United States Patent Application Publication US 2025/0084491 A1 - sequence listing, part 32

SEQ ID NO: 608196 - DNA, 75 bp, synthetic construct
  source 1..75: mol_type = other DNA
cggacagcccgaaccaccctgaatggccgcaaccggactgcttcctgcgtcctggcgaagagtattccagcctga

SEQ ID NO: 608197 - DNA, 75 bp, synthetic construct
  source 1..75: mol_type = other DNA
cacccgatggtcagccgtaccgactgttaactttgcgtaacaacgcagggatggtagtcacgctgatggactggg

SEQ ID NO: 608198 - DNA, 75 bp, synthetic construct
  source 1..75: mol_type = other DNA
atgatctggcagcctgagttcacagataaaacactctccaggaaacccggggcggttcacccagccgtagtagtc

SEQ ID NO: 608199 - DNA, 75 bp, synthetic construct
  source 1..75: mol_type = other DNA
aaatctcaataacaagtatattaacgttagtactaacatggagtttgttagttatattctctttcgggattggtt

SEQ ID NO: 608200 - DNA, 75 bp, synthetic construct
  source 1..75: mol_type = other DNA
tcagggcttatttaattacaggcctataaagcctattgacaccataatttcacgaacccttcttgaagcattaat

SEQ ID NO: 608201 - DNA, 75 bp, synthetic construct
  source 1..75: mol_type = other DNA
ttcaaatagcagcagtaaaagctttatttcttcgtgaaattaagactcgttttggtaaatatcgtctggggtatt

SEQ ID NO: 608202 - DNA, 75 bp, synthetic construct
  source 1..75: mol_type = other DNA
gccattttagaaacggaacaaggtaaagctgatgtacttggtggtggcgtttttaaaaagcgccttcaccgaaat

SEQ ID NO: 608203 - DNA, 75 bp, synthetic construct
  source 1..75: mol_type = other DNA
tgttttctgttgaaaatatacctgttctaataataacatggggcttattaactattctatcgtgtggacttggga

SEQ ID NO: 608204 - DNA, 75 bp, synthetic construct
  source 1..75: mol_type = other DNA
gggtatattatgcatagaacgatgccagatatatcgtatcctatatttttattaaatgggttgattccttatttt

SEQ ID NO: 608205 - DNA, 75 bp, synthetic construct
  source 1..75: mol_type = other DNA
aatgctgctgtcggtgaaatctcactgtcaggaacggcaggcgaaaacggctcgcttgtgacttacattgccggt

SEQ ID NO: 608206 - DNA, 75 bp, synthetic construct
  source 1..75: mol_type = other DNA
acctttatcacgcagcgtttcccgcgccataaactggccgataacggcacccccgtccggcccggtcagaatatc

SEQ ID NO: 608207 - DNA, 75 bp, synthetic construct
  source 1..75: mol_type = other DNA
gactgttaaatcactgagatatatttctccatttggtaagcagagttttgatgccctcatcccaattgcagggga

SEQ ID NO: 608208 - DNA, 75 bp, synthetic construct
  source 1..75: mol_type = other DNA
ccaataataattaagccagtttactttatttcatgcgttatgtttcctatacatgcagtcccaaaagaatactgg

SEQ ID NO: 608209 - DNA, 75 bp, synthetic construct
  source 1..75: mol_type = other DNA
ttagctagattagctagaattgaaaaatttaaagaaaaaatagaaatatcattaaatcatttagaaatgcaattt

SEQ ID NO: 608210 - DNA, 75 bp, synthetic construct
  source 1..75: mol_type = other DNA
atgccaatttatcagatagacggtctgactccggttgtgccagaagagagttttgttcatccgacagcggtattg

SEQ ID NO: 608211 - DNA, 75 bp, synthetic construct
  source 1..75: mol_type = other DNA
ctttgtccatccgacagcggtattgatcggcgatgttattctcggcaagggcgtttacgttgggcctaatgccag

SEQ ID NO: 608212 - DNA, 75 bp, synthetic construct
  source 1..75: mol_type = other DNA
acagctacagcaccgctgacgatgatcttttcaccctgccggaaggcgatatctctgttggcattcctcacgttc

SEQ ID NO: 608213 - DNA, 75 bp, synthetic construct
  source 1..75: mol_type = other DNA
gctcgatcccttagataatcacccgacaaaatccccactcttccggccttttatcagccatcgctctggacgcgc

SEQ ID NO: 608214 - DNA, 75 bp, synthetic construct
  source 1..75: mol_type = other DNA
ctgccttgcgtatgcttaccgaaaacggtcatcagccattactgcaagaaatcgcccggcgttataaccagccgg

SEQ ID NO: 608215 - DNA, 75 bp, synthetic construct
  source 1..75: mol_type = other DNA
atcaactggggtaaagtcggcactaacgggcaaagtcaggtaaaaagctttgcagatgctgcagcggcggcaaaa

SEQ ID NO: 608216 - DNA, 75 bp, synthetic construct
  source 1..75: mol_type = other DNA
aaatccccactcttccggccttttatcagccatcgctctggacgcgcccggtattaaaagcaaacgcccaatcac

SEQ ID NO: 608217 - DNA, 75 bp, synthetic construct
  source 1..75: mol_type = other DNA
ctgccgactcactggctgagtttgcctgggatctgtttaccgcctgggagaccgctggcgcgccgtcgaaagaga

SEQ ID NO: 608218 - DNA, 75 bp, synthetic construct
  source 1..75: mol_type = other DNA
gcgaataatgtcattattattctgccgtctggcattgcacctgactacttggagcaatattccagatttgaatta

SEQ ID NO: 608219 - DNA, 75 bp, synthetic construct
  source 1..75: mol_type = other DNA
tctggcattcggatttctgaccgtcgcccgtttcagtctggaccgttcctttaccagtttccgtctcaccctggt

SEQ ID NO: 608220 - DNA, 75 bp, synthetic construct
  source 1..75: mol_type = other DNA
atgccaatttaccagatagatggtctgactccggttgtgccagaagagagctttgtccatccgacagcggtattg

SEQ ID NO: 608221 - DNA, 75 bp, synthetic construct
  source 1..75: mol_type = other DNA
gccctcaaaccatgccagcgccgatctactgccagccgtagtagtctcccctccctggctttcgaaaaagaaaaa

SEQ ID NO: 608222 - DNA, 75 bp, synthetic construct
  source 1..75: mol_type = other DNA
accgtcagctttgatgaaaccttaaaaccgtttgtgcgtgatgtttccggcagccgcctgaaagacctgcccaaa

SEQ ID NO: 608223 - DNA, 75 bp, synthetic construct
  source 1..75: mol_type = other DNA
gtgttgcgtcatatcaatcatccgttcgcattaacactgcttatacgtgtagccgggcatactaaacgctgtcac

SEQ ID NO: 608224 - DNA, 75 bp, synthetic construct
  source 1..75: mol_type = other DNA
tcagtaccagcgtacgtgataacgccgaaatcaccattgttggtgaactgccaccgcaaacggcgaagcgcattg

SEQ ID NO: 608225 - DNA, 75 bp, synthetic construct
  source 1..75: mol_type = other DNA
tggataatctgaccaggttgattaaagaatctgacggtaaaacagaagaactggttaaggttatgcaggacaacc

SEQ ID NO: 608226 - DNA, 75 bp, synthetic construct
  source 1..75: mol_type = other DNA
ggctgtaagcacagtatgtgtatggaaatataccgcttacttagcgaaacccaatcgatgttggcgggatattac

SEQ ID NO: 608227 - DNA, 75 bp, synthetic construct
  source 1..75: mol_type = other DNA
gtgaggagttcttcgaaacgcagagccgcaatgtaacccactggatgcctctaccggaaccgccgcaggaggtga

SEQ ID NO: 608228 - DNA, 75 bp, synthetic construct
  source 1..75: mol_type = other DNA
gtatgctgtttattactcataacctcagcattgtcagaaaactggcccatcgcgtggcggtaatgcaaaacggtc

SEQ ID NO: 608229 - DNA, 75 bp, synthetic construct
  source 1..75: mol_type = other DNA
ccagccgacgctttctgccgcacaacgcgaacaacaagtgatagccgtgatgcatgaagtgggattagatcctga

SEQ ID NO: 608230 - DNA, 75 bp, synthetic construct
  source 1..75: mol_type = other DNA
ggctgtaagcacagtatgtgtatggaaatataccgcttacttagcgaaacccaaacgatgctggcaggatattac

SEQ ID NO: 608231 - DNA, 75 bp, synthetic construct
  source 1..75: mol_type = other DNA
ggggtatttgatcatattctacctatttatgagctaacaaagtcaagaaaagccaaaattgctccagatggagac

SEQ ID NO: 608232 - DNA, 75 bp, synthetic construct
  source 1..75: mol_type = other DNA
cctgaaatgggcggcggattatcaggaagacagaatcaccattttctacgacaccatgtcgaataatacccgcat

SEQ ID NO: 608233 - DNA, 75 bp, synthetic construct
  source 1..75: mol_type = other DNA
cacggttgtttctacttctgcatctatccagcgctccggctctgctgtatgggtgccaaaagtcgtgaccccata

SEQ ID NO: 608234 - DNA, 75 bp, synthetic construct
  source 1..75: mol_type = other DNA
tttacgtcaaaagacggaaacagttacatcgaaatgccatataccaaactgcgttcactgagccagaaggtcaat

SEQ ID NO: 608235 - DNA, 75 bp, synthetic construct
  source 1..75: mol_type = other DNA
caggaactggggcaacgtattactgccgtatgcggcatccctgtaatcatcacgcctgacgcagccaattcaact

SEQ ID NO: 608236 - DNA, 75 bp, synthetic construct
  source 1..75: mol_type = other DNA
tcttaaatgcttgtagtgatctagaaatgtttaatgataaaatcgaagatattatcattgcctgtacatcattcc

SEQ ID NO: 608237 - DNA, 75 bp, synthetic construct
  source 1..75: mol_type = other DNA
actgcgtggagcaaaataacgccactgcgctatttgcctctcctgttcatccttacacgcaaaagctactcaaca

SEQ ID NO: 608238 - DNA, 75 bp, synthetic construct
  source 1..75: mol_type = other DNA
ttattgaggaggggttacgtgtgcatcaacccaccctttcagccacgcaacgcgaagagcaagtgaaagccgtaa

SEQ ID NO: 608239 - DNA, 75 bp, synthetic construct
  source 1..75: mol_type = other DNA
gaattattgattgctgatgaaccgactaccgcgctggacgtctctgtccaggcgcagattttgcaattattacgc

SEQ ID NO: 608240 - DNA, 75 bp, synthetic construct
  source 1..75: mol_type = other DNA
caatccgccatcgcattcaggttgtattccaggatccgaactcctcgctcaatccgcggctcaacgtgttgcaga

SEQ ID NO: 608241 - DNA, 75 bp, synthetic construct
  source 1..75: mol_type = other DNA
ttcagtcctttgcagacgaacgctgcgggcgtgctggcgtggtatatcaggcgtcgaattttgattttattggca

SEQ ID NO: 608242 - DNA, 75 bp, synthetic construct
  source 1..75: mol_type = other DNA
ggccgtgctcggagtggcaaaagactccgccgaaatgaccgcactccgcaagcaggcgcgccagctcggcgacaa

SEQ ID NO: 608243 - DNA, 75 bp, synthetic construct
  source 1..75: mol_type = other DNA
tgtagtgtttagcgaccgtctactaggtgtagatgaagatcatacaaagtttaatttaattccatttaaagatgg

SEQ ID NO: 608244 - DNA, 75 bp, synthetic construct
  source 1..75: mol_type = other DNA
accgcgctgtcgattttacgtctgctcccttcaccaccggttgaatatctctctggcgatattcgttttcatggc

SEQ ID NO: 608245 - DNA, 75 bp, synthetic construct
  source 1..75: mol_type = other DNA
aaaatttgtcggtaggttttcgccatcagcaaaccgtccgtactgtagtgaatgatgtttcactacacattgagt

SEQ ID NO: 608246 - DNA, 75 bp, synthetic construct
  source 1..75: mol_type = other DNA
cgattcgccatcgcattcaggtggtatttcaggatccaaactcctcgctcaacccacgactcaacgtattgcaga

SEQ ID NO: 608247 - DNA, 75 bp, synthetic construct
  source 1..75: mol_type = other DNA
cgcaatggctcttctcacacggccggagttattgattgctgatgagccaaccaccgcattggatgtctctgtcca

SEQ ID NO: 608248 - DNA, 75 bp, synthetic construct
  source 1..75: mol_type = other DNA
aatccacggctaaacgtgttacagattatcgaggaaggattacgtgtccaccaaccaacgctttctgccgcgcaa

SEQ ID NO: 608249 - DNA, 75 bp, synthetic construct
  source 1..75: mol_type = other DNA
caaactcatcgtggatcataatgtggtggtgaaaagcgtcagttttacactgcgggcgggtgaaacgctgggttt

SEQ ID NO: 608250 - DNA, 75 bp, synthetic construct
  source 1..75: mol_type = other DNA
cgtttgattttcagggtaacgctgttgtgacgacctccgccacgatccagcggtctggctcttccgtatgggtgc

SEQ ID NO: 608251 - DNA, 75 bp, synthetic construct
  source 1..75: mol_type = other DNA
agctatcaaacgtgcagaagcagctccggcggcaactggcggcggtatcccaggcatgctgccgtggcctaaagt

SEQ ID NO: 608252 - DNA, 75 bp, synthetic construct
  source 1..75: mol_type = other DNA
ttaacgttccggatatcggcggtgacgaagttgaagtgaccgaagtgatggtgaaagtgggcgacaaagttgccg

SEQ ID NO: 608253 - DNA, 75 bp, synthetic construct
  source 1..75: mol_type = other DNA
gctccgtttgcaggtaccgtgaaagagatcaaagtgaacgtgggtgacaaagtgtctaccggctcgctgattatg

SEQ ID NO: 608254 - DNA, 75 bp, synthetic construct
  source 1..75: mol_type = other DNA
ggtgaaatcgaagaagtggaactgggccgcatccagaaaatctctggtgcgaacctgagccgtaactgggtgatg

SEQ ID NO: 608255 - DNA, 75 bp, synthetic construct
  source 1..75: mol_type = other DNA
ttcgacaaaaccgatatcaccgagctggaagcgttccgtaaacagcagaacgaagaagcggcgaaacgtaagctg

SEQ ID NO: 608256 - DNA, 75 bp, synthetic construct
  source 1..75: mol_type = other DNA
ctgatgactatttctaagaaagcgcgtgacggtaagcttactgcgggcgaaatgcagggcggttgcttcaccatc

SEQ ID NO: 608257 - DNA, 75 bp, synthetic construct
  source 1..75: mol_type = other DNA
gcttggtcaggacctcagaaagccctaatgcagactatgtcggcagaacatgacgttttagctgattatataatc

SEQ ID NO: 608258 - DNA, 75 bp, synthetic construct
  source 1..75: mol_type = other DNA
gaccgaaatgaaaccgtcgtttatggtctggtcggcaggatatggcccttcaccagaaatgctggcacgtattgc

SEQ ID NO: 608259 - DNA, 75 bp, synthetic construct
  source 1..75: mol_type = other DNA
gctatgagtaaaaaaaataacaggatttttgctaacataacctttactaacaatagctctaccacgtattttttt

SEQ ID NO: 608260 - DNA, 75 bp, synthetic construct
  source 1..75: mol_type = other DNA
tggtaaaaaccaatgcggcagaaatggaagcatttgaaaattcctataaattatttagcctgccttatttgttcc

SEQ ID NO: 608261 - DNA, 75 bp, synthetic construct
  source 1..75: mol_type = other DNA
ttggtaggattctacctcggctggctgggcggcgaaggtaaaggccgcgcactgggcgttggcgaggtgaaattc

SEQ ID NO: 608262 - DNA, 75 bp, synthetic construct
  source 1..75: mol_type = other DNA
gatagtattttgcagggcgttcccattcgatatttgtcttcagttcgcccaacaagagatgtattagtaaggggc

SEQ ID NO: 608263 - DNA, 75 bp, synthetic construct
  source 1..75: mol_type = other DNA
tggaagaattacttaattctaaagatgaaaagcaagtagctgagacactcctttatatagcctacaacattaagg

SEQ ID NO: 608264 - DNA, 75 bp, synthetic construct
  source 1..75: mol_type = other DNA
acgccagcggctatcgcggatggggaccattgagagccttggttactttattaacccgctggtgaacattgtgct

SEQ ID NO: 608265 - DNA, 75 bp, synthetic construct
  source 1..75: mol_type = other DNA
cgttacggccagaagattgaacgccgatttaccgctattcgcgcggccaccgaagccgcgcggatgctgaccgag

SEQ ID NO: 608266 - DNA, 75 bp, synthetic construct
  source 1..75: mol_type = other DNA
tgtcatcagcaaatccgctatccatcgttatggtcagaaaattgagcgccgctatggcgctatccgtgcggcgac

SEQ ID NO: 608267 - DNA, 75 bp, synthetic construct
  source 1..75: mol_type = other DNA
aggctttttccagtacattggtccgacgctgatgttcctgctggctgtgacgttttatggtgaaaaaccgggtgc

SEQ ID NO: 608268 - DNA, 75 bp, synthetic construct
  source 1..75: mol_type = other DNA
tcaaccagtcatatggggcaaaacccgatgtcgctgaatttactgctgatcgccgccggtattgtcaccaccgtg

SEQ ID NO: 608269 - DNA, 75 bp, synthetic construct
  source 1..75: mol_type = other DNA
cgataagatggtaactttcgcctttatttgggtggcgctggcaatttttgtgatggatgcgatttatacgcagcg

SEQ ID NO: 608270 - DNA, 75 bp, synthetic construct
  source 1..75: mol_type = other DNA
atacgaggcattttcaggggtatcttctgagcagaaaagcgcaggggatttctcaccggactattcagaatgaaa

SEQ ID NO: 608271 - DNA, 75 bp, synthetic construct
  source 1..75: mol_type = other DNA
gacgatatatgtgggcttgctttaacttgcattgggcacttggcaagaataaatggtaaaatagataaagggaaa

SEQ ID NO: 608272 - DNA, 75 bp, synthetic construct
  source 1..75: mol_type = other DNA
attattccatttctaaaagagaaaatagaaaattcaaatgaggtaatatcatctagagctgaagatgcacttgat

SEQ ID NO: 608273 - DNA, 75 bp, synthetic construct
  source 1..75: mol_type = other DNA
aatgtggctacgctgtcccgcgcgtccgtcaacctcaaaaagttccagtctgaagtgtcaacgccaagattattg

SEQ ID NO: 608274 - DNA, 75 bp, synthetic construct
  source 1..75: mol_type = other DNA
aataatatcaaaaatacctgaaatagtaaaaaaggttcagttagatgttttggtttcatctaaagataagaaaag

SEQ ID NO: 608275 - DNA, 75 bp, synthetic construct
  source 1..75: mol_type = other DNA
gcgcccccgggatactattattaccgatcgtgaagttgtcaggcaggctctatgttatgctgagaaaataatgaa

SEQ ID NO: 608276 - DNA, 75 bp, synthetic construct
  source 1..75: mol_type = other DNA
gcactggctgtgaagccgtctggtttgagttttgagcaggcgatgcaaactcgtgtcttccagccactcaaactc

SEQ ID NO: 608277 - DNA, 75 bp, synthetic construct
  source 1..75: mol_type = other DNA
aacggcagtgacaataaaattgcactggcagcacgccccgtaaaagcgattacgcctccaactcctgcagtacac

SEQ ID NO: 608278 - DNA, 75 bp, synthetic construct
  source 1..75: mol_type = other DNA
aatggcgttatgacctggaatataaagtttcttccgactacgcgctggcggccaaaatgtataaagccggttatg

SEQ ID NO: 608279 - DNA, 75 bp, synthetic construct
  source 1..75: mol_type = other DNA
gaacaatatgctacaagggtttttgacaattggcgtttaggagatgccaaacgtaatgatgggatactgatcatt

SEQ ID NO: 608280 - DNA, 75 bp, synthetic construct
  source 1..75: mol_type = other DNA
tgcgtctgactttcgccgtatctacaacgatgcgatcaaaaatgcacagtttgaagatccggttgaagcgctgat

SEQ ID NO: 608281 - DNA, 75 bp, synthetic construct
  source 1..75: mol_type = other DNA
gatagattttctgattcagcctctttttttgatataatatatacaacggacgcggattcaattaatcgatatgac

SEQ ID NO: 608282 - DNA, 75 bp, synthetic construct
  source 1..75: mol_type = other DNA
cggcggtaatgcaggcatgtggggcgatcatcttggtgtggtcgacttacaactcagtaatgacagcggtaaatg

SEQ ID NO: 608283 - DNA, 75 bp, synthetic construct
  source 1..75: mol_type = other DNA
ggactccccagtgattgaaggcatggatgcagtcgcgcgaaacaaggcgagtgcatctatggggcttaaacatcg

SEQ ID NO: 608284 - DNA, 75 bp, synthetic construct
  source 1..75: mol_type = other DNA
aatctcagcacggaagatgtgcttaacaggcttctggaaacagagaagcaggactccccagtgattgaaggcatg

SEQ ID NO: 608285 - DNA, 75 bp, synthetic construct
  source 1..75: mol_type = other DNA
ctggcgcaggcggacgatatcagcttcgaatggattgttgtcgatggcggttccaatgacggcacccgtgagtat

SEQ ID NO: 608286 - DNA, 75 bp, synthetic construct
  source 1..75: mol_type = other DNA
gctttcccggatatccccatgacactgtatgaggccattgtccgcgactataccggcaggacaccggaagcacgg

SEQ ID NO: 608287 - DNA, 75 bp, synthetic construct
  source 1..75: mol_type = other DNA
atccgcaaagcgtgcggcggaggacttacaggcgaaatataaccgcctgacggattccgttaaacgccagcagcg

SEQ ID NO: 608288 - DNA, 75 bp, synthetic construct
  source 1..75: mol_type = other DNA
ttcttcatcctcttccggtggcggctcaagtggcggcggatttagcggcgggggcggttcttctggcggtggcgg

SEQ ID NO: 608289 - DNA, 75 bp, synthetic construct
  source 1..75: mol_type = other DNA
tgctttcgtcagaggaattagccatgctggacaacgcgtatccggcaccaaaaggcaaaacttcgctggatatgg

SEQ ID NO: 608290 - DNA, 75 bp, synthetic construct
  source 1..75: mol_type = other DNA
atcagtgtgccactaatcaagtgctttatcatctcggctcgcgagggattgagtatgatctactcccctggtgcc

SEQ ID NO: 608291 - DNA, 75 bp, synthetic construct
  source 1..75: mol_type = other DNA
ctattcgcaatgatgttgtaggaagcgaactggaaatgatagcaatggatgctgttgatgtagtgtatgtctatg

SEQ ID NO: 608292 - DNA, 75 bp, synthetic construct
  source 1..75: mol_type = other DNA
aacgtctttctcgtctctaaagtctatccgtggaatgctggcgggcaaaaagcgataaatgcatgcgaagccagt

SEQ ID NO: 608293 - DNA, 75 bp, synthetic construct
  source 1..75: mol_type = other DNA
tcagtgtgccactaatcaggtgctttaccatctcggttcacgagggattgagtacgatctacttccctggtgcca

SEQ ID NO: 608294 - DNA, 75 bp, synthetic construct
  source 1..75: mol_type = other DNA
gaaccttgattatgctgatatgcaggaactctggcagctgccggggggaaatcagtgtgccactaatcaggtgct

SEQ ID NO: 608295 - DNA, 75 bp, synthetic construct
  source 1..75: mol_type = other DNA
gatgattttcctcggcgagcgattccgccggatgcaatggctggcggtgattctggcgatatgtggcgtgttagt

SEQ ID NO: 608296 - DNA, 75 bp, synthetic construct
  source 1..75: mol_type = other DNA
gcgtaacgatggtattttactcctggtcgcctgggaagatcataccgtccgtattgaagttggctatggactgga

SEQ ID NO: 608297 - DNA, 75 bp, synthetic construct
  source 1..75: mol_type = other DNA
gccaggaccatggacgaatttaatcgttgcctgcggtatgttaacgccttttgcgatcgtaccgctgcttatctt

SEQ ID NO: 608298 - DNA, 75 bp, synthetic construct
  source 1..75: mol_type = other DNA
gttgaccgcctgcctgcaacagcaagccagcgccaaatccggcctggaagagtgcgaaatggcatggctggaagc

SEQ ID NO: 608299 - DNA, 75 bp, synthetic construct
  source 1..75: mol_type = other DNA
ctggcagtctctgctgtgctaattggtggcaactggttactgtttatctgggcagtgaacaatcaccatatgctg

SEQ ID NO: 608300 - DNA, 75 bp, synthetic construct
  source 1..75: mol_type = other DNA
acgcaagaagattgccgttgaagcgcaaaccggcatgttaatcgaaaccatgtggctgctgcccgtggcggcaat

SEQ ID NO: 608301 - DNA, 75 bp, synthetic construct
  source 1..75: mol_type = other DNA
aaccgggctggtatatttatcacagcctgcccgccagtcatcaggcgatatttttcccggtatccggcttgaaaa

SEQ ID NO: 608302 - DNA, 75 bp, synthetic construct
  source 1..75: mol_type = other DNA
atgcgctggcataatgtgctgttactcgcggcggcgatcctgataagcgggtgtaaagaagaaaagctggcggtc

SEQ ID NO: 608303 - DNA, 75 bp, synthetic construct
  source 1..75: mol_type = other DNA
ttgccgcgagggaaatccactactctctttagaagattacagggagactatcgacaacgctgcgcatatactcct

SEQ ID NO: 608304 - DNA, 75 bp, synthetic construct
  source 1..75: mol_type = other DNA
gcaaccccgctgtggcaggccatgccgtttgtccgtgcaggacgttttcagcgcgttccggcggtctggttctat

SEQ ID NO: 608305 - DNA, 75 bp, synthetic construct
  source 1..75: mol_type = other DNA
gacggcaaacagccgctggcgatggcgcgtaaatcactgacggaaatggcagatttacttaacctgcaaagcgca

SEQ ID NO: 608306 - DNA, 75 bp, synthetic construct
  source 1..75: mol_type = other DNA
tacgtcactcccaaaagatcgggagtccttgttctggctaaatgtacaagaagttcctcctaagcctgagaccaa

SEQ ID NO: 608307 - DNA, 75 bp, synthetic construct
  source 1..75: mol_type = other DNA
ggatacgcccttaaccccaactctgggcgtcgtgtcgtgcttgaaacggataaccggggctatatggaactgaac

SEQ ID NO: 608308 - DNA, 75 bp, synthetic construct
  source 1..75: mol_type = other DNA
caaaacgctgcgcagtgccgaagctgtctcgctggcgctgccattaagcggtatcaccctttacagcggtttgta

SEQ ID NO: 608309 - DNA, 75 bp, synthetic construct
  source 1..75: mol_type = other DNA
gtctggttgccaaaggcgcacgctctaaacgttctactctgaaaggcgcattacagcctttcacgcctctcttgc

SEQ ID NO: 608310 - DNA, 75 bp, synthetic construct
  source 1..75: mol_type = other DNA
ggcgaacggattctgacgctgccacgcggtttttatttgaagaagaatttcaccagtgcgctactggcgcgtcat

SEQ ID NO: 608311 - DNA, 75 bp, synthetic construct
  source 1..75: mol_type = other DNA
gtggaacttaaaactatccctgtggatagtcttggtcgtccgctggaaacaacattcgtttgtgttgccccgtta

SEQ ID NO: 608312 - DNA, 75 bp, synthetic construct
  source 1..75: mol_type = other DNA
aaatttaatcagtatcgctacatcaggttcctgaacaagcgagcaaggaagcgactaaataccaagctattcaag

SEQ ID NO: 608313 - DNA, 75 bp, synthetic construct
  source 1..75: mol_type = other DNA
agatttacttaacctgcaaagcgcagcggaaacgcatttagcgcaatatgaagactttatccgcagcatgaaacc

SEQ ID NO: 608314 - DNA, 75 bp, synthetic construct
  source 1..75: mol_type = other DNA
gaggccttcaccggcagccggctgcgggaaagtacttaccagaccgtggctgacagcttcagagattttggcgag

SEQ ID NO: 608315 - DNA, 75 bp, synthetic construct
  source 1..75: mol_type = other DNA
aatccggcagcagaatgcggtcgtgctcgacaggttagtccagcttcgccgtctgaaaacatcgggagaagcgct

SEQ ID NO: 608316 - DNA, 75 bp, synthetic construct
  source 1..75: mol_type = other DNA
tcccttggaatatcgctaatgctggatgggataatcaccttttatcgtacacactatcaactttagtaattacat

SEQ ID NO: 608317 - DNA, 75 bp, synthetic construct
  source 1..75: mol_type = other DNA
gccggcgcgtgtcgggatttcagaaggtgatgacccatgacctgcgggtcaaaattcatggcgtgctcggtaagc

SEQ ID NO: 608318 - DNA, 75 bp, synthetic construct
  source 1..75: mol_type = other DNA
taaaatcatccggacaatgaaaccccgtacccagtttatctttgccactcataatgccaacataccggtgctggg

SEQ ID NO: 608319 - DNA, 75 bp, synthetic construct
  source 1..75: mol_type = other DNA
tatccgttaatgatggccaggccggtgtacacacactagtagtgtttgctgatgaatggtttatcaatccgcagc

SEQ ID NO: 608320 - DNA, 75 bp, synthetic construct
  source 1..75: mol_type = other DNA
agtggaagtggatgatggaaagcatactgggcgttcctgcgcgccgtacacatcaatttgaactacaatctgtgc

SEQ ID NO: 608321 - DNA, 75 bp, synthetic construct
  source 1..75: mol_type = other DNA
aattcgcctcaatccggtgctgctgatggaaaacagcgaggcttttatagaagaagtggtgccgcacgaactggc

SEQ ID NO: 608322 - DNA, 75 bp, synthetic construct
  source 1..75: mol_type = other DNA
gctgggcgttcccgcccgtcgtacgcatcagttcgaactgcaatccgtgcgtcgcaacaccttcccctaccgctg

SEQ ID NO: 608323 - DNA, 75 bp, synthetic construct
  source 1..75: mol_type = other DNA
tgctactttgattaataatgcaaaaactggtgatgtcatttcgattcaagtgctaccacctggcctaacacttga

SEQ ID NO: 608324 - DNA, 75 bp, synthetic construct
  source 1..75: mol_type = other DNA
aatgattcgctcagtaattatatggtttttatttacagaaagattcaacttcctcacattgactactaggatttt

SEQ ID NO: 608325 - DNA, 75 bp, synthetic construct
  source 1..75: mol_type = other DNA
ggacagtaacctgccgaaggaccgtgaatctttgttctggctgaacgtccaggaagtgccaccaaaaccggaaat

SEQ ID NO: 608326 - DNA, 75 bp, synthetic construct
  source 1..75: mol_type = other DNA
atgattaaaaccgaatttggtattattgatgaaattgacgctaataaagattatggtcattatgaacctgaaaaa

SEQ ID NO: 608327 - DNA, 75 bp, synthetic construct
  source 1..75: mol_type = other DNA
atgattaaaactgaatttggtattattgataaaattgatactgataaagattatggtcaccatgaacctgaaaaa

SEQ ID NO: 608328 - DNA, 75 bp, synthetic construct
  source 1..75: mol_type = other DNA
gcccctctcctcacggagagggtttgggtgagggaaaagcctcaccccagccctctcgggtaaaaacattgatga

SEQ ID NO: 608329 - DNA, 75 bp, synthetic construct
  source 1..75: mol_type = other DNA
gctccagggacatttggtgctgatattcgctctgactcgggctggtttcataaatcttctgcatcgcctgtgtgt

SEQ ID NO: 608330 - DNA, 75 bp, synthetic construct
  source 1..75: mol_type = other DNA
tgaaaagcgcgttcgttaccaacacgcacgtgagaaggtggaaaatcttattaatgaggggaacggatatctgac

SEQ ID NO: 608331 - DNA, 75 bp, synthetic construct
  source 1..75: mol_type = other DNA
gcatgttaaagagttgcttaccgtcctgcaggaactgaaaagccagtatgaaattgaaaaaaacaagctgcaggt

SEQ ID NO: 608332 - DNA, 75 bp, synthetic construct
  source 1..75: mol_type = other DNA
ggaacgtattgctccggctatcgccaaagggctggtgaaacgtaaagaacaaggtaatgaatccccgctgaacat

SEQ ID NO: 608333 - DNA, 75 bp, synthetic construct
  source 1..75: mol_type = other DNA
aaccgagcaggtggataccgtttctggcgtcgatgccgtcagcagcattggcgatgatgtcgttgatctgattgc

SEQ ID NO: 608334 - DNA, 75 bp, synthetic construct
  source 1..75: mol_type = other DNA
tcgaacgtaaactcttcaccctgaatacgggtcatgctataaccgcgtacctcggaaaactggcgggtcatcaga

SEQ ID NO: 608335 - DNA, 75 bp, synthetic construct
  source 1..75: mol_type = other DNA
ccgtcatagctatcaggttcatgtggtcggcgaaaccgagcaggtagataccgtttctggcgtcgatgccgtcag

SEQ ID NO: 608336 - DNA, 75 bp, synthetic construct
  source 1..75: mol_type = other DNA
gacaaagggccgcaggctgcgctggcacagatttccgggcttgatgccaacagcgaggttgtcacagaagcggta

SEQ ID NO: 608337 - DNA, 75 bp, synthetic construct
  source 1..75: mol_type = other DNA
caaagcgtgggtagaagaacacgttggctttgtggactctgccgttgaccgcatcgtaccgccttccgcttcggc

SEQ ID NO: 608338 - DNA, 75 bp, synthetic construct
  source 1..75: mol_type = other DNA
aactattcgcggcgatgggactgcacctgttgatagtaaagctcgtcatgcggcccgtaaggatgaaatgtttct

SEQ ID NO: 608339 - DNA, 75 bp, synthetic construct
  source 1..75: mol_type = other DNA
aggagagaaatcgccagaaaatttggaatgccgctgcgcacagtgaataactacgtttatttcgacaggagggtg

SEQ ID NO: 608340 - DNA, 75 bp, synthetic construct
  source 1..75: mol_type = other DNA
cggcgtgaaatagccagaaaattcggtatgccgctgcgcacagtgaataactacgtctatttcgacaggagggta

SEQ ID NO: 608341 - DNA, 75 bp, synthetic construct
  source 1..75: mol_type = other DNA
ttacggggtgattatcaccagtcagccaaatgttcacagcgtgatattgagctggcgcggcaactgcatcagcgt

SEQ ID NO: 608342 - DNA, 75 bp, synthetic construct
  source 1..75: mol_type = other DNA
tggccaccggtcttattaactgtattgcgttttcagcacaggcagtggatacaacgattactgtgacgggtaata

SEQ ID NO: 608343 - DNA, 75 bp, synthetic construct
  source 1..75: mol_type = other DNA
aagggaaattgccagaaaattaggcatgccgctgcgcatagtgaataactacgtttatttcgacaggagggtgtc

SEQ ID NO: 608344 - DNA, 75 bp, synthetic construct
  source 1..75: mol_type = other DNA
gtcagaacgaaagcgcgggaactgggtgtcagtctgatgttacggggtgattatcaccagtcaacaaaatatcca

SEQ ID NO: 608345 - DNA, 75 bp, synthetic construct
  source 1..75: mol_type = other DNA
caaaatattcacagcgtgatattgagctggcgcggcaactgcatcagcgtggcgtaccccgacgggaaattgccg

SEQ ID NO: 608346 - DNA, 75 bp, synthetic construct
  source 1..75: mol_type = other DNA
acgaggttgtggcttcttcagtaaacattgaagacctcgacaaagatggtaacaaggacatactagtccgcttaa

SEQ ID NO: 608347 - DNA, 75 bp, synthetic construct
  source 1..75: mol_type = other DNA
gttcgcgtaaaacgattaatgagcaggcaccggcagctccttatcagcttaatgctaatgcgccgattaatggcg

SEQ ID NO: 608348 - DNA, 75 bp, synthetic construct
  source 1..75: mol_type = other DNA
ggaagaactgctgaatgatacagaaaccactgccagtgcgaatgttgtccgttatgtactgatagttgctgtgcg

SEQ ID NO: 608349 - DNA, 75 bp, synthetic construct
  source 1..75: mol_type = other DNA
ggccagtattatttatattctcttcgcatgttatatacacaatgaacaatccgctatagtaagggatgccatagg

SEQ ID NO: 608350 - DNA, 75 bp, synthetic construct
  source 1..75: mol_type = other DNA
gattgcaagagactgcaaaacgtatttataaaagacacacttcctgaaatcgcctgcaataagctcttacagcta

SEQ ID NO: 608351 - DNA, 75 bp, synthetic construct
  source 1..75: mol_type = other DNA
atggcgtggtgaaaaatattattatctgggatggagagggtgatttattctctaactgcgaaattataaatattg

SEQ ID NO: 608352 - DNA, 75 bp, synthetic construct
  source 1..75: mol_type = other DNA
atgtatcagcctgattttcctcctgtaccctttcgtttaggactgtacccggtggtggacagcgtacagtggatc

SEQ ID NO: 608353 - DNA, 75 bp, synthetic construct
  source 1..75: mol_type = other DNA
atctggggcaggaagatttgcaagccaccgatctcagcgccatccgcgcggcaggtctgcgactgggcgtttcga

SEQ ID NO: 608354 - DNA, 75 bp, synthetic construct
  source 1..75: mol_type = other DNA
tatcaacgattactggcggctggcgatcaagcatcaggcgtatggcgtccatctggggcaggaagatttgcaagc

SEQ ID NO: 608355 - DNA, 75 bp, synthetic construct
  source 1..75: mol_type = other DNA
cagcagctacatcgcgcatttgctgaaagacgcgccttgtgaagtcattttgctcggtggcgtgtaccagaaaaa

SEQ ID NO: 608356 - DNA, 75 bp, synthetic construct
  source 1..75: mol_type = other DNA
cgatggctggcaacctgaaactggatttacaggtcgcgacatgatgcgtaccgatgtggtcaatgccgtgttgga

SEQ ID NO: 608357 - DNA, 75 bp, synthetic construct
  source 1..75: mol_type = other DNA
aaagacgcgccttgtgaagttattttgctcggtggcgtgtaccagaaaaaaagcgaaagtatggttggccctttg

SEQ ID NO: 608358 - DNA, 75 bp, synthetic construct
  source 1..75: mol_type = other DNA
tgcgtgcaaaatcagacagttccacaaactgccggagaacaggcaatactggcgcaacgcatcgttgacaagatc

SEQ ID NO: 608359 - DNA, 75 bp, synthetic construct
  source 1..75: mol_type = other DNA
cgacaacaccgaggttatcgctgaggtggttgggagagatggcgttctggttattttggaggccatgaaggcaac

SEQ ID NO: 608360 - DNA, 75 bp, synthetic construct
  source 1..75: mol_type = other DNA
ggaaatcaccatcgtcggtgaactgccgccgcaaaccgcgaaacgcattgccgagaatattaagttcggggcggc

SEQ ID NO: 608361 - DNA, 75 bp, synthetic construct
  source 1..75: mol_type = other DNA
atgtatcagcctgattttcctcctgtaccttttcgttcaggactgtacccggtggtggacagcgtacagtggatc

SEQ ID NO: 608362 - DNA, 75 bp, synthetic construct
  source 1..75: mol_type = other DNA
atgtgtcggtcacggatgcagggcaggccggagttgctgcaatgattatcaacgatgccctgcaccacagcgaaa

SEQ ID NO: 608363 - DNA, 75 bp, synthetic construct
  source 1..75: mol_type = other DNA
cggctgtgcgcggcacttcattgaatgcgtgcaaaatcagacagttccgcaaaccgcccggcgaacaggccgtgc

SEQ ID NO: 608364 - DNA, 75 bp, synthetic construct
  source 1..75: mol_type = other DNA
gctgctatagaagctgcaaaaaatctggtggcccaagaatatgagtataaggatttcaaagcggcgcagagtgat

SEQ ID NO: 608365 - DNA, 75 bp, synthetic construct
  source 1..75: mol_type = other DNA
tcattatcgtcctgaaaggattatggttacgccgcaaagccaaagccgcgcaacaggagcttgcccatgaacatt

SEQ ID NO: 608366 - DNA, 75 bp, synthetic construct
  source 1..75: mol_type = other DNA
cgttctgctggaataacgattgataaccttgaggccaagtgcgcagcgctggctgctgataacaagaaagcaatg

SEQ ID NO: 608367 - DNA, 75 bp, synthetic construct
  source 1..75: mol_type = other DNA
ggtagagatgtacgcagataacctcgacaacggagcagacgacgcagaacgaggtggttttgatgatgccgttaa

SEQ ID NO: 608368 - DNA, 75 bp, synthetic construct
  source 1..75: mol_type = other DNA
tgcatcagtttctatcagagggaactggatatggtcttcttcaaaagagacttacaggggtaacaacactcatgc

SEQ ID NO: 608369 - DNA, 75 bp, synthetic construct
  source 1..75: mol_type = other DNA
tgctggacgcattaaaactggcgaatcgcaccggatttatcagtcattttgtcatcgaaggcgaagcgatggcgc

SEQ ID NO: 608370 - DNA, 75 bp, synthetic construct
  source 1..75: mol_type = other DNA
atgaatattcaagaattatttggacgtcaggcgagcgtagtaagcccattcgaatatgagcaaggcttaaacctg

SEQ ID NO: 608371 - DNA, 75 bp, synthetic construct
  source 1..75: mol_type = other DNA
aggccaagtgcgcggagctggcagcggagaatgcggggatgaagtctggcgctatggacgaaatcaaggttatca

SEQ ID NO: 608372 - DNA, 75 bp, synthetic construct
  source 1..75: mol_type = other DNA
gcgcggcgttcgttaagcacgcgtcggtgtccgggctggacgatggcgactgcgttacggtgaaagaggcgactg

SEQ ID NO: 608373 - DNA, 75 bp, synthetic construct
  source 1..75: mol_type = other DNA
cgaggatgactgttgcgatcctgcgatcgatacgatttgcgattatgcgcttctgcctaatatcgaaaccccagc

SEQ ID NO: 608374 - DNA, 75 bp, synthetic construct
  source 1..75: mol_type = other DNA
cggaaggcgattttgaccgttcattctctgatggcattctcgaagatatcgccgaacagcttcgtaaaggagtca

SEQ ID NO: 608375 - DNA, 75 bp, synthetic construct
  source 1..75: mol_type = other DNA
aatgcgccggaaggcgattttgaccgttcattctctgatggcgttctcgaagatatcgccgaacagcttcgtaaa

SEQ ID NO: 608376 - DNA, 75 bp, synthetic construct
  source 1..75: mol_type = other DNA
atgtatgcaagagggtggaatgactatcgcgcaaagtctctgcaatcagacaccccagccaccgatgctttcctg

SEQ ID NO: 608377 - DNA, 75 bp, synthetic construct
  source 1..75: mol_type = other DNA
cccgctggaaacaacctcacggtggatatatatcacccgcggcatttattccacttgctgaaaaatccggattaa

SEQ ID NO: 608378 - DNA, 75 bp, synthetic construct
  source 1..75: mol_type = other DNA
cgcctgacgatattaataaaatcatcgaattcaccactcaggaagcgcaagaatcagaaggttcagtgattgacc

SEQ ID NO: 608379 - DNA, 75 bp, synthetic construct
  source 1..75: mol_type = other DNA
gaattacctggacgggggcggttcaataccatgataaaaattatctcatggaaaacgatattagctggcgtattc

SEQ ID NO: 608380 - DNA, 75 bp, synthetic construct
  source 1..75: mol_type = other DNA
catatttttgtctacgataataaattgtgcttaagttgtttgttaaccaatatcgatgttttttttctaatgaat

SEQ ID NO: 608381 - DNA, 75 bp, synthetic construct
  source 1..75: mol_type = other DNA
atggtgagattgtgcctttttaccaaccggtagttaatggtcgggaagggacgttacgcggcgtagaagttcttg

SEQ ID NO: 608382 - DNA, 75 bp, synthetic construct
  source 1..75: mol_type = other DNA
gatcgacaaaggcttgggtattttgatattcagcttgttaatatcctgttccgctgcctttttacttgataaata

SEQ ID NO: 608383 - DNA, 75 bp, synthetic construct
  source 1..75: mol_type = other DNA
ggtagctccgggcgaaccatacgtttagcccagtcagaacgcgtctttttaccgttaacacaatatgccagcaat

SEQ ID NO: 608384 - DNA, 75 bp, synthetic construct
  source 1..75: mol_type = other DNA
gggtgggcatatgaacagtactgggttgaacgatattaatggcgggaatttccctctttctttgctacccgttcc

SEQ ID NO: 608385 - DNA, 75 bp, synthetic construct
  source 1..75: mol_type = other DNA
tctctgccacaaaacgttcgaaaaagtcgcaggacatcgttactgctggcaatgtctccacgcaagcaggcagcg

SEQ ID NO: 608386 - DNA, 75 bp, synthetic construct
  source 1..75: mol_type = other DNA
aatctaccataatggtcagttgtcccgagtgatgacacagtattttcgcaatactggcgacgatggtatttcgca

SEQ ID NO: 608387 - DNA, 75 bp, synthetic construct
  source 1..75: mol_type = other DNA
ggatgtgtggtctgtatctttttgtcgcatcatcagcacttgcaaactcagtcccccctgaatttgaaactttag

SEQ ID NO: 608388 - DNA, 75 bp, synthetic construct
  source 1..75: mol_type = other DNA
aaaagggggcgaacggacagttaacacaaggaggaggacacaatgagttatttctgctgcccgggcatgtaaaac

SEQ ID NO: 608389 - DNA, 75 bp, synthetic construct
  source 1..75: mol_type = other DNA
tggtaatgtatttattacgtttgtcttagagtataacgaaaatgcgtttttttcttttttcagtgcccttgcccc

SEQ ID NO: 608390 - DNA, 75 bp, synthetic construct
  source 1..75: mol_type = other DNA
cattacagaatgccatgaaagaagatgtgccagctgtgacacagattcagatgcgatctacggtttccagaaagg

SEQ ID NO: 608391 - DNA, 75 bp, synthetic construct
  source 1..75: mol_type = other DNA
gaaaaagccaaaggggaagaggggctaacgcgtgaacaaattgagtcacgtattgttgttccgcaccatactatt

SEQ ID NO: 608392 - DNA, 75 bp, synthetic construct
  source 1..75: mol_type = other DNA
ttgcgatcgccagaaagcttggcagaccagtaagacatattcccgaagcaatgccggagcctgtaaatacgctgg

SEQ ID NO: 608393 - DNA, 75 bp, synthetic construct
  source 1..75: mol_type = other DNA
caaattcactagcttatagacacgggctaaaacgaccaaatggtattgaggcatatttttctaagcattacccaa

SEQ ID NO: 608394 - DNA, 75 bp, synthetic construct
  source 1..75: mol_type = other DNA
ctccccctggagagtcatcactacctgatccttctgagaaagaaaacgaatctaatgaaatattgaatgtttcag

SEQ ID NO: 608395 - DNA, 75 bp, synthetic construct
  source 1..75: mol_type = other DNA
gaaatttttacttggcttctttcccttgataagaagaaaccaccgcacgaagaaacagaagattttgtaaaacga

SEQ ID NO: 608396 - DNA, 75 bp, synthetic construct
  source 1..75: mol_type = other DNA
actaccgaaacgagggattggtacggcttgcgcctggaacagagcctcaacgtggggacgtcttctttattcaat

SEQ ID NO: 608397 - DNA, 75 bp, synthetic construct
  source 1..75: mol_type = other DNA
tatcgatgtgttttttctaatgaatatttttcaacagcatgtgcaaattattgagcgagttcgcaggatgacatc

SEQ ID NO: 608398 - DNA, 75 bp, synthetic construct
  source 1..75: mol_type = other DNA
tgtgcttaagttgtttgctaaccaatatcgatgtgttttttctaatgaatatttttcaacagcatgtgcaaatta

SEQ ID NO: 608399 - DNA, 75 bp, synthetic construct
  source 1..75: mol_type = other DNA
agtgaagcagcaaaaacagcattaattaaaaaaggcttccagcttgaagggttccattctgttttcacttcttaa

SEQ ID NO: 608400 - DNA, 75 bp, synthetic construct
  source 1..75: mol_type = other DNA
gatccgtttgcctctgtagaaagcaaggtttttgcttctcttcctgctgatgttgaatgcggagacttgatcacc

SEQ ID NO: 608401 - DNA, 75 bp, synthetic construct
  source 1..75: mol_type = other DNA
gttgtcgcgcttattacggcggcatgtaccagaaacatacgacgcaccatctgcgtcacagagacttactcaagg

SEQ ID NO: 608402 - DNA, 75 bp, synthetic construct
  source 1..75: mol_type = other DNA
tgtcagtgtcacaaggggataaacaacaaaatggcagggtggatggtgagtggattggtcatgccggtgctgccg

SEQ ID NO: 608403 - DNA, 75 bp, synthetic construct
  source 1..75: mol_type = other DNA
gatgacagggatggttatatcagggagcttttttttctgtattcattgaaagtaaaaattgaggaaagtagacaa

SEQ ID NO: 608404 - DNA, 75 bp, synthetic construct
  source 1..75: mol_type = other DNA
gcgcacaggataacaaatgtgccattaatgccggatgcggcgtgagcgccttatccgacctacgttcggcacccg

SEQ ID NO: 608405 - DNA, 75 bp, synthetic construct
  source 1..75: mol_type = other DNA
tgatgttagcagaggattttttaatgaagttagcagcgagggagagcgacgaagaaacaaccgttttttacatgg

SEQ ID NO: 608406 - DNA, 75 bp, synthetic construct
  source 1..75: mol_type = other DNA
aaaatacttaatctgacaccttcggctatcagccagtctattcagaaattaagaattatatttcctgatccgctg

SEQ ID NO: 608407 - DNA, 75 bp, synthetic construct
  source 1..75: mol_type = other DNA
gctgaaaaatatcgaccagattttcagtgaattaccgacaaactcgcagctttttgccgcagatagcggcgtgaa

SEQ ID NO: 608408 - DNA, 75 bp, synthetic construct
  source 1..75: mol_type = other DNA
ccttggcaaagcattacaaccgctgctcggttccatgctgatcccgttcgttactctgctggttttcggcgtgct

SEQ ID NO: 608409 - DNA, 75 bp, synthetic construct
  source 1..75: mol_type = other DNA
agtggaatgaaatggatcaggacgaaaaagacgaaaacatgcgtgatgtagcatttgaaacgcttgattggggat

SEQ ID NO: 608410 - DNA, 75 bp, synthetic construct
  source 1..75: mol_type = other DNA
agattgctggtggtattcgtccgctagggcgagcaataggggcttggccgtctcaaatacacaaatgggcaaatg

SEQ ID NO: 608411 - DNA, 75 bp, synthetic construct
  source 1..75: mol_type = other DNA
tatctgttccagtccatcacgggcatggagagttaaagatatcagtaattctctgtacatgagcgagagtttact

SEQ ID NO: 608412 - DNA, 75 bp, synthetic construct
  source 1..75: mol_type = other DNA
tcaaggatcaagcggcgtcgaaaaccgcttatccagcgaagagattgccgctgccgattacgtgattctcgctac

SEQ ID NO: 608413 - DNA, 75 bp, synthetic construct
  source 1..75: mol_type = other DNA
atgtcatacagcggcgaacgagataactttgcaccccatatggcgctggtgccgatggtcattgaacagacctca

SEQ ID NO: 608414 - DNA, 75 bp, synthetic construct
  source 1..75: mol_type = other DNA
aacgatattagctggcgtattcctgctttcagcggggtaattgaacttgatggcggcatgttgacgaaaaaggac

SEQ ID NO: 608415 - DNA, 75 bp, synthetic construct
  source 1..75: mol_type = other DNA
gggattttgctaaaaataacaccttgcgtgctgagggctattcatcctttcgtacagagaatttattttaccgtc

SEQ ID NO: 608416 - DNA, 75 bp, synthetic construct
  source 1..75: mol_type = other DNA
ctggcgacgatggcgtttcgcatactacccggtggttttttcaggggggagaggctgactcaggcattgaaagcc

SEQ ID NO: 608417 - DNA, 75 bp, synthetic construct
  source 1..75: mol_type = other DNA
taaacaacaaaatggcagggtggatggtgaatggattggtcatgccggtgctgccgatatgactttctctctcga

SEQ ID NO: 608418 - DNA, 75 bp, synthetic construct
  source 1..75: mol_type = other DNA
gtcagctactgatatcatgttatcactggggtatagtgcacactatggtgacattaatattatgccacgcacagg

SEQ ID NO: 608419 - DNA, 75 bp, synthetic construct
  source 1..75: mol_type = other DNA
attttcctctttctttgctgcccgttcctcgtattacaggtattcgtgttggctctacggatgcatatttaaata

SEQ ID NO: 608420 - DNA, 75 bp, synthetic construct
  source 1..75: mol_type = other DNA
cgggactgaaggagacgacagcgcgtcagtatctttacgattttccggaggggatcattgatccgatgttattga

SEQ ID NO: 608421 - DNA, 75 bp, synthetic construct
  source 1..75: mol_type = other DNA
ggattactctgcaggagccagtaaaagtgcagaacccgacaacgggagccgtaattaatacctggcgagatgttg

SEQ ID NO: 608422 - DNA, 75 bp, synthetic construct
  source 1..75: mol_type = other DNA
caccatgcagtttatcaagcctgatgtcagcaccatctgtatgggccaggcggcctcgatgggcgctttcttgct

SEQ ID NO: 608423 - DNA, 75 bp, synthetic construct
  source 1..75: mol_type = other DNA
ttctccactaacggtaatactgacagaagcggcacgaattgatatttataaaggaacacgcttattaggaacgcg

SEQ ID NO: 608424 - DNA, 75 bp, synthetic construct
  source 1..75: mol_type = other DNA
ccagcaatacatcaaatcacgcgaccaagagagcgaggaaattgcgctaacggtagggaagctgcgtgttgagct

SEQ ID NO: 608425 - DNA, 75 bp, synthetic construct
  source 1..75: mol_type = other DNA
aggatattgcgctaacggtagggaagctgcgtgttgagctggaaggcaaagacaggcgcattactgaggtgacaa

SEQ ID NO: 608426 - DNA, 75 bp, synthetic construct
  source 1..75: mol_type = other DNA
ggttggcgtgtggctctcatcgaacaatcaaatgcaatgtatggcgggacctgtattaatatcggctgcatccca

SEQ ID NO: 608427 - DNA, 75 bp, synthetic construct
  source 1..75: mol_type = other DNA
cagcgattccaggaataaccacaacgcctggcgtatatgacagtaccgggttgcttaatctgaaggaattacccg

SEQ ID NO: 608428 - DNA, 75 bp, synthetic construct
  source 1..75: mol_type = other DNA
ataaaacccaacgtatattaggggcatcactgctatgtgttgactcccacgagatgatcaatattgtgaaaatgg

SEQ ID NO: 608429 - DNA, 75 bp, synthetic construct
  source 1..75: mol_type = other DNA
ctcacttttttatcaattgtgttattgattaaatcaatagatttacaacgtgatgctaatgcaagtatcattaat

SEQ ID NO: 608430 - DNA, 75 bp, synthetic construct
  source 1..75: mol_type = other DNA
ccggacggaagttgacgcaggcagaaacaacccgacttaacgctgtgctggattacattgacgcggtgacggcaa

SEQ ID NO: 608431 - DNA, 75 bp, synthetic construct
  source 1..75: mol_type = other DNA
gcctggtgtatatgacagcaccggattacttaatctaaaagaattgcctgggcatttaggtattttgggcggcgg

SEQ ID NO: 608432 - DNA, 75 bp, synthetic construct
  source 1..75: mol_type = other DNA
atgttcgccaattttggcagtaaggttactattttcgaagccgcgcctctgtttttgcctcgtgaggatcgggat

SEQ ID NO: 608433 - DNA, 75 bp, synthetic construct
  source 1..75: mol_type = other DNA
aggccagagagagtggtgctgatattcaggtggtgacattgcctgtagctgcaattccgcgtgccagagtgatga

SEQ ID NO: 608434 - DNA, 75 bp, synthetic construct
  source 1..75: mol_type = other DNA
tcaatgggtgcaagctgtatttgtctccagtaatagatctcttcaacaacgaagttatttcttacagcctttcgg

SEQ ID NO: 608435 - DNA, 75 bp, synthetic construct
  source 1..75: mol_type = other DNA
aacatttgggcattttaggcgggggatatattggcattgagttcgcctctatgttcgctaattttggcagtaagg

SEQ ID NO: 608436 - DNA, 75 bp, synthetic construct
  source 1..75: mol_type = other DNA
aatcgaatgcaatgtatggcgggacatgtattaatatcggctgcatcccaaccaaaacattggttcatggcgcac

SEQ ID NO: 608437 - DNA, 75 bp, synthetic construct
  source 1..75: mol_type = other DNA
tctcaatgcccatgtggagcgaatcagccacgatgaaaataaagtgcaagtgcataccgggcacgcccaactggc

SEQ ID NO: 608438 - DNA, 75 bp, synthetic construct
  source 1..75: mol_type = other DNA
gattacattgacgcggtgacggcaacggataccagcaccgcgccggatgtcatctggcctgagctgccggaggcg

SEQ ID NO: 608439 - DNA, 75 bp, synthetic construct
  source 1..75: mol_type = other DNA
tttacaaccatgctcagtatctcgataagcgcagagaaatgatgcagtggtgggcggattatctcgatgagaggg

SEQ ID NO: 608440 - DNA, 75 bp, synthetic construct
  source 1..75: mol_type = other DNA
gaacaaaagagcttcgttccatgcaatggaagaacgtcgattttgaaaacaggattatcaccatcgacgccagtg

SEQ ID NO: 608441 - DNA, 75 bp, synthetic construct
  source 1..75: mol_type = other DNA
acattttcaggaagcatcgtatcgctcattgcgaccaaagttttacgctacacagccctaagaacgaaagagctt

SEQ ID NO: 608442 - DNA, 75 bp, synthetic construct
  source 1..75: mol_type = other DNA
atgaaaacggttttgccactgaggctggatttattaccgtttacaactacaatggcgaaacgcgtgaatatattg

SEQ ID NO: 608443 - DNA, 75 bp, synthetic construct
  source 1..75: mol_type = other DNA
ccggcggacaccaccacaaaacagccagccacgccatgggatacctggaacggtgaggcgtgggtaaccgatact

SEQ ID NO: 608444 - DNA, 75 bp, synthetic construct
  source 1..75: mol_type = other DNA
caaaatgtttgatgacgacattttacctatcatcggcggccttgaaattcaggatattgagccgatgcaactgct

SEQ ID NO: 608445 - DNA, 75 bp, synthetic construct
  source 1..75: mol_type = other DNA
tgggcggattgggttgatgaaaaggtggagcaaccaacattgctatattcactcagcaaaaacaacaaaaatgtc

SEQ ID NO: 608446 - DNA, 75 bp, synthetic construct
  source 1..75: mol_type = other DNA
ttttaactcatgggaatatgtgtcagaccatcgcggtgaaatcgtctatagcaccgaaacaggagacgccaaaga

SEQ ID NO: 608447 - DNA, 75 bp, synthetic construct
  source 1..75: mol_type = other DNA
gaaacgcgggaatatatttccacatcaactgaatatcttgcggttggcgtcggtataccggcatgttcttgttta

SEQ ID NO: 608448 - DNA, 75 bp, synthetic construct
  source 1..75: mol_type = other DNA
atggaagaacgtcgattttgaaaacaggattatcactatcgacgccagtgtgatgaagggacgcaaaattcatgt

SEQ ID NO: 608449 - DNA, 75 bp, synthetic construct
  source 1..75: mol_type = other DNA
tacttgtgatcaaacaaatcggctatgagggtctggaaagcggtcacggattcaggcatgaattcagcacgatta

SEQ ID NO: 608450 - DNA, 75 bp, synthetic construct
  source 1..75: mol_type = other DNA
tatacaaccatgctcagtatctcgataagcgcagagaaatgatgcagtggtgggcggactggcttgatgctggat

SEQ ID NO: 608451 - DNA, 75 bp, synthetic construct
  source 1..75: mol_type = other DNA
actcagcgcgttaactccgcggcctacgctggcgattgtctctggcctgtatgagctttttcccgaaaatgagca

SEQ ID NO: 608452 - DNA, 75 bp, synthetic construct
  source 1..75: mol_type = other DNA
cgaactgagtgtgacacccggcttctgtgttggattgcccgtcaccgaaatcagcgatagccaaacaattgacca

SEQ ID NO: 608453 - DNA, 75 bp, synthetic construct
  source 1..75: mol_type = other DNA
cacaagatataaagagcgtgaggatgttatggatcagattattcaggaaggcggtctggaatatgctactgatgt

SEQ ID NO: 608454 - DNA, 75 bp, synthetic construct
  source 1..75: mol_type = other DNA
agctatggctgggggagtaattcaacacaggaagcgcagttctccgtactcgataccatcaccgccagcgagcta

SEQ ID NO: 608455 - DNA, 75 bp, synthetic construct
  source 1..75: mol_type = other DNA
atgggaaaagataaagttatagagaaaaaacaatggaatgggattccacccgaatacacggatagatggagggaa

SEQ ID NO: 608456 - DNA, 75 bp, synthetic construct
  source 1..75: mol_type = other DNA
tcatccgttcgcattaacactgcttatacgtgtagcagggcatactaaacgctgtcacgatcgaatgacgaaagc

SEQ ID NO: 608457 - DNA, 75 bp, synthetic construct
  source 1..75: mol_type = other DNA
cgtcgggttggatatcctcgccgctatcggtagtgatatcgccctgatgcagcttaacggcatcgcccagaaact

SEQ ID NO: 608458 - DNA, 75 bp, synthetic construct
  source 1..75: mol_type = other DNA
cggaagagtctctctggcaaaaatgtgcacaaaaacttattgccgcaattccacatattccagaatggcggcaac

SEQ ID NO: 608459 - DNA, 75 bp, synthetic construct
  source 1..75: mol_type = other DNA
gtggcaaacactagggaaagtgcttaaacgaactaaaggcacaaaaataaccgctgggcagatgaaagctcttca

SEQ ID NO: 608460 - DNA, 75 bp, synthetic construct
  source 1..75: mol_type = other DNA
atatggcagcgtcattacgctatgccaaacatggagatgtcgtgataactgacgtgggggagactgtagaagacg

SEQ ID NO: 608461 - DNA, 75 bp, synthetic construct
  source 1..75: mol_type = other DNA
atcgtaacagttacgcgctgacagaagccgagcgcaacgccagcgaactgacacgctggacaggcagaaaatgcc

SEQ ID NO: 608462 - DNA, 75 bp, synthetic construct
  source 1..75: mol_type = other DNA
ggcgcgccgtcgaaagagagttgggcgttcactgcgttaggagttctcggtaacgatgacaccgcccgcaaactg

SEQ ID NO: 608463 - DNA, 75 bp, synthetic construct
  source 1..75: mol_type = other DNA
gacacagccctcaaaccatgccagcgccgatctactgccagccgtagtagtctcccctccctggctttcgaaaaa

SEQ ID NO: 608464 - DNA, 75 bp, synthetic construct
  source 1..75: mol_type = other DNA
tatatacaggaactggaagaccatctggctaaggttagtcatcgtaagatgttggaggataatgaccgaaaggta

SEQ ID NO: 608465 - DNA, 75 bp, synthetic construct
  source 1..75: mol_type = other DNA
ggattcgaccctaaatgtggtgtcggcacgatgttgcagcgtattgctgcgcgtctgcgggcgctgaaaaaatag

SEQ ID NO: 608466 - DNA, 75 bp, synthetic construct
  source 1..75: mol_type = other DNA
gggcgcaggaaacggcggggcgtggggaaagcattgagccgtacttctcccgcacgtttgagcgggtggcggata

SEQ ID NO: 608467 - DNA, 75 bp, synthetic construct
  source 1..75: mol_type = other DNA
atggcactttcccccgcgcagcgtcacagccagcgcattgcgatggaacaaaagctgaaacgcagcaaggcactg

SEQ ID NO: 608468 - DNA, 75 bp, synthetic construct
  source 1..75: mol_type = other DNA
atcgcggtcatgaacattctggtcgtctacaacatatcgttgatgaactggcgatgccagatactgctttttatg

SEQ ID NO: 608469 - DNA, 75 bp, synthetic construct
  source 1..75: mol_type = other DNA
agaggagaggtagggcaaaccgcccccaatgttctccaaagagatttcaaggctacgcggccaaacgagaagtgg

SEQ ID NO: 608470 - DNA, 75 bp, synthetic construct
  source 1..75: mol_type = other DNA
caatatctcgctgacctgatgagctggggcgcaattggcgcacgtactacggaatcgcaggtgcaccgcgaactg

SEQ ID NO: 608471 - DNA, 75 bp, synthetic construct
  source 1..75: mol_type = other DNA
atatcgcggattaaagaacctgaaacagtcagactgtatcttggattttacaaactcttattcggggattttagc

SEQ ID NO: 608472 - DNA, 75 bp, synthetic construct
  source 1..75: mol_type = other DNA
aagcacagcaggatctcactcctctgtttgcagagctgcggaatgataatccacaaaaaatgatggggttttcga

SEQ ID NO: 608473 - DNA, 75 bp, synthetic construct
  source 1..75: mol_type = other DNA
gactacaacaatgatgatgaacacagaatcgttatgctccagggggatcgacaccatgcaggaacgccggaagat

SEQ ID NO: 608474 - DNA, 75 bp, synthetic construct
  source 1..75: mol_type = other DNA
gccaacggcggatctgtgcgcggtatttacaaccatgctcagtatctcgataagcgcagagaaatgatgcagtgg

SEQ ID NO: 608475 - DNA, 75 bp, synthetic construct
  source 1..75: mol_type = other DNA
tttacaaccatgcgcagtatctcgataagcgcagagaaatgatgcagtggtgggcggactggattgatgggaagg

SEQ ID NO: 608476 - DNA, 75 bp, synthetic construct
  source 1..75: mol_type = other DNA
gccaacggcggatctgtgcgtggaatttacaaccatgctcagtatctcgataagcgcagagaaatgatgcaatgg

SEQ ID NO: 608477 - DNA, 75 bp, synthetic construct
  source 1..75: mol_type = other DNA
tagcctcgctcaaattggagtcaggtttgtgccaataccagtagaaacagacggtaatgactccaacttattgat

SEQ ID NO: 608478 - DNA, 75 bp, synthetic construct
  source 1..75: mol_type = other DNA
gaaactccggcagaacttcggtactggctgagaacccacggactggagtgcttcgtgatgaccatgcgggatgag

SEQ ID NO: 608479 - DNA, 75 bp, synthetic construct
  source 1..75: mol_type = other DNA
aaggattattcgggatgctgatgtcttggtgccctgctgggggagccgaactaagctgcctaagtctttgcatgt

SEQ ID NO: 608480 - DNA, 75 bp, synthetic construct
  source 1..75: mol_type = other DNA
atccctttcacaaaagctggaaatgatggtggcgaaagcagaagcagaagcagaagcagatgagagagaccaggt

SEQ ID NO: 608481 - DNA, 75 bp, synthetic construct
  source 1..75: mol_type = other DNA
atgggggaactccggttgagcaataacaccagtacagagctcggatggctgataccaaccagtggtgatccggat

SEQ ID NO: 608482 - DNA, 75 bp, synthetic construct
  source 1..75: mol_type = other DNA
tgggaggcggctgtgcgttcggcattctgctggccctgataacccactactggccgttgatccccggttcggcac

SEQ ID NO: 608483 - DNA, 75 bp, synthetic construct
  source 1..75: mol_type = other DNA
tgttgccatattgtgtggcacaattggcgggggcctttggtggagccgttctggcgtattttttatacaacagct

SEQ ID NO: 608484 - DNA, 75 bp, synthetic construct
  source 1..75: mol_type = other DNA
ttgtcaatataccattttgtattgccggagcagaaataattgagccttttaataaaggagagcttttgttaattg

SEQ ID NO: 608485 - DNA, 75 bp, synthetic construct
  source 1..75: mol_type = other DNA
ttcaccaaaccgaatattgtgatcaaacctaacgccaatagccgcccaaccggggataccactggctatctggca

SEQ ID NO: 608486 - DNA, 75 bp, synthetic construct
  source 1..75: mol_type = other DNA
ttgtaaaggaattgctttgtatttccagagaaatattttataaagatgagattctgttagttgattctgtttccc

SEQ ID NO: 608487 - DNA, 75 bp, synthetic construct
  source 1..75: mol_type = other DNA
tgctgccattttgtgtggcacaattagcgggagcctttggtggtgcggttctggcgtattttttatacagcaatt

SEQ ID NO: 608488 - DNA, 75 bp, synthetic construct
  source 1..75: mol_type = other DNA
ttgtattatttgggggttaggtatttcacttgctgtttaccttacggcaggcatttccggtgctcatcttaaccc

SEQ ID NO: 608489 - DNA, 75 bp, synthetic construct
  source 1..75: mol_type = other DNA
gctggcccgcttcggcatcggcacacaacgcttcgttctgcacgatggcgtgtgggccattcgccggagccgacg

SEQ ID NO: 608490 - DNA, 75 bp, synthetic construct
  source 1..75: mol_type = other DNA
tgcgtagttggtgaagtttttgatgtagcggttgatattcgtaaatcgtcacctacatttgggaaatgggttggg

SEQ ID NO: 608491 - DNA, 75 bp, synthetic construct
  source 1..75: mol_type = other DNA
ataacagtaatggtgttgttggtgatgtggcgtggttataccgttatgtgaatggtggattcaccctgacaccgg

SEQ ID NO: 608492 - DNA, 75 bp, synthetic construct
  source 1..75: mol_type = other DNA
atgaataacaatcctcgcattggcggggatttcttttatctgaaaaggacagaatacatgattaacaatattgca

SEQ ID NO: 608493 - DNA, 75 bp, synthetic construct
  source 1..75: mol_type = other DNA
aataactacagctcaaccgatttaaacggtgatctggataataatgacagctacgagattggcaactactggaac

SEQ ID NO: 608494 - DNA, 75 bp, synthetic construct
  source 1..75: mol_type = other DNA
gtgtatctggacgtcaactataaatttgtaccatggtttaatctgacagtacgaaatcgctataaccataataac

SEQ ID NO: 608495 - DNA, 75 bp, synthetic construct
  source 1..75: mol_type = other DNA
atgctgcaaaccagatacgtcgtgatcgtccgctgacacacgaagaactgatgcgccatgtaccgagtatttttg

SEQ ID NO: 608496 - DNA, 75 bp, synthetic construct
  source 1..75: mol_type = other DNA
gaaacgtctgtactggcacatatccggctggctggattgtgcggcaccggtattaaaccgccagaccttattgcc

SEQ ID NO: 608497 - DNA, 75 bp, synthetic construct
  source 1..75: mol_type = other DNA
ctatacgacaggcccgctttgccgagcagcagcgagccatgggccgtaaggcacggaagatttgggccacagacg

SEQ ID NO: 608498 - DNA, 75 bp, synthetic construct
  source 1..75: mol_type = other DNA
acatgacggtgcgactgcgccggaaggttgtccgcgagtatggcatcaaatcgctggtggatgcaccagtatcat

SEQ ID NO: 608499 - DNA, 75 bp, synthetic construct
  source 1..75: mol_type = other DNA
cgctggtcgacaaacttgaatcaatgcaacagcagttgcaacaaaaaacgaccacgaagaaatcaccggatggcc

SEQ ID NO: 608500 - DNA, 75 bp, synthetic construct
  source 1..75: mol_type = other DNA
cgtacttttcctcgctggataacatgattgcacaggggaacccgatgccggtgccttacggtgaaatgctggttg

SEQ ID NO: 608501 - DNA, 75 bp, synthetic construct
  source 1..75: mol_type = other DNA
atagggaataaatttaaaatcgtttccccaaatgggaattcggtgatatccatctcgcttgcccaaagtgaaaaa

SEQ ID NO: 608502 - DNA, 75 bp, synthetic construct
  source 1..75: mol_type = other DNA
gacctcaccgatgtgaagcacatcctgacggcgctaatcagcatgaccgctcaggccattgtggcgaccaacgga

SEQ ID NO: 608503 - DNA, 75 bp, synthetic construct
  source 1..75: mol_type = other DNA
ttcgaacatatcgagtcataccagaacaacgccatcacaggcacgcacgaagaagtgagctataacgcaccgctt

SEQ ID NO: 608504 - DNA, 75 bp, synthetic construct
  source 1..75: mol_type = other DNA
ctgattatcgaagggtgtttagctcgacttcaaaaacgaaagccatatgaacattcgctcttggttgcacactat

SEQ ID NO: 608505 - DNA, 75 bp, synthetic construct
  source 1..75: mol_type = other DNA
atgcgtgatatgtatgaagtattagaccgctggggagcatgggctgcagcagataacagtggtgtggattggcaa

SEQ ID NO: 608506 - DNA, 75 bp, synthetic construct
  source 1..75: mol_type = other DNA
gggatcgccgcagccaaggccgctggacgtatagcaaaacgtggtaatggaaaagcaattgatcgagcgggaatt

SEQ ID NO: 608507 - DNA, 75 bp, synthetic construct
  source 1..75: mol_type = other DNA
acaggaaagcgccacggcgaaagcgcaaaaagcggtggatgacatcgccgtccagtgctggttgcggcacaaatt

SEQ ID NO: 608508 - DNA, 75 bp, synthetic construct
  source 1..75: mol_type = other DNA
gatctgggtacgctaacgccaacgcttgataacgtttccatctacgccagctatgcgtatgtgaacgcggaaatc

SEQ ID NO: 608509 - DNA, 75 bp, synthetic construct
  source 1..75: mol_type = other DNA
acctcattattattatataaaagataataaactagctttatccccatcaccatgtgtatttacaaatgagattga

SEQ ID NO: 608510 - DNA, 75 bp, synthetic construct
  source 1..75: mol_type = other DNA
tttttacagacccatttgcactttcacctcattattattatataaaagataataaactagctttatccccatcac

SEQ ID NO: 608511 - DNA, 75 bp, synthetic construct
  source 1..75: mol_type = other DNA
tgtctctttgccaggtaactacccaaaagaaaccacgacgctggcccctgctacgccatacgatacgtggaacgg

SEQ ID NO: 608512 - DNA, 75 bp, synthetic construct
  source 1..75: mol_type = other DNA
ttgccaagaagagaaggtgttcagatggcacgattagaaaggaattgcaaactgcaattggttttgtagagggga

SEQ ID NO: 608513 - DNA, 75 bp, synthetic construct
  source 1..75: mol_type = other DNA
cgaattgagatgcagatagccgaagggtttattgacggatgtttgtctgtgctgggggtaagactggagatggac

SEQ ID NO: 608514 - DNA, 75 bp, synthetic construct
  source 1..75: mol_type = other DNA
atctaaagcattcaatactgttattcgaagagcccttggttgcaagttgagaacatatataagtaaaaactatag

SEQ ID NO: 608515 - DNA, 75 bp, synthetic construct
  source 1..75: mol_type = other DNA
tgagcactgtagatcagaacactgatcgccagcttgcaggagtaaatctcgataaggtttttgaagataagctgt

SEQ ID NO: 608516 - DNA, 75 bp, synthetic construct
  source 1..75: mol_type = other DNA
gatctccacgccaaaggtttagccgtccgcgtggttgacattgccgcagggcatgggcgctatgtacggatgcac

SEQ ID NO: 608517 - DNA, 75 bp, synthetic construct
  source 1..75: mol_type = other DNA
aggtcatcgtcttatttcatcgtggccatgaacattctggtcgtctacaacatatcgttgatgaactgacaatgc

SEQ ID NO: 608518 - DNA, 75 bp, synthetic construct
  source 1..75: mol_type = other DNA
gatcttttatatgggttttcgttgttcgtttgtagttcgacattcgaacagcgccgactggttcaccggcttatt

SEQ ID NO: 608519 - DNA, 75 bp, synthetic construct
  source 1..75: mol_type = other DNA
cggattgctgttgatgttggtggcacaacccatcctctttatgctattgcccatcgtgctttttatccgttttgc

SEQ ID NO: 608520 - DNA, 75 bp, synthetic construct
  source 1..75: mol_type = other DNA
actttcgtcagcatctggctgagaggtggcgtaaagtctgcggcggatggtttttactcatcgccatttcgacgc

SEQ ID NO: 608521 - DNA, 75 bp, synthetic construct
  source 1..75: mol_type = other DNA
accgtgggtaatgcgcgtgcgttcgcaaggggagatggattcactcgtgcgtgatgccggatttgataaatgcac

SEQ ID NO: 608522 - DNA, 75 bp, synthetic construct
  source 1..75: mol_type = other DNA
gtcaactggtcgaaggcacccagcgtattttctttgcccaacttgccgatccgaatacgcagcagttttatgccg

SEQ ID NO: 608523 - DNA, 75 bp, synthetic construct
  source 1..75: mol_type = other DNA
gacgggctatctggggacgctgttgtacggcttcatcctgcgtatgcttggtccactgggtttacaccatatctt

SEQ ID NO: 608524 - DNA, 75 bp, synthetic construct
  source 1..75: mol_type = other DNA
caaaggcaccttgcgcaaagtgatcgcctggcaggagcaggaaaaaacgctggctaacatcaaggctacgcgaat

SEQ ID NO: 608525 - DNA, 75 bp, synthetic construct
  source 1..75: mol_type = other DNA
atatcgttatcaaacctaacgccaacagccgcccgaccggcgataccactggttatctggctaatccggaggaag

SEQ ID NO: 608526 - DNA, 75 bp, synthetic construct
  source 1..75: mol_type = other DNA
ccatatgaccaaatgcgatggttgttatgaccgtgttgcggagggtaaaaagccgatctgtgttgaatcttgtcc

SEQ ID NO: 608527 - DNA, 75 bp, synthetic construct
  source 1..75: mol_type = other DNA
catcggggggatggtttgaaaaagcacagcggttcggcaaatccttcatgctgccgattgctgtattgcccgcag

SEQ ID NO: 608528 - DNA, 75 bp, synthetic construct
  source 1..75: mol_type = other DNA
gtctggcgtcggaagtgattgagtatgtcggtcgtcatctgggtaaaaccatcgccattgctatcaacttattta

SEQ ID NO: 608529 - DNA, 75 bp, synthetic construct
  source 1..75: mol_type = other DNA
gctatctctatcgtcaccgaaacccgcaatttccacgcaatcggcgtacggcttggtcgtcacgacgccaccatc

SEQ ID NO: 608530 - DNA, 75 bp, synthetic construct
  source 1..75: mol_type = other DNA
tgagatcaccgaagccgataaagtgctgctgcccgccattgaaagctgcattaatacccaggcgttgaaggcgtt

SEQ ID NO: 608531 - DNA, 75 bp, synthetic construct
  source 1..75: mol_type = other DNA
tgtcggtcgtcatctgggcaaaaccatcgccattgccatcaacctgtttaacccgcaaaaaattgttattgccgg

SEQ ID NO: 608532 - DNA, 75 bp, synthetic construct
  source 1..75: mol_type = other DNA
gaaccgctgggtgaacgctgccactgtggcaactttggctgcctggaaactatcgctgccaacgctgccattgaa

SEQ ID NO: 608533 - DNA, 75 bp, synthetic construct
  source 1..75: mol_type = other DNA
ccagcttgcccccgccagcgtaacaaaaattccgcgtcagcttatcgaccgcgggctgataaaagaagttgatca

SEQ ID NO: 608534 - DNA, 75 bp, synthetic construct
  source 1..75: mol_type = other DNA
atccgcaaaaaattgttattgccggtgagatcaccgaagccgataaagtgctgctccctgctattgaaagctgca

SEQ ID NO: 608535 - DNA, 75 bp, synthetic construct
  source 1..75: mol_type = other DNA
cgtaatatctccgtactaccccttaatgtttatgatcccccggaacgttttatcgcttacataaaaaaaacagag

SEQ ID NO: 608536 - DNA, 75 bp, synthetic construct
  source 1..75: mol_type = other DNA
atgtttatgatcccccggaacgttttatcgcttacataaaaaaaaaacagagaaaacctgaacatcatactttca

SEQ ID NO: 608537 - DNA, 75 bp, synthetic construct
  source 1..75: mol_type = other DNA
gctggcggagcactacttcggtgcaagtcaggattgcgaagactccattctggtgcgtgtccatcgcggaaccgg

SEQ ID NO: 608538 - DNA, 75 bp, synthetic construct
  source 1..75: mol_type = other DNA
caacgggtgttgaatctgttaaagcagggctaccagagccgcgtgccgctggacgactgcaccatcaaaactatc

SEQ ID NO: 608539 - DNA, 75 bp, synthetic construct
  source 1..75: mol_type = other DNA
gcttaacagcgcggcggtttatcgcctgattgaccagttcgggccaatctcgcgaattcagattgctgagcaaag

SEQ ID NO: 608540 - DNA, 75 bp, synthetic construct
  source 1..75: mol_type = other DNA
ctgctccctgctattgaaagctgcattaatacccaggcgctgaaggcgtttcgcactaatctgccggtggtacgt

SEQ ID NO: 608541 - DNA, 75 bp, synthetic construct
  source 1..75: mol_type = other DNA
ggcggatttctggctttcagtgcgctcttccatgcccgggcatgaactgcagacgaagtttccgcagttatgcaa

SEQ ID NO: 608542 - DNA, 75 bp, synthetic construct
  source 1..75: mol_type = other DNA
tcatcaaaccgaacgcggtagcaaaaaacgtgattggtagtatctttgcgcgctttgaaactgcagggttcaaaa

SEQ ID NO: 608543 - DNA, 75 bp, synthetic construct
  source 1..75: mol_type = other DNA
ccctgttctggttgcttaacgcgctgaactccgccgagccggtgctgagtgatttcctgcgctacccggcggttc

SEQ ID NO: 608544 - DNA, 75 bp, synthetic construct
  source 1..75: mol_type = other DNA
tgctcgatttgtcgatcattttggaaacccattatctggtacggttgagttttctgctggtagtgaagatagtcc

SEQ ID NO: 608545 - DNA, 75 bp, synthetic construct
  source 1..75: mol_type = other DNA
tggttatgctgtcacattgtctttaccagcagggataactcaagttggtggtgaacatgctgtttcaactgacga

SEQ ID NO: 608546 - DNA, 75 bp, synthetic construct
  source 1..75: mol_type = other DNA
gctgtggccgggcttctcccgctccggggcgaccatttccggcgggatgctgatgggcgtgagccgttatgccgc

SEQ ID NO: 608547 - DNA, 75 bp, synthetic construct
  source 1..75: mol_type = other DNA
cttgagctggcatgctaatggtttgtattacggtgtcggcattgagatcgacctctggctgcacgccggattcga

SEQ ID NO: 608548 - DNA, 75 bp, synthetic construct
  source 1..75: mol_type = other DNA
cgtgctggtcaacggctcacgcgcccatctgccgcaggcgcgggcgcgctatcaatcggcgctgctgcccatttg

SEQ ID NO: 608549 - DNA, 75 bp, synthetic construct
  source 1..75: mol_type = other DNA
gtgaaaacgccagtgaaattaacgcccgcctggcgcgcgccgcccgctatactccacaggattgccatacgctca

SEQ ID NO: 608550 - DNA, 75 bp, synthetic construct
  source 1..75: mol_type = other DNA
atcaatcggcgctgctgcccgtctgtttacaggtttcgccggagatcctgcgccagcgcctggaaaaccgtggcc

SEQ ID NO: 608551 - DNA, 75 bp, synthetic construct
  source 1..75: mol_type = other DNA
cgggaacagacgcagctactggtggcgcatcgctacatcacgcgcgatgccagcgccggaagtgaaaaccatatc

SEQ ID NO: 608552 - DNA, 75 bp, synthetic construct
  source 1..75: mol_type = other DNA
tattacggtgtcggcattgagatcgacctctggctgcacgccggattcgacgtcgtggttaacggctcacgcgcc

SEQ ID NO: 608553 - DNA, 75 bp, synthetic construct
  source 1..75: mol_type = other DNA
ggcgacgccggagagttgcgattttctgcatcaaatcaaaataggcgagtggatacacgctgactttaagcgtgt

SEQ ID NO: 608554 - DNA, 75 bp, synthetic construct
  source 1..75: mol_type = other DNA
ttgttgccggaaaaaccagaaatagctcatgagattgccagacatctttgcggacaaaaagggttatatgcgctg

SEQ ID NO: 608555 - DNA, 75 bp, synthetic construct
  source 1..75: mol_type = other DNA
gacaagacgcctatagctggctgctgaaatacccggaacacgccataaccggcctgttacctacggcactcggca

SEQ ID NO: 608556 - DNA, 75 bp, synthetic construct
  source 1..75: mol_type = other DNA
acactacttatccatgcaagcgagcagggaaagcgttgccacgatcgcatgacaaaggctttcgttcgcttccca

SEQ ID NO: 608557 - DNA, 75 bp, synthetic construct
  source 1..75: mol_type = other DNA
tgtggccgctgcctgaaaaaaccgccgccgtggcagcgtctgatcaccgtatccagctatacgccgcccttaagc

SEQ ID NO: 608558 - DNA, 75 bp, synthetic construct
  source 1..75: mol_type = other DNA
ggctatgccgaatgccgctggcgctaggccattggggaatttgttcggtctgctcacatgccgcacataaacatg

SEQ ID NO: 608559 - DNA, 75 bp, synthetic construct
  source 1..75: mol_type = other DNA
ctaccgtgccggcagggcctttctccatcagtgacctttatcccagtggatatggtggtgacctgacagtcactg

SEQ ID NO: 608560 - DNA, 75 bp, synthetic construct
  source 1..75: mol_type = other DNA
gattgccggaatcgctcgcttcgccccctatgcttatgctgatctttgcggaagtattctcgcagagatcaatca

SEQ ID NO: 608561 - DNA, 75 bp, synthetic construct
  source 1..75: mol_type = other DNA
gtgaagcacaggataacgcccgcgctgccttgcgtatgcttaccgaaaacggtcatcagccattactgcaagaaa

SEQ ID NO: 608562 - DNA, 75 bp, synthetic construct
  source 1..75: mol_type = other DNA
acattgaccgagacggcagaaaaagagattcatgcaaggcatcgctggcacgcacatcaaatagacatcggccaa

SEQ ID NO: 608563 - DNA, 75 bp, synthetic construct
  source 1..75: mol_type = other DNA
tggtcaccagaaaacttccagctcttcctggttgagcacccgatggttcgccacttaacccgacgtctgatttgg

SEQ ID NO: 608564 - DNA, 75 bp, synthetic construct
  source 1..75: mol_type = other DNA
cccaatcactgccagataacgccctcctccacctcggtgaaatgctccgcttccctcaggaagaggctctgtatc

SEQ ID NO: 608565 - DNA, 75 bp, synthetic construct
  source 1..75: mol_type = other DNA
cgtggctggcagatgattccactatccatttatcagagaaaaagtctctggaggccttaccttcccgacgttttc

SEQ ID NO: 608566 - DNA, 75 bp, synthetic construct
  source 1..75: mol_type = other DNA
ttgacttatcgactttaaggttgaatatcgaaatcccgcaggcactgctgaatacacgtccaagaggatatattt

SEQ ID NO: 608567 - DNA, 75 bp, synthetic construct
  source 1..75: mol_type = other DNA
tcgtaactacgcatttcacaagcgttttttcaaactcctgcaactcggattcgattactggactcctgtcggtgg

SEQ ID NO: 608568 - DNA, 75 bp, synthetic construct
  source 1..75: mol_type = other DNA
tcctctccggaggaagtcgaaaatgtggccgcgcagctactggagtttgaggtgtaccgagcccttttctggcgg

SEQ ID NO: 608569 - DNA, 75 bp, synthetic construct
  source 1..75: mol_type = other DNA
gtgccaccggagaaagccgatggccatatacaactgatcaaacaaacctcttccggattacttctcccggcgacg

SEQ ID NO: 608570 - DNA, 75 bp, synthetic construct
  source 1..75: mol_type = other DNA
tggatcctgttccgtaaattctcctctttggaggaagtcgaaaatgtggccgcgcagctgctggagtttgcgtaa

SEQ ID NO: 608571 - DNA, 75 bp, synthetic construct
  source 1..75: mol_type = other DNA
ggcgagcactcctcgcgaacgaaaactggtgtccggtttcgttgattatctgtgtgaatcagtaggccgggaaca

SEQ ID NO: 608572 - DNA, 75 bp, synthetic construct
  source 1..75: mol_type = other DNA
tttttcaaactcctgcaactgggattcgattactggactccggtcggtggggcgatcacgcctcgcgaacgagaa

SEQ ID NO: 608573 - DNA, 75 bp, synthetic construct
  source 1..75: mol_type = other DNA
ctggtgtccggtttcgttgagtatctgtgcgaatcagttggtcgggaacacactccagccctgagcgaagccgca

SEQ ID NO: 608574 - DNA, 75 bp, synthetic construct
  source 1..75: mol_type = other DNA
gattttatgctttttatcttctgggatatgagtcgtataatggtgatatggatgatttcctagctaaagcattat

SEQ ID NO: 608575 - DNA, 75 bp, synthetic construct
  source 1..75: mol_type = other DNA
atggaatttttagttatcagacttggaaaagatagtgtttctgatataaaaaaattggatagcataaaaaatggg

SEQ ID NO: 608576 - DNA, 75 bp, synthetic construct
  source 1..75: mol_type = other DNA
cacaccagccctgagtgatgccgcagagcaatatctaaatacagttgcgacacgcagaacccgggatacggcatt

SEQ ID NO: 608577 - DNA, 75 bp, synthetic construct
  source 1..75: mol_type = other DNA
gagcaataccttaacaccgttgcgactcgcagaacccgggatgtggcattactcaagtcatttgacgctttccgc

SEQ ID NO: 608578 - DNA, 75 bp, synthetic construct
  source 1..75: mol_type = other DNA
tgtcatggctgagctggctgatcagtatcttctcgatgagtcggaaaagcgcgcggggaatatcagtgcggtgaa

SEQ ID NO: 608579 - DNA, 75 bp, synthetic construct
  source 1..75: mol_type = other DNA
attaagtggtcgagcattgaatgttaagacatctgggccgtctaaatatggtgcgttggtggttgataaaaccac

SEQ ID NO: 608580 - DNA, 75 bp, synthetic construct
  source 1..75: mol_type = other DNA
tttatgctcgatttgtcgatcattttggaaacccattatctggtacggttgagttttctgctggtagtgaagata

SEQ ID NO: 608581 - DNA, 75 bp, synthetic construct
  source 1..75: mol_type = other DNA
cactttaccggcttataaaagcgaaggtgtaaattcgtggaatgttggagccacagtccaggataacagaggcaa

SEQ ID NO: 608582 - DNA, 75 bp, synthetic construct
  source 1..75: mol_type = other DNA
ctctgtaagtatgaacaaatcaaagatcaaatttataatattaatataagctgggcaagcaaggtgatgctgcca

SEQ ID NO: 608583 - DNA, 75 bp, synthetic construct
  source 1..75: mol_type = other DNA
tccgaatatgctggtccgctgggccagacgtggttttggtgtatggagtgcctggcgtctggttaaaaatacgat

SEQ ID NO: 608584 - DNA, 75 bp, synthetic construct
  source 1..75: mol_type = other DNA
caacctcatgttgttgtgactcttgaaccgaattcttgggctgctttttattttgatatcaatattgcaaatacc

SEQ ID NO: 608585 - DNA, 75 bp, synthetic construct
  source 1..75: mol_type = other DNA
tatcaactcaggcgacaaaagaggtcgtcgactggttgcaacaatatggcaatgcgcgcatcaagcttaatgtcg

SEQ ID NO: 608586 - DNA, 75 bp, synthetic construct
  source 1..75: mol_type = other DNA
atggtactccagtgggggtttatgcccgatttgttgaccatttcggcaatccgttatctggtacggttgagtttt

SEQ ID NO: 608587 - DNA, 75 bp, synthetic construct
  source 1..75: mol_type = other DNA
ttcccatagtgtggagtctggcagcgttaagttaacttttgtaccagatgctgcttccgcagaacttactatgag

SEQ ID NO: 608588 - DNA, 75 bp, synthetic construct
  source 1..75: mol_type = other DNA
cgcaaatggagtattgactctaacaaaagatcctggttatgagacaaacgatggatctccagtaggtatttatgc

SEQ ID NO: 608589 - DNA, 75 bp, synthetic construct
  source 1..75: mol_type = other DNA
acaacggtgaaagctggtgagtacacggtgactgcacgggtgactgacggttcccatagcgtggaatctggcagc

SEQ ID NO: 608590 - DNA, 75 bp, synthetic construct
  source 1..75: mol_type = other DNA
caggctggtacggtacgtgtaactgcaaaagttcagggaaaaacatttactctcagtattaagcaaacagcaaca

SEQ ID NO: 608591 - DNA, 75 bp, synthetic construct
  source 1..75: mol_type = other DNA
ctcatatagccacacttgtagaccgaaaatcacgttatacgatcatccttagactcaggggcaaagattctgtct

SEQ ID NO: 608592 - DNA, 75 bp, synthetic construct
  source 1..75: mol_type = other DNA
tgctcatgacatgagcgtctactttgtgaagaccggggataataactggcaggtctacacccaggatagtagtga

SEQ ID NO: 608593 - DNA, 75 bp, synthetic construct
  source 1..75: mol_type = other DNA
atgatcgttgcccagcgtaactataagtctaacgcccagaccatcaaaacccaggaccagatcctcaacacgcgg

SEQ ID NO: 608594 - DNA, 75 bp, synthetic construct
  source 1..75: mol_type = other DNA
cgatgttattggcaacaatatcgccaactccgccacctacggctttaaatcaggcacggcctcttttgccgatat

SEQ ID NO: 608595 - DNA, 75 bp, synthetic construct
  source 1..75: mol_type = other DNA
tggtttttcaaaaattatgattccggttccatatcctaaagatcacgaaaaatcacttaaggaacaagctcgcat

SEQ ID NO: 608596 - DNA, 75 bp, synthetic construct
  source 1..75: mol_type = other DNA
tgagcttcctcaactccatgcagcaaaataccggcgctaacaacattgtggcaaccacccagaacggctacaaac

SEQ ID NO: 608597 - DNA, 75 bp, synthetic construct
  source 1..75: mol_type = other DNA
gatagctataacaaaaaaggttcggtgactgttttcgacagtcagggtaatgctcatgacatgagcgtgtacttt

SEQ ID NO: 608598 - DNA, 75 bp, synthetic construct
  source 1..75: mol_type = other DNA
acagtacaggggcgatactttcgtgccaatccggtgtgtggagaacttccggttcctctaacggtagttacagta

SEQ ID NO: 608599 - DNA, 75 bp, synthetic construct
  source 1..75: mol_type = other DNA
aatgcggcttctatgacgaatacaacttttatggcggtactcaccgaactgacctgtcggggaaatgtagttaca

SEQ ID NO: 608600 - DNA, 75 bp, synthetic construct
  source 1..75: mol_type = other DNA
tcccctaacgggcttgtaggccgcgacagtacaggggcgatactttcgtgccaatccggtacgtggaaaaaaatt

SEQ ID NO: 608601 - DNA, 75 bp, synthetic construct
  source 1..75: mol_type = other DNA
ccgcttcagctactgcgtggcgttggcctggagcaacggcaacatgtccatctggcaagaaagtcattggtggag

SEQ ID NO: 608602 - DNA, 75 bp, synthetic construct
  source 1..75: mol_type = other DNA
gccgactgcacggatatatgacaggttggctaacgtcgtggaataccagcaataaccctgcatatggaaaaacag

SEQ ID NO: 608603 - DNA, 75 bp, synthetic construct
  source 1..75: mol_type = other DNA
gatgtggctgtctatgcgttggttttgtcgtcgcctggagccggtgagcaaaatgactgctggtgtttatttagg

SEQ ID NO: 608604 - DNA, 75 bp, synthetic construct
  source 1..75: mol_type = other DNA
atcacctcatctgaaagattgtctgtaccgacaaatatcgtgactgattcaacagggcatgtttccgtaccactt

SEQ ID NO: 608605 - DNA, 75 bp, synthetic construct
  source 1..75: mol_type = other DNA
caactggcgatcgatcgtgcgaaagaactgttcggcgctgactacgctaacgttcagccgcactccggctcccag

SEQ ID NO: 608606 - DNA, 75 bp, synthetic construct
  source 1..75: mol_type = other DNA
cctccggtattcgcgtgggtactccggcgattacgcgtcgcggcttcaaagaagcagaagcgaaagaactggctg

SEQ ID NO: 608607 - DNA, 75 bp, synthetic construct
  source 1..75: mol_type = other DNA
catcaatgatgaagcggttatcgagcgcatcaaaggtaaagttctcgacatctgcgcacgttacccggtttacgc

SEQ ID NO: 608608 - DNA, 75 bp, synthetic construct
  source 1..75: mol_type = other DNA
aaatcacctctgctgaatctgcggtaaattcggcgagaaataacctcagtgccagaacaaatgagcaaaagcatg

SEQ ID NO: 608609 - DNA, 75 bp, synthetic construct
  source 1..75: mol_type = other DNA
aatcattctattgttgtgagcggtgatccgagatttgccggtacgataaaaatcacaaccagcgcagtcatcgat

SEQ ID NO: 608610 - DNA, 75 bp, synthetic construct
  source 1..75: mol_type = other DNA
aaaagctgagcagttagccagagagatggccgggcaggctaaagggaagaaaatacgtaatgttgaagaggcatt

SEQ ID NO: 608611 - DNA, 75 bp, synthetic construct
  source 1..75: mol_type = other DNA
gcaaaagttcagggaaaaacatttactctcagtattaagcaaacagcagcaacagaacctgattctgaggtcagt

SEQ ID NO: 608612 - DNA, 75 bp, synthetic construct
  source 1..75: mol_type = other DNA
ctctcagtattaagcaaacagcagcaacagaacctgattctgaggtcagtgctgctttaaccgctgcaccagcag

SEQ ID NO: 608613 - DNA, 75 bp, synthetic construct
  source 1..75: mol_type = other DNA
gcaatagtgctcgacagcgtgaaacggtaactgctccgtcattaggcgcggtagaggaaatctctgctggtgtat

SEQ ID NO: 608614 - DNA, 75 bp, synthetic construct
  source 1..75: mol_type = other DNA
cagcgtgaaacggtaactgctccgtcattaggcgcggtagaggaaatctctgctggggtatatcgctctgttctg

SEQ ID NO: 608615 - DNA, 75 bp, synthetic construct
  source 1..75: mol_type = other DNA
atacgtcaggcgaagcattaagtggtcgagcactgaatattaagacttctggaccgtccaaatatggtgctttgg

SEQ ID NO: 608616 - DNA, 75 bp, synthetic construct
  source 1..75: mol_type = other DNA
tggagatcgcatcatctgtatcttctgctgttgtgagcgattccaacaatcttacatttacgttgcatctgaaaa

SEQ ID NO: 608617 - DNA, 75 bp, synthetic construct
  source 1..75: mol_type = other DNA
cgcctttctgcggcaattgctgcaagggaaaaagatgaaaacacactgaaaacactccgtgccggaaacgcagat

SEQ ID NO: 608618 - DNA, 75 bp, synthetic construct
  source 1..75: mol_type = other DNA
atttagtccgcaacaggcaactgaaattgcgcaaatagcaccgtcgctggctcctcactgcacgctggctctgac

SEQ ID NO: 608619 - DNA, 75 bp, synthetic construct
  source 1..75: mol_type = other DNA
aaacggccattccctcaacagcagtctttgtaagtatgaccagattaaagatcaagtttattctgttagtattag

SEQ ID NO: 608620 - DNA, 75 bp, synthetic construct
  source 1..75: mol_type = other DNA
ttttgatatcaatattgctaataccggaaatgccccagcctatgatattgaagtcggatttaatcccccactggt

SEQ ID NO: 608621 - DNA, 75 bp, synthetic construct
  source 1..75: mol_type = other DNA
ccccgtcattaggcgcggtagaggaaatctctgctggtgtatatcgctctgttctgactgctggttcgcaggctg

SEQ ID NO: 608622 - DNA, 75 bp, synthetic construct
  source 1..75: mol_type = other DNA
tacgttgcatctgaaaaatacgtcaggcgaagcattaagtggtcgagcactgaatattaagacctctggaccgtc

SEQ ID NO: 608623 - DNA, 75 bp, synthetic construct
  source 1..75: mol_type = other DNA
ctgattaagttttctgcacagcataagcaaggacagagcaacgttcacgatacaacctttggtgttgagtttaat

SEQ ID NO: 608624 - DNA, 75 bp, synthetic construct
  source 1..75: mol_type = other DNA
aacactccgtgccggaaacgcagatgccgctgatattacacgacaggagttcagactcctgcaggcagagctgag

SEQ ID NO: 608625 - DNA, 75 bp, synthetic construct
  source 1..75: mol_type = other DNA
catggcacggtgacaggcttcaaaagtgacatcgacaatcaggactggattattgcaaaagccgagcacaccatt

SEQ ID NO: 608626 - DNA, 75 bp, synthetic construct
  source 1..75: mol_type = other DNA
ccccgcgaggccaggtcgttaatcgaacaggctgaaaaacggcagaaggatgcgcagaacgcagacaagaaggcc

SEQ ID NO: 608627 - DNA, 75 bp, synthetic construct
  source 1..75: mol_type = other DNA
caacctcatgtcgttgtgactcttgaaccaaattcttgggctgctttttattttgatatcaatattgctaatacc

SEQ ID NO: 608628 - DNA, 75 bp, synthetic construct
  source 1..75: mol_type = other DNA
gtctgatggcgcgagagcgcagcgattatacccgcactttccgcatgctgagtctgaccgagcagtacagcgcgg

SEQ ID NO: 608629 - DNA, 75 bp, synthetic construct
  source 1..75: mol_type = other DNA
cggcaaccatgctgatgccggtatctgatattgactgggcgcgggtgtttaccatgcgccagcttgcggtgtcat

SEQ ID NO: 608630 - DNA, 75 bp, synthetic construct
  source 1..75: mol_type = other DNA
tacaaggacaagagccattacaggtattgatggtgatatcagaatcaacaaggcattatggatgatcgccgaaca

SEQ ID NO: 608631 - DNA, 75 bp, synthetic construct
  source 1..75: mol_type = other DNA
tcggacaatacctgtgaacttacaattaatgaaccgttaaaaaaccaggaaatatccacaggcaatatcaatgtt

SEQ ID NO: 608632 - DNA, 75 bp, synthetic construct
  source 1..75: mol_type = other DNA
atgacacagattttactaatgccaacatgtttcaggtaaatttcgttagttcaaaacaaaacgccacaatctcct

SEQ ID NO: 608633 - DNA, 75 bp, synthetic construct
  source 1..75: mol_type = other DNA
cgacgaactactacgcgccgcagtcagaacggagcatcatctggaacgatccggagatcgggattgactggccgg

SEQ ID NO: 608634 - DNA, 75 bp, synthetic construct
  source 1..75: mol_type = other DNA
caactgtgccgcactgccggaaagtgtggcggaaagtgagttgttcgggcatgtgaaaggggcgtttactggcgc

SEQ ID NO: 608635 - DNA, 75 bp, synthetic construct
  source 1..75: mol_type = other DNA
gacaagtacgatatccgttctgactttgctcaaatgctggatgcacatgcaaacttcctgcgtagcaacccgtct

SEQ ID NO: 608636 - DNA, 75 bp, synthetic construct
  source 1..75: mol_type = other DNA
tgttttaataagcattagcgatatgtattctgaagaaaaaatcaagtttgtcgaaagttgtttaaatgagcctgg

SEQ ID NO: 608637 - DNA, 75 bp, synthetic construct
  source 1..75: mol_type = other DNA
ttaccgtattaatgaacactggcttccttatttcgaattgcgctggttagaccgcaacgtcgaaccgtaccaccg

SEQ ID NO: 608638 - DNA, 75 bp, synthetic construct
  source 1..75: mol_type = other DNA
aggagcgctcagaacagaaatttggatggaactcagataaagatgaagagaatatgcaacgtctgagggatgctg

SEQ ID NO: 608639 - DNA, 75 bp, synthetic construct
  source 1..75: mol_type = other DNA
tacgtctgaagcggttaaagaggtactgaataaatcacagagtggtgatttcactgctggggtgtcgctaagcgt

SEQ ID NO: 608640 - DNA, 75 bp, synthetic construct
  source 1..75: mol_type = other DNA
gatgcaaagagcaaacttcaagagctcaaaaagctaaagcgaatggatagaaggaagaataaggagaatccgtaa

SEQ ID NO: 608641 - DNA, 75 bp, synthetic construct
  source 1..75: mol_type = other DNA
ttcacagccctgctggcgctgctggttgtggttttgctggtgacatctgctgtcagcatgtatgtgctgtggtag

SEQ ID NO: 608642 - DNA, 75 bp, synthetic construct
  source 1..75: mol_type = other DNA
cattcaaaatccaaaaaagggattttacgaggtcttcactaccagactgaaaatacgcaaggaaaactggttcgt

SEQ ID NO: 608643 - DNA, 75 bp, synthetic construct
  source 1..75: mol_type = other DNA
ttgcttttcctgaggtgacgttgccgccgccagaagcggcggcggtgcctattgttaagcaaaacctgcgtgaag

SEQ ID NO: 608644 - DNA, 75 bp, synthetic construct
  source 1..75: mol_type = other DNA
ggacgacggcttaagtgatagctgtccggcgctcactatccgcttttttgcagacaaaaaatcactggctgaagc

SEQ ID NO: 608645 - DNA, 75 bp, synthetic construct
  source 1..75: mol_type = other DNA
atgaattttttagctcacctgcatctagctcacctggcggaaagctcgctttctggcaatttactggctgatttc

SEQ ID NO: 608646 - DNA, 75 bp, synthetic construct
  source 1..75: mol_type = other DNA
cgcccattacgatgctctcgaaacccgcttctggcagttttatccgcggatgatggagcaggcgtcacgcaaggc

SEQ ID NO: 608647 - DNA, 75 bp, synthetic construct
  source 1..75: mol_type = other DNA
cgcgcgttcttcgattttaactccatgcatatggagccgtgggatggcccggcgggcatcgtgatgtctgacggt

SEQ ID NO: 608648 - DNA, 75 bp, synthetic construct
  source 1..75: mol_type = other DNA
gtacttcccgacgcggatggacccttctctcaatacgatggcgaacgatcggcaacgtgaagggaaaatgaccat

SEQ ID NO: 608649 - DNA, 75 bp, synthetic construct
  source 1..75: mol_type = other DNA
cgtcagcagcgatttttcttccacggtcagttcaatcccacactgtggctggctctgctgagtggtggcattaag

SEQ ID NO: 608650 - DNA, 75 bp, synthetic construct
  source 1..75: mol_type = other DNA
aagtcagaatatgctgccaggcgatgccgcgccgtttgaagcggtgaaacagacgcagatgatcggtctgtcgcc

SEQ ID NO: 608651 - DNA, 75 bp, synthetic construct
  source 1..75: mol_type = other DNA
gcgctggcggcgggagcgttaagcaatgcgttgctgattgagcaactggaaagccagaatatgctgccgggcgat

SEQ ID NO: 608652 - DNA, 75 bp, synthetic construct
  source 1..75: mol_type = other DNA
gcgctggcggcgggagcgttaagcaatgcgttgctgattgaacaactggaaagccagaatatgctgccaggcgat

SEQ ID NO: 608653 - DNA, 75 bp, synthetic construct
  source 1..75: mol_type = other DNA
caagtaatcactattctgccggattcaccaccacgctttatcaatttgaacaattacttatggtcagagcagtgg

SEQ ID NO: 608654 - DNA, 75 bp, synthetic construct
  source 1..75: mol_type = other DNA
atgaattttttagctcacctgcatttagcccatctcgcggaaagctcgctttccggcaatttactggctgatttc

SEQ ID NO: 608655 - DNA, 75 bp, synthetic construct
  source 1..75: mol_type = other DNA
gtggcggaaagtgagctgttcgggcatgtgaaaggggcgtttaccggcgctatcagtaaccgcagtggtaagttt

SEQ ID NO: 608656 - DNA, 75 bp, synthetic construct
  source 1..75: mol_type = other DNA
tatatccggggtcatgacccgaaggaagtgctgaagtttattgcggtgttcattctgataaccagtgtgctggtt

SEQ ID NO: 608657 - DNA, 75 bp, synthetic construct
  source 1..75: mol_type = other DNA
aagattcgggcttaactcaaaaagaaatgatagagcactggattttgaaagaaaagctgcgatggatgatgcgaa

SEQ ID NO: 608658 - DNA, 75 bp, synthetic construct
  source 1..75: mol_type = other DNA
ccgggctggggcaaaatccggctcgtcaggcactgctaaaaagcggactggcagaaacggtgtgcggatttacgg

SEQ ID NO: 608659 - DNA, 75 bp, synthetic construct
  source 1..75: mol_type = other DNA
taatggttcactcgcctccaccagcgccatcgatctgggggcaacagtaattcaggccgccattgaacgcgcaaa

SEQ ID NO: 608660 - DNA, 75 bp, synthetic construct
  source 1..75: mol_type = other DNA
acaaggcgctgaccgaggaaggctttttgcacgtcttcccacaaatttatgattgcgaaggttttttcgttgctc

SEQ ID NO: 608661 - DNA, 75 bp, synthetic construct
  source 1..75: mol_type = other DNA
caaacgtattggctcgcgactgaaaaacagttacccgcgtgagctagtgcgcgacggaaaactttttacgggtaa

SEQ ID NO: 608662 - DNA, 75 bp, synthetic construct
  source 1..75: mol_type = other DNA
gcattgaagcgttgatcggtaaagtccgattttctcgtctgggagtaaaacttgccgaaacgcataacaaaggtt

SEQ ID NO: 608663 - DNA, 75 bp, synthetic construct
  source 1..75: mol_type = other DNA
gtgattatgggtaacgtcctgcaggcgggtttagggcaaaacccggcgcgtcaggcattgcttaaaagcgagctg

SEQ ID NO: 608664 - DNA, 75 bp, synthetic construct
  source 1..75: mol_type = other DNA
ggcacgagataaaacgctgggtctggcaacgctgtgcattggtggcggtcagggaattgcgatggtgattgaacg

SEQ ID NO: 608665 - DNA, 75 bp, synthetic construct
  source 1..75: mol_type = other DNA
gataaagattttattgaagtctacaaaaaaacgctaataaatattactgcattacatattttattgatggtgtta

SEQ ID NO: 608666 - DNA, 75 bp, synthetic construct
  source 1..75: mol_type = other DNA
agaaaaccttcgtcttcagtcaagacgaattcccgaaagcggattctacgactgaagcgttaggcgcattgcgcc

SEQ ID NO: 608667 - DNA, 75 bp, synthetic construct
  source 1..75: mol_type = other DNA
cgaattcccgaaaacggattctacgactgaagcgttaggcgcattgcgcccggccttcgataaagcaggaacagt

SEQ ID NO: 608668 - DNA, 75 bp, synthetic construct
  source 1..75: mol_type = other DNA
gctgaaacggtgtgcggattcacggtcaacaaagtgtgcggttcaggtctgaaaagcgtggcgcttgctgcacag

SEQ ID NO: 608669 - DNA, 75 bp, synthetic construct
  source 1..75: mol_type = other DNA
gggcagcagtttgcgatgattgtcagcaatccgccgtatattgacgagcaggacccacatcttcaacaaggcgat

SEQ ID NO: 608670 - DNA, 75 bp, synthetic construct
  source 1..75: mol_type = other DNA
ccggggccagtgccagtggaaagctgtataccgacattagctataaaggttcggatcggtcatcgcatggtatta

SEQ ID NO: 608671 - DNA, 75 bp, synthetic construct
  source 1..75: mol_type = other DNA
ttactgccggtggacatggcgaagccggtattgataccaggaaaaatattctcggaaaagctgttgagttaacaa

SEQ ID NO: 608672 - DNA, 75 bp, synthetic construct
  source 1..75: mol_type = other DNA
aaggcatgctgggtgccggcactggtatggatgcgaacggcggcaacggcaatggcaacatgtcttccgaagagc

SEQ ID NO: 608673 - DNA, 75 bp, synthetic construct
  source 1..75: mol_type = other DNA
ccggggccagtgccagtggaaaactgtataccgacattagctataaaggttcggatcagtcgttgcatggtatca

SEQ ID NO: 608674 - DNA, 75 bp, synthetic construct
  source 1..75: mol_type = other DNA
agacacaacggaacacgcttgcggggcagcataaggagagtgaaaaggctttcggtgaggctctggcgcaggaga

SEQ ID NO: 608675 - DNA, 75 bp, synthetic construct
  source 1..75: mol_type = other DNA
gggctgtcggtgccgttccggtttatcaccagtattggtggctccctgacgaaaatttatgactccgtgttccat

SEQ ID NO: 608676 - DNA, 75 bp, synthetic construct
  source 1..75: mol_type = other DNA
aatttcgccgattactggcaggccttccgtgactacccccgactgcagggcggttttatctgggactgggccgac

SEQ ID NO: 608677 - DNA, 75 bp, synthetic construct
  source 1..75: mol_type = other DNA
atccttgcggggtatcatgacgtcgaaacctgccgtgactatggtgataatgagcgcgtaacgctcggccgctat

SEQ ID NO: 608678 - DNA, 75 bp, synthetic construct
  source 1..75: mol_type = other DNA
aaaatatccatattctgcaaagcgactggtttagcgcgctagccgggcagcagtttgcgatgattgtcagtaatc

SEQ ID NO: 608679 - DNA, 75 bp, synthetic construct
  source 1..75: mol_type = other DNA
caggttcacctttgcctacgatgcgttttaaaaatgatgatattgttaatgctataggtagtaataaggcagctt

SEQ ID NO: 608680 - DNA, 75 bp, synthetic construct
  source 1..75: mol_type = other DNA
tgatacccaatggcattatcagattgtaattgtcaataataataagggccggtgctcttactctgacaggggtaa

SEQ ID NO: 608681 - DNA, 75 bp, synthetic construct
  source 1..75: mol_type = other DNA
gatcctggcgctggatcatcgatcgtcagagcggacatttaagcgagtggtatgccgggggtgaacagcagttgc

SEQ ID NO: 608682 - DNA, 75 bp, synthetic construct
  source 1..75: mol_type = other DNA
gcattctcgataagggcaacattaaagaagaataccggaaagtgttggaggttgagttccgcacgggtaagaatc

SEQ ID NO: 608683 - DNA, 75 bp, synthetic construct
  source 1..75: mol_type = other DNA
atggcccgcgaattaatgctttattgtgttgagggtggagtaggtcacgatgcctacgtcgccgggaaaggctat

SEQ ID NO: 608684 - DNA, 75 bp, synthetic construct
  source 1..75: mol_type = other DNA
atggcccgcgaatacatgctttattgcgttgagggtggcgtaggccatgatgcctacgtcgccgggaaaggctat

SEQ ID NO: 608685 - DNA, 75 bp, synthetic construct
  source 1..75: mol_type = other DNA
ttatatccgtggtgctcactatgatattttcggtatggatgatgctgtttggtctgaaccgtatttcatgcaaat

SEQ ID NO: 608686 - DNA, 75 bp, synthetic construct
  source 1..75: mol_type = other DNA
aggacggggcgatcaccaatgcgaagatcgtaaacggtgctattgataacgccaaaattggtaactatatccagt

SEQ ID NO: 608687 - DNA, 75 bp, synthetic construct
  source 1..75: mol_type = other DNA
cattcctgaaagtacgtaaacaagtacgccagatggatctacattcaaacggtgcatgtgatccgaacgccagct

SEQ ID NO: 608688 - DNA, 75 bp, synthetic construct
  source 1..75: mol_type = other DNA
ccggagctacctgcgctgctttctggcgcggccaatgagagcgatgaagcaccgactccggcagaggaaccacac

SEQ ID NO: 608689 - DNA, 75 bp, synthetic construct
  source 1..75: mol_type = other DNA
gggactgtggagaagcgacagagcataacacggtatgttgcccacactgcggttctgtcgatcccttcggctatt

SEQ ID NO: 608690 - DNA, 75 bp, synthetic construct
  source 1..75: mol_type = other DNA
gacctggcagtgcattacgccaatcccgccgcgcaacaactgcttgcccaaagctcccgcaaactatttggtacg

SEQ ID NO: 608691 - DNA, 75 bp, synthetic construct
  source 1..75: mol_type = other DNA
tgcctacgtcgccgggaaaagctatccagccgatgaagtgctttctaatatgcacttccgggaaaatgaaagccg

SEQ ID NO: 608692 - DNA, 75 bp, synthetic construct
  source 1..75: mol_type = other DNA
atggcacgcgaattgatgctttattgcatagaaggtggcgtgggacatgatgcctacgtcgccgggaaaagctat

SEQ ID NO: 608693 - DNA, 75 bp, synthetic construct
  source 1..75: mol_type = other DNA
atggatggtatatcggcaaagatggcacttgtcattttagacacgctaatattcgtggtcatttggtggctgatt

SEQ ID NO: 608694 - DNA, 75 bp, synthetic construct
  source 1..75: mol_type = other DNA
gaaatctaccattagctgggacgatcaggacaaagaagcactggaagacctgattggtttacaagatcgcttaga

SEQ ID NO: 608695 - DNA, 75 bp, synthetic construct
  source 1..75: mol_type = other DNA
cgttatgccaaatttttaacacaagtagccaaaaccctcgtcgaagccctcatcgaaggtcaactgaccgagcaa

SEQ ID NO: 608696 - DNA, 75 bp, synthetic construct
  source 1..75: mol_type = other DNA
gagcgtcagaaatctgtgcttggtgtggcaccgtcgattcatgttatcgcccggcaactgatggataaggcactt

SEQ ID NO: 608697 - DNA, 75 bp, synthetic construct
  source 1..75: mol_type = other DNA
cgaaggaaacaaggtgtatatggactggtccatgatccgtaatgcctcaatcggcacagcccagattactgatgc

SEQ ID NO: 608698 - DNA, 75 bp, synthetic construct
  source 1..75: mol_type = other DNA
gtgggttgatgtccactcaacctacgcaactgctgaattttgatgccagcaccatgcaatgggtcactagtgctc

SEQ ID NO: 608699 - DNA, 75 bp, synthetic construct
  source 1..75: mol_type = other DNA
cgctggaaagtcccatcaccgccattccgtcctatatggtaggtgcgattgttggttccaccgccgctgtctggc

SEQ ID NO: 608700 - DNA, 75 bp, synthetic construct
  source 1..75: mol_type = other DNA
cggggatcattaatgtggtccgtgattttaatgccgatgtcagtctggccccggcagccgtcagtctctatctcg

SEQ ID NO: 608701 - DNA, 75 bp, synthetic construct
  source 1..75: mol_type = other DNA
ccgattgaaaacattaacgttgattcattcctgaaagtacgtaagcaagtacgccagatggatttgcattcaaac

SEQ ID NO: 608702 - DNA, 75 bp, synthetic construct
  source 1..75: mol_type = other DNA
acagaagcctactaatttcagaattaaggcaactggcgagacgatttacggtaaaaacgttactttgacatggga

SEQ ID NO: 608703 - DNA, 75 bp, synthetic construct
  source 1..75: mol_type = other DNA
tactctgaacaacgtcacgattaactctagctgtgttattaagggtatgctcgaagctactcaggttaagggtga

SEQ ID NO: 608704 - DNA, 75 bp, synthetic construct
  source 1..75: mol_type = other DNA
ttttgtctatcaccgccacagaatataattctcagatttacacagatctggattatgcggctaaaccggacaata

SEQ ID NO: 608705 - DNA, 75 bp, synthetic construct
  source 1..75: mol_type = other DNA
atgggaattgaagtattagtaggtgcggttattgcgggtgcatctgctgggatggctgctgctgcaacattctct

SEQ ID NO: 608706 - DNA, 75 bp, synthetic construct
  source 1..75: mol_type = other DNA
gctattgaggctagcactaacggcgtggaccagattttccattatctgacaaatacaaaatatggtcttagtgta

SEQ ID NO: 608707 - DNA, 75 bp, synthetic construct
  source 1..75: mol_type = other DNA
agaaagtctggaggcggggcaaggttttaccgataacgaagtgacgctggtgatcgacggtcgctcgcatatcct

SEQ ID NO: 608708 - DNA, 75 bp, synthetic construct
  source 1..75: mol_type = other DNA
ggagaaaaacgtccgccgactggtaccgtttgaagatctgcccgatgaagaagtgggtagccgcgaactggacga

SEQ ID NO: 608709 - DNA, 75 bp, synthetic construct
  source 1..75: mol_type = other DNA
cgaccgtaacggtctgcgtccggcgcgctacgtcatcaccaaagataagctcatcacctgcgcctctgaagtcgg

SEQ ID NO: 608710 - DNA, 75 bp, synthetic construct
  source 1..75: mol_type = other DNA
gcaggatctgctgaatctgtcgaaacgtgcctggctggcgcgtaagcccatcagccagggcggcctgctgaaata

SEQ ID NO: 608711 - DNA, 75 bp, synthetic construct
  source 1..75: mol_type = other DNA
acataacggtgaaatcaacaccatcaccggtaaccgtcagtgggcacgtgcccgtacttataaattccagacgcc

SEQ ID NO: 608712 - DNA, 75 bp, synthetic construct
  source 1..75: mol_type = other DNA
aaccacgctcgaagcgacggtcaaagagctgtgcgacaaagccgaaaaaatggtacgtagcggcaccgtgctgct

SEQ ID NO: 608713 - DNA, 75 bp, synthetic construct
  source 1..75: mol_type = other DNA
tcgccactaaatttgcgctggttaaaccgaagtccagtgatgtaaaagcactgctgggtcaccgtagtcgtagcg

SEQ ID NO: 608714 - DNA, 75 bp, synthetic construct
  source 1..75: mol_type = other DNA
ttaatcaccatcgcaggctatgacggtggcaccggcgcaagcccgctgtcgtcagtgaaatacgcaggttgcccg

SEQ ID NO: 608715 - DNA, 75 bp, synthetic construct
  source 1..75: mol_type = other DNA
ccggcgggctggcgtccgcgtgatatggagcgccgtctgtttatcgcccgtcgccgcattgaaaagcgtctcgaa

SEQ ID NO: 608716 - DNA, 75 bp, synthetic construct
  source 1..75: mol_type = other DNA
tccaccatcgcctcttaccgctgctcgaaactgtttgaagcggtcggtctgcacgatgatgtagtgggcctgtgc

SEQ ID NO: 608717 - DNA, 75 bp, synthetic construct
  source 1..75: mol_type = other DNA
acgcttcgataccgctgcgatgtctatcggcgcgttaagcccggaagcccacgaggcgctggcggaagcgatgaa

SEQ ID NO: 608718 - DNA, 75 bp, synthetic construct
  source 1..75: mol_type = other DNA
atgacgggcggtattgtctgtattctgggtaaaaccggcgttaacttcggtgcgggcatgaccggcggcttcgct

SEQ ID NO: 608719 - DNA, 75 bp, synthetic construct
  source 1..75: mol_type = other DNA
tggcgcagccgttccgctatctggcgcacaacggcgaaatcaacactatcaccggtaaccgtcagtgggcgcgcg

SEQ ID NO: 608720 - DNA, 75 bp, synthetic construct
  source 1..75: mol_type = other DNA
actatcacggcctgccgttcaaggtgacgaattactttgagtttatcgcccgtgaaacccgcgagctgatggcac

SEQ ID NO: 608721 - DNA, 75 bp, synthetic construct
  source 1..75: mol_type = other DNA
aagcgatgaatagcatcggcggtaactcgaactccggtgaaggcggcgaagaccggcgcgctatcacgaggcgct

SEQ ID NO: 608722 - DNA, 75 bp, synthetic construct
  source 1..75: mol_type = other DNA
taaaggtctgtgtatgccgacggatctgccgcgcttttatctggatcttgcggacctgcgtctggaatcggccat

SEQ ID NO: 608723 - DNA, 75 bp, synthetic construct
  source 1..75: mol_type = other DNA
gctggactccgtaattcgcgtactgggcgaaaacggtcaggaagcggtcggttcgatgggcgacgacaccccatt

SEQ ID NO: 608724 - DNA, 75 bp, synthetic construct
  source 1..75: mol_type = other DNA
ccgttaccggaactgttgagctacttctcattaaatatcgagctgatgcaagaaagtctggaggcggggcaaggt

SEQ ID NO: 608725 - DNA, 75 bp, synthetic construct
  source 1..75: mol_type = other DNA
tcacacgaaaaacaggtacgccgttggcggctttaattaagtcagttgcaaatggttttgaagaacgctcattta

SEQ ID NO: 608726 - DNA, 75 bp, synthetic construct
  source 1..75: mol_type = other DNA
cctgattggccgtaccgacctgctcaaagagctggacggtttcaccgccaaacagcagaagctggaactgtctcg

SEQ ID NO: 608727 - DNA, 75 bp, synthetic construct
  source 1..75: mol_type = other DNA
gtaacggtctgcgtccggcgcgctacgtcatcaccaaagataagctcatcacctgcgcctctgaagtgggcatct

SEQ ID NO: 608728 - DNA, 75 bp, synthetic construct
  source 1..75: mol_type = other DNA
acgactacttccgccagcaatttgcccaggtgactaacccgccaatcgacccgctgcgtgaagcgcatgttatgt

SEQ ID NO: 608729 - DNA, 75 bp, synthetic construct
  source 1..75: mol_type = other DNA
tctgattggtcgcaccgacctgctgaaagagctggacggtttcaccgccaaacagcagaaactggcgctgtcgaa

SEQ ID NO: 608730 - DNA, 75 bp, synthetic construct
  source 1..75: mol_type = other DNA
cgcacgctgcaacaggcggtacaaagcggcgagtatagcgactatcaggaatacgcgaagctggttaatgagcgt

SEQ ID NO: 608731 - DNA, 75 bp, synthetic construct
  source 1..75: mol_type = other DNA
atcggtgaaatacgcaggctgtccgtgggaactcggcctggtggaaacccaacaggcgctggttgccaacggctt

SEQ ID NO: 608732 - DNA, 75 bp, synthetic construct
  source 1..75: mol_type = other DNA
aaccacgctcgaagcgacggtcaaagagctgtgcgacaaagcagaacagatggtgcgtagcggcaccgtgctgct

SEQ ID NO: 608733 - DNA, 75 bp, synthetic construct
  source 1..75: mol_type = other DNA
catcaatactcatcagtggcctggcaaagcggcgattggtcgtctgaaaagtgaggaactggcgcaatataattt

SEQ ID NO: 608734 - DNA, 75 bp, synthetic construct
  source 1..75: mol_type = other DNA
ccagcgaactggggggcgcccgcttctcgttcagctggccactgtggcacaacatcccgcaatttacctctgcct

SEQ ID NO: 608735 - DNA, 75 bp, synthetic construct
  source 1..75: mol_type = other DNA
gtgtacaaatttaccgccgaacgcgcgggcaaacagtcgctggatgatttgatgaacagttcgctgtacctgatg

SEQ ID NO: 608736 - DNA, 75 bp, synthetic construct
  source 1..75: mol_type = other DNA
ctaaaccagccaatatctggagatgggtttcgtccaatagctttgccaacagcccaaaagatcatggaaaagtcg

SEQ ID NO: 608737 - DNA, 75 bp, synthetic construct
  source 1..75: mol_type = other DNA
tgttacgtcttcgcagggaagggcatattaacgggcaggaagttcctgaaattatcctgcttaattcacatgatg

SEQ ID NO: 608738 - DNA, 75 bp, synthetic construct
  source 1..75: mol_type = other DNA
taaccatccagcccggtggcttaattaatgataagagtatcggttcgggtggtgcagtgtatctggatgttaact

SEQ ID NO: 608739 - DNA, 75 bp, synthetic construct
  source 1..75: mol_type = other DNA
gatgaaaacggtaatgaacagacttggacgggtcagggccgtactcctaaagtgatcgctgctgctattgaagca

SEQ ID NO: 608740 - DNA, 75 bp, synthetic construct
  source 1..75: mol_type = other DNA
atcaatatcatcaataagttacgtgatgaaggtttccagccattctttgcctgtcagagtcgggttcgtgatttg

SEQ ID NO: 608741 - DNA, 75 bp, synthetic construct
  source 1..75: mol_type = other DNA
ttacgtcttcgcagggaagggcatattaacgggaaagaagttcctgaaattatcctgcttaattcacatgatggt

SEQ ID NO: 608742 - DNA, 75 bp, synthetic construct
  source 1..75: mol_type = other DNA
tccgcactggcaggatatgttaaaactggaagcagcggcgcaacgatttggcgatgggcatctcaatgagcgtat

SEQ ID NO: 608743 - DNA, 75 bp, synthetic construct
  source 1..75: mol_type = other DNA
atggatttaaatctctctttcgatctgcgtgtcgagccactgagtaaataccatcttgatgatatttccatgcac

SEQ ID NO: 608744 - DNA, 75 bp, synthetic construct
  source 1..75: mol_type = other DNA
ttagcgaaccagacctgccgttgtggctgtcaacgcatctggcagacattcaggcagtaacgcccgataaaacgg

SEQ ID NO: 608745 - DNA, 75 bp, synthetic construct
  source 1..75: mol_type = other DNA
aatccagcgtttgttgcacaggcacaacaggcgttttccggtcttaatgagcagcaacgtaacgatatgggcgat

SEQ ID NO: 608746 - DNA, 75 bp, synthetic construct
  source 1..75: mol_type = other DNA
tccctgcattttctctgcacgcttttctactgactcgcgcaactctctcagttactggtgcctccctgttaacgc

SEQ ID NO: 608747 - DNA, 75 bp, synthetic construct
  source 1..75: mol_type = other DNA
gaataaagggatgtctcgggaagacgttgcagaggtgacagctttatctcttgcagagattgataagctaattaa

SEQ ID NO: 608748 - DNA, 75 bp, synthetic construct
  source 1..75: mol_type = other DNA
caagaattcgccctgcgtcttctaagtaaaggaatgtctcgggaagacgttgcagagatggcaaatttacctctt

SEQ ID NO: 608749 - DNA, 75 bp, synthetic construct
  source 1..75: mol_type = other DNA
ttgatggtaaatccattaccgaaacctacactgctaaggtcgcagtaaaaccaggtgaactggtaaaactggacg

SEQ ID NO: 608750 - DNA, 75 bp, synthetic construct
  source 1..75: mol_type = other DNA
tacgctaaaagcaatgcagagagttcgcaaacttgaagcaccagctagaaaaggaaaacttgagccaaaagattg

SEQ ID NO: 608751 - DNA, 75 bp, synthetic construct
  source 1..75: mol_type = other DNA
aaccagggaatgccggtatcaaaaaccggtgccttaccgcttggcgataccccatccgtacaacgctttctggtg

SEQ ID NO: 608752 - DNA, 75 bp, synthetic construct
  source 1..75: mol_type = other DNA
tcatggaggccatgaagcacatcaatgactggcttggcgaagaggtgatccgctttaacccttacgcactgttag

SEQ ID NO: 608753 - DNA, 75 bp, synthetic construct
  source 1..75: mol_type = other DNA
gtgaagataatgtggtgaagttacaagattctaggtttatacgtaaagttcattttttacattttattaactctt

SEQ ID NO: 608754 - DNA, 75 bp, synthetic construct
  source 1..75: mol_type = other DNA
gcagcaatcaggctggcgaagcacttcaggcgagagggcaggatattagccgagcaaatgcgttaacgtcagcat

SEQ ID NO: 608755 - DNA, 75 bp, synthetic construct
  source 1..75: mol_type = other DNA
gtataggtaaacacattgattacatggcaaagcccgaaactaagttaaatgactttaatagagaggcgagcaaga

SEQ ID NO: 608756 - DNA, 75 bp, synthetic construct
  source 1..75: mol_type = other DNA
ggctgccgctactgccacatggcttgtccgtacggcgcgccacagtacaatgctgaaaaagggcacatgacgaag

SEQ ID NO: 608757 - DNA, 75 bp, synthetic construct
  source 1..75: mol_type = other DNA
gttatcaaacctaacgccaacagccgcccgaccggcgataccactggttatctggctaatccggaggaagtgtaa

SEQ ID NO: 608758 - DNA, 75 bp, synthetic construct
  source 1..75: mol_type = other DNA
gcatattaacgggaaagaagttcctgaaattatcctgcttaattcacatgatggttcatccagttatcagatgat

SEQ ID NO: 608759 - DNA, 75 bp, synthetic construct
  source 1..75: mol_type = other DNA
attacaaaacgttgccagatggcaaaccgttgcctctcagcaccgaacagatgaagcagattgaagatctgaccc

SEQ ID NO: 608760 - DNA, 75 bp, synthetic construct
  source 1..75: mol_type = other DNA
ttaactcgtcgcgtcgaggcagtaaaagccgtacagcaacaggcacaggcccgcgaggaagtggaagatgcagtg

SEQ ID NO: 608761 - DNA, 75 bp, synthetic construct
  source 1..75: mol_type = other DNA
gtaatattcacgcccaggtcacggcgcaactggacttcgccagtaaagaacaaacggaagaacagtatcgcccta

SEQ ID NO: 608762 - DNA, 75 bp, synthetic construct
  source 1..75: mol_type = other DNA
gcaccggggaaatgtggtggaaagagtgattgaaggggcttacgaggtggtgggcgtgtttgaccggattgagga

SEQ ID NO: 608763 - DNA, 75 bp, synthetic construct
  source 1..75: mol_type = other DNA
tcagcggcgtattgaagcgatcctgtcaccagttgtcggcaacggcaatattcacgctcaggtgacggcacaact

SEQ ID NO: 608764 - DNA, 75 bp, synthetic construct
  source 1..75: mol_type = other DNA
aaaccgtacagcaacaggcacaaactcgccaggaagtggaagatgcggtggaagtgcgcctgagcaaagatgaac

SEQ ID NO: 608765 - DNA, 75 bp, synthetic construct
  source 1..75: mol_type = other DNA
atgaatattccttaccgcttcagcgaagccagcggcgctattgaagttccggcagataaagttcacgaactgcgt

SEQ ID NO: 608766 - DNA, 75 bp, synthetic construct
  source 1..75: mol_type = other DNA
aaagcggtggagaactgccgttctggcaacaacaggtatttatcgatcagttgctgagcgccggtcgctggttgc

SEQ ID NO: 608767 - DNA, 75 bp, synthetic construct
  source 1..75: mol_type = other DNA
agtgacgagcaacatttatttggcagggctgcactgatggtcaggtatgaggatgaaaataaaacgccagtgacg

SEQ ID NO: 608768 - DNA, 75 bp, synthetic construct
  source 1..75: mol_type = other DNA
tcagcggcgtattgaagcgatcctgtcgcctattgtcggcaacggcaatattcacgcccaggtaacggcacaact

SEQ ID NO: 608769 - DNA, 75 bp, synthetic construct
  source 1..75: mol_type = other DNA
tcgcctgcgtgcgaatccgaaaattccattgattgttgccggttccgcggcagtggcggtcatggtcgcactgat

SEQ ID NO: 608770 - DNA, 75 bp, synthetic construct
  source 1..75: mol_type = other DNA
ctaacacgtcgcgccgaggcggtgaaagctgtgcagcaacaggcgcaggcccgcgaggaagtggaagatgcggtg

SEQ ID NO: 608771 - DNA, 75 bp, synthetic construct
  source 1..75: mol_type = other DNA
gcaccggggaaatgtggtggagaaagtcattgaaggggcttacgaggtggtgggcgtgtttgaccggattgagga

SEQ ID NO: 608772 - DNA, 75 bp, synthetic construct
  source 1..75: mol_type = other DNA
agtgacgaccaacatttatttggcagagctgcactgatggacaggtaggaagatgaaaataaaacgccagtgacg

SEQ ID NO: 608773 - DNA, 75 bp, synthetic construct
  source 1..75: mol_type = other DNA
agtgacgatcaacatttatttggcagagctgcagtgatggtcaggtaggaagatgaaaataaaacgccagtgacg

SEQ ID NO: 608774 - DNA, 75 bp, synthetic construct
  source 1..75: mol_type = other DNA
agtgacgatcaacatttatttggcagagctgcattgatggacaggtaggaagatgaaaataaaacgccagtgacg

SEQ ID NO: 608775 - DNA, 75 bp, synthetic construct
  source 1..75: mol_type = other DNA
tttggcgaaatccgcgttccacataaaggtgatattgtcgggcaggttatcgagggagcgtatgaagtgctcggt

SEQ ID NO: 608776 - DNA, 75 bp, synthetic construct
  source 1..75: mol_type = other DNA
ggcctggtgtgcgggaataattttggtgaaatccgcattccgcataaaggcgatattgtcgggcaggttatcgag

SEQ ID NO: 608777 - DNA, 75 bp, synthetic construct
  source 1..75: mol_type = other DNA
agtgacgagcaacatttatttggcagagctgcagtgatggacaggtaggaagatgaaaataaaacgccagtgacg

SEQ ID NO: 608778 - DNA, 75 bp, synthetic construct
  source 1..75: mol_type = other DNA
agtgacgaacaacatttatttggcagagctgcaatgatggacaggtaggaagatgaaaataaaacgccagtgacg

SEQ ID NO: 608779 - DNA, 75 bp, synthetic construct
  source 1..75: mol_type = other DNA
tttaccaaaccgaatattgtgatcaaacctaacgccaacagccgcccaaccggggataccactggctatctggca

SEQ ID NO: 608780 - DNA, 75 bp, synthetic construct
  source 1..75: mol_type = other DNA
gcaccggggaaatgtggtggagacagtaattgaaggggcttacgaggtggtgggcgtgtttgaccggattgagga

SEQ ID NO: 608781 - DNA, 75 bp, synthetic construct
  source 1..75: mol_type = other DNA
agtgacgaacaacatttatttggcagagctgcagtgatgggcaggtaggaagatgaaaataaaacgccagtgacg

SEQ ID NO: 608782 - DNA, 75 bp, synthetic construct
  source 1..75: mol_type = other DNA
agtgacgaacaacatttatttggcagagctgcactgatggccaggtaggaagatgaaaataaaacgccagtgacg

SEQ ID NO: 608783 - DNA, 75 bp, synthetic construct
  source 1..75: mol_type = other DNA
agtgacgaacaacatttatttggcagagctgcattgatggtcaggtaggaagatgaaaataaaacgccagtgacg

SEQ ID NO: 608784 - DNA, 75 bp, synthetic construct
  source 1..75: mol_type = other DNA
tcagattgtgaagcgcaaaggacggctgtatgtcatttgcaaatctaatcctcgttttaaagctgttcagggacg

SEQ ID NO: 608785 - DNA, 75 bp, synthetic construct
  source 1..75: mol_type = other DNA
cgccaaaaaacaggtccagaagtgggagcgtgtctgtgctgcactacgtgagctgaataaacaccgggaaattgt

SEQ ID NO: 608786 - DNA, 75 bp, synthetic construct
  source 1..75: mol_type = other DNA
agttaaacatgcagataataccctgaccttcggtccgcgtgatggttacgtagacggttgggcacaggctggtac

SEQ ID NO: 608787 - DNA, 75 bp, synthetic construct
  source 1..75: mol_type = other DNA
cgctatctggccttggataagcaggttttttgccgcgaacctggtgccggttctggttacaagctggtggtgtct

SEQ ID NO: 608788 - DNA, 75 bp, synthetic construct
  source 1..75: mol_type = other DNA
tttcaagtttgcggcttgcctcactgggcgtttaaagggcgctactattgaagtctcgcagagcatggagtttat

SEQ ID NO: 608789 - DNA, 75 bp, synthetic construct
  source 1..75: mol_type = other DNA
tcttttggctgagctcgtagccattcgctatctggcgctggacaaacaggttttttgcagagagccaggtgctgg

SEQ ID NO: 608790 - DNA, 75 bp, synthetic construct
  source 1..75: mol_type = other DNA
gtttcgatgccgtacagggcaaacagctggtgctttcgccggatgcgcgcgacggttcgctgaaagtgcatcagg

SEQ ID NO: 608791 - DNA, 75 bp, synthetic construct
  source 1..75: mol_type = other DNA
gcttcgatgccgtgcagggcaaacaactggtgctttcgccggatgcgcgtgatggttcattgaaagtgcatcagg

SEQ ID NO: 608792 - DNA, 75 bp, synthetic construct
  source 1..75: mol_type = other DNA
cactctgagtacaacccaagcagcaccgagcgtctgcatctgtatcagatctggatcatgcctgaagaaaacggc

SEQ ID NO: 608793 - DNA, 75 bp, synthetic construct
  source 1..75: mol_type = other DNA
tctctcatcctgttgaccatcagctgcctgcgggtatcactgctgaatgtccgattcagactgaaatcgtgctga

SEQ ID NO: 608794 - DNA, 75 bp, synthetic construct
  source 1..75: mol_type = other DNA
gggcagggcttcggcactcacccacataaagatatggaaattttgacctacgtgctggaaggtactgttgagcat

SEQ ID NO: 608795 - DNA, 75 bp, synthetic construct
  source 1..75: mol_type = other DNA
atatggaactgtaccgctgggcgttgctgaaagatgagcagtcggtgcatcagtttgccgctgaacgccgcgtct

SEQ ID NO: 608796 - DNA, 75 bp, synthetic construct
  source 1..75: mol_type = other DNA
atgtggatggtggcgacgttcattgtggttgccagcagttttgtccggctggtaggcgaaggtaaagacctggtt

SEQ ID NO: 608797 - DNA, 75 bp, synthetic construct
  source 1..75: mol_type = other DNA
tgcggctggtcggtggtacagcccggtgattccggctatgcgccgttgattaatgaactcagcggccagagcgcc

SEQ ID NO: 608798 - DNA, 75 bp, synthetic construct
  source 1..75: mol_type = other DNA
gaacagagccgggaagtggactgggtgggatcgtctttttacctcactacaccgggttattacgaccacgatcat

SEQ ID NO: 608799 - DNA, 75 bp, synthetic construct
  source 1..75: mol_type = other DNA
gagcaaagccgggaagtggactgggtgggatcgtctttttacctcgccacgctaggctattacgaccgcgatcac

SEQ ID NO: 608800 - DNA, 75 bp, synthetic construct
  source 1..75: mol_type = other DNA
gttaccagcgaatgcgcggccacgaggttaatttcatctgtgccgacgatgcccacggtacgccaatcatgctga

SEQ ID NO: 608801 - DNA, 75 bp, synthetic construct
  source 1..75: mol_type = other DNA
cgtcagttgtctgagcttatctatactcgcctgaaagagaacggttttattaaaaaccgcactatctctcagttg

SEQ ID NO: 608802 - DNA, 75 bp, synthetic construct
  source 1..75: mol_type = other DNA
agcgaacgaaatatgcaggtatcgcagaacgggcgcgtttaccccggctatggcggcaatgtcgatggtacgctc

SEQ ID NO: 608803 - DNA, 75 bp, synthetic construct
  source 1..75: mol_type = other DNA
ctgatggctaccagcgccataacaacagcggtgggactgggaatattaatcatcgcccggatcgcctacgggctg

SEQ ID NO: 608804 - DNA, 75 bp, synthetic construct
  source 1..75: mol_type = other DNA
gcccgcgtttcgcgagccgtgccggtggttacactcgtattctgaagtgtggcttccgtgcaggcgataacgcgc

SEQ ID NO: 608805 - DNA, 75 bp, synthetic construct
  source 1..75: mol_type = other DNA
ggtgtgcttttcggtagcattttcctgtgggtgattatcggtgttgcgcctgtcgctgtagcaaaaatggcgtgg

SEQ ID NO: 608806 - DNA, 75 bp, synthetic construct
  source 1..75: mol_type = other DNA
gcctgctggtcgtctgggtggagcactcgctctacagcgccctgctggtgatcttcttcgcgggcgtgccgttcc

SEQ ID NO: 608807 - DNA, 75 bp, synthetic construct
  source 1..75: mol_type = other DNA
ggtgaacaacggcgtgtggcagacgctgaccgccaccgggctgttcgcccttcccctgctggcaaagctggttgc

SEQ ID NO: 608808 - DNA, 75 bp, synthetic construct
  source 1..75: mol_type = other DNA
tgtcgcaatagcactgattgtgatggcattatttgccgctatattatttaccatggtgtctgtatttatctggca

SEQ ID NO: 608809 - DNA, 75 bp, synthetic construct
  source 1..75: mol_type = other DNA
cacagacagaagttattgagcgttcaggtgaaaaagatggacgtaaatgggtttcacgtgagcagtatggctata

SEQ ID NO: 608810 - DNA, 75 bp, synthetic construct
  source 1..75: mol_type = other DNA
ctattcccttcgctgaagctggtaatttggtttcttttggtattaaacctactcatcctgagacggggtatggat

SEQ ID NO: 608811 - DNA, 75 bp, synthetic construct
  source 1..75: mol_type = other DNA
ttccccaagtcatgacttagaagatgtttgtcagctgatggcccacgatatcaaccaacgtcatgacgttgatac

SEQ ID NO: 608812 - DNA, 75 bp, synthetic construct
  source 1..75: mol_type = other DNA
gtggaacatgtattatcgatggtgattttcaacaagaattagcatacttaaaaaatgtaatactttataatgact

SEQ ID NO: 608813 - DNA, 75 bp, synthetic construct
  source 1..75: mol_type = other DNA
acaaatttacacgactcggggtgtcggaagtttgtatggcttgcgtctgaattgccgcccggaagtaacgatact

SEQ ID NO: 608814 - DNA, 75 bp, synthetic construct
  source 1..75: mol_type = other DNA
ttggagtgcttatcgcaacgtctgcaggcgtagcgcacgctgaaggtaaattttccctgggcgcaggcgtaggtg

SEQ ID NO: 608815 - DNA, 75 bp, synthetic construct
  source 1..75: mol_type = other DNA
atgaaagaagaattaacccttacagaaatttcccgtttatatggctattcattgaatggtggcggtaagcgatgg

SEQ ID NO: 608816 - DNA, 75 bp, synthetic construct
  source 1..75: mol_type = other DNA
agatggtcaaacaacatgatggcgtgattgtgaatgtttcctcagaaagtgggctggaaggctcagaaggccaaa

SEQ ID NO: 608817 - DNA, 75 bp, synthetic construct
  source 1..75: mol_type = other DNA
atgctggatgaatcaattcctcttaccaccggcgaatttgaagagtgggggaatccgcaggatccgcaatattac

SEQ ID NO: 608818 - DNA, 75 bp, synthetic construct
  source 1..75: mol_type = other DNA
atttctgcctttgtcagccgtgaacgggaaaaagaaaacaaccggcgtgtaaaagcaagttttgtgactacaggt

SEQ ID NO: 608819 - DNA, 75 bp, synthetic construct
  source 1..75: mol_type = other DNA
tctgccactgatcagaaaacattgaagaataagctaagggagatcatcgagcgtcgtttaaatgaagtaggggac

SEQ ID NO: 608820 - DNA, 75 bp, synthetic construct
  source 1..75: mol_type = other DNA
ctagcggaatattgcggaaaggtgaaacagactattttgcagatcgccacaatcgacgctttagaaattctcgaa

SEQ ID NO: 608821 - DNA, 75 bp, synthetic construct
  source 1..75: mol_type = other DNA
tcccgacagcaaagaagtcatgcgtgatgaaccctgggatctgatgctgtgcggccatactcacggcgggcaact

SEQ ID NO: 608822 - DNA, 75 bp, synthetic construct
  source 1..75: mol_type = other DNA
gtattttagcgatgaagagcgtgccagccagcaaagtatgttgatctgttgttcgcgtgcgaagggtaaacgcct

SEQ ID NO: 608823 - DNA, 75 bp, synthetic construct
  source 1..75: mol_type = other DNA
gataatcagtacagcaatgcgtattcattgttaagttcgccgcacgacacttcttgttatcagattgccgttcga

SEQ ID NO: 608824 - DNA, 75 bp, synthetic construct
  source 1..75: mol_type = other DNA
gagtttgtggtgccggaagagatgactattttgcaggttattgaaaataataaagccgcgaaagtggaatgttta

SEQ ID NO: 608825 - DNA, 75 bp, synthetic construct
  source 1..75: mol_type = other DNA
ccattaatattggcgaactgacatgtcaggatgaagacctgtccggagagctctggcttgccgggatgcttatct

SEQ ID NO: 608826 - DNA, 75 bp, synthetic construct
  source 1..75: mol_type = other DNA
aaataatgaactatgacccaaatctgacgtcatgcggacgcatggcaaaacaaaccgttcgattaactttcgggc

SEQ ID NO: 608827 - DNA, 75 bp, synthetic construct
  source 1..75: mol_type = other DNA
ctctaaattacaacattacaccacttacggctaaagctctgcttatacatcatgcggagagcaataatatcaatc

SEQ ID NO: 608828 - DNA, 75 bp, synthetic construct
  source 1..75: mol_type = other DNA
aaacccgcatgagcggcggtggcatcacttatcttcttgaaaaagcgcgcgagaaatcgaacgcaaaaatgattg

SEQ ID NO: 608829 - DNA, 75 bp, synthetic construct
  source 1..75: mol_type = other DNA
cgatcatggcccgcaaatgacggcaatccgcgacggtgtccggggcaaagataaactggatgtgcccattaagtt

SEQ ID NO: 608830 - DNA, 75 bp, synthetic construct
  source 1..75: mol_type = other DNA
ccttcccacttcaactgtttggtttccattacaaatcccgtactcactcgacctacggcaatattgatctcctga

SEQ ID NO: 608831 - DNA, 75 bp, synthetic construct
  source 1..75: mol_type = other DNA
gctctgaatgacgcggtgagaagtgaagcagcgcgtctgagcatcgcctccgacacgctacactttgaacaattt

SEQ ID NO: 608832 - DNA, 75 bp, synthetic construct
  source 1..75: mol_type = other DNA
gaaagttgcgcatttcgtgatgagctagtccagcatccgcaggctgagaaagttcacttgcatcactcatcaacc

SEQ ID NO: 608833 - DNA, 75 bp, synthetic construct
  source 1..75: mol_type = other DNA
tacaggtgagtcaggtggaaccgcttaccgaacaggtgaaacgcttcacgctggtggcaaccgatggcaaaccgc

SEQ ID NO: 608834 - DNA, 75 bp, synthetic construct
  source 1..75: mol_type = other DNA
tgaagagactgttgcagcgatggaaaaattgatcgcccagggaaaaatccgccgctggggcgtttctaaccttga

SEQ ID NO: 608835 - DNA, 75 bp, synthetic construct
  source 1..75: mol_type = other DNA
ctgctggctaacgcacggattaacaaccatatcggccgaacccgaaccgatgaaaacggcgagtttgtcatggat

SEQ ID NO: 608836 - DNA, 75 bp, synthetic construct
  source 1..75: mol_type = other DNA
tagctgggcggcaacgggatatggatacgataatcaggcggtgggtgaaacccgtctgacgctgccgcttggggg

SEQ ID NO: 608837 - DNA, 75 bp, synthetic construct
  source 1..75: mol_type = other DNA
gggccggtattcagcgctataacaacggcgacagcaacgccaatacagggaaatatatcgctctcgatctctcgc

SEQ ID NO: 608838 - DNA, 75 bp, synthetic construct
  source 1..75: mol_type = other DNA
ggtatcggcctgcgtgtaagccacggttgtgtgcgtctgcgtaacgaagatatcaaattcctgttcgagaaagtg

SEQ ID NO: 608839 - DNA, 75 bp, synthetic construct
  source 1..75: mol_type = other DNA
ctgcaactaaacgccctcgttctttacgtcaaattttggccgaattatttagcggtcgccttctgtcacgtcttg

SEQ ID NO: 608840 - DNA, 75 bp, synthetic construct
  source 1..75: mol_type = other DNA
gcgtcagttgttgcgaacgtgggggcgattgtaacctccagttcttcatgtgaagcgaaaaatgcacggccttta

SEQ ID NO: 608841 - DNA, 75 bp, synthetic construct
  source 1..75: mol_type = other DNA
tccgcaggccttcagtcaggcgcttcaggacggcatgagcgtcccgctctatattcatctcgccggtagccaggg

SEQ ID NO: 608842 - DNA, 75 bp, synthetic construct
  source 1..75: mol_type = other DNA
tacagaatagtaactaatctcgaacttgcaggtagtcaggagcctggagtgaagactgtagtaacgccacctcaa

SEQ ID NO: 608843 - DNA, 75 bp, synthetic construct
  source 1..75: mol_type = other DNA
gtcacacttgatggtatttacagatactggatacagtatccggaagagtggcagacatcatctcaggggctgaga

SEQ ID NO: 608844 - DNA, 75 bp, synthetic construct
  source 1..75: mol_type = other DNA
tgcaaaatatgctggccagtgacagctcatggagcagcatcggcagcatcagcgccactctaccgggaggcttta

SEQ ID NO: 608845 - DNA, 75 bp, synthetic construct
  source 1..75: mol_type = other DNA
gttcaatgaggcccttaccatccccctgactgacaacgcgcagctggatctcagcttgcgccaactgctgctgca

SEQ ID NO: 608846 - DNA, 75 bp, synthetic construct
  source 1..75: mol_type = other DNA
atattcatctcgccggtagccagggtcgccaggacgatcagcgaatcggcagcgcttttatctggctggatgatg

SEQ ID NO: 608847 - DNA, 75 bp, synthetic construct
  source 1..75: mol_type = other DNA
caccgggttgtgttgtaccggaacgcacaggcgcacacaaataccgctataccatcaccgaaccctatacaggaa

SEQ ID NO: 608848 - DNA, 75 bp, synthetic construct
  source 1..75: mol_type = other DNA
gacctctatgaccagcaggaggaatcattacgtaagctcacccagacggccacgcggtatgtgttaaaactcgat

SEQ ID NO: 608849 - DNA, 75 bp, synthetic construct
  source 1..75: mol_type = other DNA
atttctcaccatgacgatgcgcccgtggctggcgaactttgagcagcagataaaaaacgccttgctggtggtctc

SEQ ID NO: 608850 - DNA, 75 bp, synthetic construct
  source 1..75: mol_type = other DNA
cactgcgtaagctgacgcagacggccacgcaatatgtgctcaggctcgacggctggatccagaaaaataaagggc

SEQ ID NO: 608851 - DNA, 75 bp, synthetic construct
  source 1..75: mol_type = other DNA
tggttatcatagcacatcatatttcatatcatatttcaaaagcttttttggtgtgacaccaaagcaattacaggc

SEQ ID NO: 608852 - DNA, 75 bp, synthetic construct
  source 1..75: mol_type = other DNA
attggtaccgtaaggatctggatacggtaccggaaggacatcaacgccaccagccggataaaggtcagtacgggg

SEQ ID NO: 608853 - DNA, 75 bp, synthetic construct
  source 1..75: mol_type = other DNA
tgccggaaaaacgccaatccttgaagggggcatggattacaggcagctggggatgagtaaccaggatgcggaatg

SEQ ID NO: 608854 - DNA, 75 bp, synthetic construct
  source 1..75: mol_type = other DNA
gaaagatggcatgatggcggcgggcgtagtcacgactgctgaatggctcgatagtgtgaagggtaagcaggcgct

SEQ ID NO: 608855 - DNA, 75 bp, synthetic construct
  source 1..75: mol_type = other DNA
gaaaaactcagaattgcaggccgtgctcggagtggcaaaagactccgccgaaatgaccgcactccgcaaacaggc

SEQ ID NO: 608856 - DNA, 75 bp, synthetic construct
  source 1..75: mol_type = other DNA
gcttatgcggtgattcagtgggggcgtgatggttttccggtggctttgcacccttacccgccgcagtcggtgaat

SEQ ID NO: 608857 - DNA, 75 bp, synthetic construct
  source 1..75: mol_type = other DNA
ggccgtgacggccagccgcaatccctgcatccgtatgcgccgggggcggttgttcctgagcgtatcggccagcat

SEQ ID NO: 608858 - DNA, 75 bp, synthetic construct
  source 1..75: mol_type = other DNA
tactgcggaatctctgccggcggtcatgaacgccatatcagttatcagcgaggcagtggcaacaatgccctgcta

SEQ ID NO: 608859 - DNA, 75 bp, synthetic construct
  source 1..75: mol_type = other DNA
cccgcgaacgcgaagggatgccgccgcgtgaaggtggcgacgaatacagccaggcatggaagcaggaagtgaagg

SEQ ID NO: 608860 - DNA, 75 bp, synthetic construct
  source 1..75: mol_type = other DNA
tatacagttaccagtaaaagttgcatatgaagagaataaagggaattatgacggtaaaaatggcggaggctggcg

SEQ ID NO: 608861 - DNA, 75 bp, synthetic construct
  source 1..75: mol_type = other DNA
gaaagggaagcaggagcacaggacgacggggaaccatatcagcctggtggaggggaagcacagcctggaggtgaa

SEQ ID NO: 608862 - DNA, 75 bp, synthetic construct
  source 1..75: mol_type = other DNA
actatcattctcaatggtaaaagtatccagattgaaggaaaagataaaataaatattttcggcgcagatattgat

SEQ ID NO: 608863 - DNA, 75 bp, synthetic construct
  source 1..75: mol_type = other DNA
ctgaagcatggcgtgatgactatgaagcaggaaaaactccggttgaagcttattgtgatgagtggggtgaggatg

SEQ ID NO: 608864 - DNA, 75 bp, synthetic construct
  source 1..75: mol_type = other DNA
cggtacgcaacgaccagacgctgaaggtgacgaacgaccggacggtgagcgtgagtcatgatgacggcctgtacg

SEQ ID NO: 608865 - DNA, 75 bp, synthetic construct
  source 1..75: mol_type = other DNA
ggctgcaaagcaaaccgaaggtggacgggccacagagcgccattgtcaccgggcctgcgggagaggaaatcttct

SEQ ID NO: 608866 - DNA, 75 bp, synthetic construct
  source 1..75: mol_type = other DNA
agacggttcaggtcgggaccagaaaagaagggggccacgaccagagtatcacggtggcgaacgaccggtgcatca

SEQ ID NO: 608867 - DNA, 75 bp, synthetic construct
  source 1..75: mol_type = other DNA
ttttcaaacaatttgctgcaatactcctctctacctttgctggccacctgtatgatcgtatgggattccagagta

SEQ ID NO: 608868 - DNA, 75 bp, synthetic construct
  source 1..75: mol_type = other DNA
gctttgtgttctccgccggatccggggcgatggaagcctatatcgaacgcgtgagccgcaatagcgggtttgaat

SEQ ID NO: 608869 - DNA, 75 bp, synthetic construct
  source 1..75: mol_type = other DNA
acgaccggacgacggacgtgaagcatgaccatacggagaccatcggtaacgaccagaagataagggtggtgaagg

SEQ ID NO: 608870 - DNA, 75 bp, synthetic construct
  source 1..75: mol_type = other DNA
atgagattttccgtatggcggctattgcttttatcttacttacggttttggtttggtttgcgaaaccgccgttta

SEQ ID NO: 608871 - DNA, 75 bp, synthetic construct
  source 1..75: mol_type = other DNA
cggcatcatgccactattgatttcacctttgataggacgttatggcaacaaaatagacatgcggttgttagtgac

SEQ ID NO: 608872 - DNA, 75 bp, synthetic construct
  source 1..75: mol_type = other DNA
gacaatatctggctttctgggagcatcaacagacgaaggcacctgggttatcacctcgtttggcgtagcaaatgc

SEQ ID NO: 608873 - DNA, 75 bp, synthetic construct
  source 1..75: mol_type = other DNA
ttaccgcaccatggaaggcttcggtattcacaccttccgcctgattaatgccgaagggaaggcaacgtttgtacg

SEQ ID NO: 608874 - DNA, 75 bp, synthetic construct
  source 1..75: mol_type = other DNA
atgagtaaaactgactatccggcatcagttgatcacaatgccgccatgattgaagaattgcgcgcagatcctgat

SEQ ID NO: 608875 - DNA, 75 bp, synthetic construct
  source 1..75: mol_type = other DNA
ctatagagctaacacgtaaaaatttacgtgctcagattgaaggtttgcgtgttgaggctgaagatctcattacaa

SEQ ID NO: 608876 - DNA, 75 bp, synthetic construct
  source 1..75: mol_type = other DNA
gagaaatgcttgagctctatcattcagcatatatcgaacttggacgaaaaatccgtcaatactcaaaaactaagg

SEQ ID NO: 608877 - DNA, 75 bp, synthetic construct
  source 1..75: mol_type = other DNA
gcgtcaactcggtgataacacagccgcgtcggctgatgatgctgccggtgctcagattattattgcaaaagccgg

SEQ ID NO: 608878 - DNA, 75 bp, synthetic construct
  source 1..75: mol_type = other DNA
aattgttacgaaagtcacgagacattagctaagatttttaaggcttcggtatcaacgattcaacgtaagattaaa

SEQ ID NO: 608879 - DNA, 75 bp, synthetic construct
  source 1..75: mol_type = other DNA
acccgaccatcacaacacttgcacaacttacatcggtagccggattacagttcactctcagcaaatccagtcact

SEQ ID NO: 608880 - DNA, 75 bp, synthetic construct
  source 1..75: mol_type = other DNA
cagcagccacagttgctgcagtctgccttgctgcatattttgctttacgaaatgaacgtaaaaagaaagcacttg

SEQ ID NO: 608881 - DNA, 75 bp, synthetic construct
  source 1..75: mol_type = other DNA
aaaacacggaacggccaacagcggcacaggccagagtgctggagtcagcgaaacgcgcggctgatgggttgcaga

SEQ ID NO: 608882 - DNA, 75 bp, synthetic construct
  source 1..75: mol_type = other DNA
gaaaattatgcacttaccaccaaccagggtgtacgcatcgccgatgatcaaaactccctacgcgccggtagccgt

SEQ ID NO: 608883 - DNA, 75 bp, synthetic construct
  source 1..75: mol_type = other DNA
tgtttgatgcctttgataacctgcccgccgttgttaatagtacgccagccattcagaccgccccgccggttaaaa

SEQ ID NO: 608884 - DNA, 75 bp, synthetic construct
  source 1..75: mol_type = other DNA
gaaaatttgcgatcgctacaccaccgccgatattgagaacatgaacgaaatgttcagcctgatggtgtgtgcgct

SEQ ID NO: 608885 - DNA, 75 bp, synthetic construct
  source 1..75: mol_type = other DNA
gcctgcggggctgccgggatgctgattgcgtatgcggagtgtctgctggaagccgatattaacccctccatgcat

SEQ ID NO: 608886 - DNA, 75 bp, synthetic construct
  source 1..75: mol_type = other DNA
tgttaaaaaggaatcgagcagtattgatacggaaacggcaaaaacgccgccggttggtcagggtggagggtatat

SEQ ID NO: 608887 - DNA, 75 bp, synthetic construct
  source 1..75: mol_type = other DNA
gctgagagcgatcgcggcttctcgctggcgcagaaaatggtggggcgtgcctgtggcgttaaaggcattcgtccg

SEQ ID NO: 608888 - DNA, 75 bp, synthetic construct
  source 1..75: mol_type = other DNA
ccgctgatcgatgcgctggatgatgccaaactggcgccaattgccgccaaagcactgtctcatacgctgctgatg

SEQ ID NO: 608889 - DNA, 75 bp, synthetic construct
  source 1..75: mol_type = other DNA
gtgaacttttactcttttcaggcggcagccagcgatcgtgggcgggtggtcgacgatatcaaaacgaataataaa

SEQ ID NO: 608890 - DNA, 75 bp, synthetic construct
  source 1..75: mol_type = other DNA
cggcgcagaaagcagcggatgcatattggggaaaagatgcaaacggtaagcaaatgacccgcgaagacgccttta

SEQ ID NO: 608891 - DNA, 75 bp, synthetic construct
  source 1..75: mol_type = other DNA
agcatgctggaacgggccgccgataatcaggatcgtgaattcagcgcacagatgcagctggcgctgggattgttt

SEQ ID NO: 608892 - DNA, 75 bp, synthetic construct
  source 1..75: mol_type = other DNA
tccgctgtctgcggtacagggtgagaagatcgacgaagtatttatcggttcttgcatgactaacatcggtcactt

SEQ ID NO: 608893 - DNA, 75 bp, synthetic construct
  source 1..75: mol_type = other DNA
tttacccgtacaaaggcgaagtacgtaaccacgaaaccaacgaactgctggcgaccttcgaactgaaaactgacg

SEQ ID NO: 608894 - DNA, 75 bp, synthetic construct
  source 1..75: mol_type = other DNA
tgaaaaacccgcccgcgggcgaagaagaattcctgttagatctgttaaccaaccgtgttccccctggcgtcgatg

SEQ ID NO: 608895 - DNA, 75 bp, synthetic construct
  source 1..75: mol_type = other DNA
acgcggcggtggtttgtgcctcggcggtaaaattgcaccaatcttctttaacacgatggaagacgcgggtgcact

SEQ ID NO: 608896 - DNA, 75 bp, synthetic construct
  source 1..75: mol_type = other DNA
taaactgctggatgcgcacaaaggtcagttgccgacccgcctgtgggtggcaccgccaacccgtatggacgccgc

SEQ ID NO: 608897 - DNA, 75 bp, synthetic construct
  source 1..75: mol_type = other DNA
tgccggatctgaaagttgagcaggcatttgaactgaccgatgcgtccgccgagcgttctgctgccggttgtacca

SEQ ID NO: 608898 - DNA, 75 bp, synthetic construct
  source 1..75: mol_type = other DNA
tgaagattgacgatatcaataagacctgcgatcgctggaaaaaagataccgaagcattacggcgcaatggggtga

SEQ ID NO: 608899 - DNA, 75 bp, synthetic construct
  source 1..75: mol_type = other DNA
tcggtttaccttcatcggtgaaatatgaatcagatggaggcccaggcatcgcgcggatcatggcttttttgatgg

SEQ ID NO: 608900 - DNA, 75 bp, synthetic construct
  source 1..75: mol_type = other DNA
actcgttgtcctcaatcagatagagcattttatcgtattgtacagtcagattttttgatacccggcgaggctctc

SEQ ID NO: 608901 - DNA, 75 bp, synthetic construct
  source 1..75: mol_type = other DNA
taggtggagtagggtagcagcacgccatttagtcgcagctccttatgtccgtcaggataatgccagacatcaata

SEQ ID NO: 608902 - DNA, 75 bp, synthetic construct
  source 1..75: mol_type = other DNA
ttaggatgtgttcaggctcaggggtatctgtaccagaaacccatgccattctccgcctgggataaaagtggaaaa

SEQ ID NO: 608903 - DNA, 75 bp, synthetic construct
  source 1..75: mol_type = other DNA
agcgaattaatgaacatttttatctcaatattgaacaactgcgtaaacaaggggtacggatatcgattgatgact

SEQ ID NO: 608904 - DNA, 75 bp, synthetic construct
  source 1..75: mol_type = other DNA
gaagccagacttgaagaagtattaacggcttataaagcagatatccctctgggcatgattagagaagaaaatgac

SEQ ID NO: 608905 - DNA, 75 bp, synthetic construct
  source 1..75: mol_type = other DNA
atgacatcagtaaataaaaacagaaaatccagggacgaaaacgagatagcaaagtacaacgaaaaagagctggcg

SEQ ID NO: 608906 - DNA, 75 bp, synthetic construct
  source 1..75: mol_type = other DNA
aaaagcgttttagttattccagtgatggtaggtgcatccgcgcggttcaggggcattcgacttcgcaggtcgcca

SEQ ID NO: 608907 - DNA, 75 bp, synthetic construct
  source 1..75: mol_type = other DNA
tctctaccacggtacggcaagccgtttccttgacgagataaaaaaacaggggctgattgcaggggagcgtcatta

SEQ ID NO: 608908 - DNA, 75 bp, synthetic construct
  source 1..75: mol_type = other DNA
aggcacggtgctgttcagcggcagcctttattgcctggcgctgtcccatctgcgtttgtgggcgtttgtcacacc

SEQ ID NO: 608909 - DNA, 75 bp, synthetic construct
  source 1..75: mol_type = other DNA
tcgccgccattagtggtttcatttttgtcgctctgggcgcttttggcgcgcacgtattaagtaaaactatgggtg

SEQ ID NO: 608910 - DNA, 75 bp, synthetic construct
  source 1..75: mol_type = other DNA
tcccgcaccttaagcatcctcaccgccagcagtgttccgctgctggaaggtattcagaccgctgccgccgtgtcg

SEQ ID NO: 608911 - DNA, 75 bp, synthetic construct
  source 1..75: mol_type = other DNA
agcgtctgtgtggttacggaaagcatgatgaccgtgaacacgtgcagtcgcttacagcacaactgcgtctggggc

SEQ ID NO: 608912 - DNA, 75 bp, synthetic construct
  source 1..75: mol_type = other DNA
acgggttgccagtggaatgcgctaaatgccaccggtatatgctcgtcaagctctgctcatcgccgatttcaggag

SEQ ID NO: 608913 - DNA, 75 bp, synthetic construct
  source 1..75: mol_type = other DNA
gccgtcagtcgcgaacgtcagacaggaatgcagatggtgcagtctgtgcttgagcgcatcggggaggtgaaatga

SEQ ID NO: 608914 - DNA, 75 bp, synthetic construct
  source 1..75: mol_type = other DNA
acgcagcaatatcactaccgcaaaagtggaacatggcgtcgatactgcgtggctggtcgatcaccacaccgaaga

SEQ ID NO: 608915 - DNA, 75 bp, synthetic construct
  source 1..75: mol_type = other DNA
aaatcttcgttgaagaagaaacacaagagccagagttccctgagcggcccgaaatttttacttggcttctttccc

SEQ ID NO: 608916 - DNA, 75 bp, synthetic construct
  source 1..75: mol_type = other DNA
taaaactacaccataagatcatttattcttatttgttaagtttatctggcacataccaaaaggtaacaccatctt

SEQ ID NO: 608917 - DNA, 75 bp, synthetic construct
  source 1..75: mol_type = other DNA
tgattgggatacgcctttaccgtgggagacggaagaaacacctgtttcatcaagtgaaaaggtagctaatgataa

SEQ ID NO: 608918 - DNA, 75 bp, synthetic construct
  source 1..75: mol_type = other DNA
cgatggccgcagacacattaggccaactttccaccctggtgccgcgcctgaacgaggcggtggcgcgggagcgcg

SEQ ID NO: 608919 - DNA, 75 bp, synthetic construct
  source 1..75: mol_type = other DNA
cattgcgacgccctgttcctgcgcgaatcggtgagcctcgacctgatgaagcgtagcgacatcgacacgtccaaa

SEQ ID NO: 608920 - DNA, 75 bp, synthetic construct
  source 1..75: mol_type = other DNA
gtaccgaataccggatccggagaatatgtttctgccgggacggctgaatcattgcctgcagtgatgaacgcggtt

SEQ ID NO: 608921 - DNA, 75 bp, synthetic construct
  source 1..75: mol_type = other DNA
cgatctggaaatgggcaaaattctcggtgcctgtgaactcaccgtcggtacgcgcctgcactccgccattatctc

SEQ ID NO: 608922 - DNA, 75 bp, synthetic construct
  source 1..75: mol_type = other DNA
ggctggtcgatcaccacacagaagacttcaccgccagctatgccgtccaacactggctggacgttgccgcacaac

SEQ ID NO: 608923 - DNA, 75 bp, synthetic construct
  source 1..75: mol_type = other DNA
cagcacatcagcgatcctgcccgttaccacgtggtgatggatgaactcaacgatctggaaatgggcaaaattctg

SEQ ID NO: 608924 - DNA, 75 bp, synthetic construct
  source 1..75: mol_type = other DNA
acaatgaaataaaaattgatacaatctcagaagaattaataaaaacaaatatatatataaatagcaaacttaatt

SEQ ID NO: 608925 - DNA, 75 bp, synthetic construct
  source 1..75: mol_type = other DNA
tgttcctttaatgtcaggatacaggaacaaagacaacttatctgtcacattcactaatgcttatccaggagaaat

SEQ ID NO: 608926 - DNA, 75 bp, synthetic construct
  source 1..75: mol_type = other DNA
cgtttataccgacatgaaggccagcttctttatatgaaagtagctgcattaggtacatattgccttgttgcttcg

SEQ ID NO: 608927 - DNA, 75 bp, synthetic construct
  source 1..75: mol_type = other DNA
tctgtgcgcacagtttgagttttgtcactcaaattaagcaacgccccgcagtgctcgcaacacatgcagggcgtc

SEQ ID NO: 608928 - DNA, 75 bp, synthetic construct
  source 1..75: mol_type = other DNA
aatagaggacgcatctgaagtgcgagagatacagacgacaacagagcttcatcgactggccgaaacactgaatct

SEQ ID NO: 608929 - DNA, 75 bp, synthetic construct
  source 1..75: mol_type = other DNA
cggcgcgtgctcttgctgtagaattcttccccgaccagcttgcggtgacccgtttacagacattcaccgcctatg

SEQ ID NO: 608930 - DNA, 75 bp, synthetic construct
  source 1..75: mol_type = other DNA
tgcattctgcttcagggcgaaaacgaaataaaccaatgggctgaccgtcattctgttgagcgcgctaccgttcag

SEQ ID NO: 608931 - DNA, 75 bp, synthetic construct
  source 1..75: mol_type = other DNA
gttaatttttcttgttcaacactggcatcaatcccatctataagctcgtgcgggaatcgaatatttttctttgct

SEQ ID NO: 608932 - DNA, 75 bp, synthetic construct
  source 1..75: mol_type = other DNA
gtgttcagctcgctggtgaaacttctgtcaatacatttgcagtagttctagagagcgatagtatgtctgccgctg

SEQ ID NO: 608933 - DNA, 75 bp, synthetic construct
  source 1..75: mol_type = other DNA
ggaaaacgcgcagctgctaatggggacaaaagccgcttttcagctctctaatgacgcggccgcgcatattggtga

SEQ ID NO: 608934 - DNA, 75 bp, synthetic construct
  source 1..75: mol_type = other DNA
aaagagaaagcgccccgttgccggagcgcctttgtgaacgaattacctacagcaccgcgatgtttgctatgtggg

SEQ ID NO: 608935 - DNA, 75 bp, synthetic construct
  source 1..75: mol_type = other DNA
ctgacggatgactgcgcccgaatgatcctttcgctgccagtcaccaatccggatgtaccacacgcagggcgtcgc

SEQ ID NO: 608936 - DNA, 75 bp, synthetic construct
  source 1..75: mol_type = other DNA
agacctccccgaaggcgcaagtacaggcagcgtttgaagaaattgcccggcgttcgatgcatgatctctcttttc

SEQ ID NO: 608937 - DNA, 75 bp, synthetic construct
  source 1..75: mol_type = other DNA
tctgaccggacatcagcagagcgcacgccaccatttgttgccctgaccggcatacgctgcagtaccgcgcatatc

SEQ ID NO: 608938 - DNA, 75 bp, synthetic construct
  source 1..75: mol_type = other DNA
gaacatggggcgcattgtcgttgacgtcgatggtgttactcttgctgaactgattaacgtggtctgcgataacgg

SEQ ID NO: 608939 - DNA, 75 bp, synthetic construct
  source 1..75: mol_type = other DNA
gtccgcttatgaggcggtggggactgacctgtttgaccagcaggaaggcgcactgcgtaagctcacacagacggc

SEQ ID NO: 608940 - DNA, 75 bp, synthetic construct
  source 1..75: mol_type = other DNA
cgctgcagtaccgcgcatatcacggcaaaagacaacgcctggctgtactcgctgtcgcatcagacgaatgacacc

SEQ ID NO: 608941 - DNA, 75 bp, synthetic construct
  source 1..75: mol_type = other DNA
atggggcgcattgtcgttgacgtcgatggtattgagcttgctgaactgattaacgtggtctgcgataacggtcac

SEQ ID NO: 608942 - DNA, 75 bp, synthetic construct
  source 1..75: mol_type = other DNA
gggcaaggcaagaagctgttccgctggcggctacccgaaggtaatccctatctgaggacggagaccagaaacacg

SEQ ID NO: 608943 - DNA, 75 bp, synthetic construct
  source 1..75: mol_type = other DNA
gacggtggtcagttaaatatcagcggtctggttgttgataatacctgtgaaactcgcgtagacggtggcaacaaa

SEQ ID NO: 608944 - DNA, 75 bp, synthetic construct
  source 1..75: mol_type = other DNA
gtcgatggtgttactctcgctgaactgattaacgtggtctgtgataatggccactcccttcgtattgttgatgaa

SEQ ID NO: 608945 - DNA, 75 bp, synthetic construct
  source 1..75: mol_type = other DNA
actcgctgtcacaccagaccagtgacttcggtgaatcagaatggattcattttaccggtaccggttatctgttac

SEQ ID NO: 608946 - DNA, 75 bp, synthetic construct
  source 1..75: mol_type = other DNA
attaaaaccatggatgcaacctcaaaaactgcaacttttgattttaaagcatcctatgttcgtgctgaaacaagc

SEQ ID NO: 608947 - DNA, 75 bp, synthetic construct
  source 1..75: mol_type = other DNA
atgtctaaaaaattaggttttgccctgtctggtcttatgctggcaatggttgcaggtaatgcttctgctgcactg

SEQ ID NO: 608948 - DNA, 75 bp, synthetic construct
  source 1..75: mol_type = other DNA
cctcagcagactgcacgccaccatttgttgcccttaccggcatacgctgcagtaccgcacatatcacggaaacgg

SEQ ID NO: 608949 - DNA, 75 bp, synthetic construct
  source 1..75: mol_type = other DNA
tacgtaccgatgcgtggtcgtatccggttctgcgacttaaacgactgggactgtcaaaaacgttccgtcgtctgg

SEQ ID NO: 608950 - DNA, 75 bp, synthetic construct
  source 1..75: mol_type = other DNA
tcgtctggttgtcacgcttagccggtgttatggcgtccgtctcattcatctggttgccagcgccgtatttctgcc

SEQ ID NO: 608951 - DNA, 75 bp, synthetic construct
  source 1..75: mol_type = other DNA
tcgtctggttgtcacgcttagccggagttatggcgtccgtctcattcatctggttgccagcgccggatttctgcc

SEQ ID NO: 608952 - DNA, 75 bp, synthetic construct
  source 1..75: mol_type = other DNA
tcgtctggttgtcacccttagccggcgttatggcgtccgtctcattcatctggttgccagcgccgaatttctgcc

SEQ ID NO: 608953 - DNA, 75 bp, synthetic construct
  source 1..75: mol_type = other DNA
tctgcgataacggctactcccttcgtgttgttgatgaatctgaccagacctcagcagaatgcacgccaccattta

SEQ ID NO: 608954 - DNA, 75 bp, synthetic construct
  source 1..75: mol_type = other DNA
tctgaccgggcatcagcagagcgcacgccaccatctgcggcccttaccggcatacgctgcagtaccgcacatatc

SEQ ID NO: 608955 - DNA, 75 bp, synthetic construct
  source 1..75: mol_type = other DNA
tcgtctggttgtcacgcttagccggggttatggcgtccgtctcattcatctggttgccagcgccgaatttctgcc

SEQ ID NO: 608956 - DNA, 75 bp, synthetic construct
  source 1..75: mol_type = other DNA
tgtttactctttcacaccagaatgaagactttggtgagtcggaatggattagttacaccgggtcgggttatctgc

SEQ ID NO: 608957 - DNA, 75 bp, synthetic construct
  source 1..75: mol_type = other DNA
tgattaacaaagtcgctgaaaacggttattcactccatgtggtggacgactccgaccaacagtcaacctgcacac

SEQ ID NO: 608958 - DNA, 75 bp, synthetic construct
  source 1..75: mol_type = other DNA
cggaaaaggataacgcctggctgtactcgctgtcgcatcagaccagtgacgttggtgaatcagaatggattcatt

SEQ ID NO: 608959 - DNA, 75 bp, synthetic construct
  source 1..75: mol_type = other DNA
tcgtctggttgtcacccttagccggagttatggcgtccgtctcattcatctggttgccagcgccgcatttctgcc

SEQ ID NO: 608960 - DNA, 75 bp, synthetic construct
  source 1..75: mol_type = other DNA
tcgtctggttgtcacacttagccggagttatggcgtccgtctcattcatctggttgccagcgccgaatttctgcc

SEQ ID NO: 608961 - DNA, 75 bp, synthetic construct
  source 1..75: mol_type = other DNA
tattacttgaccactacatacccggttctgcggcttaaacgcctggggctgtcaaaaatgttccgccgtctggtt

SEQ ID NO: 608962 - DNA, 75 bp, synthetic construct
  source 1..75: mol_type = other DNA
cggcatacgctgcagtaccgcgcatatcacggcaaaagacaacgcctggctgtactcgctgtcgcatcagacgaa

SEQ ID NO: 608963 - DNA, 75 bp, synthetic construct
  source 1..75: mol_type = other DNA
gtcgatggtattaagctcgctgaactgattaacaaagtcgctgaaaacggttattcactccgcgtggtggataaa

SEQ ID NO: 608964 - DNA, 75 bp, synthetic construct
  source 1..75: mol_type = other DNA
atgctggcaatggttgcaggtactgcttctgctgatatggatggtggtcagttaaatatcagtggtctggttgtt

SEQ ID NO: 608965 - DNA, 75 bp, synthetic construct
  source 1..75: mol_type = other DNA
tcgaaattaccgttcgtgatgacctttccatgatcgccgtacaagggccgaatgcgcaggcaaaagctgccacac

SEQ ID NO: 608966 - DNA, 75 bp, synthetic construct
  source 1..75: mol_type = other DNA
tgacgtcgatggtgttaatctcattgaactgattaacaaagtccctgaaaacggttattcactccgggtggtgga

SEQ ID NO: 608967 - DNA, 75 bp, synthetic construct
  source 1..75: mol_type = other DNA
tgacgtcgatggtgttaatctcaatgaactgattaacaaagtcactgaaaacggttattcactccgggtggttga

SEQ ID NO: 608968 - DNA, 75 bp, synthetic construct
  source 1..75: mol_type = other DNA
tcacaccagaccagtgacttcggtgaatcagaatggattcattttaccggtaccggttatctgttacgtaccgat

SEQ ID NO: 608969 - DNA, 75 bp, synthetic construct
  source 1..75: mol_type = other DNA
gaatcagaatggattcatttcacaggtagcggatatctgttacgtaccgatgcgtggtcatatccggttctgcgg

SEQ ID NO: 608970 - DNA, 75 bp, synthetic construct
  source 1..75: mol_type = other DNA
gcggagaaaacatctttaaagacagccgggttccctggccgcaggttagccgggaacaagtattagcacgcgccc

SEQ ID NO: 608971 - DNA, 75 bp, synthetic construct
  source 1..75: mol_type = other DNA
gtctggttgtcacactaagccgacgttatggcgtcagtctcattcatctggatgccagcgctgaatgcctgccgg

SEQ ID NO: 608972 - DNA, 75 bp, synthetic construct
  source 1..75: mol_type = other DNA
cgttatggtgtcagtctcattcatctggatgccagtgccggatatctgccgggtttacccactttcgactggtaa

SEQ ID NO: 608973 - DNA, 75 bp, synthetic construct
  source 1..75: mol_type = other DNA
cgttatggcgtcagtctcattcatctggatgccagcgccgaatgtctgccggatttacccactttcgactggtaa

SEQ ID NO: 608974 - DNA, 75 bp, synthetic construct
  source 1..75: mol_type = other DNA
ggcggtacatcgagccgccgccaatgactggcgtactcgctgacttgaaacagtgggtaatggatacaggagagc

SEQ ID NO: 608975 - DNA, 75 bp, synthetic construct
  source 1..75: mol_type = other DNA
tgacgtcgatggtgttaatctcattgaactgattaacaaagtcgctgaaaacggttattcactccgggtggtcga

SEQ ID NO: 608976 - DNA, 75 bp, synthetic construct
  source 1..75: mol_type = other DNA
actcgctgtcacatcagacgaatgacttcggcgaatcagaatggattcattttaccgggtccggttatctgttac

SEQ ID NO: 608977 - DNA, 75 bp, synthetic construct
  source 1..75: mol_type = other DNA
gacgtcgatggtgttaatctcactgaactgattaataacgtcgctgaaaacggttattcactccgcgtggtcgat

SEQ ID NO: 608978 - DNA, 75 bp, synthetic construct
  source 1..75: mol_type = other DNA
ccgacgccatcaacgttctggccctgaatgcgggccggatcgctgtggatattgacggcattgaactggctacgc

SEQ ID NO: 608979 - DNA, 75 bp, synthetic construct
  source 1..75: mol_type = other DNA
agttatggcgtcagtctcattcatctggatgccggtgctgaatgtctgcaggatttacccactttcaactggtaa

SEQ ID NO: 608980 - DNA, 75 bp, synthetic construct
  source 1..75: mol_type = other DNA
atcacggaaaaggacaacgcctggctgtactcgctgtcgcatcagaccagtgacgttggtgaatcagaatggatt

SEQ ID NO: 608981 - DNA, 75 bp, synthetic construct
  source 1..75: mol_type = other DNA
atgaaactttccctgacgctggaagccgacagcgttaacgtacaggcactgaacatggggcacattgtcgttgac

SEQ ID NO: 608982 - DNA, 75 bp, synthetic construct
  source 1..75: mol_type = other DNA
caacccttaccagcatacgctgcagtaccgcacatatcacggaaacggacaacgcctggttgtactcgctgtcac

SEQ ID NO: 608983 - DNA, 75 bp, synthetic construct
  source 1..75: mol_type = other DNA
tgacgtcgatggtgttaatctcagtgaactgattaacaaagtctctgaaaacggttattcactccgggtggtcga

SEQ ID NO: 608984 - DNA, 75 bp, synthetic construct
  source 1..75: mol_type = other DNA
tgacgtcgatggtgttaatctcactgaactgattaacaaagtctctgaaaacggttattcactccgggtggtgga

SEQ ID NO: 608985 - DNA, 75 bp, synthetic construct
  source 1..75: mol_type = other DNA
caacccttgccggcatacggtgcagtaccgcacatatcacggaaacggacaacgcctggttgtactcgctgtcac

SEQ ID NO: 608986 - DNA, 75 bp, synthetic construct
  source 1..75: mol_type = other DNA
caacccttcccagcatacgatgcagtaccgcacatatcacggaaacggacaacgcctggttgtactcgctgtcac

SEQ ID NO: 608987 - DNA, 75 bp, synthetic construct
  source 1..75: mol_type = other DNA
caacccttacccgcatacgatgcagtaccgcacatatcacggaaacggacaacgcctggttgtactcgctgtcac

SEQ ID NO: 608988 - DNA, 75 bp, synthetic construct
  source 1..75: mol_type = other DNA
acacggagaccattggtaacgaccagaagataacggtggggttgggccagacggtgaatgtggggagcaaaaagg

SEQ ID NO: 608989 - DNA, 75 bp, synthetic construct
  source 1..75: mol_type = other DNA
gacttcctgaacggggacccggaccagccgataatcatggggcggacgtaccatgaggacaaccgttcgccgggg

SEQ ID NO: 608990 - DNA, 75 bp, synthetic construct
  source 1..75: mol_type = other DNA
cgctgttttatgaagaccatccggcgcgggagttctgcgtgcagtacggggagagcgacctggcgttcctgaccc

SEQ ID NO: 608991 - DNA, 75 bp, synthetic construct
  source 1..75: mol_type = other DNA
cgctggaggttgacggccaggagccggacacctttgcagtgttgagcttccggttaatccagaaccagtcttatc

SEQ ID NO: 608992 - DNA, 75 bp, synthetic construct
  source 1..75: mol_type = other DNA
aggttaatccagaaccagtcatatccgtttgtgatgagtgtggatgttgccagcgactcttttatgcagacggcg

SEQ ID NO: 608993 - DNA, 75 bp, synthetic construct
  source 1..75: mol_type = other DNA
cgctggggatcaaggtggacggggatatcgtgctggagagcagcagccggataagcctgaaggtggggggctcgt

SEQ ID NO: 608994 - DNA, 75 bp, synthetic construct
  source 1..75: mol_type = other DNA
ggcggcgggaatgacggagagcctagtgatgaggatgaatcagaaggtggagaagaagacaaggacgattcagat

SEQ ID NO: 608995 - DNA, 75 bp, synthetic construct
  source 1..75: mol_type = other DNA
ggtggggaaagagaatgccggagggcatgaccagaccatcacggtggcccatgaccggagcatcacggtgcgcaa

SEQ ID NO: 608996 - DNA, 75 bp, synthetic construct
  source 1..75: mol_type = other DNA
atgtctgaacaattagtcacacctgaaaacgtcaccaccaaagatggaaaaatcaacctgctggatctcaatcgt

SEQ ID NO: 608997 - DNA, 75 bp, synthetic construct
  source 1..75: mol_type = other DNA
gggacgcctgtaccgacgctgcaaccggcggtgctgaagacactgggggatgagaagagtggtgatggcagtgat

SEQ ID NO: 608998 - DNA, 75 bp, synthetic construct
  source 1..75: mol_type = other DNA
gggatatcgtgctggagagcagcagccggataagcctgaagttgggtggctcgtttgtggtcatccattcagggg

SEQ ID NO: 608999 - DNA, 75 bp, synthetic construct
  source 1..75: mol_type = other DNA
aagccagaaggttcagagcagcccatacacaccggaactcctgtcgaaccagttgatctacctgatatttatgtt

SEQ ID NO: 609000 - DNA, 75 bp, synthetic construct
  source 1..75: mol_type = other DNA
tttgagcggtttgcggcggacagtccggagcagaagctgacgctgtgcgacgatgtggcggggctgtcacaggcg

SEQ ID NO: 609001 - DNA, 75 bp, synthetic construct
  source 1..75: mol_type = other DNA
cggcggtactgaagacaccggggggggagaagagtggtgatggcagtgactccggagaagaaaatggagactctg

SEQ ID NO: 609002 - DNA, 75 bp, synthetic construct
  source 1..75: mol_type = other DNA
taacgaccggacgacggatgtgaaacatgaccatacggagaccatcgggaacgaccagaagagtgccagcaccta

SEQ ID NO: 609003 - DNA, 75 bp, synthetic construct
  source 1..75: mol_type = other DNA
gacggtactatcattctcaatggtaaaagtatccagattgaaggaaaagataaaataaatattttcggcgcagat

SEQ ID NO: 609004 - DNA, 75 bp, synthetic construct
  source 1..75: mol_type = other DNA
cttctttgagcggtttgcggcgaccagcccggagcagaagctgacgctgtgtgacgatgtggcggggctgtcgca

SEQ ID NO: 609005 - DNA, 75 bp, synthetic construct
  source 1..75: mol_type = other DNA
atgttccgttatgaggcgcatgtccgcccgtcatcggtgcagagccaggattacacgtttaaggtgccggactga

SEQ ID NO: 609006 - DNA, 75 bp, synthetic construct
  source 1..75: mol_type = other DNA
gtggcgggctttggcatgcaggagaacaatggctggcagatgcgttaccacctgtgtattgagccgccgttatgg

SEQ ID NO: 609007 - DNA, 75 bp, synthetic construct
  source 1..75: mol_type = other DNA
ccttacaggccggttatggcgtagggcgtggtgaagcgtttagttatatttactcaaaagattgcaaccgcgacg

SEQ ID NO: 609008 - DNA, 75 bp, synthetic construct
  source 1..75: mol_type = other DNA
tacggggaaagcgacctggcgtttctggcgcggctgtgggcggaggaggggattttcttctttgagcggtttgcg

SEQ ID NO: 609009 - DNA, 75 bp, synthetic construct
  source 1..75: mol_type = other DNA
gccgcagctctggctgtccagtttacaaatactgaacgaccgacaaatgcacaggcaaaggcaatggaagccgcg

SEQ ID NO: 609010 - DNA, 75 bp, synthetic construct
  source 1..75: mol_type = other DNA
aacatggccgggtacgggtgaagtttcactgggacaggtataacccggcaacggaggcgagttcgtgctgggtga

SEQ ID NO: 609011 - DNA, 75 bp, synthetic construct
  source 1..75: mol_type = other DNA
gtgatagtggacttcctgaacggggacccggaccagccgataatcatggggcggacgtaccatgaggacaaccgt

SEQ ID NO: 609012 - DNA, 75 bp, synthetic construct
  source 1..75: mol_type = other DNA
gttaccgcgatgatttactggctaaccgcgcgattgtgaaacacggtaatttcgcgctgttaaccccagacggcc

SEQ ID NO: 609013 - DNA, 75 bp, synthetic construct
  source 1..75: mol_type = other DNA
ctgcagtgcgccgttatctggagaaatccaatgcgaaccaggggcgcgtcactatcgagtacgtgatgcttgacc

SEQ ID NO: 609014 - DNA, 75 bp, synthetic construct
  source 1..75: mol_type = other DNA
atcaatgaagtgaacggtatttcccgcgtggtgtatgacatcagcggcaagccgccagctaccattgagtgggag

SEQ ID NO: 609015 - DNA, 75 bp, synthetic construct
  source 1..75: mol_type = other DNA
ggggtatcttaacgaagccgagtttgatagttgggtacgaccagaacagatggtcggcagtatgaaagtcgggcg

SEQ ID NO: 609016 - DNA, 75 bp, synthetic construct
  source 1..75: mol_type = other DNA
tctcaattccggaaaacgagccgggcagttcaatcatgcctgggaaagtgaacccaacgcagtgtgaagcgttaa

SEQ ID NO: 609017 - DNA, 75 bp, synthetic construct
  source 1..75: mol_type = other DNA
tgtggtttcagcgctgaaaagtaatattggccacctcaactccgctgcgggagtggcgggcgtcatcaaaacaac

SEQ ID NO: 609018 - DNA, 75 bp, synthetic construct
  source 1..75: mol_type = other DNA
atgcccttaactacctgaccaacaacatggcgcaagcgttgctgatgcacctgagttatctgcttgaacaactgg

SEQ ID NO: 609019 - DNA, 75 bp, synthetic construct
  source 1..75: mol_type = other DNA
tgcgtaagattggtctggagctgggcctgtcgtacgacatgctgtaccgtcacccgttcccgggaccaggccttg

SEQ ID NO: 609020 - DNA, 75 bp, synthetic construct
  source 1..75: mol_type = other DNA
gtactgatgcgtggtcgtacccggttctgcggcttaaacgtctgggcatgtcaaaaatgttccgtcgtctccagt

SEQ ID NO: 609021 - DNA, 75 bp, synthetic construct
  source 1..75: mol_type = other DNA
cttaaacgcctggggctgtcaaaaatgttccgccgtctggttgtcacacttatccggcgttatggcgtcagtctc

SEQ ID NO: 609022 - DNA, 75 bp, synthetic construct
  source 1..75: mol_type = other DNA
gggactgtcaaaaacgttccgccgtctggttgtcacacttatccggcgttatggcgtcagtctcattcatctgga

SEQ ID NO: 609023 - DNA, 75 bp, synthetic construct
  source 1..75: mol_type = other DNA
ctggcagatggcatggaaagttttaacaaacactgtgcagtggggattgaaccgaatcgtgagcgaatcaatcaa

SEQ ID NO: 609024 - DNA, 75 bp, synthetic construct
  source 1..75: mol_type = other DNA
gctcttggcggtacagcggtgggtactggactaaatacccatccggagtatgcgcgtcgcgtagcagatgaactg

SEQ ID NO: 609025 - DNA, 75 bp, synthetic construct
  source 1..75: mol_type = other DNA
ccacacttacccggcgttatggcatcagtctcattcatctggacgccggcgcagaatgtctgccgggtttaccca

SEQ ID NO: 609026 - DNA, 75 bp, synthetic construct
  source 1..75: mol_type = other DNA
tcaatcctgctatagatctatcgcgttctgcattgtacgttaaccagcaagtccaaccgtggccgtcgacgcgtc

SEQ ID NO: 609027 - DNA, 75 bp, synthetic construct
  source 1..75: mol_type = other DNA
gcagccaggggagaggaaccacgctgggaaatcagttagaggtgataccggcggaccggacctggcgtccacggg

SEQ ID NO: 609028 - DNA, 75 bp, synthetic construct
  source 1..75: mol_type = other DNA
gcagcagggtgagaacctgaacggacagctggagcagtatgagatatttgattatccgggaaggttcaaggacga

SEQ ID NO: 609029 - DNA, 75 bp, synthetic construct
  source 1..75: mol_type = other DNA
ggacccggaccagccgataatcatggggcggacgtaccatgaggacaaccgttcgccggggagcctgccggggac

SEQ ID NO: 609030 - DNA, 75 bp, synthetic construct
  source 1..75: mol_type = other DNA
agcgtgcagacagtgaccggtcagccagatgttgaccaggttgttctggatgaagcgatcaaaaatcgttccggg

SEQ ID NO: 609031 - DNA, 75 bp, synthetic construct
  source 1..75: mol_type = other DNA
ccagaagataacggtggtgaaggggcagacggttcaggtcgggaccagaaaagaagggggccacgaccagagtat

SEQ ID NO: 609032 - DNA, 75 bp, synthetic construct
  source 1..75: mol_type = other DNA
gatacggtcgaagacgtataaaggaagcggttttaacgagctgcggtttgaggacgccacggataaggaacaggt

SEQ ID NO: 609033 - DNA, 75 bp, synthetic construct
  source 1..75: mol_type = other DNA
agattgaggtactggccaccggactgaactttaaggatgtgctgttcaccacgggattgctccggcagcagccgg

SEQ ID NO: 609034 - DNA, 75 bp, synthetic construct
  source 1..75: mol_type = other DNA
gacggcgacaagttacagcagacgctgatgagtagtggtgtcgacagcatcacaatgccgctgccgatatcgtca

SEQ ID NO: 609035 - DNA, 75 bp, synthetic construct
  source 1..75: mol_type = other DNA
atcgcactagaagcacatcaacatgaggacgacccttcagcgacgggggtacgcgacagctatctgttgttgttc

SEQ ID NO: 609036 - DNA, 75 bp, synthetic construct
  source 1..75: mol_type = other DNA
ggggaaccatgtcagcctggtggagggaaagcacagcctggtggtgaagggggacctagcgaggaaggtgagtgg

SEQ ID NO: 609037 - DNA, 75 bp, synthetic construct
  source 1..75: mol_type = other DNA
gacttcctgaacggggacccggaccagccgataatcatggggcggacctaccatgaagataaccgctccccgggc

SEQ ID NO: 609038 - DNA, 75 bp, synthetic construct
  source 1..75: mol_type = other DNA
actacccaggacgtttcaaggatgaacagcacgggcaggattttacccgttatcagatggatgggttgcgtaatg

SEQ ID NO: 609039 - DNA, 75 bp, synthetic construct
  source 1..75: mol_type = other DNA
tacaaattttcaaaatattgctgtgaacaatgagagctattctattcctgtaaccgtaagtacttataaggttgg

SEQ ID NO: 609040 - DNA, 75 bp, synthetic construct
  source 1..75: mol_type = other DNA
tgtaaggcaagtatggggcagaaacgaaagcgctctcgaagtagtaaagtatatagatctttctcaagaattaaa

SEQ ID NO: 609041 - DNA, 75 bp, synthetic construct
  source 1..75: mol_type = other DNA
ggttttctggaataacataaaaaaaacataccgtaagaaaggatttctatttatccagacaaaagaaaacagatg

SEQ ID NO: 609042 - DNA, 75 bp, synthetic construct
  source 1..75: mol_type = other DNA
tgttcgacccggctacccagttctactatgacgtgcgtattgaagataaaccgctggcgaacggctgcgcgggca

SEQ ID NO: 609043 - DNA, 75 bp, synthetic construct
  source 1..75: mol_type = other DNA
gaagagaagcagctctctgataaccaggatttacatgaaaaatacttcatggaattaatggatatcattgataag

SEQ ID NO: 609044 - DNA, 75 bp, synthetic construct
  source 1..75: mol_type = other DNA
cattccaggaaatggcagcgaatatagttcgctcccaactggcgactcttgaccttagtaccgtagaaaaagaaa

SEQ ID NO: 609045 - DNA, 75 bp, synthetic construct
  source 1..75: mol_type = other DNA
tgttaagcgccagcaacgtgaactcggtgcagtcggtattaatacccgtaatctggcaaatgatgagcgggggct

SEQ ID NO: 609046 - DNA, 75 bp, synthetic construct
  source 1..75: mol_type = other DNA
aaagcccggataaacctgcacaacagttgttactgcttttccacggtgtcggggataacccggtggcaatggggg

SEQ ID NO: 609047 - DNA, 75 bp, synthetic construct
  source 1..75: mol_type = other DNA
tcgtccgcgtgcgaacgtttcccaggtgatgcatatcatcggtgacgttgcaggtcgtgactgcgtactagtcga

SEQ ID NO: 609048 - DNA, 75 bp, synthetic construct
  source 1..75: mol_type = other DNA
atgccgcaaacgcggctctggatgttattgatgatgaagtatcaaaaggctttcctgaacctgattgggcgcatc

SEQ ID NO: 609049 - DNA, 75 bp, synthetic construct
  source 1..75: mol_type = other DNA
gaacagttggataaatatgtcgctaatggcggcaaacgtagcgactggacggtgaaattcgccgaaaaccgcagt

SEQ ID NO: 609050 - DNA, 75 bp, synthetic construct
  source 1..75: mol_type = other DNA
tgacgctggatatcgtggaggatttaggccatgcgatcgacaatcgcagtatgcaatttgccctggatcacttgc

SEQ ID NO: 609051 - DNA, 75 bp, synthetic construct
  source 1..75: mol_type = other DNA
atccggttattgagctggcgcatgccgttgcggcgcaggaggcgttaatcagtgcgggtggtgatgtgacgctgg

SEQ ID NO: 609052 - DNA, 75 bp, synthetic construct
  source 1..75: mol_type = other DNA
cattccaggatatggcagcgaatatagttcgttctcaactggcgactcttgacctgagtaccgtagaaaaagaaa

SEQ ID NO: 609053 - DNA, 75 bp, synthetic construct
  source 1..75: mol_type = other DNA
gacctttttgaccagcaagagggctcgctgcgcaaactcacccaaaccgccacacaatacgtgttgaagctcgac

SEQ ID NO: 609054 - DNA, 75 bp, synthetic construct
  source 1..75: mol_type = other DNA
atgtctatgataaagatttaaatcttgagcaaaaaaaatctatcaggcttgtaattgagggccttaaagagaact

SEQ ID NO: 609055 - DNA, 75 bp, synthetic construct
  source 1..75: mol_type = other DNA
cgaaccagagaaagcagacaataagacgatgaaagactcagagtcaaaatcggttgaagacgaagatattattcg

SEQ ID NO: 609056 - DNA, 75 bp, synthetic construct
  source 1..75: mol_type = other DNA
accggatctggcgaaaatatgcgtatccggccactttcgaggaggggggacgcgatgccacatcgcagtgtctgc

SEQ ID NO: 609057 - DNA, 75 bp, synthetic construct
  source 1..75: mol_type = other DNA
gaacacgagttggggttggagtgtgaatggtcctggcacgatcaggttgatattgcgcgcggcggtaatagtaaa

SEQ ID NO: 609058 - DNA, 75 bp, synthetic construct
  source 1..75: mol_type = other DNA
gcacccgaccgggcatgtcattcgcacgtctaactgggcgcaaaccctgccgccggaacagcgtccgactttcac

SEQ ID NO: 609059 - DNA, 75 bp, synthetic construct
  source 1..75: mol_type = other DNA
atcggtggtagttctcgctattgggctcatcttgtggtttttcatcaaccgtgccagttcacggactaacgaaca

SEQ ID NO: 609060 - DNA, 75 bp, synthetic construct
  source 1..75: mol_type = other DNA
cgcggtggcggaagtgctggcctgggtctggcaactgaaacgctggcgtctggctggtggacagcgccctgtaca

SEQ ID NO: 609061 - DNA, 75 bp, synthetic construct
  source 1..75: mol_type = other DNA
ggagttaatggatataattaataaggggcttggtttgttgatgaaaaataaagggattcgaatagaaccccttaa

SEQ ID NO: 609062 - DNA, 75 bp, synthetic construct
  source 1..75: mol_type = other DNA
cgaaccagagaaagcagacaataagacgatcaaagactgagagtcaaaatcggttgaagacgaagatattattcg

SEQ ID NO: 609063 - DNA, 75 bp, synthetic construct
  source 1..75: mol_type = other DNA
cgaaccagagaaagcagacaaaaagacgattaaagactaagagtcaaaatcggttgaagacgaagatattattcg

SEQ ID NO: 609064 - DNA, 75 bp, synthetic construct
  source 1..75: mol_type = other DNA
cgaaccagagaaagcagacaaaaagacgataaaagacttagagtcaaaatcggttgaagacgaagatattattcg

SEQ ID NO: 609065 - DNA, 75 bp, synthetic construct
  source 1..75: mol_type = other DNA
agaattatcaccggaggactggaaaatgctgtttatgtgcgaatggccccaggctgacaaggagcaggcggcatg

SEQ ID NO: 609066 - DNA, 75 bp, synthetic construct
  source 1..75: mol_type = other DNA
ccggcgctgcgcgggcagtcttccatttccgcgactttgtatgctggtttgcaactgatcatgccaggcgaagtg

SEQ ID NO: 609067 - DNA, 75 bp, synthetic construct
  source 1..75: mol_type = other DNA
tgaccgtagccgcgaagtgctgcacgatttaacccgcctgggcgatgccgatgagtgggatggctacaaaatgcg

SEQ ID NO: 609068 - DNA, 75 bp, synthetic construct
  source 1..75: mol_type = other DNA
ccggatggagataaaactgttgttcaacctgatattttaattcttgaaggattaaatgtcttacagagcgggatg

SEQ ID NO: 609069 - DNA, 75 bp, synthetic construct
  source 1..75: mol_type = other DNA
tgaccgcagccgcgaagtgctgcacgatttaacccgcctgggcgatgccgacgagtgggatggctacaaaatgcg

SEQ ID NO: 609070 - DNA, 75 bp, synthetic construct
  source 1..75: mol_type = other DNA
gcgattacctgccgcgttacgctgccaatatgttgccgctgcgccatcagaccgggaactcctcacccatcttta

SEQ ID NO: 609071 - DNA, 75 bp, synthetic construct
  source 1..75: mol_type = other DNA
tcctgcaactgttaccaaaaggatttacttcacgtgtggcgcgtacgactgacagcaccatctatcatgtggtgg

SEQ ID NO: 609072 - DNA, 75 bp, synthetic construct
  source 1..75: mol_type = other DNA
agggcatggcaaacggccaataatacctatggtttttccaacggtcttggcgtcgtggaggtgattattgctctg

SEQ ID NO: 609073 - DNA, 75 bp, synthetic construct
  source 1..75: mol_type = other DNA
ggctggcgcagtcatgataatggctgattcggctcgggaaatccttaagcaacgaagtaatgagtcgtgttcaga

SEQ ID NO: 609074 - DNA, 75 bp, synthetic construct
  source 1..75: mol_type = other DNA
agtttgtcccttacgaggcagacagcattacaccattcgtcgcaaacagtccactaatgtcgttcttttatgaac

SEQ ID NO: 609075 - DNA, 75 bp, synthetic construct
  source 1..75: mol_type = other DNA
ttaccgccgctaaccatgcgcgcgtgtcacaatcgcagggtgatgatattcagacgcggctgggtttacacagcg

SEQ ID NO: 609076 - DNA, 75 bp, synthetic construct
  source 1..75: mol_type = other DNA
atgtttccgaacaagacgatggcgtggatcattaccactcgtcggggattatcgcctcgctggaagccgggtatc

SEQ ID NO: 609077 - DNA, 75 bp, synthetic construct
  source 1..75: mol_type = other DNA
tgatcccgcgcagtttcaaaacaatgcgcagttcagtctgacaggaagcggctacgtcaatatgggggcgtatga

SEQ ID NO: 609078 - DNA, 75 bp, synthetic construct
  source 1..75: mol_type = other DNA
agtatccgcttgatgcggttcatgtggataaatttgctgatttattagggaagccaaagacagctgtcagtgaaa

SEQ ID NO: 609079 - DNA, 75 bp, synthetic construct
  source 1..75: mol_type = other DNA
acacttgcaaaaaaatgcaagaaggctcaaaagggaaatttgattatcgcaactactagtgagaatgatgaggat

SEQ ID NO: 609080 - DNA, 75 bp, synthetic construct
  source 1..75: mol_type = other DNA
actcgcgagcgcgccagtttaatcctgacgaaaagtgctaatcatgcggtagaagaggtcagactacgcaaataa

SEQ ID NO: 609081 - DNA, 75 bp, synthetic construct
  source 1..75: mol_type = other DNA
gatgagatcgcccgtctcaaaggtataaatgaagatctctcgttagaagaagttgccgagatctatttgcctttg

SEQ ID NO: 609082 - DNA, 75 bp, synthetic construct
  source 1..75: mol_type = other DNA
tggcttcgtttaactttcctaaataaacttcctgtagccattcctgctgtaaacatggaagcatggaaatcactg

SEQ ID NO: 609083 - DNA, 75 bp, synthetic construct
  source 1..75: mol_type = other DNA
atgatataaccagagtatcaaaacgcggtaaattccatactgacaaatttcctgagaatgaaatacgacatcact

SEQ ID NO: 609084 - DNA, 75 bp, synthetic construct
  source 1..75: mol_type = other DNA
ataatttatctaaaatattaattccagtcccttctatggagatacaggaacgtatagtatccattctcgataaat

SEQ ID NO: 609085 - DNA, 75 bp, synthetic construct
  source 1..75: mol_type = other DNA
caacgatgccggtcaggaagtggagtacttcaacaccacgctggataacgtcaagctggtcagagtcgctccgct

SEQ ID NO: 609086 - DNA, 75 bp, synthetic construct
  source 1..75: mol_type = other DNA
accaagtattacttgcattatggaaagccaagagtgtacgcgagcacgatactgaaaatgaagtggttatatatt

SEQ ID NO: 609087 - DNA, 75 bp, synthetic construct
  source 1..75: mol_type = other DNA
tcatgatagattaactgttcaacttgatactggtgcaatagggattgaccagtttatagagaaattagaattaag

SEQ ID NO: 609088 - DNA, 75 bp, synthetic construct
  source 1..75: mol_type = other DNA
ctgaacttaaagcaaaatattcttcctactcgcgaacgtgccagcctgatcctgaccaaaagtgctaatcatgcg

SEQ ID NO: 609089 - DNA, 75 bp, synthetic construct
  source 1..75: mol_type = other DNA
aaaaaagactttatagatgcaggtgtagggtgcatacactatggtcaaatctatacgtattacggaacatataca

SEQ ID NO: 609090 - DNA, 75 bp, synthetic construct
  source 1..75: mol_type = other DNA
agtatgattccggctgtggctggcccagtttctacgaaccggtgagtgaagaatctattcgttatatcaaagact

SEQ ID NO: 609091 - DNA, 75 bp, synthetic construct
  source 1..75: mol_type = other DNA
ataactgaacagttttataataaatctgtatttaatcctgatgctgttcttaatgccattgaaaatgagcttgtt

SEQ ID NO: 609092 - DNA, 75 bp, synthetic construct
  source 1..75: mol_type = other DNA
agtgaaaagataacgagcgtatggaatgagagtgagatagataaagacaaattaaaagaaatggttcttccttta

SEQ ID NO: 609093 - DNA, 75 bp, synthetic construct
  source 1..75: mol_type = other DNA
gattctactggaaaaaacatggatacatgctagtataaaatggcaaagcgatcatatagatatccctgttcttct

SEQ ID NO: 609094 - DNA, 75 bp, synthetic construct
  source 1..75: mol_type = other DNA
agatggatcttgagcaactgaaatcagcatggcgtcatcaaagtgaactggttgccaggatacaaagtacagatg

SEQ ID NO: 609095 - DNA, 75 bp, synthetic construct
  source 1..75: mol_type = other DNA
agattaataacatctgtcggcgttttgagttggcatctgagcagacttttaaaatagagtacagtgattctcttg

SEQ ID NO: 609096 - DNA, 75 bp, synthetic construct
  source 1..75: mol_type = other DNA
aatttctctttgctggccgaaacagggaaactggatcctgttactggcagagagaaggaaatcaggcagcttatc

SEQ ID NO: 609097 - DNA, 75 bp, synthetic construct
  source 1..75: mol_type = other DNA
cgtctggccgtgtgcctgatgtactgaagaatgtccggatccatgcccttgatatgggggctctgcttgcgggag

SEQ ID NO: 609098 - DNA, 75 bp, synthetic construct
  source 1..75: mol_type = other DNA
agctcgcccgaaacctgaactaacccgtgtgaccgcgcgcccgcaggtcgagcgtaaaacggaaaaagtgccgga

SEQ ID NO: 609099 - DNA, 75 bp, synthetic construct
  source 1..75: mol_type = other DNA
gcaggaactcacgccgttgccgccgcagttgcaggaactgatcagtcagttgccgcaggcgaaacccgaacagca

SEQ ID NO: 609100 - DNA, 75 bp, synthetic construct
  source 1..75: mol_type = other DNA
aaattgataatatttgtaaacgttttgagcgggcatcagatcagatgtataaaatagattacagtgattctctta

SEQ ID NO: 609101 - DNA, 75 bp, synthetic construct
  source 1..75: mol_type = other DNA
cacgggttgccgtatctcagtccacacgaccagatgccattcaggatattgaagctaaattagaaagactccagg

SEQ ID NO: 609102 - DNA, 75 bp, synthetic construct
  source 1..75: mol_type = other DNA
tccgggagttgggaaaagtagcatagtagaaggtttagcactgcaaatttcatctggccgcgttcctgatgcact

SEQ ID NO: 609103 - DNA, 75 bp, synthetic construct
  source 1..75: mol_type = other DNA
ggagaatataaaaagtattttgaaaaggacggcgcattagcccggcgttttcagatagtcaaagtaacagagcca

SEQ ID NO: 609104 - DNA, 75 bp, synthetic construct
  source 1..75: mol_type = other DNA
atctgtgggccggaaggctgcaaaaaatgggctgcccgagggaaaaaatcgccgtatcgcgcatgggcgtagata

SEQ ID NO: 609105 - DNA, 75 bp, synthetic construct
  source 1..75: mol_type = other DNA
gaacatggcgtcgataccgcgtggctggtcgatcaccacattgaagacttcaccgccagctatgctgttcaacac

SEQ ID NO: 609106 - DNA, 75 bp, synthetic construct
  source 1..75: mol_type = other DNA
cactgtgacgcgctgatcctgcgcgaatcggtcagcctcgatctaatgaaacgcagcaatatcaccactgcaaaa

SEQ ID NO: 609107 - DNA, 75 bp, synthetic construct
  source 1..75: mol_type = other DNA
ccaactggcgaactacgttttcggtcactgcgacgcgttgatcctgcgcgaatcggtcagcctcgatctgatgaa

SEQ ID NO: 609108 - DNA, 75 bp, synthetic construct
  source 1..75: mol_type = other DNA
atgaaattacttattcttggcaaccatacttgcggcaatcgcggcgacagcgccatcctgcgcggcttacttgat

SEQ ID NO: 609109 - DNA, 75 bp, synthetic construct
  source 1..75: mol_type = other DNA
cattttggccctgcgggggtaaccgcagcaaaactacgcgaactgggtgtcattcgcggcaaaattgccactatc

SEQ ID NO: 609110 - DNA, 75 bp, synthetic construct
  source 1..75: mol_type = other DNA
attgctggtaataatgcaagaggtaattttcacgtaagcaggtatcaaggaaagtttaatgcatatcagcgaacc

SEQ ID NO: 609111 - DNA, 75 bp, synthetic construct
  source 1..75: mol_type = other DNA
aagatgtatgtgattttgtcggaggaagtcaacctccaaaatctcaatttatttatgtatctaaacctggatatg

SEQ ID NO: 609112 - DNA, 75 bp, synthetic construct
  source 1..75: mol_type = other DNA
atttatccgaccgttatctacatgggcggcgtcagccagataaatcggtaagtctgttagatacagcctgctcac

SEQ ID NO: 609113 - DNA, 75 bp, synthetic construct
  source 1..75: mol_type = other DNA
gctgtcagtcgtgagcgtcagacaggaatgcagatggtgcaatctgtgcttgagcgcatcggggaggtgaaatga

SEQ ID NO: 609114 - DNA, 75 bp, synthetic construct
  source 1..75: mol_type = other DNA
ttggcccgttccaggatgagcaatttaaccaactggcgaaatacgtattcggtcgctgcgacgcgctgatcctgc

SEQ ID NO: 609115 - DNA, 75 bp, synthetic construct
  source 1..75: mol_type = other DNA
actagcatcaaacactcaagagaatagccggttaaccaaactccgagaatggctcctccccctacttatgaacgg

SEQ ID NO: 609116 - DNA, 75 bp, synthetic construct
  source 1..75: mol_type = other DNA
ccgccgcagttgcaggcgctggtgagccagttgccgcaggcgaaacctgaacagcaggcaaaactggcgacttac

SEQ ID NO: 609117 - DNA, 75 bp, synthetic construct
  source 1..75: mol_type = other DNA
gatccggtttatacctacaccctgccgccgcgccaggtggctaatggcgtagtggatgcctttgtacacaccgtg

SEQ ID NO: 609118 - DNA, 75 bp, synthetic construct
  source 1..75: mol_type = other DNA
gttatctcccgtaaaaccaccggcgacaagcaggcgttccattctgcccacgttcaacccgtatttgccgtgctc

SEQ ID NO: 609119 - DNA, 75 bp, synthetic construct
  source 1..75: mol_type = other DNA
agaaagtgactttcctgctggcggttggcggcggttctgtactggacggcaccaaatttatcgccgcagcggcta

SEQ ID NO: 609120 - DNA, 75 bp, synthetic construct
  source 1..75: mol_type = other DNA
tggcggcggttctgtactggacggcaccaaatttatcgctgcagcggctaactatccggaaaatatcgatccgtg

SEQ ID NO: 609121 - DNA, 75 bp, synthetic construct
  source 1..75: mol_type = other DNA
aactggaagagcacggcatgacccaactgggcgaaaatcatgacattacgttggatgtcagccgccgtatatacg

SEQ ID NO: 609122 - DNA, 75 bp, synthetic construct
  source 1..75: mol_type = other DNA
tatgctgggccacgaactgactgcgatgcacggtctggatcacgcgcaaacactggctatcgtcctgcctgcact

SEQ ID NO: 609123 - DNA, 75 bp, synthetic construct
  source 1..75: mol_type = other DNA
gtgaagatctgctgcgccgcccggaaatgacctatgaaaaattaaccagcctggtaccgtttgctcctgcgttaa

SEQ ID NO: 609124 - DNA, 75 bp, synthetic construct
  source 1..75: mol_type = other DNA
cgaacggtatctccaccagcctgccgttcgatgtgcagatgcaaatcgtccgctccatgcaggggatggaaaacg

SEQ ID NO: 609125 - DNA, 75 bp, synthetic construct
  source 1..75: mol_type = other DNA
acagcatggcgataacccaatgccggtattctcgtttatgggcaatgcgtcccagcatccccagcaggtgccgtg

SEQ ID NO: 609126 - DNA, 75 bp, synthetic construct
  source 1..75: mol_type = other DNA
atgaacaactttaatctgcacaccccaacccgcattctgtttggtaaaggcgcaatcgctggtttacgcgaacaa

SEQ ID NO: 609127 - DNA, 75 bp, synthetic construct
  source 1..75: mol_type = other DNA
tcatcatcattggcggggggcatgcaggcaccgaggccgcgatggccgcggcgcgtatgggtcaacagactctgc

SEQ ID NO: 609128 - DNA, 75 bp, synthetic construct
  source 1..75: mol_type = other DNA
gtgttctcgtttatgggcaacgcagcgcagcatccactgcaggtgccgtgctatatcacccataccaacgagaaa

SEQ ID NO: 609129 - DNA, 75 bp, synthetic construct
  source 1..75: mol_type = other DNA
actacccggaaaacatcgatccgtggcacatcctgcaaacgggcggtaaagagattaaaagcgccattccaatgg

SEQ ID NO: 609130 - DNA, 75 bp, synthetic construct
  source 1..75: mol_type = other DNA
tgcagaaaatggattgtctgcagtttttgcaaagtcaggcggatcagagcctgatagcgttgaccggttttcata

SEQ ID NO: 609131 - DNA, 75 bp, synthetic construct
  source 1..75: mol_type = other DNA
tttattattttctcaacaataaatacaatatgaatgacattatggaaagtatcattaaaaaaacgcgatatcatt

SEQ ID NO: 609132 - DNA, 75 bp, synthetic construct
  source 1..75: mol_type = other DNA
ttgcgaaggaatgcaccagatgatttttattattttatcaacaataaatataatatgaatgacattatggaaagt

SEQ ID NO: 609133 - DNA, 75 bp, synthetic construct
  source 1..75: mol_type = other DNA
tccacgatacgtcttgatccgccgtcgcttggcaagctcgagatcgccgtgcaactcgacaacggcaaactgacg

SEQ ID NO: 609134 - DNA, 75 bp, synthetic construct
  source 1..75: mol_type = other DNA
gatatgggcgctttgcttgcgggagctagtataagaggagaatttgaaaatcgcttaaaatcactattatctgaa

SEQ ID NO: 609135 - DNA, 75 bp, synthetic construct
  source 1..75: mol_type = other DNA
agaataatccaatattgacaggagatcctggcgttggtaaaagtagtattgttgaaggtttagcattgcaaattt

SEQ ID NO: 609136 - DNA, 75 bp, synthetic construct
  source 1..75: mol_type = other DNA
ccaccgaaaagtgacgtaacagtgtcttcaccagtgacgctagccggtgaaattacttatcaaactatcaatgat

SEQ ID NO: 609137 - DNA, 75 bp, synthetic construct
  source 1..75: mol_type = other DNA
actttgtatcccggatcaatatggaaaaaacaggctccattgtgaagaacgtttcaggagatctggcaggtagaa

SEQ ID NO: 609138 - DNA, 75 bp, synthetic construct
  source 1..75: mol_type = other DNA
aggcgctaaggccagatttgataccatgtttactaaagaattgatggttaaaaatataattaatttatattcatc

SEQ ID NO: 609139 - DNA, 75 bp, synthetic construct
  source 1..75: mol_type = other DNA
tcacaaagacccgaaagaaacggctgatgcatttcgtgtccgtgtgcgtgaggcatttcgccgtcgtgttgcgga

SEQ ID NO: 609140 - DNA, 75 bp, synthetic construct
  source 1..75: mol_type = other DNA
atgtaaaagcaggaggagccattgctattattttaatattttatttctttaacccccctgcaatgctgattggct

SEQ ID NO: 609141 - DNA, 75 bp, synthetic construct
  source 1..75: mol_type = other DNA
agattctttccaccaatggacgcatgcgtgaggttcttctcgtgcgtgatatgaagctttttgctggtaacgcca

SEQ ID NO: 609142 - DNA, 75 bp, synthetic construct
  source 1..75: mol_type = other DNA
cccgccgcgattattcactgccgcctcgccgctgcctgttgtgcgagcaaagcgcagctgtttgcgcgcgtggaa

SEQ ID NO: 609143 - DNA, 75 bp, synthetic construct
  source 1..75: mol_type = other DNA
atgaatatactaaaaaaacttatgcagcgtctgtgcgggtacggaaagcatgatgaccgtgaacacggggagtta

SEQ ID NO: 609144 - DNA, 75 bp, synthetic construct
  source 1..75: mol_type = other DNA
tggatgcagataaaaagcagacacagtgtgtggtaagaccgctgcaaattctgcgtgctgacgggaggtgggaaa

SEQ ID NO: 609145 - DNA, 75 bp, synthetic construct
  source 1..75: mol_type = other DNA
ctgaaagcagcaggggcgaccaccgccaacattactcaagcgattgaacaaatgcgtggaggtgaaagcgtgaac

SEQ ID NO: 609146 - DNA, 75 bp, synthetic construct
  source 1..75: mol_type = other DNA
acatccgctggcatcaatgctggccagttgcgcacagatatcaatcaggcattaaatcgtttaccgcaggttgaa

SEQ ID NO: 609147 - DNA, 75 bp, synthetic construct
  source 1..75: mol_type = other DNA
atgaagaaaaaacaaatgaaattgtaaataacaatccgggttatgtcgttgagatttttgaagaaaagatgggta

SEQ ID NO: 609148 - DNA, 75 bp, synthetic construct
  source 1..75: mol_type = other DNA
tcacgccattttacgacatcatttcagcatttccggtccttggcggtacgggaatacacatcagcgatctcaaac

SEQ ID NO: 609149 - DNA, 75 bp, synthetic construct
  source 1..75: mol_type = other DNA
agcgtctgtgtggttgcggaaagcatgatgactgtgaacacgggcagtcgcttacagtacaactgcgactggggc

SEQ ID NO: 609150 - DNA, 75 bp, synthetic construct
  source 1..75: mol_type = other DNA
cggccattcgatgggaggtcatggtgctctgattatggcgctgaaaaatccgggcaaatataccagcgtttccgc

SEQ ID NO: 609151 - DNA, 75 bp, synthetic construct
  source 1..75: mol_type = other DNA
aatcacacaggtggtgatactggatacagataaaaagctgatacagtgtgtggtaagaccgctgcaaatcctgcg

SEQ ID NO: 609152 - DNA, 75 bp, synthetic construct
  source 1..75: mol_type = other DNA
atacagtgcgtggtaagaccgctgcaaattctgcgtgctgacgggacgtgggaaaatattggcgggatgaaatag

SEQ ID NO: 609153 - DNA, 75 bp, synthetic construct
  source 1..75: mol_type = other DNA
agcgtctgtgcggttgcggaaagcatgatgaccgtgaagacggggagttacttacagcacagctgcgactgggac

SEQ ID NO: 609154 - DNA, 75 bp, synthetic construct
  source 1..75: mol_type = other DNA
tatcgcggtgagtttgaagaacgtttaaaaggcgtgcttaacgatcttgccaaacaggaaggcaacgtcatcctg

SEQ ID NO: 609155 - DNA, 75 bp, synthetic construct
  source 1..75: mol_type = other DNA
tatcgaagcagagaacatcaatgactgctatgaccactggatgctatgggcgcagatagcacatgcagacataac

SEQ ID NO: 609156 - DNA, 75 bp, synthetic construct
  source 1..75: mol_type = other DNA
ctcggtgtcgacaaacagtcgcccgaaatgcaggcgctgcgtaaacaggcgcgccagctcggtgacaataccgct

SEQ ID NO: 609157 - DNA, 75 bp, synthetic construct
  source 1..75: mol_type = other DNA
atgcacttccgagtcacaggtgaatggaatggagaaccattcaacagagttatcgaagcagaggacatcaacgat

SEQ ID NO: 609158 - DNA, 75 bp, synthetic construct
  source 1..75: mol_type = other DNA
ggaatggagaaccattcaacagagttatcgaagccgagaacatcagcgactgctataaccactggatgctgtggg

SEQ ID NO: 609159 - DNA, 75 bp, synthetic construct
  source 1..75: mol_type = other DNA
gaaaacccgttggcacagcaaatactgtctggtgaattggttccgggtaaagttattcgcctggaagttaatgaa

SEQ ID NO: 609160 - DNA, 75 bp, synthetic construct
  source 1..75: mol_type = other DNA
gtggctacctgaccgaagcggtgcgtcgtcgtccgtattccgtcattctgctggatgaagtggaaaaagcgcatc

SEQ ID NO: 609161 - DNA, 75 bp, synthetic construct
  source 1..75: mol_type = other DNA
aagtggtggtcttccatccgctgggtgaacagcacattgcctcgattgcgcagattcagttgaaacgtctgtaca

SEQ ID NO: 609162 - DNA, 75 bp, synthetic construct
  source 1..75: mol_type = other DNA
tggaaaagcaactggaagccgcaacgcagctcgaaggcaaaactatgcgtctcttgcgtaataaagtgaccgacg

SEQ ID NO: 609163 - DNA, 75 bp, synthetic construct
  source 1..75: mol_type = other DNA
gaaaacccgctggcgcagcaaatactgtctggtgaattggttcctggcaaagtcattcgcctggaagttaatgaa

SEQ ID NO: 609164 - DNA, 75 bp, synthetic construct
  source 1..75: mol_type = other DNA
tatgctcaacgaagaactgagcgacaaagaacgtcagtactccgagttagaagaagagtggaaagcagagaaagc

SEQ ID NO: 609165 - DNA, 75 bp, synthetic construct
  source 1..75: mol_type = other DNA
tcaccaccaaggcgggtgcccagcgcgtggcggcagaactggggattgtactggtaatgccagacaccagcccgc

SEQ ID NO: 609166 - DNA, 75 bp, synthetic construct
  source 1..75: mol_type = other DNA
attttcaggcgacagcaaaggtgctgaaattcccggaagtgcaaattcaggaaatcattagtaactgtgcgagat

SEQ ID NO: 609167 - DNA, 75 bp, synthetic construct
  source 1..75: mol_type = other DNA
attttcaggcgacagcaaaggtgctgaaattcccggaagtgcaaattcaggaaatcataagtaactgtgcgagag

SEQ ID NO: 609168 - DNA, 75 bp, synthetic construct
  source 1..75: mol_type = other DNA
tactcatcatccttcacatctggttctgtagacagggtggtgatcacttctggagtgaatccagattaaacatct

SEQ ID NO: 609169 - DNA, 75 bp, synthetic construct
  source 1..75: mol_type = other DNA
attttcaggcgtcagcaaaggtgctgaaattcccggaagtgcaaattcaggaaatcatgagtaactgtgcgagat

SEQ ID NO: 609170 - DNA, 75 bp, synthetic construct
  source 1..75: mol_type = other DNA
attttcaggcgtcagcaaaggtgctgaaattcccggaagtgcaaattcaggaaatcattagtaactgtgcgagag

SEQ ID NO: 609171 - DNA, 75 bp, synthetic construct
  source 1..75: mol_type = other DNA
attttcaggcgacagcaaaggtgctgaaattcccggaagtgcaaattcaggaaatcatgagtaactgtgcgagaa

SEQ ID NO: 609172 - DNA, 75 bp, synthetic construct
  source 1..75: mol_type = other DNA
tcccgcacattaagcatcctcaccgccagcagtgttccgctgctggaaggcattcagaccgccgccgccgtgtcg

SEQ ID NO: 609173 - DNA, 75 bp, synthetic construct
  source 1..75: mol_type = other DNA
cagggggaaaacgcctggagttacgcagaaaaactgaaactggcgatttccagtatccgtgaccatatgttctcc

SEQ ID NO: 609174 - DNA, 75 bp, synthetic construct
  source 1..75: mol_type = other DNA
ggtgaattcagacattttagtcagcgtgcgtcgctgaaggatgatttcttactgcatattaatgtttcgccctag

SEQ ID NO: 609175 - DNA, 75 bp, synthetic construct
  source 1..75: mol_type = other DNA
gcgtagtcactattttgctgacggcagtggtgccgaaaattatcgaacagtttgatcatctcggacacgcgctac

SEQ ID NO: 609176 - DNA, 75 bp, synthetic construct
  source 1..75: mol_type = other DNA
gcgtggtcactattttgctgacggcagtggtgccgaaaattatcgaacagtttgatcatctcggacacgcgctgc

SEQ ID NO: 609177 - DNA, 75 bp, synthetic construct
  source 1..75: mol_type = other DNA
ggggctggcgttagggctgtttgagccggcgctggtggtgatgatggcgggtgtggtgctgtttatcgtcatcgc

SEQ ID NO: 609178 - DNA, 75 bp, synthetic construct
  source 1..75: mol_type = other DNA
attttcaggcgccagcaaaggtgctgaaattcccggaagtgcaaattcaggaaatcatcagtaactgtgcgagag

SEQ ID NO: 609179 - DNA, 75 bp, synthetic construct
  source 1..75: mol_type = other DNA
cttacagcacaactgcgtctggggccggcagacatcctggagtcagatgagaatggtattatcccggagcaggcc

SEQ ID NO: 609180 - DNA, 75 bp, synthetic construct
  source 1..75: mol_type = other DNA
cagcagacattctggagtccgatgagaatggcattatcccggagcaggccagggtaatcacgcaggtggtgatac

SEQ ID NO: 609181 - DNA, 75 bp, synthetic construct
  source 1..75: mol_type = other DNA
cttacagcacagctgcgactgggaccggcagatattctggagtccgatgagaatggcattatcccggagcaggac

SEQ ID NO: 609182 - DNA, 75 bp, synthetic construct
  source 1..75: mol_type = other DNA
ctttgcgccgattgtgaatccatgcagcgtaccctggggcattaaagcgtttagcacctatttaggtgaggacaa

SEQ ID NO: 609183 - DNA, 75 bp, synthetic construct
  source 1..75: mol_type = other DNA
cgatcagggcgataatgatcagtttcttgccgaccagttgcaacctgcggtactggcagaagccgcgcgccagaa

SEQ ID NO: 609184 - DNA, 75 bp, synthetic construct
  source 1..75: mol_type = other DNA
cacgtgcagtcgcttacagcacaactgcgactggggccggcagacatcctggagtccgatgagaatggtattatt

SEQ ID NO: 609185 - DNA, 75 bp, synthetic construct
  source 1..75: mol_type = other DNA
tttcaggcgccagcaaaggtgctgaaattaccggaagtgcaaattcatgagatcgttagtcactctgcgagaatg

SEQ ID NO: 609186 - DNA, 75 bp, synthetic construct
  source 1..75: mol_type = other DNA
attttcaggcggcagcaaaggtgctgaaattcccggaagtgcaaattcaggaaatcatgagtaactgtgcgagag

SEQ ID NO: 609187 - DNA, 75 bp, synthetic construct
  source 1..75: mol_type = other DNA
attttcaggcgccagcaaaggtgctgaaattcccggaagtgcaaattcaggaaatcatgagtaactgtgcgagac

SEQ ID NO: 609188 - DNA, 75 bp, synthetic construct
  source 1..75: mol_type = other DNA
tggagcttaagaataaagattccagcgatatcgagctgattcataaggagattagcaacgcccggcgttcagcac

SEQ ID NO: 609189 - DNA, 75 bp, synthetic construct
  source 1..75: mol_type = other DNA
tttcaggcgccagcaaaggtgctgaaattaccggaagtgcagattcatgaaatcgttagtcactctgcgagaatg

SEQ ID NO: 609190 - DNA, 75 bp, synthetic construct
  source 1..75: mol_type = other DNA
tttcaggcgccagcaaaggtgctgaaattaccggaagtgcacattcatgacatcgttagtcactatgcgagaatg

SEQ ID NO: 609191 - DNA, 75 bp, synthetic construct
  source 1..75: mol_type = other DNA
ttcgctgctgacgcctgtctggtcgcctcatcttttgaagcagacgcagatgatgccgatgacgacgccgaactg

SEQ ID NO: 609192 - DNA, 75 bp, synthetic construct
  source 1..75: mol_type = other DNA
cattcgctgctttaactgccttcggtgtcgcggcaagcgtttcagatgtgctgttggtcgcactgctgagctgta

SEQ ID NO: 609193 - DNA, 75 bp, synthetic construct
  source 1..75: mol_type = other DNA
gtgtatttcccgttagccaggtcatacgcggccttaacggcttttggcgttgccgcctgtgactcggaagtgctg

SEQ ID NO: 609194 - DNA, 75 bp, synthetic construct
  source 1..75: mol_type = other DNA
ctgatgatttcgctgcctcttttgaggccgccgcatcccgggctgaggtggctgcttctgacgccttcgtggtcg

SEQ ID NO: 609195 - DNA, 75 bp, synthetic construct
  source 1..75: mol_type = other DNA
aggattctgcgctggtttccgacgctttcgcgttcgtctcggatgtcttcgctgcggaagcagacctcgctgctg

SEQ ID NO: 609196 - DNA, 75 bp, synthetic construct
  source 1..75: mol_type = other DNA
agacgctgaccgagccgacgtcgcggcctgtccggctgacgtgctggctgcgcgtgctgagtctgcagcatcagt

SEQ ID NO: 609197 - DNA, 75 bp, synthetic construct
  source 1..75: mol_type = other DNA
ttgttgcatcctgtgcagtgtatttcccgttagcaaggtcatatgctgcctttaccgcttttggtgttgcggcga

SEQ ID NO: 609198 - DNA, 75 bp, synthetic construct
  source 1..75: mol_type = other DNA
ttaatggacgcctcacgggccgatgatgcagctgctgtctcagagtctgccgcagctgaggcgctctgttccgct

SEQ ID NO: 609199 - DNA, 75 bp, synthetic construct
  source 1..75: mol_type = other DNA
gcagtgaccttgaccgccagcttcgtgacgccgtcgacaaacttgaccgcgagacacgtgcgcgccagcgatcca

SEQ ID NO: 609200 - DNA, 75 bp, synthetic construct
  source 1..75: mol_type = other DNA
agctgccgcgctttttgatgactctgcagcagcagcactttttgctgcttcacgggcctttgtcgatgccgttcc

SEQ ID NO: 609201 - DNA, 75 bp, synthetic construct
  source 1..75: mol_type = other DNA
ggcggcggtggcactggctgaggcctgcccggcacttgttgacgcggcactggcagataatgcagccgctgtttt

SEQ ID NO: 609202 - DNA, 75 bp, synthetic construct
  source 1..75: mol_type = other DNA
tcgtgctcgcatcctcaagcgccacggcggatgcaatatcctctgcccgttttgctgctgtctcggcgcgcgttg

SEQ ID NO: 609203 - DNA, 75 bp, synthetic construct
  source 1..75: mol_type = other DNA
tggtagctgccgcgctttttgaggactctgcagcagcagcacttttcgatgcttcactggcctttgttgatgccg

SEQ ID NO: 609204 - DNA, 75 bp, synthetic construct
  source 1..75: mol_type = other DNA
ggccgcaaccaacaggcgaacgttattgtgttaactctgcttctttacgcttcactgatggcgaaaacggcgaag

SEQ ID NO: 609205 - DNA, 75 bp, synthetic construct
  source 1..75: mol_type = other DNA
acaagctcatcgaattcaacatcgacagtgatgaagccaggtgagtcatatctaaccccgtggggagatgttgtt

SEQ ID NO: 609206 - DNA, 75 bp, synthetic construct
  source 1..75: mol_type = other DNA
attaatcgccaggatatcgcagaaaaactcgaaatgccgatcggagcggtgaatcagtttgtttattttgagcgg

SEQ ID NO: 609207 - DNA, 75 bp, synthetic construct
  source 1..75: mol_type = other DNA
atgcttgcattacaaccgcgctactccaactacacattatcatctggtatcctgcgcaaaactaaggaggttggt

SEQ ID NO: 609208 - DNA, 75 bp, synthetic construct
  source 1..75: mol_type = other DNA
tcaagccggaaaggcatgtgaaaccctgtctttttctatgacttcaggttttgtgatatctgtttcttgcgattt

SEQ ID NO: 609209 - DNA, 75 bp, synthetic construct
  source 1..75: mol_type = other DNA
tagcgtcattgatgctcgcaggaatttataaattgcagggtgtaccttcagttgtcagacaggatggtttggctg

SEQ ID NO: 609210 - DNA, 75 bp, synthetic construct
  source 1..75: mol_type = other DNA
tgccgtttcagaagacctggcgttcgtctcggacgtttttgccgccttcgcggaatttcctgccgccgttgccga

SEQ ID NO: 609211 - DNA, 75 bp, synthetic construct
  source 1..75: mol_type = other DNA
tcctctgcacgttttgccgctgtctcagcgcgcgttgctgcggattctgccgtacttttgctctgtgctgccgct

SEQ ID NO: 609212 - DNA, 75 bp, synthetic construct
  source 1..75: mol_type = other DNA
aactattctgcctgtaaatggtatgaagcgacctccgcacattttatcggtggcagaagtggaggttctatttat

SEQ ID NO: 609213 - DNA, 75 bp, synthetic construct
  source 1..75: mol_type = other DNA
ggcaagggaattacatcagtcgggtattaatcgccaggatatcgcggaaaaactcgaaatgccgatcggagcggt

SEQ ID NO: 609214 - DNA, 75 bp, synthetic construct
  source 1..75: mol_type = other DNA
acgctttcgtggtcgcggtggatgcagaagtggcggctgattgttctgacgctgccgcattcgtttctgacgttt

SEQ ID NO: 609215 - DNA, 75 bp, synthetic construct
  source 1..75: mol_type = other DNA
gtgactcggaagtgctgtttgtcgcactactgagttgtactatccctttctgtgctgtcgttgcattctgtgcgg

SEQ ID NO: 609216 - DNA, 75 bp, synthetic construct
  source 1..75: mol_type = other DNA
gtttctgatgatttcgctgcctcttttgaggccgccgcatcccgggctgaggtggcagcttctgacgctttcgtg

SEQ ID NO: 609217 - DNA, 75 bp, synthetic construct
  source 1..75: mol_type = other DNA
ggaatggagaaccattcaacagagttatcgaagccgagaacatcaacgactgctatgaccactggatgatatggg

SEQ ID NO: 609218 - DNA, 75 bp, synthetic construct
  source 1..75: mol_type = other DNA
ctggtactgctggtggtggcaacgggcgtggtcactattttgctgacggcagtggtgccgaaaatcatcgaacag

SEQ ID NO: 609219 - DNA, 75 bp, synthetic construct
  source 1..75: mol_type = other DNA
ccaccctatttcactttcccttctcgaaaagttgttaaacagcacacgggttaatacacagccggataatcagct

SEQ ID NO: 609220 - DNA, 75 bp, synthetic construct
  source 1..75: mol_type = other DNA
cgtattgacggattccgcaaagccagcgcacagcttgccgtgactggtcactcgcttgagaaagcgaaacaggaa

SEQ ID NO: 609221 - DNA, 75 bp, synthetic construct
  source 1..75: mol_type = other DNA
gggatcaaaaagcattcgccaaatcttgaatttgacacaattgtatatcatgatggaatatgtaaagaagatcaa

SEQ ID NO: 609222 - DNA, 75 bp, synthetic construct
  source 1..75: mol_type = other DNA
tgaagcacggatgaatgcttcggcagggggaatgttgcagcgtcggcgacacgcacatcgtcgcgtggcggcggc

SEQ ID NO: 609223 - DNA, 75 bp, synthetic construct
  source 1..75: mol_type = other DNA
tttgatcatctcggacacgcgctacccgcctccacccgaatgctcatcgccatgagcgacacgttacagaccagc

SEQ ID NO: 609224 - DNA, 75 bp, synthetic construct
  source 1..75: mol_type = other DNA
tgctgctggcggcagatcgcgtccgcgaaggaagcagcctgcgcgccgcgctggcggatctgcgcctgttcccgc

SEQ ID NO: 609225 - DNA, 75 bp, synthetic construct
  source 1..75: mol_type = other DNA
tacagcgtaatggtcgcaaaaccaaaggtatgattgaggcggattccgcgcgtcatgcccgccagttgttgcgcg

SEQ ID NO: 609226 - DNA, 75 bp, synthetic construct
  source 1..75: mol_type = other DNA
aaaatccgggcatctcgacgtggtgctcaatcgcctggcagattacaccgaacagcgacagcgcctgaaatcacg

SEQ ID NO: 609227 - DNA, 75 bp, synthetic construct
  source 1..75: mol_type = other DNA
aatggcagccctgcttgttttgccgcctgtatggattcattaaatgaatataaaaaaatcaacacccttctgcgc

SEQ ID NO: 609228 - DNA, 75 bp, synthetic construct
  source 1..75: mol_type = other DNA
gccatcatgcggtttctattcccgagctgctcgtcagccgggatgaaaggcaaacacggcaacacgcctggctca

SEQ ID NO: 609229 - DNA, 75 bp, synthetic construct
  source 1..75: mol_type = other DNA
ctggtaacactctcatttttaatcaccactccggaggcatgggtacccgcattgggtgacgctcatcatggtttc

SEQ ID NO: 609230 - DNA, 75 bp, synthetic construct
  source 1..75: mol_type = other DNA
cacggcggatgcaatatcctctgcccgttttgctgctgtctcggcgcgcgttgccgcggattccgccgtactttt

SEQ ID NO: 609231 - DNA, 75 bp, synthetic construct
  source 1..75: mol_type = other DNA
gtgatgggcgggattggccttatcgcatggccggtggtgatggggattaatgccatcattgcggcggctggcgtg

SEQ ID NO: 609232 - DNA, 75 bp, synthetic construct
  source 1..75: mol_type = other DNA
tgccgaggaagctgcgctgctggcgctcgaggctgcgttcgtttctgatgattttgccgcctcttttgaagccga

SEQ ID NO: 609233 - DNA, 75 bp, synthetic construct
  source 1..75: mol_type = other DNA
tgtctggtcgcctcatcttttgaagctgacgccgatgatgccgatgacgccgccgaactggcggacgatgcggca

SEQ ID NO: 609234 - DNA, 75 bp, synthetic construct
  source 1..75: mol_type = other DNA
cccgcttgcaccggtgtttgatgccattgcggaaaagctgggcgttgtctgccagtggtttaaagacctgcttgc

SEQ ID NO: 609235 - DNA, 75 bp, synthetic construct
  source 1..75: mol_type = other DNA
tgacgctttcgtggtcgcggtggatgcagaagtggctgctgattgttgtgacgctgccgcattcgtttctgacgt

SEQ ID NO: 609236 - DNA, 75 bp, synthetic construct
  source 1..75: mol_type = other DNA
gacgcgtcactgtttactgatgaatcaatacgctggcgaagcagctatgaggtggaaaaactacctgaagagtac

SEQ ID NO: 609237 - DNA, 75 bp, synthetic construct
  source 1..75: mol_type = other DNA
cggcactggcgctggtagctgccgcgctttttgatgactctgcagcagcagcactttttgctgcttcacgggtct

SEQ ID NO: 609238 - DNA, 75 bp, synthetic construct
  source 1..75: mol_type = other DNA
atgcgttcgtttctgatgatttcgctgcctcttttgaggccgccgcatcccgggctgaggtggctgcttctgacg

SEQ ID NO: 609239 - DNA, 75 bp, synthetic construct
  source 1..75: mol_type = other DNA
ggaattgcctgccgccgttgccgaggaggctgcactactggcgctcgaggctgcgctcgtttctgatgattttgc

SEQ ID NO: 609240 - DNA, 75 bp, synthetic construct
  source 1..75: mol_type = other DNA
ctactggagccacatggcgttgagtttcaggtgatggcaacgggctttacctgggatacacaaaatcgcgaatct

SEQ ID NO: 609241 - DNA, 75 bp, synthetic construct
  source 1..75: mol_type = other DNA
atcagactaggcatacattcgccaccagccatatcagccggggaacaaaccttttctggcttgcagctcaaatgg

SEQ ID NO: 609242 - DNA, 75 bp, synthetic construct
  source 1..75: mol_type = other DNA
atcaaactagacatacatttgctacaaaacacattagtcaaggtgttaatttgttttggttagccgctcaaatgg

SEQ ID NO: 609243 - DNA, 75 bp, synthetic construct
  source 1..75: mol_type = other DNA
ctgggatacacagaaccgcgaatctgatactgccgcctgccgcgaagtctggcaacatgcaaaaagaatgctggc

SEQ ID NO: 609244 - DNA, 75 bp, synthetic construct
  source 1..75: mol_type = other DNA
cgatccttcactggatatggttttgctcgatgagctgacgtatatggtggcgtatgactatttgccactggaaga

SEQ ID NO: 609245 - DNA, 75 bp, synthetic construct
  source 1..75: mol_type = other DNA
cgggtcgtggctgtcatcgggatatacttgaactggcagataccgtcagtgaattacgccccgtcaaacatgcgt

SEQ ID NO: 609246 - DNA, 75 bp, synthetic construct
  source 1..75: mol_type = other DNA
atgttcgggaactatattagcacaagtccggagaaaatcatcatattggcactacgcatcatgcagggcatcgct

SEQ ID NO: 609247 - DNA, 75 bp, synthetic construct
  source 1..75: mol_type = other DNA
aagctgattgccggaaaattaaaagacggaaagagtcttcacgaatgctccagcgaagagcgagaactagtcagg

SEQ ID NO: 609248 - DNA, 75 bp, synthetic construct
  source 1..75: mol_type = other DNA
ggaagaggaactgttcatcaagaggctaaaactcatccgtgctgatattcatgcccaactggcttcagtagggtg

SEQ ID NO: 609249 - DNA, 75 bp, synthetic construct
  source 1..75: mol_type = other DNA
tggaaaccagaccctgaaggtacatgatgctgtcagggggctaggactgcaacatctggaactgatggatcaggg

SEQ ID NO: 609250 - DNA, 75 bp, synthetic construct
  source 1..75: mol_type = other DNA
gcactgtaccgcccacaaaacgaagaaccttctctcacatctggtgagcggatccgtatcctttgtggactctca

SEQ ID NO: 609251 - DNA, 75 bp, synthetic construct
  source 1..75: mol_type = other DNA
gcatcgcaagaaccgtcgcagagcgcgtgtcagacctgaaaaactctccattgagcgagcaacctttaaagcggc

SEQ ID NO: 609252 - DNA, 75 bp, synthetic construct
  source 1..75: mol_type = other DNA
tgattcctcactggatatggttttgctcgatgagctgacttatatggtggcgtatgactatttgccactggaaga

SEQ ID NO: 609253 - DNA, 75 bp, synthetic construct
  source 1..75: mol_type = other DNA
ttcttacgtatcggcttatgcctgctgttttatagcactgtcgcactgctctacattgcactgtttacttccatc

SEQ ID NO: 609254 - DNA, 75 bp, synthetic construct
  source 1..75: mol_type = other DNA
tatctctcgcgggacattatatgaattacagtggcgcggaaattttgccgatacctggtatctttactgtgggcc

SEQ ID NO: 609255 - DNA, 75 bp, synthetic construct
  source 1..75: mol_type = other DNA
ctgaaggtattgccctgacatttcgtgttcctgaaggaaatataaaacatcctttgattctcttatgccatggat

SEQ ID NO: 609256 - DNA, 75 bp, synthetic construct
  source 1..75: mol_type = other DNA
cgcttccgtgcgttacgcgaaattgcagaagaatgaatgccaggtgatgccgtacccgaacccggcagatatcgc

SEQ ID NO: 609257 - DNA, 75 bp, synthetic construct
  source 1..75: mol_type = other DNA
gactcgcccggaagcgccgttcctcgctgacctggcaatggacttcgcctctattctgtcaaaagaatatgctga

SEQ ID NO: 609258 - DNA, 75 bp, synthetic construct
  source 1..75: mol_type = other DNA
ataaaatggcagagaagaagaaaaacaccgggaaagagatgtttgtgggggttacacgggtactaagtgatgatg

SEQ ID NO: 609259 - DNA, 75 bp, synthetic construct
  source 1..75: mol_type = other DNA
atcatcgaaaaccatgaaccgctgcgtgaagcgttaaaagcacgtggctataccttcgtttctgaaaccgacacc

SEQ ID NO: 609260 - DNA, 75 bp, synthetic construct
  source 1..75: mol_type = other DNA
cttctgtcgttggtgtgataaaaggaaccaaaacaaaagctggtaccagaaaagttgaattaaacaatgaagcca

SEQ ID NO: 609261 - DNA, 75 bp, synthetic construct
  source 1..75: mol_type = other DNA
gtcaaatgggtcacaaaggaccagaaatgctgtttagacactatggttcatatttatcagaatatgatggcaaga

SEQ ID NO: 609262 - DNA, 75 bp, synthetic construct
  source 1..75: mol_type = other DNA
tcggcggtgactttaaggagtttcagtccgcttatgaggctgtggggactgacctgtttgaccagcaggaaggcg

SEQ ID NO: 609263 - DNA, 75 bp, synthetic construct
  source 1..75: mol_type = other DNA
gtgggtgccatgtattcaatgcagctgcgcaggataaaagagtgaaaagtattgtcagccagctggcttttgctg

SEQ ID NO: 609264 - DNA, 75 bp, synthetic construct
  source 1..75: mol_type = other DNA
gcgtgaggctgttctgcgtgctattccgcaactgcgcggcgcgtacggtacggtaattatggactcccgtcaccc

SEQ ID NO: 609265 - DNA, 75 bp, synthetic construct
  source 1..75: mol_type = other DNA
atagccggaaaactgaaggatgggtccagcctccatgaatgtagcccggacgagaaggaattcgtgaagcgcctg

SEQ ID NO: 609266 - DNA, 75 bp, synthetic construct
  source 1..75: mol_type = other DNA
gaaaggggcaggcagagcggatagcagcgacaattcgccataatcgtgccagaggaaaacatcagattacatcaa

SEQ ID NO: 609267 - DNA, 75 bp, synthetic construct
  source 1..75: mol_type = other DNA
gattagtgggctgacggagctgtttcatggagaggatttcagccctgcatggactgtgtcggataaaacaaaaag

SEQ ID NO: 609268 - DNA, 75 bp, synthetic construct
  source 1..75: mol_type = other DNA
ggtggttgtgtcagaggagaagaatcatttcctcgtggtggatggttttcatcgtcagttactgggcagggaggc

SEQ ID NO: 609269 - DNA, 75 bp, synthetic construct
  source 1..75: mol_type = other DNA
caatgcctccggttgtgttgcctgcgcctgcgggcgcatgggctaaacataagttaactggagggggcgaagact

SEQ ID NO: 609270 - DNA, 75 bp, synthetic construct
  source 1..75: mol_type = other DNA
aagctggcgaagtccttaccatacttgcactgtatcgccagaacgtaaccctgtagaaattgccgccgatattga

SEQ ID NO: 609271 - DNA, 75 bp, synthetic construct
  source 1..75: mol_type = other DNA
atccccaggtctatggcgcccgcgtcaatctggaacacattttaggctggtctccaaacagtgattttcgtgctt

SEQ ID NO: 609272 - DNA, 75 bp, synthetic construct
  source 1..75: mol_type = other DNA
cccttttgcccgggaaccggtggactgtgtgttatgggtgaaatcggatgaggtggtagccaacgattataatcc

SEQ ID NO: 609273 - DNA, 75 bp, synthetic construct
  source 1..75: mol_type = other DNA
gctgaggctgaaacagattagcggactgacggaattgtttcaggaagaggatttcagcccggcatggacggttcg

SEQ ID NO: 609274 - DNA, 75 bp, synthetic construct
  source 1..75: mol_type = other DNA
cgcgaccattcgacataaccgggccagggggaaacaccagatcactttaatgtctgatattgtcagggatctttc

SEQ ID NO: 609275 - DNA, 75 bp, synthetic construct
  source 1..75: mol_type = other DNA
attggtactgagctgggtatggaccaggatgaagtgctgaggctgaaacaaatcagcgggctgactgagctgttt

SEQ ID NO: 609276 - DNA, 75 bp, synthetic construct
  source 1..75: mol_type = other DNA
gggatgaagtgctgaggttgaaacaaattagcggattgacagagttgtatcaggaggaggatttcagccctgcgt

SEQ ID NO: 609277 - DNA, 75 bp, synthetic construct
  source 1..75: mol_type = other DNA
gaaaggggcaagctgcacgcattgccgcaactattcgacataaccgggccagggggaaacatcagataacctcaa

SEQ ID NO: 609278 - DNA, 75 bp, synthetic construct
  source 1..75: mol_type = other DNA
aactggctggcgaaatatatggcgacaatgcctccggttgtgttgcctgcgcctgcgggcgcatgggccaaacat

SEQ ID NO: 609279 - DNA, 75 bp, synthetic construct
  source 1..75: mol_type = other DNA
acggcatgtcacgcgagatcgccgaaagagttagttatctgcgcaatgaatgcccgtacccgtgccagccagcta

SEQ ID NO: 609280 - DNA, 75 bp, synthetic construct
  source 1..75: mol_type = other DNA
attttgacgtcatggataaccactatgttcccaatctgacgattgggccgatggtgctgaaatctctgcgtaatt

SEQ ID NO: 609281 - DNA, 75 bp, synthetic construct
  source 1..75: mol_type = other DNA
atcaactggctgatgaaaaacgacgagaagacggaagctattcagaagaatttaggggatgcaccgccactatct

SEQ ID NO: 609282 - DNA, 75 bp, synthetic construct
  source 1..75: mol_type = other DNA
gcgccaaagagatcgccgaacgcgtcgcctatctgaagcactgcgactatagccaaatgccacagcaccgcgtca

SEQ ID NO: 609283 - DNA, 75 bp, synthetic construct
  source 1..75: mol_type = other DNA
gaatggcccgcgagatagcagaaaggtcggcttatatccttcattcttgccctgcgtgccaactgccagccaaac

SEQ ID NO: 609284 - DNA, 75 bp, synthetic construct
  source 1..75: mol_type = other DNA
aagctgatcgcagggaagttaaaagacggaaagagtctgcacgaatgttccgacactgaaaaagagttcgttaaa

SEQ ID NO: 609285 - DNA, 75 bp, synthetic construct
  source 1..75: mol_type = other DNA
ccggcgccgtttgcaggcgtcgtgaaggaactgaaagtcaacgttggcgataaagtgaaaactggctcgctgatt

SEQ ID NO: 609286 - DNA, 75 bp, synthetic construct
  source 1..75: mol_type = other DNA
gtgctctgtacaccatgcctgaccccggtgaactcgatcagcgagtggttctcagggaaagagtggatgttcctg

SEQ ID NO: 609287 - DNA, 75 bp, synthetic construct
  source 1..75: mol_type = other DNA
atctgctgcgcttctcgcaaaaagggcaattcgttctaccgcccgttcgttatgtgcgttcctatgcgcctgcgc

SEQ ID NO: 609288 - DNA, 75 bp, synthetic construct
  source 1..75: mol_type = other DNA
agcgggagtattggcggcggtgctgcggctgttatgctgggtggcttaggcgctggcgctgcatatatggctatg

SEQ ID NO: 609289 - DNA, 75 bp, synthetic construct
  source 1..75: mol_type = other DNA
gcaaaagctgaagctccggcagcagcaccggctgcgaaagcggaaggcaaatctgaatttgctgaaaacgacgct

SEQ ID NO: 609290 - DNA, 75 bp, synthetic construct
  source 1..75: mol_type = other DNA
gtgacggtaagctgactgcgggcgaaatgcagggcggttgcttcaccatttccagcatcggcggcctgggtacta

SEQ ID NO: 609291 - DNA, 75 bp, synthetic construct
  source 1..75: mol_type = other DNA
ccggaagcgttcgagcaggaagtgaataagcgcctggccaagtttggcattgacgaacagaccgtaactcacccc

SEQ ID NO: 609292 - DNA, 75 bp, synthetic construct
  source 1..75: mol_type = other DNA
tggaaatgactgcgcgattttttattcagaggttagagcagagtggaatcagcgagcaaaggaggcaaacagtga

SEQ ID NO: 609293 - DNA, 75 bp, synthetic construct
  source 1..75: mol_type = other DNA
aatctggtagcaaatatgcagcgcctggaaatgactgcgcgattttttattcagaggttagagcagagtggaatc

SEQ ID NO: 609294 - DNA, 75 bp, synthetic construct
  source 1..75: mol_type = other DNA
catcagcctatgggcaactcagctatcgcatgacctacaacctggtatcaatgtttaccgaccttgccatccttg

SEQ ID NO: 609295 - DNA, 75 bp, synthetic construct
  source 1..75: mol_type = other DNA
aagccagggggctactcgtaacggggattctgaacttgaagtcaccaatgccattttcggtaccaatgagttccg

SEQ ID NO: 609296 - DNA, 75 bp, synthetic construct
  source 1..75: mol_type = other DNA
tgaagcggttacgcctgcgcctatcacggaaagctgaatttcttggtgctcaccgcttgcctaccggtacttttg

SEQ ID NO: 609297 - DNA, 75 bp, synthetic construct
  source 1..75: mol_type = other DNA
tgttcgtcggtcttgatgtgctgatggatggcgatcagattcgccaggtgccggtgctcgatgagaacggtaaac

SEQ ID NO: 609298 - DNA, 75 bp, synthetic construct
  source 1..75: mol_type = other DNA
gcaccattggcatttacagcaataaagacgagatcaagcaggcaatggacgcagcaagcgcgcgcattgcagcag

SEQ ID NO: 609299 - DNA, 75 bp, synthetic construct
  source 1..75: mol_type = other DNA
gactggattaacagccagcctgaaaaataccgtgaacgcttgtatcgcggggcgatgattggccggatgttaatt

SEQ ID NO: 609300 - DNA, 75 bp, synthetic construct
  source 1..75: mol_type = other DNA
cgacagcatccgtgttgaaacaccagccaccgatgctttcctggctgaagtacgggcgcaggggggtagagatgt

SEQ ID NO: 609301 - DNA, 75 bp, synthetic construct
  source 1..75: mol_type = other DNA
atagctataaaaatggtcgcgaagcgtcacaactggcctatctgcccaccagcgcggtggcgcaatcggcgcggg

SEQ ID NO: 609302 - DNA, 75 bp, synthetic construct
  source 1..75: mol_type = other DNA
gcagatgaagccactatcacggcgcggatgaacgcgatcccgcactcaaattaccgtgcagtcgtgtttaccaaa

SEQ ID NO: 609303 - DNA, 75 bp, synthetic construct
  source 1..75: mol_type = other DNA
gacgcaatcaaggcgaaattcggcgctcgctggttgccagcgaaggcgaagaacagcgatttcccgggtaactgg

SEQ ID NO: 609304 - DNA, 75 bp, synthetic construct
  source 1..75: mol_type = other DNA
gagaaattaatagagaccatgagtcctctgagatctaaaaaccaactaacgaagaatcaacggaataaaaataat

SEQ ID NO: 609305 - DNA, 75 bp, synthetic construct
  source 1..75: mol_type = other DNA
gaaaaactaatagagacactgagtccagcaagatctaaaagccaatcaacaatgaatcaacggaatagaaataat

SEQ ID NO: 609306 - DNA, 75 bp, synthetic construct
  source 1..75: mol_type = other DNA
gcttcagttgtctggaaaatgaaattgctgaactgaataaaaaactgtcggcgctgatgccttctgaagatgcaa

SEQ ID NO: 609307 - DNA, 75 bp, synthetic construct
  source 1..75: mol_type = other DNA
agggcgatattgcggaaatcactcgccgttcggtaaacattttcgataaaactggcgcggaagtaaaacgtcagg

SEQ ID NO: 609308 - DNA, 75 bp, synthetic construct
  source 1..75: mol_type = other DNA
cgcgtcgccgtatattgtcggagtattcagataccggcaccgaaaaatcagagaagtatccgtactttgaggata

SEQ ID NO: 609309 - DNA, 75 bp, synthetic construct
  source 1..75: mol_type = other DNA
catgttgtgggtaacgttccgttcggcggtcgtgataacacacgcaacatcgataagccttacgcagaagaaacg

SEQ ID NO: 609310 - DNA, 75 bp, synthetic construct
  source 1..75: mol_type = other DNA
gtaatggccaaagcagctgataacgcagactggaaggctcgttgggggagtgtccataacgctgaccgtatgttg

SEQ ID NO: 609311 - DNA, 75 bp, synthetic construct
  source 1..75: mol_type = other DNA
atgaacaagctatctatgggggtgtttcgctgttcaagtgtcagcgaaatattgaaatacattagtgcaataaca

SEQ ID NO: 609312 - DNA, 75 bp, synthetic construct
  source 1..75: mol_type = other DNA
gcaatggccaaggcagcggataacgcagactggaaggcacgctgggggagtgtccataacgctgaccgtatgttg

SEQ ID NO: 609313 - DNA, 75 bp, synthetic construct
  source 1..75: mol_type = other DNA
gagtctgaacagccgtcctgatgaggtatctcacacacttttacctgtatacgattatgccggttcatggaacct

SEQ ID NO: 609314 - DNA, 75 bp, synthetic construct
  source 1..75: mol_type = other DNA
tcagatgccattctgttcgcaaaaaatgactacaaattgctcccggaaagccagcaacaaatccaaaccatggca

SEQ ID NO: 609315 - DNA, 75 bp, synthetic construct
  source 1..75: mol_type = other DNA
gtaaaaccacgaccgcgctggcgcttgaggcgttcaactatgagaatggccgatcaaccagaactttgtatgtag

SEQ ID NO: 609316 - DNA, 75 bp, synthetic construct
  source 1..75: mol_type = other DNA
acgcaccaaaattcgccgctggcgaggtatttgggcttcaggaagcctccggcatgaaaggggttcttttccgtg

SEQ ID NO: 609317 - DNA, 75 bp, synthetic construct
  source 1..75: mol_type = other DNA
cgtggtgaatgctactttacgcaaaagcttgccagttacctgattacacattccggtaactatcgttataacagc

SEQ ID NO: 609318 - DNA, 75 bp, synthetic construct
  source 1..75: mol_type = other DNA
gcgtatcggcgcctccaataacgagattgctcgttcgctgttcatcagcgaaaacacggtaaaaacgcatcttta

SEQ ID NO: 609319 - DNA, 75 bp, synthetic construct
  source 1..75: mol_type = other DNA
catcaacaaagagtcagacacacttgaccagaccgccgccagaactcatgccgccacgtatggcaccggtggtta

SEQ ID NO: 609320 - DNA, 75 bp, synthetic construct
  source 1..75: mol_type = other DNA
gaagtgattgcacatttggtgaactgggagctgaaacaaggcgggactctgcgtgaggctgttctgcgtgctatt

SEQ ID NO: 609321 - DNA, 75 bp, synthetic construct
  source 1..75: mol_type = other DNA
cagcgcgggcggtgttgcgcacttcgtcggtatggcgttcggctcgcggcttgagagagtcaccggctggctgtt

SEQ ID NO: 609322 - DNA, 75 bp, synthetic construct
  source 1..75: mol_type = other DNA
tttatcggtcattcccgtgggtttgcctgccgcgctacaaattgccgccgggttcggccaggcaatgtttggctg

SEQ ID NO: 609323 - DNA, 75 bp, synthetic construct
  source 1..75: mol_type = other DNA
gactggcccagggcattggtctgttatcaacgtcattattgggcactggcgtgtttgctgttcctgccttagccg

SEQ ID NO: 609324 - DNA, 75 bp, synthetic construct
  source 1..75: mol_type = other DNA
caacataatcctgaccactacctggcacgcctctcttctcgccatatcccgaataatgccctcaatgcggtgctc

SEQ ID NO: 609325 - DNA, 75 bp, synthetic construct
  source 1..75: mol_type = other DNA
cctgcacctggtaatatcgaacttaccgggttatttgctgcgttatcagtgatgttctggtgctttgtcggtctg

SEQ ID NO: 609326 - DNA, 75 bp, synthetic construct
  source 1..75: mol_type = other DNA
tactggcgatggtcggctggaagagcctgtacgcgctgatcatgctggcgggcctgtggttattcctgcccaaac

SEQ ID NO: 609327 - DNA, 75 bp, synthetic construct
  source 1..75: mol_type = other DNA
aacagccgaacgcgatcaaaaacactcttgccgggcgtatcagccacggtcaggtggatctaagtgaactggggc

SEQ ID NO: 609328 - DNA, 75 bp, synthetic construct
  source 1..75: mol_type = other DNA
gcaatcaaaaacgcgtacctgatgaaaaagaatggtgggcgcggaccggttctcctgactgcaacgccagtagtt

SEQ ID NO: 609329 - DNA, 75 bp, synthetic construct
  source 1..75: mol_type = other DNA
cacccgtactgcttatgtagtgcctaaagcagtgctggaaaactggtattacgaagcaaaagagttcctgagtga

SEQ ID NO: 609330 - DNA, 75 bp, synthetic construct
  source 1..75: mol_type = other DNA
gggaagtgagtgcagaagtgctgaaaaagacttttttaatattctgaaaaagaaaaaagggagtattcgctggag

SEQ ID NO: 609331 - DNA, 75 bp, synthetic construct
  source 1..75: mol_type = other DNA
gtctcttggtctgaattatcgcgtatccaccgccgacctgaagatgatgtacgcaccaaaattcgccgctggcga

SEQ ID NO: 609332 - DNA, 75 bp, synthetic construct
  source 1..75: mol_type = other DNA
aatttttgaagtaaaacacggtggctatcaacccgtggctgccgatgactatgcgcactgggctccagcggaagg

SEQ ID NO: 609333 - DNA, 75 bp, synthetic construct
  source 1..75: mol_type = other DNA
cagtatttaccattctgaaagaaatgcaggccagttttgagaaaaaccggctcggtactgcccagcaggctgaat

SEQ ID NO: 609334 - DNA, 75 bp, synthetic construct
  source 1..75: mol_type = other DNA
tctctttactggctggaatgtgtactccagcattatctacaccagtcaatgttactgatacaatacaaagcacag

SEQ ID NO: 609335 - DNA, 75 bp, synthetic construct
  source 1..75: mol_type = other DNA
atcatcgaaaaccatgaaccgctgcgcgaagagttaaaagcgcgtggctatatcttcgtttctgaaacagacacc

SEQ ID NO: 609336 - DNA, 75 bp, synthetic construct
  source 1..75: mol_type = other DNA
ttcaacaaactgcgcagcggtattgactgggtactggaaaaactcggcgtcatcaacaaagagtcagacacactt

SEQ ID NO: 609337 - DNA, 75 bp, synthetic construct
  source 1..75: mol_type = other DNA
gtgaggctaaacttattcaagctgttcaagccgtaggtcattcggctaagaaagtacaggcatggcttaaagacc

SEQ ID NO: 609338 - DNA, 75 bp, synthetic construct
  source 1..75: mol_type = other DNA
acttatacggaaacaaagatcatgatgataaaggcggtaaacttaaaatcaaactggtagatgatgttcctgtgt

SEQ ID NO: 609339 - DNA, 75 bp, synthetic construct
  source 1..75: mol_type = other DNA
atgaaaaacattatcgctgctatcgtgctttctgctactgctttcggtgctgatgctgcgtcctttgattgcact

SEQ ID NO: 609340 - DNA, 75 bp, synthetic construct
  source 1..75: mol_type = other DNA
gcatggtttacgctctgtagcaagtacggcgcttaatgaacaggggttcccgccagatgtaatagaggctgcgct

SEQ ID NO: 609341 - DNA, 75 bp, synthetic construct
  source 1..75: mol_type = other DNA
ccacagtgcagatcaaagcagccaggccagcggaaaaggagtacaccctacaggacggcggagggctttttctcc

SEQ ID NO: 609342 - DNA, 75 bp, synthetic construct
  source 1..75: mol_type = other DNA
gaacagccagacagctaacgcagcattgcggcgtatgggattcgctggcgtgctggtgtctcatggattacgcgc

SEQ ID NO: 609343 - DNA, 75 bp, synthetic construct
  source 1..75: mol_type = other DNA
cgctgaccaccagcgacttcgagcgtattctgaccgagccgaatgcctctatcaccgtgcagtacaaagcactga

SEQ ID NO: 609344 - DNA, 75 bp, synthetic construct
  source 1..75: mol_type = other DNA
gtttaccgactccggtattaaacgcatcgcggaagcggcatggcaggtgaacgaatctaccgaaaacatcggtgc

SEQ ID NO: 609345 - DNA, 75 bp, synthetic construct
  source 1..75: mol_type = other DNA
gggtgcgcgttctggaagtgactctgcgtaccgagtgtgcagttgacgctatccgtgctatcgccaaagaagtgc

SEQ ID NO: 609346 - DNA, 75 bp, synthetic construct
  source 1..75: mol_type = other DNA
ggactgtaccaccagaacgacataagactggggacataacaggcgaaccgctaaagcggcccattattgaaccgg

SEQ ID NO: 609347 - DNA, 75 bp, synthetic construct
  source 1..75: mol_type = other DNA
ccgtcgtctggcgaaactggctaatgcgccattcatcaaagtcgaagcaaccaaattcaccgaagtaggctatgt

SEQ ID NO: 609348 - DNA, 75 bp, synthetic construct
  source 1..75: mol_type = other DNA
tctgtggcgattgcactgcgtaaccgctggcgccgcatgcagctcaacgaagagttgcgccatgaagtcaccccg

SEQ ID NO: 609349 - DNA, 75 bp, synthetic construct
  source 1..75: mol_type = other DNA
caccgctcgccgctttgttgagatactcacgcccatcaaggcacgtggcaacctggaaacactgaaacgcgtttt

SEQ ID NO: 609350 - DNA, 60 bp, synthetic construct
  source 1..60: mol_type = other DNA
atgaatatcagcacagaaacccgcgaaattctgcgtaattacagggccgtgattaatgcg

SEQ ID NO: 609351 - DNA, 75 bp, synthetic construct
  source 1..75: mol_type = other DNA
gatcgatggttctcgaatggttcctaaataccgggccttcattaaactattgctgcattttggctgccgtagttc

SEQ ID NO: 609352 - DNA, 75 bp, synthetic construct
  source 1..75: mol_type = other DNA
gacaagagcgattatctagaagaacagcgtaaagcatatcaggcatggtgggagagagttgaatcgatcgttact

SEQ ID NO: 609353 - DNA, 75 bp, synthetic construct
  source 1..75: mol_type = other DNA
ttatctattcttatgagtaaagataatgtttataaatatcccgatcaagatgttatgaatgttttattgaaaggg

SEQ ID NO: 609354 - DNA, 75 bp, synthetic construct
  source 1..75: mol_type = other DNA
atggtgaaagtcgcccaagcacttggcctgcggctcgcttacaaatcgacccacggcgggcccacaccggccgag

SEQ ID NO: 609355 - DNA, 75 bp, synthetic construct
  source 1..75: mol_type = other DNA
agtcatcgcgggctttgcgggcggtactgcggatgcttttacgctgttcgaactgtttgaacgtaaactggaaat

SEQ ID NO: 609356 - DNA, 75 bp, synthetic construct
  source 1..75: mol_type = other DNA
gattttgatttcataaataaggtatggactgtaccaccagaacgacataagactggggacataacaggcgaaccg

SEQ ID NO: 609357 - DNA, 75 bp, synthetic construct
  source 1..75: mol_type = other DNA
atgaaattaaaattctttatgctgcgatcgatggctctcgaatggttcccaaataccgggccttcattaaactat

SEQ ID NO: 609358 - DNA, 75 bp, synthetic construct
  source 1..75: mol_type = other DNA
aattccctcattggtctcttcatgacttgagacgtacagctcgaacaaatttttctgatcttactgcgcctcata

SEQ ID NO: 609359 - DNA, 75 bp, synthetic construct
  source 1..75: mol_type = other DNA
cagcgtaaagcctaccaggcatggtgggagagagttaaatcgattgttacttgtactaactcatgctccaattga

SEQ ID NO: 609360 - DNA, 75 bp, synthetic construct
  source 1..75: mol_type = other DNA
gataagagcgattatctagaagaacagcgtaaagcttactgggcatggtgggagagggttgaatcgatcgttact

SEQ ID NO: 609361 - DNA, 75 bp, synthetic construct
  source 1..75: mol_type = other DNA
tttgagacgaacagcacgaacaaacttttctgatcttactgctcctcatattgctgaaataatgcttggtcataa

SEQ ID NO: 609362 - DNA, 75 bp, synthetic construct
  source 1..75: mol_type = other DNA
cgttctggaagtgactttgcgtaccgagtgtgcagttgatgctatccgtgcaatcgccaaagaagtaccggaagc

SEQ ID NO: 609363 - DNA, 75 bp, synthetic construct
  source 1..75: mol_type = other DNA
gcggtgaagcgtgggcgtattgttaaccgcaccaacggaccgctgaacgagcagttgcatgaacgccatgacgcc

SEQ ID NO: 609364 - DNA, 75 bp, synthetic construct
  source 1..75: mol_type = other DNA
caacgctgggcgaaagaagtgggcgaacgtccggcggtgaagcgtgggcgtattgttaaccgcaccaacgggccg

SEQ ID NO: 609365 - DNA, 75 bp, synthetic construct
  source 1..75: mol_type = other DNA
tgtcgaagtgaacccaaactcgaagatcccggcattgcgcgatcatacccataatccgccgatccgcgtgtttga

SEQ ID NO: 609366 - DNA, 75 bp, synthetic construct
  source 1..75: mol_type = other DNA
ttaaacacatttcgcttaactctaataataaagctgaaggcactgccttttatgattatttaaatgaaattaaag

SEQ ID NO: 609367 - DNA, 75 bp, synthetic construct
  source 1..75: mol_type = other DNA
atgcaagcaatacttaatgaattgcgacaaaatgtaagtcataagatagatttaaacaatgaaataaaagaatca

SEQ ID NO: 609368 - DNA, 75 bp, synthetic construct
  source 1..75: mol_type = other DNA
ataacgtaagattacatgtcagtccttctttaaatagtgaagtgattgaatgcattggcaaaaacacaattgttg

SEQ ID NO: 609369 - DNA, 75 bp, synthetic construct
  source 1..75: mol_type = other DNA
aacctgtcgatctgagtcgttttatcagaactaaccaggttgcgcgtctgaccgtaaatgccgaaccttcatcgg

SEQ ID NO: 609370 - DNA, 75 bp, synthetic construct
  source 1..75: mol_type = other DNA
ggcctgagcggtgcctggtggtggcaggatcataaagcccagcaggaagagatcaccaccatggcagatcaatct

SEQ ID NO: 609371 - DNA, 75 bp, synthetic construct
  source 1..75: mol_type = other DNA
cgccgttgccaatcgatcaggctggcgtgaccactccagcggctgatcctaatgcgctggtgatgaactttactg

SEQ ID NO: 609372 - DNA, 75 bp, synthetic construct
  source 1..75: mol_type = other DNA
atcccggcgctgcgcgatcatacgcataatccgccgatccgcgtgtttgagtctggttcgatcctgctttatctg

SEQ ID NO: 609373 - DNA, 75 bp, synthetic construct
  source 1..75: mol_type = other DNA
cctaatgcactggtcatgaactttaccgccgattgctggctggaagttaccgatgctaccggtaaaaaactgttc

SEQ ID NO: 609374 - DNA, 75 bp, synthetic construct
  source 1..75: mol_type = other DNA
ggcctgagcggtgcctggtggtggcaggatcacaaagcccagcaggaagagatcaccacgatggctgatcaatct

SEQ ID NO: 609375 - DNA, 75 bp, synthetic construct
  source 1..75: mol_type = other DNA
ggaaccaccgtgcgtcacggtatggagctgtatcgccactgccagcggcaggtggaactggtccgcgaacgcctg

SEQ ID NO: 609376 - DNA, 75 bp, synthetic construct
  source 1..75: mol_type = other DNA
ggtcattgctggcattcttgcatggcaatttgcgcccggaccaggccgcagaggtgaaactctgcggcctttttc

SEQ ID NO: 609377 - DNA, 75 bp, synthetic construct
  source 1..75: mol_type = other DNA
ccaccgcaaccaacacgcaaacacctgccgtaactgcgccagcaccagctgttgatccgcaacagaatgcggttg

SEQ ID NO: 609378 - DNA, 75 bp, synthetic construct
  source 1..75: mol_type = other DNA
ccaacggcaacaataacgccagatggtgctgcgccgttgccaaccgatcaggcaggcgtgactacgccggcggct

SEQ ID NO: 609379 - DNA, 75 bp, synthetic construct
  source 1..75: mol_type = other DNA
gagtgcgcagttgacgctatccgtgctatcgccaaagaagtgcctgaagcgattgtgggggccggtacggtgctg

SEQ ID NO: 609380 - DNA, 75 bp, synthetic construct
  source 1..75: mol_type = other DNA
cgccgctggcgcagaagtttattcagtcaaccctgcatctggatatcccggaagattaccaggaacgtctgcaag

SEQ ID NO: 609381 - DNA, 75 bp, synthetic construct
  source 1..75: mol_type = other DNA
gtaaacctgctggagcgcccaaccgagggtagcgtgctggtcgatggccaggaactgaccacgctgtcagaatcc

SEQ ID NO: 609382 - DNA, 75 bp, synthetic construct
  source 1..75: mol_type = other DNA
ctggaaaatctcaatggtatctataacctacgctttgtcagcgagccagataacggtatctacgacgccatgaac

SEQ ID NO: 609383 - DNA, 75 bp, synthetic construct
  source 1..75: mol_type = other DNA
ctgaagccctccttttcgcaaaccctatatccactattacttgttctgctgacgcagcagcggcctctttcggaa

SEQ ID NO: 609384 - DNA, 75 bp, synthetic construct
  source 1..75: mol_type = other DNA
tcgcgccatttggtgtgctgccggaaacggcggtactgaacgtgccgttatcccccgtcagcaccctttgctgca

SEQ ID NO: 609385 - DNA, 75 bp, synthetic construct
  source 1..75: mol_type = other DNA
cgggggctttatccctggtggcattggttgctggagagagaaaacccccgcacgttgcaggtatgcacctgacaa

SEQ ID NO: 609386 - DNA, 75 bp, synthetic construct
  source 1..75: mol_type = other DNA
atgaattttgaaggaaaaatcgcactggtaaccggtgcaagccgtgggattggccgcgcaattgctgaaacgctc

SEQ ID NO: 609387 - DNA, 75 bp, synthetic construct
  source 1..75: mol_type = other DNA
gggcataaaattaaacgtagcgccaaacctggctggtatatttatcacagcctgcccgccagtcatcaggcgata

SEQ ID NO: 609388 - DNA, 75 bp, synthetic construct
  source 1..75: mol_type = other DNA
cgggccagggggaaacaccagataacgtcaatgtctgaaattgtcagggacctttcccggctgggctggaccgat

SEQ ID NO: 609389 - DNA, 75 bp, synthetic construct
  source 1..75: mol_type = other DNA
cgggccagggggaaacaccagataacgtcaatgtctgaaattgtcagggacctttcccgcctgggctggacggat

SEQ ID NO: 609390 - DNA, 75 bp, synthetic construct
  source 1..75: mol_type = other DNA
cgcgccagggggaaacaccagataacgtcaatgtctgaaattgtcagggacctttcccgcctgggctggaccgat

SEQ ID NO: 609391 - DNA, 75 bp, synthetic construct
  source 1..75: mol_type = other DNA
cttcaatgtctgaaattgtcagggacctctcacggctgggctggacagatgaccgaattggaacagaggctgggc

SEQ ID NO: 609392 - DNA, 75 bp, synthetic construct
  source 1..75: mol_type = other DNA
cttcaatgtctgaaattgtcagggacctttcacgtctgggctggacagatgagcgaattggaacagaggctgggc

SEQ ID NO: 609393 - DNA, 75 bp, synthetic construct
  source 1..75: mol_type = other DNA
cttcaatgtctgaaattgtcagggacctatcacgcctgggctggacagatgaacgaattggaacagaggctgggc

SEQ ID NO: 609394 - DNA, 75 bp, synthetic construct
  source 1..75: mol_type = other DNA
cgagccagggggaaacaccagataacgtcaatgtctgaaattgtcagggacctttcccgactgggctggaccgat

SEQ ID NO: 609395 - DNA, 75 bp, synthetic construct
  source 1..75: mol_type = other DNA
aaactgttgcagcgctcactgcaggaagatggttttacgcagccggttgttgtttcagaagaaaaaggtgagtat

SEQ ID NO: 609396 - DNA, 75 bp, synthetic construct
  source 1..75: mol_type = other DNA
ctggacgagtccgatgaaccgttcgatgacgacaacctgatcgactacggtctggattcagtgcgcatgatggcg

SEQ ID NO: 609397 - DNA, 75 bp, synthetic construct
  source 1..75: mol_type = other DNA
cgtgccagggggaaacaccagataacgtcaatgtctgaaattgtcagggacctttcccgcctgggctggactgat

SEQ ID NO: 609398 - DNA, 75 bp, synthetic construct
  source 1..75: mol_type = other DNA
cgtgccagggggaaacaccagataacgtcaatgtctgaaattgtcagggacctttcccgtctgggctggaccgat

SEQ ID NO: 609399 - DNA, 75 bp, synthetic construct
  source 1..75: mol_type = other DNA
cgagccagggggaaacaccagataacgtcaatgtctgaaattgtcagggacctttcccgcctgggctggacagat

SEQ ID NO: 609400 - DNA, 75 bp, synthetic construct
  source 1..75: mol_type = other DNA
cttcaatgtctgaaattgtcagggacctgtcacgtctgggctggacagatgatcgaattggaacagaggctgggc

SEQ ID NO: 609401 - DNA, 75 bp, synthetic construct
  source 1..75: mol_type = other DNA
tcagtgctatgggtgccaatgcccactcgccgtttttctataaccgcgtcaaaggggagatggaagaagcattaa

SEQ ID NO: 609402 - DNA, 75 bp, synthetic construct
  source 1..75: mol_type = other DNA
gcggttaaaggctctcaggtcatcaaagtgatgatgaaactgggcgcaatggcaaccatcaaccaggttatcgat

SEQ ID NO: 609403 - DNA, 75 bp, synthetic construct
  source 1..75: mol_type = other DNA
cgccttgcagcggaagagcaagcccagcgtgaagcagaagaacaagccaaacgcgaggcacaacaaaaagctaaa

SEQ ID NO: 609404 - DNA, 75 bp, synthetic construct
  source 1..75: mol_type = other DNA
atgcgctatatgctttacaacgggcttaaaacccaaggagcgatcaggctgcatggttcttttctgtacagcggg

SEQ ID NO: 609405 - DNA, 75 bp, synthetic construct
  source 1..75: mol_type = other DNA
gcagaggcgatgcggcctgagcatgaaggtgtgacgattttaagctcttcagaattacgcaaaagagctgaataa

SEQ ID NO: 609406 - DNA, 75 bp, synthetic construct
  source 1..75: mol_type = other DNA
tccattgatgcgagagacgtggcgcgggtcatgctggcagaggcgatgcggcccgggcatgaaggtgtgacgatt

SEQ ID NO: 609407 - DNA, 75 bp, synthetic construct
  source 1..75: mol_type = other DNA
gttggtcacggtagtattggtgcgggtgtcgactggcagaaacagactacgacgccgggtacaggttatgttgag

SEQ ID NO: 609408 - DNA, 75 bp, synthetic construct
  source 1..75: mol_type = other DNA
tcgactggggtattacttatcagtatttaggcactcgctatgataaggattactcatcttatccttatcaaaccg

SEQ ID NO: 609409 - DNA, 75 bp, synthetic construct
  source 1..75: mol_type = other DNA
cgacctcggtcaatgatgtgctgcgccgtcttccgggtgtcgatatcacccaaaacggcggttcaggtcagctct

SEQ ID NO: 609410 - DNA, 75 bp, synthetic construct
  source 1..75: mol_type = other DNA
gtggaagcgatctccgactccttgctgaaactgtctactgacgaagttaaagtgaagatcatcggttctggcgta

SEQ ID NO: 609411 - DNA, 75 bp, synthetic construct
  source 1..75: mol_type = other DNA
tgcgtgctgtgggtaaaagcggataaggtggtggccaacgattataatcccaatgtcatggcgccgggtgagaag

SEQ ID NO: 609412 - DNA, 75 bp, synthetic construct
  source 1..75: mol_type = other DNA
ggtcagtccttttgcacaggagcctgtggactgtgtgctgtgggtgaaagcggatgaggtggtggctaacgatta

SEQ ID NO: 609413 - DNA, 75 bp, synthetic construct
  source 1..75: mol_type = other DNA
attggcacagagttgggcatggatcaggatgaagtgctgagattgaaacagataagtgggctgacggagctgttt

SEQ ID NO: 609414 - DNA, 75 bp, synthetic construct
  source 1..75: mol_type = other DNA
cctggcctgtgagttgttgcctgagtggagtgagttttttgatgtattgctggaaaacggaggtgaaagcctgtg

SEQ ID NO: 609415 - DNA, 75 bp, synthetic construct
  source 1..75: mol_type = other DNA
cagcctggcctgtgaactctttcctgagtggaaacaggcgtttgacgggctgctggcgaacgggggaatacgtca

SEQ ID NO: 609416 - DNA, 75 bp, synthetic construct
  source 1..75: mol_type = other DNA
cttcggtgatgctggaaaccattttgttagctgccaccgattatgctgtcgggataatcaaacctattttgccgg

SEQ ID NO: 609417 - DNA, 75 bp, synthetic construct
  source 1..75: mol_type = other DNA
gactgcggcggccatccatccagtcatcggttcgtctgagaatgacgtgcaactgcgcacgcgacacccggagac

SEQ ID NO: 609418 - DNA, 75 bp, synthetic construct
  source 1..75: mol_type = other DNA
taactgggaacgtcctcatagcgctcacaacggtaaaactccgatggaacgctactttgaacttgctgagaaaac

SEQ ID NO: 609419 - DNA, 75 bp, synthetic construct
  source 1..75: mol_type = other DNA
tctgatgccgttcacgcaagctatcagcccaatgaagagcatatacaggaacagaattacaagcttgaacttgaa

SEQ ID NO: 609420 - DNA, 75 bp, synthetic construct
  source 1..75: mol_type = other DNA
gtgattctgcgcttgtcacgatgcacagcctggcctgtgaactctttcctgagtggaaaccggcgtttgacgggc

SEQ ID NO: 609421 - DNA, 75 bp, synthetic construct
  source 1..75: mol_type = other DNA
ggagctgtacggcctgccggaatatctcagcgcccttaactctgcctggctgaatgagtcagccacgctgttccg

SEQ ID NO: 609422 - DNA, 75 bp, synthetic construct
  source 1..75: mol_type = other DNA
gtggactcattttctgccatagagatagataaagttaaagcctgggattttcggctagctgatataaatacgtct

SEQ ID NO: 609423 - DNA, 75 bp, synthetic construct
  source 1..75: mol_type = other DNA
tccgcatgatcgtctccctgcggctatattgcatgcacctgacggcagaatgcgtctgcgtaatattctgcaaca

SEQ ID NO: 609424 - DNA, 75 bp, synthetic construct
  source 1..75: mol_type = other DNA
aaacttgaatatgaagcaccaaacggcttgtttgagttgttaatgcaactgaccgatctttcccggccggatacc

SEQ ID NO: 609425 - DNA, 75 bp, synthetic construct
  source 1..75: mol_type = other DNA
gtgattctgcgcttgtcacgatgcacagcttgacctgtgaactctttcctgagtggaaaccggcgtttgacgggt

SEQ ID NO: 609426 - DNA, 75 bp, synthetic construct
  source 1..75: mol_type = other DNA
atcagtgtgacgactgcggcggccatccatccagtcatcggttcgtctgagaattacgtgcaactgcgcacgcga

SEQ ID NO: 609427 - DNA, 75 bp, synthetic construct
  source 1..75: mol_type = other DNA
cgaatgaggtggtggccaacgattacaatcccaatgtcatgtcttccagtgaaaaaaaactgcttaaacattcac

SEQ ID NO: 609428 - DNA, 75 bp, synthetic construct
  source 1..75: mol_type = other DNA
atgggggattctgtgacaccggacgtgctgggcaacatgattcgtcagtacttcagccagacgcaatctgaagaa

SEQ ID NO: 609429 - DNA, 75 bp, synthetic construct
  source 1..75: mol_type = other DNA
aaacagctccagagcaaagtcttttcgtactagaagaaccagaaacatctcttcatgaaagcgcacagtatgaat

SEQ ID NO: 609430 - DNA, 75 bp, synthetic construct
  source 1..75: mol_type = other DNA
acgtctgggctggacgaatgaacgtattggtacagagctgggaatggaccaggatgaagtgctgaggctgaaaca

SEQ ID NO: 609431 - DNA, 75 bp, synthetic construct
  source 1..75: mol_type = other DNA
agttattgggcagaggggcagatacaggaaaacgtctgaagggctggttgcctgtagtctgtattaatccggaga

SEQ ID NO: 609432 - DNA, 75 bp, synthetic construct
  source 1..75: mol_type = other DNA
agggaagcaggtacgggaaaacgtctgaagggctggttgccagtgacctgtattaatccggaaagaaagggacag

SEQ ID NO: 609433 - DNA, 75 bp, synthetic construct
  source 1..75: mol_type = other DNA
cgtgaggatattgaacgatggcaagtttcctctgtaaatgatgttctccgccgtttgcctggtgtggcaattgca

SEQ ID NO: 609434 - DNA, 75 bp, synthetic construct
  source 1..75: mol_type = other DNA
ggccatccatccagtcatcggttcgtctgagaatgacgtgcaactgcgcacgcgacacccggagacaacggctga

SEQ ID NO: 609435 - DNA, 75 bp, synthetic construct
  source 1..75: mol_type = other DNA
caataaaaaaatatattgaaattattgatgagaaatttgacccacttattacaaatatagtaagcaaaataaaat

SEQ ID NO: 609436 - DNA, 75 bp, synthetic construct
  source 1..75: mol_type = other DNA
ccaacctgttcgacaaagattacgagacagtctatggctaccaaactgcaggacgggaatataccttgtctggca

SEQ ID NO: 609437 - DNA, 75 bp, synthetic construct
  source 1..75: mol_type = other DNA
actcagcaacaaattggtgaaaatactcaagtaacacttcttggtgattatgcctataccaggggatttgatgtc

SEQ ID NO: 609438 - DNA, 75 bp, synthetic construct
  source 1..75: mol_type = other DNA
ttctacaccgttccgctgcagctactggcttaccacgtcgcgctgatcaaaggcaccgacgttgaccagccgcgt

SEQ ID NO: 609439 - DNA, 75 bp, synthetic construct
  source 1..75: mol_type = other DNA
agtttatttgcccgtgatgctggtatgcagctattcgcgggggacggtaaagtagatatacaggctcagggggat

SEQ ID NO: 609440 - DNA, 75 bp, synthetic construct
  source 1..75: mol_type = other DNA
aaatatttttttaacaggaaattcagttattgatgctttggtgtctgtatcaaacaaaattgaacaaagttccat

SEQ ID NO: 609441 - DNA, 75 bp, synthetic construct
  source 1..75: mol_type = other DNA
gtacttaatctgtttgagataacgccagaatatgacctcaacatcatgaaaccaggccaggatctgaccgatgtc

SEQ ID NO: 609442 - DNA, 75 bp, synthetic construct
  source 1..75: mol_type = other DNA
ctggatcttcttctgaacctgttgtggatgatgtcctccctgcctctgagtctgctcacaaaagcgctgttttcg

SEQ ID NO: 609443 - DNA, 75 bp, synthetic construct
  source 1..75: mol_type = other DNA
atgcataattatccgcaacccggcgaacgctggcagcatgaacgtggctggaccgtcacaatcatccgattaatt

SEQ ID NO: 609444 - DNA, 75 bp, synthetic construct
  source 1..75: mol_type = other DNA
cacttaaacctttcatttccctgctggataaacagttccgtacacaccgttttttcgttaataaatcagtgcctg

SEQ ID NO: 609445 - DNA, 75 bp, synthetic construct
  source 1..75: mol_type = other DNA
caaagacaaaaatggtaattgcacccatgtgtataccaatggcggatttcttgttgggggaaccgtcagcgcgct

SEQ ID NO: 609446 - DNA, 75 bp, synthetic construct
  source 1..75: mol_type = other DNA
atgtcagcggttctgacacgatgagcttcggatacgccaaaaacacctatactgcggttggtacaaataataata

SEQ ID NO: 609447 - DNA, 75 bp, synthetic construct
  source 1..75: mol_type = other DNA
acagtggtgatggtggttctggccattatctgggatcgcgcggcaggtcgtcaggtgacctccagcgctcactaa

SEQ ID NO: 609448 - DNA, 75 bp, synthetic construct
  source 1..75: mol_type = other DNA
atgaccattatttccgttgagggtaaatcgttgggggctgaactggctgtgtggggtgtcccgcataactacgct

SEQ ID NO: 609449 - DNA, 75 bp, synthetic construct
  source 1..75: mol_type = other DNA
cacatgactaatccgcgtcactggctggcagtcaatgccgctttctggtgctgcgtgtaccgcgaggccgaaagc

SEQ ID NO: 609450 - DNA, 75 bp, synthetic construct
  source 1..75: mol_type = other DNA
cggtaatatcagatctcagcgttctgtgtggtgtatggaatggcatggcaggaactgcgtgtggtttcattggtc

SEQ ID NO: 609451 - DNA, 75 bp, synthetic construct
  source 1..75: mol_type = other DNA
atttgacacagcggagagcgtctgtgttgcctctgttgcacgcacggttctgcgtgccgtccgtgacacagtggt

SEQ ID NO: 609452 - DNA, 75 bp, synthetic construct
  source 1..75: mol_type = other DNA
atggacgtgacaaacgatgattacatccgtctgttgtcgacactgctgccgcccggtccggcgtggtcagccagc

SEQ ID NO: 609453 - DNA, 75 bp, synthetic construct
  source 1..75: mol_type = other DNA
tcttctatggcaacagctttaacaaccaactgctgccagtgaaattaagcgatgccgaagtggatgaactgtttg

SEQ ID NO: 609454 - DNA, 75 bp, synthetic construct
  source 1..75: mol_type = other DNA
ccagctgctgccggtgaaattaagcgatgccgaagtggatgagctgtttgcgctggtgaaagccaatccggggat

SEQ ID NO: 609455 - DNA, 75 bp, synthetic construct
  source 1..75: mol_type = other DNA
atggattcgttacaggatgattatacaaagctgctgtacggactgatgccgccggggcctgcatggtcagatacc

SEQ ID NO: 609456 - DNA, 75 bp, synthetic construct
  source 1..75: mol_type = other DNA
gacacaagacgactgagccattagcgattaatcatacaggtgttcattttgcggttgttccggcactgacaggta

SEQ ID NO: 609457 - DNA, 75 bp, synthetic construct
  source 1..75: mol_type = other DNA
tgtcggttcgatgtgttagccttcaccgggaatgaagttgagtggattaaggacgcctttaatgaccactcataa

SEQ ID NO: 609458 - DNA, 75 bp, synthetic construct
  source 1..75: mol_type = other DNA
cgtttgtttccggtatgttttcccgctggctggcgaaaaccatcaccctctcgccacatactcagcgtaactatc

SEQ ID NO: 609459 - DNA, 75 bp, synthetic construct
  source 1..75: mol_type = other DNA
ttttactggctgattcgcctgtgcgcactgccgctgtatcgcaaaatgggccagtgggcgcggcaaaaaaatcgt

SEQ ID NO: 609460 - DNA, 75 bp, synthetic construct
  source 1..75: mol_type = other DNA
ctgcgcccgttcacgattcatgacgagagcgcccgttactggagtcgtcgcctgagctggttaagcagcctgatt

SEQ ID NO: 609461 - DNA, 75 bp, synthetic construct
  source 1..75: mol_type = other DNA
cgccatatcagcagattgcccgggaagtgaaagtgccccgtgaacggctgaagtatgcgctggaagccggtttac

SEQ ID NO: 609462 - DNA, 75 bp, synthetic construct
  source 1..75: mol_type = other DNA
caggataccggggcgtatcacatcattccgtggtcttcgataaccacctttgctaacttcgtccgtggcattggt

SEQ ID NO: 609463 - DNA, 75 bp, synthetic construct
  source 1..75: mol_type = other DNA
aaccattgcttttcaacaaagcctgtttctcaatgctttcgctctgattgagtttttcaaagctgttttacgcct

SEQ ID NO: 609464 - DNA, 75 bp, synthetic construct
  source 1..75: mol_type = other DNA
ctgattgaggtgctgaacctcaaaacggacccgatgatgacgctgctttcgcgcgtgaccgcaccacgcctgaaa

SEQ ID NO: 609465 - DNA, 75 bp, synthetic construct
  source 1..75: mol_type = other DNA
tcaccaatttaaagctggctaatggttcagtgaacacattaaaggttgttgacggcacgatcactacggccaaaa

SEQ ID NO: 609466 - DNA, 75 bp, synthetic construct
  source 1..75: mol_type = other DNA
taaagatgctggtagcttaaccaataataaaactgtttcattgtttttatctggctttgtatcattccagacttc

SEQ ID NO: 609467 - DNA, 75 bp, synthetic construct
  source 1..75: mol_type = other DNA
cttactgtgaaggctccaacgaatctacaggcagtacgcaagggcaacactaccagcggttctatcattgatttg

SEQ ID NO: 609468 - DNA, 75 bp, synthetic construct
  source 1..75: mol_type = other DNA
taaccaattcaaaaattgccaatgcaagtatcaacgaagctaagattatcgatgcaaatattacctcagctaaga

SEQ ID NO: 609469 - DNA, 75 bp, synthetic construct
  source 1..75: mol_type = other DNA
tcgcatggtaatcagtaatactatgattcaggtttttgatgcaaatggtacgttacgtgttcgtatgggattatg

SEQ ID NO: 609470 - DNA, 75 bp, synthetic construct
  source 1..75: mol_type = other DNA
ttctccccagaagtaactattactcccgaaaacttacaatgcggtctagtacagggcgtagaagttggtggcgga

SEQ ID NO: 609471 - DNA, 75 bp, synthetic construct
  source 1..75: mol_type = other DNA
accgctgaccttaccgggaattattgttggtacggtgctggcattcgctcgttcgctcggtgaatttggcgcaac

SEQ ID NO: 609472 - DNA, 75 bp, synthetic construct
  source 1..75: mol_type = other DNA
agtcaccgaaataaaaggagcgaaacacaatcctgagatcgttcagttctggcgggatattaagcgcagcggaat

SEQ ID NO: 609473 - DNA, 75 bp, synthetic construct
  source 1..75: mol_type = other DNA
gcgccaggtagcctgaaagcgccggatacgcgtaatgaaaaaataaattccctggaagatgtgcgtaaaggcagc

SEQ ID NO: 609474 - DNA, 75 bp, synthetic construct
  source 1..75: mol_type = other DNA
tcttggtaaaggtattgttagtatcagtacggttatcaagaaaacacagaaatcattagaaaataatattctcgt

SEQ ID NO: 609475 - DNA, 75 bp, synthetic construct
  source 1..75: mol_type = other DNA
gcaaagcaatagtttcaatttcgctcttgcgatgaatcgtttaaaagtacgtaaaccaactattggtattatcgc

SEQ ID NO: 609476 - DNA, 75 bp, synthetic construct
  source 1..75: mol_type = other DNA
gttggtacggtactggcttttgctcgttctctcggtgagtttggtgcaaccatcacctttgtgtcgaacattcct

SEQ ID NO: 609477 - DNA, 75 bp, synthetic construct
  source 1..75: mol_type = other DNA
caagtaggaggactcacgggatactccgatgtagcaagtgcattacagcgttctactagtccaacaagtggttta

SEQ ID NO: 609478 - DNA, 75 bp, synthetic construct
  source 1..75: mol_type = other DNA
ttcgatttacgttacaagaactacgagaagcggcccgatccctccagccaggcagtgatgttttgcctgatggac

SEQ ID NO: 609479 - DNA, 75 bp, synthetic construct
  source 1..75: mol_type = other DNA
gcgtggcggcctgcgccatcgcgttcatccgggcaatgaccattttgtacagaatgacagaattgaacgtcccca

SEQ ID NO: 609480 - DNA, 75 bp, synthetic construct
  source 1..75: mol_type = other DNA
gttaatatatataatggtgaaacattacttaaaacgtactatacacaaaatacatcatttgattatacctttgca

SEQ ID NO: 609481 - DNA, 75 bp, synthetic construct
  source 1..75: mol_type = other DNA
atatccgccaggatattcaggcgtggacggcagattatcgcgtcagctggcatcagaaggtagctaacggacaga

SEQ ID NO: 609482 - DNA, 75 bp, synthetic construct
  source 1..75: mol_type = other DNA
cccttccgatatcactacggatgaagcagtacagcatgatggacaggtcatagcattatcacgcgattactcatg

SEQ ID NO: 609483 - DNA, 75 bp, synthetic construct
  source 1..75: mol_type = other DNA
atgcagcatatccgcgatcaggatgatatttatccggtgtttcgcgaactatttcataaacaaaatgcaactact

SEQ ID NO: 609484 - DNA, 75 bp, synthetic construct
  source 1..75: mol_type = other DNA
gatcactcaatccgagacaaagactaacgcagcgattaaagccagtgagacgacgttacagacgcaaatcacgaa

SEQ ID NO: 609485 - DNA, 75 bp, synthetic construct
  source 1..75: mol_type = other DNA
tttggtaacttgttcgttagttggactgaatcaaccgaaccagattatgctggtgcacatatcgttatgcgtact

SEQ ID NO: 609486 - DNA, 75 bp, synthetic construct
  source 1..75: mol_type = other DNA
ctatcgcaaaacaggtacaaccaattggaccgcagcaggtcagacagtaccaacacagttagagtttgatttata

SEQ ID NO: 609487 - DNA, 75 bp, synthetic construct
  source 1..75: mol_type = other DNA
atactgccgttggaaataagtacgggaatgatgtagtacgtttcccttccgatattaaaaatgatcctactatta

SEQ ID NO: 609488 - DNA, 75 bp, synthetic construct
  source 1..75: mol_type = other DNA
atggggaaaagtttagggggcttctttggagcaataattacggcagttattgtcgctttagcagtttattttact

SEQ ID NO: 609489 - DNA, 75 bp, synthetic construct
  source 1..75: mol_type = other DNA
tccggtcactcaggatggtattgtaccaaaggcgaatattgccagtaagtatcaggaatatctacaacttgaagt

SEQ ID NO: 609490 - DNA, 75 bp, synthetic construct
  source 1..75: mol_type = other DNA
cttagggcgcgtttccaaccgtattatcaatgaagtgaatggtatttcccgcgtggtgtatgacatcagcggtaa

SEQ ID NO: 609491 - DNA, 75 bp, synthetic construct
  source 1..75: mol_type = other DNA
caaagtcagccaggcattcactgtcttcctgccagtacgctccgtaggcgtaatgggcgatggtcgtaaatatga

SEQ ID NO: 609492 - DNA, 75 bp, synthetic construct
  source 1..75: mol_type = other DNA
aggggactatctaccctgacgttattgaatccgccgcttctgcgacgggtaaagcgcacgttatcaaatctcacc

SEQ ID NO: 609493 - DNA, 75 bp, synthetic construct
  source 1..75: mol_type = other DNA
tggtttgctggaatggatgcctttgatgccatcggtcatagctttgcgacaatcgctattggtggtttctcgaca

SEQ ID NO: 609494 - DNA, 75 bp, synthetic construct
  source 1..75: mol_type = other DNA
atgccatcggccatagctttgcgactatcgccatcggcggcttctcgacacatgatgccagcgtcggttatttcg

SEQ ID NO: 609495 - DNA, 75 bp, synthetic construct
  source 1..75: mol_type = other DNA
agctctatcgcgcggaaatgcccggcccgctgaaagataacaaaatgcgcccgcgtattgcggaaacggcgaaaa

SEQ ID NO: 609496 - DNA, 75 bp, synthetic construct
  source 1..75: mol_type = other DNA
acgaatgggcacagaaaagtttcattctcaaaatctatatcaactgatgagttacttatggtcgttaaagcctga

SEQ ID NO: 609497 - DNA, 75 bp, synthetic construct
  source 1..75: mol_type = other DNA
cagtgaaacatcgttataaaattaatggcttcgatattggcttgtgtaccgtcaatttaggtcaggaatggccgt

SEQ ID NO: 609498 - DNA, 75 bp, synthetic construct
  source 1..75: mol_type = other DNA
atgtggttacttgaccagtgggcagagcgccatatatcagaagcgcaagcgaaaggtgagtttgataacctgcca

SEQ ID NO: 609499 - DNA, 75 bp, synthetic construct
  source 1..75: mol_type = other DNA
cctcggccgcgtttccaatcgaattatcaatgaagtgaacggcatttcccgcgtggtgtatgacatcagcggcaa

SEQ ID NO: 609500 - DNA, 75 bp, synthetic construct
  source 1..75: mol_type = other DNA
ccgcttcctgtcagcactggctggcgaaaacgatccagaagcaaaacgtaaaatcatcggtcgcgtcttcgttga

SEQ ID NO: 609501 - DNA, 75 bp, synthetic construct
  source 1..75: mol_type = other DNA
cgttacaccgtctgggctggcctgatggcgggcgttggtttaactctgctttatctggcgttgttccgtctgggt

SEQ ID NO: 609502 - DNA, 75 bp, synthetic construct
  source 1..75: mol_type = other DNA
ggcggtacatcgggccgccgccaatggctggcgcactcgctgacctgaaacaatgggtgatggatgccggagagc

SEQ ID NO: 609503 - DNA, 75 bp, synthetic construct
  source 1..75: mol_type = other DNA
gtctggttatcacactaagccaacgttatggcgtcagtctcattcatctggatgccagcgctgaatgcctgccgg

SEQ ID NO: 609504 - DNA, 75 bp, synthetic construct
  source 1..75: mol_type = other DNA
gtctggttatcacactaaaccgacgttatggcgtcagtctcattcatctggatgccagcgctgaatgcctgccgg

SEQ ID NO: 609505 - DNA, 75 bp, synthetic construct
  source 1..75: mol_type = other DNA
tctgcggcttaaacgcctggggctgtcaaaaacgttccgtcgtctggttgtcacacttaacctacgttatggcgt

SEQ ID NO: 609506 - DNA, 75 bp, synthetic construct
  source 1..75: mol_type = other DNA
gtctggttctcacactaagcccacgttatggcgtcagtctcattcatctggatgccagcgctgaatgcctgccgg

SEQ ID NO: 609507 - DNA, 75 bp, synthetic construct
  source 1..75: mol_type = other DNA
gtctggttctcacactaacccgacgttatggcgtcagtctcattcatctggatgccagcgctgaatgcctgccgg

SEQ ID NO: 609508 - DNA, 75 bp, synthetic construct
  source 1..75: mol_type = other DNA
gtctggttttcacactaagcctacgttatggcgtcagtctcattcatctggatgccagcgctgaatgcctgccgg

SEQ ID NO: 609509 - DNA, 75 bp, synthetic construct
  source 1..75: mol_type = other DNA
tctgcggcttaaacgcctggggctgtcaaaaacgttccgtcgtctggttatcacactcaacccacgttatggcgt

SEQ ID NO: 609510 - DNA, 75 bp, synthetic construct
  source 1..75: mol_type = other DNA
ggtatcagtgacgaacgtgttaatgcgatggccgtcgagctttatgctctggtatgccaacgccagcgcgaagaa

SEQ ID NO: 609511 - DNA, 75 bp, synthetic construct
  source 1..75: mol_type = other DNA
ggtatgccaacgccagcgcgaagaatacgaagcctgcaagcgggctgcctctgacaatggagactttgaatcatg

SEQ ID NO: 609512 - DNA, 75 bp, synthetic construct
  source 1..75: mol_type = other DNA
tctgcggcttaaacgcctggggctgtcaaaaacgttccgtcgtctggttctcacactcaaccaacgttatggcgt

SEQ ID NO: 609513 - DNA, 75 bp, synthetic construct
  source 1..75: mol_type = other DNA
tctgcggcttaaacgcctggggctgtcaaaaacgttccgtcgtctggttctcacactaaacccacgttatggcgt

SEQ ID NO: 609514 - DNA, 75 bp, synthetic construct
  source 1..75: mol_type = other DNA
tctgcggcttaaacgcctggggctgtcaaaaacgttccgtcgtctggttttcacactgaacctacgttatggcgt

SEQ ID NO: 609515 - DNA, 75 bp, synthetic construct
  source 1..75: mol_type = other DNA
aagaatgcaggttgcttaccgccagaacttgagcagcgaaaggaagcaatactgcttttggatattctcaaagct

SEQ ID NO: 609516 - DNA, 75 bp, synthetic construct
  source 1..75: mol_type = other DNA
tttaccgtgcggtggttgaactgcacaccgctgacggcgcgctgattgaagcggaagcctgtgatgtcggcttcc

SEQ ID NO: 609517 - DNA, 75 bp, synthetic construct
  source 1..75: mol_type = other DNA
ttggcgtaagtgaagcgacccgcattgaccctaacgcctgggtcgaacgctggaaggcggcgggccattaccagg

SEQ ID NO: 609518 - DNA, 75 bp, synthetic construct
  source 1..75: mol_type = other DNA
cgccccactcctccccgcaattgaccaccagcgaaacggatttttgcatcgggctgggtaataaacgttggcaat

SEQ ID NO: 609519 - DNA, 75 bp, synthetic construct
  source 1..75: mol_type = other DNA
caccagcgaaacggatttttgtatcgcgctggataacaagcgttggcaatttaaccgccagtcaggccttctttc

SEQ ID NO: 609520 - DNA, 75 bp, synthetic construct
  source 1..75: mol_type = other DNA
tggatggcaaaccgctggcaagtggcgaagtgcctctgaatgtcgccccgcaaggtaaacagttgattgaattgc

SEQ ID NO: 609521 - DNA, 75 bp, synthetic construct
  source 1..75: mol_type = other DNA
atgtataccccgtacgtcttcccgagcgaaaacggtctgcgctgcgggacgcgcgaattgaattatggctcacac

SEQ ID NO: 609522 - DNA, 75 bp, synthetic construct
  source 1..75: mol_type = other DNA
ggtgatccccggcaacaaagcgattctgccgatcctctggtcgctgttcccgcaccatcgttatctgttggatac

SEQ ID NO: 609523 - DNA, 75 bp, synthetic construct
  source 1..75: mol_type = other DNA
gggacacagacccttcgccagcgtcagcaacggctggatgcgaaggttaacctggcgggcggcatcaacgaggat

SEQ ID NO: 609524 - DNA, 75 bp, synthetic construct
  source 1..75: mol_type = other DNA
atggacgtgacaaacgatgattacatccgtctgttgtcggcgctgctgccgcccggtccggcgtggtcagccagc

SEQ ID NO: 609525 - DNA, 75 bp, synthetic construct
  source 1..75: mol_type = other DNA
gtcaccatatgatcactggtcgtatggatttctgtatggatgagcgtgggctgaaggtctacgaatacaacgccg

SEQ ID NO: 609526 - DNA, 75 bp, synthetic construct
  source 1..75: mol_type = other DNA
tcacccgcaaaatgaagtgcgtcttatcgacgtattgctacgtccggaagtgctggtctttgagccgctgtggac

SEQ ID NO: 609527 - DNA, 75 bp, synthetic construct
  source 1..75: mol_type = other DNA
gggcttgatcctcgaacgttgggcggagcagggctataaaggcaacggcttcaatccggcggaagggctgattaa

SEQ ID NO: 609528 - DNA, 75 bp, synthetic construct
  source 1..75: mol_type = other DNA
gtagtgcaaccgaacgcgaccgcctggtcagaagccggacacatcagcgcctggcaacaatggcgactggcggaa

SEQ ID NO: 609529 - DNA, 75 bp, synthetic construct
  source 1..75: mol_type = other DNA
cgcgtttacaaggcggttttgtctgggactgggtggatcagtcgctgattaaatatgatgaagaaggtcatccgt

SEQ ID NO: 609530 - DNA, 75 bp, synthetic construct
  source 1..75: mol_type = other DNA
gagtgcgatcttcctgacgccgatacagtccccgtcccctcaaactggcagatgcacggttacgacgcgcccatc

SEQ ID NO: 609531 - DNA, 75 bp, synthetic construct
  source 1..75: mol_type = other DNA
actgggtgccagcgtggtggtgtcgatggtagaacgaagcggcgtcgaagcctgtaaagcggcggtgcacaatct

SEQ ID NO: 609532 - DNA, 75 bp, synthetic construct
  source 1..75: mol_type = other DNA
agactatcacttatttaagtgatactggttgtctggagattcagggggccagtctagggagagaagcaggcgttc

SEQ ID NO: 609533 - DNA, 75 bp, synthetic construct
  source 1..75: mol_type = other DNA
ttttaggggtgatgggtcacagttgttgcaaaaagcccagtgcagcgcaaaaccgcaggaaaaaccacttgcgca

SEQ ID NO: 609534 - DNA, 75 bp, synthetic construct
  source 1..75: mol_type = other DNA
atggcgaatggcgctttgcctggttccggcaccagaagcggtgccggaaagctggctggagtgcgatcttctgag

SEQ ID NO: 609535 - DNA, 75 bp, synthetic construct
  source 1..75: mol_type = other DNA
caggatatgtggcggatgagcggcattttccgtgacgtctcgttgctgcataaaccgactacacaaatcagcgat

SEQ ID NO: 609536 - DNA, 75 bp, synthetic construct
  source 1..75: mol_type = other DNA
agatactacggctaccgatattatttgcccgatgtatgcccgtgtggatgaagatcagcccttcccggcagcacc

SEQ ID NO: 609537 - DNA, 75 bp, synthetic construct
  source 1..75: mol_type = other DNA
cagtttttccagttccgtttatccgggcgaaccatcgaagtgaccagcgaatacctgttccgtcatagcgataac

SEQ ID NO: 609538 - DNA, 75 bp, synthetic construct
  source 1..75: mol_type = other DNA
agcccgcaccgatcgcccctcccaacagtcgcgcagcctgaatggtgaatggcaatttgcctggtttccggcacc

SEQ ID NO: 609539 - DNA, 75 bp, synthetic construct
  source 1..75: mol_type = other DNA
cgctgatcctctgcgaatacgcccacgcgatgggtaacagcctcggcggctttgccaaatactggcaggcgtttc

SEQ ID NO: 609540 - DNA, 75 bp, synthetic construct
  source 1..75: mol_type = other DNA
gagaatccgacaggttgttactcgctcacatttaatgttgatgaaagctggctacaggaaggccagacgcgaatt

SEQ ID NO: 609541 - DNA, 75 bp, synthetic construct
  source 1..75: mol_type = other DNA
gccatctccggcgataccggtgatgacaaaaccctcagcggtggggcgtatgcacagttcgacgctcgttacgcc

SEQ ID NO: 609542 - DNA, 75 bp, synthetic construct
  source 1..75: mol_type = other DNA
cgcttccgtctgagtggccatggtcacagcatggttatcactgacctggcccggggtgggcgagagccgggacag

SEQ ID NO: 609543 - DNA, 75 bp, synthetic construct
  source 1..75: mol_type = other DNA
gaccggatatttgacacggcggagagcgtctgtgttgcctctgttgctcacacggttctgcgtgccgtccgtgac

SEQ ID NO: 609544 - DNA, 75 bp, synthetic construct
  source 1..75: mol_type = other DNA
cggttgttgccgtatcggcccgcaccggctgggaactggatacgctggtcagtgcgctcatgacagcgcttcccg

SEQ ID NO: 609545 - DNA, 75 bp, synthetic construct
  source 1..75: mol_type = other DNA
ggaggcgttacagggcggcacgttctctatcaccaacggcggtacttttggttcgatgatgtcaacgccaatcat

SEQ ID NO: 609546 - DNA, 75 bp, synthetic construct
  source 1..75: mol_type = other DNA
cgtgaatcccccgccacctttccggtgcgcggggttttgtcttttttcaccgggaatacatgtatgaatccgtct

SEQ ID NO: 609547 - DNA, 75 bp, synthetic construct
  source 1..75: mol_type = other DNA
caattgaaaaacccctttcttccctgccttattcactttcccgtcacatcccggaacatctgcgcaaactcacca

SEQ ID NO: 609548 - DNA, 75 bp, synthetic construct
  source 1..75: mol_type = other DNA
ttcagcctgaacgggtggcggagatcgcgccagctaaacccttgacaccgggtgctcgtcaggaacgtcgtgagc

SEQ ID NO: 609549 - DNA, 75 bp, synthetic construct
  source 1..75: mol_type = other DNA
tattcagccttctcccgcacaggcacagaacattcgcgaaaaaacggaggcggtattccgtctgttccggcccgt

SEQ ID NO: 609550 - DNA, 75 bp, synthetic construct
  source 1..75: mol_type = other DNA
gttatcactgacctgcccggggtgggcgagagccgggacagggatgcagagtatgaagccctgtaccgtgacatt

SEQ ID NO: 609551 - DNA, 75 bp, synthetic construct
  source 1..75: mol_type = other DNA
gtgacattctgcctgaacttgacctggtgctgtggctgattaaagccgatgaccgtgccctgtctgtggatgagt

SEQ ID NO: 609552 - DNA, 75 bp, synthetic construct
  source 1..75: mol_type = other DNA
gtgacattctgcctgaactggacctggtactgtggctgattaaagccgatgaccgggccctgtctgtggatgagt

SEQ ID NO: 609553 - DNA, 75 bp, synthetic construct
  source 1..75: mol_type = other DNA
gtcacgaacccgtgcctggcattatgggtaaaagcggggccggtaaatcctcactctgtaatgcgctgtttcagg

SEQ ID NO: 609554 - DNA, 75 bp, synthetic construct
  source 1..75: mol_type = other DNA
accaaacaaaacgagtggggaacgctgctgcgtaccaaaggtatcgacggcctgactgcgcaactgaaatcgatt

SEQ ID NO: 609555 - DNA, 75 bp, synthetic construct
  source 1..75: mol_type = other DNA
caattgaaaaaccgctctcctccctgccttactcactttcccgtcacatcctggaacatctgcgcaaactcaccc

SEQ ID NO: 609556 - DNA, 75 bp, synthetic construct
  source 1..75: mol_type = other DNA
cctgccatgaatgggatatggccggcattcagccttctcccgcacaggaacagaacattcgtgagaaaacagatg

SEQ ID NO: 609557 - DNA, 75 bp, synthetic construct
  source 1..75: mol_type = other DNA
tcactctgtaatgcgctgtttcagggggaggtcaccccggtcagtgatgttcacgccggcacccgggaagtgcgg

SEQ ID NO: 609558 - DNA, 75 bp, synthetic construct
  source 1..75: mol_type = other DNA
gttgcctctgttgcacgcacagttctgcgtgccgtccgtgacacggtggtctctgttgcccgcgcggtatggaac

SEQ ID NO: 609559 - DNA, 75 bp, synthetic construct
  source 1..75: mol_type = other DNA
gtgtttaataaaccattaagtcaagtatttgcttgtttagtgattactaaagataattaccacatgcaaaaaaaa

SEQ ID NO: 609560 - DNA, 75 bp, synthetic construct
  source 1..75: mol_type = other DNA
cggtctcaggcccgtgaacagtttaccggtgcggtggaccggatatttgacacggcggagagcgtctgcattgcc

SEQ ID NO: 609561 - DNA, 75 bp, synthetic construct
  source 1..75: mol_type = other DNA
tgaaattggcctggcgaaagggattaaactcggttacttcgcccagcatcaactggaatacctgcgcgcagatga

SEQ ID NO: 609562 - DNA, 75 bp, synthetic construct
  source 1..75: mol_type = other DNA
ccattgcgaccattcatggcaagctggatgctattgacgcatggagtattcgctcccgtgccgccagcctgctgc

SEQ ID NO: 609563 - DNA, 75 bp, synthetic construct
  source 1..75: mol_type = other DNA
cgcacggttctgcgcgccgtccgtgactcggtggtctctgttgcccgcgcggtatggaactggattttcttctga

SEQ ID NO: 609564 - DNA, 75 bp, synthetic construct
  source 1..75: mol_type = other DNA
gggaggtcaccccggtcagtgatgttcacgccggcacccgggaagtacggcgcttccgtctgagtggccatggtc

SEQ ID NO: 609565 - DNA, 75 bp, synthetic construct
  source 1..75: mol_type = other DNA
gtgtctgtgttgcctctgttgtccgtacggccctgcgcgcagttcgtgacacggtggtctctgttgcccgcgcgg

SEQ ID NO: 609566 - DNA, 75 bp, synthetic construct
  source 1..75: mol_type = other DNA
tactgtttgtggtgacgcaggccgacaaaacggagccctgccatgaatgggatatggccggtattcagccttctc

SEQ ID NO: 609567 - DNA, 75 bp, synthetic construct
  source 1..75: mol_type = other DNA
gatgcagcagatggtggcaaatcaggctttcagcaccagcgattactttttgctggcggtaattaaacttgccgc

SEQ ID NO: 609568 - DNA, 75 bp, synthetic construct
  source 1..75: mol_type = other DNA
ccgggactgatcctggcattaattctcggtcttgctggtggcgtcagcctcgggccggaacatccgatcatgacc

SEQ ID NO: 609569 - DNA, 75 bp, synthetic construct
  source 1..75: mol_type = other DNA
agcggcggctggtgcgctgacgacaagtctatttttccacccccatttttcgctgcccattgcgcattacggaca

SEQ ID NO: 609570 - DNA, 75 bp, synthetic construct
  source 1..75: mol_type = other DNA
tgggtactggaaaaactcggtgttatcaacaaagagtcagacacacttgaccagaccgccgcaaggactcatgcc

SEQ ID NO: 609571 - DNA, 75 bp, synthetic construct
  source 1..75: mol_type = other DNA
cattagggttgatgctgcatgagcacgttcccgccgttccagcggcaataaccgtttcctgcgctattctcggca

SEQ ID NO: 609572 - DNA, 75 bp, synthetic construct
  source 1..75: mol_type = other DNA
ggtgccattgtggcgacgattgccatcgctgcggggatggttgctgtgtggtgtctgccacggttgcacgcgatg

SEQ ID NO: 609573 - DNA, 75 bp, synthetic construct
  source 1..75: mol_type = other DNA
taccttcgtttctgaaaccgataccgaagtgattgcccatctggtgaactgggagctgaaacaaggcgggactct

SEQ ID NO: 609574 - DNA, 75 bp, synthetic construct
  source 1..75: mol_type = other DNA
ttctacaccgttccgctgcaactgctggcttaccacgtcgcgctgatcaaaggcaccgacgttgaccagccgcgt

SEQ ID NO: 609575 - DNA, 75 bp, synthetic construct
  source 1..75: mol_type = other DNA
gcgaatccgatctggcgctaatgaccaacgcgggtacagaaatcggcgtggcatccactaaagcattcaccaccc

SEQ ID NO: 609576 - DNA, 75 bp, synthetic construct
  source 1..75: mol_type = other DNA
gcctctgccggaaccatcggcgcgctgtttggcacacctgttgcggcggcgttgatattttcgcaaaccttaaat

SEQ ID NO: 609577 - DNA, 75 bp, synthetic construct
  source 1..75: mol_type = other DNA
tgtggaagaggtgattgcaccaatcttctacaccgttccgctgcaactactggcttaccacgttgcgctgatcaa

SEQ ID NO: 609578 - DNA, 75 bp, synthetic construct
  source 1..75: mol_type = other DNA
tggcttaccacgttgcgctgatcaaaggcaccgacgttgaccagccgcgtaacctggcaaaatcggttacggttg

SEQ ID NO: 609579 - DNA, 75 bp, synthetic construct
  source 1..75: mol_type = other DNA
gcgtctgtattgcctctgttgcatgcacggttctgcgtgccgtccgtgacacggtggtctctgttgcccgcgcgg

SEQ ID NO: 609580 - DNA, 75 bp, synthetic construct
  source 1..75: mol_type = other DNA
acagcatggttatcactgacctgcccggggtgggcgagagccgggacagggatgcagagtatgaggccctgtacc

SEQ ID NO: 609581 - DNA, 75 bp, synthetic construct
  source 1..75: mol_type = other DNA
tcccgaccatgccgccagtcccctgatgacccgactgcaggacgagctgcgcacggaatctgtccggtctcaggc

SEQ ID NO: 609582 - DNA, 75 bp, synthetic construct
  source 1..75: mol_type = other DNA
gtgttgcctctgttgtccgtacggccctgcgcgctgttcgtgacaccgtggtctctgttgcccgcgcggtatgga

SEQ ID NO: 609583 - DNA, 75 bp, synthetic construct
  source 1..75: mol_type = other DNA
ttccgtctgagtggccacggtcacagcatggttatcactgacctgcccggggtgggcgagagccgggacagggat

SEQ ID NO: 609584 - DNA, 75 bp, synthetic construct
  source 1..75: mol_type = other DNA
cagaacattcgcgaaaaaacggaggcggtattccgtctgttccggcccgtacatccggttgttgccgtatcggtc

SEQ ID NO: 609585 - DNA, 75 bp, synthetic construct
  source 1..75: mol_type = other DNA
ttgcaaatgcctctggtgggttttcaggactgaaacatgcagaaattttgccagttatggacagttactctgtct

SEQ ID NO: 609586 - DNA, 75 bp, synthetic construct
  source 1..75: mol_type = other DNA
aaccgacggtttacctgttggatgtaaggctaacacacaaaatacaccggagttgattcatgaaaatcaggcatg

SEQ ID NO: 609587 - DNA, 75 bp, synthetic construct
  source 1..75: mol_type = other DNA
aaaatcgtgtacgacagtcttgtttggccgcactcgctggttgttcgcaatcgatgattagcctcgtagctactg

SEQ ID NO: 609588 - DNA, 75 bp, synthetic construct
  source 1..75: mol_type = other DNA
tgcagagtatgaagccctgtaccgtgacattctgcctgaacttgacctggtactgtggctgattaaagccgatga

SEQ ID NO: 609589 - DNA, 75 bp, synthetic construct
  source 1..75: mol_type = other DNA
tgcgcgcgatccttcgctgtatggtcggatggattttgcctggtgtggtaatgcgccggtgaagctgctggagta

SEQ ID NO: 609590 - DNA, 75 bp, synthetic construct
  source 1..75: mol_type = other DNA
cgtgacgataacggcccgctgctgcgcaagcgtcgtgagcaatgggtggagccgttatggaaaagtatcttgagt

SEQ ID NO: 609591 - DNA, 75 bp, synthetic construct
  source 1..75: mol_type = other DNA
atgaagcgtgcggaatggggatccgtgaagataacacgctgatcactaaagacacctcgcgttttgttccgcatt

SEQ ID NO: 609592 - DNA, 75 bp, synthetic construct
  source 1..75: mol_type = other DNA
cgtcacgtttatcttcattggctatgcaagtcataatacaaggtgggacaaaactgagacacataaggcctcaca

SEQ ID NO: 609593 - DNA, 75 bp, synthetic construct
  source 1..75: mol_type = other DNA
ccgtttacgtctcaaggagtggtttaaagataaaactctgccacccaaagagaagagctacctatctcaattaat

SEQ ID NO: 609594 - DNA, 75 bp, synthetic construct
  source 1..75: mol_type = other DNA
gcgagcagtattacaatacgtttatggcataaaaaatatcgtggcacaccaacagtgggttaaaaacaaatttgc

SEQ ID NO: 609595 - DNA, 75 bp, synthetic construct
  source 1..75: mol_type = other DNA
aaaagcagcttgcagagttgcgtaaatcactggccagcatggagctgtcgcccaaaaagcgccagcgccttatct

SEQ ID NO: 609596 - DNA, 75 bp, synthetic construct
  source 1..75: mol_type = other DNA
gcgctggcgcgtcagcttcaggccatcggctttggctgggatgttaaggcgcaggatattaaggggaaagcatga

SEQ ID NO: 609597 - DNA, 75 bp, synthetic construct
  source 1..75: mol_type = other DNA
ggcgatgaaggaggcgttagagcgtgccatcatcggtaatccggacgtccgcatgaagtttcagcaaatcagcaa

SEQ ID NO: 609598 - DNA, 75 bp, synthetic construct
  source 1..75: mol_type = other DNA
gaccgtctggccttctccaccgacagctacgtcattgacccgctattcttccctggtggcaatattggcaagctg

SEQ ID NO: 609599 - DNA, 75 bp, synthetic construct
  source 1..75: mol_type = other DNA
tcgcggcagcctgcggttgcggtattgaaatttctgaatcagcgctgccggttaaacctgccgtgcgcggcgttt

SEQ ID NO: 609600 - DNA, 75 bp, synthetic construct
  source 1..75: mol_type = other DNA
gtaaaggtgttcgtctcgcagggctttatggcgtgaaacgaactctcgatctacctcacgccgaaccgctgcctc

SEQ ID NO: 609601 - DNA, 75 bp, synthetic construct
  source 1..75: mol_type = other DNA
atggataagattatagggaaacaattacctaaaaaagatcaagataatgaacattgggtatccatgtcggaccta

SEQ ID NO: 609602 - DNA, 75 bp, synthetic construct
  source 1..75: mol_type = other DNA
gaatttcttttgtcgatcgtagcgaagttttaacccatatcggtaatgagatgctcgcgaaaggtgtggtttatg

SEQ ID NO: 609603 - DNA, 75 bp, synthetic construct
  source 1..75: mol_type = other DNA
tggtacaacgcggtgctgcagacaaattgtttatcaacaccgcaggaatgggcgcgatcccggcgaatattcact

SEQ ID NO: 609604 - DNA, 75 bp, synthetic construct
  source 1..75: mol_type = other DNA
caggcaagatggccaccgctgcgcagggaaaaaaactgcgtgcgctgggctaccgggtgcgccgggggaagcgct

SEQ ID NO: 609605 - DNA, 75 bp, synthetic construct
  source 1..75: mol_type = other DNA
cactgggcaattccgcaagggcaaagcgcccacgacaccttctgggattatgtttccctgcaaccagaaacgctc

SEQ ID NO: 609606 - DNA, 75 bp, synthetic construct
  source 1..75: mol_type = other DNA
aatcgcaatccggataacttctttgccgaaaacgaacaagcagcattccatccaggtcatattgttcctggtctg

SEQ ID NO: 609607 - DNA, 75 bp, synthetic construct
  source 1..75: mol_type = other DNA
aactaaccggacgtgacccggacttccaccgccgcgagttgtgggaagcgattgaagcaggcgattttccggaat

SEQ ID NO: 609608 - DNA, 75 bp, synthetic construct
  source 1..75: mol_type = other DNA
tgttctcttataccgatacacaaatcagtcgtcttggtgggccgaatttccatgaaattccgattaaccgcccga

SEQ ID NO: 609609 - DNA, 75 bp, synthetic construct
  source 1..75: mol_type = other DNA
cgtgtggtcgcgattttgcttaatgatgaggtgagatcggcagaccttctggaaatgctcaaggcgctgaaagct

SEQ ID NO: 609610 - DNA, 75 bp, synthetic construct
  source 1..75: mol_type = other DNA
ggtagttttatggatgaactgttaacgctgatgacagcacaccgcgtgtggtcacgcattcctaagattgacaaa

SEQ ID NO: 609611 - DNA, 75 bp, synthetic construct
  source 1..75: mol_type = other DNA
gaaatggcggcagcgataagtcagattaaccaggctaacagtcagatgcaggccctgaacaacgctgcagaagcc

SEQ ID NO: 609612 - DNA, 75 bp, synthetic construct
  source 1..75: mol_type = other DNA
cgtaagcgccagcgccttttatggcgtattgcaaagctgggcattgtcgcagcggcaaaacgtcaccagcgccag

SEQ ID NO: 609613 - DNA, 75 bp, synthetic construct
  source 1..75: mol_type = other DNA
aacagctaaagcagatgcgggaaacgctggcaaaagctgaccttcccccgcgtaagcgccagcgccttttatggc

SEQ ID NO: 609614 - DNA, 75 bp, synthetic construct
  source 1..75: mol_type = other DNA
gtcaggtggcttttaccgtaaatcgtaaacccaccgcgtcacagaacaggcggaagaaagggtacgctgtaagat

SEQ ID NO: 609615 - DNA, 75 bp, synthetic construct
  source 1..75: mol_type = other DNA
aagatagctgtactccatccatttggtcaggtggcttttaccgtaaatcgtaaacccaccgcgtcacagaacagg

SEQ ID NO: 609616 - DNA, 75 bp, synthetic construct
  source 1..75: mol_type = other DNA
gtctctgcctcgaatgatgagacccgttacgcactgacgattgttccccgtatcgcccttctgaactatacgaaa

SEQ ID NO: 609617 - DNA, 75 bp, synthetic construct
  source 1..75: mol_type = other DNA
gaagaaggattgccgatggaaacgctaaaagcggtagtcaccagcatggctgaaaccgcccgcgcggcagacatt

SEQ ID NO: 609618 - DNA, 75 bp, synthetic construct
  source 1..75: mol_type = other DNA
ggtgctgtggctgattaaagccgatgaccgtgccctgtctgtggatgagtatttctggcgacacatcctgcaccg

SEQ ID NO: 609619 - DNA, 75 bp, synthetic construct
  source 1..75: mol_type = other DNA
ctcccgcacaggcacagaacattcgcgagaaaacagatgcggtattccggctgttccggcccgtacatccggttg

SEQ ID NO: 609620 - DNA, 75 bp, synthetic construct
  source 1..75: mol_type = other DNA
ctgtgttgcctctgttgcacgcacggttctgcgtgccgtccgtgacacggtggtttctgtggcccgcgcggtatg

SEQ ID NO: 609621 - DNA, 75 bp, synthetic construct
  source 1..75: mol_type = other DNA
cggctgagattaaaaatgactttgaagtcttttttaaattttgccaaacaaaaaacaaactttcacagttagtgc

SEQ ID NO: 609622 - DNA, 75 bp, synthetic construct
  source 1..75: mol_type = other DNA
tgctgctggcggcggacaggattgcgatgattaatcctgcgaatggcaatacaaagccgatgtttgttgggcagg

SEQ ID NO: 609623 - DNA, 75 bp, synthetic construct
  source 1..75: mol_type = other DNA
gggaggtcaccccggtcagtgatgttcacgccggcccccgggaagtgcagcgcttccgtctgaatggccatggtc

SEQ ID NO: 609624 - DNA, 75 bp, synthetic construct
  source 1..75: mol_type = other DNA
acacagcggagagcgtctgtgttgcctctgttgtccgtacggccctgcgcgctgttcgtgacaccgtggtctctg

SEQ ID NO: 609625 - DNA, 75 bp, synthetic construct
  source 1..75: mol_type = other DNA
ccgagctggtgcagatgcgcttgcttgccccagaacaatggggcatgccgctgcctttaacgcaaagttctaaac

SEQ ID NO: 609626 - DNA, 75 bp, synthetic construct
  source 1..75: mol_type = other DNA
atggatttactgaatccgccggcggactggtcgctgggcttatcagatgccattctgttcgcaaaaaatgactac

SEQ ID NO: 609627 - DNA, 75 bp, synthetic construct
  source 1..75: mol_type = other DNA
gtgtattacaacacgctacaggtgcctcatccttcagaacaaatgtggctggaacgactcaccgctcgccctggc

SEQ ID NO: 609628 - DNA, 75 bp, synthetic construct
  source 1..75: mol_type = other DNA
gtaaatcttcactctgtaatgccctgtttcagggggaggtcacaccggtcagtgatgttcacgccggcacccggg

SEQ ID NO: 609629 - DNA, 75 bp, synthetic construct
  source 1..75: mol_type = other DNA
ggtactgtggctgattaaagccgatgaccgtgccctgtctgtggatgagtatttctggcgacacatcctgcgccg

SEQ ID NO: 609630 - DNA, 75 bp, synthetic construct
  source 1..75: mol_type = other DNA
ccaaatttcttctgaattatcgaggatttgtatatctacatgacgatatcacaacattagctgcatacgctcttg

SEQ ID NO: 609631 - DNA, 75 bp, synthetic construct
  source 1..75: mol_type = other DNA
acacgatggaagatgcgggtgcactgccaatcgaagtcgacgtctctaacctgaacatgggcgacgtaattgacg

SEQ ID NO: 609632 - DNA, 75 bp, synthetic construct
  source 1..75: mol_type = other DNA
atggagataggcaccgatgcaccgctcgtagacgcaatcgacgaggcactctaccggcacggtatcccgcccgag

SEQ ID NO: 609633 - DNA, 75 bp, synthetic construct
  source 1..75: mol_type = other DNA
gtatcaatcagggatattttgcgcctacatatccacaaattcgcgatattttttatcctacagttgaagaagttg

SEQ ID NO: 609634 - DNA, 75 bp, synthetic construct
  source 1..75: mol_type = other DNA
aacctgacaagtggtactgtttaccatcagtttgaccggaaactgaataattgcgaagaagtggagcagccaggg

SEQ ID NO: 609635 - DNA, 75 bp, synthetic construct
  source 1..75: mol_type = other DNA
cagatgagctccctgtttttctcaggaagctcgctgaatatcatggcagtccagttacccgcatggcgacaaacc

SEQ ID NO: 609636 - DNA, 75 bp, synthetic construct
  source 1..75: mol_type = other DNA
gctgagagcgatcgcggcttctcgctggcgcagaaaatggtaggtcgtgcctgcggtgtgaaaggcattcgtccg

SEQ ID NO: 609637 - DNA, 75 bp, synthetic construct
  source 1..75: mol_type = other DNA
tcagcaggtgctgtttgtggtgacgcaggccgacaaaacggagccctgccatgaatgggatatggccggtattca

SEQ ID NO: 609638 - DNA, 75 bp, synthetic construct
  source 1..75: mol_type = other DNA
ggattcgtgagtaccttggatctcaggacgggcaacccaaaagagttgggattagtattttctacaaatagcatc

SEQ ID NO: 609639 - DNA, 75 bp, synthetic construct
  source 1..75: mol_type = other DNA
tgaggccactggttctcatcaaaaggaattgctaatcggtgttggtgagaataaaagcgttcgaatcaaggtaat

SEQ ID NO: 609640 - DNA, 75 bp, synthetic construct
  source 1..75: mol_type = other DNA
cttctgaaacggtacgttctggatgtgctaaatcacaaattaaatggtcaagaggcgtcaaaaccaaacgcctta

SEQ ID NO: 609641 - DNA, 75 bp, synthetic construct
  source 1..75: mol_type = other DNA
atgaaacatatccctgaaggcgtgattcaggcaccagaatcacccgacgccccggaggcgctgccgggatgtcgt

SEQ ID NO: 609642 - DNA, 75 bp, synthetic construct
  source 1..75: mol_type = other DNA
tgtaatgcactgtttcagggggaggtcaccccggtcagtgatgttcacgccggcacccgggaagtgcagcgcttc

SEQ ID NO: 609643 - DNA, 75 bp, synthetic construct
  source 1..75: mol_type = other DNA
acgtctcgatgacgcaaagttttaataatctctccggcgatctggcgcatgtggtcgagcagatggcaaccggca

SEQ ID NO: 609644 - DNA, 75 bp, synthetic construct
  source 1..75: mol_type = other DNA
ttcttataaaaggctggatatcgctatccgccagaccgataacaaggtcattattacaattaaagacagtggcgc

SEQ ID NO: 609645 - DNA, 75 bp, synthetic construct
  source 1..75: mol_type = other DNA
tctcgttttcccgcaaagcgccgctgagccatgtgctggtgatcaagcaccatcctatggatcgcggccatcgcc

SEQ ID NO: 609646 - DNA, 75 bp, synthetic construct
  source 1..75: mol_type = other DNA
ggcgtggaagtggataccaacgtggcggcgagcgatttcttcggtagcaatttagacgtgctcaacacgctcaat

SEQ ID NO: 609647 - DNA, 75 bp, synthetic construct
  source 1..75: mol_type = other DNA
aactatcaggatgaagacgggcattacgtctttggcggcaccatcaacgatcagccgccgattgtggctgtggat

SEQ ID NO: 609648 - DNA, 75 bp, synthetic construct
  source 1..75: mol_type = other DNA
tcagccgccgattgtggcggtggacgatgacggcgatggcgtgaccgacagctacagctatcagggcaacagcga

SEQ ID NO: 609649 - DNA, 75 bp, synthetic construct
  source 1..75: mol_type = other DNA
ttgttccgtaaaagcggcctcccgtgccggctttgcgcttacataccagttggcacaggtgcgttatgcctggtg

SEQ ID NO: 609650 - DNA, 75 bp, synthetic construct
  source 1..75: mol_type = other DNA
agagaataccgctttcattcgctgatgacttcgctggacagcaggacatttcgttccgccaatgcggcataccgt

SEQ ID NO: 609651 - DNA, 75 bp, synthetic construct
  source 1..75: mol_type = other DNA
gaacgccgagaaaatattcttataaagatggctgcaactggtgggttatctatcccttattttaaacaacttgca

SEQ ID NO: 609652 - DNA, 75 bp, synthetic construct
  source 1..75: mol_type = other DNA
cgctaccgtcacgagttcgcccgctatcgtcaccataagtctttttcgccctggtacgaggcacagtgctgggta

SEQ ID NO: 609653 - DNA, 75 bp, synthetic construct
  source 1..75: mol_type = other DNA
cccttccccgcgatcccgatttttatcgtcatctgcccgagatgccccccgcagaggttcagccgttaaagcctt

SEQ ID NO: 609654 - DNA, 75 bp, synthetic construct
  source 1..75: mol_type = other DNA
accacagtaagaaaaatgttttctgcaaatataaaatagccgatcttgaattctttagtgaagttataaccgatg

SEQ ID NO: 609655 - DNA, 75 bp, synthetic construct
  source 1..75: mol_type = other DNA
cagttaaaccgccagcagtcggcgattgaacagtatcagagcaatatcgactccgcgtcggcgggcttaagccag

SEQ ID NO: 609656 - DNA, 75 bp, synthetic construct
  source 1..75: mol_type = other DNA
aaacacttttcgtccggaagcttcgcaaccggacccgcagacgactgaacaggattttttaacccggaactccga

SEQ ID NO: 609657 - DNA, 75 bp, synthetic construct
  source 1..75: mol_type = other DNA
ggggctgtttttgtcgaactttgtccttaacacgctggtcatgaaaagtaagcgactcgtcagaaccgtattgat

SEQ ID NO: 609658 - DNA, 75 bp, synthetic construct
  source 1..75: mol_type = other DNA
tgtccttaacaggctggtcatgaaaaaacctatttcaggagaaccggtcaacgggaaaatgtatttttccgggag

SEQ ID NO: 609659 - DNA, 75 bp, synthetic construct
  source 1..75: mol_type = other DNA
accacttttatgaatgataccgggctggagagcattggcgaaaatctctacagcgaaacgcaatcctccggcgcg

SEQ ID NO: 609660 - DNA, 75 bp, synthetic construct
  source 1..75: mol_type = other DNA
cggctctttccaggtggatcagaacgggcagctggtgacggctggtggttttcaggtgcagccagcgatcaccat

SEQ ID NO: 609661 - DNA, 75 bp, synthetic construct
  source 1..75: mol_type = other DNA
aaacacttttcgtccggaagctttgcaaccggaccagcagacggctgaacaggattttttaatccggcaccctga

SEQ ID NO: 609662 - DNA, 75 bp, synthetic construct
  source 1..75: mol_type = other DNA
caacagagattactacagagaataaaaacacttctcgtccggaagcttcgcaaccggacccgcagacggctgaac

SEQ ID NO: 609663 - DNA, 75 bp, synthetic construct
  source 1..75: mol_type = other DNA
ctccgcgtcggcggggttaagccagcaggaatccattcttgatggcgtcaacaatagcctgctggcggtgcgcga

SEQ ID NO: 609664 - DNA, 75 bp, synthetic construct
  source 1..75: mol_type = other DNA
gcctcgggcaggatattgagtcgctcaccgaatcaatggtggcggcgctcaattatcaggatgaagacgggcact

SEQ ID NO: 609665 - DNA, 75 bp, synthetic construct
  source 1..75: mol_type = other DNA
cggacgcttcgcaaccggacccgcagacggctgaacaggattttttaacccgacaccctgacgcggttgtgttca

SEQ ID NO: 609666 - DNA, 75 bp, synthetic construct
  source 1..75: mol_type = other DNA
cactggttattaacacgcagctggcgatgaaaattggcctgaatgaagccattgtactgcagcagctgcattact

SEQ ID NO: 609667 - DNA, 75 bp, synthetic construct
  source 1..75: mol_type = other DNA
ggttattcgtctgggacgttcgcctgtacagcgttgtgtgaatcacatttctgaaccggacaccgaaattccgcc

SEQ ID NO: 609668 - DNA, 75 bp, synthetic construct
  source 1..75: mol_type = other DNA
gtgttaaacgtagataatgccctccccctgttaaacagcggtgaggttgcattgaagtattcctcctctgccaaa

SEQ ID NO: 609669 - DNA, 75 bp, synthetic construct
  source 1..75: mol_type = other DNA
cttgaacaaggagaaggcttctcgatcattccagtttctatggacggcaaacctctcccgaacgggcttttcccc

SEQ ID NO: 609670 - DNA, 75 bp, synthetic construct
  source 1..75: mol_type = other DNA
ctgctttattacaactttgctatgcagttgtgttcccatcacatcaacgttctgaggcttttggaattacgttgc

SEQ ID NO: 609671 - DNA, 75 bp, synthetic construct
  source 1..75: mol_type = other DNA
atgtcgattctgaaagtcggcctggttgcgtcgattccggcattgtgtggatttgctggcggcgtgcttgggggg

SEQ ID NO: 609672 - DNA, 75 bp, synthetic construct
  source 1..75: mol_type = other DNA
gtggcctccagccagaccctgaaaaaatatcaggataaaaccgtggtgatcccgtttggtctggagcagcatgac

SEQ ID NO: 609673 - DNA, 75 bp, synthetic construct
  source 1..75: mol_type = other DNA
atgaaacttaatattaattttacagagaacggagtacgtggtaacaggggcttaattgtccctttttatccggtg

SEQ ID NO: 609674 - DNA, 75 bp, synthetic construct
  source 1..75: mol_type = other DNA
gacggtcagttcgcacctatagggcaaggaccaatgtctcttcctgagttgaatcacaggattttggtcgccgca

SEQ ID NO: 609675 - DNA, 75 bp, synthetic construct
  source 1..75: mol_type = other DNA
aaaactccttagaaaggatattgaaaaatataaagatattatctcgcaagagaagataaacgatttctgtaagca

SEQ ID NO: 609676 - DNA, 75 bp, synthetic construct
  source 1..75: mol_type = other DNA
tcatggatattacttgcacttccatgcttggcaatgtttttgtctcattggattaaaacgcttggttttaaatgg

SEQ ID NO: 609677 - DNA, 75 bp, synthetic construct
  source 1..75: mol_type = other DNA
atcttatgtaactacaccaacaacaccacgctggtggtcatgctgatggcgctggctttctttggtaaaggattt

SEQ ID NO: 609678 - DNA, 75 bp, synthetic construct
  source 1..75: mol_type = other DNA
tggctcgtaagctaccaattgtgctgggaatgttgctggcttccaccatcatcttatgtaactacaccaacaaca

SEQ ID NO: 609679 - DNA, 75 bp, synthetic construct
  source 1..75: mol_type = other DNA
acatcaagcaattgctctctaaccgcatgatgctgggcgtatttttcggacaatattttatcaacaccatcacct

SEQ ID NO: 609680 - DNA, 75 bp, synthetic construct
  source 1..75: mol_type = other DNA
gcgtcgtcgttttgaagagatgtttactgccgaccatatgattgacgcctatgtcaatctctacactacattgct

SEQ ID NO: 609681 - DNA, 75 bp, synthetic construct
  source 1..75: mol_type = other DNA
atgaatatggtcgatttatttcgcgccatgctgccacctgtcagttatgacctgaacgggaaatatatttccgca

SEQ ID NO: 609682 - DNA, 75 bp, synthetic construct
  source 1..75: mol_type = other DNA
aaaaggtagctggaacggcaatgatgtttactggcttcaacacggtggattgccaacagatgacttcagtaaagc

SEQ ID NO: 609683 - DNA, 75 bp, synthetic construct
  source 1..75: mol_type = other DNA
caaccaccacccatcatctggcgaaggggtttttctccagcctgaaccaggtgttaaacgtagataatgccctcc

SEQ ID NO: 609684 - DNA, 75 bp, synthetic construct
  source 1..75: mol_type = other DNA
cccgggggctattaccactgctggcaaacgtcgccagagtcgatccgctggccgccgcgcgcaccagtattcaat

SEQ ID NO: 609685 - DNA, 75 bp, synthetic construct
  source 1..75: mol_type = other DNA
tctgggaatgcgcgtctcggcaatggtggttggtgaaagtgcgaaagagttagtcaatgtgaattttgctcagca

SEQ ID NO: 609686 - DNA, 75 bp, synthetic construct
  source 1..75: mol_type = other DNA
atcgcaggcatttgcattggcgacaccgcacgataaagcaatggaagcggcacccgaagtagcattcttccaggc

SEQ ID NO: 609687 - DNA, 75 bp, synthetic construct
  source 1..75: mol_type = other DNA
agggttccggtaaatcgctttcgatggtgttttataccgggaaaattgtgctggcgctggataatccgacagttg

SEQ ID NO: 609688 - DNA, 75 bp, synthetic construct
  source 1..75: mol_type = other DNA
ctcagcggtaaatgctgactccccctccgccgaagtggcactgcgccaacagggccgtaacagtaaagagcttgt

SEQ ID NO: 609689 - DNA, 75 bp, synthetic construct
  source 1..75: mol_type = other DNA
cctacagaaagcctgattgagtcagattgcactgcgtatgtggcctacaaaaaaggtagctggaacggcaacgat

SEQ ID NO: 609690 - DNA, 75 bp, synthetic construct
  source 1..75: mol_type = other DNA
atgtccattcccgtactctacgcgccaggtaatgactccaacttattgatagtgttttatgttcagataatgccc

SEQ ID NO: 609691 - DNA, 75 bp, synthetic construct
  source 1..75: mol_type = other DNA
gtcacctctccgattagcggtcgcattggtaagtcaaacgtgacggaaggcgcattggtacagaacggtcaggcg

SEQ ID NO: 609692 - DNA, 75 bp, synthetic construct
  source 1..75: mol_type = other DNA
atcacaccctgctgccgggtatgttcgtgcgcgcacgtctggaagaagggcttaatccaaccgccattttagttc

SEQ ID NO: 609693 - DNA, 75 bp, synthetic construct
  source 1..75: mol_type = other DNA
gctggattgttccccccgcagccgcgccgtgggatttcggtttgattgtgctgcgcaatcccccttcgggcatta

SEQ ID NO: 609694 - DNA, 75 bp, synthetic construct
  source 1..75: mol_type = other DNA
gccgtgggacttcggattgattgtgctacgtaatcccccttctggcattacgccgttgccgtatttgagggagat

SEQ ID NO: 609695 - DNA, 75 bp, synthetic construct
  source 1..75: mol_type = other DNA
accatgggacttcggcttgattgtgctgcgtaatcccccttctggcattacaccgttgccgttatttgagggaga

SEQ ID NO: 609696 - DNA, 75 bp, synthetic construct
  source 1..75: mol_type = other DNA
gcgaatacgaaagagatccgctttctggcatttgaagaggggtatttacgtccgcaatttattaccgttgaagaa

SEQ ID NO: 609697 - DNA, 75 bp, synthetic construct
  source 1..75: mol_type = other DNA
tatgaaactgtttaagaagtttcgggggtatttattggtgaagacgcaggttaattgggtttattatggggaata

SEQ ID NO: 609698 - DNA, 75 bp, synthetic construct
  source 1..75: mol_type = other DNA
agcgccgaaagaaagttatttggtgatcaaacatcatccgatggatcgtggtcacagactctatcgaccattaat

SEQ ID NO: 609699 - DNA, 75 bp, synthetic construct
  source 1..75: mol_type = other DNA
caaagtctcgctaatcaccagtgacggtattaagttcccgcaggacggtacgctggagttctctgacgttaccgt

SEQ ID NO: 609700 - DNA, 75 bp, synthetic construct
  source 1..75: mol_type = other DNA
caaagtatcgctgatcaccagcgacggcattaagttcccgcaggacggtacgctggagttctctgacgttaccgt

SEQ ID NO: 609701 - DNA, 75 bp, synthetic construct
  source 1..75: mol_type = other DNA
tgcagccaatatcgcgcaattgacggtgaatcgttatcagaaactgctcggtactcagtacatcagtaagcaaga

SEQ ID NO: 609702 - DNA, 75 bp, synthetic construct
  source 1..75: mol_type = other DNA
ttcagctcctgcagcgaaagatcgctggcgcgccgataaccgggccatttctgtcaccggttttcgcgacaaact

SEQ ID NO: 609703 - DNA, 75 bp, synthetic construct
  source 1..75: mol_type = other DNA
cccgctggctgacactcatcggtactatcattacccagtttgcgctggggtcggtttatacctggagcctgttta

SEQ ID NO: 609704 - DNA, 75 bp, synthetic construct
  source 1..75: mol_type = other DNA
agtttgcatttttccaaagactggcatttccgctgcgtatctttttgggtaatgactccaacttactgatagtgt

SEQ ID NO: 609705 - DNA, 75 bp, synthetic construct
  source 1..75: mol_type = other DNA
gatgccatcctcaccgagtcagggctgaaaatcaccccgctggatgcggcggtgccggatcgggcgcaggcgctg

SEQ ID NO: 609706 - DNA, 75 bp, synthetic construct
  source 1..75: mol_type = other DNA
ttgcctctcgggtcgtaatctttataaacagaatttgggtaatgactccaacttactgatagtgttttatgttca

SEQ ID NO: 609707 - DNA, 75 bp, synthetic construct
  source 1..75: mol_type = other DNA
caccggcctttagtattgtgtcatggatagctctcgttggtggtatcgttacctatctgttagggctatggggta

SEQ ID NO: 609708 - DNA, 75 bp, synthetic construct
  source 1..75: mol_type = other DNA
atgaatcttttaatgcgcgctatattcagtctgctgttgctttttactctctctattcctgtcatttctgactgt

SEQ ID NO: 609709 - DNA, 75 bp, synthetic construct
  source 1..75: mol_type = other DNA
atttatattatgtttctgcaaaaatgtttaaactaaaatttggtaatgactccaacttattgatagtgttttatg

SEQ ID NO: 609710 - DNA, 75 bp, synthetic construct
  source 1..75: mol_type = other DNA
gaactcattatgagtctcctcttagaatgcacatcgatagcgacggtaatgactccaacttattgatagtgtttt

SEQ ID NO: 609711 - DNA, 75 bp, synthetic construct
  source 1..75: mol_type = other DNA
ctctattcctgtgatttctgactgtgttgcaatgggcattgaaggtcgcttcaaatatatgatgctactttttta

SEQ ID NO: 609712 - DNA, 75 bp, synthetic construct
  source 1..75: mol_type = other DNA
tcagtctgttattactcttaatgatctccattcctgtcatttctgactgcgttgcaatggctattgaaagccgct

SEQ ID NO: 609713 - DNA, 75 bp, synthetic construct
  source 1..75: mol_type = other DNA
ttaatggggtttattatgggggtagatgtttttatcctaacattatgacggataaggatttttttagttttacac

SEQ ID NO: 609714 - DNA, 75 bp, synthetic construct
  source 1..75: mol_type = other DNA
aatatgggccagaacaaagtgggcctgagcttctcgctgccgatttatcagggcggaatggttaactcgcaggtg

SEQ ID NO: 609715 - DNA, 75 bp, synthetic construct
  source 1..75: mol_type = other DNA
actgacatatgaagtctggatcggtttcttcgcctctgcgttcaccaaagtgttcaccctgctggcgctgttttc

SEQ ID NO: 609716 - DNA, 75 bp, synthetic construct
  source 1..75: mol_type = other DNA
aagcggcgatagcggaactggaaaagaacggctggctgacgaaggaggagcgtaaggtcggtgggcgtaatgaaa

SEQ ID NO: 609717 - DNA, 75 bp, synthetic construct
  source 1..75: mol_type = other DNA
tggatgttgaaaaaggacttcaggagccgcaagctctaccaggtaactgcttcaatgaaaaactctggtttcttt

SEQ ID NO: 609718 - DNA, 75 bp, synthetic construct
  source 1..75: mol_type = other DNA
ggaactggcggcgctgaatgtcgaaaactttaaaaccgacaaaccacagccggttaacgcgctgctgaaagaagc

SEQ ID NO: 609719 - DNA, 75 bp, synthetic construct
  source 1..75: mol_type = other DNA
gcctgatagtccggcaccagtcgttcagcaaacatccgcacgcactatcaccagtaacggtcataaccctttccg

SEQ ID NO: 609720 - DNA, 75 bp, synthetic construct
  source 1..75: mol_type = other DNA
acgcccactggttataaacacgcagctggcaatgaaaattggcttaaacgaagccattgttttgcaacaactgca

SEQ ID NO: 609721 - DNA, 75 bp, synthetic construct
  source 1..75: mol_type = other DNA
aattggcaccggtgtgcgtccggtcgccactgaacgtttacacagtcagggcaatctgtcgcaaaccaataacag

SEQ ID NO: 609722 - DNA, 75 bp, synthetic construct
  source 1..75: mol_type = other DNA
caaagatgtcgcgattaaagggcagggctttttccaggtgatgttgccagatggctcatcagcctatacccgtga

SEQ ID NO: 609723 - DNA, 75 bp, synthetic construct
  source 1..75: mol_type = other DNA
tacaacacgacagagcaatggctggagcaattcccgttctggtctgaatccactctgaagcgcaccttcacccgg

SEQ ID NO: 609724 - DNA, 75 bp, synthetic construct
  source 1..75: mol_type = other DNA
cacaatgtcagtttcagcgtgggcgaaggtgaaatgatggcgatcgtcggtagctctggttccggtaaaagcacc

SEQ ID NO: 609725 - DNA, 75 bp, synthetic construct
  source 1..75: mol_type = other DNA
acaacctgtgcagacgctatcaggaaggcagtgtgcaaaccgatgtactgcacaatgtcagtttcagcgtgggcg

SEQ ID NO: 609726 - DNA, 75 bp, synthetic construct
  source 1..75: mol_type = other DNA
ccagaaagcattaatcaggttttgtcgtgatgtcagattcagggttacacgcccacgtaaggcaggcgtaaaacg

SEQ ID NO: 609727 - DNA, 75 bp, synthetic construct
  source 1..75: mol_type = other DNA
gtttcccgaatggttacaggatctccatcggcaatataactttgactccatcctctgttttggtgactgtcgccc

SEQ ID NO: 609728 - DNA, 75 bp, synthetic construct
  source 1..75: mol_type = other DNA
acaaaccactcaaagtgatgggcaatgccctgtacgacatcaaaggcttgacgtatcaagggcatttgcaccagt

SEQ ID NO: 609729 - DNA, 75 bp, synthetic construct
  source 1..75: mol_type = other DNA
tatgaaactgtttaagaagtttcgtgggtatttattggtgaagacgcaggttaatggggtttattatggggtaga

SEQ ID NO: 609730 - DNA, 75 bp, synthetic construct
  source 1..75: mol_type = other DNA
tggcatttgaggaaggatatttacgcccgcagtttattaccgttgaagaaggcggagttaacgcatattcatcgc

SEQ ID NO: 609731 - DNA, 75 bp, synthetic construct
  source 1..75: mol_type = other DNA
tatgaaactgtttaagaagtttcgggggtatttattgatgaagacccaggttaatgcggtttattatggggggaa

SEQ ID NO: 609732 - DNA, 75 bp, synthetic construct
  source 1..75: mol_type = other DNA
ttaatgctgtttattatagccgactgagttatgaaaaaggcacatatttagtaaatagagttccattcaataaca

SEQ ID NO: 609733 - DNA, 75 bp, synthetic construct
  source 1..75: mol_type = other DNA
tgcccgctgccagaaggcggtggatgaagatcgcaaggtgctgcttggcttcacgctgagcaacctgtccactga

SEQ ID NO: 609734 - DNA, 75 bp, synthetic construct
  source 1..75: mol_type = other DNA
gtgttatttatattcatgatgatggttatacctgcgagctatgcggcatgttatggagagttttcagcgcagcat

SEQ ID NO: 609735 - DNA, 75 bp, synthetic construct
  source 1..75: mol_type = other DNA
aaccctgtgtacgttcgtttcgatacgacggtcgtcggggagaatacggtctcactggtcagacggtgtatcaaa

SEQ ID NO: 609736 - DNA, 75 bp, synthetic construct
  source 1..75: mol_type = other DNA
gcaaaacggaatatttcaacctgaccattaaaggtctgggatatctcagcaatattcgccaggtcaatcttcaga

SEQ ID NO: 609737 - DNA, 75 bp, synthetic construct
  source 1..75: mol_type = other DNA
caccctgatctcccgctgccagaaagcagtggatgaggaccgcaaggtactgcttggttttacgttaagcaacct

SEQ ID NO: 609738 - DNA, 75 bp, synthetic construct
  source 1..75: mol_type = other DNA
ggccaggaaatggtttacaagactgaaaaatctgactccgtgccgccgcagaatggctctgtcgcacaacaaaac

SEQ ID NO: 609739 - DNA, 75 bp, synthetic construct
  source 1..75: mol_type = other DNA
gtgtgcatattgtcatgagtaactatctgtacggtacccgacagatcattgctaaaaaaccgattcgtacacctg

SEQ ID NO: 609740 - DNA, 75 bp, synthetic construct
  source 1..75: mol_type = other DNA
tcagcgaaagtgaacaccgcatccataacccgttcaccgaagagaagtacgccacgctgggtcgcgtgctgcgca

SEQ ID NO: 609741 - DNA, 75 bp, synthetic construct
  source 1..75: mol_type = other DNA
tgtcatggattacgccggggagctggacgacctcacgctgccgctgctggcgtggttatccgaaaatcagccaca

SEQ ID NO: 609742 - DNA, 75 bp, synthetic construct
  source 1..75: mol_type = other DNA
ttttatatttttttatgtgtatcttattttgatgttattctttttgggggttatatgtcgatatctatgcagcaa

SEQ ID NO: 609743 - DNA, 75 bp, synthetic construct
  source 1..75: mol_type = other DNA
aaaggacggcagattgaagttgaagcgaccggtccacaggaagaggaagcactggccgccgttatcgccctcttt

SEQ ID NO: 609744 - DNA, 75 bp, synthetic construct
  source 1..75: mol_type = other DNA
tatggttctggaaagtcaggacgaatatgactcacaatgggcgtcaatttgttccattgctccaaagactggctg

SEQ ID NO: 609745 - DNA, 75 bp, synthetic construct
  source 1..75: mol_type = other DNA
gaaagaaatctttaaaagtcataagaaatacagttttcatatagttgaaaataatactagtgttagcaaccttgg

SEQ ID NO: 609746 - DNA, 75 bp, synthetic construct
  source 1..75: mol_type = other DNA
gcaaccaattaaggtagaagagaaacctggtcgtaacgatccttgcccatgcgggagtggtaagaaatttaagca

SEQ ID NO: 609747 - DNA, 75 bp, synthetic construct
  source 1..75: mol_type = other DNA
ggttgataacttatttattctcccagtgtcggagtgtctttccctgggctgggatagtacacggcaaacgctgga

SEQ ID NO: 609748 - DNA, 75 bp, synthetic construct
  source 1..75: mol_type = other DNA
gggcactggaattgattgaacaacaggccgcaaagcacggtgcaaaacgcgtaactggggtctggctcaaaattg

SEQ ID NO: 609749 - DNA, 75 bp, synthetic construct
  source 1..75: mol_type = other DNA
gctggcgtggttatccgaaaatcagccacagttgttgctcaaccctgagcgtaatcaggacatcaaattttccgc

SEQ ID NO: 609750 - DNA, 75 bp, synthetic construct
  source 1..75: mol_type = other DNA
cagttggcagtacaacccatatgattttgatggttgccgcgactactcatgcgaaggatggaggccaaatgacaa

SEQ ID NO: 609751 - DNA, 75 bp, synthetic construct
  source 1..75: mol_type = other DNA
attgggatcaaaacaggatgtcaccgagcaagccatgatgggcatgaatgtcataaccttgagtgatgtggcttt

SEQ ID NO: 609752 - DNA, 75 bp, synthetic construct
  source 1..75: mol_type = other DNA
acctaatggattcgaaagaatgcattgacgtaattcgtgaagaagtaaagcgatggaatgattcccgcgccgctg

SEQ ID NO: 609753 - DNA, 75 bp, synthetic construct
  source 1..75: mol_type = other DNA
acgaaatcgactctgattattttgctatcacctcaactaatgagaacggtactgaaattgatcatgagatgtcta

SEQ ID NO: 609754 - DNA, 75 bp, synthetic construct
  source 1..75: mol_type = other DNA
aaagatggttttctcattaatggtgaagtcaatcagcattactttgaaccagctaacattgaggagctgattaaa

SEQ ID NO: 609755 - DNA, 75 bp, synthetic construct
  source 1..75: mol_type = other DNA
gaaaggcgatcttgaatccgttctcgacctgaccggtaaactggccgatgttgagttccgtgtagaagcaaaccc

SEQ ID NO: 609756 - DNA, 75 bp, synthetic construct
  source 1..75: mol_type = other DNA
gtcgcagcaaactggatcgcctgattggccatcatattgccgatgagcaggtcactgacattctgcgtcgtctcg

SEQ ID NO: 609757 - DNA, 75 bp, synthetic construct
  source 1..75: mol_type = other DNA
gattggcaccgacatccgtgaatacctgaaacttgatgacaacaccatcgaaatcagcgtgacgccaaaccgtgc

SEQ ID NO: 609758 - DNA, 75 bp, synthetic construct
  source 1..75: mol_type = other DNA
acctgatagcccggcaccagtcgttcagcaaacatccgcacgcactaacaccagtaacggtcataaccctttccg

SEQ ID NO: 609759 - DNA, 75 bp, synthetic construct
  source 1..75: mol_type = other DNA
ataccgtgctggcgaacgaagtaacggctcgtaacaatctcgataacgccgttgaacagttacgtcagatcaccg

SEQ ID NO: 609760 - DNA, 75 bp, synthetic construct
  source 1..75: mol_type = other DNA
ctggtatatacggcagagccgccacgccaacagtaggccatcttgctcgcgtgctgttacgcgaacgcctgggta

SEQ ID NO: 609761 - DNA, 75 bp, synthetic construct
  source 1..75: mol_type = other DNA
cggttacaggccgccgctattctgatgccatattttcacgaaacactaacaccgtgcttccaggaggaggaagat

SEQ ID NO: 609762 - DNA, 75 bp, synthetic construct
  source 1..75: mol_type = other DNA
accggaatttctgacacctcttacagcggttcgaaaacccgtggtgccgctggtacccagtatgacgatagcaat

SEQ ID NO: 609763 - DNA, 75 bp, synthetic construct
  source 1..75: mol_type = other DNA
gtgcagaacgcccgtgcacagtacgataccgtgctggcgaatgaagtgaccgcacgtaataacctcgataacgct

SEQ ID NO: 609764 - DNA, 75 bp, synthetic construct
  source 1..75: mol_type = other DNA
cctgggcgctggacgctgaaactgcgcctgtggcaccgctaccttctgccagcgttttgcctgtgccgtctactg

SEQ ID NO: 609765 - DNA, 75 bp, synthetic construct
  source 1..75: mol_type = other DNA
tgacaaaaaaggtaacaatgaaattaatgacatcatgattaacctgtctcatattcttattgattccttagatga

SEQ ID NO: 609766 - DNA, 75 bp, synthetic construct
  source 1..75: mol_type = other DNA
taacaaggttctggcgtgttaccaaagtgaagctaacaagaaaatagcgcgtctattaaataataatcaggagtt

SEQ ID NO: 609767 - DNA, 75 bp, synthetic construct
  source 1..75: mol_type = other DNA
ataattttgcccgtaatgccggggggcaggataacacaagaaatatccttaatcctaagacatttttggagtttt

SEQ ID NO: 609768 - DNA, 75 bp, synthetic construct
  source 1..75: mol_type = other DNA
atgcgggatttaataaaatcccagccggtctatgagatccagtattacggcaaaaccttccggatgaacgctgcc

SEQ ID NO: 609769 - DNA, 75 bp, synthetic construct
  source 1..75: mol_type = other DNA
ttttttcatgaagcaacctgattttgctaagtggtacttctatcaattacttaagagttatgagggagaacagat

SEQ ID NO: 609770 - DNA, 75 bp, synthetic construct
  source 1..75: mol_type = other DNA
aaaacgttacatgataccagaattgctagtggtacagaaggtaatgatgaaattaataacatcaaaattaacctg

SEQ ID NO: 609771 - DNA, 75 bp, synthetic construct
  source 1..75: mol_type = other DNA
tggaacgcagttacctgaatgcactgggtgacgcgctgaaaatcccccaggatgttcgtgaaggcattgaacgcg

SEQ ID NO: 609772 - DNA, 75 bp, synthetic construct
  source 1..75: mol_type = other DNA
ttaatgtattaccatatattaatgaacagcgtttaaataaactaaatccaccggaaaatttacgtatagcaatag

SEQ ID NO: 609773 - DNA, 75 bp, synthetic construct
  source 1..75: mol_type = other DNA
gttaaccttacaccggtcatcgattcgatgctggagacttttttaaaattcccatatatttatgatgtaagaata

SEQ ID NO: 609774 - DNA, 75 bp, synthetic construct
  source 1..75: mol_type = other DNA
agctagaaaaattaaatcctccggaaaatttacgtataacaatagaaaaatttggctggaagaaaaaaactatca

SEQ ID NO: 609775 - DNA, 75 bp, synthetic construct
  source 1..75: mol_type = other DNA
gaagggaagtcctttgaaagaaaagatgagagttcattacacctgattactaacaaggttctggcgtgttaccaa

SEQ ID NO: 609776 - DNA, 75 bp, synthetic construct
  source 1..75: mol_type = other DNA
tcatcagttgctgatgcgctgccaggcgttacttattcaactgctccataacggctggcgctatcaggaacagag

SEQ ID NO: 609777 - DNA, 75 bp, synthetic construct
  source 1..75: mol_type = other DNA
ggcaaatgctgagtgcgccgctgcgccagccgggaatcgtagcgttacgggaatacttacgccagcgcccgccag

SEQ ID NO: 609778 - DNA, 75 bp, synthetic construct
  source 1..75: mol_type = other DNA
tttgtcagttttgttgatgggcaattgacactggaaccacaggtaatgatgacaaagactcgtgcctgggcgctg

SEQ ID NO: 609779 - DNA, 75 bp, synthetic construct
  source 1..75: mol_type = other DNA
tgagaacggcgctttaatcgccaccttcagtgacggtgtccgtacccagctggcgaacggccaggcactgaaaga

SEQ ID NO: 609780 - DNA, 75 bp, synthetic construct
  source 1..75: mol_type = other DNA
tgtggattttagcaaacgctccaacgaagcgggtagaaatatgatggctcatattgagtcctcatcttattctaa

SEQ ID NO: 609781 - DNA, 75 bp, synthetic construct
  source 1..75: mol_type = other DNA
atttaatgaagtgcctgtcagcattttagtaaatgacatttttttgaagggttttttcataaaacaccctgattt

SEQ ID NO: 609782 - DNA, 75 bp, synthetic construct
  source 1..75: mol_type = other DNA
ggaaatagaaattacactttccactatcactactatggggactcgtcaaggacatacggctattatatttccaca

SEQ ID NO: 609783 - DNA, 75 bp, synthetic construct
  source 1..75: mol_type = other DNA
actggcggcctggcagaaaatcagtcttcacgacatgagcaatgaggatctgcttgctgctgccaataccgccca

SEQ ID NO: 609784 - DNA, 75 bp, synthetic construct
  source 1..75: mol_type = other DNA
agttctggagcagtaaaggttttcaatcttgggaaaatacagttacccagtaactcctgcgcggtatctatgcac

SEQ ID NO: 609785 - DNA, 75 bp, synthetic construct
  source 1..75: mol_type = other DNA
ggcatggctctcagcagttggtcggcgtcagatgcaactggtgccgtgacggtgggagttgtggcgaagggcaca

SEQ ID NO: 609786 - DNA, 75 bp, synthetic construct
  source 1..75: mol_type = other DNA
ccacatcgtgtctattttgcttaatcgtaattacggacagcattcggcgatcatggcaggtttcagccacgttac

SEQ ID NO: 609787 - DNA, 75 bp, synthetic construct
  source 1..75: mol_type = other DNA
accgtacgccagaatcgtcaggacagttggtttcgtaaaacagcatcgaagatgatcaaccgtctgatccagcgc

SEQ ID NO: 609788 - DNA, 75 bp, synthetic construct
  source 1..75: mol_type = other DNA
aagtctcggtggttattcccgtttataacgagcaggaaagtttaccggaattaatcaggcgcaccaccgcagctt

SEQ ID NO: 609789 - DNA, 75 bp, synthetic construct
  source 1..75: mol_type = other DNA
attacccaggccgacgcagcagagcaaggagttgtgatcaagcctgcacaaaattccaccgttgctgttgcgtcg

SEQ ID NO: 609790 - DNA, 75 bp, synthetic construct
  source 1..75: mol_type = other DNA
agggcaaaaaatagcaaccatgggtagcaccggaaccagttcaacacgcttgcattttgaaattcgttacaaggg

SEQ ID NO: 609791 - DNA, 75 bp, synthetic construct
  source 1..75: mol_type = other DNA
accaccggcaaagcgatgggcgactacggctgtatgctgcgcgcttatcgccggcatattgtcgatgcgatgttg

SEQ ID NO: 609792 - DNA, 75 bp, synthetic construct
  source 1..75: mol_type = other DNA
cgtggatctcccggactttcctggaagcgcagaaataccccttggcgtatattgctcaagcgagcaaaagctctc

SEQ ID NO: 609793 - DNA, 75 bp, synthetic construct
  source 1..75: mol_type = other DNA
tacaccgatgtccgcgcccgcccccgctattttgttcagcaagttatccgtccatccagcaaggaaaatgaataa

SEQ ID NO: 609794 - DNA, 75 bp, synthetic construct
  source 1..75: mol_type = other DNA
gatcctgctgattgatgacggcagtagcgataattccgcgcatatgctggtcgaagcctcacaagcggagaacag

SEQ ID NO: 609795 - DNA, 75 bp, synthetic construct
  source 1..75: mol_type = other DNA
agctcagcagccggtacagatggaaaacggacgcatcgtctacaaccgtcagtatgggaacattccgaaaggcag

SEQ ID NO: 609796 - DNA, 75 bp, synthetic construct
  source 1..75: mol_type = other DNA
gtaccgttgtatgacacgattgttatcgtcactggtgagagtgtgcgcagggattatatgtcggtatatggctat

SEQ ID NO: 609797 - DNA, 75 bp, synthetic construct
  source 1..75: mol_type = other DNA
gccggtatgacgtacggaaaaatcaacaacagttttattgtcgcgttgttgcagaccacggcggatgaggctgcg

SEQ ID NO: 609798 - DNA, 75 bp, synthetic construct
  source 1..75: mol_type = other DNA
cgggcaacacaccccggattttattgtttttattcttttttgttgtttctgtaataaccacaattgcatgcggat

SEQ ID NO: 609799 - DNA, 75 bp, synthetic construct
  source 1..75: mol_type = other DNA
cccaacttttccacccaaaaagccgacacaacacgaatgatggtgcctttttttcggcagttctgggatatggga

SEQ ID NO: 609800 - DNA, 75 bp, synthetic construct
  source 1..75: mol_type = other DNA
ttcagggtaccggacgtcgtcgctggcgagtgggcgaaaagctgcaaatgaaacagcactgcccgcacccggatc

SEQ ID NO: 609801 - DNA, 75 bp, synthetic construct
  source 1..75: mol_type = other DNA
gatgtgctggtgcgcctgggtggtctgcgcgtattgcgcattggtgatgatgtatacgccaatggtgaaaagatc

SEQ ID NO: 609802 - DNA, 75 bp, synthetic construct
  source 1..75: mol_type = other DNA
gccatgaatggccttcaggctattgttgaggcgttggaacagggaggaagcaaacacgaagtccatgttgaagaa

SEQ ID NO: 609803 - DNA, 75 bp, synthetic construct
  source 1..75: mol_type = other DNA
ttctgctgcggtaaaagcgcgcgcagattgggtggtaacttcaagcattgccgtcgaacttattgatcatctgga

SEQ ID NO: 609804 - DNA, 75 bp, synthetic construct
  source 1..75: mol_type = other DNA
ctgcaatatatcccttcccaccgaagccgacaccgttaagcattgatgaaaaaacgcattaccgtgaaaaaataa

SEQ ID NO: 609805 - DNA, 75 bp, synthetic construct
  source 1..75: mol_type = other DNA
tggactgtcgaagagtgcaagaccatcaaggcggagtatcaacagaaacttaaaaaactgcgaaacagcagaagt

SEQ ID NO: 609806 - DNA, 75 bp, synthetic construct
  source 1..75: mol_type = other DNA
atgagcgtgatgtttgatccagacacagcgatttatcctttccccccgaagccgacgccgttaagcattgatgag

SEQ ID NO: 609807 - DNA, 75 bp, synthetic construct
  source 1..75: mol_type = other DNA
ttgcggatatcatgattagggctgactgctatctgacagtcaccgaaatcaccactctagctaaagaaaaatatc

SEQ ID NO: 609808 - DNA, 75 bp, synthetic construct
  source 1..75: mol_type = other DNA
aggctggcaaatgcccgcagaatcaatggtgtcgcctttgacggcacgcaggatataaacattacgtcaggaatg

SEQ ID NO: 609809 - DNA, 75 bp, synthetic construct
  source 1..75: mol_type = other DNA
atgtattttgtcgacaacaattcaggtgtgaccgatatgccaccactggccccctctcagggtacgcaggttaaa

SEQ ID NO: 609810 - DNA, 75 bp, synthetic construct
  source 1..75: mol_type = other DNA
cagggtacgcaggttaaatggtttactgaaggtgacggacgcaaagggatcagccatatcggtcaggactggctg

SEQ ID NO: 609811 - DNA, 75 bp, synthetic construct
  source 1..75: mol_type = other DNA
tggggacgcttgccacaaaaaacagtcttggtcccggtgacgttaatgccctggcgaaggatcagaatctggccg

SEQ ID NO: 609812 - DNA, 75 bp, synthetic construct
  source 1..75: mol_type = other DNA
tcttggtcccggtgacgttaatgcactggcaaaggatcagaatctggccgatctggagaataaggggaccgcccg

SEQ ID NO: 609813 - DNA, 75 bp, synthetic construct
  source 1..75: mol_type = other DNA
cggtctgcggataatatcggtggggtctattatcgcccggttcagatttatattaataatgcctggagaacggta

SEQ ID NO: 609814 - DNA, 75 bp, synthetic construct
  source 1..75: mol_type = other DNA
cacaaccgagccgactgtcagcagtacatcaaccagtacgcctatctccacctggcgctggccgactgagggcaa

SEQ ID NO: 609815 - DNA, 75 bp, synthetic construct
  source 1..75: mol_type = other DNA
tacgcccataacgacacaatgctggtccgggaacaacaagaagtgaaggcggggcaaaaaatagcaaccatgggt

SEQ ID NO: 609816 - DNA, 75 bp, synthetic construct
  source 1..75: mol_type = other DNA
tcgcaggcagcaaaggacaggcaattatcgcgaccgcagatggccgcgttgtttatgccggtaacgcgctgcgcg

SEQ ID NO: 609817 - DNA, 75 bp, synthetic construct
  source 1..75: mol_type = other DNA
tggtttaccgaaggtgacggacaaaaaggtatcagctggattggtcaggactggctgaatattctccaggccgaa

SEQ ID NO: 609818 - DNA, 75 bp, synthetic construct
  source 1..75: mol_type = other DNA
atgccacttccaatctatctggtgcatacaatatgttttctgagttctggaatgttgctgtctcagctgcgccta

SEQ ID NO: 609819 - DNA, 75 bp, synthetic construct
  source 1..75: mol_type = other DNA
aactggaagccgaacttgtaagccaggcttacaagttgaacgcgctggatggcaactctccggtaactccggatg

SEQ ID NO: 609820 - DNA, 75 bp, synthetic construct
  source 1..75: mol_type = other DNA
tacagcgtgagcagattaaaaaaaccattgaagcgacggctcctggctgttttgaagttttcattcacaacgaca

SEQ ID NO: 609821 - DNA, 75 bp, synthetic construct
  source 1..75: mol_type = other DNA
gggccaaaatgcgaatgccgcatatcgtacccctctcagaacagtccatcgcaattctgaaacagattaaggata

SEQ ID NO: 609822 - DNA, 75 bp, synthetic construct
  source 1..75: mol_type = other DNA
ggagtcagatgcattttacggggctgaagcggggttaccgtctggcagatctggttgtgatgcatgagccactgg

SEQ ID NO: 609823 - DNA, 75 bp, synthetic construct
  source 1..75: mol_type = other DNA
cgctcagcaaccggtgcaaatggaaaatgggcgtatcgtctacaaccgtcagtacgggaatattccgaaaggcag

SEQ ID NO: 609824 - DNA, 75 bp, synthetic construct
  source 1..75: mol_type = other DNA
tatgagggcgaacagctgtatcttaatgagttaggatatgtttatggtgatgaagaaaaaacaaaagaaattgta

SEQ ID NO: 609825 - DNA, 75 bp, synthetic construct
  source 1..75: mol_type = other DNA
ggtaatgaagaaaaaacaaatgaaattgtaaaaaacatccgggttatgtcattaagatttttgaagaaaagatgg

SEQ ID NO: 609826 - DNA, 75 bp, synthetic construct
  source 1..75: mol_type = other DNA
atgcagtggtggtcggactatctggatatatgcagaaaagcatatgtgtcgccttatatgatggttcaggagaac

SEQ ID NO: 609827 - DNA, 75 bp, synthetic construct
  source 1..75: mol_type = other DNA
tgcgcctgcacataccaattctggtatgttgattacgccgccgccgaaaatggggacgacgtctacagcgcagca

SEQ ID NO: 609828 - DNA, 75 bp, synthetic construct
  source 1..75: mol_type = other DNA
aggctcgccactccaagaaatattaatggaactcccttcgacggaacgcgggatatatatattacatcgggaatg

SEQ ID NO: 609829 - DNA, 75 bp, synthetic construct
  source 1..75: mol_type = other DNA
atgtgccggataaggctgctgcccgtctgaatcttgatgtttacagtaaaggagaaggtgatgagcgttatctgc

SEQ ID NO: 609830 - DNA, 75 bp, synthetic construct
  source 1..75: mol_type = other DNA
ttgcctggatcactggcaacgatttccgcgatctcgcccaacgcaataatattcaggcaccatacgcgttgaacg

SEQ ID NO: 609831 - DNA, 75 bp, synthetic construct
  source 1..75: mol_type = other DNA
atgttgattacgccaccgccgaaaatgggaacgacatctacagcgcagcaaccgcaaattcagccggtacagcag

SEQ ID NO: 609832 - DNA, 75 bp, synthetic construct
  source 1..75: mol_type = other DNA
gtttatgccggtaacgcgctgcgcggctacggtaatctgattatcatcaaacataatgatgattacctgagtgcc

SEQ ID NO: 609833 - DNA, 75 bp, synthetic construct
  source 1..75: mol_type = other DNA
aagcaaggtgctaacggcattgaagggcgtttaacggcagagcaactcaatagtgcaaccgcctgtatttttgcg

SEQ ID NO: 609834 - DNA, 75 bp, synthetic construct
  source 1..75: mol_type = other DNA
aaaggggtagcaaggtttaccatcgattcttcgttatatgtcgcgcacgccgatgacattgtggtgatagaacgt

SEQ ID NO: 609835 - DNA, 75 bp, synthetic construct
  source 1..75: mol_type = other DNA
taatactgaattatcacaggcagagatctcctggcgtgtgggttatgaaaatgtcgatcactttgccaaactgtt

SEQ ID NO: 609836 - DNA, 75 bp, synthetic construct
  source 1..75: mol_type = other DNA
taccaaagagtatcgtatttcccctattaactatgttattcaacggcgtatgacggaagcaaaatggtcactcac

SEQ ID NO: 609837 - DNA, 75 bp, synthetic construct
  source 1..75: mol_type = other DNA
gcatttagcgatgatccaaaatgggagtccggacatcacgttcatgacaatgaaaccgagctgatttacgtcaag

SEQ ID NO: 609838 - DNA, 75 bp, synthetic construct
  source 1..75: mol_type = other DNA
attaaaaaagatattctgataaaagatgttcttttttatcttaataataattatcgcgaaaaaatcaccttagag

SEQ ID NO: 609839 - DNA, 75 bp, synthetic construct
  source 1..75: mol_type = other DNA
ttgtcatgtatcaacgctgttttgataacgccagtgaaacgctgttttgataacgccagtgaaacgctgtttgtc

SEQ ID NO: 609840 - DNA, 75 bp, synthetic construct
  source 1..75: mol_type = other DNA
ggccgggcacagaaagtgccttcctggtacatcgtttagcggatgacgcgctgaatggtgtaaccgggctggttg

SEQ ID NO: 609841 - DNA, 75 bp, synthetic construct
  source 1..75: mol_type = other DNA
ggtacatcgtttagcggatgatgcgctgaatggcgtaaccggcctggttgagtatcacgatcacttcaatcgctt

SEQ ID NO: 609842 - DNA, 75 bp, synthetic construct
  source 1..75: mol_type = other DNA
ggtacatcgtttagcggatgacgcgctgaatggcgttaccggcctggttgagtatcacgagcatttcaatcgctt

SEQ ID NO: 609843 - DNA, 75 bp, synthetic construct
  source 1..75: mol_type = other DNA
tgcttatcgttcggagcaggggtatattaaaaaagatgttctgataaaagatattcttttctatctgaataataa

SEQ ID NO: 609844 - DNA, 75 bp, synthetic construct
  source 1..75: mol_type = other DNA
gtggcctctgacgttaacgatccggcaacgacgtgtacctgtgcgctgtacggctttcagtttcagggggctgag

SEQ ID NO: 609845 - DNA, 75 bp, synthetic construct
  source 1..75: mol_type = other DNA
aaataatcagacatcttcattatgggacgcttttgcctatacattagcaattctctactacgaaaattttaaaaa

SEQ ID NO: 609846 - DNA, 75 bp, synthetic construct
  source 1..75: mol_type = other DNA
agtggtaaggggcgtattcaatttgctggtcagcctctggattcctggcccgcaacgaaacttgcgctgcatcgc

SEQ ID NO: 609847 - DNA, 75 bp, synthetic construct
  source 1..75: mol_type = other DNA
gcgcgggcagaaaattgatgccgccgcagaattttttggtgtcacgacgcccatacgccagtcgtcatttaatgt

SEQ ID NO: 609848 - DNA, 75 bp, synthetic construct
  source 1..75: mol_type = other DNA
ctggttgctcggtcaaaagctgacgctcgatcgtgctatttgggcggcagacagtaaaacgctcccgccgttgcc

SEQ ID NO: 609849 - DNA, 75 bp, synthetic construct
  source 1..75: mol_type = other DNA
agctttgaattaaccggacaggcaggtgcggataaccatttcaatagccgctggttgctcggtcaaaagctgacg

SEQ ID NO: 609850 - DNA, 75 bp, synthetic construct
  source 1..75: mol_type = other DNA
acattagcaatcttttcctccatcagttcgatcacttcgatctccgcgacagcgaagtcagcttcctgacgccgt

SEQ ID NO: 609851 - DNA, 75 bp, synthetic construct
  source 1..75: mol_type = other DNA
acatcagcgatctgtttcttcgtcaattcgaccatttcgatctccgcgacagtgaagtcagtttcctgacgccat

SEQ ID NO: 609852 - DNA, 75 bp, synthetic construct
  source 1..75: mol_type = other DNA
attacgatttgcactggcgtaaatcgccgtggcagccagacgaggcgacattgaacggcatcattcatacacaac

SEQ ID NO: 609853 - DNA, 75 bp, synthetic construct
  source 1..75: mol_type = other DNA
tctgaatatggaagcggttgtcgcgccagagatttctgcgacggttggcgtggctgcggcctttgcggttaatcc

SEQ ID NO: 609854 - DNA, 75 bp, synthetic construct
  source 1..75: mol_type = other DNA
ggatgaggtactgacgccatcgaatctggccctggcttatgggatgaacttccgtcgtctggacattgaaggtca

SEQ ID NO: 609855 - DNA, 75 bp, synthetic construct
  source 1..75: mol_type = other DNA
ttgagcgcgctttgtcagcaaggactcgctattgtgatgagcagccacgacctgaatcatacgctgcgccatgcg

SEQ ID NO: 609856 - DNA, 75 bp, synthetic construct
  source 1..75: mol_type = other DNA
cacctggctgaacgatccacgtcgacaccgtgcggaaggcctggtaagcctctccagccttaccggacagcacgg

SEQ ID NO: 609857 - DNA, 75 bp, synthetic construct
  source 1..75: mol_type = other DNA
ggacatgccgggcaattgctgcgcttattgagcgtagatgccctgatgcgtaagctgcgttttgatttcagagac

SEQ ID NO: 609858 - DNA, 75 bp, synthetic construct
  source 1..75: mol_type = other DNA
cgaaaatgccttacgaaacggtatttcgcgcaccgctggaaattgccgacggtcaggcaaccataagctggttga

SEQ ID NO: 609859 - DNA, 75 bp, synthetic construct
  source 1..75: mol_type = other DNA
ggtctatgaaggactcgattcgcttaatgagttcggctatgccgcagtggtgacgctgggcgatccggcgctgta

SEQ ID NO: 609860 - DNA, 75 bp, synthetic construct
  source 1..75: mol_type = other DNA
caaattcttggcgttgctggcatggataccagcgccgtcttcgtcactacctgtctgattgctgcattcggcagt

SEQ ID NO: 609861 - DNA, 75 bp, synthetic construct
  source 1..75: mol_type = other DNA
ctggtgcgttgatttacgttggcgtgctgatgacttccagtctggcacgcgtgaactggcaggatcttactgaat

SEQ ID NO: 609862 - DNA, 75 bp, synthetic construct
  source 1..75: mol_type = other DNA
tgtcgctaacccggaaacgctggtgagcatcggtaatctgacttctcacagcgtgctgctggggatcctcggctt

SEQ ID NO: 609863 - DNA, 75 bp, synthetic construct
  source 1..75: mol_type = other DNA
ctggtgcgttgatctacgttggcgtcttgatgacctcaagtcttgctcgtgtgaactggcaggatcttactgaat

SEQ ID NO: 609864 - DNA, 75 bp, synthetic construct
  source 1..75: mol_type = other DNA
gcaggcgctgtatgtcgacagtatctcttccgtgaccggttcgtttatcggtacttcttctgttacggcgtatat

SEQ ID NO: 609865 - DNA, 75 bp, synthetic construct
  source 1..75: mol_type = other DNA
ttactgacgattttccgcgttcgctactggatgattgccaacattccggtgagtctgcgtgtgggcattaccagc

SEQ ID NO: 609866 - DNA, 75 bp, synthetic construct
  source 1..75: mol_type = other DNA
gctgactatctggcgaaggagtataccaaagctcactgcaccggtgagcgcaattttggctgtagccggagttga

SEQ ID NO: 609867 - DNA, 75 bp, synthetic construct
  source 1..75: mol_type = other DNA
tttcgctatctggtcaacgtcgcggtactgaccaccggatttgacgccccgcacgtcgatcttatcgccattctg

SEQ ID NO: 609868 - DNA, 75 bp, synthetic construct
  source 1..75: mol_type = other DNA
atgatttttacactccgtccatatcagcaagaagccgtggatgccacgctcaaccattttcgtcgtcataaaact

SEQ ID NO: 609869 - DNA, 75 bp, synthetic construct
  source 1..75: mol_type = other DNA
aacaatatattcaatctgcttcaaaacaataatgccatttatttattcgaaaacgataataaaattgaactgcga

SEQ ID NO: 609870 - DNA, 75 bp, synthetic construct
  source 1..75: mol_type = other DNA
atgccctttatttattcgaaaacgataataaaattgaactgcgaatggggcatgatttttttctctattgaaacg

SEQ ID NO: 609871 - DNA, 75 bp, synthetic construct
  source 1..75: mol_type = other DNA
aagtaaagagaaaaacagaagtagtcgcgtcaaagtctttagcacgcatattaatttgagtcatccagcggcatc

SEQ ID NO: 609872 - DNA, 75 bp, synthetic construct
  source 1..75: mol_type = other DNA
gcaggcgctgtatgtcgatagtatctcttccgtgaccggttcgtttatcggtacttcttccgttactgcgtacat

SEQ ID NO: 609873 - DNA, 75 bp, synthetic construct
  source 1..75: mol_type = other DNA
tagcgcggccgccttcaactgtcagcatggcgatgaggtcgcgggttacaacgcttcctcgtacaatgtcctgac

SEQ ID NO: 609874 - DNA, 75 bp, synthetic construct
  source 1..75: mol_type = other DNA
cccgtcaccttcagggattatctgcaacaaccctcgctacagtcgcccaatccagattctctggcatggtggcag

SEQ ID NO: 609875 - DNA, 75 bp, synthetic construct
  source 1..75: mol_type = other DNA
caacttcaggccgccctcgccgggcgtctgccggggtggatggtgccgcaacggatcgtcttcctcgacgcctta

SEQ ID NO: 609876 - DNA, 75 bp, synthetic construct
  source 1..75: mol_type = other DNA
cccgtcacctacagggattacctgcaacaacccgcgatccagtcgcttaacgcagattctctggcatggtggcag

SEQ ID NO: 609877 - DNA, 75 bp, synthetic construct
  source 1..75: mol_type = other DNA
gcaaaacgtgccagccgttccgatgcccgtcgtctttaccagcgcgctgggctttgagcaggataacttcctcgc

SEQ ID NO: 609878 - DNA, 75 bp, synthetic construct
  source 1..75: mol_type = other DNA
ccgctaaccaaccaacgctaccgggtggtggatgaaccgccccgggaatcctggagactaaacttcctgagaaag

SEQ ID NO: 609879 - DNA, 75 bp, synthetic construct
  source 1..75: mol_type = other DNA
atgctgaaatgtgcaaagacagcatgtgcaaagatgccatgaacaaggatcatatgaagaaaggcaatatggaca

SEQ ID NO: 609880 - DNA, 75 bp, synthetic construct
  source 1..75: mol_type = other DNA
tacagtaaaagaaatcgcggcccgttttaaagtttctcgacctacgatttatagacatatttcatccgatataca

SEQ ID NO: 609881 - DNA, 75 bp, synthetic construct
  source 1..75: mol_type = other DNA
ggttatcttcctgtcgccgctggcgggaatggtgccaggctacgctgcagctggcgcgctgatctacgttggcgt

SEQ ID NO: 609882 - DNA, 75 bp, synthetic construct
  source 1..75: mol_type = other DNA
accgccagccgctgcacccggcggttggcgcgatgcttgccgacttcaccaatattcttctgctggataccgcct

SEQ ID NO: 609883 - DNA, 75 bp, synthetic construct
  source 1..75: mol_type = other DNA
tattcgatctccaggtcggttacgttgacgggatgcccgcctgtggctgtgtctggataacctgttacttgacgg

SEQ ID NO: 609884 - DNA, 75 bp, synthetic construct
  source 1..75: mol_type = other DNA
aaatggacaaaatggacaaaatggacgagatggacaagatgaaaaaggatgagatgggtaaaaaagacagcatga

SEQ ID NO: 609885 - DNA, 75 bp, synthetic construct
  source 1..75: mol_type = other DNA
tcatcttcgctggaaaatgtcagaaatgaagttcagagcaaagttaacgcttctgcattttccgttaatccagat

SEQ ID NO: 609886 - DNA, 75 bp, synthetic construct
  source 1..75: mol_type = other DNA
ttattggttggaatcctttccagtttttgcatgttaaggatttagcaagttctatacctggggcaatatttataa

SEQ ID NO: 609887 - DNA, 75 bp, synthetic construct
  source 1..75: mol_type = other DNA
tcttccggttgctgaaccgtcgatatgaaaaagcgagcatcgtgctgacatcaaataaagggttcgccgactggg

SEQ ID NO: 609888 - DNA, 75 bp, synthetic construct
  source 1..75: mol_type = other DNA
acccaacacttcccgttcctgactgaaagcgagttgcccgagttcgttaatgctctggataactatcagggcagt

SEQ ID NO: 609889 - DNA, 75 bp, synthetic construct
  source 1..75: mol_type = other DNA
acactatgagcacaattttacatgagcatggtttcgaaagtggctggatcgaaatgcaacttgcgcatgttgata

SEQ ID NO: 609890 - DNA, 75 bp, synthetic construct
  source 1..75: mol_type = other DNA
ccccgggaatgattgtcctcaaagaggaatgcaattttagtacggcagaacaacacttctgcgtactctccgagc

SEQ ID NO: 609891 - DNA, 75 bp, synthetic construct
  source 1..75: mol_type = other DNA
accagtcttactctgaagtttatgacgacgattggctggttgaagtagaaggaaaaattagcattcgtacactga

SEQ ID NO: 609892 - DNA, 75 bp, synthetic construct
  source 1..75: mol_type = other DNA
gcgtagccgaaacaggcgctaatctggagtggctggcaacaggacagggacgtaaatttaatgatgatgaattag

SEQ ID NO: 609893 - DNA, 75 bp, synthetic construct
  source 1..75: mol_type = other DNA
aagtgaagagacaaatgatgagttttctgacatcaataatatgctcaaaaaaactataatggatacattagttaa

SEQ ID NO: 609894 - DNA, 75 bp, synthetic construct
  source 1..75: mol_type = other DNA
gtttccggcgcaggaaagaggaacggcagtgtcgatttttaactctgcacaatactttgcgacggttatcttcgc

SEQ ID NO: 609895 - DNA, 75 bp, synthetic construct
  source 1..75: mol_type = other DNA
cgcgctgatcaatatggatcagcaaaacaccaaagttaaagtgccgttcagcgtgaagtgggggcagatcaaaca

SEQ ID NO: 609896 - DNA, 75 bp, synthetic construct
  source 1..75: mol_type = other DNA
tgtttggcttgtcgaagttgaaggtaaaaccagcgttagaacactaacacgcatccctgtgggaaaggttagagt

SEQ ID NO: 609897 - DNA, 75 bp, synthetic construct
  source 1..75: mol_type = other DNA
gatgcgtgctttagcaacgttaatcttgactttacatacaagtctgttgattactcagcatctaccattttgcaa

SEQ ID NO: 609898 - DNA, 75 bp, synthetic construct
  source 1..75: mol_type = other DNA
ccgaataccggatacgcagagaggacgcaggaagcgaggcgctggtaatctcatgtaccaaaatgaaggacgcgg

SEQ ID NO: 609899 - DNA, 75 bp, synthetic construct
  source 1..75: mol_type = other DNA
ctgtttcacaattacctgcagcgggtaataaaacaacgcttaacagcaatactggagatattattctgcgatgta

SEQ ID NO: 609900 - DNA, 75 bp, synthetic construct
  source 1..75: mol_type = other DNA
tatccaggggtgtgacgcgataaagcaggccacaggggccacggtgctggtggttcaccattccggcaaggatga

SEQ ID NO: 609901 - DNA, 75 bp, synthetic construct
  source 1..75: mol_type = other DNA
gggctggggctgtttttgctgctgcttggcccgctaatgtggtttggcattgtctatttcggctcgctgctgacg

SEQ ID NO: 609902 - DNA, 75 bp, synthetic construct
  source 1..75: mol_type = other DNA
cagaacacgaacagcacacggggaggcgtgcactatcgcccttctccgcgacgatatgaaaaagctggggtatga

SEQ ID NO: 609903 - DNA, 75 bp, synthetic construct
  source 1..75: mol_type = other DNA
gatgaagcacttcagccgctggttacgcaagctggaaaaagacggggttatttatatcgacggtgatgacgtagg

SEQ ID NO: 609904 - DNA, 75 bp, synthetic construct
  source 1..75: mol_type = other DNA
ggcgctggctggcgtgcaggatgccaaattgtataaaggaatccccgaccatgagcctgaggactggagggaata

SEQ ID NO: 609905 - DNA, 75 bp, synthetic construct
  source 1..75: mol_type = other DNA
agcaacgtattaccccgcacatcatcagccagattatggagttcgccgaaaagcgtaaaggagtgatgattttcg

SEQ ID NO: 609906 - DNA, 75 bp, synthetic construct
  source 1..75: mol_type = other DNA
gatgcagcactgattactggcgacacccccggcgctgagcgcgatgtgttaattgaagattttaaagcccagcgt

SEQ ID NO: 609907 - DNA, 75 bp, synthetic construct
  source 1..75: mol_type = other DNA
atcagccgaaggataaattcacagaggtaatcatttttgccggggcggacgcttactcccatgctcaacactgga

SEQ ID NO: 609908 - DNA, 75 bp, synthetic construct
  source 1..75: mol_type = other DNA
gttatctcctgcaccaaaatgaaggacgcggaggaactgaaagaggccgcatacgatttacgcgtggtggagctt

SEQ ID NO: 609909 - DNA, 75 bp, synthetic construct
  source 1..75: mol_type = other DNA
aggacctgccacgagaggcacgagaacctgatccggaacttgctgatatcaagcacctgactgggaaccacgctg

SEQ ID NO: 609910 - DNA, 75 bp, synthetic construct
  source 1..75: mol_type = other DNA
aagtgaagagacaaatgatgagttttctgacatcaataacatgctcaaaaaagctataatggattcattagttaa

SEQ ID NO: 609911 - DNA, 75 bp, synthetic construct
  source 1..75: mol_type = other DNA
cgcgatgcatggatgattgtgcaacgtatctgtggcgtatgtacgactactcacgcgctgtcttctgtccgagcg

SEQ ID NO: 609912 - DNA, 75 bp, synthetic construct
  source 1..75: mol_type = other DNA
ggtaaaggtgcggtgaactacctgagcgtgccggaattcccgaccgacagcaaaaacggcagcttcctgttcccg

SEQ ID NO: 609913 - DNA, 75 bp, synthetic construct
  source 1..75: mol_type = other DNA
aattgttagtttcaaagggggctactttcaccctaaaacttatcatattcgccgagaggatggttcacaggccgc

SEQ ID NO: 609914 - DNA, 75 bp, synthetic construct
  source 1..75: mol_type = other DNA
gaagcgccgcgcggtatgctctctcactggatggtgatcaaagacggtatcatcagcaactaccaggcggttgtt

SEQ ID NO: 609915 - DNA, 75 bp, synthetic construct
  source 1..75: mol_type = other DNA
aattgcaggatatcctgcaaaaccaatacagtgcactgatcaccaatatcggcaaaggcgatcacaccacctttg

SEQ ID NO: 609916 - DNA, 75 bp, synthetic construct
  source 1..75: mol_type = other DNA
ttgctgacggcttccatgaagcaggcgaaaatgccttatgaaacggtatttcgcgcaccgctggaaattgccgac

SEQ ID NO: 609917 - DNA, 75 bp, synthetic construct
  source 1..75: mol_type = other DNA
agttttgagttagccgggcaggctggcgcggatagtcatttcaatagtcgctggttgctggggcaaaagctaacg

SEQ ID NO: 609918 - DNA, 75 bp, synthetic construct
  source 1..75: mol_type = other DNA
acgcattcgctgtcggtggataatctgaccgcgcacataacgcgcgaacattcgggctggcagttttccattcct

SEQ ID NO: 609919 - DNA, 75 bp, synthetic construct
  source 1..75: mol_type = other DNA
gttggtagagttactcaccacatcgctgattgcgctggatcataagtacagcgatgtgagccagcaaactgccag

SEQ ID NO: 609920 - DNA, 75 bp, synthetic construct
  source 1..75: mol_type = other DNA
tattcaactggtcgcagccaaaccagaaggtccgttgagtgctggcgcgctaaacgccaaggttggtgtcatgct

SEQ ID NO: 609921 - DNA, 75 bp, synthetic construct
  source 1..75: mol_type = other DNA
gcgttaaaagcgcaattgcaggagatgtgtgaagctgagggcgttactcaggctgagatgattgccgaactgata

SEQ ID NO: 609922 - DNA, 75 bp, synthetic construct
  source 1..75: mol_type = other DNA
tcagggattgcacaacaggcagccgccttgttcagagacgcggcggaacagggcgagcttgccgggaatggtgcc

SEQ ID NO: 609923 - DNA, 75 bp, synthetic construct
  source 1..75: mol_type = other DNA
ttatcacggcgggatactatggtgccgcgtcacgcagtaatggtaactggacgacagccgatcgtaaaacgcact

SEQ ID NO: 609924 - DNA, 75 bp, synthetic construct
  source 1..75: mol_type = other DNA
aggtacttctgcaggcggtcatactgaagccgtaacaagaatggtggccggatatgatgcgaacagtggcagtgg

SEQ ID NO: 609925 - DNA, 75 bp, synthetic construct
  source 1..75: mol_type = other DNA
gggcgtgagtatcaactgcaaccgaatgttgagtgggatgcgcactatctacacggcgatggctggctgggcgag

SEQ ID NO: 609926 - DNA, 75 bp, synthetic construct
  source 1..75: mol_type = other DNA
aactatgccgtgaagcacgtaagctcaccttacaagaactatcagatagaacggatttaacgaaatcttatctat

SEQ ID NO: 609927 - DNA, 75 bp, synthetic construct
  source 1..75: mol_type = other DNA
ttactttcgttcagcttcccgaaccccacgtgacagtagatctctgccttttcccgagtcgctcaccactacatt

SEQ ID NO: 609928 - DNA, 75 bp, synthetic construct
  source 1..75: mol_type = other DNA
gtatttactggcgcggtagtggatggccgggagcggaatcagaggagggttatattgcggccttctatctgcaga

SEQ ID NO: 609929 - DNA, 75 bp, synthetic construct
  source 1..75: mol_type = other DNA
cgttatttcctgaatgattcatacggataccggcatggaaaatcagcgctggatgcaatagcagtcaccagaaaa

SEQ ID NO: 609930 - DNA, 75 bp, synthetic construct
  source 1..75: mol_type = other DNA
tacgccagtaccggtgcctccggtactgaatacctctgccggacataccggcgtgaataaggttcatcgcggagg

SEQ ID NO: 609931 - DNA, 75 bp, synthetic construct
  source 1..75: mol_type = other DNA
gacagtcggggatgcgctacattatgccctgcgtgattccggatatcgtctgtgcacgtccgatggacaggcgaa

SEQ ID NO: 609932 - DNA, 75 bp, synthetic construct
  source 1..75: mol_type = other DNA
gaccgctaaagctggatgtctctgaccagggcggcgtaatcgaaggcttctggcgtgacacgacgccgctcttac

SEQ ID NO: 609933 - DNA, 75 bp, synthetic construct
  source 1..75: mol_type = other DNA
gcaatcgttttgtctggcaggggcgtgagtatcaactgcaaccgaatgttgagtgggatgcgcactatctacacg

SEQ ID NO: 609934 - DNA, 75 bp, synthetic construct
  source 1..75: mol_type = other DNA
gatgatggattaattcattgtggcagtaaacaacaggcagaggaattactgaataaactggcaaaacgttttcag

SEQ ID NO: 609935 - DNA, 75 bp, synthetic construct
  source 1..75: mol_type = other DNA
cagcgggtcagtcagacggtatacaggctggtgcctttttatttcccggaggcggggcatgaagttcacagggga

SEQ ID NO: 609936 - DNA, 75 bp, synthetic construct
  source 1..75: mol_type = other DNA
atgtacgaagctcttttagtagttttccttattgtggcaattggccttgttggtctgatcatgctgcagcaaggt

SEQ ID NO: 609937 - DNA, 75 bp, synthetic construct
  source 1..75: mol_type = other DNA
ggcaactgttaggactcattggccgcgctgtggtgaagagtatcaacgcggcttcaaagtgccagatgatagatg

SEQ ID NO: 609938 - DNA, 75 bp, synthetic construct
  source 1..75: mol_type = other DNA
acaagatcgccaaggtatatgccatcagttggctaatgacgatcgcctgatttgggtgccagataatgaatcata

SEQ ID NO: 609939 - DNA, 75 bp, synthetic construct
  source 1..75: mol_type = other DNA
cttctttgctggcttgaatgtagataaattcgtgggcaaaatcgaagatgtaggtatggctatttttgggattga

SEQ ID NO: 609940 - DNA, 75 bp, synthetic construct
  source 1..75: mol_type = other DNA
ggtgacgtcttgctgtggattatttttcggtgatgttcattttagcggcgtctattccattccgcctgatattag

SEQ ID NO: 609941 - DNA, 75 bp, synthetic construct
  source 1..75: mol_type = other DNA
aattgaaagtgttatcttcacttttgcagagcctttaccaattgtagtttcgtcaattctttcaccggagaggga

SEQ ID NO: 609942 - DNA, 75 bp, synthetic construct
  source 1..75: mol_type = other DNA
gctacgcgctgttttgcacaccaaacatctgatgaaccccgaagtactggctgccgcccgccggatagacgacgc

SEQ ID NO: 609943 - DNA, 75 bp, synthetic construct
  source 1..75: mol_type = other DNA
cgcgactggcaaaggaagttcgtcaggctttttctggtgtccgcgatcgccgtcgccgctcatttattccactgg

SEQ ID NO: 609944 - DNA, 75 bp, synthetic construct
  source 1..75: mol_type = other DNA
acctggaagtgacaggacaggtgaaagacctgtgcgactccaggcggcaccaccatgtcagcgatgcggcttgcc

SEQ ID NO: 609945 - DNA, 75 bp, synthetic construct
  source 1..75: mol_type = other DNA
agccggggttgaacatcttgaaccctacggttttaccgcaagcgcaaacagcggtgcggaagcggtggtgttgtt

SEQ ID NO: 609946 - DNA, 75 bp, synthetic construct
  source 1..75: mol_type = other DNA
tactcgtttttcccccgaagtccgtcagcgggcgattcgtatggttctggaaagtcaggatgaatatgactcaca

SEQ ID NO: 609947 - DNA, 75 bp, synthetic construct
  source 1..75: mol_type = other DNA
cacacaatcaatttcgtagtgactatcttcgccagcgcgaacgtttttatcacgcagaatcgctaaagaagtacc

SEQ ID NO: 609948 - DNA, 75 bp, synthetic construct
  source 1..75: mol_type = other DNA
cccgcaaaagcggccaacgcgtggcttttctggccgggctggcacttctgaagacgaatccggcagaggcttacc

SEQ ID NO: 609949 - DNA, 75 bp, synthetic construct
  source 1..75: mol_type = other DNA
gctgaagcaggcggcagatacgccggaaattcaacagttgcaacagcaggtggcggagaatccagaagatgccgc

SEQ ID NO: 609950 - DNA, 75 bp, synthetic construct
  source 1..75: mol_type = other DNA
agaagcggtgcttaaaaccattccattgcaggatcaggacacccgctaccaggggctggtggcgcaaatcgaact

SEQ ID NO: 609951 - DNA, 75 bp, synthetic construct
  source 1..75: mol_type = other DNA
caagcgcggcgtattggtgaaactcaccaccagcggcgcagcaatatgtgaacaatgccatcaactggttggcca

SEQ ID NO: 609952 - DNA, 75 bp, synthetic construct
  source 1..75: mol_type = other DNA
atttccttttcttattaccagcgcaagcaacgaagtttatatcccagcatctgaaagcggtgcttatgagctatt

SEQ ID NO: 609953 - DNA, 75 bp, synthetic construct
  source 1..75: mol_type = other DNA
ggcagcctgagttcacagataaaacactctccaggaaaaccggggcggttcattaccctgtccctggcctgtgcc

SEQ ID NO: 609954 - DNA, 75 bp, synthetic construct
  source 1..75: mol_type = other DNA
ggcgttatcggtgacacaaaccaggacagaacgccccgtgtcacagccagtaccaaccacacagataaccagtca

SEQ ID NO: 609955 - DNA, 75 bp, synthetic construct
  source 1..75: mol_type = other DNA
ttaacgaatctaacctgcaacaggttcttgaacagtcgatgaccacaccggtgctgttctatttttggtctgaac

SEQ ID NO: 609956 - DNA, 75 bp, synthetic construct
  source 1..75: mol_type = other DNA
gtgtcacagccagcaccaaccgcacagataaccagtcagatggccggaaatatccgggcgttatttcccgaataa

SEQ ID NO: 609957 - DNA, 75 bp, synthetic construct
  source 1..75: mol_type = other DNA
aggagatcctcgctgcgctgggtaccggcgatgcactggcgtcgaagtatcgccgccagttatatgcgttgttgt

SEQ ID NO: 609958 - DNA, 75 bp, synthetic construct
  source 1..75: mol_type = other DNA
gacggtcagacgcgtaaaacgttccaggagatcctcgctgcgctgggtaccggtgatgcactggcgtcgaagtat

SEQ ID NO: 609959 - DNA, 75 bp, synthetic construct
  source 1..75: mol_type = other DNA
acagaacgccccgagtcacagccagtaccaaccgcacagataaccagtcagatggccggaaatatccgggcgtta

SEQ ID NO: 609960 - DNA, 75 bp, synthetic construct
  source 1..75: mol_type = other DNA
cgtactgcgctatggcattgaagatgtggtgacgaatctcgacgtgctggaacgtatgcagccttctgaaagcct

SEQ ID NO: 609961 - DNA, 75 bp, synthetic construct
  source 1..75: mol_type = other DNA
cgattggcgcaatcgcgatgattggtaaatcactgccgaaagcggtgggctacggtcatgaccttgccgcgcgcg

SEQ ID NO: 609962 - DNA, 75 bp, synthetic construct
  source 1..75: mol_type = other DNA
caaatcgctgccgaaagcggtgggctacggtcatgaccttgccgcgcgcgagagcatgttgctggcttcatgtat

SEQ ID NO: 609963 - DNA, 75 bp, synthetic construct
  source 1..75: mol_type = other DNA
tacggtcacgaccttgccgcgcgcgagagcatgttgctggcttcatgtatggcgggaatggcgttttccagtgcg

SEQ ID NO: 609964 - DNA, 75 bp, synthetic construct
  source 1..75: mol_type = other DNA
gattgcggaagtcgggattggtaaacgactgggcgatgttggtgcgacatctgcgcattacggtgcatgggcgca

SEQ ID NO: 609965 - DNA, 75 bp, synthetic construct
  source 1..75: mol_type = other DNA
ttttgcatcaggcggggatgaccgccgggctgacgcgcagtctggccgttaaaggcatcgccatgacgctctggc

SEQ ID NO: 609966 - DNA, 75 bp, synthetic construct
  source 1..75: mol_type = other DNA
tctttcaggcgttcgataccctgaatcggcaacagataaaaacatttagtgttccaccaatgacgctttgtggtt

SEQ ID NO: 609967 - DNA, 75 bp, synthetic construct
  source 1..75: mol_type = other DNA
taccggagcagatgcgcgagcggctcaatgaaacgatggacatcatcagtctgggtggagcgaccgagtgcgcca

SEQ ID NO: 609968 - DNA, 75 bp, synthetic construct
  source 1..75: mol_type = other DNA
atgaatagcgaaaacaacaaagagcttttgcgggaattgcgtctcatcgcccgtgcacatgaggaagcagcaaaa

SEQ ID NO: 609969 - DNA, 75 bp, synthetic construct
  source 1..75: mol_type = other DNA
ggtagtctgatgctgtttgtagtaggggaacctgtcgcatggatcaataactcgcttaccgcctggctgaacggt

SEQ ID NO: 609970 - DNA, 75 bp, synthetic construct
  source 1..75: mol_type = other DNA
tttattatgaagcaattggttcctttgttcaaaaaaataaaaaaatatcgacaagtaatcattgttacacacaat

SEQ ID NO: 609971 - DNA, 75 bp, synthetic construct
  source 1..75: mol_type = other DNA
aatgaaaaatcaacacgacaaaagttaacggatacatttaatgtacaatcatatactgattttgttaagctgtta

SEQ ID NO: 609972 - DNA, 75 bp, synthetic construct
  source 1..75: mol_type = other DNA
aggtgtaagtgtattcttagataaaggttatggtgaagaatcctctattttgtttaactcggagaattcatcacc

SEQ ID NO: 609973 - DNA, 75 bp, synthetic construct
  source 1..75: mol_type = other DNA
gtcgggcgctgcgaactaaaaaatccgacgatcgtgacgctattaacgcggtaagtgagctgatagcggaagttg

SEQ ID NO: 609974 - DNA, 75 bp, synthetic construct
  source 1..75: mol_type = other DNA
cgaaatacctgctgtacatgtatctcgccacccgtgcactgaaggtagtccgcgcaatcgggctgggagcactgc

SEQ ID NO: 609975 - DNA, 75 bp, synthetic construct
  source 1..75: mol_type = other DNA
gtgggcaatacagaatgcgaaggaaaccacctggggactggcgggcgtcatgcaggaatatacgtccagcctggg

SEQ ID NO: 609976 - DNA, 75 bp, synthetic construct
  source 1..75: mol_type = other DNA
acggcaaaaccgtgcgcggccgtaaaaagcgcggccccggacgcggacggggtgttcagaccgtcgtgaccgccg

SEQ ID NO: 609977 - DNA, 75 bp, synthetic construct
  source 1..75: mol_type = other DNA
aaccgcgctgtatgaagccatgctggcaagagaaaaggtccgccatgaactcagaacactggagcagggaagacc

SEQ ID NO: 609978 - DNA, 75 bp, synthetic construct
  source 1..75: mol_type = other DNA
cggcaaaaacggaagcagtgaaagcctgggcggtacagaacgcaaaggaaaccacctggggactggcgggggtta

SEQ ID NO: 609979 - DNA, 75 bp, synthetic construct
  source 1..75: mol_type = other DNA
cgaagttatatcaccatgcttgaagatcagggggcacttcagcgatggtctcttgaccgtgctcagggtgcatcc

SEQ ID NO: 609980 - DNA, 75 bp, synthetic construct
  source 1..75: mol_type = other DNA
tgggttcccttgccggaagtatcgccggtggcgcgctgggggctgctgccggtccggtcggggttgccattggtt

SEQ ID NO: 609981 - DNA, 75 bp, synthetic construct
  source 1..75: mol_type = other DNA
tcagattttgaccgcctgcagggcagcattaccggcaccatcgggcggataagcaacctttacgggatgctggcg

SEQ ID NO: 609982 - DNA, 75 bp, synthetic construct
  source 1..75: mol_type = other DNA
gaagtgaaaataacctgaaaggtgttaacgctgaccttgtgaaagttgtccgccgcgcccttcaactttccgctg

SEQ ID NO: 609983 - DNA, 75 bp, synthetic construct
  source 1..75: mol_type = other DNA
tgcggcacagaaaagcggcttacaggataagctggccacacagacggcctcagccctgaatcagggattcgagta

SEQ ID NO: 609984 - DNA, 75 bp, synthetic construct
  source 1..75: mol_type = other DNA
caggtttgcgggggcgggagcattacgtctcggcgcaacccccttacgctatggtatggcgatgacctccgtgct

SEQ ID NO: 609985 - DNA, 75 bp, synthetic construct
  source 1..75: mol_type = other DNA
attggtcagggcgcacagaccgccgcgaaatatctcctgtatatgtatctcgccacccgtgcgctgaaggctgtc

SEQ ID NO: 609986 - DNA, 75 bp, synthetic construct
  source 1..75: mol_type = other DNA
cgatgttatttggagaatatgattttctcgcccgttttgagaaagctgcgcagtgtggttttcgcggcgttgaat

SEQ ID NO: 609987 - DNA, 75 bp, synthetic construct
  source 1..75: mol_type = other DNA
cgcaagcgtaaaccaacgcgctacgagcgccacgctatccgggactttttaatcagcattgagcgctggaggaca

SEQ ID NO: 609988 - DNA, 75 bp, synthetic construct
  source 1..75: mol_type = other DNA
aattcttgctgttgatgaacctgaattatccttacatgccacatcatgttttaatcaatttgataaaataaaaaa

SEQ ID NO: 609989 - DNA, 75 bp, synthetic construct
  source 1..75: mol_type = other DNA
caaaggatacactaatttaaaagaaattgcggcgaagtcgaaaattgcggatgctacgatctcaattccggtgac

SEQ ID NO: 609990 - DNA, 75 bp, synthetic construct
  source 1..75: mol_type = other DNA
agtaataaactcgaacatacgctgcacaatttaccagcgggtgactggcggcgggcgagcggggtattgcctgta

SEQ ID NO: 609991 - DNA, 75 bp, synthetic construct
  source 1..75: mol_type = other DNA
acaatttaccggcgggtgactgggcggcggggagcgcggtattgcctgtattcctggccgtgaagaagagtttcg

SEQ ID NO: 609992 - DNA, 75 bp, synthetic construct
  source 1..75: mol_type = other DNA
gaggaactgaagcttgctgtagcggcagcgcgtaaacgcggtgaaaaagtggtgatgaccaatggcgtctttgac

SEQ ID NO: 609993 - DNA, 75 bp, synthetic construct
  source 1..75: mol_type = other DNA
atctggcaaatgcccgcaagctgggtgaccgtttgattgtcgccgtcaacagcgatgcctccaccaaacggctga

SEQ ID NO: 609994 - DNA, 75 bp, synthetic construct
  source 1..75: mol_type = other DNA
atctggcaaacgcccgcaaactgggtgaccgcctgattgtcgcagtgaacagcgatgcttccaccaaacgactga

SEQ ID NO: 609995 - DNA, 75 bp, synthetic construct
  source 1..75: mol_type = other DNA
cgtctgggcgatgtgctggcaaaacgctatccgggaacgcacgactacgccaccgataaagccctctggcaatat

SEQ ID NO: 609996 - DNA, 75 bp, synthetic construct
  source 1..75: mol_type = other DNA
atccgcgtcgctaccgtgtttcgcaacgcgccggaaccgtttttacgtatgatcgtcgtccatgaactggcgcac

SEQ ID NO: 609997 - DNA, 75 bp, synthetic construct
  source 1..75: mol_type = other DNA
ccgcagtaccaccagcttgagttcgacacccggctgtggctaacgcagttgtcgcttgggcaggacaaaatctga

SEQ ID NO: 609998 - DNA, 75 bp, synthetic construct
  source 1..75: mol_type = other DNA
gcggccttttgccgggatgcagggagcgcaggccacggcgcgacagaggcggcgcgaccggaacggtcgctgcaa

SEQ ID NO: 609999 - DNA, 75 bp, synthetic construct
  source 1..75: mol_type = other DNA
ggtgtgagtattccgacaccggtaatttttaaagatcccgaactcccgcgcaacacgccgaaaaggtcaatagaa

SEQ ID NO: 610000 - DNA, 75 bp, synthetic construct
  source 1..75: mol_type = other DNA
cagcattgataagcgtttgccgatgggcggcggtctcggcggtggttcatccaatgccgcgacggtcctggtggc

SEQ ID NO: 610001 - DNA, 75 bp, synthetic construct
  source 1..75: mol_type = other DNA
tgggtctgacgctgggtgcagatgttcctgtatttgtccgtggtcatgccgcgtttgcagaaggtgtgggtgaaa

SEQ ID NO: 610002 - DNA, 75 bp, synthetic construct
  source 1..75: mol_type = other DNA
agcaagaagccgtggatgccacgctcaatcattttcgtcgccataaaacccctgccgttatcgtactgcccactg

SEQ ID NO: 610003 - DNA, 75 bp, synthetic construct
  source 1..75: mol_type = other DNA
acttacgtaagggacaggcagatggcagctcagccacagacagcactgcaggaaactgaatataaactgcagtga

SEQ ID NO: 610004 - DNA, 75 bp, synthetic construct
  source 1..75: mol_type = other DNA
cagcagcaggttacgggatcacttacgtaagggacaggcagatggcagctcagccacaggcagcactgcaggaaa

SEQ ID NO: 610005 - DNA, 75 bp, synthetic construct
  source 1..75: mol_type = other DNA
agcgcgtctggcaaattgttgccgccattccagaaggctatgtaaccacctacggcgatgtcgccagactggcag

SEQ ID NO: 610006 - DNA, 75 bp, synthetic construct
  source 1..75: mol_type = other DNA
cgccagggggacgcccggaaaaggcactgccaggagaacaacaaaacagacagtaatcagagcagcaggaaaaag

SEQ ID NO: 610007 - DNA, 75 bp, synthetic construct
  source 1..75: mol_type = other DNA
gccaccggcgcgcggtctttttcctgcacgggcagacggacatttatcctcccgcctgccctgtgtcatcaggcg

SEQ ID NO: 610008 - DNA, 75 bp, synthetic construct
  source 1..75: mol_type = other DNA
agcaagtcccggaatggctcaatgcctttgtggcgaaaggtgcaaatctttccccattgcacaaagccatgcttt

SEQ ID NO: 610009 - DNA, 75 bp, synthetic construct
  source 1..75: mol_type = other DNA
ctgcagcgcggggagcgggtccgtttccgctgcaattttattctcggcactgccggacgctttgaagagtccatc

SEQ ID NO: 610010 - DNA, 75 bp, synthetic construct
  source 1..75: mol_type = other DNA
tttgtggcgctgacggcaacccagcgggaagatctggacgcactgcatcagcgtttgcaggggtatatcgctgat

SEQ ID NO: 610011 - DNA, 75 bp, synthetic construct
  source 1..75: mol_type = other DNA
gccgttgtcggtaaatgtaagaccgaagaagagattgttgaacgtggcatgaaactgattgccgattacgaactt

SEQ ID NO: 610012 - DNA, 75 bp, synthetic construct
  source 1..75: mol_type = other DNA
ggaatacaaccggattgccacttatcagtccatgaatgactgctacgtggtggaagactacggcaaatgtgcact

SEQ ID NO: 610013 - DNA, 75 bp, synthetic construct
  source 1..75: mol_type = other DNA
gatgaccctgacccgtcgcgatgaagaaaacaaactggtgtcaaaaggtgactatggtaatcccgatgccatggt

SEQ ID NO: 610014 - DNA, 75 bp, synthetic construct
  source 1..75: mol_type = other DNA
ctttcggtctacttccagaaagggtcactgcgtcgcttcatccgtgaagagccggagtacaaccgtatcgccacc

SEQ ID NO: 610015 - DNA, 75 bp, synthetic construct
  source 1..75: mol_type = other DNA
atgcgaacgctgatgcactggtacaggacgcgcgctcatccctgctggatgaatggcacaaggaagcagacgacc

SEQ ID NO: 610016 - DNA, 75 bp, synthetic construct
  source 1..75: mol_type = other DNA
accgggtggctgaaacacatccgtgaacacgccacgacgcgtgtcgtgaaggcaatgacgctgacccgtcgcgat

SEQ ID NO: 610017 - DNA, 75 bp, synthetic construct
  source 1..75: mol_type = other DNA
gccacatatgaccatgacgcgccggactggtaccgggagggcataaaagcactgtcagcgcaggctgaagacaag

SEQ ID NO: 610018 - DNA, 75 bp, synthetic construct
  source 1..75: mol_type = other DNA
tgctgatcgctacagccgctattgccgggccaaccgttcccatgcaggcgctggatgaagcccggttgctgccgg

SEQ ID NO: 610019 - DNA, 75 bp, synthetic construct
  source 1..75: mol_type = other DNA
atgatcatcggttttatggcgctggccttcttcggtaagggcatcggggcgctgggttgggcagtaatggcagat

SEQ ID NO: 610020 - DNA, 75 bp, synthetic construct
  source 1..75: mol_type = other DNA
cggttcggaaatggccaaagatatcggccttgatcccgtgggaatgggctatgtgttctctgccttctcatgggc

SEQ ID NO: 610021 - DNA, 75 bp, synthetic construct
  source 1..75: mol_type = other DNA
tcagatggctgcagaccttgccgcagggttcaggtattcccggctgacggttatccccggagggggacacatatt

SEQ ID NO: 610022 - DNA, 75 bp, synthetic construct
  source 1..75: mol_type = other DNA
atacagattcaggtccggactgtgggggctccggttttcctgttattgttcttattcctgaccttctgatgacag

SEQ ID NO: 610023 - DNA, 75 bp, synthetic construct
  source 1..75: mol_type = other DNA
tatcagccagtgttatttatgcatggtaatgatgataaggaagtcccggttcagtctgcatatgaattagaaaaa

SEQ ID NO: 610024 - DNA, 75 bp, synthetic construct
  source 1..75: mol_type = other DNA
cccgatcctggaaagcctcgcggcgcagtacaacgggcaatttattctggcgaagctggactgtgacgcggagca

SEQ ID NO: 610025 - DNA, 75 bp, synthetic construct
  source 1..75: mol_type = other DNA
gatggaagaaaccgaatcaaagccctggctgggcgaatcagtggatcgtcgaaccctgaaagacgtggttgagct

SEQ ID NO: 610026 - DNA, 75 bp, synthetic construct
  source 1..75: mol_type = other DNA
gattcctaaatggctctatgacgaactatccacacgtcaaggaaggatgtttaaattgaagtggtttactgaatt

SEQ ID NO: 610027 - DNA, 75 bp, synthetic construct
  source 1..75: mol_type = other DNA
gaagtatgcacatttctccccggatcatcttgaggaggctgtaacatttaatcctttaacattatgtaatggttt

SEQ ID NO: 610028 - DNA, 75 bp, synthetic construct
  source 1..75: mol_type = other DNA
gatttgggcgaagaaagatttaacgatcttgaggaaggcataccatatgagctttctatcaatgttgtttatgat

SEQ ID NO: 610029 - DNA, 75 bp, synthetic construct
  source 1..75: mol_type = other DNA
gcaacatccacgttgcgtgtggaacttgctgaaacagcacgtttcccgctacacgccagatgtggttgaaaacat

SEQ ID NO: 610030 - DNA, 75 bp, synthetic construct
  source 1..75: mol_type = other DNA
ggtcaaaaatgaagacggtgttttcatgtcccccgtaaaacctcgcacggttaatcttgagcagcgtaacctgtc

SEQ ID NO: 610031 - DNA, 75 bp, synthetic construct
  source 1..75: mol_type = other DNA
gagcagaaattccagcaactggtcggccaggcggtgcagcttggcggctcaatagcgttaatcagccactacttc

SEQ ID NO: 610032 - DNA, 75 bp, synthetic construct
  source 1..75: mol_type = other DNA
ttcgatgaggtcgaaccaaaggccgggcaggtggtaccggctctcgcacacattgggcaaagcgaagcggaatag

SEQ ID NO: 610033 - DNA, 75 bp, synthetic construct
  source 1..75: mol_type = other DNA
atgctgataaatcatatcaactatgcaaaagaatacgaggttagagaatttatgtcaactgacactagcgaacgt

SEQ ID NO: 610034 - DNA, 75 bp, synthetic construct
  source 1..75: mol_type = other DNA
atactggtactgcagaaaatcctcggacattccaacattcgcgaaacaatgagatacgcgcactttgctcctgac

SEQ ID NO: 610035 - DNA, 75 bp, synthetic construct
  source 1..75: mol_type = other DNA
cttgtaggaaagcttttgaacgtgcggttaaacgagctggtatcgagctaccagaagggcaatgcacacacgtat

SEQ ID NO: 610036 - DNA, 75 bp, synthetic construct
  source 1..75: mol_type = other DNA
cgcttgctgggctgccaacatttaaaattgctgagggtgaattggcgttcctgaccccggaagaaattaaacgtc

SEQ ID NO: 610037 - DNA, 75 bp, synthetic construct
  source 1..75: mol_type = other DNA
gtaaagattgccgtgggcgtggtgttgccatttatcgtgaagagtcggaaaaacgggggatgcctgttatcaggg

SEQ ID NO: 610038 - DNA, 75 bp, synthetic construct
  source 1..75: mol_type = other DNA
cagcgaggcggtagcaaggctgaatcaggttaatccacaacaggtaattttcgctcaacaaaacccggaagttat

SEQ ID NO: 610039 - DNA, 75 bp, synthetic construct
  source 1..75: mol_type = other DNA
cagcgaggcggtggcaaggctgaatcaggtgaatccacagcaggtgattttcgcccagcaaaaccccgacgttat

SEQ ID NO: 610040 - DNA, 75 bp, synthetic construct
  source 1..75: mol_type = other DNA
aaagaatattgaaaccttccacactgcgcaaaaactgccgccggtagatgtagaaacgcagccaggcgtgcgttg

SEQ ID NO: 610041 - DNA, 75 bp, synthetic construct
  source 1..75: mol_type = other DNA
aaagatgcgctgagcatcactgatgtgatggctgcgcagggtatgacacaaaaccgggctgagatgggattttct

SEQ ID NO: 610042 - DNA, 75 bp, synthetic construct
  source 1..75: mol_type = other DNA
gtaaagattgccgtgggcgcggtgttgccatgcatcgtgaagagtcggaaaagcagggtgtgccggttttcagaa

SEQ ID NO: 610043 - DNA, 75 bp, synthetic construct
  source 1..75: mol_type = other DNA
gcgatttttaacgatgaagaaaaattcaccgtccattcggcgttgccgcaggtagccttgctcggtgatgagggg

SEQ ID NO: 610044 - DNA, 75 bp, synthetic construct
  source 1..75: mol_type = other DNA
cgaccagggggtttttcataatgatgtgattgcggtgagcaaccgccaggtgctgttttgccatcagcaggcgtt

SEQ ID NO: 610045 - DNA, 75 bp, synthetic construct
  source 1..75: mol_type = other DNA
gcggcaaaccacaatcggctcggtggtaactatggtgatccgggtatacaggttttcgtctatggccgagaagag

SEQ ID NO: 610046 - DNA, 75 bp, synthetic construct
  source 1..75: mol_type = other DNA
ttatggcgatagaagttccggcgactcaggtttccgtgtcagatgcggtgtctacgtatctgtttaacagccagt

SEQ ID NO: 610047 - DNA, 75 bp, synthetic construct
  source 1..75: mol_type = other DNA
aaaacagggcttactgaaaatgaaaacccttgccgatgcgggattcccccaggccgtgatcccgccgcacgagcg

SEQ ID NO: 610048 - DNA, 75 bp, synthetic construct
  source 1..75: mol_type = other DNA
gtgattgccgtaagtaaccgtcaggtgctgttttgccatcagcaggcgttcgctcgccaggcgcaattactggca

SEQ ID NO: 610049 - DNA, 75 bp, synthetic construct
  source 1..75: mol_type = other DNA
gacggtgcggcgatcgatatgcccgcaggcccgtcggaagtgttggtcattgctgacagcggcgcaacgccggat

SEQ ID NO: 610050 - DNA, 75 bp, synthetic construct
  source 1..75: mol_type = other DNA
accgcatccgattgatggcctgtccggtgaatatgcggaaaaatcccttgaagaatgggcggaacagattcgcaa

SEQ ID NO: 610051 - DNA, 75 bp, synthetic construct
  source 1..75: mol_type = other DNA
gctccctggtgcgtagttatagtgtccctgctggaaaacgagggaacatctggaccgtgtttaaactcaatccaa

SEQ ID NO: 610052 - DNA, 75 bp, synthetic construct
  source 1..75: mol_type = other DNA
gactagtctggatggcatgcgtgtagttttgagctggggcgaaaagccttttgatcttgattcgcatttgatctt

SEQ ID NO: 610053 - DNA, 75 bp, synthetic construct
  source 1..75: mol_type = other DNA
ggtggaattgctaatgggcggccctcacatagacaatcagaaaaggatgttggtaaagacttaggcgcaggatgg

SEQ ID NO: 610054 - DNA, 75 bp, synthetic construct
  source 1..75: mol_type = other DNA
acagatgtacggtaagccggtgagtgaactgagcgagacagagaagcagactgtttcgacactggcaacggttgc

SEQ ID NO: 610055 - DNA, 75 bp, synthetic construct
  source 1..75: mol_type = other DNA
ctgcgagccagttacagctgttcggcaggaagaatgctggtactgagcctgctggcaacactgagcacaatagtg

SEQ ID NO: 610056 - DNA, 75 bp, synthetic construct
  source 1..75: mol_type = other DNA
gtgtgcatacacacttgaacatcatgatcacgcagtagcttttgccgccgagctacgcaaaggaggcaaccagtg

SEQ ID NO: 610057 - DNA, 75 bp, synthetic construct
  source 1..75: mol_type = other DNA
ggagatctccaaccagtacggcccggagcacctgatcattcagacccgcaacgcccgcgaactggtcgatggcat

SEQ ID NO: 610058 - DNA, 75 bp, synthetic construct
  source 1..75: mol_type = other DNA
tgcggtgtgcaggacgtgtttaacgtcggcggtgcacaggccattgccgcgctggcgtttggtacggaatctgtg

SEQ ID NO: 610059 - DNA, 75 bp, synthetic construct
  source 1..75: mol_type = other DNA
ccattcaactcttccaacaggcaacagaattagacggcaattacggacaggcatttagtaacctgggtctggcgt

SEQ ID NO: 610060 - DNA, 75 bp, synthetic construct
  source 1..75: mol_type = other DNA
ttatgaaactgcaggacagaatgctgatgcattgcagcattatcaactcgcttatgcggaaaaaataagccctct

SEQ ID NO: 610061 - DNA, 75 bp, synthetic construct
  source 1..75: mol_type = other DNA
atgggtgtaaattcggacgtttatgcggccgatgtaaatatcgatattttaagtgcgacagtgaaagataaacgc

SEQ ID NO: 610062 - DNA, 75 bp, synthetic construct
  source 1..75: mol_type = other DNA
tgcgctcaatgactgggtggatcgttactaccgcgatcgtcttactgctgccgatcttgccgacccgcaattgct

SEQ ID NO: 610063 - DNA, 75 bp, synthetic construct
  source 1..75: mol_type = other DNA
tgtgtatcacgcagactcactatttgccaatactccggtcaccaaggtgtttagtacaacaggcgaagagcaacg

SEQ ID NO: 610064 - DNA, 75 bp, synthetic construct
  source 1..75: mol_type = other DNA
atggcgggtatggcttacagccgtgtttcgactttctccggggattatctccgcgtaactgacaacaaggggaaa

SEQ ID NO: 610065 - DNA, 75 bp, synthetic construct
  source 1..75: mol_type = other DNA
gccgtctgtgcgcgtgaatgaatggttcagcgcgtatgcgatcgcgggtgtggcttacagccgtgtgtcgacttt

SEQ ID NO: 610066 - DNA, 75 bp, synthetic construct
  source 1..75: mol_type = other DNA
gcgttcctggggaaaatgggcattagtatgaatgacagggcgcgggcaacagaattactggcagattatgcatta

SEQ ID NO: 610067 - DNA, 75 bp, synthetic construct
  source 1..75: mol_type = other DNA
taagaaaacttccggcagaaataaaaccggcagtgatgcgcattatggcttcgtacgcttttgaggattatgccc

SEQ ID NO: 610068 - DNA, 75 bp, synthetic construct
  source 1..75: mol_type = other DNA
ggaaaaaacagttaagaaattctatgatgcgctggtgacccggtttgatattgaagaaggatgggctgagcggca

SEQ ID NO: 610069 - DNA, 75 bp, synthetic construct
  source 1..75: mol_type = other DNA
ccgaattcgtggccattgatattgcttatgaagggtccggtagtggggactggcgcactgacggtttcatcgtgg

SEQ ID NO: 610070 - DNA, 75 bp, synthetic construct
  source 1..75: mol_type = other DNA
ccgaatacgtggccattgatattgcttatgaagggtccggcagtggagactggcgcactgacggtttcatcgtgg

SEQ ID NO: 610071 - DNA, 75 bp, synthetic construct
  source 1..75: mol_type = other DNA
tgctgaccggaagtgatgacggtcgccacagcaacacgtctctggcgtggggtgctggcgtgcagtttaacccga

SEQ ID NO: 610072 - DNA, 75 bp, synthetic construct
  source 1..75: mol_type = other DNA
tcagctatgcaggagacaagaatcgccagcttacccgttacagcgatacccgcaggcatgaagattccgttcgta

SEQ ID NO: 610073 - DNA, 75 bp, synthetic construct
  source 1..75: mol_type = other DNA
ccgaatgcgtggccattgatattgcttatgaagggtccggtagtggtgactggcgcactgacggtttcatcgtgg

SEQ ID NO: 610074 - DNA, 75 bp, synthetic construct
  source 1..75: mol_type = other DNA
ccgaatccgtggccattgatattgcttatgaagggtccgggagtggcgactggcgcactgacggtttcatcgtgg

SEQ ID NO: 610075 - DNA, 75 bp, synthetic construct
  source 1..75: mol_type = other DNA
gcgttcctggggaaaatgggtatcagtatgaatgacagggaacgggcaacagaactgctgacagaatatgctctc

SEQ ID NO: 610076 - DNA, 75 bp, synthetic construct
  source 1..75: mol_type = other DNA
gcgcatgctggagcagggctttgaacgtgagattgtgctggcggcaacccaactcactgatgctgatattccgaa

SEQ ID NO: 610077 - DNA, 75 bp, synthetic construct
  source 1..75: mol_type = other DNA
accggtagtgatgcgcattatggcttcgtatgcttttgaggattatgcccgcagcgcagcgagtaaaaagcagtg

SEQ ID NO: 610078 - DNA, 75 bp, synthetic construct
  source 1..75: mol_type = other DNA
ttgctttgcgcatgctggaacagggcattgatcgtgatcaggtgctcgcggccactcagctaagcgaagccgatc

SEQ ID NO: 610079 - DNA, 75 bp, synthetic construct
  source 1..75: mol_type = other DNA
atctcaatgaactccttgccgctgacaacccgattagcgaactaaaagtctttgatttacgtgaaagcatggcga

SEQ ID NO: 610080 - DNA, 75 bp, synthetic construct
  source 1..75: mol_type = other DNA
ggcaatgatacccggccttcccgttatccggcgcgacagactcgcgaagccagcgaggcggtggcaaggctgaat

SEQ ID NO: 610081 - DNA, 75 bp, synthetic construct
  source 1..75: mol_type = other DNA
aaaattgctttgcgcatgctggagcagggctttgaacgtgagattgtgctggcgacaacccaactcactgatgct

SEQ ID NO: 610082 - DNA, 75 bp, synthetic construct
  source 1..75: mol_type = other DNA
ctatgaaagactaccatcaacggaggcatttaatgccatacgcaaagtgacgagtgctatcacgcttgatacgtg

SEQ ID NO: 610083 - DNA, 75 bp, synthetic construct
  source 1..75: mol_type = other DNA
ggaaaaaactgttaagcaattctatgacaagctggtggttcggtttgacattgaagaggcatgggcggagcgaca

SEQ ID NO: 610084 - DNA, 75 bp, synthetic construct
  source 1..75: mol_type = other DNA
gccagtgtgggcaaagtgcacaaaaggcgtgtatccgtcttactggggaggaataggaaaaagtcgagggaggta

SEQ ID NO: 610085 - DNA, 75 bp, synthetic construct
  source 1..75: mol_type = other DNA
ccggcttcacctgcgatgcaaaacagtggagatactcaactggcaagaaaatataatcgcgaaggtgaagctgtt

SEQ ID NO: 610086 - DNA, 75 bp, synthetic construct
  source 1..75: mol_type = other DNA
tgcgcgctcagccaggggactggtggatctgatcgacagcagggttgtgtcaattatgcagtcatcgcgtcggga

SEQ ID NO: 610087 - DNA, 75 bp, synthetic construct
  source 1..75: mol_type = other DNA
tgatactggctgcggaaaacaacgccacacagcctacagacagtacagcaaccacaacacaacatggcactgcat

SEQ ID NO: 610088 - DNA, 75 bp, synthetic construct
  source 1..75: mol_type = other DNA
ccagatgtgcggggtgtacgcaatgatgtcggactgtaacctgtttgagcctcccctgcaggaggccgttaaccg

SEQ ID NO: 610089 - DNA, 75 bp, synthetic construct
  source 1..75: mol_type = other DNA
cggattatctggcagatgccatgagatttaacccggtagccaacatagtgatcaccgaagaaaaagagccagcag

SEQ ID NO: 610090 - DNA, 75 bp, synthetic construct
  source 1..75: mol_type = other DNA
gcagttccatggcggtactgcgagtgctccccaagccactgaatgagcccaattacttctttcagtcaacttggc

SEQ ID NO: 610091 - DNA, 75 bp, synthetic construct
  source 1..75: mol_type = other DNA
cggaagtttcgtttgtattaaatggatcaaaagaagaagcgagaggtttaatcatgaactcagaaatattatcga

SEQ ID NO: 610092 - DNA, 75 bp, synthetic construct
  source 1..75: mol_type = other DNA
gcagatttccgactatggtatccccttcagaagttcacacactatttataaatacgagcttcgccagtatagtgt

SEQ ID NO: 610093 - DNA, 75 bp, synthetic construct
  source 1..75: mol_type = other DNA
atgagtatctccactacgaaacaccataacattggcctgtctgagcaccagcaacaagaaatcattacgaatgaa

SEQ ID NO: 610094 - DNA, 75 bp, synthetic construct
  source 1..75: mol_type = other DNA
tgaaaatcacgttgaattatctcgtccaggaaagggtttaaataatttttcacatcgtgtctggtttatgcgtaa

SEQ ID NO: 610095 - DNA, 75 bp, synthetic construct
  source 1..75: mol_type = other DNA
aaaaatgcttaattgcatagattctccgcgtcgagctaatctgtcggttattggctattatgattttacaactca

SEQ ID NO: 610096 - DNA, 75 bp, synthetic construct
  source 1..75: mol_type = other DNA
atgcaatttacggtataccgcagtcgcggcaggaacgccgcgtttccctttgttatcgatgttaccagcgacatt

SEQ ID NO: 610097 - DNA, 75 bp, synthetic construct
  source 1..75: mol_type = other DNA
ggtgccggaaagcccactacgttctgttactcacggggacccctctgcatgggcatgaaaggaacttcttgtcga

SEQ ID NO: 610098 - DNA, 75 bp, synthetic construct
  source 1..75: mol_type = other DNA
ctcccgattgataaaatctttgttctcaacaaagcctatgatactccagtaaaccctgctgactttcttgcctta

SEQ ID NO: 610099 - DNA, 75 bp, synthetic construct
  source 1..75: mol_type = other DNA
gacgaatattgttgaggtggggcctgagccgaaaactgctgaggagtgtgatttaggcacttttgttatgcttga

SEQ ID NO: 610100 - DNA, 75 bp, synthetic construct
  source 1..75: mol_type = other DNA
aacccaggcaataaccagatctgggtaaaaagcaacgctggggatgagaggcagattcccgactacggtatcccg

SEQ ID NO: 610101 - DNA, 75 bp, synthetic construct
  source 1..75: mol_type = other DNA
taattaaagactccggcctgcgcaccatgtacgagcaggagaagggcgaaaaaggtcagacgcgtatcgaaaact

SEQ ID NO: 610102 - DNA, 75 bp, synthetic construct
  source 1..75: mol_type = other DNA
gaagagggcatgttcccaagtcagatgtcgctggatgaaggcgggcgtctggaagaagaacgccgtctggcctac

SEQ ID NO: 610103 - DNA, 75 bp, synthetic construct
  source 1..75: mol_type = other DNA
caggatgcggtgcagttgatgacgctacactcggcgaaaggtctggagttcccgcaggtgtttatcgtcggtatg

SEQ ID NO: 610104 - DNA, 75 bp, synthetic construct
  source 1..75: mol_type = other DNA
ctaacgccgcgcggcttcgcccgtgctgtattcctggctaacgaccgggccatcacgcggacgacgcttaaccgc

SEQ ID NO: 610105 - DNA, 75 bp, synthetic construct
  source 1..75: mol_type = other DNA
tggaagacgagcagggaatagccgacacgctggtctacatgttgcagcaggaaggttttagcgtcgacgttttcg

SEQ ID NO: 610106 - DNA, 75 bp, synthetic construct
  source 1..75: mol_type = other DNA
cgccagcaactgatggatagcgtgtgggaagatgcgcaggacacctacgatcgcaccgttgatacccacattaaa

SEQ ID NO: 610107 - DNA, 75 bp, synthetic construct
  source 1..75: mol_type = other DNA
ttcttgaacgtatccgcaagctggcaccacagcatgtaaccgcgccgtaccggacggcagaagagtggcgtgagt

SEQ ID NO: 610108 - DNA, 75 bp, synthetic construct
  source 1..75: mol_type = other DNA
cgtgatacacgcaatgaacaggtcactctgaaccagatagtcgaccgcagaacggcttcgatgcgcagtgtcggg

SEQ ID NO: 610109 - DNA, 75 bp, synthetic construct
  source 1..75: mol_type = other DNA
ttaaccgctccggtatccagctgcttcaccggaagtgtacgttcggtaactaccgggtgcagaacgatggtcagc

SEQ ID NO: 610110 - DNA, 75 bp, synthetic construct
  source 1..75: mol_type = other DNA
taccatcgcccgtcgcgctttatcggtgagttgccggaagagtgtgtggaagaggtgcgcctgcgcgctacggta

SEQ ID NO: 610111 - DNA, 75 bp, synthetic construct
  source 1..75: mol_type = other DNA
atgagtgggcttagaaattgggtggtgtggtcgctgtacgacggcagcgggtacgccgttaaagattgggccgac

SEQ ID NO: 610112 - DNA, 75 bp, synthetic construct
  source 1..75: mol_type = other DNA
tggagaatcaggtgttgatggatggattgatacccacttctgggagaggtttggcggcgcattaatggtcggcat

SEQ ID NO: 610113 - DNA, 75 bp, synthetic construct
  source 1..75: mol_type = other DNA
gttaacgcgctgggaacgaaattttgcgatgccagcgcgcaccgaacgttgattaaaggagcattagattttatg

SEQ ID NO: 610114 - DNA, 75 bp, synthetic construct
  source 1..75: mol_type = other DNA
gagattacgtaattgcgaattagctggtatggggaaacgagtttatacggcaagtcgtgtgcgtgtaacttttga

SEQ ID NO: 610115 - DNA, 75 bp, synthetic construct
  source 1..75: mol_type = other DNA
taacgatattctggagttcagtattgcatgctacctcctcattaccttttcctccatcggggatgacattaccag

SEQ ID NO: 610116 - DNA, 75 bp, synthetic construct
  source 1..75: mol_type = other DNA
cttcctgaatactggggagaagaacacgtatggtgggacggcagggctgcttttcatggtgaggttgtcagacct

SEQ ID NO: 610117 - DNA, 75 bp, synthetic construct
  source 1..75: mol_type = other DNA
attatgattatgattatttttattttttttataacatctttttttataccaatagttattccttatgatataaaa

SEQ ID NO: 610118 - DNA, 75 bp, synthetic construct
  source 1..75: mol_type = other DNA
ggattacaccctcagaattgtgagaaacggaaaaaaacttgaagccggaaattattttgctgtgctgggattccg

SEQ ID NO: 610119 - DNA, 75 bp, synthetic construct
  source 1..75: mol_type = other DNA
cagaatggtttctctggacctgaaagaaaattcagcctccggctcaggaattgtgaatttaacagtcagggtggg

SEQ ID NO: 610120 - DNA, 75 bp, synthetic construct
  source 1..75: mol_type = other DNA
atgtgctgaatggtgacaatacagacgaaaacaaacagcctaatctgggcaaggacgtggcgagtgctacggata

SEQ ID NO: 610121 - DNA, 75 bp, synthetic construct
  source 1..75: mol_type = other DNA
aacaccggggggatggggaccggataatgaagaaaaagcccgtcatcaggaggttcagcaacaacgatttgatga

SEQ ID NO: 610122 - DNA, 75 bp, synthetic construct
  source 1..75: mol_type = other DNA
gagttcggtaagtaaccgttatggtacgacgaaagtgtttgaaagccagaatctgacggataagcagatccataa

SEQ ID NO: 610123 - DNA, 75 bp, synthetic construct
  source 1..75: mol_type = other DNA
tatattgctgaaattatcaaacagaccaccccggacggtgcggggcgtgtggcagcccatgccatggtgaatgcc

SEQ ID NO: 610124 - DNA, 75 bp, synthetic construct
  source 1..75: mol_type = other DNA
taagtaaccgttatggtacgacgaaagtgtttgaaagccagaatttgacggataaacagatccacaattacgcac

SEQ ID NO: 610125 - DNA, 75 bp, synthetic construct
  source 1..75: mol_type = other DNA
ggcgccagatggactattgatattaaggggaataaacaactttctgacattgcatataaatacaaagatgtggag

SEQ ID NO: 610126 - DNA, 75 bp, synthetic construct
  source 1..75: mol_type = other DNA
aaagcttatatggatcacccaagaagaacaaaacccatcctcccaccatcagtattaaaagaaataattttaaat

SEQ ID NO: 610127 - DNA, 75 bp, synthetic construct
  source 1..75: mol_type = other DNA
tattattgatactgacggcagcagccttctgaagctgaatcaggttcataacggcgggcaggggaataaggtgga

SEQ ID NO: 610128 - DNA, 75 bp, synthetic construct
  source 1..75: mol_type = other DNA
gtggcaacgccggaagccctgcggactaagagtgtggtacccggtgattatgaagcaacagccacgtttgagtta

SEQ ID NO: 610129 - DNA, 75 bp, synthetic construct
  source 1..75: mol_type = other DNA
cgcgcgtcccgggatttctggtatccgcctggacgttcgccgacagagccgtttgtcatcaggctggaaaactgc

SEQ ID NO: 610130 - DNA, 75 bp, synthetic construct
  source 1..75: mol_type = other DNA
gctcgttctttgggggctgcgttctgtgatgcttcttcttatcgtaagcagatcaaggatgctattgattttctt

SEQ ID NO: 610131 - DNA, 75 bp, synthetic construct
  source 1..75: mol_type = other DNA
acgtttatggacacagcgacccatctttatcatgtctggcccgggaaaagctatgaagagatgtttcagataaag

SEQ ID NO: 610132 - DNA, 75 bp, synthetic construct
  source 1..75: mol_type = other DNA
gaagtgacgtttatggacactgctactcgcctttatcatgcctggcccgggaaaagctatgaagagaagtttcag

SEQ ID NO: 610133 - DNA, 75 bp, synthetic construct
  source 1..75: mol_type = other DNA
attatttattttctgttcgagggtgtggtgcttatgatatgcaaacaggaaaccagtggacgcgtaatctttatg

SEQ ID NO: 610134 - DNA, 75 bp, synthetic construct
  source 1..75: mol_type = other DNA
tacattgtttcataatcataaccatatttcagatgataaatctgatgagtatattattgctggattcaattgctt

SEQ ID NO: 610135 - DNA, 75 bp, synthetic construct
  source 1..75: mol_type = other DNA
gataactcatttgtcatttttgatgtagatggagctctggagcgtctggaacattacaggtgtcaacttaagagt

SEQ ID NO: 610136 - DNA, 75 bp, synthetic construct
  source 1..75: mol_type = other DNA
cattgccgctgaagctcgtgccatggggctgacgaaaaaggacaaaatgccgcaggaaacaaagcgacgcctccg

SEQ ID NO: 610137 - DNA, 75 bp, synthetic construct
  source 1..75: mol_type = other DNA
ttgtatccagcgttaaaatacgctgaagagttatatttgctcattaatcaaaataaaataaatttcattaaaagc

SEQ ID NO: 610138 - DNA, 75 bp, synthetic construct
  source 1..75: mol_type = other DNA
cattactatgatgataatttatcaagatttggcttatctgaaagtgaggctattaatttactggagatgttgatc

SEQ ID NO: 610139 - DNA, 75 bp, synthetic construct
  source 1..75: mol_type = other DNA
tgtccgcagtagtctggctggttgctgctggtacgtcagcgagcgcagcagagcatcagtccacactaagcgccg

SEQ ID NO: 610140 - DNA, 75 bp, synthetic construct
  source 1..75: mol_type = other DNA
tctccggggattatctccgcgtaactgacaacaaggggaaaacgcacgacgtgctgaccggaagtgatgacggtc

SEQ ID NO: 610141 - DNA, 63 bp, synthetic construct
  source 1..63: mol_type = other DNA
atgaattgcgacgtagtatccacaccaagccggcgttatccggtgaggcgcaatgttgcgggg

SEQ ID NO: 610142 - DNA, 75 bp, synthetic construct
  source 1..75: mol_type = other DNA
gctctccctatcgcgtcacgctgaattacgcgtttggtcaggtcattgaaggctgcgccagcgatcgcgaagaag

SEQ ID NO: 610143 - DNA, 75 bp, synthetic construct
  source 1..75: mol_type = other DNA
acactgttttgtggcgagtcgatgttcagccgtatggagaatgcctcgaaaacagcgctcctggttttttgtgac

SEQ ID NO: 610144 - DNA, 75 bp, synthetic construct
  source 1..75: mol_type = other DNA
gtcattcagttatgctggagacaagaatcgccagattacccgttacagtgatacccgctggcatgaagattcagt

SEQ ID NO: 610145 - DNA, 75 bp, synthetic construct
  source 1..75: mol_type = other DNA
agaacacgaagttggggtcattcggcgcatttaataacgaatggcatacgctgggcttccgttttgccggtaaca

SEQ ID NO: 610146 - DNA, 75 bp, synthetic construct
  source 1..75: mol_type = other DNA
taattttggtcagtccaccaatgatacatatccgacagcattacatctggcattactgctgcgaagcaatgtatt

SEQ ID NO: 610147 - DNA, 75 bp, synthetic construct
  source 1..75: mol_type = other DNA
tttccgcagccatttgtctggctgtatccggtgcgcctgcatgggcatctgaacatcagtccacgctgagcgcgg

SEQ ID NO: 610148 - DNA, 75 bp, synthetic construct
  source 1..75: mol_type = other DNA
cgctgctttattaccgtgcaacagagtcaggtggtttactgaatccgcagggatggggagctgaaggagggcgtg

SEQ ID NO: 610149 - DNA, 75 bp, synthetic construct
  source 1..75: mol_type = other DNA
tcttcactgcctcagggcgtcacactggaaggtaatgccggtcataacctgctggcgtcgttttacgtacagagc

SEQ ID NO: 610150 - DNA, 75 bp, synthetic construct
  source 1..75: mol_type = other DNA
ttatgcagcatgatgccggtaatggcgcagacctgctggagaagggcgggcttatcagttgtcgttttaaagttg

SEQ ID NO: 610151 - DNA, 75 bp, synthetic construct
  source 1..75: mol_type = other DNA
tctggcatgaagacgagcttgtcggcggcatatatggcgtagcgcagggaacgctattttgtggcgaatcgatgt

SEQ ID NO: 610152 - DNA, 75 bp, synthetic construct
  source 1..75: mol_type = other DNA
cagtgcgccgcataccctataaccctgacctgtacatcccggaaaatacctcgatcccctgctcactggatcgcc

SEQ ID NO: 610153 - DNA, 75 bp, synthetic construct
  source 1..75: mol_type = other DNA
ctgccgagtctgaacgcgatgctcgccgttctctggtgcgcgatcacgtctgcttttttgctggtcgtatccgca

SEQ ID NO: 610154 - DNA, 75 bp, synthetic construct
  source 1..75: mol_type = other DNA
gatgtggatgatatcgtagctttcctgcacagtctgaacggggtgtacacgccgtatatgcaggataaacaataa

SEQ ID NO: 610155 - DNA, 75 bp, synthetic construct
  source 1..75: mol_type = other DNA
attaacgtgaaataccgttatcgccagtcccttaacggcattgtccatttctgtgacgcggcctggattgccagc

SEQ ID NO: 610156 - DNA, 75 bp, synthetic construct
  source 1..75: mol_type = other DNA
tctggcgtggggggctggcgtgcagtttaacccgaccgaatccgtggccattgatattgcttatgaaggttctgg

SEQ ID NO: 610157 - DNA, 75 bp, synthetic construct
  source 1..75: mol_type = other DNA
ggcgattacccgcacggcaacccaggcgcgccagagcaacagcgtcgatctcgacaaagcccgtctggtggtcag

SEQ ID NO: 610158 - DNA, 75 bp, synthetic construct
  source 1..75: mol_type = other DNA
tgctgctgccaaacacccgtcgcggcaaattactggcggcgaaactgggttaccgccttaacgcggcggtgtcta

SEQ ID NO: 610159 - DNA, 75 bp, synthetic construct
  source 1..75: mol_type = other DNA
gtgccgtttgctaacgaaatggctgagttgctgttcgggcagttggtgatgttgctgaatcgccatcgttacacc

SEQ ID NO: 610160 - DNA, 75 bp, synthetic construct
  source 1..75: mol_type = other DNA
ttacggacacactggggatggtgacgtcgttcagctatgcaggagacaagaatcgccagattacccgttacagcg

SEQ ID NO: 610161 - DNA, 75 bp, synthetic construct
  source 1..75: mol_type = other DNA
gatgacggtcgccacagcgacacctctctggcgtggggagctggcgtgcagtttaacccgaccgaatccgtggcc

SEQ ID NO: 610162 - DNA, 75 bp, synthetic construct
  source 1..75: mol_type = other DNA
ggacggtaaagcggcagtgaaacacatggtttacggcggtctggcgattggcgaagaacgtattgcctcgccgta

SEQ ID NO: 610163 - DNA, 75 bp, synthetic construct
  source 1..75: mol_type = other DNA
ttcagcgtgatggcggggccatctgtgcgcgtgaatgaatggttcagcgcgtatgtgatcgctggtgtgacttac

SEQ ID NO: 610164 - DNA, 75 bp, synthetic construct
  source 1..75: mol_type = other DNA
aaaaaacctgggcacatggggggagatgtaccccattgccgagcaggacatgctgaccaccattcagacccggct

SEQ ID NO: 610165 - DNA, 75 bp, synthetic construct
  source 1..75: mol_type = other DNA
ggcgcgtctggatttcagtaatcaactctctccggcagctatgcataaaattaaggttcgtcaggaacttgctga

SEQ ID NO: 610166 - DNA, 75 bp, synthetic construct
  source 1..75: mol_type = other DNA
tatatcagcgcacataacacccttgtggaaattcgcgcaaagcaaatctgggaagacttcatgcagtcgcatggt

SEQ ID NO: 610167 - DNA, 75 bp, synthetic construct
  source 1..75: mol_type = other DNA
cacttctatacggaacgtagaacagataacagtttgatgtttgatgttgctggcgcttttactgtgcatggacct

SEQ ID NO: 610168 - DNA, 75 bp, synthetic construct
  source 1..75: mol_type = other DNA
cgcttcgggctgacatatatcccggcagtggtgcgtcaggacgggagttcactggttgtcacgtcagcagcgatg

SEQ ID NO: 610169 - DNA, 75 bp, synthetic construct
  source 1..75: mol_type = other DNA
gtgggtaatgcgtcgctgtcgaatattgctggcgatgctgccgaaggcatgttggtcaccatgccaaaacgctat

SEQ ID NO: 610170 - DNA, 75 bp, synthetic construct
  source 1..75: mol_type = other DNA
aactatgaagatcggtttgtcattccgaccagtcatcgggaaatggcgggcgacgccttcggtgaacgcaacggc

SEQ ID NO: 610171 - DNA, 75 bp, synthetic construct
  source 1..75: mol_type = other DNA
cttacggatttcacccacaacctgcttaacgcgccgctgctggataaacaggccgaatggtgcgaagtgtttgac

SEQ ID NO: 610172 - DNA, 75 bp, synthetic construct
  source 1..75: mol_type = other DNA
gatccacacgatccctcagtgatcgaggaagccctgaaacaaggtattccacaaaacgtgattgaagctgcccag

SEQ ID NO: 610173 - DNA, 75 bp, synthetic construct
  source 1..75: mol_type = other DNA
aaagcgaaaatgcacttttgccgcaggaggctgcggaattagccggaaagtatatccacgcgcacgacacccttg

SEQ ID NO: 610174 - DNA, 75 bp, synthetic construct
  source 1..75: mol_type = other DNA
ggcttgaagcacgtcgtcagcaaaaagcggcagcggataatattgcgacaatccgccagcgccgcgctgaaatgg

SEQ ID NO: 610175 - DNA, 75 bp, synthetic construct
  source 1..75: mol_type = other DNA
cgccgcgcagaaatggaagccacgacgaacgccctgaatgaggagtggcgcacgctgtttcgtgaaagtcggggt

SEQ ID NO: 610176 - DNA, 75 bp, synthetic construct
  source 1..75: mol_type = other DNA
aacatttggaaagctactcattggggcgaacagcaccttgcggcgatgggtgttcatgctggcggtggtaatcct

SEQ ID NO: 610177 - DNA, 75 bp, synthetic construct
  source 1..75: mol_type = other DNA
ttaaaggtggcaactatggcttaatttttagaaatgatggttctagcttccatatccttactaccgatttaaaag

SEQ ID NO: 610178 - DNA, 75 bp, synthetic construct
  source 1..75: mol_type = other DNA
gtcatcgcacatgagattggtattatcgcacaggatttacaagaaattttaccggaagctgttagcacttctaat

SEQ ID NO: 610179 - DNA, 75 bp, synthetic construct
  source 1..75: mol_type = other DNA
gtagaacagataacaccgttttatttgatgtagctggtgctttgaccgtgcatggacctaccggaataaccatca

SEQ ID NO: 610180 - DNA, 75 bp, synthetic construct
  source 1..75: mol_type = other DNA
accgttatgagtttacggacacgctggggctgattacgtccttcagttatgccaatgctgaagatgagaaaaaaa

SEQ ID NO: 610181 - DNA, 75 bp, synthetic construct
  source 1..75: mol_type = other DNA
ctttcggctgcaaccgggttacatgtcaagagattaacattggatggcggtgttggtaatgccggtattgacatt

SEQ ID NO: 610182 - DNA, 75 bp, synthetic construct
  source 1..75: mol_type = other DNA
cttaccacagatctcggtgattcctttggaccgtggaatagtcgtagaccattcagttatgatttcgccgaaggt

SEQ ID NO: 610183 - DNA, 75 bp, synthetic construct
  source 1..75: mol_type = other DNA
caataagcaagaggcagcggataacgtcgcagcattaacccgtgatgttgaagccaaaaatacagcaattcatag

SEQ ID NO: 610184 - DNA, 75 bp, synthetic construct
  source 1..75: mol_type = other DNA
aaacattcactgacggtacattatacctaaatcagatgaataatagctctgaacgattctctatcaataactggg

SEQ ID NO: 610185 - DNA, 75 bp, synthetic construct
  source 1..75: mol_type = other DNA
gtcagtatgttttttatgagtggtaacaaaatcgcatcgactgataaactgacactagttgaagaaaaaggtggg

SEQ ID NO: 610186 - DNA, 75 bp, synthetic construct
  source 1..75: mol_type = other DNA
actggatagcacaattgcagtaaatgaccgcaatattcacgctaaagtagatgaaattaaacaaactactgatgc

SEQ ID NO: 610187 - DNA, 75 bp, synthetic construct
  source 1..75: mol_type = other DNA
gattcgtctatatatttgctgggtacttgtgctgataataacaactggtatatcggtaaaggtggtgctgataat

SEQ ID NO: 610188 - DNA, 75 bp, synthetic construct
  source 1..75: mol_type = other DNA
atctggcatgagacagttgatgataacgcatatcgtcttgctactggatacgaagatacaaatcaggaattattg

SEQ ID NO: 610189 - DNA, 75 bp, synthetic construct
  source 1..75: mol_type = other DNA
ccgtctgtgcgcgtgaatgaatggttcagcgcgtatgcgatggcgggtgtgacttacagccgtgtgtcgactttc

SEQ ID NO: 610190 - DNA, 75 bp, synthetic construct
  source 1..75: mol_type = other DNA
tccgtgtacctgacaacaaggggaaaacgcacgatgtgctgaccggaagtgatgacggtcgccacagcaacacgt

SEQ ID NO: 610191 - DNA, 75 bp, synthetic construct
  source 1..75: mol_type = other DNA
tccggggattatctccgcgtaactgacaacaaggggaaaacgcacgatgtgctgaccggaagtgatgacggtcgc

SEQ ID NO: 610192 - DNA, 75 bp, synthetic construct
  source 1..75: mol_type = other DNA
cgaatccgtggcaattgatattgcttatgaaggttccggcagtggcgactggcgcactgacgggttcatcgtggg

SEQ ID NO: 610193 - DNA, 75 bp, synthetic construct
  source 1..75: mol_type = other DNA
cgtggggggctggcgtgcagtttaacccgaccgaatccgtggccattgatattgcttatgaaggttacggcagtg

SEQ ID NO: 610194 - DNA, 75 bp, synthetic construct
  source 1..75: mol_type = other DNA
ggtatcttcatgcccggaccaacgttcccggcagtgatgatctgaacgggattaacgtgaaataccgttatgagt

SEQ ID NO: 610195 - DNA, 75 bp, synthetic construct
  source 1..75: mol_type = other DNA
acacttgccgatctgaccgatgacaacgccagcagcggtaacagtgttctggcggtcacgcagcaactgtcgatt

SEQ ID NO: 610196 - DNA, 75 bp, synthetic construct
  source 1..75: mol_type = other DNA
aacccattaatttcattagatttatttaaaacccgcactttctcgatcggtatcgtaggcaatattgcaacccgt

SEQ ID NO: 610197 - DNA, 75 bp, synthetic construct
  source 1..75: mol_type = other DNA
atgcgtaaactttatgccgccattttttccgcagccatttgtctggctgtatccggtgcgcctgcatgggcatct

SEQ ID NO: 610198 - DNA, 75 bp, synthetic construct
  source 1..75: mol_type = other DNA
gatgagcaaaaaacgcattacagcgatacccgctggcatgaggattacgtgcgtaaccgctggttcagcgtgatg

SEQ ID NO: 610199 - DNA, 75 bp, synthetic construct
  source 1..75: mol_type = other DNA
actttctccggggattatctccgcgtaactgacaacaaggggaaaacgcacgatgtgctgaccgggagtgatgac

SEQ ID NO: 610200 - DNA, 75 bp, synthetic construct
  source 1..75: mol_type = other DNA
ccgtctgtacgcgtgaatgaatggttcagtgcttatgcgatggcaggtgtggcttacagccgtgtttcgactttt

SEQ ID NO: 610201 - DNA, 75 bp, synthetic construct
  source 1..75: mol_type = other DNA
ttacggacacgctgggaatggtgacgtcattcagctatgcaggagacaagaatcgccagcttacccgttacagcg

SEQ ID NO: 610202 - DNA, 75 bp, synthetic construct
  source 1..75: mol_type = other DNA
gggtgtggcttacagccgtgtgtcgactttctccggggattatctccgcgtaactgacaacaaggggaaaaaagc

SEQ ID NO: 610203 - DNA, 75 bp, synthetic construct
  source 1..75: mol_type = other DNA
taactgacagcaaggggaaaacgcacgatgtgctgaccggaagtgatgacggtcgccacagcaacacgtctctgg

SEQ ID NO: 610204 - DNA, 75 bp, synthetic construct
  source 1..75: mol_type = other DNA
tcccggcagcgatgatcttaacgggattaacgtgaaataccgctatgagtttacggacacgctggggatggtgac

SEQ ID NO: 610205 - DNA, 75 bp, synthetic construct
  source 1..75: mol_type = other DNA
attaacgtgaaataccgttatgaatttacggacacgctggggctggtgacgtcattcagttatgcaggagacaag

SEQ ID NO: 610206 - DNA, 75 bp, synthetic construct
  source 1..75: mol_type = other DNA
cagcctggaatgccgggattcagttcagtcccgtagagacggtggttattgaccttgcttatgaaggctccggca

SEQ ID NO: 610207 - DNA, 75 bp, synthetic construct
  source 1..75: mol_type = other DNA
aacgggattaacgtgaaataccgttatgagtttacggacacgctggggctgattacgtccttcagttatgccaat

SEQ ID NO: 610208 - DNA, 75 bp, synthetic construct
  source 1..75: mol_type = other DNA
gatgtgctgaccggaagtgatgacggtcgccacagcaacacgtctctggcgtggggagctggcgtgcagtttaac

SEQ ID NO: 610209 - DNA, 75 bp, synthetic construct
  source 1..75: mol_type = other DNA
tacagccgtgtgtcgactttttccggggattatctccgcgtaactgacaacaaggggaaaacgcatgatgtgctg

SEQ ID NO: 610210 - DNA, 75 bp, synthetic construct
  source 1..75: mol_type = other DNA
taactgacaacaaggggaaaacgcacgatgtgctgaccggaagtgatgacgatcgccacagcaacacgtctctgg

SEQ ID NO: 610211 - DNA, 75 bp, synthetic construct
  source 1..75: mol_type = other DNA
atgcgatggcgggtgtggcttacagccgtgtgtcgactttctccggggattatctccgcgtaactgacaacaagg

SEQ ID NO: 610212 - DNA, 75 bp, synthetic construct
  source 1..75: mol_type = other DNA
tcagggagaaattatcaacctgattacagggcaggatattgatttttccaatatttacacactgaaaatgaaaca

SEQ ID NO: 610213 - DNA, 75 bp, synthetic construct
  source 1..75: mol_type = other DNA
gtcgcactgctgattagcggtggtatcctgacctgggccggatttaacgatccgcaggaaatcaacggcacctta

SEQ ID NO: 610214 - DNA, 75 bp, synthetic construct
  source 1..75: mol_type = other DNA
cttcatgcccggacgaacgttcccggcagtgatgatctgaacgggattaacgtgaaataccgttatgagtttacg

SEQ ID NO: 610215 - DNA, 75 bp, synthetic construct
  source 1..75: mol_type = other DNA
aatccgtggccattgatattgcttatgaaggccccggcagtggcgactggcgcactgacggtttcatcgtgggtg

SEQ ID NO: 610216 - DNA, 75 bp, synthetic construct
  source 1..75: mol_type = other DNA
ggtatcttcatgcccggacgaacgctcccggtagcgataatcttaacgggattaacgtgaaataccgttatgagt

SEQ ID NO: 610217 - DNA, 75 bp, synthetic construct
  source 1..75: mol_type = other DNA
gaacatcagtccacgctgagcgcggggtatcttcatgcccggacgaacgttcccggcagcgatgatctgaacggg

SEQ ID NO: 610218 - DNA, 75 bp, synthetic construct
  source 1..75: mol_type = other DNA
aaaaaacgcactacagcgatacccgctggcatgaagattccgtgcgtaaccgctggttcagcgtgatggcggggc

SEQ ID NO: 610219 - DNA, 75 bp, synthetic construct
  source 1..75: mol_type = other DNA
ttgatgtcgcttatgaaggttccggtagtggcgactggcgaacggatgcatttattgttggtatcggataccgtt

SEQ ID NO: 610220 - DNA, 75 bp, synthetic construct
  source 1..75: mol_type = other DNA
ggaaaaacgcacgacgtgctgaccggaagtgatgacgctcgccacagtaacacctctctggcgtggggagctggc

SEQ ID NO: 610221 - DNA, 75 bp, synthetic construct
  source 1..75: mol_type = other DNA
cccgaccgaatccgtggccattgatgtcgcttatgaaggttccggcagtggcgactggcgtactgacggtttcat

SEQ ID NO: 610222 - DNA, 75 bp, synthetic construct
  source 1..75: mol_type = other DNA
ttgtatataccggaaaacacagtcattccatgctctatggattaccgctttgtttccgatcgcgctggaagaata

SEQ ID NO: 610223 - DNA, 75 bp, synthetic construct
  source 1..75: mol_type = other DNA
ttacggacacactggggatggtgacgtcattcagctatgcaggagacaggaatcgccagattacccgttacagcg

SEQ ID NO: 610224 - DNA, 75 bp, synthetic construct
  source 1..75: mol_type = other DNA
cccgaccgaatccgtggccgttgatgtcgcttatgaaggctccggcagcggtgactggcgtaccaacagtttcat

SEQ ID NO: 610225 - DNA, 75 bp, synthetic construct
  source 1..75: mol_type = other DNA
gaaagagtactctccgctggcagtgaaaaaactggctgaagtcactggcttcccatgcgtaccggctgaagacct

SEQ ID NO: 610226 - DNA, 75 bp, synthetic construct
  source 1..75: mol_type = other DNA
gagcatcactccactctgagtgccgggtatcttcatacccattctgatatgtccggcagtgatgatttaaccgga

SEQ ID NO: 610227 - DNA, 75 bp, synthetic construct
  source 1..75: mol_type = other DNA
tgtctgcagtcgtctggctggccgctgcgggtgcgccagcgggtgcagcagagcatcactccactctgagtgccg

SEQ ID NO: 610228 - DNA, 75 bp, synthetic construct
  source 1..75: mol_type = other DNA
aacgtgaaataccgttatgagtttacggacacactggggctggtgacgtcattcagctatgcaggagacaagaat

SEQ ID NO: 610229 - DNA, 75 bp, synthetic construct
  source 1..75: mol_type = other DNA
cgtctcttatcatgaagccaaagcagaaactgcttcgccggaagtgatggcggattgcccgcgtcgtatcattct

SEQ ID NO: 610230 - DNA, 75 bp, synthetic construct
  source 1..75: mol_type = other DNA
cgcacgggtgatgtgaaacagccgaacgatccgggcgaaatcaccaatgaagtgacgccaattaaagtgggcggt

SEQ ID NO: 610231 - DNA, 75 bp, synthetic construct
  source 1..75: mol_type = other DNA
tgtccgcagccatttgtctgtccgtatccggcgcgcctgcatgggcgtctgagcagcaggccacgctgagcgcgg

SEQ ID NO: 610232 - DNA, 75 bp, synthetic construct
  source 1..75: mol_type = other DNA
ctctcttctggcccacgtgccggcctgaatgagatcaacctgccggaactgcaggcaggctcttctatcatgcca

SEQ ID NO: 610233 - DNA, 75 bp, synthetic construct
  source 1..75: mol_type = other DNA
tgcaactgaacgttatggaaccggtcattggtcaggcaatgtttgaatccgttcacattctgaccaatgcttgct

SEQ ID NO: 610234 - DNA, 75 bp, synthetic construct
  source 1..75: mol_type = other DNA
tcccatgcgtaccggctgaagacctgatcgaagcgacctctgactgcggcgcttatgttatggttcacggcgcgc

SEQ ID NO: 610235 - DNA, 75 bp, synthetic construct
  source 1..75: mol_type = other DNA
cgacgtgctgaccgggagggatgacgggcgccacagcaacacgtctctgggggggggggggggggggggggttta

SEQ ID NO: 610236 - DNA, 75 bp, synthetic construct
  source 1..75: mol_type = other DNA
atcgtgggtaaaatctgtgccgaaaccggtaagagtgtacgtgaagtcgttctggaacgcggtctgttgactgaa

SEQ ID NO: 610237 - DNA, 75 bp, synthetic construct
  source 1..75: mol_type = other DNA
agcggcagctatcggaaatcgcctgctgaaagatggccagacagtgattgtggttactgtggctgatgttatgag

SEQ ID NO: 610238 - DNA, 75 bp, synthetic construct
  source 1..75: mol_type = other DNA
gtgaagttgaacgtgaatatgccgtgcgtgtatttggacaggttgacgacgcaaagctgcgtgatttgagtcgtg

SEQ ID NO: 610239 - DNA, 75 bp, synthetic construct
  source 1..75: mol_type = other DNA
gtgaagttgaacgtgaatatgctgtacgcgtgtttggtcaggttgatgatgcgaaactgcgcgatttaagtcgtg

SEQ ID NO: 610240 - DNA, 75 bp, synthetic construct
  source 1..75: mol_type = other DNA
tcgcccagactaactatctgcgtgagctggtggaactgccgccagaaaccagttctaaagttgccgtagaaaaag

SEQ ID NO: 610241 - DNA, 75 bp, synthetic construct
  source 1..75: mol_type = other DNA
ttgctgatgccgtctctaaaggcaatgccgatttcgctatcgccacagaagcgctgcatctgtatgaagatttag

SEQ ID NO: 610242 - DNA, 75 bp, synthetic construct
  source 1..75: mol_type = other DNA
ttaccattgaagaactggcgcaatatccgttggtgacatataccttcggctttaccggacgttcagaactggata

SEQ ID NO: 610243 - DNA, 75 bp, synthetic construct
  source 1..75: mol_type = other DNA
aaagcctgtacaaaatgtgactgtattgttgaagcaccggcgccgtcccgcccgatagagcgtggtatcgcgggg

SEQ ID NO: 610244 - DNA, 75 bp, synthetic construct
  source 1..75: mol_type = other DNA
tcatgtatatcatcgtggcgattgtcatgttgctgcgtggttttgctgacgccattatgatgcgtagccaacagg

SEQ ID NO: 610245 - DNA, 75 bp, synthetic construct
  source 1..75: mol_type = other DNA
acccggaagtttacatcctgatcctgcctgttttcggtgtgttctccgaaattgcggcaaccttctcgcgtaaac

SEQ ID NO: 610246 - DNA, 75 bp, synthetic construct
  source 1..75: mol_type = other DNA
cagcctgaaaaacaggcgcaaccagcaacagccagcgccacccctatgcagcaggtgaaaaagaatattcaggcg

SEQ ID NO: 610247 - DNA, 75 bp, synthetic construct
  source 1..75: mol_type = other DNA
ctctgaccgaaggccgtaaccgtgaagttcgtcgtctgtgggaagcggttggtgtgcaggtgagccgcctgatcc

SEQ ID NO: 610248 - DNA, 75 bp, synthetic construct
  source 1..75: mol_type = other DNA
gtggttccgctgcagatcggcgcgcgtgacgttgcgttcccgttcctcaacaacttaagcttctggtttaccgtt

SEQ ID NO: 610249 - DNA, 75 bp, synthetic construct
  source 1..75: mol_type = other DNA
ctttatgccgctgtatgcgctgggctttatgggcatgacccgtcgtttgagccagcagattgacccgcagttcca

SEQ ID NO: 610250 - DNA, 75 bp, synthetic construct
  source 1..75: mol_type = other DNA
gtcgccgatcccgaccttgtgcgtgttgatgctcacgatatcttcagccacagtacaaccaaaattggttttcgc

SEQ ID NO: 610251 - DNA, 75 bp, synthetic construct
  source 1..75: mol_type = other DNA
gacagcgagcagttcgctcacgtgcgcgaagccgtcgagagcattgccacggaacaggccggccttctggatcgc

SEQ ID NO: 610252 - DNA, 75 bp, synthetic construct
  source 1..75: mol_type = other DNA
atttcaggccagatgttgcgtcaggccgcagagaactacgacccggaagtgtgggggtcacgggtgaacgtggag

SEQ ID NO: 610253 - DNA, 75 bp, synthetic construct
  source 1..75: mol_type = other DNA
aagacgcaactgaaaacccttgatgctgatccgcagcaacgttttattgccaccggtggcaataaccagattctg

SEQ ID NO: 610254 - DNA, 75 bp, synthetic construct
  source 1..75: mol_type = other DNA
agttcttcgacttttacatttacgccactgcggccgttattgtgtttccgcatatcttcttcccgcagggcgatc

SEQ ID NO: 610255 - DNA, 75 bp, synthetic construct
  source 1..75: mol_type = other DNA
ccgccgagaacttcaacccggatgtttacgctgcccgcgtgaacgttgagcactatctctcgccatgtccgtcaa

SEQ ID NO: 610256 - DNA, 75 bp, synthetic construct
  source 1..75: mol_type = other DNA
cctgacccgcgaactgactgaactgaaggcgcagctgaaaaccgaagatgcagacaaggaacagcgctttgcttc

SEQ ID NO: 610257 - DNA, 75 bp, synthetic construct
  source 1..75: mol_type = other DNA
taaaagacgagttcaaggaatactcccgtgtagccattcataatatagataaagttatatttaaagggcaaacac

SEQ ID NO: 610258 - DNA, 75 bp, synthetic construct
  source 1..75: mol_type = other DNA
gtggaattccgtcacggtaacatgacgctggaaaatccatcgccagagctgctcacagtgttgatccgtgaactg

SEQ ID NO: 610259 - DNA, 75 bp, synthetic construct
  source 1..75: mol_type = other DNA
cccgcatttaacgcgagacgtcgttgatgccgctgtggcactgcgttctaatgaagaaattgaggtcatgtttaa

SEQ ID NO: 610260 - DNA, 75 bp, synthetic construct
  source 1..75: mol_type = other DNA
ggaagaaattccgcgttgccgtctccggtgccaccgttgacgggcgcgaaattcgaccagatcacctccgtgatg

SEQ ID NO: 610261 - DNA, 75 bp, synthetic construct
  source 1..75: mol_type = other DNA
atgcgcctggctggacagccttacaccagaagcccgataagtttctatctgaagcccgccgccgtcaagaacgaa

SEQ ID NO: 610262 - DNA, 75 bp, synthetic construct
  source 1..75: mol_type = other DNA
agaaggtaatccgccgctgggcgagcaggggatgttctgtatcagcagcggacgaccgtttattgagaaactcaa

SEQ ID NO: 610263 - DNA, 75 bp, synthetic construct
  source 1..75: mol_type = other DNA
gcgaaactaaaaccaaatgggaatatatccggagtacagcaaccattcgcattggtggacaaactacagcaggat

SEQ ID NO: 610264 - DNA, 75 bp, synthetic construct
  source 1..75: mol_type = other DNA
atttcggtcgaggattacccactatggatgactcgtggctatccagaagtaaacgatgttgttttaaccacagaa

SEQ ID NO: 610265 - DNA, 75 bp, synthetic construct
  source 1..75: mol_type = other DNA
gcccgaccgaagtcggccccgtacgccccgccataattctgacgcgaaaaagacgtggcaatacagtacgcacaa

SEQ ID NO: 610266 - DNA, 75 bp, synthetic construct
  source 1..75: mol_type = other DNA
agactgattagccagcgccacgtgctcaccccggaatgcatgattgcgcgcctctcctttgttgaggaaagtgac

SEQ ID NO: 610267 - DNA, 75 bp, synthetic construct
  source 1..75: mol_type = other DNA
gaaactcaaacgtgccgctgccggagccagtgcgattatcgcctggggaacctgcgcgtcctggggctgcgtgca

SEQ ID NO: 610268 - DNA, 75 bp, synthetic construct
  source 1..75: mol_type = other DNA
gctttatggaccgtgtcagtcagaagcagctgacagaagcgcagtcaaaagcgctctctgaccggtttaacgacg

SEQ ID NO: 610269 - DNA, 75 bp, synthetic construct
  source 1..75: mol_type = other DNA
tattagctgtgattattttgttttattacagccaacttcgccatttaggaattataaacatataagggaagctgt

SEQ ID NO: 610270 - DNA, 75 bp, synthetic construct
  source 1..75: mol_type = other DNA
gattcgtcgagcggttaagcgtcacagtcaggtgagcggcggtcgtcgttctggtggacgtaataataacggtta

SEQ ID NO: 610271 - DNA, 75 bp, synthetic construct
  source 1..75: mol_type = other DNA
tagcttagaaaaactccgcgataccttacttcccaaactgatgagcggtgaagtacgggttcagtatgcagaaga

SEQ ID NO: 610272 - DNA, 75 bp, synthetic construct
  source 1..75: mol_type = other DNA
ttaaagatctggtaagtgatggtagccttgaaaaaccactagatggtaatcatggcggcatacacccaaagggtg

SEQ ID NO: 610273 - DNA, 75 bp, synthetic construct
  source 1..75: mol_type = other DNA
gcgctctctgaccggtttaacgacgcgctggagaagagtctggcggagtatcagcagcagcatcatgtggtcatt

SEQ ID NO: 610274 - DNA, 75 bp, synthetic construct
  source 1..75: mol_type = other DNA
atccgcgaaagagtagaacgacagaattcctgtttctcattctgtttatcgtgttgatgataccgatatccccgc

SEQ ID NO: 610275 - DNA, 75 bp, synthetic construct
  source 1..75: mol_type = other DNA
agtcggggttacgtatcccacaggatattgcggtgattggttatgacgatattgaactggcaagttttatgacgc

SEQ ID NO: 610276 - DNA, 75 bp, synthetic construct
  source 1..75: mol_type = other DNA
cgttatcaataaagatcgcttcgtcagcgaagcgattaccgccaaagttgaagcggcgattaaggaactcaatta

SEQ ID NO: 610277 - DNA, 75 bp, synthetic construct
  source 1..75: mol_type = other DNA
atatctgacctgaaacaacatggtcagatactgctggttgttgatcagccagctaccatcggtgcattacctgtc

SEQ ID NO: 610278 - DNA, 75 bp, synthetic construct
  source 1..75: mol_type = other DNA
cgagttcttgctcaccctctttacccggtcctgaccagtatgcccggagtcggtgtcaggaccgcagccagactc

SEQ ID NO: 610279 - DNA, 75 bp, synthetic construct
  source 1..75: mol_type = other DNA
aaatcgccgaactctccatgctctgcggcttcgatgatgatcttgccggggggggggggggcacagacaacgcag

SEQ ID NO: 610280 - DNA, 75 bp, synthetic construct
  source 1..75: mol_type = other DNA
acgaggtggcgcttgcggtagaacagcgagttcttgctcaccctctttacccggtcctgaccagtatgcccggag

SEQ ID NO: 610281 - DNA, 75 bp, synthetic construct
  source 1..75: mol_type = other DNA
gactttattgaatcccgcgaatatgaaaaaccgttgaatgtctacggttactcaaaattcctgtttgatgaatat

SEQ ID NO: 610282 - DNA, 75 bp, synthetic construct
  source 1..75: mol_type = other DNA
ttcgaaggtagcgagaacttcaaacgtgacttcgtctatgtgggcgatgtggcagatgtaaacctgtggttcctg

SEQ ID NO: 610283 - DNA, 75 bp, synthetic construct
  source 1..75: mol_type = other DNA
atgactacattattcagaaaagaatatccgcaaaaaagtagagcgacagaatttttgtttctcattctgtttatc

SEQ ID NO: 610284 - DNA, 75 bp, synthetic construct
  source 1..75: mol_type = other DNA
ttaatcagtacatgagtttatatgcgatggcagggatgggcgttgctaaagttaccgctgacctgaaaattaagg

SEQ ID NO: 610285 - DNA, 75 bp, synthetic construct
  source 1..75: mol_type = other DNA
gcgacttcgtctacgtgggcgacgtggcagatgtgaatctgtggttcctggaaaatggcgtttccggcatcttca

SEQ ID NO: 610286 - DNA, 75 bp, synthetic construct
  source 1..75: mol_type = other DNA
gactttattgaatcccgcgaatacgaaaaaccacttaacgtctacggttactcaaaattcctgtttgatgaatat

SEQ ID NO: 610287 - DNA, 75 bp, synthetic construct
  source 1..75: mol_type = other DNA
tacgaaaagcttccgaaagatgtgcgtgctgatttccagacgcgtatcgatgccactcgtcagatgtttgccgaa

SEQ ID NO: 610288 - DNA, 75 bp, synthetic construct
  source 1..75: mol_type = other DNA
ttaccggatcatgcgccagaatgcgctgttgcttgtgtcaacgccacgatgtttgaccgttatttgccattttca

SEQ ID NO: 610289 - DNA, 75 bp, synthetic construct
  source 1..75: mol_type = other DNA
tggctgggcggcatcagccagccgccaatccattacgaggccgctttcagccgcgcacagcagacggcggaacgc

SEQ ID NO: 610290 - DNA, 75 bp, synthetic construct
  source 1..75: mol_type = other DNA
gcggagtgtatttcgctcggttgggatagcagccgccagacgctggatgcgcaggtaatcagcggcgaaggggaa

SEQ ID NO: 610291 - DNA, 75 bp, synthetic construct
  source 1..75: mol_type = other DNA
atgatgaagggctttctgaaaccagaaagtcgattgccccgagatgaaaaagagattgcccggttcattctccgc

SEQ ID NO: 610292 - DNA, 75 bp, synthetic construct
  source 1..75: mol_type = other DNA
tgttattggtcacagagtcaaaattggaaaaaacttttctgtaaaacctggtgtaactatcggtcttcgtgggtc

SEQ ID NO: 610293 - DNA, 75 bp, synthetic construct
  source 1..75: mol_type = other DNA
cgggaaaaatagaacgtttcattcttgataaatacaatgtaaccgttcccttaactgtaaatattggtaaagggt

SEQ ID NO: 610294 - DNA, 75 bp, synthetic construct
  source 1..75: mol_type = other DNA
cgagtctggttactttgtgctgtcgatgatcaccttgttggtgatactcgtcctatttgggattgcatacgagac

SEQ ID NO: 610295 - DNA, 75 bp, synthetic construct
  source 1..75: mol_type = other DNA
gtgggattttataaaaaaatactttagcaatcatcacctcacgatgtgggggcctaataccacatacaattttgt

SEQ ID NO: 610296 - DNA, 75 bp, synthetic construct
  source 1..75: mol_type = other DNA
catctgtagaaaatgactatattcaaagattcaagaatattgttgagacgtgcggcgatctggataatgaaataa

SEQ ID NO: 610297 - DNA, 75 bp, synthetic construct
  source 1..75: mol_type = other DNA
acagcagtcggcagacactggatgcgcaggtaatcagtggcgaaggtgaagataatgtgctgacgttatcactgc

SEQ ID NO: 610298 - DNA, 75 bp, synthetic construct
  source 1..75: mol_type = other DNA
cgagtgtcatttggtgtagtcgcaggtaccgggtttattcttttaatagcccccattgttgcattactcctcaag

SEQ ID NO: 610299 - DNA, 75 bp, synthetic construct
  source 1..75: mol_type = other DNA
tcaattttccaatgaaaagctgaggataatcactaaagataatagcagtaatttgctaaacttaggcattagttc

SEQ ID NO: 610300 - DNA, 75 bp, synthetic construct
  source 1..75: mol_type = other DNA
ggggattatttcagcatcattgaaactaaacatggctctttcctgccggatcacaccgctaagaaacgcaaaaaa

SEQ ID NO: 610301 - DNA, 75 bp, synthetic construct
  source 1..75: mol_type = other DNA
ctgaaaatcccccaggatgttcgtgaaggcattgaacgcgatctcgaacagcaaaaacgtactttggcggagtaa

SEQ ID NO: 610302 - DNA, 75 bp, synthetic construct
  source 1..75: mol_type = other DNA
atggctaactggttaaatcaactgcaatccctgcttgggcaaagccgttcttctacctcctcgtctgcggatcag

SEQ ID NO: 610303 - DNA, 75 bp, synthetic construct
  source 1..75: mol_type = other DNA
atgatagttcattacacctgattactaacaaggttctggcgtgttatcaacgcgaagctaacaaggaaatagcgc

SEQ ID NO: 610304 - DNA, 75 bp, synthetic construct
  source 1..75: mol_type = other DNA
cgataatttatttattctgccggtagaagagtgcatttcgctcggttgggacagcagtcggcagacgctggatgc

SEQ ID NO: 610305 - DNA, 75 bp, synthetic construct
  source 1..75: mol_type = other DNA
ttgtattgaaggcacactttgcgaacatgtcgtactggctgtgcaggccttcgtcgaggccaaagcgcagcaagc

SEQ ID NO: 610306 - DNA, 75 bp, synthetic construct
  source 1..75: mol_type = other DNA
tttcatcttttttgttggagtttactacatattaaagataatagactttcaaaatacgacactaactatgttttt

SEQ ID NO: 610307 - DNA, 75 bp, synthetic construct
  source 1..75: mol_type = other DNA
aagtagtattgctggagggattatcattttttctttttgggaagttacaaggttaggcataatagggttgttatt

SEQ ID NO: 610308 - DNA, 75 bp, synthetic construct
  source 1..75: mol_type = other DNA
ttcgttttaataccgcgtggcagtggggagaacgtgaagaacaggcggtaaaacaattaggcaaacttattcaag

SEQ ID NO: 610309 - DNA, 75 bp, synthetic construct
  source 1..75: mol_type = other DNA
gagcaaaccttcatcgcgattataatgttgagattcctttaacagtgagtatagggccaggcttagatattgctc

SEQ ID NO: 610310 - DNA, 75 bp, synthetic construct
  source 1..75: mol_type = other DNA
gaaacgctgtcgctggtgggcgagtctggcagcggtaaatccactaccggacgggcgctgttgcgtctggtcgaa

SEQ ID NO: 610311 - DNA, 75 bp, synthetic construct
  source 1..75: mol_type = other DNA
ccagtctgggcacggaacgtctggcttttgcggcacaacaacgcatgcaactgatgacattcaactgtcagcagg

SEQ ID NO: 610312 - DNA, 75 bp, synthetic construct
  source 1..75: mol_type = other DNA
gctcggttctggcaacccgattctggtttttgccttcctgctgctggggttaagtctgatgggactgaccttcgg

SEQ ID NO: 610313 - DNA, 75 bp, synthetic construct
  source 1..75: mol_type = other DNA
ctgcacgcgttgcgtggttgctggagcgcgtgggcctgttacctgaacatgcctggcgttacccgcatgagtttt

SEQ ID NO: 610314 - DNA, 75 bp, synthetic construct
  source 1..75: mol_type = other DNA
ttgccacacagtgatgaacttgatgctggtaatgtgctggcggttgaaaatctgaatattgcctttatgcaggac

SEQ ID NO: 610315 - DNA, 75 bp, synthetic construct
  source 1..75: mol_type = other DNA
cgttgagattggcccacggcgcgcgatatttgaaaatccgcagcacccttatacgcgtaaattactggcggcagt

SEQ ID NO: 610316 - DNA, 75 bp, synthetic construct
  source 1..75: mol_type = other DNA
aaaataaccaggaatttacgccggtaaactcacgtaataaagttctggttgcctcactcatcggtacagccattg

SEQ ID NO: 610317 - DNA, 75 bp, synthetic construct
  source 1..75: mol_type = other DNA
ctgttaccagagctgttcccgacagaagtgcgttacaccggagcatcgttctcttacaacgtatcgtcgattctc

SEQ ID NO: 610318 - DNA, 75 bp, synthetic construct
  source 1..75: mol_type = other DNA
gtctgctggcagatgcttttggtcgccgtaaaagtatggtggtgatcactacgcttatcattctgtttgccctgt

SEQ ID NO: 610319 - DNA, 75 bp, synthetic construct
  source 1..75: mol_type = other DNA
ggctctgccgtttttggtcattttggcgatcgcgttgggcgtaaagcgacgctggtcgcctcgttgctaacgatg

SEQ ID NO: 610320 - DNA, 75 bp, synthetic construct
  source 1..75: mol_type = other DNA
acggaagtgcgttacaccggagcatcgttctcttacaacgtatcgtcgattctcggggcttccgttgcgccgtat

SEQ ID NO: 610321 - DNA, 75 bp, synthetic construct
  source 1..75: mol_type = other DNA
actgaaaacgccccaccgcgcaaacgtgcactgtatggctccttcccgcagctgggcgcaccgattggcttcttc

SEQ ID NO: 610322 - DNA, 75 bp, synthetic construct
  source 1..75: mol_type = other DNA
actcagggcggcgagattatgttcaacggtcagcgagttgataccctttcacctggcaagcttcagtcattacgc

SEQ ID NO: 610323 - DNA, 75 bp, synthetic construct
  source 1..75: mol_type = other DNA
aaagcatttaattgttgaaggccgggatgacgaatcgataacacagatatttggtgggcatgatgaaaagtttat

SEQ ID NO: 610324 - DNA, 75 bp, synthetic construct
  source 1..75: mol_type = other DNA
cggtgtgacggcagacgggcgcgaaataaacggcgacatgctgaaagctgccgccaccagttataacccgtccgt

SEQ ID NO: 610325 - DNA, 75 bp, synthetic construct
  source 1..75: mol_type = other DNA
atggcagaacaacgccaggaagaaggcacccagtggtttaaccgcgtaatggggattattggtcgtggccgcaaa

SEQ ID NO: 610326 - DNA, 75 bp, synthetic construct
  source 1..75: mol_type = other DNA
cagaaaacgatgaagcgatcagcttttgatgcactggatgttgcaggtaagcaaaacgcactgaaagacggtatc

SEQ ID NO: 610327 - DNA, 75 bp, synthetic construct
  source 1..75: mol_type = other DNA
atgaaactgaaaacggtcgagattaacggaaaacaatacgcagaaattgatactgctggcctgccagtttatgtg

SEQ ID NO: 610328 - DNA, 75 bp, synthetic construct
  source 1..75: mol_type = other DNA
tattgataaggaaggattagatacgattgccagtgaatttgaaatatctttaaatgacttaattcctggcttagt

SEQ ID NO: 610329 - DNA, 75 bp, synthetic construct
  source 1..75: mol_type = other DNA
ccactataaccgcgcaacaacagcagaccacacacagcgacgacaatgccacgaaggcgctgttccggcgactgc

SEQ ID NO: 610330 - DNA, 75 bp, synthetic construct
  source 1..75: mol_type = other DNA
ccacactgaccgcgcaacagcagcaggcgacacgcagcgacggcaatgccacgcaggcgttgttccggcgactgc

SEQ ID NO: 610331 - DNA, 75 bp, synthetic construct
  source 1..75: mol_type = other DNA
gtcctgcgtcgcccactggatgacgccacactgaccgcgcaacagcagcaggcgacacgcagcgacggcaatgcc

SEQ ID NO: 610332 - DNA, 75 bp, synthetic construct
  source 1..75: mol_type = other DNA
ggttgcggtcggcgatgtggtgtgctgctatgcacgctgtgtccagaaagggacgacatcggtcagcattaatat

SEQ ID NO: 610333 - DNA, 75 bp, synthetic construct
  source 1..75: mol_type = other DNA
aatggtgacatctttggtggttggttaatgtcacaaatggatattggcggcgctattctggcaaaagaaattgcc

SEQ ID NO: 610334 - DNA, 75 bp, synthetic construct
  source 1..75: mol_type = other DNA
acagtactgacaccggctgggtgattatgagtatcgggatggcgattggcgcggggattgtttttctcccggtgc

SEQ ID NO: 610335 - DNA, 75 bp, synthetic construct
  source 1..75: mol_type = other DNA
tggagattacgcctgtttatcttcaggatgaaaatgatcaacacgttctgaccggtgcggtggtgatgttgcgct

SEQ ID NO: 610336 - DNA, 75 bp, synthetic construct
  source 1..75: mol_type = other DNA
gcaaaaattcaacaaggcccgcgttgattattaccttaacggtaacgcaaaaatcaacgtcaacggtaaacctgg

SEQ ID NO: 610337 - DNA, 75 bp, synthetic construct
  source 1..75: mol_type = other DNA
acggtgcaatcgttggtagcgtcctggatgttatcaaacctttcgccccggtcggtgaaattactcagaccttcg

SEQ ID NO: 610338 - DNA, 75 bp, synthetic construct
  source 1..75: mol_type = other DNA
ggaagatgcggtcgagagtgaactgtttggtcatgctccggaagggaagaaagggttctttgagcaggcgaacgg

SEQ ID NO: 610339 - DNA, 75 bp, synthetic construct
  source 1..75: mol_type = other DNA
cagcgattcgtatgggccgtcagttgcaaaatgtcgccgcacaggacgtcagtgccttcagtcaaattgtcgccg

SEQ ID NO: 610340 - DNA, 75 bp, synthetic construct
  source 1..75: mol_type = other DNA
agcgcctttagtcaaattgtcgccgtcagcccgaaaatgaagcatgttgtcgaacaggcgcagaaactggcgatg

SEQ ID NO: 610341 - DNA, 75 bp, synthetic construct
  source 1..75: mol_type = other DNA
gaaaaaattcaacaaaaaacgcgttaacttctacctggaaggtaacgaaaacatcgcggttgatggtcataaagc

SEQ ID NO: 610342 - DNA, 75 bp, synthetic construct
  source 1..75: mol_type = other DNA
cgcagcgtcatcaccccgctgattggcatgaccactggcgtagttccgttaccgcgcatgatgccgaccgataac

SEQ ID NO: 610343 - DNA, 75 bp, synthetic construct
  source 1..75: mol_type = other DNA
tacaacttccgcattatgtctgctgaggggcttcagatcacctgtgatatgaaaggtcgttcgggtgtggtctac

SEQ ID NO: 610344 - DNA, 75 bp, synthetic construct
  source 1..75: mol_type = other DNA
atcatgtctgccgaaggtttacaaatcacctgcgacatgctgggccgttccggagtcgtttacggcaaaaattcc

SEQ ID NO: 610345 - DNA, 75 bp, synthetic construct
  source 1..75: mol_type = other DNA
acacagaaattgagcctgaaaaccgcgaaaatcgacctgactaccgccacctttgacgtgctgattaaattcttc

SEQ ID NO: 610346 - DNA, 75 bp, synthetic construct
  source 1..75: mol_type = other DNA
gttggtgaaatccgccagacctttgcactgaaaggcaacgaaatcattgcttatcagcgccgtcgtgacgttatc

SEQ ID NO: 610347 - DNA, 75 bp, synthetic construct
  source 1..75: mol_type = other DNA
taaatctttcggtaaagtgttaacaggccagatgaatacatcttctcctgcggtagaacgtgttgaggttaataa

SEQ ID NO: 610348 - DNA, 75 bp, synthetic construct
  source 1..75: mol_type = other DNA
cggcaatattgatgtgttacagcaggcctgcccacaagaggtgtggatcaaccccattgatgctcaggcacgcgg

SEQ ID NO: 610349 - DNA, 75 bp, synthetic construct
  source 1..75: mol_type = other DNA
acgtaacgcgcattataaagcctatattctgggcgaagggcctgacggcatagctaaaacgccggaatgggcagc

SEQ ID NO: 610350 - DNA, 75 bp, synthetic construct
  source 1..75: mol_type = other DNA
tccaagcatgatattgagccgcaaccccagcaagcattcggtgggtttgaactgtgcctgagtgatatttcgaac

SEQ ID NO: 610351 - DNA, 75 bp, synthetic construct
  source 1..75: mol_type = other DNA
acctgatgccaacagagcaagaagaccttatctctcatgaatctgccgggaatatgggctatgtgatcctcgccc

SEQ ID NO: 610352 - DNA, 75 bp, synthetic construct
  source 1..75: mol_type = other DNA
cccggcagaaaaaattatccagttggcacgagagatcggttcagcaaaaccggcttatatttgccagggctgggg

SEQ ID NO: 610353 - DNA, 75 bp, synthetic construct
  source 1..75: mol_type = other DNA
gttttgatggctgggacgatcccctgcggaaaacctatccactgcagttaacgggcttccactacaaagcgcgta

SEQ ID NO: 610354 - DNA, 75 bp, synthetic construct
  source 1..75: mol_type = other DNA
ccttctcgctggcggtttacccgtcatcacagccggtgtttatggatttagccaaaaaaggcgtggtagcagatt

SEQ ID NO: 610355 - DNA, 75 bp, synthetic construct
  source 1..75: mol_type = other DNA
tgtttctcgccagtaataacgaaataattgccgaagaacatttcaccggcgaaattaaaaaagaagaagcaaaaa

SEQ ID NO: 610356 - DNA, 75 bp, synthetic construct
  source 1..75: mol_type = other DNA
atgccagaacccggtcgcgctgacgcgatcattcatcgtgttttgaacatgtatcattatgaaggtgtgacagat

SEQ ID NO: 610357 - DNA, 75 bp, synthetic construct
  source 1..75: mol_type = other DNA
tgttcaaaaacggttacgtcaaaaacaaagtcatggagttcgttggaccgggcgttagcgcgctctctaccgatt

SEQ ID NO: 610358 - DNA, 75 bp, synthetic construct
  source 1..75: mol_type = other DNA
agtctgactgctgaagagcgcgagattatcaaggcgggtagtttgattaacttcaataaaaaccgtcagatgtaa

SEQ ID NO: 610359 - DNA, 75 bp, synthetic construct
  source 1..75: mol_type = other DNA
gacacctgggatatcgactatccgggagttgttgcggtgcatttgaccggaaaacctgcgccgtatgtggggcca

SEQ ID NO: 610360 - DNA, 75 bp, synthetic construct
  source 1..75: mol_type = other DNA
atgtactttactaaagaaaaccttgctaccaacgcccgtatgcagggccattggaaagaactgtgggcgcaacgc

SEQ ID NO: 610361 - DNA, 75 bp, synthetic construct
  source 1..75: mol_type = other DNA
ggcgtcggcatggtgttccagtcctatgcgctctatccccacctgtctgtggcagaaaatatgtcttttggcctg

SEQ ID NO: 610362 - DNA, 75 bp, synthetic construct
  source 1..75: mol_type = other DNA
gagtgatatcgctgacgtcatccttgagggtgaagttcaggtcgtcgagcaactcggcaacgaaacccaaatcca

SEQ ID NO: 610363 - DNA, 75 bp, synthetic construct
  source 1..75: mol_type = other DNA
gcgcagctcgcgatcgctggcttcaacaggcagaacaacgtgagctgggaaacaatgctcaatactggtggctgc

SEQ ID NO: 610364 - DNA, 75 bp, synthetic construct
  source 1..75: mol_type = other DNA
tgtggtcatattcatcaggaactcgatctcgactggaacgggcgccgcctgatggcaacgccgtcgacctgtgta

SEQ ID NO: 610365 - DNA, 75 bp, synthetic construct
  source 1..75: mol_type = other DNA
cagtttaagccgcactgttccaactttacgctggacaccatcgcgcccggctggcgtactctcgagttacatgct

SEQ ID NO: 610366 - DNA, 75 bp, synthetic construct
  source 1..75: mol_type = other DNA
cgatcaggtcgaagcgatgacgttggccgacaaaatcgtggtgctggacgccggtcgcgtggcgcaggttgggaa

SEQ ID NO: 610367 - DNA, 75 bp, synthetic construct
  source 1..75: mol_type = other DNA
tgtacaaattttgcgttcagcggaaaacctggtaccggaaaaaaccatctggcgtcggcaatcgggaatcgtctg

SEQ ID NO: 610368 - DNA, 75 bp, synthetic construct
  source 1..75: mol_type = other DNA
ggtgatggaccgtatgaccatgaacggtggtcgttgggtgaattttaactgggagagctggcgatcaaacgttgg

SEQ ID NO: 610369 - DNA, 75 bp, synthetic construct
  source 1..75: mol_type = other DNA
ccatgaaaacattgctcggcgagcggattatggatcgcatgaccatgaacggagggcgatgggtgaattttaact

SEQ ID NO: 610370 - DNA, 75 bp, synthetic construct
  source 1..75: mol_type = other DNA
gcaccgcaaatgttcatttgcgaattaccaggtgcagaacgacggccagcgatacgcgttaagccaggcgaaatc

SEQ ID NO: 610371 - DNA, 75 bp, synthetic construct
  source 1..75: mol_type = other DNA
gattatcgtcaccgtgtctgacgtcatgagcgtgttgcatgacagctacgacaacggcaaatccggggaaaaatt

SEQ ID NO: 610372 - DNA, 75 bp, synthetic construct
  source 1..75: mol_type = other DNA
cgccagttgcgggtggaaaaaattctgaatcgctcaggcatccagccgttgcaccgtaaatgctcgtttgtgaat

SEQ ID NO: 610373 - DNA, 75 bp, synthetic construct
  source 1..75: mol_type = other DNA
ggttcttgatgaaattggcattcagcgcgagacgaaaaacgagcaggtagtactgcaccagattattgatcgacg

SEQ ID NO: 610374 - DNA, 75 bp, synthetic construct
  source 1..75: mol_type = other DNA
gcaggattcgcataacgaacatgtggtgatcaacgggcagaatttcttgatggagataacgccggtctatcttca

SEQ ID NO: 610375 - DNA, 75 bp, synthetic construct
  source 1..75: mol_type = other DNA
tatccctgaaaccagcccgtcaggcagcgctgcaggccatcatgacggtggaagaggctcgccagcgcggcgcac

SEQ ID NO: 610376 - DNA, 75 bp, synthetic construct
  source 1..75: mol_type = other DNA
gtgctgtccgctgccgctgccggttgatgttcaggccgaactgttccccgaggtgcagcacagccggactgagcg

SEQ ID NO: 610377 - DNA, 75 bp, synthetic construct
  source 1..75: mol_type = other DNA
cgataccaacgtggaaggttctatcgtctacggcacaccgcgtaatttcagcattaccggcacgtatcaattctg

SEQ ID NO: 610378 - DNA, 75 bp, synthetic construct
  source 1..75: mol_type = other DNA
cgtgctttcagtcgatatgaaaagtaaagtggatatggcgaacccggcgagttgtcagctatttgggcaaaaact

SEQ ID NO: 610379 - DNA, 75 bp, synthetic construct
  source 1..75: mol_type = other DNA
gttcgctggatgagatcaccagtcgatttgaacgatcggtattaacccagctttatcgcaattaccccagcacgc

SEQ ID NO: 610380 - DNA, 75 bp, synthetic construct
  source 1..75: mol_type = other DNA
ttctggcaaatatgagctgcgagtgctgcaaacccgaaacgacgcccgtaaaaacaaaactaaaaaatataacgt

SEQ ID NO: 610381 - DNA, 75 bp, synthetic construct
  source 1..75: mol_type = other DNA
ggcaagtccggtgagaaatttttacaggaactttgcggggtagaccttctggtccttgatgaaattggcatgcag

SEQ ID NO: 610382 - DNA, 75 bp, synthetic construct
  source 1..75: mol_type = other DNA
tgtcctggatgaaattggtatgcagcgggatacgcgtaacgaacaggtcacactgaaccagatagtcgatcgcag

SEQ ID NO: 610383 - DNA, 75 bp, synthetic construct
  source 1..75: mol_type = other DNA
cactgaaccagatagtcgatcgcagaacggcctcgatgcacagcgtcgggatgctgacgaacctgaaccatacgg

SEQ ID NO: 610384 - DNA, 75 bp, synthetic construct
  source 1..75: mol_type = other DNA
tgaatcgctcaggcatccagccgttgcaccgtaaatgctcgtttgcgaattaccaggtgcagaacgacggccagc

SEQ ID NO: 610385 - DNA, 75 bp, synthetic construct
  source 1..75: mol_type = other DNA
cattgcggcagagctggaaggcggctgtacgaattttgtgttcagtggccggcctggcacaggaaaaaaccacct

SEQ ID NO: 610386 - DNA, 75 bp, synthetic construct
  source 1..75: mol_type = other DNA
ggcaacagcaaccagtcgttcagccatgcaacgtgttcatcgtgccaagtggaacagcaagagcgctcaggaaaa

SEQ ID NO: 610387 - DNA, 75 bp, synthetic construct
  source 1..75: mol_type = other DNA
tcagaaggccaaaaatctgcttttgttgcacctacgcctcatacacgcactacactgaaatccccatcttctaca

SEQ ID NO: 610388 - DNA, 75 bp, synthetic construct
  source 1..75: mol_type = other DNA
aaattgtgaaacgttcggaaggcatgtcttcctgtatgaaaactgcctaccatgcgcgttgcagaataacagatg

SEQ ID NO: 610389 - DNA, 75 bp, synthetic construct
  source 1..75: mol_type = other DNA
aaatcagatattaacaagactgttcgtttcccaaatcgttttgagcaagaacaaacggaggtcaacaaacacatg

SEQ ID NO: 610390 - DNA, 75 bp, synthetic construct
  source 1..75: mol_type = other DNA
tcaccgttgagcataaccacgctaccgcgccaatgacgcgcgctccggcaccggaatatgttccggaggcaccgc

SEQ ID NO: 610391 - DNA, 75 bp, synthetic construct
  source 1..75: mol_type = other DNA
gagtggtcagcgtcgtcgtcgctatcgtgacgagcgttatccaacccagtcgccaatgccgttgaccgtagcgtg

SEQ ID NO: 610392 - DNA, 75 bp, synthetic construct
  source 1..75: mol_type = other DNA
aggattttcagatcctcgacagcgaggaccagctacgcctgctcaaacgcctaatcaaggcgatgaacctcgacg

SEQ ID NO: 610393 - DNA, 75 bp, synthetic construct
  source 1..75: mol_type = other DNA
aacaacattcagtacgcgtggatccgcctgctggctggcgatactggcaaagtaatgattgttggcgatgacgac

SEQ ID NO: 610394 - DNA, 75 bp, synthetic construct
  source 1..75: mol_type = other DNA
cggtgagcatagccgtttgcaggtggcatttcagggccagggtattaaatggctggtggcggcttatgcccggct

SEQ ID NO: 610395 - DNA, 75 bp, synthetic construct
  source 1..75: mol_type = other DNA
taccttgctgccgctggctcgtcagaacgtattgaccatcgttctcttcaggcccagcatgaagaggcattagaa

SEQ ID NO: 610396 - DNA, 75 bp, synthetic construct
  source 1..75: mol_type = other DNA
ctcaccccgtctgtaccacttgagcagatgggaaaggatagctatccaaagttcaggccaccgggattacgaagt

SEQ ID NO: 610397 - DNA, 75 bp, synthetic construct
  source 1..75: mol_type = other DNA
gctaaagcaaacaaatcccaaattgatcttatcagtgaagaacatgataaacgtattgctgaaaactatgtcttt

SEQ ID NO: 610398 - DNA, 75 bp, synthetic construct
  source 1..75: mol_type = other DNA
aacgtatcgatcaccgttctctcagaactcaatgtgctgatgcccttgctcaggcagaagaagcattcagtgctg

SEQ ID NO: 610399 - DNA, 75 bp, synthetic construct
  source 1..75: mol_type = other DNA
aattgcttttagctattgataaaaatttcagtaaattaattagttacctcaacgcaatcccaccagatattactt

SEQ ID NO: 610400 - DNA, 75 bp, synthetic construct
  source 1..75: mol_type = other DNA
tcaaaaattttactcagattatagtgagctaagttatgatttgttagtagctgaacttcaagttgtaaaaaatga

SEQ ID NO: 610401 - DNA, 75 bp, synthetic construct
  source 1..75: mol_type = other DNA
tgatagtaggatatataagagagaaatttatatgggccagaaggaaacccgataccactgatgctgaccatgata

SEQ ID NO: 610402 - DNA, 75 bp, synthetic construct
  source 1..75: mol_type = other DNA
accgtcgtcgtatgaaggcgaatcagattcgtcgtgcggttaagcgtcacagtcaggtgagcggcggtcgtcgct

SEQ ID NO: 610403 - DNA, 75 bp, synthetic construct
  source 1..75: mol_type = other DNA
aatggagttatttgaagaaacagattatgcgagatttctagtatcggtatcggaatgttttgcaagtactgattt

SEQ ID NO: 610404 - DNA, 75 bp, synthetic construct
  source 1..75: mol_type = other DNA
ataataaccccaatgcacatatttattttcttgcaactccaccagttagagacagaatagatagatctaatagtt

SEQ ID NO: 610405 - DNA, 75 bp, synthetic construct
  source 1..75: mol_type = other DNA
tgatgaagtgctgggtgtcaatgttccacgctcagagtttgaaaaacgtaccaaatttaacgatagtaactataa

SEQ ID NO: 610406 - DNA, 75 bp, synthetic construct
  source 1..75: mol_type = other DNA
gtggaacgccagaacaacggtcaaacagcccgttattttgatgtcgctattcccgtagaactcaacaatgatgac

SEQ ID NO: 610407 - DNA, 75 bp, synthetic construct
  source 1..75: mol_type = other DNA
ggaatgataccgagtctcaggaacaacgagctgctgaacaagctcaacgcgatcatcaaattgaggaagcaaaga

SEQ ID NO: 610408 - DNA, 75 bp, synthetic construct
  source 1..75: mol_type = other DNA
gttctgacaccttccctttattctgacaaaataagtaagttcagcgtttacaaattacctaaacagactaataga

SEQ ID NO: 610409 - DNA, 75 bp, synthetic construct
  source 1..75: mol_type = other DNA
agaagctttacgataacacatcttgctgaacccgaagagattgttcttccagactcccctgcaacagtagaacag

SEQ ID NO: 610410 - DNA, 75 bp, synthetic construct
  source 1..75: mol_type = other DNA
agcgtatcgcagagaactatgtctatgatgaagtgttgggagtcaatgttccacgctcggagtttgaaaaacgcg

SEQ ID NO: 610411 - DNA, 75 bp, synthetic construct
  source 1..75: mol_type = other DNA
ttaaccgcatcaaaacctggcaggacaacggcggggcgcttgccgagtgcgccattctctaccgcagcaacgccc

SEQ ID NO: 610412 - DNA, 75 bp, synthetic construct
  source 1..75: mol_type = other DNA
agcgctgactgggttaaggagaatctgggatttgacccgcgcagcgtaggcagaaccattcgcgggtggtttggt

SEQ ID NO: 610413 - DNA, 75 bp, synthetic construct
  source 1..75: mol_type = other DNA
gacagagtaacggtgtagtgcatggctccaacgtccagcccgacatccccggcggcggcactcttgctgatcgca

SEQ ID NO: 610414 - DNA, 75 bp, synthetic construct
  source 1..75: mol_type = other DNA
cagtacctgggccccggcaggtgataacaacgatccgaaaaagtatgcacaggatgttgcgaaatggatgggagt

SEQ ID NO: 610415 - DNA, 75 bp, synthetic construct
  source 1..75: mol_type = other DNA
ttttcgacccggagaaggccgccaaggcagccgctaagtaccttagccagctgttgcggcagaacggcggagacc

SEQ ID NO: 610416 - DNA, 75 bp, synthetic construct
  source 1..75: mol_type = other DNA
gtggcctttacggctaagatcgcctccggtctggataatctctactgggcgtcacagcgcaccggcgcgacggtt

SEQ ID NO: 610417 - DNA, 75 bp, synthetic construct
  source 1..75: mol_type = other DNA
gttgtgaagggtgtgctcttcgcggcggatgtgatagctcagatggcgtggcgcgtctcgcaagcggtcggcggc

SEQ ID NO: 610418 - DNA, 75 bp, synthetic construct
  source 1..75: mol_type = other DNA
ccagcaggtcacgcgcccggtggcttcggttggtttgtatattcctggcggctccgccccgcttttctcaaccgt

SEQ ID NO: 610419 - DNA, 75 bp, synthetic construct
  source 1..75: mol_type = other DNA
gccacctgttccagcctcggcctggctgatttccagaagcgtatgaccgtgcaggagctgtcgaaagaaggtttc

SEQ ID NO: 610420 - DNA, 75 bp, synthetic construct
  source 1..75: mol_type = other DNA
atgttgcctttgttgaactatattgcaagtttaattattgggcaaccagaaccatataagttaaagtttctgtat

SEQ ID NO: 610421 - DNA, 75 bp, synthetic construct
  source 1..75: mol_type = other DNA
tgttgaaggagctgcgctgtccgtggtggtcttcacggctaagatcgcctctggtctggataatctttactgggc

SEQ ID NO: 610422 - DNA, 75 bp, synthetic construct
  source 1..75: mol_type = other DNA
gtcacagcgcaccggcgcgacggtccatggaattcagtctattggctatgcggtttcgcaggttggcggcagtgc

SEQ ID NO: 610423 - DNA, 75 bp, synthetic construct
  source 1..75: mol_type = other DNA
gctctggttaatgaaaccatcaaagagaaaaccggttctcagattacgaccaactatcagggtgtggccctgtcc

SEQ ID NO: 610424 - DNA, 75 bp, synthetic construct
  source 1..75: mol_type = other DNA
gagcctgaacagctcggccagtcagtcaagcggccacagccaactaaagcaggctctgaactgctgggatggatg

SEQ ID NO: 610425 - DNA, 75 bp, synthetic construct
  source 1..75: mol_type = other DNA
gaattaactgaaatactggaaaaaatatcttttcctgaaaaatccgggagcaatttgcttaaaccggaggcggtc

SEQ ID NO: 610426 - DNA, 75 bp, synthetic construct
  source 1..75: mol_type = other DNA
aaaaagtttcttccggcaggccagcaggcggctatcaccaccggtatacagggtatacatggtatacatggtata

SEQ ID NO: 610427 - DNA, 75 bp, synthetic construct
  source 1..75: mol_type = other DNA
gttgtccctgtgtgtgctggcaccggtattctgtacacccagaaagctggctgaagtttccagggagatcatcgt

SEQ ID NO: 610428 - DNA, 75 bp, synthetic construct
  source 1..75: mol_type = other DNA
gaagatttaatgccgctgcaggcattcctctcccatgcggcgctggaagcgggcgagggcaggcggatacctggc

SEQ ID NO: 610429 - DNA, 75 bp, synthetic construct
  source 1..75: mol_type = other DNA
gaagatttaatgccgttgcaggcgtttctctcccatgcggcgctggaagcgggcgaagggcaggcggatacctgg

SEQ ID NO: 610430 - DNA, 75 bp, synthetic construct
  source 1..75: mol_type = other DNA
tctctgctattttcttaattaaatcatacaaaaaatttattatattaggtcaggtttcagtatttgaggctgacg

SEQ ID NO: 610431 - DNA, 75 bp, synthetic construct
  source 1..75: mol_type = other DNA
aaatatcttttcctgaaaaatccgggagcagtccggttaaaccggaagcggtcagctgcaatttgttgtccctgt

SEQ ID NO: 610432 - DNA, 75 bp, synthetic construct
  source 1..75: mol_type = other DNA
gcgttctgttggtaccgaggtcgagcgccgccagcagtcggcaaacgctcaggttatgcgcggcaatcaaacgaa

SEQ ID NO: 610433 - DNA, 75 bp, synthetic construct
  source 1..75: mol_type = other DNA
ccctgaagtgggatttcagcaacttcagggaccagatgggcgagttcagcaaaatgctgaatatgatcgccgacc

SEQ ID NO: 610434 - DNA, 75 bp, synthetic construct
  source 1..75: mol_type = other DNA
cgggctaaccagtatgcgcagatgctggggattgacgaaaacaccctcatggcgatgcgccggggtgtgggcggt

SEQ ID NO: 610435 - DNA, 75 bp, synthetic construct
  source 1..75: mol_type = other DNA
agcctctcccgatttgtgcgtaacaatcccggcgcggaaggcttcctgaatcgcctgggcgtacagacccgtgac

SEQ ID NO: 610436 - DNA, 75 bp, synthetic construct
  source 1..75: mol_type = other DNA
aaggtcataaaggggagcctctggctgggtgagatagtcgggcggctgttcttcagactgattgaggggacatca

SEQ ID NO: 610437 - DNA, 75 bp, synthetic construct
  source 1..75: mol_type = other DNA
cgacaaacctttcgctatgtggtgctgccgctggcaatcccgggtattgccgctggctctatctttaccttctca

SEQ ID NO: 610438 - DNA, 75 bp, synthetic construct
  source 1..75: mol_type = other DNA
tttatgagcatggtgaaactacttatctgattacatttgaccattacagcatttgtgcgcgttattgtggcgaaa

SEQ ID NO: 610439 - DNA, 75 bp, synthetic construct
  source 1..75: mol_type = other DNA
attccggtactggatttgcctcgtgatgaactggaatctttcgccagtgcagtcaccggacgtttccgtaacccg

SEQ ID NO: 610440 - DNA, 75 bp, synthetic construct
  source 1..75: mol_type = other DNA
catcccgtgtgagttgattgactataatggcgacgcgttgcgtgaactggtgctgcgctatgcgcaagagtgggc

SEQ ID NO: 610441 - DNA, 75 bp, synthetic construct
  source 1..75: mol_type = other DNA
ttaataagcgaattaattataagttatattgttttattgcgattgcattattagcaggtgtattttcttttaaag

SEQ ID NO: 610442 - DNA, 75 bp, synthetic construct
  source 1..75: mol_type = other DNA
tatttaaacgtcgaccgtgttgcattatcagcttcccacgctacaacagcaggctacatcatcctttttccttct

SEQ ID NO: 610443 - DNA, 75 bp, synthetic construct
  source 1..75: mol_type = other DNA
gggcgcgctgctgttattcctcgcttgccctgaaagcagttcagttatcgctgcggcatattccggcatcactgc

SEQ ID NO: 610444 - DNA, 75 bp, synthetic construct
  source 1..75: mol_type = other DNA
gaaggcacattacagaaatggaggtctgttctaccgttcctcaagagatggctatggttttgaggaagactgggc

SEQ ID NO: 610445 - DNA, 75 bp, synthetic construct
  source 1..75: mol_type = other DNA
gagcacaacaagcggtagtggccagactcgtaatgcagggaagacatcatcagatggtgctcatacccactcgct

SEQ ID NO: 610446 - DNA, 75 bp, synthetic construct
  source 1..75: mol_type = other DNA
cagctatattctggttaacttctataccggagtcggaagttgccggaccttgcagatgaaggcgcattacagaaa

SEQ ID NO: 610447 - DNA, 75 bp, synthetic construct
  source 1..75: mol_type = other DNA
agaagcaagagattgggtatcaagaggctggctgctatgatatggcgtcttgttttttaagcgaggaaagatttt

SEQ ID NO: 610448 - DNA, 75 bp, synthetic construct
  source 1..75: mol_type = other DNA
aaaacgcgtgaaattgcggatggttgcgaaatgtctgtttacctggcgctttattatctccgggagctgaaccgg

SEQ ID NO: 610449 - DNA, 75 bp, synthetic construct
  source 1..75: mol_type = other DNA
gtcacaggcgcatcagcagtcagccagtggtcacaaaatgggtcagtacataaggtagtgtctgcggccagtgtg

SEQ ID NO: 610450 - DNA, 75 bp, synthetic construct
  source 1..75: mol_type = other DNA
aagaatcataactacaaatgcatatattaaagagagggataaactatcaggcattatacacaacatcgaaaattc

SEQ ID NO: 610451 - DNA, 75 bp, synthetic construct
  source 1..75: mol_type = other DNA
aagttttcatctttaaatttggattttttaattaatgacgagagagtttttaatcttgaaggcttaataaaaaaa

SEQ ID NO: 610452 - DNA, 75 bp, synthetic construct
  source 1..75: mol_type = other DNA
ggaggatttgttatatcaatattaaataatgctacgagtgaagcggcgaacattaatgtattccgaaaaaacatg

SEQ ID NO: 610453 - DNA, 75 bp, synthetic construct
  source 1..75: mol_type = other DNA
attcaggaagtaaaactatagatattcacattcttgataaaaatagtgattatgatacttttgacttccgtaata

SEQ ID NO: 610454 - DNA, 75 bp, synthetic construct
  source 1..75: mol_type = other DNA
gtcaggtagcattgtctgataaggccaatgacaaacttggaaagtttcaagtgaaactaaaagaaaaaaatatca

SEQ ID NO: 610455 - DNA, 75 bp, synthetic construct
  source 1..75: mol_type = other DNA
ggaggatttgttatatcaatattaaataatgctacaagtgaagcggcaaatattaatgtgctccgaaaaaacatg

SEQ ID NO: 610456 - DNA, 75 bp, synthetic construct
  source 1..75: mol_type = other DNA
ctattgataataaattgtcagacaatagaataaatataaccccaatggggataaagatacaggaaacagtcagtg

SEQ ID NO: 610457 - DNA, 75 bp, synthetic construct
  source 1..75: mol_type = other DNA
caggaacattaaaggtttttcatctaaataaatcaggcgacttattgttaaccacttcaaaaactcatgggggcg

SEQ ID NO: 610458 - DNA, 75 bp, synthetic construct
  source 1..75: mol_type = other DNA
ggaggaagcaatacatattttgttcctgctacactacaggataatttgcatatatatatatcagaaaaatcaaat

SEQ ID NO: 610459 - DNA, 75 bp, synthetic construct
  source 1..75: mol_type = other DNA
ttgaagatttaaaactaagaaggattatatcagaatctattctgtctctgataaaaggggaaaagtactcaatta

SEQ ID NO: 610460 - DNA, 75 bp, synthetic construct
  source 1..75: mol_type = other DNA
gatgtgatgtgattttagaaagtgacactatacaaaaaataaaatcatttgcaaaaaatataacaatacagacag

SEQ ID NO: 610461 - DNA, 75 bp, synthetic construct
  source 1..75: mol_type = other DNA
tctcgggaataaaatattgtatccatcagaagaacttgtaaagtttataagaacctcaaaggaatatttaagcaa

SEQ ID NO: 610462 - DNA, 75 bp, synthetic construct
  source 1..75: mol_type = other DNA
gtaatatttatttagatatgagagaaaatcctccaatattacacggtgagaaatcatataatagcggaaagaata

SEQ ID NO: 610463 - DNA, 75 bp, synthetic construct
  source 1..75: mol_type = other DNA
gaagtcacggaatggcatacggtagttatcttcggcaagctggccgagattgcaggcgaatacctccgcaaaggt

SEQ ID NO: 610464 - DNA, 75 bp, synthetic construct
  source 1..75: mol_type = other DNA
actaattagtgcaggtacagcagcgggtaaaacagaggctttctttctgcctgcctgttcggcggttgcagatct

SEQ ID NO: 610465 - DNA, 75 bp, synthetic construct
  source 1..75: mol_type = other DNA
gttctgggcgacgcgattccccgtcagtactcagaatgctaattacagaaaatgagcttactgtgagtagcagta

SEQ ID NO: 610466 - DNA, 75 bp, synthetic construct
  source 1..75: mol_type = other DNA
cagaactgctacgtgatcccgtggatgggggataaaattgtcaatacaattacgtccctgcttatacgttgtggc

SEQ ID NO: 610467 - DNA, 75 bp, synthetic construct
  source 1..75: mol_type = other DNA
cttctggggggacaccgttgtcgaatgtgtgcttaacaaactctgtccgtctcatacctacgtaatttttaaata

SEQ ID NO: 610468 - DNA, 75 bp, synthetic construct
  source 1..75: mol_type = other DNA
cgcttgaagcccgactgcagaaagggaatttgcccacaaccgctgtttgtacaatgacgctggagctgggtattg

SEQ ID NO: 610469 - DNA, 75 bp, synthetic construct
  source 1..75: mol_type = other DNA
accgcatagcaataggtagcaagaaagtagattatgccgatactgccgccagaaacctatttgcggaaggctgta

SEQ ID NO: 610470 - DNA, 75 bp, synthetic construct
  source 1..75: mol_type = other DNA
tacatcagtctgaaaggaaggagttattacaacaaaaaagcatcaatcatttaaaaagaagtgataccatcgatg

SEQ ID NO: 610471 - DNA, 75 bp, synthetic construct
  source 1..75: mol_type = other DNA
tgatgttaaacttttaataaggctagatcgtgaattatatgcaataagcagcaaaatagagaatccgttagcctt

SEQ ID NO: 610472 - DNA, 75 bp, synthetic construct
  source 1..75: mol_type = other DNA
tatgaaggatgggttccttggtaaacctgtatgggcaacgctagataccatgtggagtacaactcagcttttggc

SEQ ID NO: 610473 - DNA, 75 bp, synthetic construct
  source 1..75: mol_type = other DNA
ggttctcagcttccttgttgcagcacagaacacgctttcggctatcacaggccagggggcagaacttgcggcaat

SEQ ID NO: 610474 - DNA, 75 bp, synthetic construct
  source 1..75: mol_type = other DNA
gtcgatcacctgctgggaagaatcaacaatccagtcccccgagtcgcactcagcgcaacgctgggggaactggaa

SEQ ID NO: 610475 - DNA, 75 bp, synthetic construct
  source 1..75: mol_type = other DNA
gtcacgccctggcatggtgatgttgcgcagagcaaaaagctgaaagcaaagaagaatcctgccggtattttgctt

SEQ ID NO: 610476 - DNA, 75 bp, synthetic construct
  source 1..75: mol_type = other DNA
atggacgtgacaaacgatgattacatccgcctgttatcggcactgttgccgcccggtccggcgtggtcagctagc

SEQ ID NO: 610477 - DNA, 75 bp, synthetic construct
  source 1..75: mol_type = other DNA
cctgccgtgtatatcttgacgataatcaggggcgacacctgctaacaatcgaagatccgctggaaggacagatac

SEQ ID NO: 610478 - DNA, 75 bp, synthetic construct
  source 1..75: mol_type = other DNA
caggttcaggtaaatcaacaacgttacgcagtgcctgccgtgtatatcttgacgataatcaggggcgacacctgc

SEQ ID NO: 610479 - DNA, 75 bp, synthetic construct
  source 1..75: mol_type = other DNA
cctgccggatgaatgtattccggcgggaacgcagacccttcgccagcgtcagcaacggctggatgcgaaggttaa

SEQ ID NO: 610480 - DNA, 75 bp, synthetic construct
  source 1..75: mol_type = other DNA
cggaagtactgcagcaggcggtgaatgatgcggtcgcgaatattccggtaccggcggacggtaaaagtatcaccc

SEQ ID NO: 610481 - DNA, 75 bp, synthetic construct
  source 1..75: mol_type = other DNA
gacctgacgcaagtgcctggtctggtcgagcaggtggctaatgacctggatgcgattctcgaaaaagggatgcgc

SEQ ID NO: 610482 - DNA, 75 bp, synthetic construct
  source 1..75: mol_type = other DNA
taccggttatccgcgcgatgaagtggctaaactggaagaagaactgggttatcacgatggtttcctcgacaccgc

SEQ ID NO: 610483 - DNA, 75 bp, synthetic construct
  source 1..75: mol_type = other DNA
aatcttcgcctccggcctgctggcgggcgcagacggtggtattggcagtacttacaacattatgggatggcgtta

SEQ ID NO: 610484 - DNA, 75 bp, synthetic construct
  source 1..75: mol_type = other DNA
cagatcaacaccctggttacgctgccaggcgtaggggcgttgaaacagacctctggcgatctctatcagatggaa

SEQ ID NO: 610485 - DNA, 75 bp, synthetic construct
  source 1..75: mol_type = other DNA
cctgccggatgaatgtattcccgcagggacacagacccttcgccagcgtcagcaacgactggatgcgaaggttaa

SEQ ID NO: 610486 - DNA, 75 bp, synthetic construct
  source 1..75: mol_type = other DNA
cagatcaacacactggttacgctgccaggtgtcggtgccctgaaacagacttctggcgatctctatcaaatggaa

SEQ ID NO: 610487 - DNA, 75 bp, synthetic construct
  source 1..75: mol_type = other DNA
gtgaacaggtactggaaatcgtcgctgaagaggcgaaaggtaagattaaactcatcgcccacgtcggttgcgtca

SEQ ID NO: 610488 - DNA, 75 bp, synthetic construct
  source 1..75: mol_type = other DNA
gaaggcgatatccagaccgcgcagaaactgcaaactgagtgcaacaaagtcattgatttactgatcaaaacgggc

SEQ ID NO: 610489 - DNA, 75 bp, synthetic construct
  source 1..75: mol_type = other DNA
cggtgctgacctacgcgaagctggatctgtgggcgaagtttcaggatttccaagtgcgcatccgtgacgccatcg

SEQ ID NO: 610490 - DNA, 75 bp, synthetic construct
  source 1..75: mol_type = other DNA
catgatcggctttaacggcttgaagcgtgcgaaaacctccaaccgtagtgaaaacccgctgctgcaggatgtgaa

SEQ ID NO: 610491 - DNA, 75 bp, synthetic construct
  source 1..75: mol_type = other DNA
catggggggcttgcaggccgtgcgtgcgccattcttcccgccgaatgcgctgctgatcacccgtctggataacct

SEQ ID NO: 610492 - DNA, 75 bp, synthetic construct
  source 1..75: mol_type = other DNA
tgatatcggcagcggcggctttaccacctcgctggagctggaagttaagatcgatgaatggacggctgaggcggg

SEQ ID NO: 610493 - DNA, 75 bp, synthetic construct
  source 1..75: mol_type = other DNA
agcggacacgctggatctgactctggatgatgcagacgggcaggtagccttaccatcacgcggcgcaaagatatc

SEQ ID NO: 610494 - DNA, 75 bp, synthetic construct
  source 1..75: mol_type = other DNA
ggcactgggtaaagacctgtcggataagcccgtggaacatatagaccagaccaatgagagtgacggcagttttct

SEQ ID NO: 610495 - DNA, 75 bp, synthetic construct
  source 1..75: mol_type = other DNA
ttaacgcttacctgcagcagctggcgcatctgaacggtgtggcagttgaagaactgtccagcaagttcaccgtag

SEQ ID NO: 610496 - DNA, 75 bp, synthetic construct
  source 1..75: mol_type = other DNA
agaccagatccagcagtccgccgctttcctgacgttgattaacatcacaccggtcactgagcagtccggtcagtt

SEQ ID NO: 610497 - DNA, 75 bp, synthetic construct
  source 1..75: mol_type = other DNA
taccgctgcgcagcactggtggaaaacatccagattggcgatttcagcgccgccgcagcagaaaccggagcgtaa

SEQ ID NO: 610498 - DNA, 75 bp, synthetic construct
  source 1..75: mol_type = other DNA
caggagaacagtgaaaaaatggctgccgatatgatcatcagtcagaaacgcatggggggcttgcaggccgtgcgt

SEQ ID NO: 610499 - DNA, 75 bp, synthetic construct
  source 1..75: mol_type = other DNA
tgctgatcacccgtctggataacctgtccatttactggcaggaagacacccgccgccgttcagttatcgacaacc

SEQ ID NO: 610500 - DNA, 75 bp, synthetic construct
  source 1..75: mol_type = other DNA
agaccagatccagcaatccgccgcattcctgacgctgattaatgtcacgccagtgactgagcagtctggtcagtt

SEQ ID NO: 610501 - DNA, 75 bp, synthetic construct
  source 1..75: mol_type = other DNA
ctgctactgctactgctactgctactgctactgctactgctactgctactgttcttcttttttctgctgctctga

SEQ ID NO: 610502 - DNA, 75 bp, synthetic construct
  source 1..75: mol_type = other DNA
gtggcggttacatgatgccggatggcgaccgttttcacatggtgaacggtgcaaactggtttgaccgtaccgtga

SEQ ID NO: 610503 - DNA, 75 bp, synthetic construct
  source 1..75: mol_type = other DNA
atggatgcccgaatatgagggcggcttctggcattttattcgcctgccggaggggggcggctacatgatgccgga

SEQ ID NO: 610504 - DNA, 75 bp, synthetic construct
  source 1..75: mol_type = other DNA
tggtcggcacggtggcgctgttttacaccggctacctgctttatctcggtattccgagcttcctgaatatcaaca

SEQ ID NO: 610505 - DNA, 75 bp, synthetic construct
  source 1..75: mol_type = other DNA
cagttgtggctgtaccacgacagcggtgatgcgggactgacacacctgtaccggatgcgtgatgcgcagtcgtgg

SEQ ID NO: 610506 - DNA, 75 bp, synthetic construct
  source 1..75: mol_type = other DNA
cggatacgtgatgcgcagttgtggagccacatcgaatttcaccccgaatgcaacgcgatttacgcggcactggac

SEQ ID NO: 610507 - DNA, 75 bp, synthetic construct
  source 1..75: mol_type = other DNA
tgaatgttgaagagtgcgaccgtctgtcttttctgccttacctgtttggcaacgattttctgtatgccgaagcat

SEQ ID NO: 610508 - DNA, 75 bp, synthetic construct
  source 1..75: mol_type = other DNA
gatgccggaatatcagggaggcttctggcacttcatccgcctgccggacggtggcggttacatgatgccggacgg

SEQ ID NO: 610509 - DNA, 75 bp, synthetic construct
  source 1..75: mol_type = other DNA
gctactgctactgctactgctactgctactgctactgctactgctactgctactgctactgctactgctactgct

SEQ ID NO: 610510 - DNA, 75 bp, synthetic construct
  source 1..75: mol_type = other DNA
aggaggagatggctggtcgccggtgaagggagaaggcgggaagggggggtcgaggcccggtcaggaggagcaggt

SEQ ID NO: 610511 - DNA, 75 bp, synthetic construct
  source 1..75: mol_type = other DNA
cccatcccgatcgtgaaatgcaggtgattaatcgcgaaaacgaaacgatttctcaccattacacccaccacgttt

SEQ ID NO: 610512 - DNA, 75 bp, synthetic construct
  source 1..75: mol_type = other DNA
gggaacggtatggaaattgagccgtggctgaaggcggctgtgcgcaaagaatttgtcgatgataaccgggtgaag

SEQ ID NO: 610513 - DNA, 75 bp, synthetic construct
  source 1..75: mol_type = other DNA
ggatgcgtgatgcgcggtcgtggagccacatcgaatttcatcccgaatgtaacgcgatttacgcggcactggact

SEQ ID NO: 610514 - DNA, 75 bp, synthetic construct
  source 1..75: mol_type = other DNA
aaagcggtaatctgttattcatcatgcccggcggtggcgtgaacgcgcagggccagccgttgccatcgtttgcca

SEQ ID NO: 610515 - DNA, 75 bp, synthetic construct
  source 1..75: mol_type = other DNA
taggattatcatactcgccttcagatgtatttctctttaaaaacaatataataactggggctattgaaactatta

SEQ ID NO: 610516 - DNA, 75 bp, synthetic construct
  source 1..75: mol_type = other DNA
atgagtcattgaaatttaaattcagagttgtaaataatggacttgatgcaagtaaaaaagataattatgacaatc

SEQ ID NO: 610517 - DNA, 75 bp, synthetic construct
  source 1..75: mol_type = other DNA
gaagccagtaaaaagcacgactatgacaatcatgaaactgaaataataaaaaaagctcacgaaaaagaaggaggc

SEQ ID NO: 610518 - DNA, 75 bp, synthetic construct
  source 1..75: mol_type = other DNA
catgatcggctttaacggcgtgaagcgagcgaaaacctccaaccgcagcgaaaacccgctgctgcaggatgtgaa

SEQ ID NO: 610519 - DNA, 75 bp, synthetic construct
  source 1..75: mol_type = other DNA
caggaaaacagtgaaaaactcgctgccgatatgatcatcagtcagaaacgcatgggtggcctgcaggcggtgcgt

SEQ ID NO: 610520 - DNA, 75 bp, synthetic construct
  source 1..75: mol_type = other DNA
gttaacctgtacgaaggagaaaagtggcattactttcagctcgccgggtccgaggctgaacgtgcagataaagca

SEQ ID NO: 610521 - DNA, 75 bp, synthetic construct
  source 1..75: mol_type = other DNA
atataagaaattagggattttttctgaagacttttatacagaaagcgaggcttatcctctgcggttaaatgatag

SEQ ID NO: 610522 - DNA, 75 bp, synthetic construct
  source 1..75: mol_type = other DNA
tggtatgcttggtgagggatttgaccataagcctttaggtgtggcagctattttcagaccttttgcttctttgaa

SEQ ID NO: 610523 - DNA, 75 bp, synthetic construct
  source 1..75: mol_type = other DNA
gaatttgttaagccagcatttgaacgtctgggcttgaaagtcggcttggttagcactgatgagaaaaataatgaa

SEQ ID NO: 610524 - DNA, 75 bp, synthetic construct
  source 1..75: mol_type = other DNA
agaagtcgctgatgagaatattggtattagaattggcatagatatcggtgaaagtgattatgtgttgtgggggaa

SEQ ID NO: 610525 - DNA, 75 bp, synthetic construct
  source 1..75: mol_type = other DNA
tcgactctgctgggatggaaaatttagaaccagtgtgggaagatgcaaatgacatttctttggaaagttttaata

SEQ ID NO: 610526 - DNA, 75 bp, synthetic construct
  source 1..75: mol_type = other DNA
gtaggtggtgaatcttcttttgtcgatatacaagacagaaacccaattgaagttacaattaaagaaattggtgat

SEQ ID NO: 610527 - DNA, 75 bp, synthetic construct
  source 1..75: mol_type = other DNA
aaaggtggcgaatatgccaacctggacgccgtggtgatggatgccgtcaatgagcttatcgatgtggtctaccag

SEQ ID NO: 610528 - DNA, 75 bp, synthetic construct
  source 1..75: mol_type = other DNA
gaagcgcagattttcgggatgaatttaatgttaaacgtgaggcgtcctggcatgatgtgaccgttgaacgtgtgg

SEQ ID NO: 610529 - DNA, 75 bp, synthetic construct
  source 1..75: mol_type = other DNA
ttacacgcagcagcggcgatcgccatcagttccgcattgctgaccgcgaggcgtatacgggtgtacgcgcctact

SEQ ID NO: 610530 - DNA, 75 bp, synthetic construct
  source 1..75: mol_type = other DNA
tacattaaaacacattgttgctatttgtcttgtaactaagtggccacaggcaatcttataccaaagtggttttct

SEQ ID NO: 610531 - DNA, 75 bp, synthetic construct
  source 1..75: mol_type = other DNA
acactgcgatcactatcgggcaattattgattcggcggatggtttgccgatggtggtgtacaacattccagccct

SEQ ID NO: 610532 - DNA, 75 bp, synthetic construct
  source 1..75: mol_type = other DNA
gggcttctgtttcttcatgcctgtcatttgtctgttactgatgttgttgttcctgctactgctactgttcttctt

SEQ ID NO: 610533 - DNA, 75 bp, synthetic construct
  source 1..75: mol_type = other DNA
gtggacgtgcagaactctaccccgaaatgcatggcacggtaacaggatttaaaagcgagattgataatcaggact

SEQ ID NO: 610534 - DNA, 75 bp, synthetic construct
  source 1..75: mol_type = other DNA
caggaaaacagtgaaaaactggcagccgatatgataatcagtcagaaacgcatgggaggcctgcaggccgtgcgt

SEQ ID NO: 610535 - DNA, 75 bp, synthetic construct
  source 1..75: mol_type = other DNA
taccgctgcgctgcactggtggaaaacatccagattggcgatttcagcgccgctgcagcagaagccggagcgtaa

SEQ ID NO: 610536 - DNA, 75 bp, synthetic construct
  source 1..75: mol_type = other DNA
ctgttactgatgatgttgttgttcctgctactgctactgctactgctactgttcttcttttttctactgctctga

SEQ ID NO: 610537 - DNA, 75 bp, synthetic construct
  source 1..75: mol_type = other DNA
ttcagacttctggctggaccggaaagcatgctggcactgttggaacaacagaaagtcaaggataaccgaatcgct

SEQ ID NO: 610538 - DNA, 75 bp, synthetic construct
  source 1..75: mol_type = other DNA
tgccgctttgctgcatagccggacggcgcaacaaacaaataattttgcagtatcgcttccggacataagcgaata

SEQ ID NO: 610539 - DNA, 75 bp, synthetic construct
  source 1..75: mol_type = other DNA
caggaaaacagtgaaaaactggccgccgatatgattatcagtcagaaacgcatgggtggcctgcaggccgtgcgt

SEQ ID NO: 610540 - DNA, 75 bp, synthetic construct
  source 1..75: mol_type = other DNA
atgtcgattcctttgctcaagcctggtttgccgagcgcaaacaacgcgacccatttgactgggcagaaaaaaatc

SEQ ID NO: 610541 - DNA, 75 bp, synthetic construct
  source 1..75: mol_type = other DNA
gctgggtggtggagcagttgtcagagctgacctgcgaaaaggcgacctttatcctggcgacaccggcagagacgg

SEQ ID NO: 610542 - DNA, 75 bp, synthetic construct
  source 1..75: mol_type = other DNA
gcggaggacctgcagagcctggtggggccacggtggtccgccgccgggtgtatgcccgttttctggatgcggtga

SEQ ID NO: 610543 - DNA, 75 bp, synthetic construct
  source 1..75: mol_type = other DNA
tttatttagtagttctctcaacttttcgttctgctctctgaacttttcctgtatttctttttgcatggcgataac

SEQ ID NO: 610544 - DNA, 75 bp, synthetic construct
  source 1..75: mol_type = other DNA
ccatttgactgggcagaaaaaaatctccaggaagtcgaacgcaataaacgagaaaaacatacgagcctgtttaag

SEQ ID NO: 610545 - DNA, 75 bp, synthetic construct
  source 1..75: mol_type = other DNA
ttgaaataccgccgatttattgtacgtatctcgaatggctacaaaagcaagaagccagccatctccagcgttatg

SEQ ID NO: 610546 - DNA, 75 bp, synthetic construct
  source 1..75: mol_type = other DNA
ggagcgtgtagcgcgctttgatccgcgcacggggcttacgcgactgattactcaacgcgttagtcaggcatcaat

SEQ ID NO: 610547 - DNA, 75 bp, synthetic construct
  source 1..75: mol_type = other DNA
agtggtgctggcgaccaatattgctgaaaccagtttaaccatcgaaggtattcgtctggtggtggattgtgccca

SEQ ID NO: 610548 - DNA, 75 bp, synthetic construct
  source 1..75: mol_type = other DNA
ttgatggaaaacggtgtaattaatccgcgtattcatcccaacgtcgcctcacgtaaaattcgtaacggtgttggg

SEQ ID NO: 610549 - DNA, 75 bp, synthetic construct
  source 1..75: mol_type = other DNA
actaatggcgaagcgtggggaacatttcatgcgctgctggctgatgttgacagcctggggcaagtgcagatggtg

SEQ ID NO: 610550 - DNA, 75 bp, synthetic construct
  source 1..75: mol_type = other DNA
gagcaggagctgagtgaccgctgggtggtggagcagatgtcagagctgacggccatgacggcctcgtttgtgctg

SEQ ID NO: 610551 - DNA, 75 bp, synthetic construct
  source 1..75: mol_type = other DNA
gcgaatacctgtatgtggacttaccgttctgatgagtgtggttacacgggcagggcagtggctgacgagttcgac

SEQ ID NO: 610552 - DNA, 75 bp, synthetic construct
  source 1..75: mol_type = other DNA
ttcccgtccgaccctgacggtttctaacctgcacggtatggtcaccgggatggcggaagagctgcagagtctggt

SEQ ID NO: 610553 - DNA, 75 bp, synthetic construct
  source 1..75: mol_type = other DNA
ttgatatttactgagaggtcagatcaactttccagggcaacagatcgcgtacccggtttgccggccaatcctgga

SEQ ID NO: 610554 - DNA, 75 bp, synthetic construct
  source 1..75: mol_type = other DNA
tggcaggggcgacagtatcagccgtatcccattcaggggacgggatttgaactgaacggcaagggcagtgctgcc

SEQ ID NO: 610555 - DNA, 75 bp, synthetic construct
  source 1..75: mol_type = other DNA
ccgggatggcggaagacctgcagagtctggtgggggccacggtggtccgccgccgggtgtatgcccgttttctgg

SEQ ID NO: 610556 - DNA, 75 bp, synthetic construct
  source 1..75: mol_type = other DNA
aggttcagatggcgatgaacggcggtatttatggtgaaaactatgcgccgctcggtttgtacatcgaaaacggtc

SEQ ID NO: 610557 - DNA, 75 bp, synthetic construct
  source 1..75: mol_type = other DNA
gggatgcagcgatccggcgcagatgagctggctggatcaaccgccagcggtgaatctacaggcggcgaaacgtct

SEQ ID NO: 610558 - DNA, 75 bp, synthetic construct
  source 1..75: mol_type = other DNA
gctgacagccatgacggcctcgtttgtgctggctacaccgaccgagacggacggggcgctgtttcccggtcggat

SEQ ID NO: 610559 - DNA, 75 bp, synthetic construct
  source 1..75: mol_type = other DNA
gctgacagccatgacggcctcgtttgtgctggcaacaccgaccgagacggacggggcgctgtttcccggtcgtat

SEQ ID NO: 610560 - DNA, 75 bp, synthetic construct
  source 1..75: mol_type = other DNA
tggcaggggcggcaatatcaggtatacccgattgacggcagtggctttgagatgaacgggaagggcagcagtgcc

SEQ ID NO: 610561 - DNA, 75 bp, synthetic construct
  source 1..75: mol_type = other DNA
cgaaaggcggtgcaggtaaaactacatcttcagttaacctgattggtgaaatgaaaacagatgctgtggatcttg

SEQ ID NO: 610562 - DNA, 75 bp, synthetic construct
  source 1..75: mol_type = other DNA
gctgacagccatgacggcctcgtttgtgctggcgacaccgaccgagacggatggggcgctgtttcccggtcgaat

SEQ ID NO: 610563 - DNA, 75 bp, synthetic construct
  source 1..75: mol_type = other DNA
gctgacagccatgacggcctcgtttgtgctggctacaccgaccgagacggagggggcgctgtttcccggtcgcat

SEQ ID NO: 610564 - DNA, 75 bp, synthetic construct
  source 1..75: mol_type = other DNA
tgttcggtctggtcaccgggatggcggaagacctgcagagtctggtgggggccacggtggtccgccgccgggtgt

SEQ ID NO: 610565 - DNA, 75 bp, synthetic construct
  source 1..75: mol_type = other DNA
gtcaccgcgggtggtgctctgggaaattgacctgacggtgcagggcggtgagcggtattttttctgcaacgagct

SEQ ID NO: 610566 - DNA, 75 bp, synthetic construct
  source 1..75: mol_type = other DNA
gggatgtcggctttgatatatgtgttagtggcgtaatgggtttcctgctttttgtggccattactaatggaatga

SEQ ID NO: 610567 - DNA, 75 bp, synthetic construct
  source 1..75: mol_type = other DNA
atgaacggaggtatttatgatgaaggttatgcgcctctcggtttgtacatcgaaaacggtcaacagaaggtagcg

SEQ ID NO: 610568 - DNA, 75 bp, synthetic construct
  source 1..75: mol_type = other DNA
ggcgaacacctgtatgtggacctaccgctctgatgagtgtggttacacgggcggggctgtggcggatgagttcga

SEQ ID NO: 610569 - DNA, 75 bp, synthetic construct
  source 1..75: mol_type = other DNA
tgcagagcctggtgggtgccacggtggtccgccgccgggtgtatgcccgttttctggatgcggtgaattttgtgg

SEQ ID NO: 610570 - DNA, 75 bp, synthetic construct
  source 1..75: mol_type = other DNA
tcccggcaccgcaagggatgcgcaaagtggtgctggcgaccaatattgctgaaaccagtttaactatcgaaggta

SEQ ID NO: 610571 - DNA, 75 bp, synthetic construct
  source 1..75: mol_type = other DNA
cctggcgtcggttgcagattggtcagctcacagtaaaagtacagccgctggcgaaaccgtcggaagatgaattac

SEQ ID NO: 610572 - DNA, 75 bp, synthetic construct
  source 1..75: mol_type = other DNA
gcgctaccggtcgatattgatgagttagtgcaacgctgctcacagctattacagcaatctgacaccgttgaatgg

SEQ ID NO: 610573 - DNA, 75 bp, synthetic construct
  source 1..75: mol_type = other DNA
gacgcaacgtgccgggcgtgccgggcgtctggagccgggcatttgtttacatctgatagccaaagaacaggcaga

SEQ ID NO: 610574 - DNA, 75 bp, synthetic construct
  source 1..75: mol_type = other DNA
cgacgctggaagcgtggttgttgccacatatgagcggtgtacattcactgcgtggcctgaaatcactcgatattt

SEQ ID NO: 610575 - DNA, 75 bp, synthetic construct
  source 1..75: mol_type = other DNA
gctcacagtaaaagtacagccgctggcgaaaccgtcggaagatgaattacatcatgcaatgctcaacggtattcg

SEQ ID NO: 610576 - DNA, 75 bp, synthetic construct
  source 1..75: mol_type = other DNA
acgcgccgcggcgcaaagtgaaccggagatcttacaaagcgatctttccggtttgctgatggaattactgcaatg

SEQ ID NO: 610577 - DNA, 75 bp, synthetic construct
  source 1..75: mol_type = other DNA
tttcttgatgcggtgaactttgtggcggggaatccggaggcagacccggagcaggagctgacggaccggtgggtg

SEQ ID NO: 610578 - DNA, 75 bp, synthetic construct
  source 1..75: mol_type = other DNA
atgcccgttttctggatgcggtgaattttgtggcaggcaatccggaagcggacccggagcaggagctgagagacc

SEQ ID NO: 610579 - DNA, 75 bp, synthetic construct
  source 1..75: mol_type = other DNA
ggcgaacgacttagcgcgaaagggcaaaaaatggcgacgctgggtaatgatccacggttagccgctatgctggtg

SEQ ID NO: 610580 - DNA, 75 bp, synthetic construct
  source 1..75: mol_type = other DNA
acatatgactggcgtacattcactacgcggcctgaaatcactcgacatttatcaggcacttgtattatccctcca

SEQ ID NO: 610581 - DNA, 75 bp, synthetic construct
  source 1..75: mol_type = other DNA
gctgccagaagcgcccgtcgtcatctcagaagggcgctcgtttccggttgaacgccgttatttaccgctgcccgc

SEQ ID NO: 610582 - DNA, 75 bp, synthetic construct
  source 1..75: mol_type = other DNA
gtgaccaaacaggaaaaaaccgctctgaacatggcgcgcttcatcagaagccagacattaacgctgctggagaag

SEQ ID NO: 610583 - DNA, 75 bp, synthetic construct
  source 1..75: mol_type = other DNA
tgtactggcaaaaagccaatggcaaagcgtggggaactttacatgctctgctggcggatatgaatagtcagggtc

SEQ ID NO: 610584 - DNA, 75 bp, synthetic construct
  source 1..75: mol_type = other DNA
gctctataaagcctttgcagctgcgctgaaatatcttggtgttgatctgccggcaaagtttaccgacttcggtgg

SEQ ID NO: 610585 - DNA, 75 bp, synthetic construct
  source 1..75: mol_type = other DNA
gcaaatgagatgacaccggatgttccccgtatcccctcgcctgaaatcctggctgccggatattcaggccgtggt

SEQ ID NO: 610586 - DNA, 75 bp, synthetic construct
  source 1..75: mol_type = other DNA
aagggcagcagtgcctgcccgtcgctgacggtgtcgaatctgttgggtctggtcaccggaatggcggaggacctg

SEQ ID NO: 610587 - DNA, 75 bp, synthetic construct
  source 1..75: mol_type = other DNA
aagggcagcagtgcctgcccgtcgctgacggtgtcgaatctgttaggtctggtcaccgggatggcggaggacctg

SEQ ID NO: 610588 - DNA, 75 bp, synthetic construct
  source 1..75: mol_type = other DNA
aagggcagcagtgcctgaccgtcgctgacggtgtcgaatctgttcggtctggtcaccggcatggcggaggacctg

SEQ ID NO: 610589 - DNA, 75 bp, synthetic construct
  source 1..75: mol_type = other DNA
tgcttcaaagagactgccgggctgggggcgctgggcgatctggcggcgcatatcgtcaatatggcgcagtacctg

SEQ ID NO: 610590 - DNA, 75 bp, synthetic construct
  source 1..75: mol_type = other DNA
tcaaatccagtgtaaccggaatgggcgacagcatcagtggctggttcagcgaaaagctgggcattcattcgccga

SEQ ID NO: 610591 - DNA, 75 bp, synthetic construct
  source 1..75: mol_type = other DNA
catcagcagcgtataccgtcacgccaatgaccgcggtcatggtttgtttaatcctgcggctgatattaagccttc

SEQ ID NO: 610592 - DNA, 75 bp, synthetic construct
  source 1..75: mol_type = other DNA
gaccgtacgctacagcctgaagagatcggtgtattcttccgcgctctggatcacgtcgggactatggccacgatg

SEQ ID NO: 610593 - DNA, 75 bp, synthetic construct
  source 1..75: mol_type = other DNA
gatccgtggtgctgaaaccttcgcggtacataccgacagctatatgaagcacgtcattctggctgacagtacccg

SEQ ID NO: 610594 - DNA, 75 bp, synthetic construct
  source 1..75: mol_type = other DNA
ccggtgttagagcacttaaacaaacctccggagatttatatcagatggagcagattcgtcggtctcatccagact

SEQ ID NO: 610595 - DNA, 75 bp, synthetic construct
  source 1..75: mol_type = other DNA
cttcacggcgactattaccccaatcctgccgaagaggttttaccggcttcaattgcgacattcgaagcgcgcgac

SEQ ID NO: 610596 - DNA, 75 bp, synthetic construct
  source 1..75: mol_type = other DNA
aaaagaagaaaagacactccacgattttaccgtcagctacatgaaacacacccggctggcggacagcacaagggc

SEQ ID NO: 610597 - DNA, 75 bp, synthetic construct
  source 1..75: mol_type = other DNA
atctgcaacccgcactggcacaactggaaaaggccagagccgcccaccttgagaacgcccgcctgatggatgaga

SEQ ID NO: 610598 - DNA, 75 bp, synthetic construct
  source 1..75: mol_type = other DNA
gacgtatcgcctggctcagaaagaaggggagttgttgcctaagtttggtccccatgacttacggcgtacagccag

SEQ ID NO: 610599 - DNA, 75 bp, synthetic construct
  source 1..75: mol_type = other DNA
acataccgacagttatatgaaacacgtcatcctggctgacagtacccgcgcaatgaagcaggcggtgatcgaccg

SEQ ID NO: 610600 - DNA, 75 bp, synthetic construct
  source 1..75: mol_type = other DNA
ctactttaaaccgggttttgacactgacgtatcgtctggctcagaaagaaggggagttgttgcctaagtttggtc

SEQ ID NO: 610601 - DNA, 75 bp, synthetic construct
  source 1..75: mol_type = other DNA
gagaaggcgcgggacaaagcccgcgttaaggacgctgaaaactttggtgcttggggcgaaaaatggctacgcggc

SEQ ID NO: 610602 - DNA, 75 bp, synthetic construct
  source 1..75: mol_type = other DNA
cgagcttaagccgaagttcggcaaccagaagctgacagaaatcacccatgaggatttacgggcgctgactgatgc

SEQ ID NO: 610603 - DNA, 75 bp, synthetic construct
  source 1..75: mol_type = other DNA
gatgcagcaagtgcatgcgcgggtgtgagatgcgcggcatggtggctaattttggcggtttcctttccattaaca

SEQ ID NO: 610604 - DNA, 75 bp, synthetic construct
  source 1..75: mol_type = other DNA
gatgagttcgataaacccaccacggatatccgtaaggacagatgcagcaagtgcatgcgcgggtgtgagatgcgc

SEQ ID NO: 610605 - DNA, 75 bp, synthetic construct
  source 1..75: mol_type = other DNA
cggaaggacagatgcagtaaatgcatgcgcgggtgtgagatgcgcggcatggtggctaattttggcggtttcctt

SEQ ID NO: 610606 - DNA, 75 bp, synthetic construct
  source 1..75: mol_type = other DNA
gatgcagcaagtgcatgcgcgggtgtgaactgcgcaggaatgtcggcaattttggcggtttcctttccattaata

SEQ ID NO: 610607 - DNA, 75 bp, synthetic construct
  source 1..75: mol_type = other DNA
tttcgttgcgggcaatccggaggcagacccggagcaggagctgagtgaccgctgggtggtggagcagatgtcgca

SEQ ID NO: 610608 - DNA, 75 bp, synthetic construct
  source 1..75: mol_type = other DNA
gcatacccgattgacggcagtggctttgagatgaacgggaagggcagcagtgccagaccgtcgctgacggtgtcg

SEQ ID NO: 610609 - DNA, 75 bp, synthetic construct
  source 1..75: mol_type = other DNA
catgctggctaacgcctgcacctggatctatcgcggtgatgagtgcggttataatggcccagctgtcgctgatga

SEQ ID NO: 610610 - DNA, 75 bp, synthetic construct
  source 1..75: mol_type = other DNA
gtcaccgcgggtggtactctgggaaatcgacctgacggtgcagggcggtgagcggtattttttctgcaatgagct

SEQ ID NO: 610611 - DNA, 75 bp, synthetic construct
  source 1..75: mol_type = other DNA
aggccaacactgaaagtatctaacctgcacggcatggtcaccgggatggtggaggatttacagagtctggtcggc

SEQ ID NO: 610612 - DNA, 75 bp, synthetic construct
  source 1..75: mol_type = other DNA
atgcaggacatacaacaggaaacactgaatgaatgcatccgtgcggagcagtcggcctgcctggtgctctgggaa

SEQ ID NO: 610613 - DNA, 75 bp, synthetic construct
  source 1..75: mol_type = other DNA
tgctgacagccatgacggcctcgtttgtgctggccacaccgaccgagacggacggggcgctgtttcccggtcgta

SEQ ID NO: 610614 - DNA, 75 bp, synthetic construct
  source 1..75: mol_type = other DNA
atgcaggatattccacaggaaacacatcatgagacgacacgcctcactcagtcagcccagatggtgctctgggaa

SEQ ID NO: 610615 - DNA, 75 bp, synthetic construct
  source 1..75: mol_type = other DNA
tgaacgagtcggttaaatcagagcagtcaccgcgggtggtactctgggaaatcgacctgatggtacagggcggtg

SEQ ID NO: 610616 - DNA, 75 bp, synthetic construct
  source 1..75: mol_type = other DNA
tggtgccgtttttccggggcgcatcatgctggctaatacctgcacctggacctatcgcggtgatgagtgcggtta

SEQ ID NO: 610617 - DNA, 75 bp, synthetic construct
  source 1..75: mol_type = other DNA
ataaatgcagcaaatgcctgagcggctgtaagtttcgcaataacatcggtaactttggcggctacctttccatta

SEQ ID NO: 610618 - DNA, 75 bp, synthetic construct
  source 1..75: mol_type = other DNA
tgggggccacggtggtccgccgccgggtgtatgcccgttttctggatgcggtgaatttagttgcgggcaatccgg

SEQ ID NO: 610619 - DNA, 75 bp, synthetic construct
  source 1..75: mol_type = other DNA
cctatcgcggtgatgagtgcggttatcacggtccggcggtcgcggatgaatatgatcagccgacgtccgatatca

SEQ ID NO: 610620 - DNA, 75 bp, synthetic construct
  source 1..75: mol_type = other DNA
agtgctgatgccgcaggtgtcattctgacttctcttgtgattaaccgccagttgtggctgtaccacgacagcggg

SEQ ID NO: 610621 - DNA, 75 bp, synthetic construct
  source 1..75: mol_type = other DNA
ttaattaacagtcaattccagtacataggtagcacggctgagggtatgcagttacggctgggatatacggcccgt

SEQ ID NO: 610622 - DNA, 75 bp, synthetic construct
  source 1..75: mol_type = other DNA
aatgacgccagttgatacgggttttttgattaacagcatgtaccagactgtcgagaaaaacggcaacggcctttg

SEQ ID NO: 610623 - DNA, 75 bp, synthetic construct
  source 1..75: mol_type = other DNA
caggtaaattaaaaggacagccgcgcgaacatttcggcaagactagcgaaggggttgaattcggcggcggtactg

SEQ ID NO: 610624 - DNA, 75 bp, synthetic construct
  source 1..75: mol_type = other DNA
tttctccgctgcactggccgcagttgtcttcagcttcgccttcccttctactctgcatttatccagcagtgcggg

SEQ ID NO: 610625 - DNA, 75 bp, synthetic construct
  source 1..75: mol_type = other DNA
cgcggagccggaatttttgcgcaaggcattcgaagatccaaacaacgctgacgatatttataaagagattgtaga

SEQ ID NO: 610626 - DNA, 75 bp, synthetic construct
  source 1..75: mol_type = other DNA
cgaacatttcggcaaaacaagagaaggcgtcgaatttggcggcggtactggtaagggtgattactgggatccaaa

SEQ ID NO: 610627 - DNA, 75 bp, synthetic construct
  source 1..75: mol_type = other DNA
gtttgctgcaattcttggtaaagactatgaggtgttctgggggacacatcgattagggacctctgaattttggtg

SEQ ID NO: 610628 - DNA, 75 bp, synthetic construct
  source 1..75: mol_type = other DNA
cgagcagagcgatctgttccgcctcacttatgcgtttgaatcggccaaagaagcggggtttgcttatcagttgct

SEQ ID NO: 610629 - DNA, 75 bp, synthetic construct
  source 1..75: mol_type = other DNA
ctgggtacagggtctgtggcaaccgaagaaaatacgatctctgtaggttcctctactaatcaacgtcgtatcacc

SEQ ID NO: 610630 - DNA, 75 bp, synthetic construct
  source 1..75: mol_type = other DNA
ctggcgatgagaaatgctgaaaagcatcttctgaaaaaagcatggaaaaagaacgcggctgaaaaactgtctgag

SEQ ID NO: 610631 - DNA, 75 bp, synthetic construct
  source 1..75: mol_type = other DNA
attacttaatgcaaccatatctatggtatgtctttgctgtgctatatcaatataccagtcatttcttgttgtagc

SEQ ID NO: 610632 - DNA, 75 bp, synthetic construct
  source 1..75: mol_type = other DNA
gaacgctgctgaaaaactggctgaagtggactttaaaggggttaagcaggcattagccaaaatgcattacactgt

SEQ ID NO: 610633 - DNA, 75 bp, synthetic construct
  source 1..75: mol_type = other DNA
ctgatcccgctggcctgtaatatgttcggtatcccaaacgacatcgccatgcaggtggtcgccgtcggctttatt

SEQ ID NO: 610634 - DNA, 75 bp, synthetic construct
  source 1..75: mol_type = other DNA
tttgaaaaacgagcccgcgaccgcaacttcgaggccatgcaaaaggagatgtacgggcagtttgaaaacaccttc

SEQ ID NO: 610635 - DNA, 75 bp, synthetic construct
  source 1..75: mol_type = other DNA
ggccgttatcgttgggaaaactttattcgtgcaagaacaagttggtccagagcaaatagaccaaataactggtat

SEQ ID NO: 610636 - DNA, 75 bp, synthetic construct
  source 1..75: mol_type = other DNA
tggacggtaaactcgttgaaacagaagagttagttattcacttcgaatataaggcaatgaaaaagggcactaagc

SEQ ID NO: 610637 - DNA, 75 bp, synthetic construct
  source 1..75: mol_type = other DNA
ctgctttttcgtcaccctgttttgcatcagagaaaaattccagccggtcagcaaaaaagagatgctgcacatgcg

SEQ ID NO: 610638 - DNA, 75 bp, synthetic construct
  source 1..75: mol_type = other DNA
tcaccctgttttgcatcagagaaaaattccagccggtcagcaaaaaagagatgctgcacatgcgggaagtggtga

SEQ ID NO: 610639 - DNA, 75 bp, synthetic construct
  source 1..75: mol_type = other DNA
cagcggtagcgccatcatcaccaactacttctcttccggcgtcgcggtgtttgcctttctgggcacgtccgtaat

SEQ ID NO: 610640 - DNA, 75 bp, synthetic construct
  source 1..75: mol_type = other DNA
atactacttgttttacaaagaacatgatttctattaataagaaaaatgagaatgtattagaaatactcgaatatg

SEQ ID NO: 610641 - DNA, 75 bp, synthetic construct
  source 1..75: mol_type = other DNA
ctgatgaaattaacgactatctggataataagctgaaggccaaaatccagtctgcgctggcggatgccggaaacg

SEQ ID NO: 610642 - DNA, 75 bp, synthetic construct
  source 1..75: mol_type = other DNA
gtcctcatagcgctcacaacggtaaaactccgatggaacgctactttgaacttgctgagaaaacaccatactctg

SEQ ID NO: 610643 - DNA, 75 bp, synthetic construct
  source 1..75: mol_type = other DNA
atagcccaaaagtacaggagcttaaaaagcaactggcggctatggcatccggagcaaatgagcatgaaaatgcag

SEQ ID NO: 610644 - DNA, 75 bp, synthetic construct
  source 1..75: mol_type = other DNA
aaaatgaatcaccggctaagcagctgccaagcggttccactggctggatcgaactgccaactggtcagcgctgga

SEQ ID NO: 610645 - DNA, 75 bp, synthetic construct
  source 1..75: mol_type = other DNA
aatgcagctacttgtacaactattgatgagtatgaagttgctaatttggaattattgctaaaagaaacgtttaca

SEQ ID NO: 610646 - DNA, 75 bp, synthetic construct
  source 1..75: mol_type = other DNA
cgtgggtcagttgaaagtaacggatgcgcaggtttcccagaatacccagagcattactaacctggataatcgggt

SEQ ID NO: 610647 - DNA, 75 bp, synthetic construct
  source 1..75: mol_type = other DNA
tattgctatcggttctaacgcacgcgcaaatcatgccgacagcattgcaatgggtaatggttctcagactacccg

SEQ ID NO: 610648 - DNA, 75 bp, synthetic construct
  source 1..75: mol_type = other DNA
tgattggttatgacaccacggatggcgaactgcttggcgcgttgtcgattggtgatgacggtaaatatcgtcaaa

SEQ ID NO: 610649 - DNA, 75 bp, synthetic construct
  source 1..75: mol_type = other DNA
catcactggacgcgagattccgtaggcatattttaaatcgcacattgagatgcataaccatattaaaagaaactc

SEQ ID NO: 610650 - DNA, 75 bp, synthetic construct
  source 1..75: mol_type = other DNA
ggtgacgattccctgctgtggaacgctacggcgggtgcattcagtgccaaacacggcaccaacggtactgacagc

SEQ ID NO: 610651 - DNA, 75 bp, synthetic construct
  source 1..75: mol_type = other DNA
gggtatcgctctgggtagcagttccgtttccagccgtgtaatagttaaagggactcgtaacaccagcgtatcgga

SEQ ID NO: 610652 - DNA, 75 bp, synthetic construct
  source 1..75: mol_type = other DNA
tgaagacggtcaacgtcagatcaccaacgtcgcagcggggtcggcggataccgatgcggtcaacgtgggtcaatt

SEQ ID NO: 610653 - DNA, 75 bp, synthetic construct
  source 1..75: mol_type = other DNA
cccccatgcaatagctgacgccgtagaaaatttaaaggaagaaggcgaaagcactgggcaatttatcgtttcggc

SEQ ID NO: 610654 - DNA, 75 bp, synthetic construct
  source 1..75: mol_type = other DNA
atggcgacaaaagcagtaaacgcgaaatcacaaaccgttgcggcaagagttccgcatgaagtaatgaacaatgtt

SEQ ID NO: 610655 - DNA, 75 bp, synthetic construct
  source 1..75: mol_type = other DNA
cccgcgccggaaattgaccccgtgctgaaagccttcgggcgacacatagcccggagttttcaccgggggcgtggt

SEQ ID NO: 610656 - DNA, 75 bp, synthetic construct
  source 1..75: mol_type = other DNA
gaaagatgagagtttatctgttattgatggtaatcaacggttgacttcaattaaactatttattgaggatggttt

SEQ ID NO: 610657 - DNA, 75 bp, synthetic construct
  source 1..75: mol_type = other DNA
caatccgcaaccgtcgcatattcttgatcgccgtttgctggcgctgtgtaaagcaggtcaaattaattatacaac

SEQ ID NO: 610658 - DNA, 75 bp, synthetic construct
  source 1..75: mol_type = other DNA
gtacagggcagtttgtaacagcagcattaaagcgagaagttgagtaccgccagcgccgcaaggccaaagaatcag

SEQ ID NO: 610659 - DNA, 75 bp, synthetic construct
  source 1..75: mol_type = other DNA
tgcgggtgtattaaccgggccaacctacactattggtggtactgattacaataacgtcggtgatgctctggctgc

SEQ ID NO: 610660 - DNA, 75 bp, synthetic construct
  source 1..75: mol_type = other DNA
cgaaaaccatcgttaatggtaatgcgggtattggtatcggcctgaacacgctggttctggctgatgcgatcaacg

SEQ ID NO: 610661 - DNA, 75 bp, synthetic construct
  source 1..75: mol_type = other DNA
tgttgccaaaggcgatagcagcgtggccatgggttataactcttttgccaaaggcgatagcagcgtggccatcgg

SEQ ID NO: 610662 - DNA, 75 bp, synthetic construct
  source 1..75: mol_type = other DNA
ggaggaggctcatcggtaaaccctgacgacggtacagttaacgcaccaacctacaatttaaaaaatggtaacaaa

SEQ ID NO: 610663 - DNA, 75 bp, synthetic construct
  source 1..75: mol_type = other DNA
ccgatgcggtcaacgtgggtcagttgaaagtaacggatgcgcaggtttcccagaatacccagagcattactaacc

SEQ ID NO: 610664 - DNA, 75 bp, synthetic construct
  source 1..75: mol_type = other DNA
gagcttccgctttgaactgtcgctgaaggatattttctgcagcgagtcccatatttccccggtaagaccggtatt

SEQ ID NO: 610665 - DNA, 75 bp, synthetic construct
  source 1..75: mol_type = other DNA
atgggtaatggttctcagactacccgtggtgcgcagaccaactacactgcctacaacatggacgcgccgcagaac

SEQ ID NO: 610666 - DNA, 75 bp, synthetic construct
  source 1..75: mol_type = other DNA
tctaacgcacgcgcaaatcatgccgacagcattgcaatgggtaatggttctcagactacccgtggtgcgcagacc

SEQ ID NO: 610667 - DNA, 75 bp, synthetic construct
  source 1..75: mol_type = other DNA
aacacagccagcatcattactaatgttgcagacggtgcaatttcctctaccagcagcgacgctattaacggctca

SEQ ID NO: 610668 - DNA, 75 bp, synthetic construct
  source 1..75: mol_type = other DNA
gaactgcttggcgcgttgtcgattggtgatgacggtaaatatcgtcaaatcatcaacgtcgcggatggttctgaa

SEQ ID NO: 610669 - DNA, 75 bp, synthetic construct
  source 1..75: mol_type = other DNA
ggttttttcacacagacggcttcgagagcagacttctactacccatggattaagagatataatcttatgtggctg

SEQ ID NO: 610670 - DNA, 75 bp, synthetic construct
  source 1..75: mol_type = other DNA
atggcgtagatgccaacgcgcagggtaaagatagtgttgcgattggttctggttccattgctgccgctgacaaca

SEQ ID NO: 610671 - DNA, 75 bp, synthetic construct
  source 1..75: mol_type = other DNA
gtatcggttatggtgcctacgtggacgcgaatgcacttaatggcattgctattggtagcaacgcgcgtgcaaacc

SEQ ID NO: 610672 - DNA, 75 bp, synthetic construct
  source 1..75: mol_type = other DNA
tacgccgtatggtggttttgtgccgacggtgaaaattgccaccaacagtgaactggcggcgaagaaaaaacactg

SEQ ID NO: 610673 - DNA, 75 bp, synthetic construct
  source 1..75: mol_type = other DNA
tatcgacaccatcgttgagtttgccaacggtaaacaaacctgcaacgagcgtaacgacttccgcgaactggcgat

SEQ ID NO: 610674 - DNA, 75 bp, synthetic construct
  source 1..75: mol_type = other DNA
gttaagtgcgccgggtaacgatgccgtagcgaccagcgccctggcgggtgcgggctgccatatggtgctgttcag

SEQ ID NO: 610675 - DNA, 75 bp, synthetic construct
  source 1..75: mol_type = other DNA
tttcggtatgggctcaggcagcgttcacagcgtgatggtcaacggtgtgatggtctatgaagaccgtcagtttaa

SEQ ID NO: 610676 - DNA, 75 bp, synthetic construct
  source 1..75: mol_type = other DNA
gtcgctcatgggctgtacttgtcgaaagatgacatcgccctactcaatcagcgcgatgcgttcctggtgcataac

SEQ ID NO: 610677 - DNA, 75 bp, synthetic construct
  source 1..75: mol_type = other DNA
aacatcgccccctgcccggatttcatctcaacgctgaaaaatctctggtggcgactcgatcgcgcccttgatgaa

SEQ ID NO: 610678 - DNA, 75 bp, synthetic construct
  source 1..75: mol_type = other DNA
aagctggtgatgcgtgccctgacgctcctgcaaaaacatcatgtcgactataacgtgctggtctgcgtcaaccgc

SEQ ID NO: 610679 - DNA, 75 bp, synthetic construct
  source 1..75: mol_type = other DNA
tgaatatcgaatgggcatttgccaattttgtcggcgcgcctggcgcggtttgccatcatcagccaacctgcgggc

SEQ ID NO: 610680 - DNA, 75 bp, synthetic construct
  source 1..75: mol_type = other DNA
cgttgagtttatccagtttattccggtggtggagcgcctggctgatgaaacagctgcccgcaatggactgaaatt

SEQ ID NO: 610681 - DNA, 75 bp, synthetic construct
  source 1..75: mol_type = other DNA
taccgtactgaccgaagtgccggagatgtttggcgcagagcagttgctgatggaccattgccgtgacgaagcaac

SEQ ID NO: 610682 - DNA, 75 bp, synthetic construct
  source 1..75: mol_type = other DNA
agtttggtctggagtgcggtggttctgacggtctttctggtattactgctaacccgatgctggggcgtttctctg

SEQ ID NO: 610683 - DNA, 75 bp, synthetic construct
  source 1..75: mol_type = other DNA
taacgtgatgcgcaacgataaacgcgagccaggcaaactcagcgaactgaagtttggtctggagtgcggtggttc

SEQ ID NO: 610684 - DNA, 75 bp, synthetic construct
  source 1..75: mol_type = other DNA
tgcataacgcccgttcaaacatgaacaaccatgtcggctacaaccatcaccttagcgacatccgcaatctggcgt

SEQ ID NO: 610685 - DNA, 75 bp, synthetic construct
  source 1..75: mol_type = other DNA
cggtaacgccggaacggcaatgcgtccgctggcggcagctctttgtctgggtagcaatgatattgtactgaccgg

SEQ ID NO: 610686 - DNA, 75 bp, synthetic construct
  source 1..75: mol_type = other DNA
gaagcaatgatattgtcctgacgggtgagcctcgcatgaaagagcgcccgattggtcatctggtggatgcgctgc

SEQ ID NO: 610687 - DNA, 75 bp, synthetic construct
  source 1..75: mol_type = other DNA
aaccgcgctttattgctggcggcattagcacacggcaaaacagtattaaccaatctgctggatagcgatgatgtt

SEQ ID NO: 610688 - DNA, 75 bp, synthetic construct
  source 1..75: mol_type = other DNA
gtgacgattcttgatcccaaatgtacggccaaaacatttccggattatttcgagcagctggcgcggattagccag

SEQ ID NO: 610689 - DNA, 75 bp, synthetic construct
  source 1..75: mol_type = other DNA
tgctgatcgtacgcgttgcgaaattatcggtaacggcggtccattacacgcagaaagtgcgctggagttatttct

SEQ ID NO: 610690 - DNA, 75 bp, synthetic construct
  source 1..75: mol_type = other DNA
ctgaacgccatcgatatggatatgaaccatattcccgatgcggcgatgaccattgctacaacggcgctttttgcg

SEQ ID NO: 610691 - DNA, 75 bp, synthetic construct
  source 1..75: mol_type = other DNA
ctaatgagtcgcaactttggtgcgaaattcggcctgctggaagccggttataaagccgatttaaccatttgcgat

SEQ ID NO: 610692 - DNA, 75 bp, synthetic construct
  source 1..75: mol_type = other DNA
ggtagaagctcatattggtgctcacgcgccgtttactgtgccggatgccggtctggaaatgctgcgtgaggccgt

SEQ ID NO: 610693 - DNA, 75 bp, synthetic construct
  source 1..75: mol_type = other DNA
caatggtgtgatggtctatgaagaccgtcagtttaacttcgattgcgattccatttatgcacaagccagaaaagc

SEQ ID NO: 610694 - DNA, 75 bp, synthetic construct
  source 1..75: mol_type = other DNA
atggaatacggttcgacaaagatggaagagagactctctcgcagtcctggtggcaaactggctttgtgggctttc

SEQ ID NO: 610695 - DNA, 75 bp, synthetic construct
  source 1..75: mol_type = other DNA
actaagtctgaattttccgggttatctcaaaatggaatacggttcgacaaagatggaagagagactctctcgcag

SEQ ID NO: 610696 - DNA, 75 bp, synthetic construct
  source 1..75: mol_type = other DNA
gcgcaattcgatctcatcgatagcaaaacgctggtcgctcatgggctgtatctgtcgaaagaggatattgccctg

SEQ ID NO: 610697 - DNA, 75 bp, synthetic construct
  source 1..75: mol_type = other DNA
gttcggtgattattgagcacaacggtgacgtttacgcctgcgatcactttgtttatccgcaatatcggctgggga

SEQ ID NO: 610698 - DNA, 75 bp, synthetic construct
  source 1..75: mol_type = other DNA
cgtccgctaccgtaagtcagacgacctcggacaaacctggggcgagattgccacgctgctcgataaccccggcac

SEQ ID NO: 610699 - DNA, 75 bp, synthetic construct
  source 1..75: mol_type = other DNA
cctggaaaagctaaatcgtgagttctcctaccccagcatcaaacaaagcccggacggtacgctacatatcgctta

SEQ ID NO: 610700 - DNA, 75 bp, synthetic construct
  source 1..75: mol_type = other DNA
tgtcgaacttgcaggttctgaagatattgagatttatcaatcgattagcaacgcttacttcagggcattatctac

SEQ ID NO: 610701 - DNA, 75 bp, synthetic construct
  source 1..75: mol_type = other DNA
atgattaagagtgaacacaatattcttattatggggaattctgcctcccacgttgataaattttttaagggatat

SEQ ID NO: 610702 - DNA, 75 bp, synthetic construct
  source 1..75: mol_type = other DNA
actgaagtgtaactttaagactgtcgggaagttaacgggtaaagataatattgttgctataagttatccgggatg

SEQ ID NO: 610703 - DNA, 75 bp, synthetic construct
  source 1..75: mol_type = other DNA
aaatgcaaaaaaaacctagggcaagagttagcagacaattggttgaattgcataagttatcagagttttatagaa

SEQ ID NO: 610704 - DNA, 75 bp, synthetic construct
  source 1..75: mol_type = other DNA
ccgagccaggttccttgcccgtttactggcgcagggaaatcgaagtttcgtttccggcaaaaagacctttatacc

SEQ ID NO: 610705 - DNA, 75 bp, synthetic construct
  source 1..75: mol_type = other DNA
tcgactggaacgatgtactaaaattaacaggaccggatggattccccgtaaaatgggctcctgaatgtcttgctc

SEQ ID NO: 610706 - DNA, 75 bp, synthetic construct
  source 1..75: mol_type = other DNA
ctgagcaagacccagacttgtaagaagatcctgactgatttctttgggatggatttgtacgctccattaactgat

SEQ ID NO: 610707 - DNA, 75 bp, synthetic construct
  source 1..75: mol_type = other DNA
attatcgggcgaaaggggatgcgctggagatgctcgatcgtgaaggtaatccgattgaatcgcagttcaactaca

SEQ ID NO: 610708 - DNA, 75 bp, synthetic construct
  source 1..75: mol_type = other DNA
atgccgataaatctgacatcttatttggggttacagggggcgaaagttgtcccggcagttgtgttttctaatttt

SEQ ID NO: 610709 - DNA, 75 bp, synthetic construct
  source 1..75: mol_type = other DNA
ctccgtaatcgtgggatctcccgcttactgagtcacttaccaaaggatttaggctttaataaccggatctactat

SEQ ID NO: 610710 - DNA, 75 bp, synthetic construct
  source 1..75: mol_type = other DNA
atgaatagtgaagagcagacaatcatttttaattgtgctgggtggcctgatttaggtggtggatcagcagtatca

SEQ ID NO: 610711 - DNA, 75 bp, synthetic construct
  source 1..75: mol_type = other DNA
tgcaatgaccggctttgcgtcagcggtcgcggcggtgctgctggtctcttactttggctctgcacgttccgatct

SEQ ID NO: 610712 - DNA, 75 bp, synthetic construct
  source 1..75: mol_type = other DNA
gccctgcctttaaccatggtgatcgtcagcggcgggatcgacatctcctttggctcgacgatggggttgtgcgcc

SEQ ID NO: 610713 - DNA, 75 bp, synthetic construct
  source 1..75: mol_type = other DNA
ggatgtttttattcagaacagattctggacaatatctgtccagtcatttcttaatggacacagaaatattatttt

SEQ ID NO: 610714 - DNA, 75 bp, synthetic construct
  source 1..75: mol_type = other DNA
acatgcgcctggtgatattcagggggaactgacggaatggtctgtgcgccccgatgaatttggtgaatttctggt

SEQ ID NO: 610715 - DNA, 75 bp, synthetic construct
  source 1..75: mol_type = other DNA
cgctgagttcatccagtttattccggtggtcgagcgcctggctgatgaaacggctgctcatgctggacttaagct

SEQ ID NO: 610716 - DNA, 75 bp, synthetic construct
  source 1..75: mol_type = other DNA
tgaatatcgaatgggcgtttgccaattttgtcggtgcgccgggtgcggtttgccatcatcagccaacctgtgggc

SEQ ID NO: 610717 - DNA, 75 bp, synthetic construct
  source 1..75: mol_type = other DNA
gtgcatcgctattttggtccccatgttttactgggcgatgaagtggtaacggcgacccataaacacatcaaaacc

SEQ ID NO: 610718 - DNA, 75 bp, synthetic construct
  source 1..75: mol_type = other DNA
atgaccactcaactggaacaggcctgggaactggcgaaacagcgtttcgcggcggtggggattgatgtcgaggag

SEQ ID NO: 610719 - DNA, 75 bp, synthetic construct
  source 1..75: mol_type = other DNA
cggagagctacacggttggctccaatgagttttacctggggtatgccgccagacggcgctgtgcctggacgccgg

SEQ ID NO: 610720 - DNA, 75 bp, synthetic construct
  source 1..75: mol_type = other DNA
cacttaattccctcaaaagaggctgtcaacactgagtgggataactttgagttgttattaagccttatttggagt

SEQ ID NO: 610721 - DNA, 75 bp, synthetic construct
  source 1..75: mol_type = other DNA
taaagcatactggtcaaaatgctggagttggaagagttgaatggactgcaacagaaaaagcacgacatctggcta

SEQ ID NO: 610722 - DNA, 75 bp, synthetic construct
  source 1..75: mol_type = other DNA
tcaataagttacttttggatgttgataaccctcgtttcccgacgtcagcagaaaatcagcgtgatgctattgcca

SEQ ID NO: 610723 - DNA, 75 bp, synthetic construct
  source 1..75: mol_type = other DNA
gctatattcgtcgcggtgaagtgtcggcgggtgagcaggatacggtggcctttgaagtggcgcagtttgtcgaaa

SEQ ID NO: 610724 - DNA, 75 bp, synthetic construct
  source 1..75: mol_type = other DNA
aagcgtctttttgcactggccagcgcaacgacagccggtggagcgctggcactttaccgtgtggccaacctgaca

SEQ ID NO: 610725 - DNA, 75 bp, synthetic construct
  source 1..75: mol_type = other DNA
gatgccagtggtaatcgtcagaagtaccgcgtggcgcatgaagttgcccgtgctgttaattttcgtgaagcaacg

SEQ ID NO: 610726 - DNA, 75 bp, synthetic construct
  source 1..75: mol_type = other DNA
gagttcatcgacatgtttgacgacgttgctgttaaggctggtgaggtggcggaagaaatcatcaaaatggtaacg

SEQ ID NO: 610727 - DNA, 75 bp, synthetic construct
  source 1..75: mol_type = other DNA
acgccagtttattgacatggcggagcaagcgaaaatgcttcgcgtaaaaatcaaactgcttacaggtgaagcgga

SEQ ID NO: 610728 - DNA, 75 bp, synthetic construct
  source 1..75: mol_type = other DNA
tctgaagtgggagcaatggcaggcgcaaagcgaaacaaacggactgatcggcgcttgcgccagcggcctgaaagg

SEQ ID NO: 610729 - DNA, 75 bp, synthetic construct
  source 1..75: mol_type = other DNA
atgatcgaaacgctgcttgaagtgcgtaatttaagtaaaacgttccgctaccggaccggttggtttcgtcgtcag

SEQ ID NO: 610730 - DNA, 75 bp, synthetic construct
  source 1..75: mol_type = other DNA
ttgaatccccgtcaacgtatctcgcagattcttgattttccactgcgcttgaacaccgatctggaacctgaacag

SEQ ID NO: 610731 - DNA, 75 bp, synthetic construct
  source 1..75: mol_type = other DNA
acaatattaaaaagcgaaaactttatattcgtaacctgactacaaaaacatgcatttctgactgcatgattaaag

SEQ ID NO: 610732 - DNA, 75 bp, synthetic construct
  source 1..75: mol_type = other DNA
agccgttaattttcgtgaggcaacgttcagcggaacgctggatgccccacagcaggacgggaaaatggcctggtt

SEQ ID NO: 610733 - DNA, 75 bp, synthetic construct
  source 1..75: mol_type = other DNA
ctgcgtatcagtggcgaaataccatttaaaaaaccggagatcctgaagcgtatttttgagctggccagcgccacc

SEQ ID NO: 610734 - DNA, 75 bp, synthetic construct
  source 1..75: mol_type = other DNA
atgacttcgatcccaacgctggcgcttaatggtgaagctatccagctgaaaaacatgcgtgtgaccgtatcgcag

SEQ ID NO: 610735 - DNA, 75 bp, synthetic construct
  source 1..75: mol_type = other DNA
acggcgggcgcggtagcggcgcaaggccagattgctgcggcggcggccccggcggcggcggcaacagcggcgtca

SEQ ID NO: 610736 - DNA, 75 bp, synthetic construct
  source 1..75: mol_type = other DNA
gaatacggcgcatctgctgaattcatgggatgccatttcggccagccatgaggtcattccgggcagcagccgcgg

SEQ ID NO: 610737 - DNA, 75 bp, synthetic construct
  source 1..75: mol_type = other DNA
gtggccggtaccctgctgaacagtgcgctgatttatgcggggaataacctgaagctgtttacagaccgtctgcat

SEQ ID NO: 610738 - DNA, 75 bp, synthetic construct
  source 1..75: mol_type = other DNA
ttgctggcgttagtattggaacctttgttgagccgggcagcgacaaaattgtcgaaacgctattcaggtaatcaa

SEQ ID NO: 610739 - DNA, 75 bp, synthetic construct
  source 1..75: mol_type = other DNA
tgcttccgggatttttagcactcaataattctgtatgggcaagtgattcctccactggtgcaagtgatttgcccg

SEQ ID NO: 610740 - DNA, 75 bp, synthetic construct
  source 1..75: mol_type = other DNA
tacttccgggatttttggcactcaataattctgtatgggcaagtgattcatctaccggagcaagtgatttgcctg

SEQ ID NO: 610741 - DNA, 75 bp, synthetic construct
  source 1..75: mol_type = other DNA
ggcaaaaggtgaagcctgggttcaaattagcaggcaagctggtacttcttaccgcactgcgctatggcccggcgg

SEQ ID NO: 610742 - DNA, 75 bp, synthetic construct
  source 1..75: mol_type = other DNA
gagcaatgcgcttgttggcctgcttaacggcactcaatcattgagcgatgtttttgctaacttagggagcaatat

SEQ ID NO: 610743 - DNA, 75 bp, synthetic construct
  source 1..75: mol_type = other DNA
caacagaaacaggaattgttagcctatgagcaacagatccgcgatctgaaatgggaacaatggcaggcgcaaagc

SEQ ID NO: 610744 - DNA, 75 bp, synthetic construct
  source 1..75: mol_type = other DNA
ctgaaagcaatatccagggagacggggcagagcctgaaagatactggcgaattatggcaaggcctggctatctca

SEQ ID NO: 610745 - DNA, 75 bp, synthetic construct
  source 1..75: mol_type = other DNA
ggccgggataagatttatggtattgttcacggtgtaatgccgtccatcggtgcggcggcaacctatacccgcatg

SEQ ID NO: 610746 - DNA, 75 bp, synthetic construct
  source 1..75: mol_type = other DNA
atcttcccattaaagaaggtattgcccccgaagaacgcacctacgctgaactttatctaaatagagaaaattggt

SEQ ID NO: 610747 - DNA, 75 bp, synthetic construct
  source 1..75: mol_type = other DNA
atcaaatgcaaaaatgtacatgccacaagcaggcatgaatgaaatctctagtgcctcagtagaggccttgacaag

SEQ ID NO: 610748 - DNA, 75 bp, synthetic construct
  source 1..75: mol_type = other DNA
atgattgctcatcacttcggaactgatgaaataccacgtcagtgtgtgacccctggcgattatgttcttcatgaa

SEQ ID NO: 610749 - DNA, 75 bp, synthetic construct
  source 1..75: mol_type = other DNA
aactgcttgaagaatatttttttgctcaccggctgagacccgctaccgaatggagttataacaaggttgtcagag

SEQ ID NO: 610750 - DNA, 75 bp, synthetic construct
  source 1..75: mol_type = other DNA
atggtgaacggtgcaaactggtttgaccgtaccgtgagtgctgatgccgcaggcatcatctactcccttgtgatt

SEQ ID NO: 610751 - DNA, 75 bp, synthetic construct
  source 1..75: mol_type = other DNA
ccgtaaccattgcgctcttgctggtttgggcaacgggagtcatgggaagccgcctgctgcttgggatgcattggc

SEQ ID NO: 610752 - DNA, 75 bp, synthetic construct
  source 1..75: mol_type = other DNA
gggcaaaacactggaagaagagttgtcgctgcacacagatctctgtgtagaaaaggaattgcaactattgacaca

SEQ ID NO: 610753 - DNA, 75 bp, synthetic construct
  source 1..75: mol_type = other DNA
tacctggttgtgcagaggtttgcagaagcggaagagcagaacatggtgaatagtcgtcgacgcaatgctatatac

SEQ ID NO: 610754 - DNA, 75 bp, synthetic construct
  source 1..75: mol_type = other DNA
ggcgtggtatcagaggagggcgtaatgcgctctggccagcgtggtactggctgacggtgctggatgcattcagat

SEQ ID NO: 610755 - DNA, 75 bp, synthetic construct
  source 1..75: mol_type = other DNA
ctcctttctgccttacctgtttggcctggattttctgtatgccgaggcatctgtgtacgcgctggcgaaaaaaat

SEQ ID NO: 610756 - DNA, 75 bp, synthetic construct
  source 1..75: mol_type = other DNA
aacatcatgcaatatgcgaaacctgtcactctgaacgttgaagagtgcgaccgtctctcctttctaccgtatctg

SEQ ID NO: 610757 - DNA, 75 bp, synthetic construct
  source 1..75: mol_type = other DNA
tacaggatgcgcgatgcacagttgtggagccacatcgaatttcaccccgaatgcaacgcgatttacgcagcactg

SEQ ID NO: 610758 - DNA, 75 bp, synthetic construct
  source 1..75: mol_type = other DNA
tggcagaaagagactggttttgcctttccttctggtcacacaatgtttgctgccagttgggctctgctggccgtt

SEQ ID NO: 610759 - DNA, 75 bp, synthetic construct
  source 1..75: mol_type = other DNA
ctttaaccattgcgctcttgctggtctgggctacgggagtaatgggaagccgcttgctgctggggatgcattggc

SEQ ID NO: 610760 - DNA, 75 bp, synthetic construct
  source 1..75: mol_type = other DNA
gatttcgtgggcgctggtggcggtggcaacgtggcttacgcaacgaatttgtgggccattaacaccgcctgcgga

SEQ ID NO: 610761 - DNA, 75 bp, synthetic construct
  source 1..75: mol_type = other DNA
tttattgcctgcgggcaaaaacccttttaacgactgcaccgtacagcgggacagaaagaaaaagcggactttaaa

SEQ ID NO: 610762 - DNA, 75 bp, synthetic construct
  source 1..75: mol_type = other DNA
acaccacccgcaaagcaagccgtaaatctgcaaaaacgcaggaaaccgtcctgtctgccctgctggcgcagacgg

SEQ ID NO: 610763 - DNA, 75 bp, synthetic construct
  source 1..75: mol_type = other DNA
ctttttctttggcggttggatgacagtaagtaatatcataagtccggtcatggtgtattttgatcgatttatagt

SEQ ID NO: 610764 - DNA, 75 bp, synthetic construct
  source 1..75: mol_type = other DNA
atgaaattccacgtcagtgtgtgactcccggtgattatgttcttcatgaaggccgtacatatattgcttctgcga

SEQ ID NO: 610765 - DNA, 75 bp, synthetic construct
  source 1..75: mol_type = other DNA
tggaatataccaggcaggtattaaagcctcattcagcagtacgttaagcgggcatctcggggtggggtatagcaa

SEQ ID NO: 610766 - DNA, 75 bp, synthetic construct
  source 1..75: mol_type = other DNA
ctgcctggaagaactggcatttagtcgccaaccttgtgcactttctggttacgacgagttgcatatttcccccgt

SEQ ID NO: 610767 - DNA, 75 bp, synthetic construct
  source 1..75: mol_type = other DNA
cgttgccgcgccaccgccgcccggttactggccaggctgacactgtggccggatatcgaactggtcagcggtcag

SEQ ID NO: 610768 - DNA, 75 bp, synthetic construct
  source 1..75: mol_type = other DNA
ttttccgcagactgagccgtgaatgtggtttttttgtctcgtcacacagattcagacacacactggcaacaaagc

SEQ ID NO: 610769 - DNA, 75 bp, synthetic construct
  source 1..75: mol_type = other DNA
ctgcgaccggcgacgtaatgccctgtatccggcaagatactggctgacggttctggatgtgttgcgttataccgg

SEQ ID NO: 610770 - DNA, 75 bp, synthetic construct
  source 1..75: mol_type = other DNA
tttccaaggttaagtaacattaaagactttaaagaatttaaacgtaatgtaaataaatcattgcttttaatgttt

SEQ ID NO: 610771 - DNA, 75 bp, synthetic construct
  source 1..75: mol_type = other DNA
ggaacctttttggctatgcaataccaactttaattgctatcccctcgctaggatttctcgctcgaggtttggggc

SEQ ID NO: 610772 - DNA, 75 bp, synthetic construct
  source 1..75: mol_type = other DNA
cgcacggtgccgtattccgcagagtccgtcagcgaactggcggagtccatcaagggcgttggcctgttacagaat

SEQ ID NO: 610773 - DNA, 75 bp, synthetic construct
  source 1..75: mol_type = other DNA
attgccctgatcacgcgtctcgatgtgcctgcttatcgggccgaattgatagctgaaagcctgtgggagtttatt

SEQ ID NO: 610774 - DNA, 75 bp, synthetic construct
  source 1..75: mol_type = other DNA
agtcgaaagcctgtgggagtttattgacgaggaccgcagcgtgcagacacgtctgggccgtgaagacagcgagta

SEQ ID NO: 610775 - DNA, 75 bp, synthetic construct
  source 1..75: mol_type = other DNA
tggtacagcgccagtgcagaaagcctggcgctgtggtacagcgccagtgcagaaagcctggcgctgagcgcgctc

SEQ ID NO: 610776 - DNA, 75 bp, synthetic construct
  source 1..75: mol_type = other DNA
gcaaattgccgtcactctgcgtgacgctcaggcctgctttaacctgaatgcccttgctcaaccaacaacggcgtc

SEQ ID NO: 610777 - DNA, 75 bp, synthetic construct
  source 1..75: mol_type = other DNA
tcagtgagatgcgcgtggtacagggaatggacgccgggctttatcaaaaactgaaaccgttggtctgtgcgctgc

SEQ ID NO: 610778 - DNA, 75 bp, synthetic construct
  source 1..75: mol_type = other DNA
tcagcgaaatgcgcgtggtacagggaatggacgccgggctttatcaaaaactgaaaccgctggtctgtgcgctgc

SEQ ID NO: 610779 - DNA, 75 bp, synthetic construct
  source 1..75: mol_type = other DNA
agagatgttcttaataaatcagtaaaagaaatcatgaaacatacggaagtaaagaacttaagtttcgtagtttca

SEQ ID NO: 610780 - DNA, 75 bp, synthetic construct
  source 1..75: mol_type = other DNA
ctgatatgcatgtatgtcctatgctgacgccaggtttaccacctgttcctcatgtagggggaccattgttaccac

SEQ ID NO: 610781 - DNA, 75 bp, synthetic construct
  source 1..75: mol_type = other DNA
tgggaaagtggcagtattgttttcacggttttcattgtgcatttgagaataaaaaaacagagcaaaatattgaag

SEQ ID NO: 610782 - DNA, 75 bp, synthetic construct
  source 1..75: mol_type = other DNA
cctgaaaaatgaaaagcgcgtgcatctggcacagccgtgggcttccggccctcgtttcttcccactgccgcaggg

SEQ ID NO: 610783 - DNA, 75 bp, synthetic construct
  source 1..75: mol_type = other DNA
tgcctgcttatcgggccgaactgatagccgaaagcctgtgggagtttattgacgaagaccgcagcgtgcagacgc

SEQ ID NO: 610784 - DNA, 75 bp, synthetic construct
  source 1..75: mol_type = other DNA
tggctttcccgctgcgcgatggcattccagtgctactggaaacggaagctcgtgtgctgactgctgatgagagta

SEQ ID NO: 610785 - DNA, 75 bp, synthetic construct
  source 1..75: mol_type = other DNA
ggcctttaataatcagccaatgatggtaggcaactgggcgcaaagtatattgcacggcggggtcattgcatcggc

SEQ ID NO: 610786 - DNA, 75 bp, synthetic construct
  source 1..75: mol_type = other DNA
gaaaatttaaaggaagaaggcgaaagcactgggcaatttatcgtttcggcgcttgaaggtgagatcaaacgccgc

SEQ ID NO: 610787 - DNA, 75 bp, synthetic construct
  source 1..75: mol_type = other DNA
gcactgcgcaatttatcgttacagccatgcgaggcgagatcaaacgccgccagcgtcgcaaggccaaagaatcag

SEQ ID NO: 610788 - DNA, 75 bp, synthetic construct
  source 1..75: mol_type = other DNA
atgaacacactacgttattttgattttggcgcagcccgccccgtgttgttattaattgctcgtattgccgtcatc

SEQ ID NO: 610789 - DNA, 75 bp, synthetic construct
  source 1..75: mol_type = other DNA
tgctgaaagccttcgggcgacacatcgccgggagttttcacggggggcgtggtgtacacacccccgccatgaaaa

SEQ ID NO: 610790 - DNA, 75 bp, synthetic construct
  source 1..75: mol_type = other DNA
tttgcctgtaccggacataccgccgctgaactcattcatctgcgtgctgacgccagccagccacatatggggctg

SEQ ID NO: 610791 - DNA, 75 bp, synthetic construct
  source 1..75: mol_type = other DNA
ttacaacctcgaagccattctcgctgtcggctatcgcgttcgctcgcctcgaggcacgcaattccgccagtgggc

SEQ ID NO: 610792 - DNA, 75 bp, synthetic construct
  source 1..75: mol_type = other DNA
tggggactgaagcgatgaaagtcgcgctggcgctggctgccccgctgttgctggtggcgttggtcacgggcctta

SEQ ID NO: 610793 - DNA, 75 bp, synthetic construct
  source 1..75: mol_type = other DNA
gtaaatcgaacaaatattgcagatattgcaacggaatacgcacaatgttttgcaagtggcgtattcacccgtggg

SEQ ID NO: 610794 - DNA, 75 bp, synthetic construct
  source 1..75: mol_type = other DNA
acgccagcggctgtcgcggatgggcacaattgatcttcgcgtggattacctgcgcccaggcagaggagagcgttt

SEQ ID NO: 610795 - DNA, 75 bp, synthetic construct
  source 1..75: mol_type = other DNA
caaatatgattaatttctggaaaaatgtcagtattgcaggcgcattcttgctgctggcgattaccggaccggggg

SEQ ID NO: 610796 - DNA, 75 bp, synthetic construct
  source 1..75: mol_type = other DNA
cgccgcgatattaatcgtgcttggcttttcacccgtccgctggcggtgctgtttattttctacacgctgggtaca

SEQ ID NO: 610797 - DNA, 75 bp, synthetic construct
  source 1..75: mol_type = other DNA
gaaaatttaaaggaagaaggcgaaagcacagggcaatttatcgtttcggcacttgaaggcgagatcaaacgccgc

SEQ ID NO: 610798 - DNA, 75 bp, synthetic construct
  source 1..75: mol_type = other DNA
aaagcacagctcgatgaatttgttgttggcatgcattctgccgacccggttatcaggatcgccagattaatatcg

SEQ ID NO: 610799 - DNA, 75 bp, synthetic construct
  source 1..75: mol_type = other DNA
aggcatatctcaatatgttggtgaatttttgacactcgaccaggccaaagaacagaccgtaaactgggtttcagc

SEQ ID NO: 610800 - DNA, 75 bp, synthetic construct
  source 1..75: mol_type = other DNA
aattcagttttttcaataaagttcgtgtgttattgaaaaaaattctgaagccagatgaacgtattgatgacgttg

SEQ ID NO: 610801 - DNA, 75 bp, synthetic construct
  source 1..75: mol_type = other DNA
gattcacattttgatgttgtattgggacctgtagactataaaaaagcactggaatttatgccgggaaaggatttt

SEQ ID NO: 610802 - DNA, 75 bp, synthetic construct
  source 1..75: mol_type = other DNA
tacacggaaacaccggtcagagtgtcaggctttaagcgcgtcatagacgagcaggactggacaatcactaaggtg

SEQ ID NO: 610803 - DNA, 75 bp, synthetic construct
  source 1..75: mol_type = other DNA
cgaatcattcaccggtatggggcgtgaccgaatttcttttctggaaattagcgccaaaaaaatggggcggtggtg

SEQ ID NO: 610804 - DNA, 75 bp, synthetic construct
  source 1..75: mol_type = other DNA
tggttgggtgaagcataacagccttttgatcaatgcagctgcaaatgcctggcatttacctgctcccttgcttgc

SEQ ID NO: 610805 - DNA, 75 bp, synthetic construct
  source 1..75: mol_type = other DNA
tgaaattgggtaaagagctatcagatttaatgcaggcgcagaaaaccgcgccagtattgcaacgcgtctcaattg

SEQ ID NO: 610806 - DNA, 75 bp, synthetic construct
  source 1..75: mol_type = other DNA
tagttctcaccgttcatcatcaggtggcgggtactatggtggcagcactccttattatccaaaaacatacagctc

SEQ ID NO: 610807 - DNA, 75 bp, synthetic construct
  source 1..75: mol_type = other DNA
tcttaatgaacatgatttagtgatagccccacttaacaccgaagttccattctacattgcagggcatcgcagtca

SEQ ID NO: 610808 - DNA, 75 bp, synthetic construct
  source 1..75: mol_type = other DNA
cattggtaatgttcgctgggtgattgattcatgttttgaggttgtattgggtcccgtagagtataaaaaagcact

SEQ ID NO: 610809 - DNA, 75 bp, synthetic construct
  source 1..75: mol_type = other DNA
aattcagttttttcaataaagttcgtgtattattgaaaaaaattctgaagccagatgaaagcattgatgatgttg

SEQ ID NO: 610810 - DNA, 75 bp, synthetic construct
  source 1..75: mol_type = other DNA
acgttgcattctattcacaaccagtaagatccctggccgggcttgagcagttactctcgttaatacatcaaatca

SEQ ID NO: 610811 - DNA, 75 bp, synthetic construct
  source 1..75: mol_type = other DNA
gtgcgctggataaaggttggatcatcattccgtgcgagctgatcgactacaacggcgacgcgttgcgtgaactgg

SEQ ID NO: 610812 - DNA, 75 bp, synthetic construct
  source 1..75: mol_type = other DNA
ttgtcttaacggcgattgccaacgatcgcttacatgatgaagtgtatgcaaaacaggtgcgggcgctgggtcatg

SEQ ID NO: 610813 - DNA, 75 bp, synthetic construct
  source 1..75: mol_type = other DNA
tacaacccgtggcggagggaatactcccttttattgaggataattttgctacacttatgaccgggcaacttgggc

SEQ ID NO: 610814 - DNA, 75 bp, synthetic construct
  source 1..75: mol_type = other DNA
cgctggactaccaacgttcaccgctggattacgaacactatctgacccgccagttacaacccgtggcggagggaa

SEQ ID NO: 610815 - DNA, 75 bp, synthetic construct
  source 1..75: mol_type = other DNA
gcagcagatcaatatcaatacattagatatctcacaaagcacccttttggaagcattattcgatccgtggttaac

SEQ ID NO: 610816 - DNA, 75 bp, synthetic construct
  source 1..75: mol_type = other DNA
gttaaagctgttgaagccgccgttacgcgtgatatgactattgtggcattaaccggctatgacggcggtgaactt

SEQ ID NO: 610817 - DNA, 75 bp, synthetic construct
  source 1..75: mol_type = other DNA
cacccgtggcaacagccgcgatattgtaaaagcggtagaagctgccgttacgcgtgatatgaccattgtggcatt

SEQ ID NO: 610818 - DNA, 75 bp, synthetic construct
  source 1..75: mol_type = other DNA
gtttgtttatcacatgccgtttaaccgtgcgttggggatggaactggagcgttacgaaaaagaattcgcgcaact

SEQ ID NO: 610819 - DNA, 75 bp, synthetic construct
  source 1..75: mol_type = other DNA
ccgcacccgcatcctgccgcaactgctggcagggcagaaggcaaacggcacacttccggcgcgccttactttcgc

SEQ ID NO: 610820 - DNA, 75 bp, synthetic construct
  source 1..75: mol_type = other DNA
ggtgccggtggcgttccaggcagggctggataccgtaggtgaagcgatgaacgatgctgaaatttgcgcattcgt

SEQ ID NO: 610821 - DNA, 75 bp, synthetic construct
  source 1..75: mol_type = other DNA
acccgccagctacaacccgtggcggagggaatactcccttttattgaggataattttgctacacttatgaccggg

SEQ ID NO: 610822 - DNA, 75 bp, synthetic construct
  source 1..75: mol_type = other DNA
ccatttattatttatgttattgaccatattcagaataactttaaaagattcaccgctcaagaaggaaacaatggt

SEQ ID NO: 610823 - DNA, 75 bp, synthetic construct
  source 1..75: mol_type = other DNA
ataaatcaacagaactgttttatgatcttgcttgtagatcgtttacagcaagctggaatctgttcatggaagtga

SEQ ID NO: 610824 - DNA, 75 bp, synthetic construct
  source 1..75: mol_type = other DNA
gcctgattaaaaccgctttgctggttgctccgctgtatgtgttcgtcgccgcctgggcgttatggctgcgggtcg

SEQ ID NO: 610825 - DNA, 75 bp, synthetic construct
  source 1..75: mol_type = other DNA
gttaacggcgggctgggaaaaacggcgggggttcatgcgcggtttgggggatggtcggtacctgattgccgaagc

SEQ ID NO: 610826 - DNA, 75 bp, synthetic construct
  source 1..75: mol_type = other DNA
acgatcgcatcagagctgtaaattcgctacatcaacaaggtgttaaacgcatttttgtttatctgaaagatgaat

SEQ ID NO: 610827 - DNA, 75 bp, synthetic construct
  source 1..75: mol_type = other DNA
tgggattttggttgttatctgctgttgatgggagtgatgttgctgccgtggatacaacagagcctgcgtgtgcac

SEQ ID NO: 610828 - DNA, 75 bp, synthetic construct
  source 1..75: mol_type = other DNA
tgttcgtcgccgcctgggcgttatggctgcgggtcgctcagtacggctggactgtcgaccgcttgcagggcgcgc

SEQ ID NO: 610829 - DNA, 75 bp, synthetic construct
  source 1..75: mol_type = other DNA
tctcttttaaacagaagcgcctttggggatggctggcgctggtgtttattgccacgctggggatgagcggctggc

SEQ ID NO: 610830 - DNA, 75 bp, synthetic construct
  source 1..75: mol_type = other DNA
aaaacgcgttacgctcggtggcggttggaagaaaaaattattatctcttcttcggctcagacaagggaggagaaa

SEQ ID NO: 610831 - DNA, 75 bp, synthetic construct
  source 1..75: mol_type = other DNA
cgaaatcaaccgactgaaggcgctggttgcgaaactgcagcgcatgcagttcggtaaaagctcagaaaaacttcg

SEQ ID NO: 610832 - DNA, 75 bp, synthetic construct
  source 1..75: mol_type = other DNA
ttattgctgcaacgctatcctttccagggcgatgcgcgtatcagccagactttaatggcgcgactggcgtctctg

SEQ ID NO: 610833 - DNA, 75 bp, synthetic construct
  source 1..75: mol_type = other DNA
acggtaaaaattatattgttgatgaagtatcagataatgttggtgtattggaaataactctcactgttaatacta

SEQ ID NO: 610834 - DNA, 75 bp, synthetic construct
  source 1..75: mol_type = other DNA
gatcgtgaagctcaatgactggccgtcaaaccgtgtgcatgaactgctgccctggaactgctcaactgtaaaata

SEQ ID NO: 610835 - DNA, 75 bp, synthetic construct
  source 1..75: mol_type = other DNA
gagccggaggactggttgcgcgaagtgatcgtgaagctcaatgactggccgtcgaaccgtgtgcatgaactgctg

SEQ ID NO: 610836 - DNA, 75 bp, synthetic construct
  source 1..75: mol_type = other DNA
aatgacagtagccgctatcgctacttttaccagtcagtatggcataacgtacttatattactggtgatttttctc

SEQ ID NO: 610837 - DNA, 75 bp, synthetic construct
  source 1..75: mol_type = other DNA
ggcggtgccgctgcgcgtccgtttatcactcaccataacgcgctggatctcgacatgtacctgcgtatcgcgccg

SEQ ID NO: 610838 - DNA, 75 bp, synthetic construct
  source 1..75: mol_type = other DNA
ggtcaaacagcagcaagtttaatggcatcgcttaatcaggcattagattatcaacctgacgaactgtttctgtac

SEQ ID NO: 610839 - DNA, 75 bp, synthetic construct
  source 1..75: mol_type = other DNA
tcaccgcgcagggtttagcgctttcggaccagcttggcccgctgtttatttccccggaagttcgcaggctggaga

SEQ ID NO: 610840 - DNA, 75 bp, synthetic construct
  source 1..75: mol_type = other DNA
tatttaagccttgggtcaaagcggaaaatatcgtcagcagcatccaatactactaccagtaccacttcggattcc

SEQ ID NO: 610841 - DNA, 75 bp, synthetic construct
  source 1..75: mol_type = other DNA
acgctacaaacaataacaaatgaacatcttaagagtgttctagatgaaaatggatatttagcaggtgttttaaag

SEQ ID NO: 610842 - DNA, 75 bp, synthetic construct
  source 1..75: mol_type = other DNA
gatggaaagtaccgttacgaatatcgggttgcaaaaatagatgatactactgttctgaaagaatcaatcaaagat

SEQ ID NO: 610843 - DNA, 75 bp, synthetic construct
  source 1..75: mol_type = other DNA
ccaccagaatgcgcaggctgagtggataaacggaatcctgaaaatgagtttttactctcgcgtcctgcagagctg

SEQ ID NO: 610844 - DNA, 75 bp, synthetic construct
  source 1..75: mol_type = other DNA
gcgctccaccgttcttgtctggttgcgtaaatatggccggcttgactggagccccggacttcctgaccaggtaaa

SEQ ID NO: 610845 - DNA, 75 bp, synthetic construct
  source 1..75: mol_type = other DNA
ttaattcgccggtgctggacagtatgcgcattagcgtgaacagtcatatggcgcgttatcagagcggcaaaaaca

SEQ ID NO: 610846 - DNA, 75 bp, synthetic construct
  source 1..75: mol_type = other DNA
aacttgcgcctgtagactgggccagttttaccattggcggcggtacgccactactgcttaataccgggcaactgt

SEQ ID NO: 610847 - DNA, 75 bp, synthetic construct
  source 1..75: mol_type = other DNA
gccgggcttgaggagatcagcggcggtgatctgttgatcgacggcaaacgaatgaatgacgttccagccaaagca

SEQ ID NO: 610848 - DNA, 75 bp, synthetic construct
  source 1..75: mol_type = other DNA
gatctttagtatcgataaattgatcaccatgatggctcatgcaggattgcatattcaacgtattgaagttcaata

SEQ ID NO: 610849 - DNA, 75 bp, synthetic construct
  source 1..75: mol_type = other DNA
gtgggttccgacagcagtggcgaacatgcggcggtgttgtactcgctgatcggcacatgccgtatgaacaatgta

SEQ ID NO: 610850 - DNA, 75 bp, synthetic construct
  source 1..75: mol_type = other DNA
tttgctgctcggcttcctcatcatcaaaatcgccatgctgtggctgattgcccgaccgttgcaggtgccaaataa

SEQ ID NO: 610851 - DNA, 75 bp, synthetic construct
  source 1..75: mol_type = other DNA
atgaatggatggttaatctatgaaactgaaaaactccccggatttagtttaggacttattgctttggcggtgggt

SEQ ID NO: 610852 - DNA, 75 bp, synthetic construct
  source 1..75: mol_type = other DNA
agcgccattctggcttttccgatggcgtggtatatggcgcgcgataccagcgggaaaatgaaagcgttcttttat

SEQ ID NO: 610853 - DNA, 75 bp, synthetic construct
  source 1..75: mol_type = other DNA
ttcattcggaagaagatgagcacccaatcggccgtctgctggtcgacgcatgctacagccctgtggagcgtattg

SEQ ID NO: 610854 - DNA, 75 bp, synthetic construct
  source 1..75: mol_type = other DNA
ttacccgaccgagccgcgccatgctcgaagcaatgatggccgccccggttggggacaacgtttacggagacgacc

SEQ ID NO: 610855 - DNA, 75 bp, synthetic construct
  source 1..75: mol_type = other DNA
gcgttttcgtgaccgctgcgtatcggcgggtattgatgtggaaattattccgggaattttgccggtctcgaactt

SEQ ID NO: 610856 - DNA, 75 bp, synthetic construct
  source 1..75: mol_type = other DNA
cgagctacattgttaaagcctatgcctggacgttattgctggcaaaagatggcgtggcgcagtggtttttacaac

SEQ ID NO: 610857 - DNA, 75 bp, synthetic construct
  source 1..75: mol_type = other DNA
cggtgtgaagcggggcgaggaactggcggaagcaagcggtgatttgtggcgtgacgcacgctgggccatcagccg

SEQ ID NO: 610858 - DNA, 75 bp, synthetic construct
  source 1..75: mol_type = other DNA
acggctatttctgaggttaacgctgagctgtacgacttccgcaaccgccagcagttgctgggctaccgggaactg

SEQ ID NO: 610859 - DNA, 75 bp, synthetic construct
  source 1..75: mol_type = other DNA
ggcggtaatacgctgtcaacttccgggctggggcgctttctggtgtttctctatatctggctgccgttcatgatc

SEQ ID NO: 610860 - DNA, 75 bp, synthetic construct
  source 1..75: mol_type = other DNA
tatggctgtggcagtcactatcgccagcgccattctggcttttccaatggcatggtatatggcgcgctataccag

SEQ ID NO: 610861 - DNA, 75 bp, synthetic construct
  source 1..75: mol_type = other DNA
ggctggggcgctttctggtgtttctctatatctggctgccgttcatgatcctgcccgtgcaggcggcgcttgagc

SEQ ID NO: 610862 - DNA, 75 bp, synthetic construct
  source 1..75: mol_type = other DNA
ccagatgcagcaacgaccactaaaaggcagcgagaaacgcgctctggaggcgctgaaagcagacggagatactca

SEQ ID NO: 610863 - DNA, 75 bp, synthetic construct
  source 1..75: mol_type = other DNA
tgccagcctgtttgccctgccgcaaatgcgccgtggttatcaacgtctggcgaagtggattgatggttttgccgg

SEQ ID NO: 610864 - DNA, 75 bp, synthetic construct
  source 1..75: mol_type = other DNA
tattcccgggggatgaggtgtttgtcagaaccgttgaaggacacaacatgatcaagattcttggctatgacagag

SEQ ID NO: 610865 - DNA, 75 bp, synthetic construct
  source 1..75: mol_type = other DNA
tggccggatttcaggacgttactctccgctgcgcattgcggcagtgactgacttcattattgtgcttgcattgct

SEQ ID NO: 610866 - DNA, 75 bp, synthetic construct
  source 1..75: mol_type = other DNA
aaaatcttcacgaaaacctctgccggcacaacttccccgggagacacatcgccttctgcctgctgaaaccagttg

SEQ ID NO: 610867 - DNA, 75 bp, synthetic construct
  source 1..75: mol_type = other DNA
gggtgcctggcccacgcccgccgaaaaatccatgacgaggatgtgcgccgtccgacagaaatgactcaggaagcg

SEQ ID NO: 610868 - DNA, 75 bp, synthetic construct
  source 1..75: mol_type = other DNA
tgccagcctgtttgctctgccgcaaatgcgccgtggttatcaacgtctggcgggtgatgctgccaacttactgat

SEQ ID NO: 610869 - DNA, 75 bp, synthetic construct
  source 1..75: mol_type = other DNA
cggatattcgcgacgaggcgaaaggaaaactacgcgaacaatttcattttttacgcagccctgccccgtggttaa

SEQ ID NO: 610870 - DNA, 75 bp, synthetic construct
  source 1..75: mol_type = other DNA
atgatcaaggttcttggctatgacagagacggagaataccaatttacaagcatcaatcaagaccacaggccaata

SEQ ID NO: 610871 - DNA, 75 bp, synthetic construct
  source 1..75: mol_type = other DNA
gtcttcgtgtaaaaggagacagcatgtggcccagaattaaatcaggagaatatgtactcattgagcctaacacca

SEQ ID NO: 610872 - DNA, 75 bp, synthetic construct
  source 1..75: mol_type = other DNA
tggcaacgccatgtttacgttatcttcgtcttacctgatgctcgccattggccgactggtttccggctttccgca

SEQ ID NO: 610873 - DNA, 75 bp, synthetic construct
  source 1..75: mol_type = other DNA
caatcatcgcgcttttttccagtcgctactcactcaaacatatcttgttgtttctggtggcgttgtgcgtcattg

SEQ ID NO: 610874 - DNA, 75 bp, synthetic construct
  source 1..75: mol_type = other DNA
ctactcgctcaaacatatcttgttgtttctggtggcgttgtgcgttattggcaatgccatgttcacgctctcttc

SEQ ID NO: 610875 - DNA, 75 bp, synthetic construct
  source 1..75: mol_type = other DNA
ccagcgtaacggcgtctactacttccgtcttcgggtcagacaatcaaacaatgatagaatgacctcaatatcatt

SEQ ID NO: 610876 - DNA, 75 bp, synthetic construct
  source 1..75: mol_type = other DNA
cagcactcaaggcaatacacgcagacagacccaacgctacctatgaggaaatgagggaacaccttaaggacatcg

SEQ ID NO: 610877 - DNA, 75 bp, synthetic construct
  source 1..75: mol_type = other DNA
actggcgtttttatctctgcgagccgggggtgattaccgtggccgatttaccggcgggctgggggttgctgcatg

SEQ ID NO: 610878 - DNA, 75 bp, synthetic construct
  source 1..75: mol_type = other DNA
gttaaatcagggaaaaccgatttgattaagggatttaaaaagaaaagcggtggaacgtatgatacagttcttgtt

SEQ ID NO: 610879 - DNA, 75 bp, synthetic construct
  source 1..75: mol_type = other DNA
tcatattatcgaatcacagccgccggaaaactataatcctgaatacaaagcctggaaggttgaaacgcttccttt

SEQ ID NO: 610880 - DNA, 75 bp, synthetic construct
  source 1..75: mol_type = other DNA
ccgctgacgttgacgccaccatgctgcccggcggtaaaaccaccaacacagcgcaggattttctcgctttgctgg

SEQ ID NO: 610881 - DNA, 75 bp, synthetic construct
  source 1..75: mol_type = other DNA
atggcactgtcgacggacgtattcctgaaggcgagtctatgcaggagctcagtgatcgtgtcaatgcggcactgg

SEQ ID NO: 610882 - DNA, 75 bp, synthetic construct
  source 1..75: mol_type = other DNA
ccgcagaagactttatcggtgaataccagcgccttctcgtgctgtaccgcgcggcgtttcaggaggtcactggcg

SEQ ID NO: 610883 - DNA, 75 bp, synthetic construct
  source 1..75: mol_type = other DNA
gttaccgcgtggacgtgaaaggtgatggtgatggactgggtttatttcacatcaacggcaccgacagtaccgcca

SEQ ID NO: 610884 - DNA, 75 bp, synthetic construct
  source 1..75: mol_type = other DNA
ctgatagaggcgaaatgttctcgtgctgacttgttggcagatagaaaaaagcgttttcgtaaaaatccatctctt

SEQ ID NO: 610885 - DNA, 75 bp, synthetic construct
  source 1..75: mol_type = other DNA
gagaactggcgtcgccagctggtgaacggcacggtggatgggcgtattcctgaaggcgaatcaatgcaggaactc

SEQ ID NO: 610886 - DNA, 75 bp, synthetic construct
  source 1..75: mol_type = other DNA
tatcgattcactcaccgaagaagaagagaactggcgtcggcagctggtcaatggcaccgttgacgggcgtattcc

SEQ ID NO: 610887 - DNA, 75 bp, synthetic construct
  source 1..75: mol_type = other DNA
cattcagtgtggtgaggagtcgttctatgcccgtgccagaaaaacaactgacagcggatttgagggggttcttgg

SEQ ID NO: 610888 - DNA, 75 bp, synthetic construct
  source 1..75: mol_type = other DNA
ctaaccagaaccataaatccagtttttactacaccatgaccggagtctttcagcgtggtgctgatgttatcaggg

SEQ ID NO: 610889 - DNA, 75 bp, synthetic construct
  source 1..75: mol_type = other DNA
tcctgtacaggatgtgaatttaagatatggaaagatttctgtggcaaatcattaaccgataaacaaattgaaacg

SEQ ID NO: 610890 - DNA, 75 bp, synthetic construct
  source 1..75: mol_type = other DNA
tgccctgaagtcagtattcgatcagccactggacgttgattcgacacgtaaaagcaaggcgtttaacagtgcgaa

SEQ ID NO: 610891 - DNA, 75 bp, synthetic construct
  source 1..75: mol_type = other DNA
tttctgatgttgacctgggcgaaatgaaaattgaacccgcagcgccagccggacaatctccacgcctgagttctc

SEQ ID NO: 610892 - DNA, 75 bp, synthetic construct
  source 1..75: mol_type = other DNA
gaacaaacaattttcggctaaggttaagctgattgataaagcaaccggaaagttggggtttgagtttacccccaa

SEQ ID NO: 610893 - DNA, 75 bp, synthetic construct
  source 1..75: mol_type = other DNA
tatcagaccaaaaggttatttctgtacaggatgtgaatttaaaatctggaatgagttttctggcaagaaaatcac

SEQ ID NO: 610894 - DNA, 75 bp, synthetic construct
  source 1..75: mol_type = other DNA
ggtggcattggtacgccagctacccgcgcagccattctggaaacgctgaagaaaagaaactatatcacgctggaa

SEQ ID NO: 610895 - DNA, 75 bp, synthetic construct
  source 1..75: mol_type = other DNA
gataaaaaaacggctgcgccgttgccgtttaacctggtcaggctccagcaatacatgaacaaaaagttcaaaatg

SEQ ID NO: 610896 - DNA, 75 bp, synthetic construct
  source 1..75: mol_type = other DNA
gataagaaaacggctgcaccgttaccgtttaacctcgttcgtcttcagcagtatatgaacaggaagttcaaaatg

SEQ ID NO: 610897 - DNA, 75 bp, synthetic construct
  source 1..75: mol_type = other DNA
acggcacaacaaacgctggatatcacacagcagctacgtgaaaaatacaaagcaattacttacaaccgttcagat

SEQ ID NO: 610898 - DNA, 75 bp, synthetic construct
  source 1..75: mol_type = other DNA
gcgtgctgatgtgaccgaaattattcatgctggcgatccagatgacgaaggacagctacttgtcgatgaggtcct

SEQ ID NO: 610899 - DNA, 75 bp, synthetic construct
  source 1..75: mol_type = other DNA
ttacggtaactttgattcccgctatgtccgggatatccggcttggtggtgctgccacatacaaacctgctaacaa

SEQ ID NO: 610900 - DNA, 75 bp, synthetic construct
  source 1..75: mol_type = other DNA
atattcaggatttttttaactggatgtggtcggtggatccacacctcgcctcccgcctcaatgactggcatgact

SEQ ID NO: 610901 - DNA, 75 bp, synthetic construct
  source 1..75: mol_type = other DNA
gttgcgtagcgcctgtctggcgatggcgcacttcaaccattatcagagttgggattatgacggcagtgagatcga

SEQ ID NO: 610902 - DNA, 75 bp, synthetic construct
  source 1..75: mol_type = other DNA
catcaccacttgatgaatggaaactcgtgctggataaatggcaccagagcaagacgctcgagcaaaccagagccc

SEQ ID NO: 610903 - DNA, 75 bp, synthetic construct
  source 1..75: mol_type = other DNA
gtttcccttcaacccagcagccattgggcagttggtagaacgacactgcaaagttaaagaacaaggcctagtgtt

SEQ ID NO: 610904 - DNA, 75 bp, synthetic construct
  source 1..75: mol_type = other DNA
ttgaatcgctgatgaaggggaaagtctggcgttatgtaaacaaacacggtgacggtaacctcagccttaaactga

SEQ ID NO: 610905 - DNA, 75 bp, synthetic construct
  source 1..75: mol_type = other DNA
gatgcagaatataactctaatgatgatttgaggaatataaagcaaaggctaagaaataatgtcgataataagaat

SEQ ID NO: 610906 - DNA, 75 bp, synthetic construct
  source 1..75: mol_type = other DNA
ggttggatggattatcagcatcccacccggccacgctggtgcaggcactgttaacggaaccgcaagtcgcaaaca

SEQ ID NO: 610907 - DNA, 75 bp, synthetic construct
  source 1..75: mol_type = other DNA
atacttattttcttgatgcggatgatattattaatgctaaatcattagagcatgcggtcaagaaagcaattttag

SEQ ID NO: 610908 - DNA, 75 bp, synthetic construct
  source 1..75: mol_type = other DNA
aaaaaaataattaagccggacaatgttagggataactttaataatagatttgctgaatatgctaattcttatcct

SEQ ID NO: 610909 - DNA, 75 bp, synthetic construct
  source 1..75: mol_type = other DNA
caaacacagagaccggagaaacgcgcctgcggttgcgtgatgcgcggttctgtcgtgtccggcactgtccgatct

SEQ ID NO: 610910 - DNA, 75 bp, synthetic construct
  source 1..75: mol_type = other DNA
gagttggaaagcaattaatccccgaaaacgttgccgaacatattgctcttaaattgcgtcaagcgctaaacgcag

SEQ ID NO: 610911 - DNA, 75 bp, synthetic construct
  source 1..75: mol_type = other DNA
aaaccattaactcgcgcgacggacaacgcatcggttactgtaaaagaacaaaatgaaccagtggcacaggtttca

SEQ ID NO: 610912 - DNA, 75 bp, synthetic construct
  source 1..75: mol_type = other DNA
actttagagatgggcaatacaaacttgccattcaagagtataaaaaaataacaaaagatagcccattgtacccat

SEQ ID NO: 610913 - DNA, 75 bp, synthetic construct
  source 1..75: mol_type = other DNA
caaggtttatatgcgatgcgtgacgtgcaggtagcgcgcctggctctgtttcatggcgatcgagaaaaggcaaaa

SEQ ID NO: 610914 - DNA, 75 bp, synthetic construct
  source 1..75: mol_type = other DNA
agcctgccaggggttttcgcgcgggctgacaggcggcctccaccgcctgccctgtatcacctgtgcctgctgccc

SEQ ID NO: 610915 - DNA, 75 bp, synthetic construct
  source 1..75: mol_type = other DNA
tggtgtgagcagcacggttcaaagcgtaatgctgatggtttaggaatgctggtggcgcaggcagcgcatgctttc

SEQ ID NO: 610916 - DNA, 75 bp, synthetic construct
  source 1..75: mol_type = other DNA
atgtgacggtaccttttaaagaagaggcttttgccagagcggatgagcttactgaacgggcagcgttggctggtg

SEQ ID NO: 610917 - DNA, 75 bp, synthetic construct
  source 1..75: mol_type = other DNA
tgccagaggaacatcaagcccggaagaagccgctaacgctattgcaaaagcccaggcttatatgcgccagcatgg

SEQ ID NO: 610918 - DNA, 75 bp, synthetic construct
  source 1..75: mol_type = other DNA
gtgcgtttttatggctctgacagccgcccggaaatcgcggcttacgcgtttgatgtgctttcccgtcagatgatg

SEQ ID NO: 610919 - DNA, 75 bp, synthetic construct
  source 1..75: mol_type = other DNA
ttctgtgaaggctgggtattcggagcgcgaaaagtaattgcagtgtatgacgtctcaccggaagaaagaaacctc

SEQ ID NO: 610920 - DNA, 75 bp, synthetic construct
  source 1..75: mol_type = other DNA
caaccggggcaaaaaatttgggaaagcggagatgtcaatatcactgtttattgcgacaatgcgacaggatggacg

SEQ ID NO: 610921 - DNA, 75 bp, synthetic construct
  source 1..75: mol_type = other DNA
tttcggcacgatggtgcgtctgaatcaagaaattaaagagagcgcagccggaaaattcctcgcggataactacgg

SEQ ID NO: 610922 - DNA, 75 bp, synthetic construct
  source 1..75: mol_type = other DNA
atggagcagaccgacaagcgcaagcaggataaactgaagttcgaccgggtaattaatctggcgcgcagactgccg

SEQ ID NO: 610923 - DNA, 75 bp, synthetic construct
  source 1..75: mol_type = other DNA
attgatggattaaataatatttcatttcttgattgtagtgtcgatgtccgtatttttccagaaagccagatcgtt

SEQ ID NO: 610924 - DNA, 75 bp, synthetic construct
  source 1..75: mol_type = other DNA
gaactgggaagatgacctgggcggtgagtttgacaagctggcgaaagacaagaacttcgacaacatccagaaggc

SEQ ID NO: 610925 - DNA, 75 bp, synthetic construct
  source 1..75: mol_type = other DNA
cgcagaacgcaacggctgcggttttacctttggcgacggttgccacggttcggacagcaaattcaacctgttcaa

SEQ ID NO: 610926 - DNA, 75 bp, synthetic construct
  source 1..75: mol_type = other DNA
gatgtcaaagcctataccggaaaacccgccatgcagccggttcccgcattactgaaccaggcgcgggcgctctct

SEQ ID NO: 610927 - DNA, 75 bp, synthetic construct
  source 1..75: mol_type = other DNA
ttctgtacgagttaccgtggtttatggtcatcggcagtccgggcgatggtaaaactaccgcgttgctcaacactg

SEQ ID NO: 610928 - DNA, 75 bp, synthetic construct
  source 1..75: mol_type = other DNA
tgcatccacgcggggaagacgtgccggtggccggggaaattaaagctgatttgcgcaccgtcagcaatattgtca

SEQ ID NO: 610929 - DNA, 75 bp, synthetic construct
  source 1..75: mol_type = other DNA
ctgcgcaccgtcagccatattttcaaccgcgccatccgacaactgaaacaactgcgtgtggatctacctggttgg

SEQ ID NO: 610930 - DNA, 75 bp, synthetic construct
  source 1..75: mol_type = other DNA
ggaatacgtgctttcagatgcgattgcgcgtcaggacagcaaagccgcctatgacgccctgcatgtttatctgct

SEQ ID NO: 610931 - DNA, 75 bp, synthetic construct
  source 1..75: mol_type = other DNA
ggcgtattttttaccagcgccgcgcaggcgcaggcagacgcggtagccgatcagacgggcatctggcagcgtttt

SEQ ID NO: 610932 - DNA, 75 bp, synthetic construct
  source 1..75: mol_type = other DNA
tagaagaaggtctggtattgctgaacgggatccttaacgagaaagaggaatacgcggtcattgaaaaaatcaccg

SEQ ID NO: 610933 - DNA, 75 bp, synthetic construct
  source 1..75: mol_type = other DNA
gtttaacgagcgtgaagaacagtcgttggtctctcatattcgcgaactctttggccgctggaatagcgagttgac

SEQ ID NO: 610934 - DNA, 75 bp, synthetic construct
  source 1..75: mol_type = other DNA
atcagccgcttctgtaacgggcatccactggatggtgcaaatcttaacgatctggtggtgaaagtgcttacacca

SEQ ID NO: 610935 - DNA, 75 bp, synthetic construct
  source 1..75: mol_type = other DNA
cgctggatcggggtgtaccgggtatcttcacccgcgaaggctaccgggggttatttgacaaacgactgcctgaat

SEQ ID NO: 610936 - DNA, 75 bp, synthetic construct
  source 1..75: mol_type = other DNA
ggtgatggataccattctggtagtacgaccacgtcaggttcagtttaaatggtccttcgacaaggtgacaggaac

SEQ ID NO: 610937 - DNA, 75 bp, synthetic construct
  source 1..75: mol_type = other DNA
cttccccgtcccttcaccctcacattcctgatgctgggtgtggcgtttcgtttatggcagggcgatgctgctatt

SEQ ID NO: 610938 - DNA, 75 bp, synthetic construct
  source 1..75: mol_type = other DNA
actgcgactggtggtttactaatgaggctgtgctcattgacaccgccgggcgctatgcccgccacgatgatggcg

SEQ ID NO: 610939 - DNA, 75 bp, synthetic construct
  source 1..75: mol_type = other DNA
cgatgaaatattttcagaagggggctgcatgagtacagaaatgaaaacggggctggtgctgtccggtggcggggc

SEQ ID NO: 610940 - DNA, 75 bp, synthetic construct
  source 1..75: mol_type = other DNA
attgcccttgctgcggaaagattagctggcagctaaatccatacgatttcgatggctgcagtgacattgaatgtg

SEQ ID NO: 610941 - DNA, 75 bp, synthetic construct
  source 1..75: mol_type = other DNA
gtggagtacagctttgatggtcggcgggtgatactggaaatcaccgccggacgggattttgacccagtggatcgc

SEQ ID NO: 610942 - DNA, 75 bp, synthetic construct
  source 1..75: mol_type = other DNA
ataaatcattaacgcagatggcacaggagagtggtggtagcgcaacagtacggctgaactcactggactggcttg

SEQ ID NO: 610943 - DNA, 75 bp, synthetic construct
  source 1..75: mol_type = other DNA
ggcggtcgcgcagccgtgctggaacatatcgatgctctgtttgacggcagtcgcgtggtgcattcgccatacgaa

SEQ ID NO: 610944 - DNA, 75 bp, synthetic construct
  source 1..75: mol_type = other DNA
gctggcggaactgcgggagacgctgggtattcgtttcccggtttatctggttgtcaccaaaatggatctgctacc

SEQ ID NO: 610945 - DNA, 75 bp, synthetic construct
  source 1..75: mol_type = other DNA
ccggctgtggcgggcgctgcgtctggatgaacaactgctgcgccgtttcctgcatccgcgtggggaagacgtacc

SEQ ID NO: 610946 - DNA, 75 bp, synthetic construct
  source 1..75: mol_type = other DNA
cagggtaacagcggctatctgaatgaaatcgccagccggacggtccaactggatggtgacgtcaaagcctatacc

SEQ ID NO: 610947 - DNA, 75 bp, synthetic construct
  source 1..75: mol_type = other DNA
ggcctcacctgattccccgctgatgcggctgagtaaagtcgtggtagatcagaccaccctggtgccgccgctgga

SEQ ID NO: 610948 - DNA, 75 bp, synthetic construct
  source 1..75: mol_type = other DNA
gacctactgacccagtttatcttccgtgaagcacacctggtggagccgaatcttcaatgggcctggcgttatcgc

SEQ ID NO: 610949 - DNA, 75 bp, synthetic construct
  source 1..75: mol_type = other DNA
tgaagttggtcagttcattggtaaagatgcccagatgatgctgaagctgcaaaccatcaccgaaaacttaggtgt

SEQ ID NO: 610950 - DNA, 75 bp, synthetic construct
  source 1..75: mol_type = other DNA
cgggtaaacctgtacgcatgattattctggatacgctggcgcgttgctttggtggtaatgatgaaaatgattccc

SEQ ID NO: 610951 - DNA, 75 bp, synthetic construct
  source 1..75: mol_type = other DNA
gtttgatgttgatgaaatggttatcgctgcccgtcaggtggagcgggaaacgggtaaacctgtacgcatgattat

SEQ ID NO: 610952 - DNA, 75 bp, synthetic construct
  source 1..75: mol_type = other DNA
acgtttccacgggccgccagtggggaggccgcagggttgcacatggcgctgttctctatgtggttggtgaaggcg

SEQ ID NO: 610953 - DNA, 75 bp, synthetic construct
  source 1..75: mol_type = other DNA
agtggataacttttatcgaattaccccgaaaatatctaataatacatctaaccagagacaaccaaatgagagcga

SEQ ID NO: 610954 - DNA, 75 bp, synthetic construct
  source 1..75: mol_type = other DNA
catagcagcaggcgcacaattctatgaattcacccgcgaaaatatgtggaacggagaaaatttcgaacatgaata

SEQ ID NO: 610955 - DNA, 75 bp, synthetic construct
  source 1..75: mol_type = other DNA
cctttcgtgcgttgcaccagaacaaaggccagatatttcaagagggcgtgacggatttatttaagaaattatcct

SEQ ID NO: 610956 - DNA, 75 bp, synthetic construct
  source 1..75: mol_type = other DNA
aatgagcgttggatctaccggatacgacacacagcttgattacgtggtaaaggggattattccggcatcgtcgct

SEQ ID NO: 610957 - DNA, 75 bp, synthetic construct
  source 1..75: mol_type = other DNA
ctgtatctggtaaaccgtccagtttttccggctgtcccgcttgatgttgatgaactggttatcgctgcccgtcag

SEQ ID NO: 610958 - DNA, 75 bp, synthetic construct
  source 1..75: mol_type = other DNA
ctgggagcgttcgatgcactctgaacgcgcaccgtttttcctcaaactggcggcctggggcggcgtggttttctt

SEQ ID NO: 610959 - DNA, 75 bp, synthetic construct
  source 1..75: mol_type = other DNA
gcattccgcgctgcactggatgcagagtaccgaatcagccgggaaaattcagacgttacagcactggtggcggcg

SEQ ID NO: 610960 - DNA, 75 bp, synthetic construct
  source 1..75: mol_type = other DNA
ggcatggggaggccgcagggtaagtaagggcgcggttatctatatcgctggcgaaggcagtatgggcgtaaaacg

SEQ ID NO: 610961 - DNA, 75 bp, synthetic construct
  source 1..75: mol_type = other DNA
aaaacaccttaaacgatggttagccaaactggaaaaagacgacgtgatctacattgacggtgatgatgtaggacc

SEQ ID NO: 610962 - DNA, 75 bp, synthetic construct
  source 1..75: mol_type = other DNA
accgtcccatctttccggctgccccgcttgatgttgatgaaatggttatcgctgcccgtcaggtggagcgggaaa

SEQ ID NO: 610963 - DNA, 75 bp, synthetic construct
  source 1..75: mol_type = other DNA
gcaggccacatcaggccatcaaatattaatgccattgcgcacaagctggcagcggcaggtgtacaggatgcgaat

SEQ ID NO: 610964 - DNA, 75 bp, synthetic construct
  source 1..75: mol_type = other DNA
gagcaggtgaaaaatctgtatctggtaaaccgccccatctttccggctgccccgcttgatgttgatgaaatggtt

SEQ ID NO: 610965 - DNA, 75 bp, synthetic construct
  source 1..75: mol_type = other DNA
agcttctacaaaaaccaatacgccacctggcagcgcttgagtgcggcgttaaatggcagttttaaagctaaccgt

SEQ ID NO: 610966 - DNA, 75 bp, synthetic construct
  source 1..75: mol_type = other DNA
aactggggtacgaaataaagcacttccggcgctggctgggcaagctggaaaaagacggcgttatctatgttgacg

SEQ ID NO: 610967 - DNA, 75 bp, synthetic construct
  source 1..75: mol_type = other DNA
gtatcggcgttccgcgtcgtgtaaaagcctgggaggttgtgcacggtgagcaggtgaaaaatctgtatctggtaa

SEQ ID NO: 610968 - DNA, 75 bp, synthetic construct
  source 1..75: mol_type = other DNA
tgtggcgcggtggactatcatcttaatgcgcaagagaaagggttagcgcgggcgcgcaataatattgatgcctag

SEQ ID NO: 610969 - DNA, 75 bp, synthetic construct
  source 1..75: mol_type = other DNA
gcgcgaaataatattgatgcctggtggcccgcgattgaagcaggtgccgaggcaattttgcaaaccgccagcggt

SEQ ID NO: 610970 - DNA, 75 bp, synthetic construct
  source 1..75: mol_type = other DNA
atcgaagatcaacgcaaaaaagctgaagctgagcgaagacgtcgtgaactcgaacagaagaaacgcgaagaagaa

SEQ ID NO: 610971 - DNA, 75 bp, synthetic construct
  source 1..75: mol_type = other DNA
atgaaaattgaacagattttttccaagaagttgacgcgtgacattaatggcgttgttaaagcggaacaaaaagac

SEQ ID NO: 610972 - DNA, 75 bp, synthetic construct
  source 1..75: mol_type = other DNA
aggtagggctggtgctgcgaccgttgttaccagagcaagtcagagcaaaattgcccgctggaaccgtgaaagcca

SEQ ID NO: 610973 - DNA, 75 bp, synthetic construct
  source 1..75: mol_type = other DNA
atgagtaaagcaacatataccgtaaccgtcaccaataacagtaatggcgtctctgtcgattatgaaactgagacg

SEQ ID NO: 610974 - DNA, 75 bp, synthetic construct
  source 1..75: mol_type = other DNA
gatctccagcacatcagcaaaacgccattcaagctatccagcaaattcttccagaccaaaccaaaccaatcgtag

SEQ ID NO: 610975 - DNA, 75 bp, synthetic construct
  source 1..75: mol_type = other DNA
taagaagcaccatccatcagcagaacgccattcaagctatccagcaaatccttccagacccaaccaaaccaatcg

SEQ ID NO: 610976 - DNA, 75 bp, synthetic construct
  source 1..75: mol_type = other DNA
gcgctgttaaccgacattagcgatcaggttaattggtacggtaaaaagctatcgccggaagactggaaatcggta

SEQ ID NO: 610977 - DNA, 75 bp, synthetic construct
  source 1..75: mol_type = other DNA
gggttttaagatctggaggcaggaatttcacttattcaggattatccgtatccggtgataagttagtatttactg

SEQ ID NO: 610978 - DNA, 75 bp, synthetic construct
  source 1..75: mol_type = other DNA
gtggtgggataattggtcttggtgtgggcaaatgggtctctggatatactgcaacatttgctcctgatattacca

SEQ ID NO: 610979 - DNA, 75 bp, synthetic construct
  source 1..75: mol_type = other DNA
atggtgaggaaactaacgtttgaactaagaagccccatccatcagcagaacgccattcaagctatccagcaaatt

SEQ ID NO: 610980 - DNA, 75 bp, synthetic construct
  source 1..75: mol_type = other DNA
atgcgctggaaagcgatatcgaaccatttaaaggtttgctgctggggctgtttttcatcggcgttggcatgtcga

SEQ ID NO: 610981 - DNA, 75 bp, synthetic construct
  source 1..75: mol_type = other DNA
attgataacgacacccgcctgccagcgtttaaagacgcgctgcgctggaacgaagtgtattacggatttcgtcgc

SEQ ID NO: 610982 - DNA, 75 bp, synthetic construct
  source 1..75: mol_type = other DNA
agctgtatgagtttcgcagacgtcagcagatgctgggatatgcctcgctggcagaggttccggctgaacagctgg

SEQ ID NO: 610983 - DNA, 75 bp, synthetic construct
  source 1..75: mol_type = other DNA
gcacgcgccatgctcaacgagcgttatcaggactatgacgccacagcatccggtgtgaagcggggcgaggaactg

SEQ ID NO: 610984 - DNA, 75 bp, synthetic construct
  source 1..75: mol_type = other DNA
tcgcagacgccagcagatgctcggatatgcctcgctggcagaggttccggcggagcagctggacggcaaaagtga

SEQ ID NO: 610985 - DNA, 75 bp, synthetic construct
  source 1..75: mol_type = other DNA
agctgtatgagtttcgcagacgccagcagatgctggggtatgcctcgctggcagaagttccggcggaacagctgg

SEQ ID NO: 610986 - DNA, 75 bp, synthetic construct
  source 1..75: mol_type = other DNA
gcggaagcaagcggtgatttatggcgtgacgcccgctgggccatcagccgggtgcaggatgcgccgcactgcaca

SEQ ID NO: 610987 - DNA, 75 bp, synthetic construct
  source 1..75: mol_type = other DNA
ttgttggattattatagtataatttcctatataaccgatgaagaatcaccgattgaaatcagaaataatacttct

SEQ ID NO: 610988 - DNA, 75 bp, synthetic construct
  source 1..75: mol_type = other DNA
actatacctaccacttcgagaaaggtaatgacctggtgctcggctcccacatgctggaagtctgcccgtcgatcg

SEQ ID NO: 610989 - DNA, 75 bp, synthetic construct
  source 1..75: mol_type = other DNA
cgttcagcaccttggcattggcggtaaagacgatcctgcccgcctgatcttcaacacccaaaccggccctgcgat

SEQ ID NO: 610990 - DNA, 75 bp, synthetic construct
  source 1..75: mol_type = other DNA
caatgacctggtgctcggctcccatatgctggaagtctgcccgtcgatcgccgtcgaagagaagccgatcctcga

SEQ ID NO: 610991 - DNA, 75 bp, synthetic construct
  source 1..75: mol_type = other DNA
atgaagtttgttgcgccagaacagacaccggaacaggcggaaatcatcaggaatacgccgttctggcctgatgtg

SEQ ID NO: 610992 - DNA, 75 bp, synthetic construct
  source 1..75: mol_type = other DNA
acgcaccagcgcgatgttaagtgagatcattaccgaagaccgtgaacatctgtcattaattcaacgacatggctg

SEQ ID NO: 610993 - DNA, 75 bp, synthetic construct
  source 1..75: mol_type = other DNA
gcaacatgctgtcgttaccggtcactggcaggataaacaagcacatgagcgtatcggctcctggatgcgtcaggc

SEQ ID NO: 610994 - DNA, 75 bp, synthetic construct
  source 1..75: mol_type = other DNA
gtagagaacgaagacggttctcacgttcctgtttcgcaaccaatcatcattaacgctgctggatatccggtatat

SEQ ID NO: 610995 - DNA, 75 bp, synthetic construct
  source 1..75: mol_type = other DNA
tgatttctggctttgctctggcgtgtctgaccccgccctgcatttatgccatttataagggtctttctttccccg

SEQ ID NO: 610996 - DNA, 75 bp, synthetic construct
  source 1..75: mol_type = other DNA
gcggctcggcggtgatgaatttggtctgctgctgccagactgcaatgttgaaagcgctcgttttatcgctacacg

SEQ ID NO: 610997 - DNA, 75 bp, synthetic construct
  source 1..75: mol_type = other DNA
gaaaaccatcgccgggccagtcgttttacccttagtgatggatacgctttcgggcatcggcgtcgatctgattta

SEQ ID NO: 610998 - DNA, 75 bp, synthetic construct
  source 1..75: mol_type = other DNA
caggaaatggccacagaaaaccgtgctgcggtaagccgtaaccgtcaggtgggtgaacgcaacagtcgcgccatt

SEQ ID NO: 610999 - DNA, 75 bp, synthetic construct
  source 1..75: mol_type = other DNA
actgctgttggttcgggaacgcacgcctggtcagaccagtcaacgtcagtgggaaccgcggcatatgtaggtgac

SEQ ID NO: 611000 - DNA, 75 bp, synthetic construct
  source 1..75: mol_type = other DNA
agagagattgatcagccggtttgcgctgacagtgttgattccatggctgtctggcatgtcgattgtcagtacata

SEQ ID NO: 611001 - DNA, 75 bp, synthetic construct
  source 1..75: mol_type = other DNA
atgaaacctttaaagccgcgtttgccgatatcaatggctcacgctgggaagacgagcgcgacgcttactacttca

SEQ ID NO: 611002 - DNA, 75 bp, synthetic construct
  source 1..75: mol_type = other DNA
agttatccagaaacgtttgttggtaaagactgacgaagcaaaagcggcgctggcaaaagtgtggcaagagaaagg

SEQ ID NO: 611003 - DNA, 75 bp, synthetic construct
  source 1..75: mol_type = other DNA
tatagacacgctggacggcaccaccagaacggcgctggattccgttatatcgaaactcaaggacgaggtatggcc

SEQ ID NO: 611004 - DNA, 75 bp, synthetic construct
  source 1..75: mol_type = other DNA
cgaaacaggccaggttaaccagctactggatattctcagacataaagcattaacgcagatggcacaggagagtgg

SEQ ID NO: 611005 - DNA, 75 bp, synthetic construct
  source 1..75: mol_type = other DNA
cgggtcgaaaaaagtctgaacacgcttgaacgcctgatgctcattgcgcgcgttgaagataaatatgtgttcctg

SEQ ID NO: 611006 - DNA, 75 bp, synthetic construct
  source 1..75: mol_type = other DNA
ccagccatacagtgtgggtaaatttaacgccacagcggctgtgggcgggtacagtgacaagcaggctgttgcggt

SEQ ID NO: 611007 - DNA, 75 bp, synthetic construct
  source 1..75: mol_type = other DNA
cgctatcatcgccgcttcaatggggtctacgctgacagtacgcaaagagagcaaaataaaagaattagacattaa

SEQ ID NO: 611008 - DNA, 75 bp, synthetic construct
  source 1..75: mol_type = other DNA
tgaaaacgatagccccgaatgcctctatgaattcgagaggctgctgaatgattacactttgcgagaaaaactaca

SEQ ID NO: 611009 - DNA, 75 bp, synthetic construct
  source 1..75: mol_type = other DNA
tatgaattcgataggctgcttaatgattactctttgcgagaaaagctacagcataaaacaggggcgttgagagac

SEQ ID NO: 611010 - DNA, 75 bp, synthetic construct
  source 1..75: mol_type = other DNA
tggcggcagcgccgggctgattggcgggcgcgttgatcaggccaccatgcgcgtcgcggatatgtttatgacctt

SEQ ID NO: 611011 - DNA, 75 bp, synthetic construct
  source 1..75: mol_type = other DNA
catgtgcgggtgtttgtcgatcatctggcaggcgcggtgatcccttcgctgctggtgctggcaacgctggatatc

SEQ ID NO: 611012 - DNA, 75 bp, synthetic construct
  source 1..75: mol_type = other DNA
catgtgcgggtgtttgtcgatcatctggcaggcgcggtgatccctcgctgctggtgctggcgacgctggatattg

SEQ ID NO: 611013 - DNA, 75 bp, synthetic construct
  source 1..75: mol_type = other DNA
atgaaaggcttcccaattgcacatatttttcccccttcaattccgccaatgtatgcagtggttaacaatcacaat

SEQ ID NO: 611014 - DNA, 75 bp, synthetic construct
  source 1..75: mol_type = other DNA
aaagaaagtttgcagaaattgtctccaccaatgacgttaataaaatttacagtataagtaatgaactgcggagag

SEQ ID NO: 611015 - DNA, 75 bp, synthetic construct
  source 1..75: mol_type = other DNA
attttatggtcgtcgacgcggtaacgcagaatgtcttttttcaccggagctgattcgtcgcctggctgatcggca

SEQ ID NO: 611016 - DNA, 75 bp, synthetic construct
  source 1..75: mol_type = other DNA
attacactttgcgagaaaaactacagcataaaacaggggcgttgagagattctattgtccataaagtgcttcgca

SEQ ID NO: 611017 - DNA, 75 bp, synthetic construct
  source 1..75: mol_type = other DNA
acttcatcatcaaaccggtcaattgcgtgatgccattgtcagcaaggttctccgaagcatagatgacaggcttgc

SEQ ID NO: 611018 - DNA, 75 bp, synthetic construct
  source 1..75: mol_type = other DNA
atgaaaggcttcccaattgcacatatttttcacccttcaatcccgccaatgcacgcagtggttaacaatcacaac

SEQ ID NO: 611019 - DNA, 75 bp, synthetic construct
  source 1..75: mol_type = other DNA
atagtgttgaaatcgtcacttatatggaacttgaagatagctctgaagcggtacaatcaagttcttataatgcaa

SEQ ID NO: 611020 - DNA, 75 bp, synthetic construct
  source 1..75: mol_type = other DNA
tgcgtaaacatcaaatcatcaccgatatgagtgaagaagcgatggtcgaaaacgatcttaccgggccgtttatgc

SEQ ID NO: 611021 - DNA, 75 bp, synthetic construct
  source 1..75: mol_type = other DNA
tgatcgccaccatgaaagcaggcgtcagctatgtggattaccacatccagttccatcagcgcatcgccaaactgc

SEQ ID NO: 611022 - DNA, 75 bp, synthetic construct
  source 1..75: mol_type = other DNA
tgtggttcgcctacagcccgacagaaaaggcatccatccgcagacccatcttgcggggttcagcggtgtgctaca

SEQ ID NO: 611023 - DNA, 75 bp, synthetic construct
  source 1..75: mol_type = other DNA
cgaaccgctgccgacctccttctggactgaagatgtagaagtgatcgcgctgccgaaagccgatggcattggtag

SEQ ID NO: 611024 - DNA, 75 bp, synthetic construct
  source 1..75: mol_type = other DNA
acggactcgcgatgcactggcgcgcggcaagctggatgcgttacttattcactccggcgaactgttcaacgtttt

SEQ ID NO: 611025 - DNA, 75 bp, synthetic construct
  source 1..75: mol_type = other DNA
atcggttatatcggtccggtgccggagcgtgcgctgcaactgggtattgaggccagcaatatcaacccgaaaggg

SEQ ID NO: 611026 - DNA, 75 bp, synthetic construct
  source 1..75: mol_type = other DNA
tatgtgctgactgacggtaagctccatgctgatgacacgcctgtcccggtgctgttgccaggcaataagaaaacg

SEQ ID NO: 611027 - DNA, 75 bp, synthetic construct
  source 1..75: mol_type = other DNA
gtgacgatcgcaacgccggttcgaccatgccggcagcggtgtggttctcatactctcccgaccgcaaaggtatcc

SEQ ID NO: 611028 - DNA, 75 bp, synthetic construct
  source 1..75: mol_type = other DNA
cagcccggacagaaaaggcatccatccgcagactcatcttgcttgcttcagcggtgtgctgcaagcggatgcgta

SEQ ID NO: 611029 - DNA, 75 bp, synthetic construct
  source 1..75: mol_type = other DNA
cggtgcgtcactgtacagtcttatcgggacgtgcaaattaaacggcgtggatccggaacgctatctgcatcatgt

SEQ ID NO: 611030 - DNA, 75 bp, synthetic construct
  source 1..75: mol_type = other DNA
agagataaggggaatgacggcggagcagcgccttgccgaacgtcagttgaaaacgaaaccgctgctgaaatccct

SEQ ID NO: 611031 - DNA, 75 bp, synthetic construct
  source 1..75: mol_type = other DNA
tgtgcacgttcgcaccccgtcagccctgacggaggaagcgctgaaacggatcggcgaactgtacgccatcgaggc

SEQ ID NO: 611032 - DNA, 75 bp, synthetic construct
  source 1..75: mol_type = other DNA
aagccgaaactgtggttctatctgccggttgattactggcacaacgtcgaaccgctgccgacctccttctggact

SEQ ID NO: 611033 - DNA, 75 bp, synthetic construct
  source 1..75: mol_type = other DNA
ccggccgggtggatgacccggcagtgcagcgcccgctgcgtcagacccgcacccgcaaaccgttccctgagtcac

SEQ ID NO: 611034 - DNA, 75 bp, synthetic construct
  source 1..75: mol_type = other DNA
ctgaacggagtggagccagaaagctatctccgctatgtccttgacgtcatagccgactggccgataaaccgggtc

SEQ ID NO: 611035 - DNA, 75 bp, synthetic construct
  source 1..75: mol_type = other DNA
aacgtcagcgaaaaacgaaaccgctgttgaaatccctggaaagctggttgcgtgaaaagatgaagaccctgttct

SEQ ID NO: 611036 - DNA, 75 bp, synthetic construct
  source 1..75: mol_type = other DNA
gtggccggcactgacgtactatgcgaacgatggctgggtggaaatcgacagcaacatcgctgaaaatgccctgcg

SEQ ID NO: 611037 - DNA, 75 bp, synthetic construct
  source 1..75: mol_type = other DNA
ggtgcctgaacaaattatcgtggaatttactgaaagtgaggtcatatctcggtttgatgaatttgccgatgctgt

SEQ ID NO: 611038 - DNA, 75 bp, synthetic construct
  source 1..75: mol_type = other DNA
gatgcctacgccgggttcaacgagctctaccgcgacggccatataaaggaagccgcgtgctgggcccatgcccgc

SEQ ID NO: 611039 - DNA, 75 bp, synthetic construct
  source 1..75: mol_type = other DNA
gtttcaggggtgtcctgcatgcggatgcgtacgccgggttcaacgagctgtatcgcaatggtgggataacggaag

SEQ ID NO: 611040 - DNA, 75 bp, synthetic construct
  source 1..75: mol_type = other DNA
gtttcagtggtgtcctgcaggcggatgcgtacgccgggttcaacgagctgtatcgcaatggtgggataacggaag

SEQ ID NO: 611041 - DNA, 75 bp, synthetic construct
  source 1..75: mol_type = other DNA
atcaggcgccggaagagatgcgcagcttcctgctggatgccggggcagaatataacggctatgcggctgacctga

SEQ ID NO: 611042 - DNA, 75 bp, synthetic construct
  source 1..75: mol_type = other DNA
atgaacgacatctcttctgacgacatcttcctgctgaaacagcgcctggccgaacaggaagcgctgatccactcc

SEQ ID NO: 611043 - DNA, 75 bp, synthetic construct
  source 1..75: mol_type = other DNA
ggttcagcggtgtcctgcacgcggatgcgtacgccgggttcaacgagctgtatcgcaatggtgggataacggaag

SEQ ID NO: 611044 - DNA, 75 bp, synthetic construct
  source 1..75: mol_type = other DNA
gcttcagaggtgtcctgcaagcggatgcgtacgccgggttcaacgagctgtatcgcaatggtgggataacggaag

SEQ ID NO: 611045 - DNA, 75 bp, synthetic construct
  source 1..75: mol_type = other DNA
atgttcataaaagtgggccacggcaggcaattattcaggcgatcataaaatgctgtacattgatcctacccacgt

SEQ ID NO: 611046 - DNA, 75 bp, synthetic construct
  source 1..75: mol_type = other DNA
acggcagaagaagcactgaagcgaatcagtgaactgtacgccatcgaggatgaaatacggggattaccggagtca

SEQ ID NO: 611047 - DNA, 75 bp, synthetic construct
  source 1..75: mol_type = other DNA
ccgatgacacgccagtcccggtgctgttgccaggtaataagaagacgaagaccgggcggttgtggacgtatgttc

SEQ ID NO: 611048 - DNA, 75 bp, synthetic construct
  source 1..75: mol_type = other DNA
aggaaaaatacaaaggcggttggatccgtaaaatcaacggcaaactgcaaccgcgtatgggtaaccgcgcgatgc

SEQ ID NO: 611049 - DNA, 75 bp, synthetic construct
  source 1..75: mol_type = other DNA
gccgtgctgcccgaactgcggcggttcactgagctatctgggcgaggatacctccgaacagctggagttgatgcg

SEQ ID NO: 611050 - DNA, 75 bp, synthetic construct
  source 1..75: mol_type = other DNA
cgaggataccgccgaacagctggagttgatgcgtagcgccttccgggttatccggacggtacgggaaaaacatgc

SEQ ID NO: 611051 - DNA, 75 bp, synthetic construct
  source 1..75: mol_type = other DNA
gggcgtatgttcgtgatgaccgcaatgccgggtcagcgttggcacctgcagtgtggttcgcttacagcccggaca

SEQ ID NO: 611052 - DNA, 75 bp, synthetic construct
  source 1..75: mol_type = other DNA
tggagccagaaagctacctccgctatgtccttgacgtcatagccgactggccgataaaccgggtcggcgaattgc

SEQ ID NO: 611053 - DNA, 75 bp, synthetic construct
  source 1..75: mol_type = other DNA
cactcagaactggcgaaagcgttcgcatacgccctgaaccagtggccggcgctgacgtactatgcagatgatggc

SEQ ID NO: 611054 - DNA, 75 bp, synthetic construct
  source 1..75: mol_type = other DNA
ctgttgccaggcaataagaaaacgaagaccgggcggttatggacctacgttcgtgacgaccataacgccgggtca

SEQ ID NO: 611055 - DNA, 75 bp, synthetic construct
  source 1..75: mol_type = other DNA
ccgttatcttggcgtgctgctgtacgatgccgacgccattgaacgtgcagccagcaccgagaacgagaaagatct

SEQ ID NO: 611056 - DNA, 75 bp, synthetic construct
  source 1..75: mol_type = other DNA
ggcgcttcggggctatgtcctgagcgacggcaaacaccatgtcgatgataccccggtccagatgctgctgtcggg

SEQ ID NO: 611057 - DNA, 75 bp, synthetic construct
  source 1..75: mol_type = other DNA
tatgcagagcataccccgctgtaccgccagtctgaaatatatagccgccagggtgtggaactgagccgctccctc

SEQ ID NO: 611058 - DNA, 75 bp, synthetic construct
  source 1..75: mol_type = other DNA
ggttcgccctacatcgacgccaccatcagcgataaccgtcaggaattgatcgccaaaatgcaggcggggaaaatt

SEQ ID NO: 611059 - DNA, 75 bp, synthetic construct
  source 1..75: mol_type = other DNA
cctgcagtgaggttcgcttacagcccggacagaaaaggcatccatccgcagactcatcttgcttgcttcagcggt

SEQ ID NO: 611060 - DNA, 75 bp, synthetic construct
  source 1..75: mol_type = other DNA
actgacggcaaactccatgccgatgataccccggtccaggtactgctgccgggtaataagaagacgaagaccggg

SEQ ID NO: 611061 - DNA, 75 bp, synthetic construct
  source 1..75: mol_type = other DNA
aacgcgaaatagaccatctgcaggcacagctggataagctgcgccggatgaacgtcggcagccgctcggaaaaag

SEQ ID NO: 611062 - DNA, 75 bp, synthetic construct
  source 1..75: mol_type = other DNA
cgcgtacgcacttaaccagtggccggcgctgacccgctatgcagaagatggctgggtggaggtgggccctccggt

SEQ ID NO: 611063 - DNA, 75 bp, synthetic construct
  source 1..75: mol_type = other DNA
ctgggtggaaatcgacaacaacatcgctgaaaatgccctgcgggcggtcagtctgggtcgtaaaaacttcctgtt

SEQ ID NO: 611064 - DNA, 75 bp, synthetic construct
  source 1..75: mol_type = other DNA
gctcatgcccgccgaaagatccacgatgtgcacgtccgcatcccgtcagcaccgacggaagaagccctggagcag

SEQ ID NO: 611065 - DNA, 75 bp, synthetic construct
  source 1..75: mol_type = other DNA
aacgcgaaatagaccatctgcaggcacagctggataagctgcgccggatgaacctcggcagcagctcagaaaaag

SEQ ID NO: 611066 - DNA, 75 bp, synthetic construct
  source 1..75: mol_type = other DNA
aacgcgaaatagaccatctgcaggcacagctggataagctgcgccggatgaacatcggcagccgctcagaaaaag

SEQ ID NO: 611067 - DNA, 75 bp, synthetic construct
  source 1..75: mol_type = other DNA
gaaatgccgtaccgctgcccggacattgtctggaacccgtaccgccgtaaattcagtatccttgtgcgtatcctc

SEQ ID NO: 611068 - DNA, 75 bp, synthetic construct
  source 1..75: mol_type = other DNA
aacgcgaaatagaccatctgcaggcacagctggataagctgcgccggatgaacctcggcagcggctcggaaaaag

SEQ ID NO: 611069 - DNA, 75 bp, synthetic construct
  source 1..75: mol_type = other DNA
aacgcgaaatagaccatctgcaggcacagctggataagctgcgccggatgaacctcggcagccgctccgaaaaag

SEQ ID NO: 611070 - DNA, 75 bp, synthetic construct
  source 1..75: mol_type = other DNA
aacgcgaaatagaccatctgcaggcacagctggataagctgcgccggatgaacctcggcagctgctctgaaaaag

SEQ ID NO: 611071 - DNA, 75 bp, synthetic construct
  source 1..75: mol_type = other DNA
atctgcaacccgcactggcacaactggaaaaggccagagccgctcatcttgagaacgcccgcctgatggatgaga

SEQ ID NO: 611072 - DNA, 75 bp, synthetic construct
  source 1..75: mol_type = other DNA
atgaagttgccatcatctttgatagagcaaattcactcaccacgtttacgcaaaaatctcgggattaacaggctt

SEQ ID NO: 611073 - DNA, 75 bp, synthetic construct
  source 1..75: mol_type = other DNA
tagctaaaggattagtaaggcttgttagatctttaggtggaaccgccaaagaatccagcaggacgggaatagttt

SEQ ID NO: 611074 - DNA, 75 bp, synthetic construct
  source 1..75: mol_type = other DNA
atgtacccgatgaactggctctgtagtaaaggcggtgagtgcgaaaccttcatgctggcagaaatgatctgcggc

SEQ ID NO: 611075 - DNA, 75 bp, synthetic construct
  source 1..75: mol_type = other DNA
tatgcagcggtaccaaatatgctacaacccggcgtgtcgaaatatgattttgcggcgggtcgtagccatattgaa

SEQ ID NO: 611076 - DNA, 75 bp, synthetic construct
  source 1..75: mol_type = other DNA
tatgcagcagtgccaaatatgctgcaacccggcgtatcgaaatatgattttgcggcgggtcgtagccatattgaa

SEQ ID NO: 611077 - DNA, 75 bp, synthetic construct
  source 1..75: mol_type = other DNA
acagtcaaaggtgacctggtctgggtagagtttccttatttagatgttaacggtcgaatagacaccagacgccca

SEQ ID NO: 611078 - DNA, 75 bp, synthetic construct
  source 1..75: mol_type = other DNA
gccgggagctggtacaggaatatgacaatctggccgtggtgctgaatttcgaacgtgaacgcctgaaaggggcgt

SEQ ID NO: 611079 - DNA, 75 bp, synthetic construct
  source 1..75: mol_type = other DNA
tgaatgaatgcattcgtgcggagcagtctgccagcgtggtgctctgggaaatcgacctgacagaggtagacgggg

SEQ ID NO: 611080 - DNA, 75 bp, synthetic construct
  source 1..75: mol_type = other DNA
tacagcaacccaccaggcaaaccaagcaagccgatagcgaacttgaggaacaaaggaaggccattcaaagcctga

SEQ ID NO: 611081 - DNA, 75 bp, synthetic construct
  source 1..75: mol_type = other DNA
tttccttttctcaggatagaaaagaaagcattcaagacagaatcaaacaactgattggcagcaggagcctgcgta

SEQ ID NO: 611082 - DNA, 75 bp, synthetic construct
  source 1..75: mol_type = other DNA
cgctaacggagacatagctttcaaggcaggaggaacctttcaggccactgctggcaacttcgatttcaagaaagg

SEQ ID NO: 611083 - DNA, 75 bp, synthetic construct
  source 1..75: mol_type = other DNA
cggcccttccgggaatgcagaccaccgcagaggcagagcacgcgtactggctgagccgcgaaaagtcatacgtga

SEQ ID NO: 611084 - DNA, 75 bp, synthetic construct
  source 1..75: mol_type = other DNA
acgaaggataagtgcagcaaatgcctgagtggttgcaagttccgcaataatgtcggcaattttggcggctacctt

SEQ ID NO: 611085 - DNA, 75 bp, synthetic construct
  source 1..75: mol_type = other DNA
aggtgtcctgagcgacgagctgaaacagcgccacattgagcgcgtggcacgccgggagctggtacaggaatatga

SEQ ID NO: 611086 - DNA, 75 bp, synthetic construct
  source 1..75: mol_type = other DNA
ttcacgaccgaccctgacggtttctaacctggacggtatggtcaccggaatggcggaagatgtgcagagtctggt

SEQ ID NO: 611087 - DNA, 75 bp, synthetic construct
  source 1..75: mol_type = other DNA
ttcacgaccaacgctgacggtttctaacctggacggtatggtcaccggaatggcggaagatatgcagagtctggt

SEQ ID NO: 611088 - DNA, 75 bp, synthetic construct
  source 1..75: mol_type = other DNA
ggcagcgcaagggattgtccagatgattggcatttttatcgacaccctggtcatctgtacggcaagcgccatgct

SEQ ID NO: 611089 - DNA, 75 bp, synthetic construct
  source 1..75: mol_type = other DNA
gcccggtgtttgatccgttgcgttatccggatatcggtcgccagctttctccagacgcgtgggatgatgtttcgc

SEQ ID NO: 611090 - DNA, 75 bp, synthetic construct
  source 1..75: mol_type = other DNA
cccggatgcggtccgggagcaactgcatcagatgctgcgcgataaacgacatacccaggaagaaatccgcgaagc

SEQ ID NO: 611091 - DNA, 75 bp, synthetic construct
  source 1..75: mol_type = other DNA
agtgcagcgaactgagtgcggtcagtgcctcctttgtgttgtccacaccgacggaaacggatggtgctgtttttc

SEQ ID NO: 611092 - DNA, 75 bp, synthetic construct
  source 1..75: mol_type = other DNA
atcggcatttttatcgacacgctggtcatctgtacggcaagcgccatgctgatattgctggccggaaacggcgta

SEQ ID NO: 611093 - DNA, 75 bp, synthetic construct
  source 1..75: mol_type = other DNA
gcagtaaatgcatgcgcgggtgtgagatgcgcggcatggtggctaatttcggcggtttcctttccattaataaac

SEQ ID NO: 611094 - DNA, 75 bp, synthetic construct
  source 1..75: mol_type = other DNA
tcggtgataaaatgatttcaatcaatctatttgaaccgccccgggaatcctggagactaaacttcctgagaaaga

SEQ ID NO: 611095 - DNA, 75 bp, synthetic construct
  source 1..75: mol_type = other DNA
cagatgcccccggcggtctggttcgcgtacagtccggaccggaaaggtatccatccacaaaatcacctggccggt

SEQ ID NO: 611096 - DNA, 75 bp, synthetic construct
  source 1..75: mol_type = other DNA
actgaacgaaacacatcagctatttaaagattttgtaaaacgtatgcgtccgtctctggatattgaagaggtggc

SEQ ID NO: 611097 - DNA, 75 bp, synthetic construct
  source 1..75: mol_type = other DNA
gtaataaacgccagcgtggcgagttacgggttaacaatctcagcgaacaatataaggagatgaaagaagaactgg

SEQ ID NO: 611098 - DNA, 75 bp, synthetic construct
  source 1..75: mol_type = other DNA
aagcagcaaaagcgaaagccaaactgggcgaggtggcaactgacagtaaacctcgcgtctgggtgctggatttta

SEQ ID NO: 611099 - DNA, 75 bp, synthetic construct
  source 1..75: mol_type = other DNA
ccatgccgatgataccccggtccaggtactgctgccgggtaataagaagacgaagaccgggcggttgtgggcgta

SEQ ID NO: 611100 - DNA, 75 bp, synthetic construct
  source 1..75: mol_type = other DNA
tcagtgcgatgccatcgtgcaggccccgcgcctcacggcccatcgagcggggtatcgcaggaccggggctgctgg

SEQ ID NO: 611101 - DNA, 75 bp, synthetic construct
  source 1..75: mol_type = other DNA
tcaaagtatgcagagcacaccccgctgtaccgccagtctgaaatgtacggccgccagggcgtggagctgagtcgt

SEQ ID NO: 611102 - DNA, 75 bp, synthetic construct
  source 1..75: mol_type = other DNA
gccggttcacagatgcccccggcggtctggttcgcgtacagtccggaccggaaaggtatccatccacaaaatcac

SEQ ID NO: 611103 - DNA, 75 bp, synthetic construct
  source 1..75: mol_type = other DNA
acaacatcgctgaaaatgcgctgcggacggtcagtctgggtcgtaaaaacttcctgttcttcggttctgaccacg

SEQ ID NO: 611104 - DNA, 75 bp, synthetic construct
  source 1..75: mol_type = other DNA
caaactccatgctgacgatatgcctgtcccggtgctgttgccgggcaataagaagacgaagaccgggcgcttatg

SEQ ID NO: 611105 - DNA, 75 bp, synthetic construct
  source 1..75: mol_type = other DNA
gctgccagtggcggttacatgatggcctgtgtggcggacaaaattgtttccgcaccgtttgctattgtgggttcc

SEQ ID NO: 611106 - DNA, 75 bp, synthetic construct
  source 1..75: mol_type = other DNA
gtgaatttcgttgcgggcaatccggaggcggacccggagcaggagctgagtgaccgctgggtggtggagcagatg

SEQ ID NO: 611107 - DNA, 75 bp, synthetic construct
  source 1..75: mol_type = other DNA
cgttttctggatgcggtgaattttgtggcggggaatccggaggccgacccggagcaggagctgacggaccggtgg

SEQ ID NO: 611108 - DNA, 75 bp, synthetic construct
  source 1..75: mol_type = other DNA
tcgcaccggaagactggctgcgggcagagatgcagggggagattgtggcactggtccacagtcatcccggtggct

SEQ ID NO: 611109 - DNA, 75 bp, synthetic construct
  source 1..75: mol_type = other DNA
atcgacctgaccgaggtaggcggggatcgctactttttctgcaatgagcagaacgagaaaggagagtctgtcacc

SEQ ID NO: 611110 - DNA, 75 bp, synthetic construct
  source 1..75: mol_type = other DNA
atgtcagaaactattacggtgaattgccctacctgcgggaaaacggtggtttggggtgaagtcagcccgtttcgg

SEQ ID NO: 611111 - DNA, 75 bp, synthetic construct
  source 1..75: mol_type = other DNA
cgaaaaagcggatgaccttaatgaagacgtcaccgcaagtctgagcgccctttttgcgatgttgccgggttttga

SEQ ID NO: 611112 - DNA, 75 bp, synthetic construct
  source 1..75: mol_type = other DNA
tttaggtgaagtgcaaatctccctcaaagtggatgataaccaggcgcaaatccagatggtttcgccgcatcagca

SEQ ID NO: 611113 - DNA, 75 bp, synthetic construct
  source 1..75: mol_type = other DNA
cgcattgtttaaccaaggtgggacttgtggaattgttgtctgaatatggtttgtttttggcgaaaatcgtcaccg

SEQ ID NO: 611114 - DNA, 75 bp, synthetic construct
  source 1..75: mol_type = other DNA
ttgcgatgttgccgggttttgacaatacgcccaaagtgactgatgcgccgtcaaccgtgttaccgacagagaaac

SEQ ID NO: 611115 - DNA, 75 bp, synthetic construct
  source 1..75: mol_type = other DNA
aaatcatgaacctctggcgggtgaagacgacgatgcgctacccgttcccgtctctttacaagggcgcgtaacagg

SEQ ID NO: 611116 - DNA, 75 bp, synthetic construct
  source 1..75: mol_type = other DNA
gctcagacgatgacgttggctgcggtggctgacaaaaatacgacaaaagacgaaaaagcggatgatcttaatgaa

SEQ ID NO: 611117 - DNA, 75 bp, synthetic construct
  source 1..75: mol_type = other DNA
agcggcaccagtggaggttacgcgccagcatatatccgttcaaggcgggatacagatgatgctcaatggtctgga

SEQ ID NO: 611118 - DNA, 75 bp, synthetic construct
  source 1..75: mol_type = other DNA
cgtcactggaggggtggctgcgggagaaacagaaaaccctctcaaggcactcagaactggcgaaggcgttcgggt

SEQ ID NO: 611119 - DNA, 75 bp, synthetic construct
  source 1..75: mol_type = other DNA
cagatcggtcagttgtacgccatagaggcggatataaggggaatgccggcagagcagcggcttgctgaacgtcag

SEQ ID NO: 611120 - DNA, 75 bp, synthetic construct
  source 1..75: mol_type = other DNA
ggtcccgttaaggcttatcttggcatctggtctaaagcaacatccaccaacgcaacactggagaaaaatttcccg

SEQ ID NO: 611121 - DNA, 75 bp, synthetic construct
  source 1..75: mol_type = other DNA
gtggtgtactgcaggcggatgcatacgccgggttcaacgagctgtaccgggatggccggataacggaagccgcct

SEQ ID NO: 611122 - DNA, 75 bp, synthetic construct
  source 1..75: mol_type = other DNA
ctggggatggggctactaatttctacgattacccgcaaccagttcaatgccgctcaggtggccctgaacgcggct

SEQ ID NO: 611123 - DNA, 75 bp, synthetic construct
  source 1..75: mol_type = other DNA
cgcatttcaggaaatccgggaagccgcacgattacgacaagacgtgtgccaattatcgacgaagctcagacatgg

SEQ ID NO: 611124 - DNA, 75 bp, synthetic construct
  source 1..75: mol_type = other DNA
cctgatcgggacgtgcaaactgaatgacgtggatccagaaagctaccttcgccatgtgcctggcgtcatagcaga

SEQ ID NO: 611125 - DNA, 75 bp, synthetic construct
  source 1..75: mol_type = other DNA
tgtaccgggatggccggataacggaagccgcctgttgggctcacgcccgccgtaaaacccacgatgtgcacgttc

SEQ ID NO: 611126 - DNA, 75 bp, synthetic construct
  source 1..75: mol_type = other DNA
agtttggctgaaataacaaatccccggattcggggacttgtgtataagagacagatcgaacgggggatcgccgga

SEQ ID NO: 611127 - DNA, 75 bp, synthetic construct
  source 1..75: mol_type = other DNA
cgaaaaacgaaaccgctgttgaaatccctggaaagctggttgcgtgaaaagatgaagaccctgtcgcgacactca

SEQ ID NO: 611128 - DNA, 75 bp, synthetic construct
  source 1..75: mol_type = other DNA
gccggaatggccttccagccgtgttgatgaactcctgctgcatattagcatggaggtgttcggtgagtgccggac

SEQ ID NO: 611129 - DNA, 75 bp, synthetic construct
  source 1..75: mol_type = other DNA
tactatactgacgacggctgggccgaggctgataacaacatagctgagaatgcgctgcggatggtcagtctgggc

SEQ ID NO: 611130 - DNA, 75 bp, synthetic construct
  source 1..75: mol_type = other DNA
actaaccccgctgtcggctacgactctgacctgctggtgcgctgcggcgcaacggtgatgttctccgaagtcact

SEQ ID NO: 611131 - DNA, 75 bp, synthetic construct
  source 1..75: mol_type = other DNA
taagctccatgctgatgacacgcctgtcccggtgctgttgccaggcaataagaaaacgaagaccgggcggttatg

SEQ ID NO: 611132 - DNA, 75 bp, synthetic construct
  source 1..75: mol_type = other DNA
ggtcccgttaaggcttatctggggatctggtctaaagctacttcaactaacgcaacactggagaaaaatttcccg

SEQ ID NO: 611133 - DNA, 75 bp, synthetic construct
  source 1..75: mol_type = other DNA
ccgcggcgctgatggacactcatcagcaaaaacagtggcacaaagcgcagaagaaaaagcacaagcaagaagcga

SEQ ID NO: 611134 - DNA, 75 bp, synthetic construct
  source 1..75: mol_type = other DNA
gcaaaaacagtggcacaaagcgcagaagaaaaagcacaagcaagaagcgaaagcagcaaaagcgaaagctaaact

SEQ ID NO: 611135 - DNA, 75 bp, synthetic construct
  source 1..75: mol_type = other DNA
taaaggtttgctgctggggctgtttttcatcggcgttggcatgtcgatagactttggcacgctgcttgaaaatcc

SEQ ID NO: 611136 - DNA, 75 bp, synthetic construct
  source 1..75: mol_type = other DNA
ccatcgtgcaggcacctgcaccttcgcggcccatcgagcggggtatcgccggaccggggctgctggcccgcgtgc

SEQ ID NO: 611137 - DNA, 75 bp, synthetic construct
  source 1..75: mol_type = other DNA
gacagaaaaggcatccatccgcagacccatcttgcggggttcagtggtgtactgcaggcggatgcatacgccggg

SEQ ID NO: 611138 - DNA, 75 bp, synthetic construct
  source 1..75: mol_type = other DNA
ggagtggagccagaaagctacctccgctatgtccttgacgtcatagccgactggccgataaaccgggtcggcgaa

SEQ ID NO: 611139 - DNA, 75 bp, synthetic construct
  source 1..75: mol_type = other DNA
taaggggaatgacggcggagcagcgccttgccgaacgtcagttgaaaacgaaaccgctgctgaaatccctggaaa

SEQ ID NO: 611140 - DNA, 75 bp, synthetic construct
  source 1..75: mol_type = other DNA
atgaccggcagtacagcgtccgttgcgtcagaccgcacccgtaagccgttccctgaatcactaccccgtgacgaa

SEQ ID NO: 611141 - DNA, 75 bp, synthetic construct
  source 1..75: mol_type = other DNA
ggtgtatgttcgtgacgaccgtaacgccgggtcaacgctggcgccggcggtgtggttcgcttacagcccggacag

SEQ ID NO: 611142 - DNA, 75 bp, synthetic construct
  source 1..75: mol_type = other DNA
gcgccatatcctgagcgtactgccggaatggccttccaaccgagttgatgaactcctgccatggaacgtagtact

SEQ ID NO: 611143 - DNA, 75 bp, synthetic construct
  source 1..75: mol_type = other DNA
atggaatttcacgaaaacagagctaaagcgtttatcggcttggtgcaactctggcaggcggtgaggcgttggcgg

SEQ ID NO: 611144 - DNA, 75 bp, synthetic construct
  source 1..75: mol_type = other DNA
aaaaagctgaacttgaacgccttcatgattccagtcgtgacgggcaagtcagagatcgtcttaaagccattcttc

SEQ ID NO: 611145 - DNA, 75 bp, synthetic construct
  source 1..75: mol_type = other DNA
gggatgcagcgatccggcgcagatgagctggctggatcaaccgccagccgtgaatttacaggccgcgaaacgcct

SEQ ID NO: 611146 - DNA, 75 bp, synthetic construct
  source 1..75: mol_type = other DNA
cggcggcaaatgcaggcccgacgggtgttacagcagatgagtgatgaacggttgagggacactgggttacgctgg

SEQ ID NO: 611147 - DNA, 75 bp, synthetic construct
  source 1..75: mol_type = other DNA
cggcggcaaatgcaggcccgacgggtgttacagcagatgagtgatgaacggttgagggaaactgggttaagctgg

SEQ ID NO: 611148 - DNA, 75 bp, synthetic construct
  source 1..75: mol_type = other DNA
cggcggcaaatgcaggcccgacgggtgttacagcagatgagtgatgaacggttgagggaaaatgggttacgctgg

SEQ ID NO: 611149 - DNA, 75 bp, synthetic construct
  source 1..75: mol_type = other DNA
ttttgtagagccggaggaaacagaccagacggtttaaatgagccggttactcttgttatgccattaacctcagat

SEQ ID NO: 611150 - DNA, 75 bp, synthetic construct
  source 1..75: mol_type = other DNA
gccagcggcgacagtggaggattgctttctgagttattgcttttggggtttaatagtggtcctcaagctcttagc

SEQ ID NO: 611151 - DNA, 75 bp, synthetic construct
  source 1..75: mol_type = other DNA
acacctcgtattcacttcccctgaatctgggtatcggcggtgctgtggcaaagctcaccaacctggactggcaga

SEQ ID NO: 611152 - DNA, 75 bp, synthetic construct
  source 1..75: mol_type = other DNA
gtggttgccggaatatgactggccagcggttgatgatgagagtttgttggcgacgctggaaacgtggctactgcc

SEQ ID NO: 611153 - DNA, 75 bp, synthetic construct
  source 1..75: mol_type = other DNA
caacctggctgccgctgcaactgctggcgcatcccggcattaacgggaaagttatcctgctggagccgcgtcgtc

SEQ ID NO: 611154 - DNA, 75 bp, synthetic construct
  source 1..75: mol_type = other DNA
tttgagcgccttctggaaaggagcgtattgcgatgtgcaaaaagagatgaaagggcgttatcccaaacacgtctg

SEQ ID NO: 611155 - DNA, 75 bp, synthetic construct
  source 1..75: mol_type = other DNA
cggcggcaaatgcaggcccgacgggtgttacagcagatgagtgatgaacggttgagggagactgggttaggctgg

SEQ ID NO: 611156 - DNA, 75 bp, synthetic construct
  source 1..75: mol_type = other DNA
aagctacctacgcaatgtacttgacgtcatagctgactggccgctgaaccgggtcagcgaactgctcccctggcg

SEQ ID NO: 611157 - DNA, 75 bp, synthetic construct
  source 1..75: mol_type = other DNA
aagctacctacgcaatgtacttgacgtcatagctgactggccgatgaaccgggtcagcgaactgctcccatggcg

SEQ ID NO: 611158 - DNA, 75 bp, synthetic construct
  source 1..75: mol_type = other DNA
aagctacctacgcaatgtacttgacgtcatagcagactggccgatgaaccgggtcagcgaactgctcccttggcg

SEQ ID NO: 611159 - DNA, 75 bp, synthetic construct
  source 1..75: mol_type = other DNA
aagctacctacgcaatgtacttgacgtcatagcggactggccggtgaaccgggtcagcgaactgctcccttggcg

SEQ ID NO: 611160 - DNA, 75 bp, synthetic construct
  source 1..75: mol_type = other DNA
aagctacctacgcaatgtacttgacgtcatagccgactggccgctgaaccgggtcagcgaactgctcccttggcg

SEQ ID NO: 611161 - DNA, 75 bp, synthetic construct
  source 1..75: mol_type = other DNA
aagctacctacgcaatgtacttgacgtcatagctgactggccggtgaaccgggtcagcgaactgctcccgtggcg

SEQ ID NO: 611162 - DNA, 75 bp, synthetic construct
  source 1..75: mol_type = other DNA
aacgccaaaggcagtaaaagcagcctatgacaatgctgagaaacgtctgcagaaagaccagaacggtggtgatat

SEQ ID NO: 611163 - DNA, 75 bp, synthetic construct
  source 1..75: mol_type = other DNA
tcgatggtgatgaccccgcagtattcagaccaatacaaaaatacatcaatggcacatggtataacgtcgcacagg

SEQ ID NO: 611164 - DNA, 75 bp, synthetic construct
  source 1..75: mol_type = other DNA
cggcggcaaatgcaggcccgacgggtgttacagcagatgagtgatgaacggttgagggagagtgggttacgctgg

SEQ ID NO: 611165 - DNA, 75 bp, synthetic construct
  source 1..75: mol_type = other DNA
agccaactaccgcttttttatggtgcgcatttcaggaaatccgggaagccgcacgatcacaacaagacgagtacc

SEQ ID NO: 611166 - DNA, 75 bp, synthetic construct
  source 1..75: mol_type = other DNA
accgacaggttatccagtctggactggcagacctacgactttgtgccgggcagcatgataactgtcagactctcc

SEQ ID NO: 611167 - DNA, 75 bp, synthetic construct
  source 1..75: mol_type = other DNA
gaacatccagtgctcttggcggtaattcgattgttttgggtgataatgacacgggctttaaacaaaatggtgatg

SEQ ID NO: 611168 - DNA, 75 bp, synthetic construct
  source 1..75: mol_type = other DNA
atacgccgtttttcaatctcaactattttgctttagcagcgaaagagcatcaaagattactctcaattgcaaaca

SEQ ID NO: 611169 - DNA, 75 bp, synthetic construct
  source 1..75: mol_type = other DNA
gattgaaatgcagtctcgtgttgccaagatttatggtgaccgtcaggcgatggcagccggtgagaaactgttcga

SEQ ID NO: 611170 - DNA, 75 bp, synthetic construct
  source 1..75: mol_type = other DNA
tacgccacgctggttgatgaaggcattccggttcgcctgtcgggtgaagactccggtcgcggtaccttcttccac

SEQ ID NO: 611171 - DNA, 75 bp, synthetic construct
  source 1..75: mol_type = other DNA
cacaggccgggtggttgaatccatgctgaaagccaaaccccatccggagctggcttaccgtgcagtcctgggtct

SEQ ID NO: 611172 - DNA, 75 bp, synthetic construct
  source 1..75: mol_type = other DNA
gttgaagcgtgcgaaggtcaggacatgatgtcatggttaaatgcccacagccgttgcctgaccttcctgggcggc

SEQ ID NO: 611173 - DNA, 75 bp, synthetic construct
  source 1..75: mol_type = other DNA
ggacagacgctttatcgacaatctgctgcgtcatcatcgggataacgttgagcttccgttatcccgcctgggcga

SEQ ID NO: 611174 - DNA, 75 bp, synthetic construct
  source 1..75: mol_type = other DNA
tgttgcagcagtttgctcacgtcaaggattttgtctggtgccaggaagagccgctcaaccagggcgcatggtact

SEQ ID NO: 611175 - DNA, 75 bp, synthetic construct
  source 1..75: mol_type = other DNA
ccagccatcggtgaaatcgacgagcttgatccgaagggcgtgaagcgcgtagtgatgtgttctggtaaggtttat

SEQ ID NO: 611176 - DNA, 75 bp, synthetic construct
  source 1..75: mol_type = other DNA
tccaacagcgtatcgagtctggtcgcgcgactttcaatagcgaagagaaaaaacgcttcttaagcgaactgaccg

SEQ ID NO: 611177 - DNA, 75 bp, synthetic construct
  source 1..75: mol_type = other DNA
caagctggagcaggaaaaagtggcgacgctggaagatgccaccgagatggttaacctgtaccgcgatgcgctgga

SEQ ID NO: 611178 - DNA, 75 bp, synthetic construct
  source 1..75: mol_type = other DNA
cggtgcaaaattccctggtgcaaaacgcttctcgctggaaggtggtgacgcgttgatcccgatgctcaaagagat

SEQ ID NO: 611179 - DNA, 75 bp, synthetic construct
  source 1..75: mol_type = other DNA
cagtgaccgggcagggcgtggttcaggaaactctgaacatgtcgaaagcgcgtggttatgaagttggcggtacgg

SEQ ID NO: 611180 - DNA, 75 bp, synthetic construct
  source 1..75: mol_type = other DNA
ccggaacggctggaaaaggcctgttacgttgccctgcactataacgccccggacagacgctttatcgacaatctg

SEQ ID NO: 611181 - DNA, 75 bp, synthetic construct
  source 1..75: mol_type = other DNA
aactttggcagtcgttccgaaaaagtctcccgccgtatcgcacaaatggaagccgatctgaaccggcttcagaaa

SEQ ID NO: 611182 - DNA, 75 bp, synthetic construct
  source 1..75: mol_type = other DNA
tctttccttcgcaatggcaccgcaaacgctgcccgttgctgaagaatctttgcctcttcaggcgcaacatcttgc

SEQ ID NO: 611183 - DNA, 75 bp, synthetic construct
  source 1..75: mol_type = other DNA
gatgcatattgcttctggtattgcgcaatgcctcaccatcatcggtattcctgtcggcattgcgaactttaaaat

SEQ ID NO: 611184 - DNA, 75 bp, synthetic construct
  source 1..75: mol_type = other DNA
acggaatacaaagccgtgaaggttggccctgactatcacgttgaatatgcccgtcactggtactccgttccacac

SEQ ID NO: 611185 - DNA, 75 bp, synthetic construct
  source 1..75: mol_type = other DNA
cctgagcttccgttatcccgccagggagaacaatatccggcatatgcttcagaacatgaaaacctgagtggcccg

SEQ ID NO: 611186 - DNA, 75 bp, synthetic construct
  source 1..75: mol_type = other DNA
acggtactgaatattttctggctgattttctttggctggtggttatgcctgatgcacattgcgacaggtatcgca

SEQ ID NO: 611187 - DNA, 75 bp, synthetic construct
  source 1..75: mol_type = other DNA
ctgccgaacagctggagctgatgcgcagcgccttccgggttatccggacagtacgtgaaaaacatgcctgtactc

SEQ ID NO: 611188 - DNA, 75 bp, synthetic construct
  source 1..75: mol_type = other DNA
catggaggagagcggggagcgctgctgtacagcctgatcgggacatgcaaactgaacgtaagcgactcgtcagaa

SEQ ID NO: 611189 - DNA, 75 bp, synthetic construct
  source 1..75: mol_type = other DNA
aaagagagcgatacgctgactggtagggtgtatgacccggcagtacagcgtccgttgcgtcagacccgcacccgt

SEQ ID NO: 611190 - DNA, 75 bp, synthetic construct
  source 1..75: mol_type = other DNA
tagccccgttcttggggatggcgtggatcgcacaacggaaaacaacatcttttcgacagcttacaataattacct

SEQ ID NO: 611191 - DNA, 75 bp, synthetic construct
  source 1..75: mol_type = other DNA
aagctgctcatccccgataacctcagaagcgcagtgaaaaaggccgatcgatatgagcctgtcatcaacgacagt

SEQ ID NO: 611192 - DNA, 75 bp, synthetic construct
  source 1..75: mol_type = other DNA
aggcggatgcgtacgccgggttcaacgaactgtaccgcaatggacagataacggaagctgcctgctgggctcatg

SEQ ID NO: 611193 - DNA, 75 bp, synthetic construct
  source 1..75: mol_type = other DNA
tggaacgttatctgcaactttgtgctgaacaaaacatgcaggtgtgcgtaccgtctaccccggcacaggtttacc

SEQ ID NO: 611194 - DNA, 75 bp, synthetic construct
  source 1..75: mol_type = other DNA
cattcgctggcggaaaatgaccggtggcgggatgcgccagtccggcattctggctgccgccgggatgtatgccct

SEQ ID NO: 611195 - DNA, 75 bp, synthetic construct
  source 1..75: mol_type = other DNA
tggtaacacatctcgacgtctcgcgtgaacaactggctgaagtcgccgcccactggcgcgctttcctgacgcgtt

SEQ ID NO: 611196 - DNA, 75 bp, synthetic construct
  source 1..75: mol_type = other DNA
cgacatctcctgctaaaacagcgcctggccgaacaggaagcgctgatccacgccctgcaggaaaagctgagcaac

SEQ ID NO: 611197 - DNA, 75 bp, synthetic construct
  source 1..75: mol_type = other DNA
cagatgctgaaatcgctggcagatcactataagttcgacgtcgaagcgccgtggggcagcctgagcgcgaacgtg

SEQ ID NO: 611198 - DNA, 75 bp, synthetic construct
  source 1..75: mol_type = other DNA
gcttacggctgcgaactgaaagagatcacgcaatattgtgattcgttcaccatttgtctgtcgaaaggtcttggt

SEQ ID NO: 611199 - DNA, 75 bp, synthetic construct
  source 1..75: mol_type = other DNA
tacatgaaagcgagaaacgtgctgattaacgcctcgccgattgtccgcctggtgacgcatcttgacgtctcgcgc

SEQ ID NO: 611200 - DNA, 75 bp, synthetic construct
  source 1..75: mol_type = other DNA
aaagaaaaactttatgttcttcggcagcgatcacggcggcgagcgaggagcactgttgtacgggctgatcggcac

SEQ ID NO: 611201 - DNA, 75 bp, synthetic construct
  source 1..75: mol_type = other DNA
gggaaaattacaccctacactgcatgaaaaccttctgcttcttcccggacatttagatgtttcggacttagattc

SEQ ID NO: 611202 - DNA, 75 bp, synthetic construct
  source 1..75: mol_type = other DNA
gatcggcatgacgctggcgctctcatcaacggcgattgccatgcaggcgatgaatgaacgcaatctgatggtgac

SEQ ID NO: 611203 - DNA, 75 bp, synthetic construct
  source 1..75: mol_type = other DNA
tctcccgtcgtatagcacagatggaagctgacctgaaggcacttcagaaagaaagtgatacccttaccggtcggg

SEQ ID NO: 611204 - DNA, 75 bp, synthetic construct
  source 1..75: mol_type = other DNA
gaggcagagataaggggaatgacggcggaacagcgccttgccgaacgtcagttgaaaacgaaaccgctgctgaaa

SEQ ID NO: 611205 - DNA, 75 bp, synthetic construct
  source 1..75: mol_type = other DNA
agcaggcatatcatgtcccgatgtttatctggtatagccccgttcttggggatggcgtggatcgcacaacggaaa

SEQ ID NO: 611206 - DNA, 75 bp, synthetic construct
  source 1..75: mol_type = other DNA
ctgtcagggcgacggcgtgatcaaagtggagatgcacttcctgccggacatttacgtaccgtgcgaccagtgcaa

SEQ ID NO: 611207 - DNA, 75 bp, synthetic construct
  source 1..75: mol_type = other DNA
acgccgggttcaacgagctgtatcgcaatggtgggataacggaagctgcctgctgggctcatgcccgccgaaaga

SEQ ID NO: 611208 - DNA, 75 bp, synthetic construct
  source 1..75: mol_type = other DNA
tgagcatcggtcatgcgatggagtttttcaataatctcaaactcgctggacaacgcgcgaagattgcggaaaaaa

SEQ ID NO: 611209 - DNA, 75 bp, synthetic construct
  source 1..75: mol_type = other DNA
tctggcaaggaaaatatcgaattcaaatacatgaacgatcgtggcgatacgtctatccgccgccatccgttcgaa

SEQ ID NO: 611210 - DNA, 75 bp, synthetic construct
  source 1..75: mol_type = other DNA
ccctgttcttcggctctggccatggtggtgagcggggagcgctactgtacagcctgatcgggacgtgcaaactga

SEQ ID NO: 611211 - DNA, 75 bp, synthetic construct
  source 1..75: mol_type = other DNA
gtcatgctgcccggaatgtggaggctcgctaagctatctgggtgaggatgccgccgaacagctggagctgatgcg

SEQ ID NO: 611212 - DNA, 75 bp, synthetic construct
  source 1..75: mol_type = other DNA
gctgcgccagacccggacccgcaaaccgttccctgagtcactcccccgggatgagaagcggctgctgccgacgga

SEQ ID NO: 611213 - DNA, 75 bp, synthetic construct
  source 1..75: mol_type = other DNA
gccgcgctgtccggaccacgacgtcccgctggcggcgcaaaccgtcagccagatggtggataacgtgctgtcgca

SEQ ID NO: 611214 - DNA, 75 bp, synthetic construct
  source 1..75: mol_type = other DNA
atcaccgaaatccacgactatttgcgtttgttgttcgcccgcgtcggcgagccgcgctgtccggaccacgacgtc

SEQ ID NO: 611215 - DNA, 75 bp, synthetic construct
  source 1..75: mol_type = other DNA
tgagcatcggtcatgcgatggaattcttcaacaatctcaaactcgcaggtcagcgggcgaagattgcggaaaaaa

SEQ ID NO: 611216 - DNA, 75 bp, synthetic construct
  source 1..75: mol_type = other DNA
ccgtctggcgagccagattggtgcgggcctggttggcgttatgtatgtactggacgagccgtctatcggcctgca

SEQ ID NO: 611217 - DNA, 75 bp, synthetic construct
  source 1..75: mol_type = other DNA
gaagtggtggttgatcgcttcaaggtgcgtgacgatctcacccaacgtcttgccgagtcgtttgaaaccgcgctg

SEQ ID NO: 611218 - DNA, 75 bp, synthetic construct
  source 1..75: mol_type = other DNA
aatacatgaacgatcgtggcgatacctccattcgtcgtcatccgttcgaaggcgtgctacacaatatggagcgcc

SEQ ID NO: 611219 - DNA, 75 bp, synthetic construct
  source 1..75: mol_type = other DNA
gccgactatcggcacgtcgccttctggcagcgactacgttatttttgccgcctttatctgcaaagtagtcaggaa

SEQ ID NO: 611220 - DNA, 75 bp, synthetic construct
  source 1..75: mol_type = other DNA
ttctgcgtccaggatcggatgctcgcaaaagccgccgccatattcgcgcgctgcgccgggattttgtcgatcaac

SEQ ID NO: 611221 - DNA, 75 bp, synthetic construct
  source 1..75: mol_type = other DNA
tgcgctgctccaccagcaattacgtatgaccagtgtcatctccagcctgcgacgtatgttgctcaactggccctc

SEQ ID NO: 611222 - DNA, 75 bp, synthetic construct
  source 1..75: mol_type = other DNA
gccactgcgcttttaaccgcgttgaaaaacatgcatgcccgtttactggaacatgccagcttgctctggcagcct

SEQ ID NO: 611223 - DNA, 75 bp, synthetic construct
  source 1..75: mol_type = other DNA
gcaatttgccgtggtttaaagccacgctggcacaatggcgatatgcattacgtaacaccattgccatgtgcctgg

SEQ ID NO: 611224 - DNA, 75 bp, synthetic construct
  source 1..75: mol_type = other DNA
actctactccgccgtcgcagcaccgtttaagtcgttgtcacttctgatgcgcacgctggtgttactttcgctatt

SEQ ID NO: 611225 - DNA, 75 bp, synthetic construct
  source 1..75: mol_type = other DNA
gtctcaacccactgctcttactaatgcgcttaatgttatgtgccatttatacaatggttttgatgaaggaaatat

SEQ ID NO: 611226 - DNA, 75 bp, synthetic construct
  source 1..75: mol_type = other DNA
atcatcagtactatcgtattttatccggcgaatcccgtccattccctagcatatatgaggctgtttccgaacaga

SEQ ID NO: 611227 - DNA, 75 bp, synthetic construct
  source 1..75: mol_type = other DNA
attcgcactaatactctgcaggatgccgcaattaatcttgctggttgcctgcaatatgcataccgtaaattaatc

SEQ ID NO: 611228 - DNA, 75 bp, synthetic construct
  source 1..75: mol_type = other DNA
ggcgatcccgtttgataacgtcgacgacgagcaaattcaaaagccgcagcgttggaatccggcggatctgggacg

SEQ ID NO: 611229 - DNA, 75 bp, synthetic construct
  source 1..75: mol_type = other DNA
ccgataccatcaaattgatgaatcagcgatacttgccagaacccttggtttggctattaacaactgctatcactc

SEQ ID NO: 611230 - DNA, 75 bp, synthetic construct
  source 1..75: mol_type = other DNA
ggtatttcagcagttccatttgatcccgttcttaactgcgctggaaaacatcatgctcgcccagcattaccacag

SEQ ID NO: 611231 - DNA, 75 bp, synthetic construct
  source 1..75: mol_type = other DNA
gccgtggttttttcttttgagcatgtcggcgtggcttggcttttgtacctgggcctgtgcgcacttcacgaataa

SEQ ID NO: 611232 - DNA, 75 bp, synthetic construct
  source 1..75: mol_type = other DNA
aatccgagcaactgataagactgaacgcaacatggcaaacgttaagccaggtatgggctgcgcgtgagcttattg

SEQ ID NO: 611233 - DNA, 75 bp, synthetic construct
  source 1..75: mol_type = other DNA
gcttccctgcatttttactgacgactcactactgggaaggtcgttggctgatggatatggccagaattgatgatc

SEQ ID NO: 611234 - DNA, 75 bp, synthetic construct
  source 1..75: mol_type = other DNA
accggcagcagattgactccgcccatgaaatcgttcttaaagaacagcaggcggttcaggagtggcagaggctgg

SEQ ID NO: 611235 - DNA, 75 bp, synthetic construct
  source 1..75: mol_type = other DNA
atacaagaaatcatcccagaatgagacagagtttccaggaataaaacctccggcatcagagagtgaaattaatat

SEQ ID NO: 611236 - DNA, 75 bp, synthetic construct
  source 1..75: mol_type = other DNA
tcttacagatgcgcttaatattatgtgccatttatacaatggttttgatgaaggaaatatcagcctgaaaacctg

SEQ ID NO: 611237 - DNA, 75 bp, synthetic construct
  source 1..75: mol_type = other DNA
atgcaacaaaagtatgatcgtgttttatccggcgaatcccacccattccctggcatatacgaggcggtttccgaa

SEQ ID NO: 611238 - DNA, 75 bp, synthetic construct
  source 1..75: mol_type = other DNA
gctcgtaaaagccgccgccatattcgcgcgctgcgccgggattttgtcgatcagctaagccgccatccaacactg

SEQ ID NO: 611239 - DNA, 75 bp, synthetic construct
  source 1..75: mol_type = other DNA
caaagcagtcaggaattacatcgtctgcaaagcggcgtagatgatcatgccaaactcccacggacatccggcctg

SEQ ID NO: 611240 - DNA, 75 bp, synthetic construct
  source 1..75: mol_type = other DNA
taagccgccatccaaccctgagtgaaagcgaatttgaatcgctcacttatcaccacgttagtcagttgagcaaca

SEQ ID NO: 611241 - DNA, 75 bp, synthetic construct
  source 1..75: mol_type = other DNA
gaagagagcaatttaatgcccgcaatgggttatctccatattgatggtaaaggagcgctggcaagtagcggaagt

SEQ ID NO: 611242 - DNA, 75 bp, synthetic construct
  source 1..75: mol_type = other DNA
atgtccgttacgcatatccctcaggtggcgatcgaaacccgccacttatacaaacggttcggtgacgttaccgcc

SEQ ID NO: 611243 - DNA, 75 bp, synthetic construct
  source 1..75: mol_type = other DNA
gcaaatttaacgtcaccgccaaaggtggactggtggaagaagagtacgtcgactgggtgatctcgcgtccctaca

SEQ ID NO: 611244 - DNA, 75 bp, synthetic construct
  source 1..75: mol_type = other DNA
agtttatgcctgcctcaggatatcagtgatacatcgctaaaccgttatcgtcacgctgtgacgcgcattgtcaac

SEQ ID NO: 611245 - DNA, 75 bp, synthetic construct
  source 1..75: mol_type = other DNA
ttaactggctcactcgctgtggagaaattttcagcaaagagagcgagtatcttaccggactggatcgcgaaattg

SEQ ID NO: 611246 - DNA, 75 bp, synthetic construct
  source 1..75: mol_type = other DNA
aagtacgattacgatgcaagctcgcaaaggccgtgccagttatctcggtgaacgcagtattggtcaccaggaccc

SEQ ID NO: 611247 - DNA, 75 bp, synthetic construct
  source 1..75: mol_type = other DNA
gggtgccggtggtggaatcgttacgtcagtcctgcgagcaaaatctctctgttccggcggcgctcgacgctgcca

SEQ ID NO: 611248 - DNA, 75 bp, synthetic construct
  source 1..75: mol_type = other DNA
ctgcgtaagattaagcgggttactgatacgctgaatcgtcaggggctgcgcgtggttgcggtggcgacgaaatac

SEQ ID NO: 611249 - DNA, 75 bp, synthetic construct
  source 1..75: mol_type = other DNA
atctgaatgcaggcggcgatcgcaccgatcagccgcaggcaaaagatatgggctttgattactcactggttaata

SEQ ID NO: 611250 - DNA, 75 bp, synthetic construct
  source 1..75: mol_type = other DNA
cttcaaactgaatggttgtgaagaactggggctaattgataactcccgcgcggtagatgcggcggtcaacaccgt

SEQ ID NO: 611251 - DNA, 75 bp, synthetic construct
  source 1..75: mol_type = other DNA
tggctattaacgccactgacggaccgtcagggccggtggtggcgcgttcgcgccgccgccgtgaagccgcccgca

SEQ ID NO: 611252 - DNA, 75 bp, synthetic construct
  source 1..75: mol_type = other DNA
cgagaaacgccgtttctgtgcttcagggggcagtgagtgctgaattgcttcaggataaagcagcacttcaggaca

SEQ ID NO: 611253 - DNA, 75 bp, synthetic construct
  source 1..75: mol_type = other DNA
accgacaaaaagctggcggatatctggtcgcggcataccgtggatattcaccaggcggtacgcggcggtctgccg

SEQ ID NO: 611254 - DNA, 75 bp, synthetic construct
  source 1..75: mol_type = other DNA
gtcggtggtgccagtggtccgctgttcggtaccttctttatccgcgccgcacaggcgacccaggcacggcaaagc

SEQ ID NO: 611255 - DNA, 75 bp, synthetic construct
  source 1..75: mol_type = other DNA
cgatgctgccgggttgccggtgcactatacgggtggcccctgctttgtgggggtggatattgctgtccgtaatga

SEQ ID NO: 611256 - DNA, 75 bp, synthetic construct
  source 1..75: mol_type = other DNA
caaaatctggaccgccctgtttccggtcatttccaacggctacagactgcgtgtgacatcgacgccgaacggcaa

SEQ ID NO: 611257 - DNA, 75 bp, synthetic construct
  source 1..75: mol_type = other DNA
caggaatatcagttacccattaatgaacatggttcaaaagccgctattcatgggctgctcgcctggcgtgactgg

SEQ ID NO: 611258 - DNA, 75 bp, synthetic construct
  source 1..75: mol_type = other DNA
ccggttggcggcgagctggaaatggttgatggcaccacgttgtcacattcccttgccgggcgtcataagattcgt

SEQ ID NO: 611259 - DNA, 75 bp, synthetic construct
  source 1..75: mol_type = other DNA
agtctgtaacatctgttcgaatccgcgtcgtcaggaaaacggtcaaatctgcgtggtggagagtccggcggacat

SEQ ID NO: 611260 - DNA, 75 bp, synthetic construct
  source 1..75: mol_type = other DNA
agctcagaaaaaacagaatatcggtacgggcattggtacgggggccactatcggggcgactgttggttcagcagt

SEQ ID NO: 611261 - DNA, 75 bp, synthetic construct
  source 1..75: mol_type = other DNA
agcgaacaggaggcacgccagcaatccccggctggctgcgtgatggtattcgccgcccgtattcgtcaggggtca

SEQ ID NO: 611262 - DNA, 75 bp, synthetic construct
  source 1..75: mol_type = other DNA
tgcattgcaaatcaaatgacgacagaagatattctgggaaaactaaaaatctcattaaaaacattctactgccat

SEQ ID NO: 611263 - DNA, 75 bp, synthetic construct
  source 1..75: mol_type = other DNA
aagatattctggagaaactgaaaatatcgctaaaaacgttctactgccataaacacaatatcatgatgatcctca

SEQ ID NO: 611264 - DNA, 75 bp, synthetic construct
  source 1..75: mol_type = other DNA
ataacggtcaattctttaccagcggaccattaattgacggcgtgctgggaatgaaagcttacggcagcctggcaa

SEQ ID NO: 611265 - DNA, 75 bp, synthetic construct
  source 1..75: mol_type = other DNA
acgctaatccgacaacgcttcaccacgttgatgagctggatttaaatttcacgcaggcgaaaaaaatagccgcga

SEQ ID NO: 611266 - DNA, 75 bp, synthetic construct
  source 1..75: mol_type = other DNA
ccacacctttaaaaccgctaatgatctgtgggaaataaccattacccatccacaacaggcgctttcggtaagcct

SEQ ID NO: 611267 - DNA, 75 bp, synthetic construct
  source 1..75: mol_type = other DNA
acgggcattggtacgggggcggctatgggcgctgccgttggtggtctccccggtgcggctattggtgctgtcata

SEQ ID NO: 611268 - DNA, 75 bp, synthetic construct
  source 1..75: mol_type = other DNA
tgggggctgccgttggtggccttcccggtgccgctattggtgcagtcatcggtggtcttgctggttcgttgtttt

SEQ ID NO: 611269 - DNA, 75 bp, synthetic construct
  source 1..75: mol_type = other DNA
cacatgtttcattttttccaaaatccatgctgccagattatgaatctgctggatggaatctttccgatgtggtgg

SEQ ID NO: 611270 - DNA, 75 bp, synthetic construct
  source 1..75: mol_type = other DNA
aactggcgcgtctggcggctcccgttcttcatgcccgtactttacagcccgtttctggcagcgaaatcgacctgc

SEQ ID NO: 611271 - DNA, 75 bp, synthetic construct
  source 1..75: mol_type = other DNA
tgataaaagcacttgaagataagaattacgctgaagcaattaaacaatgtaaagatagtctatggtatcggtcag

SEQ ID NO: 611272 - DNA, 75 bp, synthetic construct
  source 1..75: mol_type = other DNA
gcctctggcaacagggatttcttcagcggttttggcgaaaatatcaacatggattttgccattaaagctcagctt

SEQ ID NO: 611273 - DNA, 75 bp, synthetic construct
  source 1..75: mol_type = other DNA
ttctcactattcaaaaagttgatattcctcttaagaaagtgaatatatttattgggcctcaggcacaggggaaaa

SEQ ID NO: 611274 - DNA, 75 bp, synthetic construct
  source 1..75: mol_type = other DNA
atgaatatcaaagaaagattaatacagtacgaaggaagtaaagaatatcaacgagtacgcggatactaccgacaa

SEQ ID NO: 611275 - DNA, 75 bp, synthetic construct
  source 1..75: mol_type = other DNA
tccgatgatggcatcagcctggtggcagtactgcgcaccggcccgaccgaaagcctgattcaggggctgcatcag

SEQ ID NO: 611276 - DNA, 75 bp, synthetic construct
  source 1..75: mol_type = other DNA
acggttggtgctggtctggctgaattaacctttcagggttgtcatttagtcatcccgcacaaacccgaagagatg

SEQ ID NO: 611277 - DNA, 75 bp, synthetic construct
  source 1..75: mol_type = other DNA
cggtttgcttgcctggcgtgactggcaaatcagcgagttaaccgccaccagcgtcaccttgacggcttttctgcc

SEQ ID NO: 611278 - DNA, 75 bp, synthetic construct
  source 1..75: mol_type = other DNA
ctgtcgcagcgccttatggcgtgggtattcatacttatttaacctgcaacttaacatctgttgatgaatatctgt

SEQ ID NO: 611279 - DNA, 75 bp, synthetic construct
  source 1..75: mol_type = other DNA
caacggctgttatcgctatcaggggcaggaatatcagttacccattaatgaacatggttcaaaagccgctattca

SEQ ID NO: 611280 - DNA, 75 bp, synthetic construct
  source 1..75: mol_type = other DNA
tgttccgatcaaccctgggtgcaggtttatagcggtgaaaaattacagcgtcagggactggcagttgaacctatg

SEQ ID NO: 611281 - DNA, 75 bp, synthetic construct
  source 1..75: mol_type = other DNA
tctggcaccgatttactattactggaacccggaaaaacacatcgcctgttttttaatattcacggaaagcgacgt

SEQ ID NO: 611282 - DNA, 75 bp, synthetic construct
  source 1..75: mol_type = other DNA
tagccaggcggcgtttgcactgccactgccagcgaaagacaaaccgagctacggtatggcgaccgatatgcaagg

SEQ ID NO: 611283 - DNA, 75 bp, synthetic construct
  source 1..75: mol_type = other DNA
ggctgctttatcaagcgtggtgacatgacgatgaaggtgccggcggtcgcaggaataaccgccatcgacaccatt

SEQ ID NO: 611284 - DNA, 75 bp, synthetic construct
  source 1..75: mol_type = other DNA
ttccctgcatggtatgttgagcaaaaaaaaggatggtcgtcaattatggcgactgtaccaacacaatttggaatt

SEQ ID NO: 611285 - DNA, 75 bp, synthetic construct
  source 1..75: mol_type = other DNA
aagggcagatcatttttgctacatcagaagatgaaaatgtcttaaaagaggcattagaagggtatgactatacaa

SEQ ID NO: 611286 - DNA, 75 bp, synthetic construct
  source 1..75: mol_type = other DNA
tgtgctggcaggtgtggtggacagccgccgtagtctgctgagctatgaaggactggacgccagccgcgcgttagc

SEQ ID NO: 611287 - DNA, 75 bp, synthetic construct
  source 1..75: mol_type = other DNA
ttgaatgaaacgctggatgatatttgcgaagcattgagttatgtcgattatctgtttcctaattttgccgaggca

SEQ ID NO: 611288 - DNA, 75 bp, synthetic construct
  source 1..75: mol_type = other DNA
aggaataaccgccatcgacaccattggcgcgggcgataactttgcttcaggttttattgcggcactgttagaagg

SEQ ID NO: 611289 - DNA, 75 bp, synthetic construct
  source 1..75: mol_type = other DNA
atcaactctgacatcatcaccgtagacggcgatcgcgcattcgtgctgcgcatcagcgagcataaaccagaagcg

SEQ ID NO: 611290 - DNA, 75 bp, synthetic construct
  source 1..75: mol_type = other DNA
agctcactacccagcagctgattaacggcgttgcgggcaccgactttatgttgaaaggtgaaaccgacgaactgg

SEQ ID NO: 611291 - DNA, 75 bp, synthetic construct
  source 1..75: mol_type = other DNA
gcgtttcaggttgacggcaagttcgataacagccgctataacggtatcctcaaccagatggggatgagtgccgat

SEQ ID NO: 611292 - DNA, 75 bp, synthetic construct
  source 1..75: mol_type = other DNA
atttttttaaaaatgccatcctcaaaggtaatttaggtctttttgataagtttgatttatccgttatcgagagaa

SEQ ID NO: 611293 - DNA, 75 bp, synthetic construct
  source 1..75: mol_type = other DNA
atgggcgaaattattgactttgcggaaaggcaaaaaggcggaaggaagaaaaaggcatcttccacttcgcccatt

SEQ ID NO: 611294 - DNA, 75 bp, synthetic construct
  source 1..75: mol_type = other DNA
atattgtcgaactaagtggtattggtttacatagcggcagcagcattcatatgaaaatcatgcccgctaccgcta

SEQ ID NO: 611295 - DNA, 75 bp, synthetic construct
  source 1..75: mol_type = other DNA
ttcaaaactaacagtgttccccagggcgtccgcgatcgggcattcgaagaatgggagcagatcatcatagataac

SEQ ID NO: 611296 - DNA, 75 bp, synthetic construct
  source 1..75: mol_type = other DNA
tacaacactgaacataatgattttgagaagcgaaaagagaagcagcagaactttaaagcggcgctggagaaactg

SEQ ID NO: 611297 - DNA, 75 bp, synthetic construct
  source 1..75: mol_type = other DNA
caatgtgattttcagccaactggtgaatgaaatcaccaccgagccggattacgacgcagctctggctgtactgaa

SEQ ID NO: 611298 - DNA, 75 bp, synthetic construct
  source 1..75: mol_type = other DNA
ccgccgatctgccgttcgcccagtctcgtttctgcggtgcggaaggtcttaacaacgtcatcaccctttccactt

SEQ ID NO: 611299 - DNA, 75 bp, synthetic construct
  source 1..75: mol_type = other DNA
actaactccctgtcgaaaacgccaatgctgaaagcgcagcacccggagtatgaaacctggacagcgggcattcac

SEQ ID NO: 611300 - DNA, 75 bp, synthetic construct
  source 1..75: mol_type = other DNA
tcgccacgcagtgggcccgagcggctctcgaaaaatctgagcctccggtcattatcgcgacctcaacgaataacc

SEQ ID NO: 611301 - DNA, 75 bp, synthetic construct
  source 1..75: mol_type = other DNA
acataccggcagcagattgactccgcccatgaaatcgttcttaaagaacagcaggcggttcaggagtggcagagg

SEQ ID NO: 611302 - DNA, 75 bp, synthetic construct
  source 1..75: mol_type = other DNA
cttgcgcccaaaagtttatttccggttactgcagcatggtaaggaccgttctgcaggtgcgcctgatattgttac

SEQ ID NO: 611303 - DNA, 75 bp, synthetic construct
  source 1..75: mol_type = other DNA
ttcaccaattccagcagaaacccgacaggggtattgccatcaggatctgtctgttgcacactcctgcacctcaga

SEQ ID NO: 611304 - DNA, 75 bp, synthetic construct
  source 1..75: mol_type = other DNA
acatggaaatttacaacaatccatcaacttaaacacgaagatatagataatacaactgcatgggaaacagattat

SEQ ID NO: 611305 - DNA, 75 bp, synthetic construct
  source 1..75: mol_type = other DNA
aaagagcgtaaggatttaaaaacttccgagaccaaaatctacacacttcatggtgtggagcagcatgataacttc

SEQ ID NO: 611306 - DNA, 75 bp, synthetic construct
  source 1..75: mol_type = other DNA
cgcgatgccttaagccattttctggatgcaagacatggcgatatccttgctgttaatggccctccgggaaccgga

SEQ ID NO: 611307 - DNA, 75 bp, synthetic construct
  source 1..75: mol_type = other DNA
cagtctattcaaaacatgaagatggcgggtttattgatagcgataacagcatgctgaatgttgcagtctcccgtg

SEQ ID NO: 611308 - DNA, 75 bp, synthetic construct
  source 1..75: mol_type = other DNA
gtggaagcgaagaatgaaacctttgccccgcagcatcccgatcaatatctctcctggaaagccacctcggaacag

SEQ ID NO: 611309 - DNA, 75 bp, synthetic construct
  source 1..75: mol_type = other DNA
ggcgtggaagcggtgcgtgaagaccatccgctggcatcactactaccgtgcgataacgtctttgccatcgaaagc

SEQ ID NO: 611310 - DNA, 75 bp, synthetic construct
  source 1..75: mol_type = other DNA
gggtatacagcgccgacccgcgtaaagtgaaagatgcctgtctgctgccattgctgcgtcttgatgaagccagtg

SEQ ID NO: 611311 - DNA, 75 bp, synthetic construct
  source 1..75: mol_type = other DNA
accatttctttgaaaacggcgatgaacttaacgagcagatggtgcaacgactggaagcggcccgcgaaatggggc

SEQ ID NO: 611312 - DNA, 75 bp, synthetic construct
  source 1..75: mol_type = other DNA
acctgatccttgaaggatatattgcttttcttgatccgccaaaagagacaaccgctccggcactgaaggcattaa

SEQ ID NO: 611313 - DNA, 75 bp, synthetic construct
  source 1..75: mol_type = other DNA
cgtgctctcgcgttatctcgatccacaatggtcgattatcggcattcagtcgccgcgccctcatggccccatgca

SEQ ID NO: 611314 - DNA, 75 bp, synthetic construct
  source 1..75: mol_type = other DNA
gtgttccggttacagtagctaattctatgccgcaggctagtagcaaagcgcagacttttactcttgtggcaaaag

SEQ ID NO: 611315 - DNA, 75 bp, synthetic construct
  source 1..75: mol_type = other DNA
attgccgattgcatagaaaagggtaagacggatttcaaggtgagcaaagagattacagctttgccgttcagaggc

SEQ ID NO: 611316 - DNA, 75 bp, synthetic construct
  source 1..75: mol_type = other DNA
tgacaatgtaatttttagccagctggtagatgaaatcactaccgagccgaattacgaagcagcactgactgtact

SEQ ID NO: 611317 - DNA, 75 bp, synthetic construct
  source 1..75: mol_type = other DNA
taatttaaataaattactttccggacaagaacaaaaaatcactctactgaaaagtgctaaaacggaatggaaaaa

SEQ ID NO: 611318 - DNA, 75 bp, synthetic construct
  source 1..75: mol_type = other DNA
gaaaagctgaccgacgcctgtctggaaatcatcaatacccctccaggcatcatgtccgccacgcgggggggatat

SEQ ID NO: 611319 - DNA, 75 bp, synthetic construct
  source 1..75: mol_type = other DNA
aaacgaaatacggtatttctgaccgtcgcgacggtgttattgatggcaaaaccgatgttaacggtgacggaaaac

SEQ ID NO: 611320 - DNA, 75 bp, synthetic construct
  source 1..75: mol_type = other DNA
tcaatatgttaaatctgagtatattgaggaattagtagatgaattacaaacacaatgttttgactggtctggaaa

SEQ ID NO: 611321 - DNA, 75 bp, synthetic construct
  source 1..75: mol_type = other DNA
gggcatggtacgccgactggcaggccagccaggcgctcggcgtaacgcaacaaccggaatactggcagcatatgc

SEQ ID NO: 611322 - DNA, 75 bp, synthetic construct
  source 1..75: mol_type = other DNA
ttgtcggcgtggttatgttcgcctcgttcatcatcatgtttttccgttactggcatcacaacctaatcaatcggg

SEQ ID NO: 611323 - DNA, 75 bp, synthetic construct
  source 1..75: mol_type = other DNA
ggcgattattttcctggttctgctgctggtgagcggcgtgattatctggcgtccttattttgctcctgctttctc

SEQ ID NO: 611324 - DNA, 75 bp, synthetic construct
  source 1..75: mol_type = other DNA
gttgatgcaaatcatgggcacaccgcaactggcgcgaattctgcacccgtttgtcggcgtggttatgtttgcctc

SEQ ID NO: 611325 - DNA, 75 bp, synthetic construct
  source 1..75: mol_type = other DNA
tatctacgcagccctttgggtgaaaggcacgattaccgccatggtggaaggatgggttaccagcgcctgggcgaa

SEQ ID NO: 611326 - DNA, 75 bp, synthetic construct
  source 1..75: mol_type = other DNA
gcgctttacctggtggggggaagatgagagcggcgatgcgtttatgacggcgtgggcatggtacgccgactggca

SEQ ID NO: 611327 - DNA, 75 bp, synthetic construct
  source 1..75: mol_type = other DNA
cttctttgccctgacccctgaggaaacacaaactattgtccccatcgccagagcgctgattggcaaccgttccgc

SEQ ID NO: 611328 - DNA, 75 bp, synthetic construct
  source 1..75: mol_type = other DNA
tcggcaacgccaccactgaagtggcgttggcgcaggatggccggtttatcggcagcgggattgtcgccacgaccg

SEQ ID NO: 611329 - DNA, 75 bp, synthetic construct
  source 1..75: mol_type = other DNA
cgtgaccggcggactggcgggggaattctcgctggagcaggccgtcggaattgcatcgatggtaaaatccgaccg

SEQ ID NO: 611330 - DNA, 75 bp, synthetic construct
  source 1..75: mol_type = other DNA
acatcctcagactgctggaagaacgtaacatgacaaagcaggagctttctcaccaggcaggggtgtcaatttctt

SEQ ID NO: 611331 - DNA, 75 bp, synthetic construct
  source 1..75: mol_type = other DNA
cagctggcgcgcattctgcacccgtttgtcggcgtggttatgtttgtctcgttcatcatcatgtttttccgttac

SEQ ID NO: 611332 - DNA, 75 bp, synthetic construct
  source 1..75: mol_type = other DNA
caggttctgtatatcgccacctcgcaaatccttgatgatgagatggctgcacggatagaacatcatcggcaaggc

SEQ ID NO: 611333 - DNA, 75 bp, synthetic construct
  source 1..75: mol_type = other DNA
aaccatcggtatgcgtgtgccttctaacccgattgcgcaggccttgcttgaagcattgggtgaaccgatgctttc

SEQ ID NO: 611334 - DNA, 75 bp, synthetic construct
  source 1..75: mol_type = other DNA
acagaaacaggagtattactcccctgtcacatcaacaacggaagggattaacctcggatataaggccagcctttc

SEQ ID NO: 611335 - DNA, 75 bp, synthetic construct
  source 1..75: mol_type = other DNA
caccgggagacctgtattatgacagttctaccaagaactattacatcctgaaagcgagctcatattcaccgtttt

SEQ ID NO: 611336 - DNA, 75 bp, synthetic construct
  source 1..75: mol_type = other DNA
caatctggtcggtaaacttgataaagccccgatggctgatttcagtagtgccacgattactaccggcagtctgcc

SEQ ID NO: 611337 - DNA, 75 bp, synthetic construct
  source 1..75: mol_type = other DNA
atgatcgccagtgaaattaagcaaaaactgcatgttgatgttcaggtcggaggcgcagaagcagaagccgccatt

SEQ ID NO: 611338 - DNA, 75 bp, synthetic construct
  source 1..75: mol_type = other DNA
ttcgtcgttctggtgggcggttcttcgctggatttcgaagtaccgcagttagtcaccgatgcattggcgcattat

SEQ ID NO: 611339 - DNA, 75 bp, synthetic construct
  source 1..75: mol_type = other DNA
tgtatttgcccgcgtctgtgtagtgaaacccgacgaactggtgcctattcccggtgatttgacgctggaaaaagt

SEQ ID NO: 611340 - DNA, 75 bp, synthetic construct
  source 1..75: mol_type = other DNA
tatgggggatttacgggatagtcagggagatgctggagggggggcgcgtatcatgaatggtaccggttcaggtga

SEQ ID NO: 611341 - DNA, 75 bp, synthetic construct
  source 1..75: mol_type = other DNA
ttcgctcagaactggatattttatcaagaaagattatgcctggttgtggtcttgtttttgagctatatcaacgtc

SEQ ID NO: 611342 - DNA, 75 bp, synthetic construct
  source 1..75: mol_type = other DNA
ttatctgcgttcggaaaaaagtctctacatgaaatggagtatgccaacggtgtatcgcatgggcgacaaaccggc

SEQ ID NO: 611343 - DNA, 75 bp, synthetic construct
  source 1..75: mol_type = other DNA
acaaaatggatgctgacagggtatcagacagttgctgatgccggtgcctcgaaaaccgcaacggactttatggcg

SEQ ID NO: 611344 - DNA, 75 bp, synthetic construct
  source 1..75: mol_type = other DNA
cgcagctctccggtaagggtatactggctcttgatggttccgttaacctgccagaaggttcgataaccaagaagt

SEQ ID NO: 611345 - DNA, 75 bp, synthetic construct
  source 1..75: mol_type = other DNA
ctggcaaaatgttggtcacgatcgtgataaagcgattcaaatcgtgaaacagcagaagattgaggaaagttctca

SEQ ID NO: 611346 - DNA, 75 bp, synthetic construct
  source 1..75: mol_type = other DNA
caggaggcgcttacgcgggcagcggcaaacgcaggcatcaatatcagcgacatatcgcttatccgaattaatgaa

SEQ ID NO: 611347 - DNA, 75 bp, synthetic construct
  source 1..75: mol_type = other DNA
atgatgatgatttttggcatgtttgtgtttgagctgaaaacgcttccgcatcagcagatccagcagagcaaaaca

SEQ ID NO: 611348 - DNA, 75 bp, synthetic construct
  source 1..75: mol_type = other DNA
ggtcagcttgaagcctggcaagagaatgccatgttcgatacagggcgttacaggcgaaaaaaatccggtaccgcg

SEQ ID NO: 611349 - DNA, 75 bp, synthetic construct
  source 1..75: mol_type = other DNA
ctaagttatatagcattaatgtgtatggtgttatccggttcgactttctctgttatctgcgttatgttatttttt

SEQ ID NO: 611350 - DNA, 75 bp, synthetic construct
  source 1..75: mol_type = other DNA
tatctcgggcagaaaccgacgacggttatcgatcttaccgataatacgccagtggtggtgcgtgaaggcgtaggt

SEQ ID NO: 611351 - DNA, 75 bp, synthetic construct
  source 1..75: mol_type = other DNA
aaaggcggggtgattgtttatccaactgattccggctatgcgctcggctgtaaaattgaagataaaaacgccatg

SEQ ID NO: 611352 - DNA, 75 bp, synthetic construct
  source 1..75: mol_type = other DNA
ccagtgctgaaatgtgcggtaacacgcgtcagcaggcgatgacctggcttatcgatctggaaatactgaccgcgc

SEQ ID NO: 611353 - DNA, 75 bp, synthetic construct
  source 1..75: mol_type = other DNA
ccaggtgaaaaccccggctatcagaccggacgacttgcgcgctctataggttattacgtcccccgtaaaagctcc

SEQ ID NO: 611354 - DNA, 75 bp, synthetic construct
  source 1..75: mol_type = other DNA
tttgtgggtctgctatcgcaacccctttaatattttgctcacgatccttggcggcatttcttacgccacggaaga

SEQ ID NO: 611355 - DNA, 75 bp, synthetic construct
  source 1..75: mol_type = other DNA
aggtaaaaccagcgatcgcgtgctgcatagcgcgtggctgaacagtcattatcagaccggacttaaaaacctgct

SEQ ID NO: 611356 - DNA, 75 bp, synthetic construct
  source 1..75: mol_type = other DNA
gtactcttttcatttttagtccggttttttttattattcagttttgcgttttttttctggtgtttatacagggta

SEQ ID NO: 611357 - DNA, 75 bp, synthetic construct
  source 1..75: mol_type = other DNA
cgggggttttctctctccagcaaccaatgccaccagggattaagcccccgcaacattgcgcctcaccggaacctt

SEQ ID NO: 611358 - DNA, 75 bp, synthetic construct
  source 1..75: mol_type = other DNA
ggcgctgtttgcgctttcggtcgcggtaggcttaacgccggaaatgttgccgatgattgttacctcgacgctggc

SEQ ID NO: 611359 - DNA, 75 bp, synthetic construct
  source 1..75: mol_type = other DNA
ctgaacttctccattcgtgccgtgccccgagcgggctcaggccggactattcagctggtcagcgagctggcgggg

SEQ ID NO: 611360 - DNA, 75 bp, synthetic construct
  source 1..75: mol_type = other DNA
tcgttcttgccaggcggtcaagactctgcgtgcgcatattgatattgcacagcatcgggcgcgcattggctggtt

SEQ ID NO: 611361 - DNA, 75 bp, synthetic construct
  source 1..75: mol_type = other DNA
tttgactgatgataccttcctcgcgcgtctgaaagaaatggcgcagcagcaagcgcgaaatttctcttgggataa

SEQ ID NO: 611362 - DNA, 75 bp, synthetic construct
  source 1..75: mol_type = other DNA
ccggtactgcgcaggttttgcctgaagctttgattcagaagatccttgctatctcacaagggcagccagatgacc

SEQ ID NO: 611363 - DNA, 75 bp, synthetic construct
  source 1..75: mol_type = other DNA
gccggaaccaatatcggcggcatgctggaacatgttcgccagacaatggctgagctgaccaacaagcctagcaac

SEQ ID NO: 611364 - DNA, 75 bp, synthetic construct
  source 1..75: mol_type = other DNA
ttcgtggtgctggttggcggctcttctcttgattttgaaatcccgcaactggttaccgatgctctggcacattat

SEQ ID NO: 611365 - DNA, 75 bp, synthetic construct
  source 1..75: mol_type = other DNA
tgagttttacagcgtcggccagcatagcgttttaaccagccatctcgttccgcaggagtttgccttagaagcact

SEQ ID NO: 611366 - DNA, 75 bp, synthetic construct
  source 1..75: mol_type = other DNA
aatgggccaatctgccgatgaaagagcgtgcgcgcctgatgcgccgtctgggcgatctgatcgaccagaacgtgc

SEQ ID NO: 611367 - DNA, 75 bp, synthetic construct
  source 1..75: mol_type = other DNA
ccttgaagcgctgcagtggctgaaggacgacggcgtggtggcttcactggatgtggaggcgtggatagtgccgcc

SEQ ID NO: 611368 - DNA, 75 bp, synthetic construct
  source 1..75: mol_type = other DNA
taaaacaaaataaaaaagatggttttgacatccgctcaattgaagcgctaagaaagacacaaaaaataattagaa

SEQ ID NO: 611369 - DNA, 75 bp, synthetic construct
  source 1..75: mol_type = other DNA
atcgctggctgaccgttttgtattatgggccagcgctataactacactgatttttatattcatagccttatttaa

SEQ ID NO: 611370 - DNA, 75 bp, synthetic construct
  source 1..75: mol_type = other DNA
acgccggaaacgcaaacgctgttccagtcgggatggtttgtggtgggcttactgtcgcaaacgctgattgtgcat

SEQ ID NO: 611371 - DNA, 75 bp, synthetic construct
  source 1..75: mol_type = other DNA
aaggcggtgagtacagcttcgaagtgttcgcggaaatgaagaacgtctgcatttccatgggcgaccatccaattc

SEQ ID NO: 611372 - DNA, 75 bp, synthetic construct
  source 1..75: mol_type = other DNA
gaagccgaagccgaagccgaagccgaagccggacaggatgctccccggaaaaagaccggtaacaaagcgaaacag

SEQ ID NO: 611373 - DNA, 75 bp, synthetic construct
  source 1..75: mol_type = other DNA
gatgatgcggggagcgtggcgggtgtggttcatgcagtggccggtacagatttagccgaagccgaagccgaagcc

SEQ ID NO: 611374 - DNA, 75 bp, synthetic construct
  source 1..75: mol_type = other DNA
cgctcaaccagttcaatattccggaagcggggctgatcttgctgatgggcgttgatccgttccttgatatggggc

SEQ ID NO: 611375 - DNA, 75 bp, synthetic construct
  source 1..75: mol_type = other DNA
cactgtgcgctgatgaaaccggctgccgataaattggctgttgaattggcgaaaatcaccttcaataccccaacc

SEQ ID NO: 611376 - DNA, 75 bp, synthetic construct
  source 1..75: mol_type = other DNA
aatgctggctgatatggcggcgagctatccaattgtcgaagaaacgtttgctgaagcttctgcggcgctgggcta

SEQ ID NO: 611377 - DNA, 75 bp, synthetic construct
  source 1..75: mol_type = other DNA
tttagccggagccggagccggagccggagccgaagccgaagccgaagccgaagccgaagccggacaggatgctcc

SEQ ID NO: 611378 - DNA, 75 bp, synthetic construct
  source 1..75: mol_type = other DNA
gtattacaacggtgaggacaaaggtgtgttcatgctggctaaacgcttcacggccctgagcttcggctgcttccg

SEQ ID NO: 611379 - DNA, 75 bp, synthetic construct
  source 1..75: mol_type = other DNA
tcgcccatgagtcccaactgaaagcactgtcacgtctggctgctaaacagggcttctctggtgaagacgctatcg

SEQ ID NO: 611380 - DNA, 75 bp, synthetic construct
  source 1..75: mol_type = other DNA
acatcccgttccctgtagaagtcctgcctacccgcaatagcctgcctactccaatcattgctcacactctggctg

SEQ ID NO: 611381 - DNA, 75 bp, synthetic construct
  source 1..75: mol_type = other DNA
cgctatgaacatctgtgagaatgtggtccgtaccatcaacgctcgcatggtcgacgttctggagtcctccaaact

SEQ ID NO: 611382 - DNA, 75 bp, synthetic construct
  source 1..75: mol_type = other DNA
aagcagacgctatcatggacgctctgtacgagaataccgagtcatcctttggctctgaagtgtccgactacggca

SEQ ID NO: 611383 - DNA, 75 bp, synthetic construct
  source 1..75: mol_type = other DNA
tcaccgttgagccgattgagcaagctatcctcgtgtcccaccagaccaagctatgggacgctaagtcttccactg

SEQ ID NO: 611384 - DNA, 75 bp, synthetic construct
  source 1..75: mol_type = other DNA
gtcaggtcgtttctccggtaaactttaactctccgggacaggtggttattgccggtcataaagaagcggttgagc

SEQ ID NO: 611385 - DNA, 75 bp, synthetic construct
  source 1..75: mol_type = other DNA
gcattacgaagacgatgcacacacctacaccctgaaatatcagtacctgctgggccgcgacattctggtcgctcc

SEQ ID NO: 611386 - DNA, 75 bp, synthetic construct
  source 1..75: mol_type = other DNA
ggccgtttattgctggaactacaaaacgacaaccttaaccacaaccgtatctggctgcgccttgccgcacaacca

SEQ ID NO: 611387 - DNA, 75 bp, synthetic construct
  source 1..75: mol_type = other DNA
cgtaacgcgggtgtgaaggttaacggcatctgggcgcaggactggtccgggatccgtatgacctcttttggcaaa

SEQ ID NO: 611388 - DNA, 75 bp, synthetic construct
  source 1..75: mol_type = other DNA
ttacgctgatgtatcaacaagataaccatgcccggcgcagcatcggcactaacgctgcccgcctggtaaaaggga

SEQ ID NO: 611389 - DNA, 75 bp, synthetic construct
  source 1..75: mol_type = other DNA
attgaacgtgcaaagcaggcacaagttccaaagcacgttattgataaagcaattgataaagccaaaggcggcgga

SEQ ID NO: 611390 - DNA, 75 bp, synthetic construct
  source 1..75: mol_type = other DNA
tgcaacgtctaaaatttatgcaaaattcggtgtagaaatctatgctgctgctaaacaaggtgaacccgatccaga

SEQ ID NO: 611391 - DNA, 75 bp, synthetic construct
  source 1..75: mol_type = other DNA
ctcacaccgataccatcagcgatctctttgatgtgctgtgcctgaaccgttattacggatggtatgtccaaagcg

SEQ ID NO: 611392 - DNA, 75 bp, synthetic construct
  source 1..75: mol_type = other DNA
ccgacaagctggctgttgaattagcaaaaatcacttttaacgccccaaccgttccggttgtgaacaacgttgatg

SEQ ID NO: 611393 - DNA, 75 bp, synthetic construct
  source 1..75: mol_type = other DNA
atgcagtgcgtctggttgagatgcgcggcaggttcatgcaggaagctgtaccggaagggacaggcgcaatggcgg

SEQ ID NO: 611394 - DNA, 75 bp, synthetic construct
  source 1..75: mol_type = other DNA
aacagttttcctattttgatctacgcggcaaaccgttcccactgtggaccagcgagcagggtgttggtcgcaaca

SEQ ID NO: 611395 - DNA, 75 bp, synthetic construct
  source 1..75: mol_type = other DNA
ttccgcggtaatttcagcattaaagataaattgcaggagaagattgcgctcaccgacgctaccgtcagccagtca

SEQ ID NO: 611396 - DNA, 75 bp, synthetic construct
  source 1..75: mol_type = other DNA
gtattactgccatgttgataacagttgctatatgaacttcgactttagcgcgccggaatatcacgagctggcatt

SEQ ID NO: 611397 - DNA, 75 bp, synthetic construct
  source 1..75: mol_type = other DNA
ccgtcatgatggtgagaacattaccgtggtcttatccagagatggcgactctcagtctcacgacctagaaatcct

SEQ ID NO: 611398 - DNA, 75 bp, synthetic construct
  source 1..75: mol_type = other DNA
gtaaagtgcgcgcggaacaggtcactattacacctcaggtctcaggacgtattgttgagctgaatataaaagaca

SEQ ID NO: 611399 - DNA, 75 bp, synthetic construct
  source 1..75: mol_type = other DNA
atgcagggcgacaccctcgatgcgatttgcgcccggtattacgggcgcactgggggcgtcgttgaaacggtgctg

SEQ ID NO: 611400 - DNA, 75 bp, synthetic construct
  source 1..75: mol_type = other DNA
cgggtctttactgacaagaatgatggaaccggtaatgcagtatcttctgttgaagggagttccactgcaacaaca

SEQ ID NO: 611401 - DNA, 75 bp, synthetic construct
  source 1..75: mol_type = other DNA
atttatcttctactcaacgtctttatgctgacgctgggggcgataatcatatttttctctggtcgcgtgtgggct

SEQ ID NO: 611402 - DNA, 75 bp, synthetic construct
  source 1..75: mol_type = other DNA
acaccctcgatgcgatttgcgcccggtattacgggcgcactgagggcgtcgttgaaacggtgctgcaggcgaatc

SEQ ID NO: 611403 - DNA, 75 bp, synthetic construct
  source 1..75: mol_type = other DNA
tcacgcgtccaggacaaaccccgctgcatcgtgagccaaatctgatgcaggccatcgcgcaacagggcgacacac

SEQ ID NO: 611404 - DNA, 75 bp, synthetic construct
  source 1..75: mol_type = other DNA
cttatattatgtttctgcatcaaatacttactttatcctgaaatcaaaggcgtacggtccatttttcagtgattt

SEQ ID NO: 611405 - DNA, 75 bp, synthetic construct
  source 1..75: mol_type = other DNA
aaaaggggttaataatggaggactgaaagtcggtgatggaaccgtaattctgaatcaacgccctgatgataatgg

SEQ ID NO: 611406 - DNA, 75 bp, synthetic construct
  source 1..75: mol_type = other DNA
cgactggtcgccgggcgggggaatatccgtggcaacgaaggaccgcgcaatgcggtagctaccgggctactcatc

SEQ ID NO: 611407 - DNA, 75 bp, synthetic construct
  source 1..75: mol_type = other DNA
gataaagcgattcaaatcgtgaaacagcagaagattgaggaaagctctcaaccttatatgtttcatggacaactt

SEQ ID NO: 611408 - DNA, 75 bp, synthetic construct
  source 1..75: mol_type = other DNA
caaactatctaaataaaggtgatagtggctctcctttatttgcgtatgactctctggaaaaaaaatgggttttaa

SEQ ID NO: 611409 - DNA, 75 bp, synthetic construct
  source 1..75: mol_type = other DNA
ggcgtggatgtaggtagagtgttctctggagatacctggaaagtaacagcacgtgcaggtctgagttaccagttc

SEQ ID NO: 611410 - DNA, 75 bp, synthetic construct
  source 1..75: mol_type = other DNA
cttatgctcccctggctgggcgttttgttagtctcagtagtcggaggtgagtactgggccagtctaatagatgcc

SEQ ID NO: 611411 - DNA, 75 bp, synthetic construct
  source 1..75: mol_type = other DNA
ggacgtggctaaagtggctggatgttcttgcgatggaacaaagcgtcagtcaggcggatatcaagctggccacga

SEQ ID NO: 611412 - DNA, 75 bp, synthetic construct
  source 1..75: mol_type = other DNA
tgagtccgtcagcagcgacagcgacggcgtcgctcccggatacgctgcaacagcttgccgcatatctgcaaacct

SEQ ID NO: 611413 - DNA, 75 bp, synthetic construct
  source 1..75: mol_type = other DNA
taaaatgaaagcgtggcagggttcttacggtgtatcaaagttcactggaattgtaagtcctgcgtattttatttt

SEQ ID NO: 611414 - DNA, 75 bp, synthetic construct
  source 1..75: mol_type = other DNA
acgtgcgccgctggcgaacaatggcagtgtgctggagcagtcgacgccgaataaatggccagaatgggacgtccc

SEQ ID NO: 611415 - DNA, 75 bp, synthetic construct
  source 1..75: mol_type = other DNA
gcaacatgcgcaaacgcctgcggggactggcgctcatcctgcgcccggcatcccttcatatctaccgtacagaga

SEQ ID NO: 611416 - DNA, 75 bp, synthetic construct
  source 1..75: mol_type = other DNA
ctctgcgcaccgcccggtgagcgcagccgcatgcgcgaacgcctgcggggactggcgctcatcctgcgcccggca

SEQ ID NO: 611417 - DNA, 75 bp, synthetic construct
  source 1..75: mol_type = other DNA
gtgatgtaactgaagaagaaggtaatattgttatttatactgaacctactgaccttcataaaggaatcgcggcgc

SEQ ID NO: 611418 - DNA, 75 bp, synthetic construct
  source 1..75: mol_type = other DNA
aactgatagcggatttatcccgctgcaatccggaggcattcgtcttgtgtgagatgtggttccccgatgatgtta

SEQ ID NO: 611419 - DNA, 75 bp, synthetic construct
  source 1..75: mol_type = other DNA
ttattgctgattatatactgaggtttcttaaaaataatactgatgccaagctttatgaggcaatgcagcgtcttg

SEQ ID NO: 611420 - DNA, 75 bp, synthetic construct
  source 1..75: mol_type = other DNA
gatcggagtggagttctaatccgttatgatggatcatcactctgctttcaacccgtagacaaaaaccgcgtatct

SEQ ID NO: 611421 - DNA, 75 bp, synthetic construct
  source 1..75: mol_type = other DNA
agcttcaggatttacatgttgagccgctgttcgagtccgagtttgtgctggtagccagtaagtcccgaacatgca

SEQ ID NO: 611422 - DNA, 75 bp, synthetic construct
  source 1..75: mol_type = other DNA
atgagcactattcttcttccgaaaacgcagcacgtagtctttcaggaagttattagaagtggttctatcggctcg

SEQ ID NO: 611423 - DNA, 75 bp, synthetic construct
  source 1..75: mol_type = other DNA
cgatatgatggtggtttccgccgccggtagcaccactaaccagttgattaactggttgaaactaagccagaccga

SEQ ID NO: 611424 - DNA, 75 bp, synthetic construct
  source 1..75: mol_type = other DNA
tacccccacgtcatctgtgaaaaaaggtgagatgcttcccatcgtggtgacgatcaaagatgccaatggtaatcc

SEQ ID NO: 611425 - DNA, 75 bp, synthetic construct
  source 1..75: mol_type = other DNA
aggccgggctggagtcattgtatgaagccaaccgcggaaatgcgatgaaaacggttcagggctggcccgtcgcct

SEQ ID NO: 611426 - DNA, 75 bp, synthetic construct
  source 1..75: mol_type = other DNA
acagtgacggctgcagatggaacggtctttaaacgcccattattgttgaaagagttatccagtacgtcgggtcga

SEQ ID NO: 611427 - DNA, 75 bp, synthetic construct
  source 1..75: mol_type = other DNA
ggttgtgatcaatagtggcctggcggatgaaacttcgctcaatgataccgccgcagcatacagcgcgatgaccgg

SEQ ID NO: 611428 - DNA, 75 bp, synthetic construct
  source 1..75: mol_type = other DNA
gaatacggtgccgaatgttgaatttactttgaaacgtggtgaggcatcgccgcgtaacgctggggcaacgttgta

SEQ ID NO: 611429 - DNA, 75 bp, synthetic construct
  source 1..75: mol_type = other DNA
ggattctgcgaaggctaactactgggggcatatgccagcaaccttgacggcagtgaatggtgcggtatttgaacg

SEQ ID NO: 611430 - DNA, 75 bp, synthetic construct
  source 1..75: mol_type = other DNA
tttctttcacaccaagaaagaaaacccactctgaaccgaagaaagaaaaagttaaagtcagacgtgtttatgctg

SEQ ID NO: 611431 - DNA, 75 bp, synthetic construct
  source 1..75: mol_type = other DNA
taaacaagacaaagaaatctctgatgtgaatgttgatagtgaccataaaaacacacagtgccccgccactgatga

SEQ ID NO: 611432 - DNA, 75 bp, synthetic construct
  source 1..75: mol_type = other DNA
tacttttacaccaaaaaagaaaactcacaccgagccaaagaaagaaaaagttaaagtcagacgtgtttatggttt

SEQ ID NO: 611433 - DNA, 75 bp, synthetic construct
  source 1..75: mol_type = other DNA
aatgccttgaataatgcacccgtgccgtataccgcgttcaccattactaaagatatggggaaaaatcgtcagggg

SEQ ID NO: 611434 - DNA, 75 bp, synthetic construct
  source 1..75: mol_type = other DNA
gtcatgggggtagtgacaaaatgtcacccgtgttagataagttattagataaaacattagataataatattatag

SEQ ID NO: 611435 - DNA, 75 bp, synthetic construct
  source 1..75: mol_type = other DNA
ataagagcaaagagactgaacttaatgaagatattaaaggagatgactttctctctatgaatgaatctgaccttg

SEQ ID NO: 611436 - DNA, 75 bp, synthetic construct
  source 1..75: mol_type = other DNA
tggcgacccaacgtcgcctattttgaaggcgacaatgaaatgaaacgtaccgcgaaagcgattccggtacaggtt

SEQ ID NO: 611437 - DNA, 75 bp, synthetic construct
  source 1..75: mol_type = other DNA
tgccatcatggggcacaaagttctccctgccagccaggaatcaacgggctacagcgccacagacatcgttgaata

SEQ ID NO: 611438 - DNA, 75 bp, synthetic construct
  source 1..75: mol_type = other DNA
gttgagatgatcccgaaactggcgcactcttcaggcattaacccggcatacctgactattccaatgctacaggcg

SEQ ID NO: 611439 - DNA, 75 bp, synthetic construct
  source 1..75: mol_type = other DNA
cctgctgatgattgccgcctattttgttgcctgcctgatgtcactggcagtttcctccgcaacgggcctgggcgt

SEQ ID NO: 611440 - DNA, 75 bp, synthetic construct
  source 1..75: mol_type = other DNA
taaaacagctgcatgaacgccagcttgatcttcttattaccactgaagcgcccaaaatggacgaatttagtagtc

SEQ ID NO: 611441 - DNA, 75 bp, synthetic construct
  source 1..75: mol_type = other DNA
gtggttattgtgggtgtagctcgctacatcattaaagggtattccgccactggtgtgttatttgtcggtggcctg

SEQ ID NO: 611442 - DNA, 75 bp, synthetic construct
  source 1..75: mol_type = other DNA
ccgtttctggcgtggtcgttgcggttgccgggatggcgaaaatctcgccatttgaagtcgttaaacgcacctctg

SEQ ID NO: 611443 - DNA, 75 bp, synthetic construct
  source 1..75: mol_type = other DNA
atgttatcgccaccagcccgccgacccgttctgttttgccgatattggcccgcttctggcaacggcgctgcatga

SEQ ID NO: 611444 - DNA, 75 bp, synthetic construct
  source 1..75: mol_type = other DNA
tcagcgtttgttacctaacaaacctgttgaagtcattgactcgctgttatatggcaaagtcgatggtttaggcgt

SEQ ID NO: 611445 - DNA, 75 bp, synthetic construct
  source 1..75: mol_type = other DNA
gcgtttgttacccaacaaaccggttgaagtaattgactcgctgctttatggcaaagtcgatggtttaggcgtgct

SEQ ID NO: 611446 - DNA, 75 bp, synthetic construct
  source 1..75: mol_type = other DNA
atgctacaggatgtattcgagtcagaagaatttgctgccgcgccggtattaaccccgcagcaggagagccactac

SEQ ID NO: 611447 - DNA, 75 bp, synthetic construct
  source 1..75: mol_type = other DNA
agacgggtaagctgctgattggtctattgaataataatcatgatgaatcagaagagtcgcgtatcgtgcaattca

SEQ ID NO: 611448 - DNA, 75 bp, synthetic construct
  source 1..75: mol_type = other DNA
tatcgacattggtacgcctctttttggcggatcggttgtgccggtgacggtgaaatcactcgcatttccttcctg

SEQ ID NO: 611449 - DNA, 75 bp, synthetic construct
  source 1..75: mol_type = other DNA
cggcgttcgtatgcgccgccaatgatgcgcccgaaaaacgcgtcaatatgagttcgccggaatattactctgctg

SEQ ID NO: 611450 - DNA, 75 bp, synthetic construct
  source 1..75: mol_type = other DNA
gagcgtcgacagctactccggctttaagcgaaattatctctcctgttcgggcaatgagatggtagcgaacgttga

SEQ ID NO: 611451 - DNA, 75 bp, synthetic construct
  source 1..75: mol_type = other DNA
aaggggcgagcagagtaaaacgcaggcaaaccatgaaaaaagcagcatgtcacgcgtttacagttgggggtatga

SEQ ID NO: 611452 - DNA, 75 bp, synthetic construct
  source 1..75: mol_type = other DNA
aacacatccgtcgatacatggacaagagaggggagcagagtaaaacgcaagccaaccatgaaaaaagcagtatgt

SEQ ID NO: 611453 - DNA, 75 bp, synthetic construct
  source 1..75: mol_type = other DNA
cggtaaaagacgcacagggcaacgcgttagcggatatgccatttaccctcaatcgcggtgatggctatacccgta

SEQ ID NO: 611454 - DNA, 75 bp, synthetic construct
  source 1..75: mol_type = other DNA
tccacgacgtatagtggctgtggaaccaactatattccgactcaggccggtctgacgtcactgtttgctaataat

SEQ ID NO: 611455 - DNA, 75 bp, synthetic construct
  source 1..75: mol_type = other DNA
gcccggatacaccactggcggcctactggggtcatatggcggaaacctttaccagcagcgaaggcgtcaccttca

SEQ ID NO: 611456 - DNA, 75 bp, synthetic construct
  source 1..75: mol_type = other DNA
acagattttccggagaacgtggtgacggcagttgaaagcaatgtgttgaggttgcatggacggttaagccgagaa

SEQ ID NO: 611457 - DNA, 75 bp, synthetic construct
  source 1..75: mol_type = other DNA
cagccaatatcagccagcctgacgccgataagttgcttgctgcatcacgtggtgaatttgttgcagggattagcg

SEQ ID NO: 611458 - DNA, 75 bp, synthetic construct
  source 1..75: mol_type = other DNA
tcaaaaaaagttgcttgccgtattcggtaaggtgccggcagattccataaaaccagaacacatccgtcgatacat

SEQ ID NO: 611459 - DNA, 75 bp, synthetic construct
  source 1..75: mol_type = other DNA
tctctgaaatgggaacagatcggaaacgatgggatctttatccagcaaggtaaaacaggaaagaaacagataaaa

SEQ ID NO: 611460 - DNA, 75 bp, synthetic construct
  source 1..75: mol_type = other DNA
tgacagaaaggttaaagtttcaccaacacttgatgtcccgttacctgataatattccaagaaaatattccaagta

SEQ ID NO: 611461 - DNA, 75 bp, synthetic construct
  source 1..75: mol_type = other DNA
aggcgagcagagtaaaacgcaggcaaaccatgaaaaaagcagtatgtcgcgcgtttatagttgggggtatgagcg

SEQ ID NO: 611462 - DNA, 75 bp, synthetic construct
  source 1..75: mol_type = other DNA
acgatgagcgtgggctcgttgacggtgacggatgcctggggcaatacgcgaaataatttccagtcgacaagtgaa

SEQ ID NO: 611463 - DNA, 75 bp, synthetic construct
  source 1..75: mol_type = other DNA
aaacaacgatcaaccgctggcgtactactacttctcgctgcacctggatgacggtgttaaccgcaagaatcaaac

SEQ ID NO: 611464 - DNA, 75 bp, synthetic construct
  source 1..75: mol_type = other DNA
tgatgatgccgcacaggcgatgaaagcgcaggtgggcgaagacgcctcgatgcgtctgacgatcactgacaccaa

SEQ ID NO: 611465 - DNA, 75 bp, synthetic construct
  source 1..75: mol_type = other DNA
ctgcggacggtacggtatttaagcgcccgctgttgttgaaggaactggcctatcagactgggcgaacatcaacgt

SEQ ID NO: 611466 - DNA, 75 bp, synthetic construct
  source 1..75: mol_type = other DNA
aacaccaaaggttgatgaatacgccccggtatttggttgcacccatgcgtcatctggccgcttcgaatttttgtt

SEQ ID NO: 611467 - DNA, 75 bp, synthetic construct
  source 1..75: mol_type = other DNA
cggcaatacgccgtttgccctgaaacacgcgaactcgatcaatcgtcagaatgtgacgtcatcgcagaaagtgtc

SEQ ID NO: 611468 - DNA, 75 bp, synthetic construct
  source 1..75: mol_type = other DNA
tggcgttacaaacctgccgtacaacgccgttgatgactgccagccagattacgctggaagcctcagaccccgggc

SEQ ID NO: 611469 - DNA, 75 bp, synthetic construct
  source 1..75: mol_type = other DNA
cggcgcaggacgcagcaaaatcggccagtaatggtggacgaccgagcgccgtagcgaagaaaggcgagacgattc

SEQ ID NO: 611470 - DNA, 75 bp, synthetic construct
  source 1..75: mol_type = other DNA
gtgtctggtagaaccacatacggaagcagccacaatagagcttacttcaacggcgcaggacgcagcaaaatcggc

SEQ ID NO: 611471 - DNA, 75 bp, synthetic construct
  source 1..75: mol_type = other DNA
ggagtcgtcgacggcgagtacggcgtatcagggatgtctggtcaatcctcgcgcgaccgtctccagcgtcacgct

SEQ ID NO: 611472 - DNA, 75 bp, synthetic construct
  source 1..75: mol_type = other DNA
agcgccagcgtacccgtctatcagggcagtgttcagcttaatcctgctgaatctcatgatgtcgggttttctgct

SEQ ID NO: 611473 - DNA, 75 bp, synthetic construct
  source 1..75: mol_type = other DNA
aagcccgcgcctgacgtcgagccgaaaatcgtcctcacgccagaaaactatgatgacacggcgcaggcgatgaaa

SEQ ID NO: 611474 - DNA, 75 bp, synthetic construct
  source 1..75: mol_type = other DNA
aaccgcgcagtaatgagctgttggatttgtatagtgatcacccgaacggcacgctaatgaccgacctggggttac

SEQ ID NO: 611475 - DNA, 75 bp, synthetic construct
  source 1..75: mol_type = other DNA
gcaatctggttggtagcgcgttacaaggacgcgtaatgctggtggatgatgtgatcaccgccggaacggcgattc

SEQ ID NO: 611476 - DNA, 75 bp, synthetic construct
  source 1..75: mol_type = other DNA
cgggcgcgatctggcactgttaggccgtttttacgctgaagcattggtggattccggcattgagttcgatctgct

SEQ ID NO: 611477 - DNA, 75 bp, synthetic construct
  source 1..75: mol_type = other DNA
tagaaagtatggatgatggcgtgattagctgggacgagcagggtaatttgcaatttatcaacgcccaggcggcgc

SEQ ID NO: 611478 - DNA, 75 bp, synthetic construct
  source 1..75: mol_type = other DNA
gaaaatccagatggcttgctgcctggtagcaacgggcgaagcggcaactatcagcgacggcctggcgcgtgttaa

SEQ ID NO: 611479 - DNA, 75 bp, synthetic construct
  source 1..75: mol_type = other DNA
tcatccccagttacaacggcgcgcgtaaacaggccaacctgacgccgttgttggcgattctgctgcacaaactcg

SEQ ID NO: 611480 - DNA, 75 bp, synthetic construct
  source 1..75: mol_type = other DNA
tgtgaaggggatacacgcagacatttcccgcgccagacaaagatatcgccggaggcggaacggcaaccagttcgt

SEQ ID NO: 611481 - DNA, 75 bp, synthetic construct
  source 1..75: mol_type = other DNA
cttagttcggccatgaagagcctctctgtgaagcttaccaaggtttgtaatgacattcggttgcttgcttcaggt

SEQ ID NO: 611482 - DNA, 75 bp, synthetic construct
  source 1..75: mol_type = other DNA
gcgaaagcgctgggcggcggtttcccggtcggtgcgttgttggcaaccgaagagtgcgccagcgtgatgaccgtt

SEQ ID NO: 611483 - DNA, 75 bp, synthetic construct
  source 1..75: mol_type = other DNA
tctcagcgcaaggctcttttcaggaaaagcgtgatgattggttctggtgttttgattcagatgaggtttacgtta

SEQ ID NO: 611484 - DNA, 75 bp, synthetic construct
  source 1..75: mol_type = other DNA
gtgctgctgtgcggcgaagagggggttgggaaagagctgctgagccaggctatccacaatgaaagcgaacgggcg

SEQ ID NO: 611485 - DNA, 75 bp, synthetic construct
  source 1..75: mol_type = other DNA
ggacaccacagtgatgctggcggcatctgctggtcagcttgagcttaacgttatggagccggtcatcacctttgc

SEQ ID NO: 611486 - DNA, 75 bp, synthetic construct
  source 1..75: mol_type = other DNA
ctctcctgaagccacatctgggatataaggtgtgttctgaaatggcgcacgaagcataccatacaggtaaatccc

SEQ ID NO: 611487 - DNA, 75 bp, synthetic construct
  source 1..75: mol_type = other DNA
cgggtgctgtatgaaaaacatgacactgctggcaacgcgctactgccacaagcaaaagacccggaaaccacggcg

SEQ ID NO: 611488 - DNA, 75 bp, synthetic construct
  source 1..75: mol_type = other DNA
tactgaaagagattatttgtaaagcacttcccctgcccgtagacgataaatcgttgagcgaagtactgcatcagg

SEQ ID NO: 611489 - DNA, 75 bp, synthetic construct
  source 1..75: mol_type = other DNA
gcgcgacaattttcataccattaaagagaactggcatcgtttaatgaatcgtcagcggtggcttgattactggca

SEQ ID NO: 611490 - DNA, 75 bp, synthetic construct
  source 1..75: mol_type = other DNA
aacgtatcgccctggcacgattaattttacgacgtccgaaatggatatttcttgacgaaactacctctcatcttg

SEQ ID NO: 611491 - DNA, 75 bp, synthetic construct
  source 1..75: mol_type = other DNA
atgagtctattgaatgacgttcagaaattcattgaagcccatccggggtgtacttccggcgacattgcggatgct

SEQ ID NO: 611492 - DNA, 75 bp, synthetic construct
  source 1..75: mol_type = other DNA
atgagtctattcaatgacgttcagaaattcattgaagcccatccggggtgtacttccggggacattgcggatgct

SEQ ID NO: 611493 - DNA, 75 bp, synthetic construct
  source 1..75: mol_type = other DNA
tggcttgattactggcagaatatttattcgcgctcgcttagcgttcttccctactttctgttattgccgcagttt

SEQ ID NO: 611494 - DNA, 75 bp, synthetic construct
  source 1..75: mol_type = other DNA
atcaaaggggaaggggaggcagaaatgctcggcttctatgaagccatgcaaaatcacaccgtcaagctgacgccg

SEQ ID NO: 611495 - DNA, 75 bp, synthetic construct
  source 1..75: mol_type = other DNA
atcactaaaaatccagatggcttgctgcctggtggcggcgggcgaagtggcatccgttagcgatggcctggcgcg

SEQ ID NO: 611496 - DNA, 75 bp, synthetic construct
  source 1..75: mol_type = other DNA
taaacaggccaacctgacgccattgctggcgatcctgctgcacaaactcggttttccagtagtggttcacggtgt

SEQ ID NO: 611497 - DNA, 75 bp, synthetic construct
  source 1..75: mol_type = other DNA
gctcaaacacgtagaagccacctttgaaagtcagcatcagtttattgatgcggtgataacccttaaaccgataat

SEQ ID NO: 611498 - DNA, 75 bp, synthetic construct
  source 1..75: mol_type = other DNA
ggcggacgagcttattggcagcgatcgcccggagaacgaaaatggtcgcctgagtcggctggaactggcgcacgg

SEQ ID NO: 611499 - DNA, 75 bp, synthetic construct
  source 1..75: mol_type = other DNA
agcatcctgggagcgatgccgcaaactgatgaaacgggagtcgtggagcgtaccgcaccaggcccagggcgtgac

SEQ ID NO: 611500 - DNA, 75 bp, synthetic construct
  source 1..75: mol_type = other DNA
tctgtctcggaaagaaaaattacgtgttcttcggtagcgatcacggcggcgagcgtggagcactgctgtacgggc

SEQ ID NO: 611501 - DNA, 75 bp, synthetic construct
  source 1..75: mol_type = other DNA
aatgccttgaataatgcgcccgtgccgtataccgcgttcaccatcacgaaagatatgggcaaaaaccgccagggg

SEQ ID NO: 611502 - DNA, 75 bp, synthetic construct
  source 1..75: mol_type = other DNA
acgtttgaggtcagccagaatagcagttatgggctgtcaacgccgctcagcgcagaactcatgcgcgatacctcg

SEQ ID NO: 611503 - DNA, 75 bp, synthetic construct
  source 1..75: mol_type = other DNA
atgcgtcagttcggtgcgctggcgacggtggtgccaacgtcagtgcaggatgtggctggttggccgatgcagggt

SEQ ID NO: 611504 - DNA, 75 bp, synthetic construct
  source 1..75: mol_type = other DNA
ggcaggatttgcacataccgaatggctggggttagccgtatttgagcattcataccacgaaggcgataacgtggg

SEQ ID NO: 611505 - DNA, 75 bp, synthetic construct
  source 1..75: mol_type = other DNA
acaccttgagtgcgttgaaagtgaaaaaaggcgaagacgcggtgattcgcgtggtgactaaaaatgcgcagggaa

SEQ ID NO: 611506 - DNA, 75 bp, synthetic construct
  source 1..75: mol_type = other DNA
gataaccagccccgatacccctaaagccaaattctgggggcatatggccgaaacgatgatcggtgctggcgggct

SEQ ID NO: 611507 - DNA, 75 bp, synthetic construct
  source 1..75: mol_type = other DNA
tggtacgacacagtagataaacaaggcagtatcgcttatcagggaatggcaatgatgagcgtccttagcgtggtg

SEQ ID NO: 611508 - DNA, 75 bp, synthetic construct
  source 1..75: mol_type = other DNA
cgcagaaaagtttcctacacaaccgcccaggtacaatccctcacaccgattcgccaaacggtggagaagcttgta

SEQ ID NO: 611509 - DNA, 75 bp, synthetic construct
  source 1..75: mol_type = other DNA
tagaggcggtcacaaccgcaaggactaccacctaactctcgacacagccaaagaactggcgatggttgacgactg

SEQ ID NO: 611510 - DNA, 75 bp, synthetic construct
  source 1..75: mol_type = other DNA
acggcgatccggatgacggtgattgtgcgggatagcggaggaaatctgttgccaggcgcaaactttaatctcata

SEQ ID NO: 611511 - DNA, 75 bp, synthetic construct
  source 1..75: mol_type = other DNA
cttacctcgcagatttataatcacattgagcaaatcgcgccaaatattcatgtgatattcaagtcttcattaaat

SEQ ID NO: 611512 - DNA, 75 bp, synthetic construct
  source 1..75: mol_type = other DNA
ccagtatcgcgtatcagggcatggcaatgatgagcgtacttagcgtggtgtcgcaaacgcatctggtcgctattg

SEQ ID NO: 611513 - DNA, 75 bp, synthetic construct
  source 1..75: mol_type = other DNA
tcggatttgtcagttttgttgctcgatttaccgaaggtggtaaaacaggtgcaataattgaacgttcgcgatttt

SEQ ID NO: 611514 - DNA, 75 bp, synthetic construct
  source 1..75: mol_type = other DNA
accaacggcaccaaagtaggaatgaagccgcttgaaaatgaatcattaatcaatgatatcagtctattacatccc

SEQ ID NO: 611515 - DNA, 75 bp, synthetic construct
  source 1..75: mol_type = other DNA
agaacgcgatgcgttgcgggaggaagtcgcccgactgaatcaggaaatacgccgccggcagatggagctggatat

SEQ ID NO: 611516 - DNA, 75 bp, synthetic construct
  source 1..75: mol_type = other DNA
gatgagcaaaaacaggttgccgttgaacattatcttaaccacggctgctgcctggcgtttaccagcagagccctg

SEQ ID NO: 611517 - DNA, 75 bp, synthetic construct
  source 1..75: mol_type = other DNA
ttggtgactgggagatgcggcatcatcgcgatttgatgcaagaagatgccgaaaactatagcgcatggtgcaatg

SEQ ID NO: 611518 - DNA, 75 bp, synthetic construct
  source 1..75: mol_type = other DNA
cggtgaaggatttcaggcattttcgcaacgtgtggaacgctttatcgcaaggcttagtgaatatcagcactatca

SEQ ID NO: 611519 - DNA, 75 bp, synthetic construct
  source 1..75: mol_type = other DNA
gtggtgcctcaacggcaattggcgcgcaggggggcaattgaaggtttaaaagaaattaaactctttaaccgtcgg

SEQ ID NO: 611520 - DNA, 75 bp, synthetic construct
  source 1..75: mol_type = other DNA
gattggcattgttgcgctggcaaatatgaattcgaatctgatactacagctttgcgcggatatcgataattatct

SEQ ID NO: 611521 - DNA, 75 bp, synthetic construct
  source 1..75: mol_type = other DNA
ctgactgacgtacttccggactttggtggtgacagctggacttactctgataactatatgaccggcagaacaacc

SEQ ID NO: 611522 - DNA, 75 bp, synthetic construct
  source 1..75: mol_type = other DNA
atggatgttagcgaaagattagcaaaggcaggaattacaggcgatgcggcgatatatgatgattctgatccagaa

SEQ ID NO: 611523 - DNA, 75 bp, synthetic construct
  source 1..75: mol_type = other DNA
ttgtataaatggaaagatgaaattatcggcaacagtgcttaccagactatgcgtaaacataacgaaccttccctg

SEQ ID NO: 611524 - DNA, 75 bp, synthetic construct
  source 1..75: mol_type = other DNA
cttatcagattatgcgtaaacataacgaaccttccctggaggcagaacgcggtgcgttgcgggggaagtcgcccg

SEQ ID NO: 611525 - DNA, 75 bp, synthetic construct
  source 1..75: mol_type = other DNA
ttgtataaatggaaagatgaaattatcggcaacagtgcttaccagactatgcgtaaacaggtgatgcctctaatt

SEQ ID NO: 611526 - DNA, 75 bp, synthetic construct
  source 1..75: mol_type = other DNA
ctttttgtttatccatcattaactgtcacctggaatggttgcgcgacaaacccacccaaaacacgtgcttatggt

SEQ ID NO: 611527 - DNA, 75 bp, synthetic construct
  source 1..75: mol_type = other DNA
ttgatcgatcaatgagcgctggattaactcgctatttcccgacaactgagctggcgcaaattggtgatgaaacgg

SEQ ID NO: 611528 - DNA, 75 bp, synthetic construct
  source 1..75: mol_type = other DNA
ttgccgcgcaaggatatcgtttccgcgtgccatacgggacactactgtgtgtttcagataaaccgttgcatggtg

SEQ ID NO: 611529 - DNA, 75 bp, synthetic construct
  source 1..75: mol_type = other DNA
gcgattgatatggaaagtgcaaccattgcagcacaaggataccgtttccgcgtgccatacgggacgctactgtgt

SEQ ID NO: 611530 - DNA, 75 bp, synthetic construct
  source 1..75: mol_type = other DNA
cacggttgcgccattataccggtacgccagttgaacattttcaaccgttcgtcttgtttaccaactacacacgtt

SEQ ID NO: 611531 - DNA, 75 bp, synthetic construct
  source 1..75: mol_type = other DNA
gtgatattggttgtctggagattcagggggccagtctatcatccaacggaattctccccgttatcgcattttgat

SEQ ID NO: 611532 - DNA, 75 bp, synthetic construct
  source 1..75: mol_type = other DNA
ggcggatgttatcgacggcattaaaaccctgcgcgaaatcggcttcgataccttcaaactgaacggttgtgaaga

SEQ ID NO: 611533 - DNA, 75 bp, synthetic construct
  source 1..75: mol_type = other DNA
ccaaccggtgaaggggtaaccagcgcgcggacgtttgtccgtctgcgtcgctgtgtattagtcgatgcgtttcgc

SEQ ID NO: 611534 - DNA, 75 bp, synthetic construct
  source 1..75: mol_type = other DNA
cgcgatgaccacgttcttgatgcggttctgccgcccgatattcctattccgagcattgcggaagtgcaacgtgcg

SEQ ID NO: 611535 - DNA, 75 bp, synthetic construct
  source 1..75: mol_type = other DNA
aaccctcgcagcatgaaatcccttatccttatgtcatcgatggctctgaattgacacttgatcgctcaatgagcg

SEQ ID NO: 611536 - DNA, 75 bp, synthetic construct
  source 1..75: mol_type = other DNA
gcagaacctgttatctctcctggcatgaagctgccgggcgcgataaaggccatcagtggatggaagagcaattag

SEQ ID NO: 611537 - DNA, 75 bp, synthetic construct
  source 1..75: mol_type = other DNA
ggcagcctgagttcacagataaaacactctccaggaaacccggggcggttcagaccgtaacctgggacggtagca

SEQ ID NO: 611538 - DNA, 75 bp, synthetic construct
  source 1..75: mol_type = other DNA
cacaaattaatgccctgcacgggacgttactggagtttggtgaaaccatccacaaaggccgagcagcgatggaac

SEQ ID NO: 611539 - DNA, 75 bp, synthetic construct
  source 1..75: mol_type = other DNA
cacacatattccagggcgatttattaccctccagggcttccctctgacgactaacggtaagatcgtcatgcgctg

SEQ ID NO: 611540 - DNA, 75 bp, synthetic construct
  source 1..75: mol_type = other DNA
ccgctgatgccgggtcatttcgcatcgttatggaggatctggcgcgtttttatgcctctccgcccgacgatatta

SEQ ID NO: 611541 - DNA, 75 bp, synthetic construct
  source 1..75: mol_type = other DNA
atatcagattgatgatcttgattactttgtgcttacagagacgggattcaccccttatacccacatcggtaacag

SEQ ID NO: 611542 - DNA, 75 bp, synthetic construct
  source 1..75: mol_type = other DNA
ctgccggtggtcattcctgtctttgccaatctgctttatagccagcgcgacggcaaactcgcgtggggaaaactc

SEQ ID NO: 611543 - DNA, 75 bp, synthetic construct
  source 1..75: mol_type = other DNA
gttctcagcactgggcacgtgaactgacaaagcttggtcataaagtccggttgttacaggcccgcttcgttaagg

SEQ ID NO: 611544 - DNA, 75 bp, synthetic construct
  source 1..75: mol_type = other DNA
ggtggtaaaaaccattgatctggaaagcaaaaaaatcaccatccaccacgatccaattaccgcggtgaactggcc

SEQ ID NO: 611545 - DNA, 75 bp, synthetic construct
  source 1..75: mol_type = other DNA
agcaaaaaaatcaccatccaccacgatccgattgccgcagtgaactggccggagatgaccatgcgctttaccatc

SEQ ID NO: 611546 - DNA, 75 bp, synthetic construct
  source 1..75: mol_type = other DNA
gctgtcaatttgaacgatgaaaatgcaagtgcactgtggcacgagctgggtcatcatcttgagtacagtaaccct

SEQ ID NO: 611547 - DNA, 75 bp, synthetic construct
  source 1..75: mol_type = other DNA
agcgaaaaaacgttatcgaatggagaaccagcaattactacgcgaccacggcgtgccatgtgaaatcacactctc

SEQ ID NO: 611548 - DNA, 75 bp, synthetic construct
  source 1..75: mol_type = other DNA
cgtcagctgaaacccggcagcgtggtggcgatttcactgccgcgcagcccggaacacgtcattatttcgctcgcc

SEQ ID NO: 611549 - DNA, 75 bp, synthetic construct
  source 1..75: mol_type = other DNA
ctgaccgtattccagccgctggtgccacccgactggaagatgaacttacgcgatggcgaactatatgcccaggtc

SEQ ID NO: 611550 - DNA, 75 bp, synthetic construct
  source 1..75: mol_type = other DNA
acacaggacgcaacaaacgccatttctctggaaaacctgaagtttgagaagcttaaatttcagtatgaaatgtat

SEQ ID NO: 611551 - DNA, 75 bp, synthetic construct
  source 1..75: mol_type = other DNA
gtttaagaaaaactctggctatagtccattgcagttcagaagagatgaagcatggttgtttaaaaatcaaatagg

SEQ ID NO: 611552 - DNA, 75 bp, synthetic construct
  source 1..75: mol_type = other DNA
tgctgcaattttgctacacctcagaagtcgccgacagtgcactgaaaatcctcgacgaagcaggattacctggtg

SEQ ID NO: 611553 - DNA, 75 bp, synthetic construct
  source 1..75: mol_type = other DNA
cagtactgcgcactggcccgaccgaaagcctgatccaggggctgcatcagtccgtcttccgcgcggaaaaacgca

SEQ ID NO: 611554 - DNA, 75 bp, synthetic construct
  source 1..75: mol_type = other DNA
acaaaaagataacttctatggcgtgcagttccacccggaacgctccggtgccgctggcgctaagttgctgaaaaa

SEQ ID NO: 611555 - DNA, 75 bp, synthetic construct
  source 1..75: mol_type = other DNA
atcagccgtcgcacgccacggatatgatcctgttgtcagccgtgacccggacgtggtgctgcgcgccgataaact

SEQ ID NO: 611556 - DNA, 75 bp, synthetic construct
  source 1..75: mol_type = other DNA
caagcggcgatggatcaggtgcgtgagcgcgaactgtttgatctcatcaaggcctgtacccaaccggtgctgggc

SEQ ID NO: 611557 - DNA, 75 bp, synthetic construct
  source 1..75: mol_type = other DNA
tgctgcaattttgctatacctccgaagtggctgatagcgccctgaaaattctcgatgaagcaggattgccaggcg

SEQ ID NO: 611558 - DNA, 75 bp, synthetic construct
  source 1..75: mol_type = other DNA
ttgctgcgtctggatgaggccagcgaactggcgcgcctggcggctcccgttcttcacgcccgtactttacagccg

SEQ ID NO: 611559 - DNA, 75 bp, synthetic construct
  source 1..75: mol_type = other DNA
gcgcattgcgaaggcggtagcatcgatcacttctttgagaacggcgatgaactgaatgagcagatggtgcaacgg

SEQ ID NO: 611560 - DNA, 75 bp, synthetic construct
  source 1..75: mol_type = other DNA
tgctgcaattttgctacacctctgaagtggctgacagcgccctgaaaatcctcgacgaagcgggattacctggcg

SEQ ID NO: 611561 - DNA, 75 bp, synthetic construct
  source 1..75: mol_type = other DNA
cgggttacaacattgaaccggaccaggtgcgcgtggagtcgctggtgccagcacattgtgaaggcggcagcatcg

SEQ ID NO: 611562 - DNA, 75 bp, synthetic construct
  source 1..75: mol_type = other DNA
cgttatcagcgccaacaaactggcgggagccagcgacagcaacaagtatcgccagatccacgatgctttcgaaaa

SEQ ID NO: 611563 - DNA, 75 bp, synthetic construct
  source 1..75: mol_type = other DNA
gcgaagagagcaacggcgtcgacttgctgggcatcatcgacgaagacgtgccgaaaatgaccgactttggtctgc

SEQ ID NO: 611564 - DNA, 75 bp, synthetic construct
  source 1..75: mol_type = other DNA
gggcaattgttggttacggcacattcgctgtcatttactgggggtatcgcatactgcgacataaagaaggattag

SEQ ID NO: 611565 - DNA, 75 bp, synthetic construct
  source 1..75: mol_type = other DNA
cgattatcggttacggcgcattcgctgttatttattggggctatcgcatactgcgacataaagaaggattaggct

SEQ ID NO: 611566 - DNA, 75 bp, synthetic construct
  source 1..75: mol_type = other DNA
aaagcatcattaaaaaacccgctgcctttcggaccatttctggcggctgcgggtttcgttgtaggctgggatagt

SEQ ID NO: 611567 - DNA, 75 bp, synthetic construct
  source 1..75: mol_type = other DNA
cggcgctcaggcagggatacctgttgccatcgacgccaaccctgaatgggcgattgaagccggacgatggacaga

SEQ ID NO: 611568 - DNA, 75 bp, synthetic construct
  source 1..75: mol_type = other DNA
atcgagtacggcaataagctggaaagtaaactccgtgaagataatcaggaaatggccgatctcatcgaccaggtt

SEQ ID NO: 611569 - DNA, 75 bp, synthetic construct
  source 1..75: mol_type = other DNA
ttttgtacgcttgtttatcagccctactttttttctgggatgcaaagcatggcttgttacctgacagatttacct

SEQ ID NO: 611570 - DNA, 75 bp, synthetic construct
  source 1..75: mol_type = other DNA
cgaagaagccgatagcctcattagcgcttttgtcagcgatcttgagcgcctggcggcgctgctcgacagcggtat

SEQ ID NO: 611571 - DNA, 75 bp, synthetic construct
  source 1..75: mol_type = other DNA
cgccagccggagcacagcaatccgctggagtgtgacaccctgtgttttatgggcaccaccgtggtgagcggcacg

SEQ ID NO: 611572 - DNA, 75 bp, synthetic construct
  source 1..75: mol_type = other DNA
ggcgtggaagcggtgcgtgaagatcatccgttggcatcactgctgccgtgcgataacgtctttgccatcgaaagc

SEQ ID NO: 611573 - DNA, 75 bp, synthetic construct
  source 1..75: mol_type = other DNA
aagctggtgattctggcgcgtgaagcaggttacaacatcgaaccggatcaggtacgtgtggaatcgctggtgcct

SEQ ID NO: 611574 - DNA, 75 bp, synthetic construct
  source 1..75: mol_type = other DNA
atccgttggcatcactgctgccgtgcgataacgtctttgccatcgaaagccgctggtatcgcgacaacccgctgg

SEQ ID NO: 611575 - DNA, 75 bp, synthetic construct
  source 1..75: mol_type = other DNA
gttaaaggcgatgaaagtaaaggtgggggaagaagcgtctctgcgtgtaaccatcaccgataacaaaaacaataa

SEQ ID NO: 611576 - DNA, 75 bp, synthetic construct
  source 1..75: mol_type = other DNA
gcatttctgccatgcctggttaatgcgcgttcaaccgtttccagcgtcacgctcacctcaacggcgtttgacgct

SEQ ID NO: 611577 - DNA, 75 bp, synthetic construct
  source 1..75: mol_type = other DNA
tatctctgtctcctccactaccgttgatgatcttattttaaatgaagtcacaccggaatcagccagcttttcctt

SEQ ID NO: 611578 - DNA, 75 bp, synthetic construct
  source 1..75: mol_type = other DNA
gcacgccgagtgatttcacaagctcgacagcagatgatctgctgctacagttcctgacgccggttgcgcaagcca

SEQ ID NO: 611579 - DNA, 75 bp, synthetic construct
  source 1..75: mol_type = other DNA
tgatgaaagtataaatgccgcgaaggcaaaggtcggtgacagcactacgatacgcctgaccattaccgataaaaa

SEQ ID NO: 611580 - DNA, 75 bp, synthetic construct
  source 1..75: mol_type = other DNA
cactgttcgaccagaatggcagtatgcaggctgaatgtggggtaggtcatattccgagccagaatcaattacagg

SEQ ID NO: 611581 - DNA, 75 bp, synthetic construct
  source 1..75: mol_type = other DNA
gcagcagggcgcaggctaaagttggagaaaccgtcaccatgacggtgcataccttcaatgcactgaataatgcgc

SEQ ID NO: 611582 - DNA, 75 bp, synthetic construct
  source 1..75: mol_type = other DNA
ggcgacggcgcaggcgctggtcacgctgccgatttcgctcatcggttatgttgttgcttgtttctggctgaatac

SEQ ID NO: 611583 - DNA, 75 bp, synthetic construct
  source 1..75: mol_type = other DNA
ttagcctgatgattgctatcgccgtgctttgctcatgggtcggcgcactttgctggaacgtcgccagccagcgat

SEQ ID NO: 611584 - DNA, 75 bp, synthetic construct
  source 1..75: mol_type = other DNA
acagacggatctggggttacctgtagctgccggaagtggaaactggtgggcttatgaaatgagtatacctaaccc

SEQ ID NO: 611585 - DNA, 75 bp, synthetic construct
  source 1..75: mol_type = other DNA
gtctgggcacgtgtgagtcaggcgaatacgtccagtataagtaaaggtggctgtggagcgaatatgctgccgcgt

SEQ ID NO: 611586 - DNA, 75 bp, synthetic construct
  source 1..75: mol_type = other DNA
ctacggatgcacagggctacgcaacggtggagattgaacaaccccagggcgtgggcttaattacgccgctaaata

SEQ ID NO: 611587 - DNA, 75 bp, synthetic construct
  source 1..75: mol_type = other DNA
ctctggtaatgagatggtggcgaaggttgaagtgacaaccgatcgtgatactacctcgggcagcctggcacgggc

SEQ ID NO: 611588 - DNA, 75 bp, synthetic construct
  source 1..75: mol_type = other DNA
gcaaaacaagaccggcaccaaacaaatcaaggaatggtctccacgattacgaaccgcgatccagttagccagaaa

SEQ ID NO: 611589 - DNA, 75 bp, synthetic construct
  source 1..75: mol_type = other DNA
agcaaaacaaaaccggcaccaaacaaatcaaggaatggtcaccgcgattacgtacagcgatccagttagcccgaa

SEQ ID NO: 611590 - DNA, 75 bp, synthetic construct
  source 1..75: mol_type = other DNA
tacgaagagatcctgaatgatgctattgatgtcatgacgttcagtaaactctggaacaaatttcttagcagcacc

SEQ ID NO: 611591 - DNA, 75 bp, synthetic construct
  source 1..75: mol_type = other DNA
gtaattgaaggccggaaaaacatactgacgttttcgcaattatggaaaaaattccttaacagcactgattatgct

SEQ ID NO: 611592 - DNA, 75 bp, synthetic construct
  source 1..75: mol_type = other DNA
aaaatccgcctatgtgatcagcaatcaatacggcaaccgatatatgtacaaaggctttaacgaaatgtgggtaga

SEQ ID NO: 611593 - DNA, 75 bp, synthetic construct
  source 1..75: mol_type = other DNA
tgacaggaaggttaaagtttcaccaacacttgatgtcccgttacctgaaaatattccaagtaattccaagtgtga

SEQ ID NO: 611594 - DNA, 75 bp, synthetic construct
  source 1..75: mol_type = other DNA
caacaacagggatatcaggtcgaaggcctgtttatgaagaactgggaagaagacgacggtgaggaatattgcaca

SEQ ID NO: 611595 - DNA, 75 bp, synthetic construct
  source 1..75: mol_type = other DNA
gatggttacacccgtagcaatgaaaagcatattgcaggaagcggtgacgggatcgtttcaccggtcgtggtggat

SEQ ID NO: 611596 - DNA, 75 bp, synthetic construct
  source 1..75: mol_type = other DNA
cttcaacacaggtcaacttgtgactgtatctaaaagccgcgccttccaggcgtgcctggtgcaccctcactcaac

SEQ ID NO: 611597 - DNA, 75 bp, synthetic construct
  source 1..75: mol_type = other DNA
gcaaaacaaaaccggcaccaaacaaatcaaggaatggtcaccgcgattacgtacagcgatccagttagcccgaaa

SEQ ID NO: 611598 - DNA, 75 bp, synthetic construct
  source 1..75: mol_type = other DNA
gccgagcaaaaagccgacgttccgtttgggtgcaacttccatgacataaaagccaaagggatttcagattacgaa

SEQ ID NO: 611599 - DNA, 75 bp, synthetic construct
  source 1..75: mol_type = other DNA
ggaacacgctccaaatgaccagtttcggcgcacattcaacgccattgaggatgccagcgaacagctggaggcgtt

SEQ ID NO: 611600 - DNA, 75 bp, synthetic construct
  source 1..75: mol_type = other DNA
gtgccattcaacgtactggcgcgcctgtttccacgatgattatcggcaccctgccggtggtgattcccgtttttg

SEQ ID NO: 611601 - DNA, 75 bp, synthetic construct
  source 1..75: mol_type = other DNA
acgtcagcaacggaagtattctctatggctcttcagttgtatcatgacaaagaggccgctgccgcatcactgatg

SEQ ID NO: 611602 - DNA, 75 bp, synthetic construct
  source 1..75: mol_type = other DNA
tatgcaaatcttaatggtgttgttgctgtcgatttgcacgatgaaaatgcaaatgcactgtggcacgagctgggt

SEQ ID NO: 611603 - DNA, 75 bp, synthetic construct
  source 1..75: mol_type = other DNA
agatgaaagaagcctccattcagtgggccgatcaacaaaatgaggttaactctgacttcttgccagcattcagga

SEQ ID NO: 611604 - DNA, 75 bp, synthetic construct
  source 1..75: mol_type = other DNA
cctctcacctttaaagcaaacaatattattagttctgtgtacagttggagtaacatttttactcttacatggatt

SEQ ID NO: 611605 - DNA, 75 bp, synthetic construct
  source 1..75: mol_type = other DNA
acgcccgatggtgatgactatttgctgggctatctggcggcgctctggctatggcaactacctgcaccacttgcc

SEQ ID NO: 611606 - DNA, 75 bp, synthetic construct
  source 1..75: mol_type = other DNA
agaggccgctgccgcatcactgatgaatggtgacggattgctggaactgttattaggtgtggcaaaggagctaaa

SEQ ID NO: 611607 - DNA, 75 bp, synthetic construct
  source 1..75: mol_type = other DNA
gtctggaggctattacgttgtctatgaggatggatatgaatcatattctcctgctgaggtatttgagtctggata

SEQ ID NO: 611608 - DNA, 75 bp, synthetic construct
  source 1..75: mol_type = other DNA
ttcgcatgtcgtgcttttcttagatttcgatggggtttgccacaggtgtaaaaatgaaacctttgagcgaatgcc

SEQ ID NO: 611609 - DNA, 75 bp, synthetic construct
  source 1..75: mol_type = other DNA
tcaccagacacaaagtaaaagcctttatctgccttgatgacgatgcgaccctgtttcctccagagtacccgcacc

SEQ ID NO: 611610 - DNA, 75 bp, synthetic construct
  source 1..75: mol_type = other DNA
ttaacccgtcagaaagcggagatctgcttagccgcagtaatgacgcgtttattcgcggattcatgacgcaagttg

SEQ ID NO: 611611 - DNA, 75 bp, synthetic construct
  source 1..75: mol_type = other DNA
gtgacagcgaagggagacgaggtaaaaacagcgtttgatatcgtcgatgcctcagctcttttggtatccaatact

SEQ ID NO: 611612 - DNA, 75 bp, synthetic construct
  source 1..75: mol_type = other DNA
tacgcagcatttgatgttagcgcggaatatatctgtaagcaccgaccaatgtctggaggctattacgttgtctat

SEQ ID NO: 611613 - DNA, 75 bp, synthetic construct
  source 1..75: mol_type = other DNA
agaagataaagcgatctcatttgcacagccttatgtttttgcttttacttcaaactttcgtgttttttctgatct

SEQ ID NO: 611614 - DNA, 75 bp, synthetic construct
  source 1..75: mol_type = other DNA
tttctgcttctgccggagggatgtggcccagcctttccagcaatcgtcgattattataccagtccacccacgtga

SEQ ID NO: 611615 - DNA, 75 bp, synthetic construct
  source 1..75: mol_type = other DNA
agttcagcaccatatcgtgtctataacattggtaatagttcgcctgtggagttgatggactatatcaatgcgtta

SEQ ID NO: 611616 - DNA, 75 bp, synthetic construct
  source 1..75: mol_type = other DNA
ctggctttatcggtttctatgtaagtaaacggcttcttgcagctggtcatcaggttgtaggtattgacaacttaa

SEQ ID NO: 611617 - DNA, 75 bp, synthetic construct
  source 1..75: mol_type = other DNA
ctctaagacattgaatgaactggagcagctgactggcgctcgcttgtttgagcgtggtcgtcaggggcgcaactt

SEQ ID NO: 611618 - DNA, 75 bp, synthetic construct
  source 1..75: mol_type = other DNA
gtagctatggcagtggtgtcttttggtgcaaatgcagctccacaggggcagggaaaagtaacttttaacggaact

SEQ ID NO: 611619 - DNA, 75 bp, synthetic construct
  source 1..75: mol_type = other DNA
gacagcaacaggtgtttcctatttagttgatggtgataacacaattcattttactgctgccgtcagaaaagatgg

SEQ ID NO: 611620 - DNA, 75 bp, synthetic construct
  source 1..75: mol_type = other DNA
gtatcgttcaggcgacgggtgtcggtttacataccggcaagaaagtcaccctgacgttacgccctgcgccggcca

SEQ ID NO: 611621 - DNA, 75 bp, synthetic construct
  source 1..75: mol_type = other DNA
atcccaataacagcatacatattgataaaccacgaaaagtatataaaagaacaaaggaaaatgaggaagcaagga

SEQ ID NO: 611622 - DNA, 75 bp, synthetic construct
  source 1..75: mol_type = other DNA
tggagtttggaaatctgattaacctttcacaatcatcactgtgcaaagcattgaatatcgcttccggtaatatgt

SEQ ID NO: 611623 - DNA, 75 bp, synthetic construct
  source 1..75: mol_type = other DNA
ttccagaaaaagatccacagtggactgtagaaactgggtcgcctgcaacaagttcagcaccatatcgtgtctata

SEQ ID NO: 611624 - DNA, 75 bp, synthetic construct
  source 1..75: mol_type = other DNA
gagacacaagctctctataaaactattggttttaaaccggaaacgccagtacagcaaggtgttaaaaactttgta

SEQ ID NO: 611625 - DNA, 75 bp, synthetic construct
  source 1..75: mol_type = other DNA
caaacgcttgctggatgccggacaccaggtagtcggtattgataatctgaacgactactacgacgtcaatctcaa

SEQ ID NO: 611626 - DNA, 75 bp, synthetic construct
  source 1..75: mol_type = other DNA
atgatcaatagactgaaagacattgagaaaggaaaaatccccccagaacaagtagatcttaacttctatactcat

SEQ ID NO: 611627 - DNA, 75 bp, synthetic construct
  source 1..75: mol_type = other DNA
tgatttatgtaatcaacaggattatagagaaagatggtggaacgctatcaaaggtaataaccttgctgatgacta

SEQ ID NO: 611628 - DNA, 75 bp, synthetic construct
  source 1..75: mol_type = other DNA
ggatttaaaaataattttttccgcgttgcattacacaagaatattctttatagaaccatcagcaaactgcaggag

SEQ ID NO: 611629 - DNA, 75 bp, synthetic construct
  source 1..75: mol_type = other DNA
atgcagtcgaccaccatatccggcacatcggcggagaacacatcctgccttcagtggggattaaaacgtaatatc

SEQ ID NO: 611630 - DNA, 75 bp, synthetic construct
  source 1..75: mol_type = other DNA
ggtgctttcagcgacaaggatgcgttgtgcctggaccaagcttttcccctgatactcaaacaactggaactaatg

SEQ ID NO: 611631 - DNA, 75 bp, synthetic construct
  source 1..75: mol_type = other DNA
gtaatcttggttgggaaacaggactgaaccgccccgggtttcctggagagtgttttatctgtgaactcaggctgc

SEQ ID NO: 611632 - DNA, 75 bp, synthetic construct
  source 1..75: mol_type = other DNA
atgggaagaaagaaaaagaacaacttaaaacgtattgagcaagggaacaccttcaacgacgtaagaaagcaagtt

SEQ ID NO: 611633 - DNA, 75 bp, synthetic construct
  source 1..75: mol_type = other DNA
caggaagctcttatataccatgctttgcggcagggcttttcaccggaggaagtgtttttttctccagatattatt

SEQ ID NO: 611634 - DNA, 75 bp, synthetic construct
  source 1..75: mol_type = other DNA
atgcaaaaacttgaaaaccggtgtgatctgctgctaattcagcatcagaaatggatggcaagtgtaacccggttt

SEQ ID NO: 611635 - DNA, 75 bp, synthetic construct
  source 1..75: mol_type = other DNA
ttgtggcgctgatcctctggcactacacccgtaatcgcaatttaatggatgtcacgaatagcgatttttcccaat

SEQ ID NO: 611636 - DNA, 75 bp, synthetic construct
  source 1..75: mol_type = other DNA
gcagcggtggcggtcatcggttcgctgattattttcactctgcgtgtaaatcgcactgttgcgcagaccgacgtg

SEQ ID NO: 611637 - DNA, 75 bp, synthetic construct
  source 1..75: mol_type = other DNA
gctgcttacacattttaacctgggtggtgttttactcagtgaactacatcgtctgggagaaagccgactggcaaa

SEQ ID NO: 611638 - DNA, 75 bp, synthetic construct
  source 1..75: mol_type = other DNA
cacgaccaataccaactgtgctagaaacaagacagtttaactcagttaacggcagtgacgccgaatcttatgcaa

SEQ ID NO: 611639 - DNA, 75 bp, synthetic construct
  source 1..75: mol_type = other DNA
cgggttatggcggtgaatgtgccgacgacatggattaattctggtatgagtgagtttgacagccggttgtttgca

SEQ ID NO: 611640 - DNA, 75 bp, synthetic construct
  source 1..75: mol_type = other DNA
acagataaagatacagataaagatacagatcaagaagatcaaaacactatggtccatggcgtaaaaaacgccacg

SEQ ID NO: 611641 - DNA, 75 bp, synthetic construct
  source 1..75: mol_type = other DNA
acgatgcaggggcgggtacttgatggtgatttaatcactggatgggaaaaacgccaggtgcttaaagaggacaac

SEQ ID NO: 611642 - DNA, 75 bp, synthetic construct
  source 1..75: mol_type = other DNA
gcgtaaaacatcgcgctggcaagagaaagctaccggctggctgaaacgctatggtgcagtcacgctattattaag

SEQ ID NO: 611643 - DNA, 75 bp, synthetic construct
  source 1..75: mol_type = other DNA
ggctcccgtcttgaccgtcctgaactcttccgtcttctgagggattgccagcaaaacgatatattgctggtagag

SEQ ID NO: 611644 - DNA, 75 bp, synthetic construct
  source 1..75: mol_type = other DNA
ataaacaggctgattgcgagcggcagctcctggagccagattcaaaaagtgctgggttgcagccgggcgacaatc

SEQ ID NO: 611645 - DNA, 75 bp, synthetic construct
  source 1..75: mol_type = other DNA
aaggccagattacgcgagggggtgccaccagaggccatgctggatggcgtgaggcgttacgcaagatacctagcg

SEQ ID NO: 611646 - DNA, 75 bp, synthetic construct
  source 1..75: mol_type = other DNA
cgcgattctggctgggagaaacggggagagaacttagaaaggcgggggcagaagcgcaagttgttgctttttacc

SEQ ID NO: 611647 - DNA, 75 bp, synthetic construct
  source 1..75: mol_type = other DNA
ccaatcagcgtgtgcatgcaaccagcctgcgttatttctggtgccgggagttcggtggggaaaaaagcaggaaac

SEQ ID NO: 611648 - DNA, 75 bp, synthetic construct
  source 1..75: mol_type = other DNA
ttttatgatagatataaggatgatttccacctggatgtcagacgtgaatcatgtcggaaaattgaagccccttca

SEQ ID NO: 611649 - DNA, 75 bp, synthetic construct
  source 1..75: mol_type = other DNA
atcgacgttttttggcccgaacaggaatttcgaaaatccgtggtcgctgccgaaggctggcgcagtcagcctgcg

SEQ ID NO: 611650 - DNA, 75 bp, synthetic construct
  source 1..75: mol_type = other DNA
gcgaaaactcaggaagtctggtccggaatgtatggtagtggcgttgtatatgatgacctcgcctcattccaatat

SEQ ID NO: 611651 - DNA, 75 bp, synthetic construct
  source 1..75: mol_type = other DNA
caggctgaacagtctgctccggcgttttgacgatcgcgatctctaccacaccctgatatggcttgtgctggtatg

SEQ ID NO: 611652 - DNA, 75 bp, synthetic construct
  source 1..75: mol_type = other DNA
atgcgccggataattggtaagcatcttgccgttcctcgctggcaggatacatgtgattattataatcagatgatg

SEQ ID NO: 611653 - DNA, 75 bp, synthetic construct
  source 1..75: mol_type = other DNA
gtcaccgtcattgatcgggagtcaggagccgccctggaaaccagtgctgcgaatgccgggcaaatttcccccggc

SEQ ID NO: 611654 - DNA, 75 bp, synthetic construct
  source 1..75: mol_type = other DNA
tatgctgcaccgtgggcggcaccaggtgtgcctttaaaagcgattaaatggatgttccagcgccatgcgccgctg

SEQ ID NO: 611655 - DNA, 75 bp, synthetic construct
  source 1..75: mol_type = other DNA
ttgaaggaccggccgattttaatgaccgggtagatgaactgtttttagtccaccagcttccggtagccatataca

SEQ ID NO: 611656 - DNA, 75 bp, synthetic construct
  source 1..75: mol_type = other DNA
tggcacgctccggcactggcaaaaatgtggcgcgaatgcccgcaggaaattaacaagccagaattgccctcacag

SEQ ID NO: 611657 - DNA, 75 bp, synthetic construct
  source 1..75: mol_type = other DNA
cgaacggctaacagtttgctttcatgcgcagttaaaacaacgtcacgcaacgatgcgttttgaagaaatgaacga

SEQ ID NO: 611658 - DNA, 75 bp, synthetic construct
  source 1..75: mol_type = other DNA
gagtgggtgcttgtgggtggcaacccttttccattttggtctgaatctgtgtcacttgttattctttacctatcc

SEQ ID NO: 611659 - DNA, 75 bp, synthetic construct
  source 1..75: mol_type = other DNA
caggagacacagacctacgcgccgaaggtgttcaggcacatgtcgcaggtatccggcggcagcatcatcatgccg

SEQ ID NO: 611660 - DNA, 75 bp, synthetic construct
  source 1..75: mol_type = other DNA
attaacgtcaccaacaccgccacggggcagacaacccgccggacggtgaaggggggcgcggtggtcacggcgatg

SEQ ID NO: 611661 - DNA, 75 bp, synthetic construct
  source 1..75: mol_type = other DNA
gcaattgatgaactgcgtggggcattctcaaaacgccgtcaggtcggtgcaagtgagtatgcatatattagcttt

SEQ ID NO: 611662 - DNA, 75 bp, synthetic construct
  source 1..75: mol_type = other DNA
gcgaaacgtcgcccgaccggcggcgtcgagtcactgcgcgccattccgtggatttttgcctggacacaaaaccgc

SEQ ID NO: 611663 - DNA, 75 bp, synthetic construct
  source 1..75: mol_type = other DNA
acaacagagttgaagcactacgtctggcgcggttgctgtatcagcgagaaccagcaaatcttacgcgcctggatc

SEQ ID NO: 611664 - DNA, 75 bp, synthetic construct
  source 1..75: mol_type = other DNA
ctccacgccacaaccgccgctgccaaaagatgtcacgtctgaactggaacgtaccgaaatcactcttccgtccaa

SEQ ID NO: 611665 - DNA, 75 bp, synthetic construct
  source 1..75: mol_type = other DNA
gaagctctgcacggtttgctggcgctggcccgtcatcaactggcctgtcagcctgcatttatcgctggtttcagc

SEQ ID NO: 611666 - DNA, 75 bp, synthetic construct
  source 1..75: mol_type = other DNA
ttccacgcctctgcctcctctaccaaaagatgtaacgtccgaactggaacgtaccgaaatcaccctaccatccga

SEQ ID NO: 611667 - DNA, 75 bp, synthetic construct
  source 1..75: mol_type = other DNA
ttctgaattactggcaaccgctattagcggcgatgccgggttaaccatccaaggcggggcatctaccaccgaaga

SEQ ID NO: 611668 - DNA, 75 bp, synthetic construct
  source 1..75: mol_type = other DNA
ggccagctcagaactcgtaaatggactgatcaagcgggcgttgagaagtacaccacagaggttgtggttaacgtc

SEQ ID NO: 611669 - DNA, 75 bp, synthetic construct
  source 1..75: mol_type = other DNA
caaaaaaacgaggtggggagcaagtggggaatttaaaaagtggggagcaaaagtggggagtggtggggaatggat

SEQ ID NO: 611670 - DNA, 75 bp, synthetic construct
  source 1..75: mol_type = other DNA
aacccgctacgggggagacttacccgaaatctgatttattcaacaaagccaatcagatgatggaacgcgaacggc

SEQ ID NO: 611671 - DNA, 75 bp, synthetic construct
  source 1..75: mol_type = other DNA
cgcaaaccattgctcatcatcaacaactggaacagcaggcactggcgtcactgcaacactggggagttttccatg

SEQ ID NO: 611672 - DNA, 75 bp, synthetic construct
  source 1..75: mol_type = other DNA
ccgattttattaacgctctgcccgatttacgtgcagcgatggcctggctaccgcctcgagaacgcggggcgctgg

SEQ ID NO: 611673 - DNA, 75 bp, synthetic construct
  source 1..75: mol_type = other DNA
tggcacgctccggcactggcaaaaatgtggcgcgaatgtccgcaggaaattaacacgccagaattgccgtcgctg

SEQ ID NO: 611674 - DNA, 75 bp, synthetic construct
  source 1..75: mol_type = other DNA
ccggaatctctcttccggcggagcttaccttaaatcgctttacccccgatggactggcgcaaagtcaggtgttac

SEQ ID NO: 611675 - DNA, 75 bp, synthetic construct
  source 1..75: mol_type = other DNA
tcaaaagccagaattgccatcgctaccagatgccgttaccggatgttatctgacgccttacagtgaaaaacgcct

SEQ ID NO: 611676 - DNA, 75 bp, synthetic construct
  source 1..75: mol_type = other DNA
cggattcggtaaacttgccccttctacgccacaaccgcctctgccaaaagatgtcacctgcgaactggaacgtac

SEQ ID NO: 611677 - DNA, 75 bp, synthetic construct
  source 1..75: mol_type = other DNA
agcagcaggagcgctttttctgcgaggcattaactgaaccaacgctgacatgggcgaaggaaagtcagtttgcaa

SEQ ID NO: 611678 - DNA, 75 bp, synthetic construct
  source 1..75: mol_type = other DNA
ggcgtgctgctgaacaacgatccgcaaaagtggatcgacaccttatcgctgctggtaaattccgggcaaaaacgt

SEQ ID NO: 611679 - DNA, 75 bp, synthetic construct
  source 1..75: mol_type = other DNA
attttccgtcgtgatattcgcgattcatccgagcttacccaagccgaggcagttaaggccttaggcttcctcaag

SEQ ID NO: 611680 - DNA, 75 bp, synthetic construct
  source 1..75: mol_type = other DNA
ggaatttctaaagcaagacgagaggaaataaaaaaatccctctcattcatatcacaactacaaaaacagaggttg

SEQ ID NO: 611681 - DNA, 75 bp, synthetic construct
  source 1..75: mol_type = other DNA
gggacgctgcaactgttccgtaccgaacaacagtatgaaaatgcgacccgcgatatcgccgtgctggaagatgcc

SEQ ID NO: 611682 - DNA, 75 bp, synthetic construct
  source 1..75: mol_type = other DNA
aagagggtgcgccagtgtccaccgttcttgatgaaacctacaaaatcgccattactcgatttgataatcgcatcc

SEQ ID NO: 611683 - DNA, 75 bp, synthetic construct
  source 1..75: mol_type = other DNA
gccgctggcccagcagtttcagcaggagctgtacctgcgtatcttccgcaacgagccatatcaggaatacgtgcg

SEQ ID NO: 611684 - DNA, 75 bp, synthetic construct
  source 1..75: mol_type = other DNA
ctattgttaatgcccgtctgaaaccgcatcccgactatcgtccgccgctaaggtgggtttctattgatattgaaa

SEQ ID NO: 611685 - DNA, 75 bp, synthetic construct
  source 1..75: mol_type = other DNA
tggtgggcggaaacgctgcaaaaacaacggctgaccagcgcattagaactggagtatgaaactcatttctgccgt

SEQ ID NO: 611686 - DNA, 75 bp, synthetic construct
  source 1..75: mol_type = other DNA
gataaaggaccatgggtaaatcactggaatgagatggcgcgaaagacggtcgtaaagcgtgcaagcaagtattgg

SEQ ID NO: 611687 - DNA, 75 bp, synthetic construct
  source 1..75: mol_type = other DNA
ccgtggcggaaggaatactcccttttattgaggataattttgctacacttatgaccgggcaacttgggctatttt

SEQ ID NO: 611688 - DNA, 75 bp, synthetic construct
  source 1..75: mol_type = other DNA
gtgatcatcggttggaacgtggtgcagttcgatctgcgaatgctgcaaaaacatgccgagcgttaccgtcttccg

SEQ ID NO: 611689 - DNA, 75 bp, synthetic construct
  source 1..75: mol_type = other DNA
ggctcttgcaggggctggtgcagatattattgcatttgatggcaccacaaggcatcgccctgtaggtgtgaaagc

SEQ ID NO: 611690 - DNA, 75 bp, synthetic construct
  source 1..75: mol_type = other DNA
atctgcaactgcaggcgctgccattaagctatttcccgtggctggttgcgattctggcagggtatatgacgctaa

SEQ ID NO: 611691 - DNA, 75 bp, synthetic construct
  source 1..75: mol_type = other DNA
cgtatcgctatctgatgaaaaacctgcgttctcgcctgatggcgacacaggcatggctggaagcgcgcctgaaag

SEQ ID NO: 611692 - DNA, 75 bp, synthetic construct
  source 1..75: mol_type = other DNA
ctccgtaagttatcaaaacagcaaagaaatcactataacattaaagacggataaccacagttatattggtacacc

SEQ ID NO: 611693 - DNA, 75 bp, synthetic construct
  source 1..75: mol_type = other DNA
aaataaccaacacaatcatagatgcaaaagtgacggcatttctgccggaaaatgtactgaccatcggaggtcaat

SEQ ID NO: 611694 - DNA, 75 bp, synthetic construct
  source 1..75: mol_type = other DNA
atgtcgttacttgcacaactggatcaaaaaatcgctaccaatggtggcttgattgtctcctgccagccggttccg

SEQ ID NO: 611695 - DNA, 75 bp, synthetic construct
  source 1..75: mol_type = other DNA
gtaccgtttattcagagctgtgcatcgtggccgttaatgatcatgaccgtgatcgtgatgattgtcgggatcgcg

SEQ ID NO: 611696 - DNA, 75 bp, synthetic construct
  source 1..75: mol_type = other DNA
tgacctcttacacgctgataacgcattaaccgaacatgagcttgtggcactgtgggaaagtataacagggacaat

SEQ ID NO: 611697 - DNA, 75 bp, synthetic construct
  source 1..75: mol_type = other DNA
aatgggctgagggggtcacattttcagttaaaatgaaagcccgagacgaacgggcagcccgctacgatggttact

SEQ ID NO: 611698 - DNA, 75 bp, synthetic construct
  source 1..75: mol_type = other DNA
caggaaggctgccgtgttattgccgaagggcgttataacagccccgcctcggcagcagccgcaatggaacacgga

SEQ ID NO: 611699 - DNA, 75 bp, synthetic construct
  source 1..75: mol_type = other DNA
acaggatgccccctatctgaaggggatttatccactgaccccaccaatgagtgggatcatatttgaacggatgaa

SEQ ID NO: 611700 - DNA, 75 bp, synthetic construct
  source 1..75: mol_type = other DNA
catcctgaaactcggtactttggattttattccatagaacttccggctgattacaaaccaacaggaatggttatg

SEQ ID NO: 611701 - DNA, 75 bp, synthetic construct
  source 1..75: mol_type = other DNA
acggcgataagcccgatcacgatgatgacacacatcctgacgatgaaccgccacagcctccacgcggtggacgcc

SEQ ID NO: 611702 - DNA, 75 bp, synthetic construct
  source 1..75: mol_type = other DNA
ggagtatgaaacccatttctgccgttttctgatgccaaccattcgcggagccgataccggcagtaaaaagcgcta

SEQ ID NO: 611703 - DNA, 75 bp, synthetic construct
  source 1..75: mol_type = other DNA
gcacggacacagcaccgcaacttatctcgctatcgccaataagcaggaagaaacagtcctggcaatcaatgacac

SEQ ID NO: 611704 - DNA, 75 bp, synthetic construct
  source 1..75: mol_type = other DNA
aatatggatattcgcggaatggcggatatccgttacccgcaagcagcctctcatccaggttctgttcactgttcc

SEQ ID NO: 611705 - DNA, 75 bp, synthetic construct
  source 1..75: mol_type = other DNA
aaagtaaaaaactggtacagccggatccacactctgaaaccaacacaaaatgaactggaaattttgtgggggcaa

SEQ ID NO: 611706 - DNA, 75 bp, synthetic construct
  source 1..75: mol_type = other DNA
gaagtccgtttgtttgcaaaggatatggttagtcggtttgtagcgtggtcgcttgagcgtggggaaaagcttaaa

SEQ ID NO: 611707 - DNA, 75 bp, synthetic construct
  source 1..75: mol_type = other DNA
ttgaattgtttctttatggcgagctaatcaatgaacctccgtttaatggcgaagtccgtttgtttgcaaaggata

SEQ ID NO: 611708 - DNA, 75 bp, synthetic construct
  source 1..75: mol_type = other DNA
acaagccaggaggcgtaggattttatccagtaccagacaaatgccctgacgatgtttttaatctgtatgaggggc

SEQ ID NO: 611709 - DNA, 75 bp, synthetic construct
  source 1..75: mol_type = other DNA
catcgacggaagatcagttcgccgatcgggcaaaagagatgctggagcagttcgtacaggagcgggggcataaaa

SEQ ID NO: 611710 - DNA, 75 bp, synthetic construct
  source 1..75: mol_type = other DNA
gtagtcaaagagagggagaacaatttctgctcacacctcccgttcataccgttgtggacagctttggtgcagatg

SEQ ID NO: 611711 - DNA, 75 bp, synthetic construct
  source 1..75: mol_type = other DNA
gtgcagcaggcatggacgcgtggatgttcgcttgctgtgagtgaagcgttatcgcttttctcgttgtttgccagt

SEQ ID NO: 611712 - DNA, 75 bp, synthetic construct
  source 1..75: mol_type = other DNA
ctggaattacgcgacgttcagctcattgggcataattcctacgaacaaatccgcgcgacgttattatcaatgatt

SEQ ID NO: 611713 - DNA, 75 bp, synthetic construct
  source 1..75: mol_type = other DNA
tgagtttgacaaccgattgttttcagccattaacgatatgctgctggatatgctggctgctgttgccagaaggga

SEQ ID NO: 611714 - DNA, 75 bp, synthetic construct
  source 1..75: mol_type = other DNA
atgtactaccgacaggtcaagaaactgagcatccgtgagactgcagaagcaacaggttacagtacttcgcaggtt

SEQ ID NO: 611715 - DNA, 75 bp, synthetic construct
  source 1..75: mol_type = other DNA
ttgtgccttggtaaagcgttacgctatgttgcagttgcagcagcgaccgttcagggcatgatgtggtggcactaa

SEQ ID NO: 611716 - DNA, 75 bp, synthetic construct
  source 1..75: mol_type = other DNA
tcaacgcgatagataatatgacagacattgagcaggaaaaagtcgcgcaatttttgtcacgtgaaggaattcgca

SEQ ID NO: 611717 - DNA, 75 bp, synthetic construct
  source 1..75: mol_type = other DNA
gcgttgggttgtccggttttggatgagttccagctttatcaggaagcggaagaacgcagtaaacgtcgctgtggt

SEQ ID NO: 611718 - DNA, 75 bp, synthetic construct
  source 1..75: mol_type = other DNA
cgataaagtagaactggaaggaaaatacgttcctcactttaaaccaggtaaagaactgcgcgatcgcgccaatat

SEQ ID NO: 611719 - DNA, 75 bp, synthetic construct
  source 1..75: mol_type = other DNA
tctcacgggagaaacattgcctgccggagattgtgactaacatctggcacgggcgcgatgaagccaaacgtcagg

SEQ ID NO: 611720 - DNA, 75 bp, synthetic construct
  source 1..75: mol_type = other DNA
agcgtttggtcatctctattttccccgtatgcatcgcgctggttatgtcgcgcctaatctcggcgaagtgccgcc

SEQ ID NO: 611721 - DNA, 75 bp, synthetic construct
  source 1..75: mol_type = other DNA
cattgagcaggaaaaagtcgcgcaatttttgtcacgtgaaggaattcgcaatttcctcgcccgtctcgatattga

SEQ ID NO: 611722 - DNA, 75 bp, synthetic construct
  source 1..75: mol_type = other DNA
ccttatcaacggttcgcacttccgcgccacgaacgtggaagaagtgcgcgtgcttaccacaagctgccgtcgtgc

SEQ ID NO: 611723 - DNA, 75 bp, synthetic construct
  source 1..75: mol_type = other DNA
ggtaatttagcaggtgctctggccggagcttcggcgccggagctggcgaacatcatcggtcatcacgcgggtatt

SEQ ID NO: 611724 - DNA, 75 bp, synthetic construct
  source 1..75: mol_type = other DNA
tgcggaaggaacgactcaggccgcagtggcagatggcacaatcaccatccgggacagggacaatcagaagcagaa

SEQ ID NO: 611725 - DNA, 75 bp, synthetic construct
  source 1..75: mol_type = other DNA
atcgggttactgattaacggtgaagtgaatccaaatgatgtcattcttggttactggacgggagtctttacagca

SEQ ID NO: 611726 - DNA, 75 bp, synthetic construct
  source 1..75: mol_type = other DNA
tcggcaatatgggaggttctgcgtctacagaatacatcaacgatcgaataggaaaatctttgagtgataaatcag

SEQ ID NO: 611727 - DNA, 75 bp, synthetic construct
  source 1..75: mol_type = other DNA
atgatccaggaatcaaccgttatcagattcacagccaacggccgtcagtatgaagtcgacgaaagcctgattgac

SEQ ID NO: 611728 - DNA, 75 bp, synthetic construct
  source 1..75: mol_type = other DNA
gattgatttgattgatttactagtgcagttgtggcgtggcaagatgacaattatcatttccgtcattgtggctat

SEQ ID NO: 611729 - DNA, 75 bp, synthetic construct
  source 1..75: mol_type = other DNA
atgagagtagaaaataataatgtttctgggcaaaataatgacccagaacagattgatttgattgatttactagtg

SEQ ID NO: 611730 - DNA, 75 bp, synthetic construct
  source 1..75: mol_type = other DNA
tcaatgcacaatctacttagttttacgtcaaaactatcagcaaccttgattcctcataacactcaaacagatccg

SEQ ID NO: 611731 - DNA, 75 bp, synthetic construct
  source 1..75: mol_type = other DNA
aaaaatcacataaattctgggcggttgagcagcagggaaacgagttacatatcagttggggtaaggtcggcacca

SEQ ID NO: 611732 - DNA, 75 bp, synthetic construct
  source 1..75: mol_type = other DNA
gcggaactgaagttgattgcggagaaaacaaaaaagggctacgtagaagaagtatccgtgataacaccgacatct

SEQ ID NO: 611733 - DNA, 75 bp, synthetic construct
  source 1..75: mol_type = other DNA
aaccatgacgccgaatcagttgttcagaatgcccacgccgcattacccgttgcaatacttccgcttccagctccg

SEQ ID NO: 611734 - DNA, 75 bp, synthetic construct
  source 1..75: mol_type = other DNA
aaaaaaataactctctatacatttaaaactctcgctataaatagcttatatattattgacactatatcatgctat

SEQ ID NO: 611735 - DNA, 75 bp, synthetic construct
  source 1..75: mol_type = other DNA
aactcattacccgtcgatcgccacatgccatacattctggttcataactccttatctgagatggacctgacaact

SEQ ID NO: 611736 - DNA, 75 bp, synthetic construct
  source 1..75: mol_type = other DNA
tttccgatggttcgtctttacgtatttccgtcactcgcagcgaactcattgaagcagagattatcacgccggata

SEQ ID NO: 611737 - DNA, 75 bp, synthetic construct
  source 1..75: mol_type = other DNA
cagaaatgcagaaacaatataagcatctgtttgcccatggtgagtatataaaaggcataacttcattaattaagt

SEQ ID NO: 611738 - DNA, 75 bp, synthetic construct
  source 1..75: mol_type = other DNA
gcgcgccatcaccggctatgatgtcgagaaaggggcattgcgcacgttctataagcgcgatattgagcgctatat

SEQ ID NO: 611739 - DNA, 75 bp, synthetic construct
  source 1..75: mol_type = other DNA
gtgaagaaatttattcaggaactaccggaaattacttttagcggaaaaatcgcgctcgaacgggaactggatgtt

SEQ ID NO: 611740 - DNA, 75 bp, synthetic construct
  source 1..75: mol_type = other DNA
ggccattggtgctgggcctttactgggaacgcgctaacgccaaaggcgcgctaagcgcgatgatcgtcggcggcg

SEQ ID NO: 611741 - DNA, 75 bp, synthetic construct
  source 1..75: mol_type = other DNA
cggcagggctgaatgctgacctgaaaacataccgggtgatgctttccgtgagccgggaggaggcccggcatctgg

SEQ ID NO: 611742 - DNA, 75 bp, synthetic construct
  source 1..75: mol_type = other DNA
acccttcgcggggcaacaaaaagggcggcctcgccaacgtggtaaagaaggcactcggctccattgctaaatcgg

SEQ ID NO: 611743 - DNA, 75 bp, synthetic construct
  source 1..75: mol_type = other DNA
ggtgcatggtggaataaagaccctgtcattgctgcccgtaatattcatatcagttggggggatattcagaatgac

SEQ ID NO: 611744 - DNA, 75 bp, synthetic construct
  source 1..75: mol_type = other DNA
ttgagcttgcaaaacattcccttactttaaacggtgaaatgtggacaagaaacgcaattagccgagcatattacg

SEQ ID NO: 611745 - DNA, 75 bp, synthetic construct
  source 1..75: mol_type = other DNA
cttaatggcgcgtctggcttctctgttggaaagtcatccttacctggcgacgcctgcgaaagtggcaattttatc

SEQ ID NO: 611746 - DNA, 75 bp, synthetic construct
  source 1..75: mol_type = other DNA
taaaagatactgattatcctttggctgtaggttttatgaccaaccagagctacatcaaatcgttaggcgatttta

SEQ ID NO: 611747 - DNA, 75 bp, synthetic construct
  source 1..75: mol_type = other DNA
ggattacggctaaatttatttatgaagagcccttcctatcctgttgaggactatacagttcatgaaataacatta

SEQ ID NO: 611748 - DNA, 75 bp, synthetic construct
  source 1..75: mol_type = other DNA
tccataactcagcaaatatagtgcagagttcaccatgtcaaacggtttcttttgcaggaaaggaatatgagttaa

SEQ ID NO: 611749 - DNA, 75 bp, synthetic construct
  source 1..75: mol_type = other DNA
atccgcaactggttacgccacaaggcgctgacgatattctgtcgcctgcctttatgacgtcgttctgggtactgg

SEQ ID NO: 611750 - DNA, 75 bp, synthetic construct
  source 1..75: mol_type = other DNA
tggcttcaaccaaattattgagtcaattgatgctgagggaggcgcaaactatggcattttcggatacctttctgc

SEQ ID NO: 611751 - DNA, 75 bp, synthetic construct
  source 1..75: mol_type = other DNA
aaatgacccaataattggtatagaagcctatcccggtaccgcggagatccatgcaaaaatgggatataaagttat

SEQ ID NO: 611752 - DNA, 75 bp, synthetic construct
  source 1..75: mol_type = other DNA
atgtctatgccattaagcaatgccgctaataaccaattcaatacaaataatcacttccttcatcatccaaaagtc

SEQ ID NO: 611753 - DNA, 75 bp, synthetic construct
  source 1..75: mol_type = other DNA
cgccagtggcctgagccaaaagatggtgagcctcgcttgcacattaaagaacccggcaactctccggtaactccg

SEQ ID NO: 611754 - DNA, 75 bp, synthetic construct
  source 1..75: mol_type = other DNA
aatacgtggagttgagcgatggcactttatcgtggttagggaacgccttgttctggatgcagctaccagagccgc

SEQ ID NO: 611755 - DNA, 75 bp, synthetic construct
  source 1..75: mol_type = other DNA
ccaggcggttattccatgctttccgcgctggtagttgaactggtattgagtgcaggtttcctgttggtgatccac

SEQ ID NO: 611756 - DNA, 75 bp, synthetic construct
  source 1..75: mol_type = other DNA
tggtccactgaaacacctctcaaaagaggctctggaagccgcagccgaaccagacgatctcagcgagtgggctga

SEQ ID NO: 611757 - DNA, 75 bp, synthetic construct
  source 1..75: mol_type = other DNA
tggacggcggtggtctgggggcatctgctgtgggtgatgccgtggatgctgtttatcctgcaacccgcctggcag

SEQ ID NO: 611758 - DNA, 75 bp, synthetic construct
  source 1..75: mol_type = other DNA
taatctttctgctatgggctgtgatggcggcgatctatgcgccgctgatcctggctgttttcacactggcaacgc

SEQ ID NO: 611759 - DNA, 75 bp, synthetic construct
  source 1..75: mol_type = other DNA
tccccgcgtagatggcgttcgtaagcctgccacgcctttattgccaggcattacgctggcgagttttttaccctt

SEQ ID NO: 611760 - DNA, 75 bp, synthetic construct
  source 1..75: mol_type = other DNA
aaacttgtgactgtagcgggagaatcgaaatcaaggttccagtcagttggacaactatcaaaactatttgggcta

SEQ ID NO: 611761 - DNA, 75 bp, synthetic construct
  source 1..75: mol_type = other DNA
acgaccataaaatccatctgggataaaggtattgcgtattttgcagcagaaccgcctcaggaggttaaccgtggc

SEQ ID NO: 611762 - DNA, 75 bp, synthetic construct
  source 1..75: mol_type = other DNA
tacagcgaatacctggaccaatcgacaaacattcagcggtggcctttctggggaactgtccggcaatgccgctac

SEQ ID NO: 611763 - DNA, 75 bp, synthetic construct
  source 1..75: mol_type = other DNA
tttcagaaactacgtttataagctgcccggaatgctttggtgatgatgattgcgaaacttgtgacggcagcggaa

SEQ ID NO: 611764 - DNA, 75 bp, synthetic construct
  source 1..75: mol_type = other DNA
tggataagctgtagtgagagaatgccgaacgataaacagtatgtttggtgttggggtaagtcttacggctggact

SEQ ID NO: 611765 - DNA, 75 bp, synthetic construct
  source 1..75: mol_type = other DNA
tccgctgaaacatctctcaaaagaggcactggaagccgcagccgaaccagacgatcttagcgagtgggctgatat

SEQ ID NO: 611766 - DNA, 75 bp, synthetic construct
  source 1..75: mol_type = other DNA
ggcaactactgttgccgctattggtttttgccctcaccgctttaatgtcaaaatgggccggttacgccagacaag

SEQ ID NO: 611767 - DNA, 75 bp, synthetic construct
  source 1..75: mol_type = other DNA
agtgaaactgaatctggaaggtctggagcatatcgccgcatatatgcagcgaatggctgaacgtccggcggtcaa

SEQ ID NO: 611768 - DNA, 75 bp, synthetic construct
  source 1..75: mol_type = other DNA
atgaaactgttctacaaaccgggcgcctgctctcttgcttcccatatcaccctgcgtgagagcggaaaggacttt

SEQ ID NO: 611769 - DNA, 75 bp, synthetic construct
  source 1..75: mol_type = other DNA
agcgattatgcagtatcttgccgacagcgtccccgaccgccagttgctggcaccggtaaacagtatttcccgcta

SEQ ID NO: 611770 - DNA, 75 bp, synthetic construct
  source 1..75: mol_type = other DNA
aaccagacgatcttagcgagtgggctgatatgcagtttctgttgtgggatgcacagcgccgtgccggcatcagcg

SEQ ID NO: 611771 - DNA, 75 bp, synthetic construct
  source 1..75: mol_type = other DNA
ggtgagcctcgcttgcacattaaagaacccggcaactctccggtaactccggatggttggataagctgtagtgag

SEQ ID NO: 611772 - DNA, 75 bp, synthetic construct
  source 1..75: mol_type = other DNA
atttttcgaaacacagagccgcaatgtaaccgactggatgccgttaccagaaccgccgcaggaggtgcgccaatg

SEQ ID NO: 611773 - DNA, 75 bp, synthetic construct
  source 1..75: mol_type = other DNA
attaccgcttattatttttgccctgaccgcgttagtcgcaaaatgggtaggttatgtcagacaaggactccgcta

SEQ ID NO: 611774 - DNA, 75 bp, synthetic construct
  source 1..75: mol_type = other DNA
agtgagtattgcgcagtatatgccgacgctgtggttgggcgcgggccgttttccgacacttactaccgaagcggt

SEQ ID NO: 611775 - DNA, 75 bp, synthetic construct
  source 1..75: mol_type = other DNA
ggcagcgtatgtgcgcccgtctgccgtggctgctcgccattccccatgtggcttttgccaccagcgcccttctgc

SEQ ID NO: 611776 - DNA, 75 bp, synthetic construct
  source 1..75: mol_type = other DNA
ggcagttactgacgatggggaagagccggcatcgaaagtaacccactggatgcatctaccagaaccgcctcagga

SEQ ID NO: 611777 - DNA, 75 bp, synthetic construct
  source 1..75: mol_type = other DNA
ctgattgccttcgcggtgggattttcagtcagtattgcgcagtatatgccgacgctgtggctgggcgcggggcgt

SEQ ID NO: 611778 - DNA, 75 bp, synthetic construct
  source 1..75: mol_type = other DNA
gtctgggcattactctggcggtgaaagaaagcgcatttctgctgtggattttggcggcagtattgagtgaaaaaa

SEQ ID NO: 611779 - DNA, 75 bp, synthetic construct
  source 1..75: mol_type = other DNA
ataccggcagataaaggtgacctgtgccgcctggtcatcacgggttcgcatgctgcgggttgaattcagtgccga

SEQ ID NO: 611780 - DNA, 75 bp, synthetic construct
  source 1..75: mol_type = other DNA
gtgaaacccggtatggatgtgacatcggccccttccgtcagggaggtgcgctttggtgatggctattcccagcgt

SEQ ID NO: 611781 - DNA, 75 bp, synthetic construct
  source 1..75: mol_type = other DNA
acacgggaggaggcccggcatctggaggcgttcctggcagagcacgggggctggaaggcgtttctgtggacgccg

SEQ ID NO: 611782 - DNA, 75 bp, synthetic construct
  source 1..75: mol_type = other DNA
ggtgatggctattcccagcgtgcgcctgccgggctgaacgctgacctgaaaacgtacagcgtgacgctgtccgtc

SEQ ID NO: 611783 - DNA, 75 bp, synthetic construct
  source 1..75: mol_type = other DNA
tgacctgtgccgcctggtcatcacgggttcgcatgctgagggttgaattcagggcggagtttaagcaggtggtga

SEQ ID NO: 611784 - DNA, 75 bp, synthetic construct
  source 1..75: mol_type = other DNA
tataccgttacgctgaataaaaacgtggcggactggaacacctcttttaacctgcagtacagccgtcagacatac

SEQ ID NO: 611785 - DNA, 75 bp, synthetic construct
  source 1..75: mol_type = other DNA
gtgagatgtccggttatttatctttttgcgaatctggtgatgcgtggaataaaagacagaataccttttgcagac

SEQ ID NO: 611786 - DNA, 75 bp, synthetic construct
  source 1..75: mol_type = other DNA
tgacctgtgccgcctggtcatcacgggttcgcatgctgggggttgaattcagcgcagagtttaagcaggtggtga

SEQ ID NO: 611787 - DNA, 75 bp, synthetic construct
  source 1..75: mol_type = other DNA
tgacctgtgccgcctggtcatcacgggttcgcatgctgggggttgaattcagagccgagtttaagcaggtggtga

SEQ ID NO: 611788 - DNA, 75 bp, synthetic construct
  source 1..75: mol_type = other DNA
tgacctgtgccgcctggtcatcacgggttcgcatgctgcgggttgaattcagtgctgagtttaagcaggtggtga

SEQ ID NO: 611789 - DNA, 75 bp, synthetic construct
  source 1..75: mol_type = other DNA
tcccatccgatccatcaaaaacacaaccaggcagtaaacgcccacaacagaaataacggccagcgcgccttccat

SEQ ID NO: 611790 - DNA, 75 bp, synthetic construct
  source 1..75: mol_type = other DNA
agcagttttcactgtcccgaaacagcctgacgccagcagtgaatggttatcaggatacgggctggcgtaactttt

SEQ ID NO: 611791 - DNA, 75 bp, synthetic construct
  source 1..75: mol_type = other DNA
tttacgtcaggaagcggaatgtggaattttatccccaaaattgaaattcctattttcaatgccggcagaaacaaa

SEQ ID NO: 611792 - DNA, 75 bp, synthetic construct
  source 1..75: mol_type = other DNA
agctcgatttttttggcaaacttaagaatatgagtgacgctgatcggcagaactactttgccagcgaagaagccc

SEQ ID NO: 611793 - DNA, 75 bp, synthetic construct
  source 1..75: mol_type = other DNA
gggacgggcggatgcggtcgggccgctcacccgttacggtgcggcaaaggggatgtttcagttcatcgacccgac

SEQ ID NO: 611794 - DNA, 75 bp, synthetic construct
  source 1..75: mol_type = other DNA
agacagagcgaatgcttttgaaggtcgcgggcaaggggccgaccaaacgcctgatgtacggcactatcaaacagc

SEQ ID NO: 611795 - DNA, 75 bp, synthetic construct
  source 1..75: mol_type = other DNA
agaattcaggtaaggctgactcaaggaaaacttctcgccgtcgcggcagcaaagatggtcagagtgcaggggtgg

SEQ ID NO: 611796 - DNA, 75 bp, synthetic construct
  source 1..75: mol_type = other DNA
gaagtggctgatgcgctggcattacgtcaaagcctggacgatcaaatcagcgcccaacagcgttatctggcgtcg

SEQ ID NO: 611797 - DNA, 75 bp, synthetic construct
  source 1..75: mol_type = other DNA
cgtgtctctctataacgttatgttctctaagttatgcaggtggagtgccaacggtaagcattgcagagttaacgc

SEQ ID NO: 611798 - DNA, 75 bp, synthetic construct
  source 1..75: mol_type = other DNA
caggatgagcagctggagcttaaaaatcaggaagtgcagctacaaaacacgcgcctgttaatggaacagaaagag

SEQ ID NO: 611799 - DNA, 75 bp, synthetic construct
  source 1..75: mol_type = other DNA
cgtgatttgagaatggctgccctgaaggttgaagaggcccgggcccagttcaacgtcacggatgcagatcgttat

SEQ ID NO: 611800 - DNA, 75 bp, synthetic construct
  source 1..75: mol_type = other DNA
ggcgttggatgcttatcgcattttgactctttacggatacacagtaactatagaaaagaaggagggtaatgactg

SEQ ID NO: 611801 - DNA, 75 bp, synthetic construct
  source 1..75: mol_type = other DNA
atggatttatcaccagaagacgcaaagtttttacgagaactgcaacaccgtatgctcagagaagccattatcgaa

SEQ ID NO: 611802 - DNA, 75 bp, synthetic construct
  source 1..75: mol_type = other DNA
atgccgcaggcctggcttgagtattctgatgccacctggctgcctccttcacgctgggacgacggcattcccgga

SEQ ID NO: 611803 - DNA, 75 bp, synthetic construct
  source 1..75: mol_type = other DNA
gccgtctcaaacacagatgagcgggtactttagccacagcagcccactggccaatattgcagccaacttttcaac

SEQ ID NO: 611804 - DNA, 75 bp, synthetic construct
  source 1..75: mol_type = other DNA
gcggttggattgtcagcctcaaggtctaaatatctggggcgtgataacgattctgcttacctccgtatatccgtg

SEQ ID NO: 611805 - DNA, 75 bp, synthetic construct
  source 1..75: mol_type = other DNA
aacctacagggtgacgctttccgtgacccgggaggaggcccggcatctggaggcgttcctggcagagcacggggg

SEQ ID NO: 611806 - DNA, 75 bp, synthetic construct
  source 1..75: mol_type = other DNA
cagtaataatgtatctgctattcttctttggtattcccgcttgcccgaatttaactctcgcctacggtctggcag

SEQ ID NO: 611807 - DNA, 75 bp, synthetic construct
  source 1..75: mol_type = other DNA
tcaaaacgttttgatgatgtaaatgcagatatcacatttgcagggtatcgtttctcagagcgtaactatatgact

SEQ ID NO: 611808 - DNA, 75 bp, synthetic construct
  source 1..75: mol_type = other DNA
ctcaggtcgttcgcgtaattacgaacacactatggaaggcccggtttttatatccggcgaagcatcatgggggat

SEQ ID NO: 611809 - DNA, 75 bp, synthetic construct
  source 1..75: mol_type = other DNA
gatgccggtgaaaaatccgatgtccggcaccggtctgcgctggaagccgctgcgcgatcagatctttttcctcgc

SEQ ID NO: 611810 - DNA, 75 bp, synthetic construct
  source 1..75: mol_type = other DNA
tgtcgccagagcacaactggacgatgtcgcgtttgccgcatcgccggaagggaaaacactgcgtactgatctgct

SEQ ID NO: 611811 - DNA, 75 bp, synthetic construct
  source 1..75: mol_type = other DNA
acgcgggaggaggcacgttatctggaggcttttctggcagagcacgggggctggaaagcctttctgtggacgccg

SEQ ID NO: 611812 - DNA, 75 bp, synthetic construct
  source 1..75: mol_type = other DNA
aggcattcctggcagagcacggtggctggaaggcgtttctgtggacaccgccttatgcctggcggcagataaagg

SEQ ID NO: 611813 - DNA, 75 bp, synthetic construct
  source 1..75: mol_type = other DNA
ggaaggcatcggtcaatctgcagtacagccatcagacttactgggaccgccggacatctgactattacacgttgt

SEQ ID NO: 611814 - DNA, 75 bp, synthetic construct
  source 1..75: mol_type = other DNA
tgcacacagtgaacagcgtgtgatgcaggcgcttaacgccgcatcgctgcgccagacaaccttaatggtcaccca

SEQ ID NO: 611815 - DNA, 75 bp, synthetic construct
  source 1..75: mol_type = other DNA
tctaccgctcctgccacaaggagttgatacgcctgttggcgaccaggctgcccgcctttccgtggggcaggcgca

SEQ ID NO: 611816 - DNA, 75 bp, synthetic construct
  source 1..75: mol_type = other DNA
ggccaacgtgcagtgttggttggtcgcagcggttcaggtaaaagctcactgctgaacgcgctttctggttttctt

SEQ ID NO: 611817 - DNA, 75 bp, synthetic construct
  source 1..75: mol_type = other DNA
cgtactactggcgcgacctgatgccagcgaacaagaattacaaacagcgctggataacgcctgggtcagcgagtt

SEQ ID NO: 611818 - DNA, 75 bp, synthetic construct
  source 1..75: mol_type = other DNA
cattctgctgggcactgcaccgctaattccgttgtttatggcgctggttggaatgggggctgccgatgctaaccg

SEQ ID NO: 611819 - DNA, 75 bp, synthetic construct
  source 1..75: mol_type = other DNA
actgaatgcgctttccggttttctttcatatcagggatcgctacgaatcaacggaatagaattacgtgatttatc

SEQ ID NO: 611820 - DNA, 75 bp, synthetic construct
  source 1..75: mol_type = other DNA
cctgaatcacaccaccggcagcgggcagggaacggacagtcagttcacctggagtcgtttctacatgtaccgcgc

SEQ ID NO: 611821 - DNA, 75 bp, synthetic construct
  source 1..75: mol_type = other DNA
ttgtttgactacaacatcaacggcacagtgaacaaaccctataaaggtaagcagtcccgttcgctgagctataac

SEQ ID NO: 611822 - DNA, 75 bp, synthetic construct
  source 1..75: mol_type = other DNA
ggggatggtggcagacagcggtctggcctggctgagcggggtgaatccgggtgaaaccctgaatgtcggctggga

SEQ ID NO: 611823 - DNA, 75 bp, synthetic construct
  source 1..75: mol_type = other DNA
cggtttatcgtcgcttgacgccgcaaaaaagcgatcctcaacatttgcaggaaatatatcagggtattattagta

SEQ ID NO: 611824 - DNA, 75 bp, synthetic construct
  source 1..75: mol_type = other DNA
atatctgcatcccgttcgaaatacctgaaccgggataacgattcggcgtttgttcgtctgtccgtgccgtgggga

SEQ ID NO: 611825 - DNA, 75 bp, synthetic construct
  source 1..75: mol_type = other DNA
tacgtactggaataacggacaatgtgcggatttccgacagttatccggagtggagatacgcccgaatccggcaga

SEQ ID NO: 611826 - DNA, 75 bp, synthetic construct
  source 1..75: mol_type = other DNA
taaattaccagattctgccagacacgctgattaattttgccgttcttaacgtcacagacagaaagagcgaggata

SEQ ID NO: 611827 - DNA, 75 bp, synthetic construct
  source 1..75: mol_type = other DNA
tgatcgacggcagcgtcaccgttgggccaaacgcggtgctggcttttaaacgcgagggttatcgcaagcgcgact

SEQ ID NO: 611828 - DNA, 75 bp, synthetic construct
  source 1..75: mol_type = other DNA
catgcaactgattgacgtctatccggatgcccgaattgcgctactggaaaaagagtccggcccggcctgccatca

SEQ ID NO: 611829 - DNA, 75 bp, synthetic construct
  source 1..75: mol_type = other DNA
cacgctgtatgtggcgaaatttaacgatgacggcaaaggcgagtggctaccgctggtgttcggccaaaacgggct

SEQ ID NO: 611830 - DNA, 75 bp, synthetic construct
  source 1..75: mol_type = other DNA
tggctgaccggcattcgtactgaaaatataccgccattcaatccgctgacagacgaagataatgaacccgttatg

SEQ ID NO: 611831 - DNA, 75 bp, synthetic construct
  source 1..75: mol_type = other DNA
aagaaaggcagctttgcttcccgtaaaacggatgacatgttgttgttacaggaaacagaacgtgcactggcggat

SEQ ID NO: 611832 - DNA, 75 bp, synthetic construct
  source 1..75: mol_type = other DNA
gtgaggttttcaaccaagaaacagcctaggtataacccattcacaaaaaatatagtattcactctgttgattggc

SEQ ID NO: 611833 - DNA, 75 bp, synthetic construct
  source 1..75: mol_type = other DNA
aaaaaagtggggttcttcatttcgatctcaatcataccgcaaccctaatatatgaacatttaggcgatgatattg

SEQ ID NO: 611834 - DNA, 75 bp, synthetic construct
  source 1..75: mol_type = other DNA
aaatcaggtaaaaccttaaatttagacgcaacttattatgaaattattaagccagctgcagaagagtgtggtata

SEQ ID NO: 611835 - DNA, 75 bp, synthetic construct
  source 1..75: mol_type = other DNA
atggatacgccacgtccacagttattagattttcaatttcatcagaataacgacagttttaccctacattttcaa

SEQ ID NO: 611836 - DNA, 75 bp, synthetic construct
  source 1..75: mol_type = other DNA
ctgcgaaatcaccggcatcgcgttcactccggataaccggacgctgtttattaacatccagcaccctggcgagcc

SEQ ID NO: 611837 - DNA, 75 bp, synthetic construct
  source 1..75: mol_type = other DNA
ttgcctgtcagggtatatgccgctctgcggttattatccagaatcaataattcatctgggctggattacatataa

SEQ ID NO: 611838 - DNA, 75 bp, synthetic construct
  source 1..75: mol_type = other DNA
gtgggttgatgttttcaataatgcagaaaaacttttaaaggaaggtaatttcactgaggcaaaaaaatattatag

SEQ ID NO: 611839 - DNA, 75 bp, synthetic construct
  source 1..75: mol_type = other DNA
acgtggtggcgctggcagcaaaagcaggatacagcacatggtggatatccaatcagggaaaactgggagagcatg

SEQ ID NO: 611840 - DNA, 75 bp, synthetic construct
  source 1..75: mol_type = other DNA
aaacggatgacatgttgttgttacaggaaacagaacgtgcactggcggataaatcctctccgaaggtgattttcc

SEQ ID NO: 611841 - DNA, 75 bp, synthetic construct
  source 1..75: mol_type = other DNA
cgaacacaccgccgtggtcaccgtaactggctggcactgctgctgttcgtattatgctcagtaaacagctggccg

SEQ ID NO: 611842 - DNA, 75 bp, synthetic construct
  source 1..75: mol_type = other DNA
gaggcgctggccgctttccgccagttagctgaagataactttggtgaaacagaagatattgcgccaccaactctg

SEQ ID NO: 611843 - DNA, 75 bp, synthetic construct
  source 1..75: mol_type = other DNA
gcccgtcatttcgcaggtatttttcagtggctgaccggcattcgtactgaaaatataccgccattcaatctgctg

SEQ ID NO: 611844 - DNA, 75 bp, synthetic construct
  source 1..75: mol_type = other DNA
ggaattctttatccagagaaagttatcgttggtaaatcaataaattctgacgccatatccggaaaagtgctttcc

SEQ ID NO: 611845 - DNA, 75 bp, synthetic construct
  source 1..75: mol_type = other DNA
aaacttggactgggaacactaagcgatttcaggctgctctatacaggatgcggtgacagcagagtcaaacggaat

SEQ ID NO: 611846 - DNA, 75 bp, synthetic construct
  source 1..75: mol_type = other DNA
cggacactgatttatgactatgagcagaaccctgattccggcaacaacgtggtggcgctggcagcaaaagcagga

SEQ ID NO: 611847 - DNA, 75 bp, synthetic construct
  source 1..75: mol_type = other DNA
agacgaagataatgaacccgttattgtttttaacggagagaaaaatgtgccggcagacagtctgaaaccacagcc

SEQ ID NO: 611848 - DNA, 75 bp, synthetic construct
  source 1..75: mol_type = other DNA
tctcatcagtccgtcagcagaaaaatcagtgcccgtcatttcgcaggtatgaaccgccccgggaatcctggagac

SEQ ID NO: 611849 - DNA, 75 bp, synthetic construct
  source 1..75: mol_type = other DNA
tatgcgatacaaccagaagaaacgctaacgctggacgttaaaacgcaacgtttcaaccgtcagggtgaagccact

SEQ ID NO: 611850 - DNA, 75 bp, synthetic construct
  source 1..75: mol_type = other DNA
taaaggcatctgccttagtgccggaagtccggtatcccacagcgccttaattgcccgtgaactgggtattggctg

SEQ ID NO: 611851 - DNA, 75 bp, synthetic construct
  source 1..75: mol_type = other DNA
aatgcagcgttatgaacaactgagtcagcacggggctgacaactggaaaatccagccgggagcaccgttatatga

SEQ ID NO: 611852 - DNA, 75 bp, synthetic construct
  source 1..75: mol_type = other DNA
tctaagaagtagattccctaataacagggcggaaatgaccaagtgggatgtagtgaaggccagagaagatgtttt

SEQ ID NO: 611853 - DNA, 75 bp, synthetic construct
  source 1..75: mol_type = other DNA
aatctaactgatattttatctccagaaattgaactaaacaaaatcacgttaacgcatgcaactattgaaattgat

SEQ ID NO: 611854 - DNA, 75 bp, synthetic construct
  source 1..75: mol_type = other DNA
aaatgtcccattcaaatttaacgatggtgatttgaacgagataataaaagaactcgtaaacattcacaaacgtga

SEQ ID NO: 611855 - DNA, 75 bp, synthetic construct
  source 1..75: mol_type = other DNA
gtatctgcatcgctataacgatgccacgctgtcgagaatgcgtaccgaatatgtggtgccgctgctggcgcgtta

SEQ ID NO: 611856 - DNA, 75 bp, synthetic construct
  source 1..75: mol_type = other DNA
agggaaggtatgactacggctgataatgatagatttctgcggttctggtgggaagtaaataacagaaaaatttat

SEQ ID NO: 611857 - DNA, 75 bp, synthetic construct
  source 1..75: mol_type = other DNA
tcatattttgattgaagcctataatgtgctgaaaaatatctatgaagaacgtggttatcgcgggcgtgatattcc

SEQ ID NO: 611858 - DNA, 75 bp, synthetic construct
  source 1..75: mol_type = other DNA
gcgctggagaccattcgtcgctatctttccacccagttctggaaagatcatctgaaaatgtataaaaagcgtcca

SEQ ID NO: 611859 - DNA, 75 bp, synthetic construct
  source 1..75: mol_type = other DNA
atccgccgtatatgggtaatggtggaatgaatagcgaacttaaagcgtttgcaaaaaataatttcccggatagca

SEQ ID NO: 611860 - DNA, 75 bp, synthetic construct
  source 1..75: mol_type = other DNA
gtctgaatattctctctttacaggaaagcctgcatctggatatcgccaagctctggcagcagctcaatttccacc

SEQ ID NO: 611861 - DNA, 75 bp, synthetic construct
  source 1..75: mol_type = other DNA
cgctatggccagttctcgctggacaaatccttgatctcacgtcgtgaacgtctggtcaaacgtgcagaaaagcaa

SEQ ID NO: 611862 - DNA, 75 bp, synthetic construct
  source 1..75: mol_type = other DNA
ggatatttcgctgtatcaaaataaattaataaacaatgtagaaaagcttatcaatatttcaaaagtagattggga

SEQ ID NO: 611863 - DNA, 75 bp, synthetic construct
  source 1..75: mol_type = other DNA
cagtgggtcgaatctaaagatggacttaccactggaaataatgagaattttattcgctactggtgggaagtagat

SEQ ID NO: 611864 - DNA, 75 bp, synthetic construct
  source 1..75: mol_type = other DNA
attgaaccagaaagtattaaggtgctggacccggcctgcggctccgggcatatcctgaccgaagcctataaagtg

SEQ ID NO: 611865 - DNA, 75 bp, synthetic construct
  source 1..75: mol_type = other DNA
agccagaaagtggtatggcaacaatgaatggattgtaaattgggaaaacgatggcgaggaaataaaaaacaataa

SEQ ID NO: 611866 - DNA, 75 bp, synthetic construct
  source 1..75: mol_type = other DNA
gtagcaactttaatgggataaatgaagaattaattgattcagaaataactttagtcagcaacccatactacaagt

SEQ ID NO: 611867 - DNA, 75 bp, synthetic construct
  source 1..75: mol_type = other DNA
actccctcgatcgcgaaggccttgtctacgcccatgaaggtaacaaaggcttcgccgatctcgtcgccgaaggtg

SEQ ID NO: 611868 - DNA, 75 bp, synthetic construct
  source 1..75: mol_type = other DNA
gtcttactgacattatatacaatacagttccaatcgcagaggtaactttaaattgcaatccgttatatcgatatg

SEQ ID NO: 611869 - DNA, 75 bp, synthetic construct
  source 1..75: mol_type = other DNA
cttctatgccaatggttgcagcatctaacgaatttggtaacccggcaagtggaagtccgccaaggccattcttca

SEQ ID NO: 611870 - DNA, 75 bp, synthetic construct
  source 1..75: mol_type = other DNA
gactattatccagttctctctatcaatatttaattcaattacaaggaggtacgttaaatgtaaccactggaataa

SEQ ID NO: 611871 - DNA, 75 bp, synthetic construct
  source 1..75: mol_type = other DNA
gctatgacgaccgcctgcgtcactatgctgatatgagaatcagtattgatctcgacgatggcgttaaggttaact

SEQ ID NO: 611872 - DNA, 75 bp, synthetic construct
  source 1..75: mol_type = other DNA
caatgcaatcctggatgttcctttccagttttgaaaacatgcgtgaaaatatcctcactaattatacaatcgaaa

SEQ ID NO: 611873 - DNA, 75 bp, synthetic construct
  source 1..75: mol_type = other DNA
tattccgtttattcagcaagcgtggattctggcgcagcgatatgatgcggtggtggcaaatccgccgtatatggg

SEQ ID NO: 611874 - DNA, 75 bp, synthetic construct
  source 1..75: mol_type = other DNA
atataaaaaatgaagccactgaaaaagaaaaaattgaaaaaaacattgaaataataatcgctcaagctctaaata

SEQ ID NO: 611875 - DNA, 75 bp, synthetic construct
  source 1..75: mol_type = other DNA
agtctgatttgtttgcgatgtttatgcagcgtgctttttccttgcttaaagaaaatgggttcaatgctcaagtaa

SEQ ID NO: 611876 - DNA, 75 bp, synthetic construct
  source 1..75: mol_type = other DNA
aaagaaaaaaaatgggttacctatgcaaatggtggagagtccagaaaatattatggaaatgatcaatatgtaatt

SEQ ID NO: 611877 - DNA, 75 bp, synthetic construct
  source 1..75: mol_type = other DNA
ttgaatgtgataataacatttatttttcttctttatttaatataaaacaagaaatagagactagcattcctgttg

SEQ ID NO: 611878 - DNA, 75 bp, synthetic construct
  source 1..75: mol_type = other DNA
tcagtcgtgcaaatgatttactttcggatatgaaaggattcaatactggatgtcctatcaaatcaattactacat

SEQ ID NO: 611879 - DNA, 75 bp, synthetic construct
  source 1..75: mol_type = other DNA
cgggcaatacaccccggattttattgtttttattcttttttgttgtttctgcaataaccacaattgcatgcggat

SEQ ID NO: 611880 - DNA, 75 bp, synthetic construct
  source 1..75: mol_type = other DNA
tttgtccaggcaatacgtcccggattttattgtttttattctttttcgttatttccgtaataatcacaattgcat

SEQ ID NO: 611881 - DNA, 75 bp, synthetic construct
  source 1..75: mol_type = other DNA
tggggacaactgacacattgcgtgaaatgcagcgttataaacaactgagtcagcacggggctgacaactggaaaa

SEQ ID NO: 611882 - DNA, 75 bp, synthetic construct
  source 1..75: mol_type = other DNA
agacgaagataatgagcgcattatggtttttaacggagagaggtatgtaccggaagacagtctgaaaccgcagcg

SEQ ID NO: 611883 - DNA, 75 bp, synthetic construct
  source 1..75: mol_type = other DNA
atgagcaaagaattttacgcaagactggcagctattcaggagaacttgaacgcgccaaagaaccagtacaactca

SEQ ID NO: 611884 - DNA, 75 bp, synthetic construct
  source 1..75: mol_type = other DNA
ataccatgttgacaatatcaggttttttctcctcagaacaagaatatatagagttatctaaggcatgcgaccttt

SEQ ID NO: 611885 - DNA, 75 bp, synthetic construct
  source 1..75: mol_type = other DNA
acttaaggcataataagtctattgatagagagatttttctcgaaagcctaaacctcttaagcaaaagactaaata

SEQ ID NO: 611886 - DNA, 75 bp, synthetic construct
  source 1..75: mol_type = other DNA
ttcctgaaggccgagcgtaccagttagaaaaaattactaacgggaaactgaaagttgacgtgtatttatatcaaa

SEQ ID NO: 611887 - DNA, 75 bp, synthetic construct
  source 1..75: mol_type = other DNA
tcagtgcccgtcatttcacaggtatttttcagtggctgaccggcattcgtactgaaaatataccgccattcaatc

SEQ ID NO: 611888 - DNA, 75 bp, synthetic construct
  source 1..75: mol_type = other DNA
cttctgctccttgcacacagaaataccctcacatccattacagcgctgttatttctgttctgttgtgcactgtat

SEQ ID NO: 611889 - DNA, 75 bp, synthetic construct
  source 1..75: mol_type = other DNA
agaaccctgactccggcaacaacgtggtggcgctggcagcaaaagcaggatacagcacatggtggatatccaatc

SEQ ID NO: 611890 - DNA, 75 bp, synthetic construct
  source 1..75: mol_type = other DNA
cgggcaacacaccccagattttattgtttttattcttttttattgtttctgtaataaccacaattgcatgcggat

SEQ ID NO: 611891 - DNA, 75 bp, synthetic construct
  source 1..75: mol_type = other DNA
ggcacaccggagcagcacaaagcacaggacgtttacaacatcagacgagacgaattagaaggagcggctgcttaa

SEQ ID NO: 611892 - DNA, 75 bp, synthetic construct
  source 1..75: mol_type = other DNA
ggcgttcgccaaagcgtggaagatgctcgaaggcacaccggagcagcacaaagcacaggacgtttacaacatcag

SEQ ID NO: 611893 - DNA, 75 bp, synthetic construct
  source 1..75: mol_type = other DNA
gtcgataacgagcgctacggcgaagacgatcagatcgctttgcaacgcttaatcgaagaaattcagtctgaaatt

SEQ ID NO: 611894 - DNA, 75 bp, synthetic construct
  source 1..75: mol_type = other DNA
cagcggcgattgagatataaagttgaaccacctgtcactattcagggatgcggaacggtatcacaggctaaaaaa

SEQ ID NO: 611895 - DNA, 75 bp, synthetic construct
  source 1..75: mol_type = other DNA
tctacgaacgaccgttacgaccgtaaacgcgctgcgtaacaaaggacattcgacagataaaatggcggtggtgtt

SEQ ID NO: 611896 - DNA, 75 bp, synthetic construct
  source 1..75: mol_type = other DNA
accatgcgcttcaaagtaactttcgatgcgtcagatcgcgttgcagaaaccataaaaaacatcatcaaagaccag

SEQ ID NO: 611897 - DNA, 75 bp, synthetic construct
  source 1..75: mol_type = other DNA
caaggtttcgcggtgctgtcgtatgtgtatgaacacgaaaaacgcgacttagccagccgcattgtctccacccag

SEQ ID NO: 611898 - DNA, 75 bp, synthetic construct
  source 1..75: mol_type = other DNA
caaggtttcgcggtgctctcctatgtgtatgaacacgaaaaacgcgacttagccagccgcattgtctccacccag

SEQ ID NO: 611899 - DNA, 75 bp, synthetic construct
  source 1..75: mol_type = other DNA
catcatcaccacgatctttcggtcgccacgctgcatgtgcacattaatcacgacgactgcctggaaatcgccgtg

SEQ ID NO: 611900 - DNA, 75 bp, synthetic construct
  source 1..75: mol_type = other DNA
cacggcaactattaccgatggcgaaaaccgccatacggcaaccgctctcgcaagagaggaagaaagcaagaaagg

SEQ ID NO: 611901 - DNA, 75 bp, synthetic construct
  source 1..75: mol_type = other DNA
gctacaagctcttatgcacgcaagtattgcctcaatggtttgttcggcattgatgatgcgaaagatgcagataca

SEQ ID NO: 611902 - DNA, 75 bp, synthetic construct
  source 1..75: mol_type = other DNA
ttggtaatcggtattacgtgaaagccacggcaactattaccgatggcgaaaacagtcatacggcaaccgctcttg

SEQ ID NO: 611903 - DNA, 75 bp, synthetic construct
  source 1..75: mol_type = other DNA
ttgcctggcgggaaaccgcgcaccaaagccttttgcgatcaaaacggcattcgctacgacaactgcggcaagatg

SEQ ID NO: 611904 - DNA, 75 bp, synthetic construct
  source 1..75: mol_type = other DNA
cgtatcgggatttatgaacattcaagtgcgggacgggatctttattcagaaatattcagtaagcttggtgctgaa

SEQ ID NO: 611905 - DNA, 75 bp, synthetic construct
  source 1..75: mol_type = other DNA
ggtgggtatcttttaggtagcgatgtaaattataacagcggtatgattaaagcgcttccaacaagagatgctgtt

SEQ ID NO: 611906 - DNA, 75 bp, synthetic construct
  source 1..75: mol_type = other DNA
gaacccgtcagggcggcgaatatgaagcatcgacgctgattagctgttccgggctgatggctgaccggctggtga

SEQ ID NO: 611907 - DNA, 75 bp, synthetic construct
  source 1..75: mol_type = other DNA
catgggttcactgtcgaatatcatggtgtaattccgactcccgcattagctcattattcgatgcagaaaaacatt

SEQ ID NO: 611908 - DNA, 75 bp, synthetic construct
  source 1..75: mol_type = other DNA
cgatgcctgtagtcgggtactggcgatgacgctgccgctaacgacggattatcgcctgctacaaaccggggcaat

SEQ ID NO: 611909 - DNA, 75 bp, synthetic construct
  source 1..75: mol_type = other DNA
agtggctacgcggtgatattcttggcgtattgtctgctcaggcaatgcaaatgcaagcgcttgctgtaccggtaa

SEQ ID NO: 611910 - DNA, 75 bp, synthetic construct
  source 1..75: mol_type = other DNA
agagaatgacgccctgattgcggcatggcctcacggtaaatttattggtgctccggtgtggcacatgaacgaacc

SEQ ID NO: 611911 - DNA, 75 bp, synthetic construct
  source 1..75: mol_type = other DNA
gaagaaagactccggctatcaccagcgctcgatagccgagaccgccatgtaccggttcaagcaactcatcgggcc

SEQ ID NO: 611912 - DNA, 75 bp, synthetic construct
  source 1..75: mol_type = other DNA
aacgtggtggcgctggcagcaaaagcaggatacagcacatggtggatatccaatcagggaaaactgggggagcat

SEQ ID NO: 611913 - DNA, 75 bp, synthetic construct
  source 1..75: mol_type = other DNA
acagcggcgatggcaaaaattttccaggccagaggcggtgagattatttataacgccgaagtcagcgccctcagt

SEQ ID NO: 611914 - DNA, 75 bp, synthetic construct
  source 1..75: mol_type = other DNA
ttggcggcatttttgtgccgtccagcggcattgtcagctatcgcgaagtgacggcggcgatggcaaaaatcttcc

SEQ ID NO: 611915 - DNA, 75 bp, synthetic construct
  source 1..75: mol_type = other DNA
gttctgtatatcgccacctcgcaaatccttgatgatgagatggctgcacggatagaacatcatcggcaaggccgc

SEQ ID NO: 611916 - DNA, 75 bp, synthetic construct
  source 1..75: mol_type = other DNA
tgctaaacaatttgattcagtcgctggttttgaagctaatggtggttttctccttgcctccgatttacaaattaa

SEQ ID NO: 611917 - DNA, 75 bp, synthetic construct
  source 1..75: mol_type = other DNA
ggatatggttacgtggggatattcttggattattatgtgctgagtttctttcaatcaaaaaccttgcaactccaa

SEQ ID NO: 611918 - DNA, 75 bp, synthetic construct
  source 1..75: mol_type = other DNA
gataggctctccttatgttattgaaaaaatcaatcttgtaaaaaaacattattctcgagtagctgggtttgaagc

SEQ ID NO: 611919 - DNA, 75 bp, synthetic construct
  source 1..75: mol_type = other DNA
tttagaagaccaggttaaagccagatgttgggcgcatgagtttaaattagatgctattttttctacggatggtga

SEQ ID NO: 611920 - DNA, 75 bp, synthetic construct
  source 1..75: mol_type = other DNA
agtccagaggcggtgaaattatctataacgccgaagtcagcgggcttaatgagcataaaaacggcgtggtgatac

SEQ ID NO: 611921 - DNA, 75 bp, synthetic construct
  source 1..75: mol_type = other DNA
tacggggggatatacttgggctattagcttctttagaattaggtattgaagctttagctattcctgtaaattgta

SEQ ID NO: 611922 - DNA, 75 bp, synthetic construct
  source 1..75: mol_type = other DNA
ataggttcaccatatgttatttcggcatttaatagcctttatcaaagatatgatgctattgccggttttgaggct

SEQ ID NO: 611923 - DNA, 75 bp, synthetic construct
  source 1..75: mol_type = other DNA
gcaatagtactatttctcaactgattaataatcttcctcagcgattcacttggtcagatagagttaaaaacttcc

SEQ ID NO: 611924 - DNA, 75 bp, synthetic construct
  source 1..75: mol_type = other DNA
agatttattttaaataatggtgatattatacatctccgtccttccggtaatgctccagaactccgttgttatgct

SEQ ID NO: 611925 - DNA, 75 bp, synthetic construct
  source 1..75: mol_type = other DNA
aagagaattgggatctatgaacattctagtgcaggacgagatttatatgctccactttttaatcaattgggtgct

SEQ ID NO: 611926 - DNA, 75 bp, synthetic construct
  source 1..75: mol_type = other DNA
attggctctccgtacgtaattgctgctttcgaaagcttgaggaaaaaataccactgtatcgcaggattcgaggct

SEQ ID NO: 611927 - DNA, 75 bp, synthetic construct
  source 1..75: mol_type = other DNA
agcatagtaatatttcctttggaacaagtggcgccagagggctggtttcagattttgaacctaaagtatgtgctg

SEQ ID NO: 611928 - DNA, 75 bp, synthetic construct
  source 1..75: mol_type = other DNA
gacggttatagatttacactaaataataatgtcatcattcatctaagatcttccggaaatgctccagagttgaga

SEQ ID NO: 611929 - DNA, 75 bp, synthetic construct
  source 1..75: mol_type = other DNA
gtcgcctgccactttaagcgaatgcaccagaacatcgtcgataaaatcgagtatctgaactgttcgcgcgaattt

SEQ ID NO: 611930 - DNA, 75 bp, synthetic construct
  source 1..75: mol_type = other DNA
tttacccgcaatttcataccgggtacttatcacatctacggtgactccctgcgtggttattacatcacccttgat

SEQ ID NO: 611931 - DNA, 75 bp, synthetic construct
  source 1..75: mol_type = other DNA
agaagttaattgatgaagccatcgacgaagcggcacgttgtaccgaaatgtggtttacagagggtttgaccaaag

SEQ ID NO: 611932 - DNA, 75 bp, synthetic construct
  source 1..75: mol_type = other DNA
tcaccctgttcctgttgatggcgttaggcggtatcggtggcgtcatgctcgcaggttatacctttattttgcgtg

SEQ ID NO: 611933 - DNA, 75 bp, synthetic construct
  source 1..75: mol_type = other DNA
cggcgatatacgacgcgccagcgtcttttttatcgtccgcgctcacgcacgccagaattatggtgggctgggcag

SEQ ID NO: 611934 - DNA, 75 bp, synthetic construct
  source 1..75: mol_type = other DNA
atgaatgtttcaagcctaaatattgattctgcaatttcgggacgttacactgttcctgcaccttataaagcgggt

SEQ ID NO: 611935 - DNA, 75 bp, synthetic construct
  source 1..75: mol_type = other DNA
aaaacaaaccattctaagaaatttgctatcagtaatagagttgaaaaaacaaaaggagtatcactgtgttatctt

SEQ ID NO: 611936 - DNA, 75 bp, synthetic construct
  source 1..75: mol_type = other DNA
gagggagtgtcatcatggttacacatgatcttgaacttattacaagcaatatgagtgtaattaaactggaaaatt

SEQ ID NO: 611937 - DNA, 75 bp, synthetic construct
  source 1..75: mol_type = other DNA
tgctatgcttgaaattgttgggcttccggtgtcagctatgaaagctattaatctatctggtggcgagaagcaacg

SEQ ID NO: 611938 - DNA, 75 bp, synthetic construct
  source 1..75: mol_type = other DNA
atcaactctggcgtgacgctttctattggttagcctggcaaaatcgaattctggaattacgtgacgttcagctca

SEQ ID NO: 611939 - DNA, 75 bp, synthetic construct
  source 1..75: mol_type = other DNA
agtcatttcatggtagagatattttaacaaatcataatctttcgttttctcaggatggtttttacgttattatgg

SEQ ID NO: 611940 - DNA, 75 bp, synthetic construct
  source 1..75: mol_type = other DNA
accacggtggaaccgttattatggtaactcatgacacaaatttaatcacaagtgatatgaggattatatcttttt

SEQ ID NO: 611941 - DNA, 75 bp, synthetic construct
  source 1..75: mol_type = other DNA
gcctttaaccagatggaaaaactgctttcaaagccatccacgctgagcgatgccgcagataacgccagcgtgctt

SEQ ID NO: 611942 - DNA, 75 bp, synthetic construct
  source 1..75: mol_type = other DNA
acgatattgccgcaatcttttctggtcaccatacactgttagatgatccagaactgctggcggcggcaaacgaat

SEQ ID NO: 611943 - DNA, 75 bp, synthetic construct
  source 1..75: mol_type = other DNA
agccacagaagcaggtgcacctgaactgaatcgaatattcgccgcaggtgtggcacaaataaaagagatgccacc

SEQ ID NO: 611944 - DNA, 75 bp, synthetic construct
  source 1..75: mol_type = other DNA
tttgttgaagttaaaacgctgctcgatggtgtcactgttggcgggcataaggtcagtgatactgagcaggtgttg

SEQ ID NO: 611945 - DNA, 75 bp, synthetic construct
  source 1..75: mol_type = other DNA
gattacgccaggccattgacttcacgttattagatctgatgacgttaacagcgaaagcagaagcgagcgggcttg

SEQ ID NO: 611946 - DNA, 75 bp, synthetic construct
  source 1..75: mol_type = other DNA
tgaaatctctgacacatgtcctccgtacgatgaagaagcccgttctctggcggtggtcataaaaaaccgtaacgg

SEQ ID NO: 611947 - DNA, 75 bp, synthetic construct
  source 1..75: mol_type = other DNA
gtcgaaggtacactggcagcaacggtcagcgcggcctcgggggcggagatcgacaaagttatctttgacgccatg

SEQ ID NO: 611948 - DNA, 75 bp, synthetic construct
  source 1..75: mol_type = other DNA
ctggtttataccttatcgacatttaatgccgatatgttgctggagaaaaacggcaaatgcgttacaccggagagt

SEQ ID NO: 611949 - DNA, 75 bp, synthetic construct
  source 1..75: mol_type = other DNA
gtccaaattatggtggggcgtgcaggggcatcgcaagatgcgccgggttctatgttgaccggttacgccaaccct

SEQ ID NO: 611950 - DNA, 75 bp, synthetic construct
  source 1..75: mol_type = other DNA
gtcttttttatcgtccatgctcgcgcacgccagaattatggtgggctgggcaggggagctgaaaggctcgccggt

SEQ ID NO: 611951 - DNA, 75 bp, synthetic construct
  source 1..75: mol_type = other DNA
gatttgccagcagggtgagaaactgtatgcgatacaaccagaagaaacgctaacgctggacgttaaaactcttcg

SEQ ID NO: 611952 - DNA, 75 bp, synthetic construct
  source 1..75: mol_type = other DNA
gatttgccagcagggagagaagctgtatgcgattcaacctgaagagacgttaacgctggacgtaaaagcacaacg

SEQ ID NO: 611953 - DNA, 75 bp, synthetic construct
  source 1..75: mol_type = other DNA
cgcagaccagagaagaatttccgcaatttacatcaccgacgattttgctggcggaaaatatatatccgtcaacgg

SEQ ID NO: 611954 - DNA, 75 bp, synthetic construct
  source 1..75: mol_type = other DNA
agatactaatgagggagatattgtacttagactacaagatgtacattattcagggattgcatttgataaagaact

SEQ ID NO: 611955 - DNA, 75 bp, synthetic construct
  source 1..75: mol_type = other DNA
tcgggaggagatgccgaatggggagttagggcaaataataaaggatatagaatagactattgtgattctgtcact

SEQ ID NO: 611956 - DNA, 75 bp, synthetic construct
  source 1..75: mol_type = other DNA
ttaacgggcagattttcgatcaccaggcgcgcctgcattcgtttgaactggcgatggatgttaaggaagagttgt

SEQ ID NO: 611957 - DNA, 75 bp, synthetic construct
  source 1..75: mol_type = other DNA
cgttactcgatctggcccccattcccgaaggttcttcagcgcgagaagcattctcccactctctcgatctcgccc

SEQ ID NO: 611958 - DNA, 75 bp, synthetic construct
  source 1..75: mol_type = other DNA
atggctaccccagtttcgctgatggatgaccagatggtcgacatggcgtttatcactcaactgaccggcttaacc

SEQ ID NO: 611959 - DNA, 75 bp, synthetic construct
  source 1..75: mol_type = other DNA
ttggtccagttggcccgctgaaacatctctcaaaagaggcactggaagccgcagccgaaccagacgatcttagcg

SEQ ID NO: 611960 - DNA, 75 bp, synthetic construct
  source 1..75: mol_type = other DNA
atcctgacgctaatgatgggtggataattcctggtgcgtcgtggaaaccgtcacactggatgccgctaccagagc

SEQ ID NO: 611961 - DNA, 75 bp, synthetic construct
  source 1..75: mol_type = other DNA
atttccctcgtgatgttgcagagctggtggactggtttgacgcccgcgatccaaatccgcatgtgcgcccggtgc

SEQ ID NO: 611962 - DNA, 75 bp, synthetic construct
  source 1..75: mol_type = other DNA
aactggaggcactgaaaaatgcgccaccgcgtgaaattcgcacggaagtggttaagccggtatttaccaataagt

SEQ ID NO: 611963 - DNA, 75 bp, synthetic construct
  source 1..75: mol_type = other DNA
tgcatattccagcatcagtatctggcggaacataaaacgcaagggcagactctactaaaaccgaccgcgcaatag

SEQ ID NO: 611964 - DNA, 75 bp, synthetic construct
  source 1..75: mol_type = other DNA
gtggttgttaggctccagcctttacagtgcgcaactggcggcgcagcttggtctgccgttcgcgtttgcctcaca

SEQ ID NO: 611965 - DNA, 75 bp, synthetic construct
  source 1..75: mol_type = other DNA
gtctggctgaaaagcgcggctatcatcgctactggctggcggaacaccacaatatgaccggcattgccagtgctg

SEQ ID NO: 611966 - DNA, 75 bp, synthetic construct
  source 1..75: mol_type = other DNA
tggtgggtgataaagcgaaagtgcgtcatggtttgcagtcgatcctgcgcgaaaccgacgccgatgagattatgg

SEQ ID NO: 611967 - DNA, 75 bp, synthetic construct
  source 1..75: mol_type = other DNA
cacattcccgattattttttacgtttctccccggttgttatgccggtgaaggtggcgcgctgttttcatgaccac

SEQ ID NO: 611968 - DNA, 75 bp, synthetic construct
  source 1..75: mol_type = other DNA
aggcggcgtcggacgtaatatcgcgcataacctggctctgcttggtcgggatgtgcatttaatatcagctattgg

SEQ ID NO: 611969 - DNA, 75 bp, synthetic construct
  source 1..75: mol_type = other DNA
gcagcgaaaaggatggagaacaatttttgctgaccgcgccagcgcatacgacagtagacagttttggtgctgacg

SEQ ID NO: 611970 - DNA, 75 bp, synthetic construct
  source 1..75: mol_type = other DNA
ccgatgaaattccggtgtttgtcgataccgtttcggaatttaaagcaggaaaaatcaaacactggctggcacata

SEQ ID NO: 611971 - DNA, 75 bp, synthetic construct
  source 1..75: mol_type = other DNA
tttttgcgtgctacgtttttggagatgtttggcgatcccattgaaaatccgaagggatggaatgtcaaacctctg

SEQ ID NO: 611972 - DNA, 75 bp, synthetic construct
  source 1..75: mol_type = other DNA
ccgataacccgcgatgctgatcgtaatgccgcagtgaatgcgttgcatcagcaaggcgttcagcaactgtttgtt

SEQ ID NO: 611973 - DNA, 75 bp, synthetic construct
  source 1..75: mol_type = other DNA
tgaacgtttcaaactgcattcgtctgcatggacacagcactgcaacttatctcgctatcgctaataagcaggaag

SEQ ID NO: 611974 - DNA, 75 bp, synthetic construct
  source 1..75: mol_type = other DNA
tggtgcagttgtaaaaaatttgaactcagatattgtgagaaacttggaaattccgttccccccttttgcggaaca

SEQ ID NO: 611975 - DNA, 75 bp, synthetic construct
  source 1..75: mol_type = other DNA
aaaaataaaattgaatcaattttttatagaaaagataagcatgaagatctttttgcttctatttctaataaatta

SEQ ID NO: 611976 - DNA, 75 bp, synthetic construct
  source 1..75: mol_type = other DNA
aatcatgtgttccctgttattggtaaacgaaacattaccgacctcaaaacccgtgacctactccaaccaattaag

SEQ ID NO: 611977 - DNA, 75 bp, synthetic construct
  source 1..75: mol_type = other DNA
caattactgaacgggtcgcgtgatttacttcgccatgcgggcgtggtgctggctgattgtaacctgactgctgag

SEQ ID NO: 611978 - DNA, 75 bp, synthetic construct
  source 1..75: mol_type = other DNA
gcgctggagtgggtctttaccctcgctgatgaaatcccggtgtttgtcgataccgtttcagaattcaaagcgggc

SEQ ID NO: 611979 - DNA, 75 bp, synthetic construct
  source 1..75: mol_type = other DNA
ttgcgctggagccggatctcatcatgtttgatgagcctttgttgggcaagatcccattaccatgggcgtgctggt

SEQ ID NO: 611980 - DNA, 75 bp, synthetic construct
  source 1..75: mol_type = other DNA
gggaagtgggccagtgaatccgcacaggcacttgatgaagtggaaagactggccgcgatgatcccgcccggtcag

SEQ ID NO: 611981 - DNA, 75 bp, synthetic construct
  source 1..75: mol_type = other DNA
tgatggtgtgaaagtgaattacggcaagtttggtgatctgttggctgatgttaaggccattaccggttcggcccc

SEQ ID NO: 611982 - DNA, 75 bp, synthetic construct
  source 1..75: mol_type = other DNA
atctcagacgtgtcaggacttatctctccggacgtgatcgggtgggccgctggtgcggccatcaccctcattatc

SEQ ID NO: 611983 - DNA, 75 bp, synthetic construct
  source 1..75: mol_type = other DNA
gcggcgaaggtgtgccacgaagtggggttggatgcgggagaggtggtcatcggcagtgatattgaaacgttatct

SEQ ID NO: 611984 - DNA, 75 bp, synthetic construct
  source 1..75: mol_type = other DNA
acaactgattctggaaaataatatttttggtcttgatatcgacgaccgggcagcacagctttccggttttgcatt

SEQ ID NO: 611985 - DNA, 75 bp, synthetic construct
  source 1..75: mol_type = other DNA
atgccgcgtcacgtcttgacccggagacgtataaaaaagtgcatgatgccggttttcgctgggcaccaaaacagg

SEQ ID NO: 611986 - DNA, 75 bp, synthetic construct
  source 1..75: mol_type = other DNA
ccgtggaaaatgggcgcactaccgtgccctctccggcagaacgtcgcgatctttatctgcaagggtgtgacttca

SEQ ID NO: 611987 - DNA, 75 bp, synthetic construct
  source 1..75: mol_type = other DNA
tggcggtacgccttccgcgctttcggcacgcgatttggccagaatcatcaccacattacgagaaaagctgccatt

SEQ ID NO: 611988 - DNA, 75 bp, synthetic construct
  source 1..75: mol_type = other DNA
ttttatcagaatcgttttaatgaagatgcgtgtgctcattataccaacgccctgattcgagaaatcgaactggag

SEQ ID NO: 611989 - DNA, 75 bp, synthetic construct
  source 1..75: mol_type = other DNA
atggggtgcatctgtgcgacatcccattgaacgtctaccaggtgatacgtcgccaatccttgtctgcgttgtggc

SEQ ID NO: 611990 - DNA, 75 bp, synthetic construct
  source 1..75: mol_type = other DNA
tttccgaagcagatcccgcttggcggtaaaaatgtcgcctgggcacagtctgaggtcagcgcatggatggcggac

SEQ ID NO: 611991 - DNA, 75 bp, synthetic construct
  source 1..75: mol_type = other DNA
tcgtttctgggcaagcaatattttgcagtctcttaatgaactgattcaggtacttaatgcgccagcgattgcgct

SEQ ID NO: 611992 - DNA, 75 bp, synthetic construct
  source 1..75: mol_type = other DNA
ggatcgttttttaagatactggtgggaggtggcaatagaatctgaaaaatggtttaagtttgctaaaggtggaga

SEQ ID NO: 611993 - DNA, 75 bp, synthetic construct
  source 1..75: mol_type = other DNA
ttgcgtcactatgctgatagacgtatcactattgatctggatgacggcgttaaggttaactacggcaaatttggc

SEQ ID NO: 611994 - DNA, 75 bp, synthetic construct
  source 1..75: mol_type = other DNA
ttgtgcctaaacgccattaaaccgaaaaaatctgaatcagcgctggagactattcgccgctatttatcgactcag

SEQ ID NO: 611995 - DNA, 75 bp, synthetic construct
  source 1..75: mol_type = other DNA
aatcattacgggaaatagctaactatttcttagagtttgacctgaaagttattgaggaaattcgtttggctgagg

SEQ ID NO: 611996 - DNA, 75 bp, synthetic construct
  source 1..75: mol_type = other DNA
ttcaaaacggcagcctagtaaacatattaaaaaaccagactgaagttttttatcaaaagttaatcaaaacacatg

SEQ ID NO: 611997 - DNA, 75 bp, synthetic construct
  source 1..75: mol_type = other DNA
agcattttttgatgagaaaatgattgagagcctatccttgaacactgctgaactaatttctctggctaaagaaaa

SEQ ID NO: 611998 - DNA, 75 bp, synthetic construct
  source 1..75: mol_type = other DNA
gttcgcataactataatttagattttatatttaaaaaagggattacatggaacgctctttcctcaagcaagacat

SEQ ID NO: 611999 - DNA, 75 bp, synthetic construct
  source 1..75: mol_type = other DNA
ccgacagtgacggcatcctgccgctgatggatgacgagtggtttgaggacgacgtcacctctcgcgtcaaagagt

SEQ ID NO: 612000 - DNA, 75 bp, synthetic construct
  source 1..75: mol_type = other DNA
tgcaaaagggggtgagttgaggaagtggttcggaaatcatgagtatatcataaactatgaaaatgatggcattga

SEQ ID NO: 612001 - DNA, 75 bp, synthetic construct
  source 1..75: mol_type = other DNA
gggattcatttgaaagatcccaaaatttcacaagctcaccattattgtttaaacagggtaaatcaattgattatt

SEQ ID NO: 612002 - DNA, 75 bp, synthetic construct
  source 1..75: mol_type = other DNA
attgaacctgaaaccatcaaagtacttgaccctgcttgtggttcgggccacatattgattgaagcctataacgtg

SEQ ID NO: 612003 - DNA, 75 bp, synthetic construct
  source 1..75: mol_type = other DNA
cctgcaccgttacaacgagggcacgctttctcgtatgcgtaccgagtatgtcaccccgttactaggcaaatacga

SEQ ID NO: 612004 - DNA, 75 bp, synthetic construct
  source 1..75: mol_type = other DNA
atcgccgaaagtctctgtttatacgcgatcaagccgaaaaaaggcgaatctgcgctggagaccattcgtcgctat

SEQ ID NO: 612005 - DNA, 75 bp, synthetic construct
  source 1..75: mol_type = other DNA
gacagcgtattgcatcagtcagcccccatccacgcggtctatttcggtggcggcacgccttccgcgctttcggca

SEQ ID NO: 612006 - DNA, 75 bp, synthetic construct
  source 1..75: mol_type = other DNA
tgaaagaagaaaagcaaaaaataattagctcgtacaagggaagtggcttgccacttcccttttttgctcataagg

SEQ ID NO: 612007 - DNA, 75 bp, synthetic construct
  source 1..75: mol_type = other DNA
tgcgtattcaggaactggctcagaatatccacaaactgattgttcaccacaatctgccggatctgatgtaccgcg

SEQ ID NO: 612008 - DNA, 75 bp, synthetic construct
  source 1..75: mol_type = other DNA
gcgttctgacagcacctggcacggcttcaaaaacatcgataacgagcacatgtatcttgacccgatcaaagtcac

SEQ ID NO: 612009 - DNA, 75 bp, synthetic construct
  source 1..75: mol_type = other DNA
tgcaataggagataagtttaacgaactagttatatgtgcgattgctttcgtggttttctttgtgctaaccggtgt

SEQ ID NO: 612010 - DNA, 75 bp, synthetic construct
  source 1..75: mol_type = other DNA
aagctcgtgaagtcagcgcccgtatagccaaagtcaaatcaatgacgggtgaagagatcaaagccatccgcaccc

SEQ ID NO: 612011 - DNA, 75 bp, synthetic construct
  source 1..75: mol_type = other DNA
ggcggcgttctctcaggcttccatgatccacgttaaaggtgacgtaaacgaagaaacctttaacgaagcctacat

SEQ ID NO: 612012 - DNA, 75 bp, synthetic construct
  source 1..75: mol_type = other DNA
atgaatcaatcagagcagagaaaaaaaatactggttcttacacctcgctttccctaccctgtcattggaggggat

SEQ ID NO: 612013 - DNA, 75 bp, synthetic construct
  source 1..75: mol_type = other DNA
acttctattatatctgaagttgataaaaactatctatcaccatcatttaatgaaaacgtaattgtgtgtgggaat

SEQ ID NO: 612014 - DNA, 75 bp, synthetic construct
  source 1..75: mol_type = other DNA
attggtgtatgtcctattagattaggggcaggtatccaaaataaggtacttgaatatatggcgttgggattacct

SEQ ID NO: 612015 - DNA, 75 bp, synthetic construct
  source 1..75: mol_type = other DNA
tgccttacaccaacttctctccaatttacgaaggtaaatgtggtatgagcggtggccgtgtagaagggaaagtga

SEQ ID NO: 612016 - DNA, 75 bp, synthetic construct
  source 1..75: mol_type = other DNA
tccatgatccacgttaaaggtgacgtaaacgaagaaacttttaacgaagcctacatgatgcacaccaccacttct

SEQ ID NO: 612017 - DNA, 75 bp, synthetic construct
  source 1..75: mol_type = other DNA
atacatcagccttgagatatataaaaagagaaataaaaatcgataagccggtggaacttatatttatcggaaata

SEQ ID NO: 612018 - DNA, 75 bp, synthetic construct
  source 1..75: mol_type = other DNA
cgaccgtctggggctcactgacggcacgccccccgctggcgggccgctgcgcctccctggctgagctgatgcaac

SEQ ID NO: 612019 - DNA, 75 bp, synthetic construct
  source 1..75: mol_type = other DNA
tgctttcttgcccttcttgccgatgttgccattgcacttactgatccagaacctgctgtatgatgtgtcgcaggt

SEQ ID NO: 612020 - DNA, 75 bp, synthetic construct
  source 1..75: mol_type = other DNA
gcctggctgcactctgaagtcaccgcatggatggccgggcgcattgccggacgcaaacgggggtacgacgcatga

SEQ ID NO: 612021 - DNA, 75 bp, synthetic construct
  source 1..75: mol_type = other DNA
gatgaatcacagcagcaacgtctgcaacatcttttcaccacgacgctgcagaccctcgccggagaacacgaagca

SEQ ID NO: 612022 - DNA, 75 bp, synthetic construct
  source 1..75: mol_type = other DNA
cggcctgccaggtcaggatgcgcaaacctggggagaagatctggctattgcccgcgatatcggtctcgatggcgt

SEQ ID NO: 612023 - DNA, 75 bp, synthetic construct
  source 1..75: mol_type = other DNA
tcgggggtaaaaatgtcgcctggctacagtctgaaatcacggcatggatggaagaacgtgtcgcgcaccgcaacc

SEQ ID NO: 612024 - DNA, 75 bp, synthetic construct
  source 1..75: mol_type = other DNA
aacgctttcccggcgcaggtttccctcgggggtaaaaatgtcgcctggctacagtctgaaatcacggcatggatg

SEQ ID NO: 612025 - DNA, 75 bp, synthetic construct
  source 1..75: mol_type = other DNA
accatcacggtttactggcgatgaccgactgctcaacgccggaagacggcctggcatgccaaaagctgggagccg

SEQ ID NO: 612026 - DNA, 75 bp, synthetic construct
  source 1..75: mol_type = other DNA
cctggcactggtgaaaacattaagcgacgccggatgtcgggtgattgccgaagggcgttacaactcgcctgctca

SEQ ID NO: 612027 - DNA, 75 bp, synthetic construct
  source 1..75: mol_type = other DNA
gtgttttttttaaaagtaagggtagttactcttatgttgttacagtagatatggataatcagatgtatatggtca

SEQ ID NO: 612028 - DNA, 75 bp, synthetic construct
  source 1..75: mol_type = other DNA
ggcatctcggccagaacttctacagcaaaagccgcgaagctgaacatcaggcctttcttgactggctgctggaga

SEQ ID NO: 612029 - DNA, 75 bp, synthetic construct
  source 1..75: mol_type = other DNA
gatgaatcgcagcagcaacgtctgcagcatcttttcgccacgacgttgcataccctcgccggagaacacgaagca

SEQ ID NO: 612030 - DNA, 75 bp, synthetic construct
  source 1..75: mol_type = other DNA
cgggacgccaggcgcagtgctgtgccccattccgtttttacgtccgcgtgacattattaccagccaggcggggct

SEQ ID NO: 612031 - DNA, 75 bp, synthetic construct
  source 1..75: mol_type = other DNA
atgagtctcttaaatgacgttcagaaattcattgaagcccatccggggtgtacttccggggacattgcggatgct

SEQ ID NO: 612032 - DNA, 75 bp, synthetic construct
  source 1..75: mol_type = other DNA
cttataggtatcggtgttttgggtgaatatattggaagaatatacatagaaacaaaacatagacctagattttta

SEQ ID NO: 612033 - DNA, 75 bp, synthetic construct
  source 1..75: mol_type = other DNA
cattctgtttcttggaggaatacaactaatcggtataggcgtgctcggagagtatataggacgtatctacattga

SEQ ID NO: 612034 - DNA, 75 bp, synthetic construct
  source 1..75: mol_type = other DNA
aatcaccagcttttcaaccttccctcttcgcatgtggacttatattggtctgttcgttgccggtgcttcgttcct

SEQ ID NO: 612035 - DNA, 75 bp, synthetic construct
  source 1..75: mol_type = other DNA
aatacataggaagaatatatattgagtcaaaaaacagaccaaggtatcttttaaaggaaaatgactgtgaaaaaa

SEQ ID NO: 612036 - DNA, 75 bp, synthetic construct
  source 1..75: mol_type = other DNA
ggaagctctaagtttaatggctggaagttgtggaaccttgcccttgaggggataaccagtttttcaacagtgccg

SEQ ID NO: 612037 - DNA, 75 bp, synthetic construct
  source 1..75: mol_type = other DNA
ctctagttgttccgctgtcatttacacgcaactttggtaaagaaccagcattgtttgcagggttagaccatgcaa

SEQ ID NO: 612038 - DNA, 75 bp, synthetic construct
  source 1..75: mol_type = other DNA
tcttcaatgaagaagaagcgataccaattttctataaaacggtacgtgaattcgaagagttgaagccatatgaag

SEQ ID NO: 612039 - DNA, 75 bp, synthetic construct
  source 1..75: mol_type = other DNA
ctgaaatgttttacaagcttcataacaaaatcagcaatcctaagattgaagagaacgttggcgattttcgtctta

SEQ ID NO: 612040 - DNA, 75 bp, synthetic construct
  source 1..75: mol_type = other DNA
tgttgacctgcaagatccgattgaggttattccccatctgattgaaaagtggcgggcaggcgctgatatggtgct

SEQ ID NO: 612041 - DNA, 75 bp, synthetic construct
  source 1..75: mol_type = other DNA
ccggaagaagccgcatcgctgaacctggcacgcaggtatttaaaacagcgcaccgactccgcccgccacacgctg

SEQ ID NO: 612042 - DNA, 75 bp, synthetic construct
  source 1..75: mol_type = other DNA
atatcgtccgcgatccgctgctccgcaatgcttatctgagtctgcataacgccactcatcatcaggcgatccagt

SEQ ID NO: 612043 - DNA, 75 bp, synthetic construct
  source 1..75: mol_type = other DNA
tttatatgtaccgctatcaggattacccggcagaccgccgcgaactcatcatcctcgacgactccccgcaaagcc

SEQ ID NO: 612044 - DNA, 75 bp, synthetic construct
  source 1..75: mol_type = other DNA
aactgtggaaccttgcccttgaggggataaccagtttctcaacattcccgctgcgcatgtggacttatatcggat

SEQ ID NO: 612045 - DNA, 75 bp, synthetic construct
  source 1..75: mol_type = other DNA
atggaagcataataagctttttctgcttctgccggaggagtatggcccagcctttccagcaatcgtcgattgtta

SEQ ID NO: 612046 - DNA, 75 bp, synthetic construct
  source 1..75: mol_type = other DNA
cggcagggcagaagtggtcagcgatgcggagggaaccggaggtaaggcagtgaagctgaccaaggaagccggtaa

SEQ ID NO: 612047 - DNA, 75 bp, synthetic construct
  source 1..75: mol_type = other DNA
tttatgaagggcgtgctgagctgggttggcggacgcacagatgttgttgagtatgccagggcagaacgcgtcgca

SEQ ID NO: 612048 - DNA, 75 bp, synthetic construct
  source 1..75: mol_type = other DNA
ggtcggctggatgggggttcctgatggcgaagagatgttgcagccaaccagaaagcatcattggcagcatcaaat

SEQ ID NO: 612049 - DNA, 75 bp, synthetic construct
  source 1..75: mol_type = other DNA
gagaaactaactcgttactggcgaggaagcgtaacgtcactgaagattctctgtgacagttccagcgtagagata

SEQ ID NO: 612050 - DNA, 75 bp, synthetic construct
  source 1..75: mol_type = other DNA
tcgctgaagctggttgtccgccccaatcacccgctacttcaggagaacgtaacgctaagccgggtgctggaatgg

SEQ ID NO: 612051 - DNA, 75 bp, synthetic construct
  source 1..75: mol_type = other DNA
ctgagtggttctataaactacataacaaaatcagcacccctcagatcgaagagaatgtcggtgacttccgtctta

SEQ ID NO: 612052 - DNA, 75 bp, synthetic construct
  source 1..75: mol_type = other DNA
ttcatgaaaggcgtcttgtcatgggttggcggtaaaattgatgttgttgagtatgcaagagctgaacgcgttgcc

SEQ ID NO: 612053 - DNA, 75 bp, synthetic construct
  source 1..75: mol_type = other DNA
caaaataagcaacccaaagatcgaggagaatgtcggcgatttccggttaatgagccgtgaagttgtcgaaaacat

SEQ ID NO: 612054 - DNA, 75 bp, synthetic construct
  source 1..75: mol_type = other DNA
ggcaggccggtgcagatatggttctggctaaacgctctgaccgctccactgacagcaggctgaagcgtaaatctg

SEQ ID NO: 612055 - DNA, 75 bp, synthetic construct
  source 1..75: mol_type = other DNA
ggagattccaaatttaatggctggaagctttggaaccttgcccttgaaggcattacaagcttctcaacattccca

SEQ ID NO: 612056 - DNA, 75 bp, synthetic construct
  source 1..75: mol_type = other DNA
tgtctcgcgaagttgtcgaaaacattaagcaattaccagagcgcaatctattcatgaaaggcgttcttagttggg

SEQ ID NO: 612057 - DNA, 75 bp, synthetic construct
  source 1..75: mol_type = other DNA
tcttcaatgaagaagaaacgataccaattttctataaagcggtacgtgaattcgaagagttgaagccatatgaag

SEQ ID NO: 612058 - DNA, 75 bp, synthetic construct
  source 1..75: mol_type = other DNA
acggacgggaaatcaatgacgacgctgttttcttaccgtgcatcggagtcaggcggagcactgacgccacagggc

SEQ ID NO: 612059 - DNA, 75 bp, synthetic construct
  source 1..75: mol_type = other DNA
ttccggcagaccactgcctgcatgatgtgcaggacatgagcgggataaaccaccctaaagctgacctgagtaaag

SEQ ID NO: 612060 - DNA, 75 bp, synthetic construct
  source 1..75: mol_type = other DNA
cgacagtatcagaagtgcgcccgtcatcgccttccggtgcagaagtcacaggcgtcacaacactgctctcttacc

SEQ ID NO: 612061 - DNA, 75 bp, synthetic construct
  source 1..75: mol_type = other DNA
tggcatcacagggctggcgctattatcacaaaccggcgagcggagacaatgttaacaaaaacattgctgaagcgg

SEQ ID NO: 612062 - DNA, 75 bp, synthetic construct
  source 1..75: mol_type = other DNA
ccgcagaatgccgggattcttctggtgccctgttgccgtggcggggctggtttaaccgtggggaatgacggcacg

SEQ ID NO: 612063 - DNA, 75 bp, synthetic construct
  source 1..75: mol_type = other DNA
cgtgacaccaccggatgagaagccgtcacctgatacaccatcaaaaccgtccacgccacccgcagacaccacgac

SEQ ID NO: 612064 - DNA, 75 bp, synthetic construct
  source 1..75: mol_type = other DNA
gattattactacgttattccactggccgggcagtcgaacggcatggcttacggtgaggggcttcctctgccgcag

SEQ ID NO: 612065 - DNA, 75 bp, synthetic construct
  source 1..75: mol_type = other DNA
gtcagcagcataatggtttattcacgaccatggttcagcagttcagaactgacctgtctccgcttgctgcgcagt

SEQ ID NO: 612066 - DNA, 75 bp, synthetic construct
  source 1..75: mol_type = other DNA
cgggtcagcattcaccaccgggccggacggttcattcagtgaggccagcggtgcttccgctgattcttcacgctg

SEQ ID NO: 612067 - DNA, 75 bp, synthetic construct
  source 1..75: mol_type = other DNA
gcggaaattgttgccgatgaaggtgcaacaggtggtaccgcgatgaagctgagcaaggagacaggagtggggtta

SEQ ID NO: 612068 - DNA, 75 bp, synthetic construct
  source 1..75: mol_type = other DNA
tacagtgacgtgaccggtgcctcagagagttctacccgctggggtgtgggcaggccgctgtataaggatctcatc

SEQ ID NO: 612069 - DNA, 75 bp, synthetic construct
  source 1..75: mol_type = other DNA
agtgacgccggatggcgctccctgtaaatataacgacattattccggcagaccactgtctgcatgatgtacagga

SEQ ID NO: 612070 - DNA, 75 bp, synthetic construct
  source 1..75: mol_type = other DNA
aatccgcaaaaaaaatcttctttgtgccgtttatgacggatgaaaacgggcgaaatgtgggtaccaacgagccgt

SEQ ID NO: 612071 - DNA, 75 bp, synthetic construct
  source 1..75: mol_type = other DNA
agaacaggctcccatctattcccatatccatttcaccagcgatctcgacgaagtattaaatgatcccgacgttaa

SEQ ID NO: 612072 - DNA, 75 bp, synthetic construct
  source 1..75: mol_type = other DNA
ggcgtgcataccctcgaccagattatctcgctgttcggtcgcccggatcatgtggcttacgacattcgcagcctg

SEQ ID NO: 612073 - DNA, 75 bp, synthetic construct
  source 1..75: mol_type = other DNA
gcgcgctggaagccgggaaaaatgtgctggtcgaaaaaccgttcaccccgacgcttgcgcaggcgaaagagctgt

SEQ ID NO: 612074 - DNA, 75 bp, synthetic construct
  source 1..75: mol_type = other DNA
gtcatcccgcacctcattgctaagtggcaggatggcgctgatatggttctggctaaaagaacagaccgctctacc

SEQ ID NO: 612075 - DNA, 75 bp, synthetic construct
  source 1..75: mol_type = other DNA
tattctgtttcttggtggaattcaattaataggaattggagtacttggtgagtatattggtagaatatatttaga

SEQ ID NO: 612076 - DNA, 75 bp, synthetic construct
  source 1..75: mol_type = other DNA
ggtgatgtcaccacgccggtgctggttaaaccatcgggtgacggggagacggctatcagcaagaccggtgagcct

SEQ ID NO: 612077 - DNA, 75 bp, synthetic construct
  source 1..75: mol_type = other DNA
ggatgagaatggacagagcacgccaacgaatgctccggcggaagacccggatattgtggctgtcgggtattacgg

SEQ ID NO: 612078 - DNA, 75 bp, synthetic construct
  source 1..75: mol_type = other DNA
agcacaacaacactgctgtcttaccgtgccagtgagtctgaagggaggctgaccgaacagggctggagtgctgga

SEQ ID NO: 612079 - DNA, 75 bp, synthetic construct
  source 1..75: mol_type = other DNA
aggtcttccgctgccggagacatatgaccgtccggacccgcgtattaagcaactggcgcgccgcagtacggtgac

SEQ ID NO: 612080 - DNA, 75 bp, synthetic construct
  source 1..75: mol_type = other DNA
caaggaatctgaagttcttaccaatctggaaatccttgaacgcggttttgagcaagcctctccctccacagtgac

SEQ ID NO: 612081 - DNA, 75 bp, synthetic construct
  source 1..75: mol_type = other DNA
gatcccactggcgggacaatcaaatggcatggcctatggtgaagggcttccgttaccggattcatttgaccgccc

SEQ ID NO: 612082 - DNA, 75 bp, synthetic construct
  source 1..75: mol_type = other DNA
tgatatcaccagcgctgcgacatatccggtgctgattgacagcattgtggtggaagtgaataccccgtcagcagg

SEQ ID NO: 612083 - DNA, 75 bp, synthetic construct
  source 1..75: mol_type = other DNA
tgcagtcccctttctgggaggcagtgactcagaagatgattatcgtgaagcactggaactggtcgaatatttgat

SEQ ID NO: 612084 - DNA, 75 bp, synthetic construct
  source 1..75: mol_type = other DNA
atgctgccgatattgcgatgtatcaggagaaaaaacacaaacagaaaacaccttttgtcgcgcatccagcgctac

SEQ ID NO: 612085 - DNA, 75 bp, synthetic construct
  source 1..75: mol_type = other DNA
gatgttctcggaagtaacggaagtgcgtgacgcgatccatctgctgacgccgcgcgcagtgaacgaagaggtcgg

SEQ ID NO: 612086 - DNA, 75 bp, synthetic construct
  source 1..75: mol_type = other DNA
aagttttcaccaccgggcgcggcacgccatatggcctgatggcagtaccggtcattaaaatggcaacacgtactg

SEQ ID NO: 612087 - DNA, 75 bp, synthetic construct
  source 1..75: mol_type = other DNA
cacgccagcatatttgtgtgcctatcattggcggcccctcgggaaaactggaaagccgttaccatgtgaataccc

SEQ ID NO: 612088 - DNA, 75 bp, synthetic construct
  source 1..75: mol_type = other DNA
acgtcacgttactacagagagaacaaagaatgactgctaatgctgcacgcgctgttaaagcaacaagagaactgg

SEQ ID NO: 612089 - DNA, 75 bp, synthetic construct
  source 1..75: mol_type = other DNA
gcggtggctgaaatggctaaagcaggcaagctgccagccttctacatgacagacccattaaaaccaagagggaaa

SEQ ID NO: 612090 - DNA, 75 bp, synthetic construct
  source 1..75: mol_type = other DNA
taccctcctgaagctgatctgtgggattgagcggcccagcgctgggaaaatctggtttagcggccatgacatcac

SEQ ID NO: 612091 - DNA, 75 bp, synthetic construct
  source 1..75: mol_type = other DNA
aagcccctgaacgccaggaaatccggctttcacaaaacccttctcatctcctgtcaaaagaagggtttgcgatgt

SEQ ID NO: 612092 - DNA, 75 bp, synthetic construct
  source 1..75: mol_type = other DNA
gggcgttttgaccgagttaaaattgctaaaaaacacacagcagtgttaactgagcggcagaaatatttattcgag

SEQ ID NO: 612093 - DNA, 75 bp, synthetic construct
  source 1..75: mol_type = other DNA
atggctgagcgtgttgccttcgtggtacgtaaaatgacggtggaatattacgcacctgcacggctcgacgatatg

SEQ ID NO: 612094 - DNA, 75 bp, synthetic construct
  source 1..75: mol_type = other DNA
agtgggacaagtacgcagcccagctagttgatgaagctccgacagaatggcatgactggaaaaatcgcattagtt

SEQ ID NO: 612095 - DNA, 75 bp, synthetic construct
  source 1..75: mol_type = other DNA
tctcaatatgggaaaaaccgaccgcagcgccaacccttcgccgggcaacgaaaacggcggactcgcaaacgtggt

SEQ ID NO: 612096 - DNA, 75 bp, synthetic construct
  source 1..75: mol_type = other DNA
attgcctcacggtcgttactgcgcgaggtaaaaacgacattgccgggttcggcaagtgtaagggagtttgcccgg

SEQ ID NO: 612097 - DNA, 75 bp, synthetic construct
  source 1..75: mol_type = other DNA
aaactcaacaaacctttatcaagtcattaggaaatattacagtcagaatagttcaaaaaaatcttttgatatatc

SEQ ID NO: 612098 - DNA, 75 bp, synthetic construct
  source 1..75: mol_type = other DNA
gctgccgggcaggttgccccggctctctctcttgatggctctattcagtcggagggcgatcaggtttcaatcggt

SEQ ID NO: 612099 - DNA, 75 bp, synthetic construct
  source 1..75: mol_type = other DNA
tcatgtcagacagcgcacgatgaaaaaagagattgaagcgctggatgatgcggaagctatactggcgtataaagt

SEQ ID NO: 612100 - DNA, 75 bp, synthetic construct
  source 1..75: mol_type = other DNA
gtgataacagatgtctggaaatataggggcaaatccagcacattcctgaaatcgcatcctgaaattgatattcag

SEQ ID NO: 612101 - DNA, 75 bp, synthetic construct
  source 1..75: mol_type = other DNA
atgggcatggcgggccatgtgacttttgtacacaacggcaaggcttatgttactggtggtgttaaccagaatatc

SEQ ID NO: 612102 - DNA, 75 bp, synthetic construct
  source 1..75: mol_type = other DNA
tctcaatatgggaaaaaccgaccgcagcgccaacccttcgccgggcaacgagaatggcggtctcgcaaacgtggt

SEQ ID NO: 612103 - DNA, 75 bp, synthetic construct
  source 1..75: mol_type = other DNA
tctcaatatgggaaaaaccgaccgcagcgccaacccttcgccgggcaacgacaagggcggcctcgcaaacgtggt

SEQ ID NO: 612104 - DNA, 75 bp, synthetic construct
  source 1..75: mol_type = other DNA
tctcaatatgggaaaaaccgaccgcagcgccaacccttcgccgggcaacgataaaggcggtctcgcaaacgtggt

SEQ ID NO: 612105 - DNA, 75 bp, synthetic construct
  source 1..75: mol_type = other DNA
tctctcttgatggatctattcagtcggagggcgatcaggtttcaatcggtattacccaaaaatcaccccgatcag

SEQ ID NO: 612106 - DNA, 75 bp, synthetic construct
  source 1..75: mol_type = other DNA
gcaattgttgaagtgctgtcgcccggtcaacccccgactaaacgcggattaatttacgccgcgacgccagccagt

SEQ ID NO: 612107 - DNA, 75 bp, synthetic construct
  source 1..75: mol_type = other DNA
gcaattgttgaagtgctgtcgcccggtcaacccccgactaaacgcgtattaatttacgccgcgacgccagccagg

SEQ ID NO: 612108 - DNA, 75 bp, synthetic construct
  source 1..75: mol_type = other DNA
tcgtaatttctacgatccttacgcctggagctggcagcatgataactcgcgctgggatttactggatgttatgcg

SEQ ID NO: 612109 - DNA, 75 bp, synthetic construct
  source 1..75: mol_type = other DNA
atttctggaaacggagtgcgtggaaaatgtcgccacaaccgaaatcattaaagcaactgaagaaagtaacggcca

SEQ ID NO: 612110 - DNA, 75 bp, synthetic construct
  source 1..75: mol_type = other DNA
cgttttatgatcgacgcagatggtgcagaagatattccgttgaacaataaacgcgcgggtgatgctgccaactta

SEQ ID NO: 612111 - DNA, 75 bp, synthetic construct
  source 1..75: mol_type = other DNA
ttactgggacgccagcagtaatgtgaattattcattatcacttagccgcgattttgatatcgggccattaaaaaa

SEQ ID NO: 612112 - DNA, 75 bp, synthetic construct
  source 1..75: mol_type = other DNA
gtcatttttactcgtttatcatgccagattacccgtcatatcagcgtttcgtcgttggcacggaagatgcaatac

SEQ ID NO: 612113 - DNA, 75 bp, synthetic construct
  source 1..75: mol_type = other DNA
agattacccgtcatatcagcgtttcatcgttggcacggaagatgcaatacccgaagtaagacaaccactggagga

SEQ ID NO: 612114 - DNA, 75 bp, synthetic construct
  source 1..75: mol_type = other DNA
acaatcacgctaacgttggcgatgtcgttaagctggtggctccggctggtgatttctttatggatgtagcgaatg

SEQ ID NO: 612115 - DNA, 75 bp, synthetic construct
  source 1..75: mol_type = other DNA
tccctatgctgcctcgcgagctttctgacgatctctgctcactgcgcgccaatgaagtccgcccggtactggcat

SEQ ID NO: 612116 - DNA, 75 bp, synthetic construct
  source 1..75: mol_type = other DNA
aactcgaacgcggcgatgtacttccccatgacatagttgaatcctcagcgactgcatggcgggataaaatgaggg

SEQ ID NO: 612117 - DNA, 75 bp, synthetic construct
  source 1..75: mol_type = other DNA
ttttatggccgctgcaaaaaacatggaccgtaatggctctcagttaatccgggattttatgcgccagaccgttga

SEQ ID NO: 612118 - DNA, 75 bp, synthetic construct
  source 1..75: mol_type = other DNA
cagttatcatcattggttgtgcgtcagcttatgccgttgaattcaacaaagatttaatcgaagccgaagatcgtg

SEQ ID NO: 612119 - DNA, 75 bp, synthetic construct
  source 1..75: mol_type = other DNA
acatttagccgaataaactgggaagatgacaaccaggatcaactgtacctaaatatttcaattccctggggaacc

SEQ ID NO: 612120 - DNA, 75 bp, synthetic construct
  source 1..75: mol_type = other DNA
catatctgcacctcaggcatggttaaaatacaaagatgcaaactggacgcctcctgaactttggaatcatggtat

SEQ ID NO: 612121 - DNA, 75 bp, synthetic construct
  source 1..75: mol_type = other DNA
aatacgatagacctgatcattgatgctgcaattgatgggcatggattggcgtatctaccttatgatcaggttgag

SEQ ID NO: 612122 - DNA, 75 bp, synthetic construct
  source 1..75: mol_type = other DNA
cgggtgatcctgctcgacttttcgggcatgacggaactgctcgatggcgagcaaagctactccacgcctgaaagc

SEQ ID NO: 612123 - DNA, 75 bp, synthetic construct
  source 1..75: mol_type = other DNA
tttatggaaacctcctttcactacgcgctgtaccgccccatcatcacatccctacaggcgcaggggcagagttgc

SEQ ID NO: 612124 - DNA, 75 bp, synthetic construct
  source 1..75: mol_type = other DNA
cggaaaaactgccgctgggcaaaaaacgcaacatgctcaatgaactggcagtgggggaatatatcctctgcatgg

SEQ ID NO: 612125 - DNA, 75 bp, synthetic construct
  source 1..75: mol_type = other DNA
agatcacccgccttgccgccagtgaagatgaaaacggtcaacggggccgccgtcagtcgcacttgcaggcgctgc

SEQ ID NO: 612126 - DNA, 75 bp, synthetic construct
  source 1..75: mol_type = other DNA
tgagcattcgctggaagacggctggcagccgctgctacgcgccgacaaatggctggcctgttacccgagcctttg

SEQ ID NO: 612127 - DNA, 75 bp, synthetic construct
  source 1..75: mol_type = other DNA
cggcttagctaaagagacgtggaaccatgcagactggaaccgtttttatcagcgtattttgtgttacagccacta

SEQ ID NO: 612128 - DNA, 75 bp, synthetic construct
  source 1..75: mol_type = other DNA
taagatctcctggaccatcgccatgatgcaaaaacaccgggcgctcatctccggttccgaccagatccccatctg

SEQ ID NO: 612129 - DNA, 75 bp, synthetic construct
  source 1..75: mol_type = other DNA
gtgttgcgctttactgagcaagagtatctggctttcagtaagcgcagaaagaaaggatgggttaagccaaagccc

SEQ ID NO: 612130 - DNA, 75 bp, synthetic construct
  source 1..75: mol_type = other DNA
atccggcatttgttcttcgatatggtaatgcagttataggtcttgttaatcagggatatggaaaagtgacggtaa

SEQ ID NO: 612131 - DNA, 75 bp, synthetic construct
  source 1..75: mol_type = other DNA
atgtgaacctgatttgcaaactgcaccacggcacctgctcgcgcccggaagaagctgcatcgctggcactggcgc

SEQ ID NO: 612132 - DNA, 75 bp, synthetic construct
  source 1..75: mol_type = other DNA
cccagcgaacgcaccattttgtgtatctcgcatagccacaacacctttgataaagattttattcttggggccagc

SEQ ID NO: 612133 - DNA, 75 bp, synthetic construct
  source 1..75: mol_type = other DNA
ggcgcggcttacggagattcgccatcactattgcgatgcgtttatggatggcaaggcgggagaacgggcggcgat

SEQ ID NO: 612134 - DNA, 75 bp, synthetic construct
  source 1..75: mol_type = other DNA
ttgtcagcctcgacaacagaacccgcagtaacacccaggctatccagaatcactcccgccagctgcaggagcata

SEQ ID NO: 612135 - DNA, 75 bp, synthetic construct
  source 1..75: mol_type = other DNA
aaagataataaagatatttttactggggttataaatattaaaaatggcatgattactaccgtcaatactgacgag

SEQ ID NO: 612136 - DNA, 75 bp, synthetic construct
  source 1..75: mol_type = other DNA
agaaaccgttgcaggacttgttgatgataccactgtacgtgttaatgatgatggaagtctcacgatggatcgtgg

SEQ ID NO: 612137 - DNA, 75 bp, synthetic construct
  source 1..75: mol_type = other DNA
atgttgcaggtcacaagcgagcaatggctttcctggctaaatctgtatttctggccgttattgcgcgtgctggcg

SEQ ID NO: 612138 - DNA, 75 bp, synthetic construct
  source 1..75: mol_type = other DNA
gagtttgccagagcaatggaaattgcgccctcaacggcaagccgattgctgaccggaaaagcagctttgacgcca

SEQ ID NO: 612139 - DNA, 75 bp, synthetic construct
  source 1..75: mol_type = other DNA
ttctttcttctgttgttgccggactgttgctggtaagtagtgggggtgttgcaaaagagattgatattggtggta

SEQ ID NO: 612140 - DNA, 75 bp, synthetic construct
  source 1..75: mol_type = other DNA
gaagagatagatcttaaattgctttttggaatgtttgagccacacgaaaagccgtggttcgtacatgaagataaa

SEQ ID NO: 612141 - DNA, 75 bp, synthetic construct
  source 1..75: mol_type = other DNA
tatccgcaacacggaaggtcagcgacgctggcgctgccggaattctgaacccgatgccggaaaggtgcttaatac

SEQ ID NO: 612142 - DNA, 75 bp, synthetic construct
  source 1..75: mol_type = other DNA
gacaggaatttcaagccgggcttccgtatcgatctgcatattaaggatctggcaaatgcgctggatacctcccat

SEQ ID NO: 612143 - DNA, 75 bp, synthetic construct
  source 1..75: mol_type = other DNA
tggacaaatctgttcgtgagcgtaccactgttggtgtgagttctgatggcaccctgacccgtgcagaaggtgcaa

SEQ ID NO: 612144 - DNA, 75 bp, synthetic construct
  source 1..75: mol_type = other DNA
acaacaagctggtacacaaattgcgatgcaacgaattttgttcccggttgattctcctagtttaaagcttgataa

SEQ ID NO: 612145 - DNA, 75 bp, synthetic construct
  source 1..75: mol_type = other DNA
aaaaataatgagaccgtgatacctgcaattaatactgaaattggctcttttatgaccttcaacattgatgagttt

SEQ ID NO: 612146 - DNA, 75 bp, synthetic construct
  source 1..75: mol_type = other DNA
cgttaattgcgcctttttgcgaacatttattcagtgaaatttttaatttgctggctgatattattagtgaattgc

SEQ ID NO: 612147 - DNA, 75 bp, synthetic construct
  source 1..75: mol_type = other DNA
gccgcagaaggtgaagtcagggttcctgttgaagttcctgatgacggtgatggttcacagaccacaattacctct

SEQ ID NO: 612148 - DNA, 75 bp, synthetic construct
  source 1..75: mol_type = other DNA
ggtgccaccggtggtaaggccctgcaactgaacaaaccggaaagccacatctggtttctggagcatgatgccgcc

SEQ ID NO: 612149 - DNA, 75 bp, synthetic construct
  source 1..75: mol_type = other DNA
ctgaccgacagtggtaccggggcagtgacgcagaacatgcaggcagcgatgatgcgcggcgacgaagcttacagc

SEQ ID NO: 612150 - DNA, 75 bp, synthetic construct
  source 1..75: mol_type = other DNA
tgataaattccgtgcagacctggcggatatggcaggtcagtgcgttggtggctctgctggcggtgttccctggat

SEQ ID NO: 612151 - DNA, 75 bp, synthetic construct
  source 1..75: mol_type = other DNA
ctgcaactgacagacatatcaaaggcggcggcatatacgctgcttattgacagtgtgaaggtggaagtgaacaac

SEQ ID NO: 612152 - DNA, 75 bp, synthetic construct
  source 1..75: mol_type = other DNA
gatggcctacggtgaagggcttccgttaccggattcatttgaccgtcctgaaccgcgaattaaacaactggcacg

SEQ ID NO: 612153 - DNA, 75 bp, synthetic construct
  source 1..75: mol_type = other DNA
tctggttggcgttaatgcgttgaccggggagtttggttctgaaaacccacaaacacttatgttcagggtacaggc

SEQ ID NO: 612154 - DNA, 75 bp, synthetic construct
  source 1..75: mol_type = other DNA
ccagaaagttgacgatgctattgccgacgctatccaaaaaggtcaatttaaccttgcccccccatccggtaaaat

SEQ ID NO: 612155 - DNA, 75 bp, synthetic construct
  source 1..75: mol_type = other DNA
ggctggcagggtgcatttatgttcactggcatcctggcgatgctgtgggtggtgctgtggtgggcgttctatcac

SEQ ID NO: 612156 - DNA, 75 bp, synthetic construct
  source 1..75: mol_type = other DNA
gcagttcattccgtgggtgaaggtcgcgatggagcatgagtttgtgcataacaacccggtcagggttaatgatga

SEQ ID NO: 612157 - DNA, 75 bp, synthetic construct
  source 1..75: mol_type = other DNA
gtacggtactgtttgacccaacctccttcgccacactggatatggaaacgctctctggcagcggcaatttctgga

SEQ ID NO: 612158 - DNA, 75 bp, synthetic construct
  source 1..75: mol_type = other DNA
ttcatttcacaaagtgataattactggctatcgaacggtatgcaggcacatcccggcacggctaaatctgcgctg

SEQ ID NO: 612159 - DNA, 75 bp, synthetic construct
  source 1..75: mol_type = other DNA
ctggcaagccgtgaaatcagcgaagcgctgaaagcgaaaggcattgatatgctggacgccccggtgagcggcggt

SEQ ID NO: 612160 - DNA, 75 bp, synthetic construct
  source 1..75: mol_type = other DNA
actccagtagggttgaggaggaaattatttatgaagtttccaaatctggatctcaggctttattggatcaccttc

SEQ ID NO: 612161 - DNA, 75 bp, synthetic construct
  source 1..75: mol_type = other DNA
acgagccgcattgtttaagcttgccagaaaaggggatgcctttgctctgcgtgagttactaagggtggataaaaa

SEQ ID NO: 612162 - DNA, 75 bp, synthetic construct
  source 1..75: mol_type = other DNA
gtatacgaaattgttggcgagcagggactactgcatgaaaaaggccgttatgcggtcgggcagggaccaatgtgg

SEQ ID NO: 612163 - DNA, 75 bp, synthetic construct
  source 1..75: mol_type = other DNA
atgttggactgccaccctgttttattgcccgaaggccctttctcacgcgaacaggcggttggcgtcacaacagct

SEQ ID NO: 612164 - DNA, 75 bp, synthetic construct
  source 1..75: mol_type = other DNA
atgtaggactgtcgccctgttttattgcccgaaggccctttctcacgcgaacaggcggttggcgtcacaacagct

SEQ ID NO: 612165 - DNA, 75 bp, synthetic construct
  source 1..75: mol_type = other DNA
ctgtccaaacctgtttcactcggtttgcgactgttcggtaacatgtacgcgggtgagctgattttcattctgatt

SEQ ID NO: 612166 - DNA, 75 bp, synthetic construct
  source 1..75: mol_type = other DNA
attaccccacatgccgcttcatttaccgatgaggccgatcacaatacgatgaaaatttctattaaaaacgttcta

SEQ ID NO: 612167 - DNA, 75 bp, synthetic construct
  source 1..75: mol_type = other DNA
tacaacgcctataaagatgaaaaaacctgtggtgttctgtctgaagacgacacttttggtaccatcactatcgct

SEQ ID NO: 612168 - DNA, 75 bp, synthetic construct
  source 1..75: mol_type = other DNA
gggtggtatcggtgacctgtataacttcaaactcgcaccttccctgactctgggttgtggttcctggggtggtaa

SEQ ID NO: 612169 - DNA, 75 bp, synthetic construct
  source 1..75: mol_type = other DNA
gaggacttcatgacgccgcgtgacatcgttcacctggcgaccgcattgctgcttgacccggatgatgccctgttt

SEQ ID NO: 612170 - DNA, 75 bp, synthetic construct
  source 1..75: mol_type = other DNA
taacgcgataaagaacaccggagccaaaatcactgccaccacaccacatggtattggggaaacctctattgtggc

SEQ ID NO: 612171 - DNA, 75 bp, synthetic construct
  source 1..75: mol_type = other DNA
aatgctaactctatttctgttgcagaaatgaccattctgatgatgctctccagttcccgaaaatatgttgaaatc

SEQ ID NO: 612172 - DNA, 75 bp, synthetic construct
  source 1..75: mol_type = other DNA
atgtcggactggctccctgttttattgcccgaaggccctttctcacgcgaacaggcggttggcgtcacaacagct

SEQ ID NO: 612173 - DNA, 75 bp, synthetic construct
  source 1..75: mol_type = other DNA
ttagataccgctatgtgggacaccgctcaggcgaaagataagatggacgcctggctgtctggcccgaacgccaac

SEQ ID NO: 612174 - DNA, 75 bp, synthetic construct
  source 1..75: mol_type = other DNA
cgctggcgctgctggaattttgaacctgatgccggaaaacagctaaacccgtatctcgccagtgagggaattctc

SEQ ID NO: 612175 - DNA, 75 bp, synthetic construct
  source 1..75: mol_type = other DNA
atgttggactgtcgccctgttttattgcccgaaggccctttctcacgcgaacaggcggttgtcatcacaacagct

SEQ ID NO: 612176 - DNA, 75 bp, synthetic construct
  source 1..75: mol_type = other DNA
aatgctgaagggcagctacgctggcggtgctggaattttgaacctgatgccggaaaacagctaaatccatatctc

SEQ ID NO: 612177 - DNA, 75 bp, synthetic construct
  source 1..75: mol_type = other DNA
cgctggcgctgccggaattctgaacccgatgccggcaaacaacttaatacgcggctcgccagtgacggtcttctc

SEQ ID NO: 612178 - DNA, 75 bp, synthetic construct
  source 1..75: mol_type = other DNA
tccagcattccggtgtttggcgtcgatgcgctgccagaagctctggcactggtgaaatccggtgcactggcgggc

SEQ ID NO: 612179 - DNA, 75 bp, synthetic construct
  source 1..75: mol_type = other DNA
cgttggttaaacggccaggacatcgccagtgagcatggctggattgaggttgttgagtccatgaccttatctgtc

SEQ ID NO: 612180 - DNA, 75 bp, synthetic construct
  source 1..75: mol_type = other DNA
tgggctatcgctcttcaatgccgattatcgaactgaaactcaccggaccggcaagcgagcaacaggcgatggaaa

SEQ ID NO: 612181 - DNA, 75 bp, synthetic construct
  source 1..75: mol_type = other DNA
atgtgggactgcctccctgttttattgcccgaaggccctttctcacgcgaacaggcggttggcgtcacaacagct

SEQ ID NO: 612182 - DNA, 75 bp, synthetic construct
  source 1..75: mol_type = other DNA
tgttgctgtgcacagcgcccgttttcgctaaacccgttctgaccgtctacacctacgattccttcgccgccgact

SEQ ID NO: 612183 - DNA, 75 bp, synthetic construct
  source 1..75: mol_type = other DNA
tgttgctgtgcacagcgcccgttttcgcgaaacctgttctgactgtttatacctacgattccttcgccgctgact

SEQ ID NO: 612184 - DNA, 75 bp, synthetic construct
  source 1..75: mol_type = other DNA
gttcagtctgacgttgagcgagcaattcaccggtggcttgctggctttgcaactttctcgcgcgggggcaccatt

SEQ ID NO: 612185 - DNA, 75 bp, synthetic construct
  source 1..75: mol_type = other DNA
attacagaagaacccgaaaaatgtgttgctggcggtgtgctggatgcagggagagtttgacatgaacgccgccac

SEQ ID NO: 612186 - DNA, 75 bp, synthetic construct
  source 1..75: mol_type = other DNA
ttacccaatgcggcttcgcggagatgaagccatcgcgttgttacagatgacgccgtttgcctggcgtgcaagagc

SEQ ID NO: 612187 - DNA, 75 bp, synthetic construct
  source 1..75: mol_type = other DNA
gtaaagcagaagaattagcgcgcgtagtgaagcccggcggttggatcattacagctacgccgggaccgcgacatt

SEQ ID NO: 612188 - DNA, 75 bp, synthetic construct
  source 1..75: mol_type = other DNA
ctgggcatttactggcagttgtcgtccctgccggagggagtgacgctggcagaggaaggcaacgacatgctgatg

SEQ ID NO: 612189 - DNA, 75 bp, synthetic construct
  source 1..75: mol_type = other DNA
ggtgatgtcaccacgcctgttgtggtgaagccgtcgggtgacagcggtacggtaatgagcacagtcagtgagccg

SEQ ID NO: 612190 - DNA, 75 bp, synthetic construct
  source 1..75: mol_type = other DNA
gacacagggcggcagactgacctgtaagttccgcctctcaggcgcactgaccaacaatcagttcgggctggggat

SEQ ID NO: 612191 - DNA, 75 bp, synthetic construct
  source 1..75: mol_type = other DNA
accaaatacgcgtctcaatatgaagttgtgtacggtggttacaaagggaaaacggataaggctatttattttgtt

SEQ ID NO: 612192 - DNA, 75 bp, synthetic construct
  source 1..75: mol_type = other DNA
gacagcgaatttgcgcgaacttatctgtttcgccctatcccctcctggtcgtcaaaattcactatgggccagtac

SEQ ID NO: 612193 - DNA, 75 bp, synthetic construct
  source 1..75: mol_type = other DNA
gggataagttatcccacgcaattaaaaatgccctgtctggcgttgtgtgttccctactcttcgttttgccagtcc

SEQ ID NO: 612194 - DNA, 75 bp, synthetic construct
  source 1..75: mol_type = other DNA
caaggaaacaggcaaatcctcctggtaccttgagcatgatgccggtaatggtgcggacctgctgggtaaaggtgg

SEQ ID NO: 612195 - DNA, 75 bp, synthetic construct
  source 1..75: mol_type = other DNA
ctgtttgcttaccgggcatcagagtctgaaggacagctggcaccacagggctggactgccggaggcggtaaggcc

SEQ ID NO: 612196 - DNA, 75 bp, synthetic construct
  source 1..75: mol_type = other DNA
gggctgcatattgccaaaaaactgctgccttacatcccgcagaatgccgggatacttctggtgccctgttgccgt

SEQ ID NO: 612197 - DNA, 75 bp, synthetic construct
  source 1..75: mol_type = other DNA
tggtgaaggccttcctctgccggagacatatgaccgtccggacccgcgtattaagcagctggcgcgtcgcagtac

SEQ ID NO: 612198 - DNA, 75 bp, synthetic construct
  source 1..75: mol_type = other DNA
gatacttctagtgccctgttgtcgttgcgggtcagcattcaccactggagccgacggctcattcagtgaggccag

SEQ ID NO: 612199 - DNA, 75 bp, synthetic construct
  source 1..75: mol_type = other DNA
tgtcgcagtctccggtaggttcttttgcggcagacaaattacgtgtaacggatatcacaaaagcggcgacgtata

SEQ ID NO: 612200 - DNA, 75 bp, synthetic construct
  source 1..75: mol_type = other DNA
tcttcattgcctcagggtgtcacactggaaggtaatgccggtaacaatctgctggcgtcgttttacgtacagagc

SEQ ID NO: 612201 - DNA, 75 bp, synthetic construct
  source 1..75: mol_type = other DNA
catggcctatggtgaagggtttccgttaccggattcatttgaccgcccggacccacggattaagcaactggcacg

SEQ ID NO: 612202 - DNA, 75 bp, synthetic construct
  source 1..75: mol_type = other DNA
caaaaagaacttggcacgtttggcgcattcgaccatgactggcatacgcttgcatttaaatttaagggcagtaac

SEQ ID NO: 612203 - DNA, 75 bp, synthetic construct
  source 1..75: mol_type = other DNA
accgtctggcctcagcgattcttctccatgcaggacgaacggctgaactggtggggggacaggttgtgacgccgc

SEQ ID NO: 612204 - DNA, 75 bp, synthetic construct
  source 1..75: mol_type = other DNA
ggcataccaggcaatctatggcggctacaaaaacaaaacagataaaaacattcatttcgtcccattaatgacaga

SEQ ID NO: 612205 - DNA, 75 bp, synthetic construct
  source 1..75: mol_type = other DNA
ttctgaaactggagcaccgacgccgtcaccttcagaagcagtaaccaccacaacgctgctgtcttaccgtgtcag

SEQ ID NO: 612206 - DNA, 75 bp, synthetic construct
  source 1..75: mol_type = other DNA
ccggcgaatgcgggcattttgctggttccctgttgtcgtggcgggtcggcattcactggcggagctgacggctca

SEQ ID NO: 612207 - DNA, 75 bp, synthetic construct
  source 1..75: mol_type = other DNA
ggcaacacaccatcgggtccgtctgcagatacgtccgttcgcacaatctccctgctgccgacagccggagaggct

SEQ ID NO: 612208 - DNA, 75 bp, synthetic construct
  source 1..75: mol_type = other DNA
cgcgacacagtgacgccgggaggtgaagcctgtcagtataacgacattattccggcggaccactgtctgcatgat

SEQ ID NO: 612209 - DNA, 75 bp, synthetic construct
  source 1..75: mol_type = other DNA
ggcggaacagtgtaccggtggcagtgctgctggcgttccgtggatttgtggcgataccacgtatttctggaaaca

SEQ ID NO: 612210 - DNA, 75 bp, synthetic construct
  source 1..75: mol_type = other DNA
gcatcactggcgataagccgaattcattgggatgatgacaaagagaatcagtattacttctctttctccctgcca

SEQ ID NO: 612211 - DNA, 75 bp, synthetic construct
  source 1..75: mol_type = other DNA
aacaggggtggcggataaacttctgctgactgatatcacgaaggtggcaacgtatacgctgctgattgacagcgt

SEQ ID NO: 612212 - DNA, 75 bp, synthetic construct
  source 1..75: mol_type = other DNA
aaacaacagcattcaggtgacgccggtacttgatgagaagcggggcacgccattcacgctggtgaaatctcaggc

SEQ ID NO: 612213 - DNA, 75 bp, synthetic construct
  source 1..75: mol_type = other DNA
tacctggtcttttcatggagaaattgctggtaacggtctgaatgaaatagataacgcaggatacatgtgggaatg

SEQ ID NO: 612214 - DNA, 75 bp, synthetic construct
  source 1..75: mol_type = other DNA
tcagtgcattttcggcggataagttgcatgtgacagacattaccaaaagtgcgacttacccggtactgatagaca

SEQ ID NO: 612215 - DNA, 75 bp, synthetic construct
  source 1..75: mol_type = other DNA
agcacgaaagagccattatgggtaatgccggtatccggcaatcccagcgcagaaatcaccagttcaggtgtgacc

SEQ ID NO: 612216 - DNA, 75 bp, synthetic construct
  source 1..75: mol_type = other DNA
tgagtgtgcggtttaaggtgccgggctcactggtacagaaccggtttgccctgggtatttactggcagttgtcgt

SEQ ID NO: 612217 - DNA, 75 bp, synthetic construct
  source 1..75: mol_type = other DNA
aacggaaaagaatatccatttcgtaccgttcatgacggatgagaacggggtgaatgtgccgacgaacaaaccgga

SEQ ID NO: 612218 - DNA, 75 bp, synthetic construct
  source 1..75: mol_type = other DNA
tcagggcggcgtcgccgtcagaccttgctgatacacttgctcaaaaaattcgtgaaggatggcagccatacggcg

SEQ ID NO: 612219 - DNA, 75 bp, synthetic construct
  source 1..75: mol_type = other DNA
tggaaacaaaaatatacctctcagtacccggtggtttacggtgcatatcagaacaaagaagcgcaaaaaatttat

SEQ ID NO: 612220 - DNA, 75 bp, synthetic construct
  source 1..75: mol_type = other DNA
ctctaaaatctggtacgggcagattaaagacatgcccgtcagcgatgccagtgtgtcggcgctgaaaaaatatct

SEQ ID NO: 612221 - DNA, 75 bp, synthetic construct
  source 1..75: mol_type = other DNA
cacgccatcggggccgtctgaagatgcatccgtacgcacaatctccctgttgccgacagccggagaggctgctgc

SEQ ID NO: 612222 - DNA, 75 bp, synthetic construct
  source 1..75: mol_type = other DNA
gtccggtgaagacctggcatcacagggctggcgctattatcacaaaccggcgagcggagacagtgttaataaaaa

SEQ ID NO: 612223 - DNA, 75 bp, synthetic construct
  source 1..75: mol_type = other DNA
tccgggagtggtcaccacggagccagattattactacgttattccactggccgggcagtcgaacggcatggctta

SEQ ID NO: 612224 - DNA, 75 bp, synthetic construct
  source 1..75: mol_type = other DNA
tcgaaaactcggttattcgtaccacgctcacacagggtgccatcggctacgcaaaactgaatgcaaccaccggtt

SEQ ID NO: 612225 - DNA, 75 bp, synthetic construct
  source 1..75: mol_type = other DNA
acagggctggagtgctggcggaggtaaagcggaaattgttgctgatgagggtgcaacaggtggaaccgcgatgaa

SEQ ID NO: 612226 - DNA, 75 bp, synthetic construct
  source 1..75: mol_type = other DNA
atgacatttaaacattatgatgttgtcagggcggcgtcgccgtcagaccttgcggatgcgcttgctcaaaaaatt

SEQ ID NO: 612227 - DNA, 75 bp, synthetic construct
  source 1..75: mol_type = other DNA
taataactcgcctcgataaatccaccatggtgttatcgctcagcgttccacaagcctggttaaaatatcaggcaa

SEQ ID NO: 612228 - DNA, 75 bp, synthetic construct
  source 1..75: mol_type = other DNA
cagtacaattctgttaccgcaggctggtacggttcaattacagctacgcgtcatggtgtcgctcttcacgattat

SEQ ID NO: 612229 - DNA, 75 bp, synthetic construct
  source 1..75: mol_type = other DNA
caatacctttcaggtcggttccgcttccatcccctatttaacccgtaaagggcaagtacgctacaaaacatcgct

SEQ ID NO: 612230 - DNA, 75 bp, synthetic construct
  source 1..75: mol_type = other DNA
gattttgacggcacgcccggaaatcacgcagcacagtttggtgcgctggttgataaattccgtgcagacctggcg

SEQ ID NO: 612231 - DNA, 75 bp, synthetic construct
  source 1..75: mol_type = other DNA
ttatcggtcgaacaaaagcggcactggagaagaacccgaaaaatgtgctgtttgccgtggtgtggatgcaggggg

SEQ ID NO: 612232 - DNA, 75 bp, synthetic construct
  source 1..75: mol_type = other DNA
ggtgcagtaatcagcgccaccagcaacccggagtattactttgttgtggttctggcagggcagtcaaacggcatg

SEQ ID NO: 612233 - DNA, 75 bp, synthetic construct
  source 1..75: mol_type = other DNA
tgaagccgtcggatggagaaggcacagtaatcagcgccaccagagacccggagtattactttgttgtggttctgg

SEQ ID NO: 612234 - DNA, 75 bp, synthetic construct
  source 1..75: mol_type = other DNA
acatatgaccgtccggacccgcgtattaagcagctggcgcgccgcagtacggtgacaccgggcggtgcagcatgc

SEQ ID NO: 612235 - DNA, 75 bp, synthetic construct
  source 1..75: mol_type = other DNA
aacggcgattctggtgcatgccgggagaaccgctgaattcattaccggaaaacagcctgatacggtgaagcccac

SEQ ID NO: 612236 - DNA, 75 bp, synthetic construct
  source 1..75: mol_type = other DNA
ttcggttataggtcagtttcatcagcaacaaaaagagacgaccttgcaagttgcgacaatgagtaaccctatgat

SEQ ID NO: 612237 - DNA, 75 bp, synthetic construct
  source 1..75: mol_type = other DNA
cagcagccgcaacaaccggtagcaccgcagcagcagtatcagcagccgcaacaaccagttgcgccacagccgcaa

SEQ ID NO: 612238 - DNA, 75 bp, synthetic construct
  source 1..75: mol_type = other DNA
agcagccgcaacaaccagttgcgccgcagcagcagtatcaacagccgcaacaaccggttgcaccgcagccgcagt

SEQ ID NO: 612239 - DNA, 75 bp, synthetic construct
  source 1..75: mol_type = other DNA
gagcgaagtggagccggtagatacctttgcgcttgaacaaatggcgcgcctggtggaagcgcgtctggctgattt

SEQ ID NO: 612240 - DNA, 75 bp, synthetic construct
  source 1..75: mol_type = other DNA
tgaacagggcaccgacgtcatcaccgtgtttacccttgccaaagcgcgggaagtgtctgcggcagcggtgaaagc

SEQ ID NO: 612241 - DNA, 75 bp, synthetic construct
  source 1..75: mol_type = other DNA
gccattgctggcggaatacggtgcgactcatgccgaacccggtcatgcgctgacgggcactattccggcaaacca

SEQ ID NO: 612242 - DNA, 75 bp, synthetic construct
  source 1..75: mol_type = other DNA
agcagcaggataccctgcttcatccgctgttgatgcgtaatggcgacagccgtccgttgcataaaccgacgacgc

SEQ ID NO: 612243 - DNA, 75 bp, synthetic construct
  source 1..75: mol_type = other DNA
gctattttcaatttttatctgtgatggaaaaaacgtctatcgtactccctcgcggtcaactgacacacgttctgc

SEQ ID NO: 612244 - DNA, 75 bp, synthetic construct
  source 1..75: mol_type = other DNA
atggcagtacgaaaactcaccacagggaaatggctttgcgaatgttcccccgccggacgtagtgggcgtcgtgtg

SEQ ID NO: 612245 - DNA, 75 bp, synthetic construct
  source 1..75: mol_type = other DNA
tggctgggcgaatcagtagatcgtcgaaccctgaaagacgtggttgagctatggttcaaactacatggtaaatct

SEQ ID NO: 612246 - DNA, 75 bp, synthetic construct
  source 1..75: mol_type = other DNA
gcagccgcagtatcagcagccacaacagccagttgcgccacagccgcaggataccctgcttcatccgctgttgat

SEQ ID NO: 612247 - DNA, 75 bp, synthetic construct
  source 1..75: mol_type = other DNA
ccggttgcgccgcagcagcagtatcaacagctgcaacaaccggttgcaccgcagccgcagtatcagcagccacaa

SEQ ID NO: 612248 - DNA, 75 bp, synthetic construct
  source 1..75: mol_type = other DNA
gggactaccggttccggtaaatctgtcggtgtgaacgcgatgatcctgagcatgctttataaagcacagccagaa

SEQ ID NO: 612249 - DNA, 75 bp, synthetic construct
  source 1..75: mol_type = other DNA
gctgccgggaaagttttgccgacaccgaatcttcacacgctgatacaggcacgggatcaactggcgaaatctggt

SEQ ID NO: 612250 - DNA, 75 bp, synthetic construct
  source 1..75: mol_type = other DNA
gtattatcgaacagatggaagcgcaggggattgtcagcgaacaggggcacaacggtaatcgtgaagtgctggccc

SEQ ID NO: 612251 - DNA, 75 bp, synthetic construct
  source 1..75: mol_type = other DNA
gaactgatgctgtatttgagcttgatttcaccggcaatggcataaaatggaataaactttctcccgtctcctcac

SEQ ID NO: 612252 - DNA, 75 bp, synthetic construct
  source 1..75: mol_type = other DNA
cctgtgccatttaaaagtggtactggagcaattgataacgacactgtctacattggtttaggtagcgcaggtacg

SEQ ID NO: 612253 - DNA, 75 bp, synthetic construct
  source 1..75: mol_type = other DNA
gcggggccatctgtgcgcgtgaatgagtggttcagtgcttatgcgatggcgggtgtggcttacagccgtgtttcg

SEQ ID NO: 612254 - DNA, 75 bp, synthetic construct
  source 1..75: mol_type = other DNA
gatgttggtgcccacgccgagatcatccgcctgattgaaacgctgtgcgctgatggtctggcgctgctggtgatc

SEQ ID NO: 612255 - DNA, 75 bp, synthetic construct
  source 1..75: mol_type = other DNA
tatcaggtcagcgatcggatcaccgtcttacgcaacggcagtttcgtaggctgtcgggaaacccgcgagctaccg

SEQ ID NO: 612256 - DNA, 75 bp, synthetic construct
  source 1..75: mol_type = other DNA
actcatgccgaacccggtcacgcgctgacggggacgattccggcaaatcagctgggcgaccagcctgaacgtgtc

SEQ ID NO: 612257 - DNA, 75 bp, synthetic construct
  source 1..75: mol_type = other DNA
atgcgctggtgtttacgccagaaaatcaaaagattactgaaaccaatctcaaaactgtggatgacagcagtatcg

SEQ ID NO: 612258 - DNA, 75 bp, synthetic construct
  source 1..75: mol_type = other DNA
gcgatgtggtgctggtgtctggtattcagcgtggcgcggcagagattgtgggtcgttatgacagcctcggcaacc

SEQ ID NO: 612259 - DNA, 75 bp, synthetic construct
  source 1..75: mol_type = other DNA
taagaactatgcgcatgaaggcctgaaaaaatcatatagcgctgatattcatctttggcataacgggggtaatgg

SEQ ID NO: 612260 - DNA, 75 bp, synthetic construct
  source 1..75: mol_type = other DNA
gaataaaaaacgacaaaccgtttatctgcgcgaagtattggataacgccaaattccgcgataatccgtcgccatt

SEQ ID NO: 612261 - DNA, 75 bp, synthetic construct
  source 1..75: mol_type = other DNA
gcgatgtggtgctggtatcgggtattcagcgcggcgcggcagaaattgtggggcgttatgacagcctcggtaacc

SEQ ID NO: 612262 - DNA, 75 bp, synthetic construct
  source 1..75: mol_type = other DNA
gtatctgggcgtgctgctctacgacgccgaccgcatcgaagaagcagcgagtaccgaacgagaggtcgatctcta

SEQ ID NO: 612263 - DNA, 75 bp, synthetic construct
  source 1..75: mol_type = other DNA
ttaaccgccggtgattttacgaaataccgcgaagcgcggttaaaaggtgaagtgcgaaatgaagagggcgcactt

SEQ ID NO: 612264 - DNA, 75 bp, synthetic construct
  source 1..75: mol_type = other DNA
acccacgagcagattgcagaattgctttatgattgccaacaccagaacgaattgttaacgctggtagtcaagatt

SEQ ID NO: 612265 - DNA, 75 bp, synthetic construct
  source 1..75: mol_type = other DNA
tggcttggagaaacggtagatcgtcgaactctcagggatatcgtagacctttggtacaaacttcacggcacctct

SEQ ID NO: 612266 - DNA, 75 bp, synthetic construct
  source 1..75: mol_type = other DNA
aattgccgaaggtgagctagcttttctttccgcggacgaaatcaaacgcctgcttaatgcctgcgccgaatctca

SEQ ID NO: 612267 - DNA, 75 bp, synthetic construct
  source 1..75: mol_type = other DNA
aagccccagcctgctgatgattgcaaaaatatgcctggccaccggcgcacgctggagtgaagccgaaaacctgca

SEQ ID NO: 612268 - DNA, 75 bp, synthetic construct
  source 1..75: mol_type = other DNA
accgcgaagcgcggttaaaaggtgaagtgcgaaatgaagagggcgcacttatgtcgccggttaagccccgcacgg

SEQ ID NO: 612269 - DNA, 75 bp, synthetic construct
  source 1..75: mol_type = other DNA
gctaaccttcaggatctgttcagccattcgacgctgagcgacttctgcgcccatctacaggcggctacgtcagga

SEQ ID NO: 612270 - DNA, 75 bp, synthetic construct
  source 1..75: mol_type = other DNA
gccactaccgcgccggtgctgaaggccacgcggaacacgcgacagtcgtaccacttcacggacgtctccgcgcag

SEQ ID NO: 612271 - DNA, 75 bp, synthetic construct
  source 1..75: mol_type = other DNA
gccgaaaacgctctctgtcgcctggggcgcatggggagaaagcggtcgggcggccacgccggaaatgctggcgac

SEQ ID NO: 612272 - DNA, 75 bp, synthetic construct
  source 1..75: mol_type = other DNA
cgcagtctcactaccacagcgctggctcgccgtacggggtgacaccctttggcttccttcactgtcgcccaatac

SEQ ID NO: 612273 - DNA, 75 bp, synthetic construct
  source 1..75: mol_type = other DNA
atcgatctcgccgaaaacaccccgagggaaacgctgcatcaagggttgagtgcagtctcactatcacagcgctgg

SEQ ID NO: 612274 - DNA, 75 bp, synthetic construct
  source 1..75: mol_type = other DNA
ccgcctgtagcgaaatgctcatgccgtcactgcgcgaagcgatgtttaaccacgattcggcgcagctggacaata

SEQ ID NO: 612275 - DNA, 75 bp, synthetic construct
  source 1..75: mol_type = other DNA
tgcacattttgcacctgatcatctagaggatgcagtaacaaaaaaccctttacatggattaaaatggacctcacc

SEQ ID NO: 612276 - DNA, 75 bp, synthetic construct
  source 1..75: mol_type = other DNA
atcgagataaacgcctgacgggtgagatctacttcagcgagaaatggaaaaaaggagcaagcccagtcactatta

SEQ ID NO: 612277 - DNA, 75 bp, synthetic construct
  source 1..75: mol_type = other DNA
acccatgagcagattgttgaattgctggctgattgtaaacgtcaggacccgattctggcactggtagttaagata

SEQ ID NO: 612278 - DNA, 75 bp, synthetic construct
  source 1..75: mol_type = other DNA
cgtaaacaattcgccaccaaaggcgaagcactggccttcgagcgatacaccatgggggaaatagaagcaaaaccc

SEQ ID NO: 612279 - DNA, 75 bp, synthetic construct
  source 1..75: mol_type = other DNA
cgatgccttcgcagaacgcaacggctgcggttttacctttggcgacggttgccacggttcggacagcaaattcaa

SEQ ID NO: 612280 - DNA, 75 bp, synthetic construct
  source 1..75: mol_type = other DNA
tgcccatacaaaaaaatctacttcaactggaaaagcggcaagtcagaaaaatgtatcttctgttatccgcgaatt

SEQ ID NO: 612281 - DNA, 75 bp, synthetic construct
  source 1..75: mol_type = other DNA
actggcgcgagactttgacgcacagattttttcgcgctatcgcgaaaaaagaattgcgggtaaattcgcccgttc

SEQ ID NO: 612282 - DNA, 75 bp, synthetic construct
  source 1..75: mol_type = other DNA
gcattttatgatgaacggagggaatatactggtgctgcagaaaattctcggacatgccaatattcgagaaacaat

SEQ ID NO: 612283 - DNA, 75 bp, synthetic construct
  source 1..75: mol_type = other DNA
acgttttgcgtcatacttttggtgcgcattttatgatgaacggagggaatatactggtgctgcagaaaattctcg

SEQ ID NO: 612284 - DNA, 75 bp, synthetic construct
  source 1..75: mol_type = other DNA
ttacaaaaaatactgggtcatcacgatataaaaatgactatgcgatatgctcatctcgccccggaccatcttgag

SEQ ID NO: 612285 - DNA, 75 bp, synthetic construct
  source 1..75: mol_type = other DNA
tcaaaccctgctatcaagactttaagaagatgctcaagcttacgaacattgagctgacggaagggcagaagactc

SEQ ID NO: 612286 - DNA, 75 bp, synthetic construct
  source 1..75: mol_type = other DNA
gcaaatggctctgtgagctttatccaaatggccgggaggggcggcgtatacgtcgacagtttaacaccaaaggcg

SEQ ID NO: 612287 - DNA, 75 bp, synthetic construct
  source 1..75: mol_type = other DNA
caccttgaacaagctgtaaccctcaatccgttatcgctgtatgttggcgacaatgtggcggcagaggttgcataa

SEQ ID NO: 612288 - DNA, 75 bp, synthetic construct
  source 1..75: mol_type = other DNA
agaaattaggttatcagggttattaccatttaaaaattgcattagcaaaagaagtcattaatcctgacaatagct

SEQ ID NO: 612289 - DNA, 75 bp, synthetic construct
  source 1..75: mol_type = other DNA
cgggccgaacaggaagccgcacttcttcggggacagatagccgaagaaaaacgcctggtggaactgctgacgtct

SEQ ID NO: 612290 - DNA, 75 bp, synthetic construct
  source 1..75: mol_type = other DNA
atacccgctggtatgaagattctgtgcgtaaccgctggttcagcgtcatggcggggccctctgtgcgcgtgaatg

SEQ ID NO: 612291 - DNA, 75 bp, synthetic construct
  source 1..75: mol_type = other DNA
atagctttacgctaaatgtactatctgattcagaacaacctgacgatattgactacgacgaagatactgaaggcg

SEQ ID NO: 612292 - DNA, 75 bp, synthetic construct
  source 1..75: mol_type = other DNA
aaaccccggaacaactggaaaaaatgctggaaggacttggggatgtggatattgacagtcacgaacaggacggcg

SEQ ID NO: 612293 - DNA, 75 bp, synthetic construct
  source 1..75: mol_type = other DNA
cttctcggttgccgtatccatcgacgggaagctccagaatgaccccgcatggaaagacaaaccgctcactgaacg

SEQ ID NO: 612294 - DNA, 75 bp, synthetic construct
  source 1..75: mol_type = other DNA
gccgctggagcttccggcaggcgtgctgaccgccattatcggcgcaccgtggtttgtctggctgcttgtgagaat

SEQ ID NO: 612295 - DNA, 75 bp, synthetic construct
  source 1..75: mol_type = other DNA
agcctgacggattacctgatgctcctgcacccgcaggatgtaaacagtgccctgctgtggctgacgggtagctta

SEQ ID NO: 612296 - DNA, 75 bp, synthetic construct
  source 1..75: mol_type = other DNA
agttgtaaccttgatgcgaggaacaactgaagaagaagcgtggaatattgcccgttatcatacggcaggaggaag

SEQ ID NO: 612297 - DNA, 75 bp, synthetic construct
  source 1..75: mol_type = other DNA
gtggttgaaggcatggacgtagtcgacaaaattaaaggtgtcgcaaccggtcgtagcggtatgcaccaggacgta

SEQ ID NO: 612298 - DNA, 75 bp, synthetic construct
  source 1..75: mol_type = other DNA
gtgaaaacggggcgggaaaatcgacgctaatcaaagcattaaccggtgtataccacgccgatcgcggcactatct

SEQ ID NO: 612299 - DNA, 75 bp, synthetic construct
  source 1..75: mol_type = other DNA
gaaaccgccgaagtgatcttcggtatcaaacctgctgacagcggcacggcgttgatcaaaggcaaaccgcaaacg

SEQ ID NO: 612300 - DNA, 75 bp, synthetic construct
  source 1..75: mol_type = other DNA
gctcagagatcgccttgaattaatcagaacattgctaagcgaagatggctcactctggattactattgatgataa

SEQ ID NO: 612301 - DNA, 75 bp, synthetic construct
  source 1..75: mol_type = other DNA
agacttcgataacttcaacaacaacagcttccatgtcgtcaccgaactaacctgcgaaaacggcgatgaagagtt

SEQ ID NO: 612302 - DNA, 75 bp, synthetic construct
  source 1..75: mol_type = other DNA
gcgaagaaatcgaacacatcaaagacgttctgtttagcttcgataccgaaaacgcggaaatcttcactgaccaga

SEQ ID NO: 612303 - DNA, 75 bp, synthetic construct
  source 1..75: mol_type = other DNA
cggatgatcctgcaacaggcgctaaaagacgtagaagtcagaatgggcgatgtggatcgcaaatacatctacgcc

SEQ ID NO: 612304 - DNA, 75 bp, synthetic construct
  source 1..75: mol_type = other DNA
tcgggctggcgttgctctcagccgctacgcaggcagcagcgccgccggttaagttcttttaccgggatacagtcc

SEQ ID NO: 612305 - DNA, 75 bp, synthetic construct
  source 1..75: mol_type = other DNA
aacacatcatgcgttacccgcagctcttcgccaccaaagcaatcgagcgcaaactgaacgctggcgtgaaaaaag

SEQ ID NO: 612306 - DNA, 75 bp, synthetic construct
  source 1..75: mol_type = other DNA
gccgacgcccgcagcctgtacaacctgattcgcctccagggcaacactgagtttctccaggcgctggatttcaac

SEQ ID NO: 612307 - DNA, 75 bp, synthetic construct
  source 1..75: mol_type = other DNA
aattcaagcgcttcgccaatatcacccagttcatgctcttctccaacaacatggagtatgacgacagtgacccgg

SEQ ID NO: 612308 - DNA, 75 bp, synthetic construct
  source 1..75: mol_type = other DNA
taaaaatccccgtcatcctccacctaatacggctgggctaccactacctgtcccttaaagaacaacgctgggaca

SEQ ID NO: 612309 - DNA, 75 bp, synthetic construct
  source 1..75: mol_type = other DNA
aatgatgttcttaaacggtgaagagggttttatcgagaagaataaacaaaaggcgctgcactggttgaatctgag

SEQ ID NO: 612310 - DNA, 75 bp, synthetic construct
  source 1..75: mol_type = other DNA
ctgttcaaatcggcggaagagatccgcgaagaaatcgaacacatcaaagacgttctgtttaccttcgacacggaa

SEQ ID NO: 612311 - DNA, 75 bp, synthetic construct
  source 1..75: mol_type = other DNA
cttcgatacagagaacgcagaaatcttcacggaccagataaaccagattcaggatcgggaaaccgcgctggcgtt

SEQ ID NO: 612312 - DNA, 75 bp, synthetic construct
  source 1..75: mol_type = other DNA
ccgactaaccgcctttgcaccgcgctgttgagccgggatcggctggcatttattctgcgctatgcgctggtgtat

SEQ ID NO: 612313 - DNA, 75 bp, synthetic construct
  source 1..75: mol_type = other DNA
gtaatcttatcgtaagatccttatctgagagttattctttaaatgtagaaaactccaagatatcggtattgaatg

SEQ ID NO: 612314 - DNA, 75 bp, synthetic construct
  source 1..75: mol_type = other DNA
tttcgttatatagtcgtcaagatggaattacttatgcgggtgtaaattcagtactcaatgcaatagaaaatgatg

SEQ ID NO: 612315 - DNA, 75 bp, synthetic construct
  source 1..75: mol_type = other DNA
tgtctgcagccatctgtctggccgtatccgtcgcgcctgcatgggcgtctgagcagcaggccacgctgagcgcgg

SEQ ID NO: 612316 - DNA, 75 bp, synthetic construct
  source 1..75: mol_type = other DNA
cagccaggcttgccggcattagtcgccctaccatttacaagttgatgaaccgcggaaaacttaactttacgtctg

SEQ ID NO: 612317 - DNA, 75 bp, synthetic construct
  source 1..75: mol_type = other DNA
gggtaatggctggatccatgccacgccgatcagcaaagaggtgtttaaagagcatttcttcattctgagtaaaac

SEQ ID NO: 612318 - DNA, 75 bp, synthetic construct
  source 1..75: mol_type = other DNA
aaaggttacgacacaatccctcttgatatggcgctggagcgtgaaatcgttgagctggatgatgttgcgggtgaa

SEQ ID NO: 612319 - DNA, 75 bp, synthetic construct
  source 1..75: mol_type = other DNA
attgccgacattgaagcctgtcgccagttctggcgcgacggcgagcacgtcatcagcgacatcctcgactactca

SEQ ID NO: 612320 - DNA, 75 bp, synthetic construct
  source 1..75: mol_type = other DNA
gctactggagcataagcagggcactgctgatccgcagcatgtccgagcaaagtcctggtggcagttttggaaatt

SEQ ID NO: 612321 - DNA, 75 bp, synthetic construct
  source 1..75: mol_type = other DNA
gaaaccgctgaagttatcttcggaatcaaacccgccgacagcggtactgcgctgatcaaaggccaaccacaaacg

SEQ ID NO: 612322 - DNA, 75 bp, synthetic construct
  source 1..75: mol_type = other DNA
tactgggtatcggcttctgcccggaagacaggaaaaccgatggcatcatcgccgccgcctcggtgcgggaaaata

SEQ ID NO: 612323 - DNA, 75 bp, synthetic construct
  source 1..75: mol_type = other DNA
gctgatgctggctgtcgcgatgacagcaaccggcgtggccgtctgtggcccgataagttttattggtctcgtcgt

SEQ ID NO: 612324 - DNA, 75 bp, synthetic construct
  source 1..75: mol_type = other DNA
gtgaagatgagcttgttggcggtatgtacggtgtggcccagggaacgctattttgtggcgagtccatgttcagcc

SEQ ID NO: 612325 - DNA, 75 bp, synthetic construct
  source 1..75: mol_type = other DNA
ggcggaaaacgccgggctaaaagatgcggtgaatgcccgggatgaacatatcaactcacttcgtcaggccatgct

SEQ ID NO: 612326 - DNA, 75 bp, synthetic construct
  source 1..75: mol_type = other DNA
attgcattagcccaaaagataaaaacatatttgttccagggaaaaagacgctggcattaatggcgacattagcgg

SEQ ID NO: 612327 - DNA, 75 bp, synthetic construct
  source 1..75: mol_type = other DNA
ggagcagtattaattaccggtattaccccgcaggaagcacgggcgaaaggagaaaacgaagccgcgtttgccgcc

SEQ ID NO: 612328 - DNA, 75 bp, synthetic construct
  source 1..75: mol_type = other DNA
taatttctacgatccttacgcctggagctggcagcatgataactcgcgctgggatttgctggatgttatgcgtgc

SEQ ID NO: 612329 - DNA, 75 bp, synthetic construct
  source 1..75: mol_type = other DNA
attatcgggcacgcaacttcccggggacgctggattatgccgagcagcaacgctggctggagcaccgccgccagg

SEQ ID NO: 612330 - DNA, 75 bp, synthetic construct
  source 1..75: mol_type = other DNA
caattcagtcagtcgagctgtcgtgtaatttgtatttgctgcgtgagtttgctgcggatcggtacggactgaaat

SEQ ID NO: 612331 - DNA, 75 bp, synthetic construct
  source 1..75: mol_type = other DNA
atgacggtaagcaacaatctacctttttgttttcacgattacgaaacctttggcacgcaccccgcgttagatcgc

SEQ ID NO: 612332 - DNA, 75 bp, synthetic construct
  source 1..75: mol_type = other DNA
agctggcagcatgataactcgcgctgggatttactggatgttatgcgtgcctgttatgccctgcgcccggaagga

SEQ ID NO: 612333 - DNA, 75 bp, synthetic construct
  source 1..75: mol_type = other DNA
gaggttacgcattttttttgaaaccaaccttgctcgttatgctgcaaaaaaagcctctgaagaagatatcaacag

SEQ ID NO: 612334 - DNA, 75 bp, synthetic construct
  source 1..75: mol_type = other DNA
actccaggcaataatggaacatgatgccgataaagcagaattattgatggaaaatcatcttcaacaccgccttag

SEQ ID NO: 612335 - DNA, 75 bp, synthetic construct
  source 1..75: mol_type = other DNA
atacacatttacaacacattgaaatactccaggcaataatagaacatgatgccgataaagcagaatcattgatgg

SEQ ID NO: 612336 - DNA, 75 bp, synthetic construct
  source 1..75: mol_type = other DNA
gggattaactggcctgaaaatgaagatggtttgcccagtttccgtcttgaacatttgacgaaagccaatggcatt

SEQ ID NO: 612337 - DNA, 75 bp, synthetic construct
  source 1..75: mol_type = other DNA
catcctgaaaatcgcaatgccgtgattatggtggatttagcaggagatatttcgccattactggaactggatagc

SEQ ID NO: 612338 - DNA, 75 bp, synthetic construct
  source 1..75: mol_type = other DNA
tggcccaggcgaatacgctacgcccggaagatgccgaccgactgggaattaatcgtcagcattgcctcgataacc

SEQ ID NO: 612339 - DNA, 75 bp, synthetic construct
  source 1..75: mol_type = other DNA
tgcgccagttggttgccgaaggcaaatttcgtgaagacctgtacgcgcgaataaatctctggaccttcaccttgc

SEQ ID NO: 612340 - DNA, 75 bp, synthetic construct
  source 1..75: mol_type = other DNA
atgcgtaaaacagtggcttttggctttgtcggaacggtgctggattatgccgggcgcggcagtcagcgctggtca

SEQ ID NO: 612341 - DNA, 75 bp, synthetic construct
  source 1..75: mol_type = other DNA
cgtcgcgcagatttgctggtttctgctggcagaagcgcgttacctgcccgcccggctgatacaatcttcacctcc

SEQ ID NO: 612342 - DNA, 75 bp, synthetic construct
  source 1..75: mol_type = other DNA
tatatccaggggcgcaacgcgattgcaggcatcgtggtgatgaccagtaaagatccgaccttcgactgggaatcc

SEQ ID NO: 612343 - DNA, 75 bp, synthetic construct
  source 1..75: mol_type = other DNA
gcggtaattttcgcgaactttctgccagtgttacgcgtatggcgacgtttgccaatagcggacgcatcactctgg

SEQ ID NO: 612344 - DNA, 75 bp, synthetic construct
  source 1..75: mol_type = other DNA
caccggcgcgagagacgcgcgggaagggttattacgcagcgccaacagcggcatgttgtttcttgatgaaattgg

SEQ ID NO: 612345 - DNA, 75 bp, synthetic construct
  source 1..75: mol_type = other DNA
ccataatctggaaaaagaagcaccagacggcgtcgctaccgaaatgctcgatgaaggtctggttcgtgaagatct

SEQ ID NO: 612346 - DNA, 75 bp, synthetic construct
  source 1..75: mol_type = other DNA
gatggcgtcgccaccgaaatgctcgatgagggtttggttcgtgaagatctcaccgcgctggactttgtcaccatc

SEQ ID NO: 612347 - DNA, 75 bp, synthetic construct
  source 1..75: mol_type = other DNA
ggatatggctgccacgctggcagtgcttttcacaggtgatgggcgggatgctgcggagatcctgcgtacactgcc

SEQ ID NO: 612348 - DNA, 75 bp, synthetic construct
  source 1..75: mol_type = other DNA
aaaacgcatgagcaacaaatggtgagcaatggcatgaaaaaatgcccttactgtgcggagttgatcaaagaagaa

SEQ ID NO: 612349 - DNA, 75 bp, synthetic construct
  source 1..75: mol_type = other DNA
tggactgaaccgggaaacggtaatcagaaaattgttcgcgtgtcttatacatggaagttggcggatgttccttca

SEQ ID NO: 612350 - DNA, 75 bp, synthetic construct
  source 1..75: mol_type = other DNA
atacatggaagttggcggatgttcctgcatgggtggacaaaaaagcgttctccagcgtcaagggtatgaatgaac

SEQ ID NO: 612351 - DNA, 75 bp, synthetic construct
  source 1..75: mol_type = other DNA
gcgagcgggatgaacgaaccttatttagtggcttgtcatttacgctgaacgcaggagagtgggtacaaatcaccg

SEQ ID NO: 612352 - DNA, 75 bp, synthetic construct
  source 1..75: mol_type = other DNA
caaaataccctacaagtcattatcggtactaaagtcatcgccctgcgtcgggatatggataactatatggggata

SEQ ID NO: 612353 - DNA, 75 bp, synthetic construct
  source 1..75: mol_type = other DNA
atatgggcgtgaagatgggctttactggcgatctgattcaatttattagctttggtgtcttacgtggcacaagaa

SEQ ID NO: 612354 - DNA, 75 bp, synthetic construct
  source 1..75: mol_type = other DNA
ccagccgcgcgcgctggccgacagccactatccccgctggcaccatgcgccggtgaccgggctgatgaacgatcc

SEQ ID NO: 612355 - DNA, 75 bp, synthetic construct
  source 1..75: mol_type = other DNA
tcgattatatgcagggttatcttattggtaagccgcaaccgttaattgatacgctgaatgaaatcgaacccattc

SEQ ID NO: 612356 - DNA, 75 bp, synthetic construct
  source 1..75: mol_type = other DNA
tgataaatcagagttgcaggcagcggagcaaatggttaaggctctgggtggtaaagaaaatattaaatcactgga

SEQ ID NO: 612357 - DNA, 75 bp, synthetic construct
  source 1..75: mol_type = other DNA
acagaagggctatcaaagcattgctgatttccggtgtgctcacggtaattattggcggcgtcagcgagccgattg

SEQ ID NO: 612358 - DNA, 75 bp, synthetic construct
  source 1..75: mol_type = other DNA
ttgccctgaatgtgacgagccgctgcactatatccgtgatgcggtgagtgaaaagctggagtatattcccgctca

SEQ ID NO: 612359 - DNA, 75 bp, synthetic construct
  source 1..75: mol_type = other DNA
aaactgcgtgctatggcacttaccatggtacaaaaagtcatgtcggagaatgccgaaaaagagcgggaattactg

SEQ ID NO: 612360 - DNA, 75 bp, synthetic construct
  source 1..75: mol_type = other DNA
tcagtggagaaaggacgggaccgtcagttgtgtgcttcaactgccggaccggacgtagccatgagtatcctgaaa

SEQ ID NO: 612361 - DNA, 75 bp, synthetic construct
  source 1..75: mol_type = other DNA
tgttatttctctaggtccttcattggcctgcatattcataaaatgccgtcgaccaggctcatatcccagtcgttt

SEQ ID NO: 612362 - DNA, 75 bp, synthetic construct
  source 1..75: mol_type = other DNA
tcaaacaaagacacctatcagggactcattcatgcaaatgctttccaaccaaaggcaacttacacttccccattc

SEQ ID NO: 612363 - DNA, 75 bp, synthetic construct
  source 1..75: mol_type = other DNA
ggcacatatcctcccgaaaagtgccgttgagccatcagtcatcgcacaggtgatcatcaataaatacggtgacca

SEQ ID NO: 612364 - DNA, 75 bp, synthetic construct
  source 1..75: mol_type = other DNA
taattgatattgatcgtgaagcgaaaacaatcactattgcagaactgcgcgacgaaaaaggtgaattgctggttc

SEQ ID NO: 612365 - DNA, 75 bp, synthetic construct
  source 1..75: mol_type = other DNA
atgaagatcctggtaatctcggtcgaactgcaatgcgttacgtgatagacgagtcgaatgccaaacacaatctac

SEQ ID NO: 612366 - DNA, 75 bp, synthetic construct
  source 1..75: mol_type = other DNA
cattaaatacgtgattggtcacctctgttcttcatcaacgcagcctgcgtctgatatctacgaagacgaaggcat

SEQ ID NO: 612367 - DNA, 75 bp, synthetic construct
  source 1..75: mol_type = other DNA
tcgatgaaaaaaccaaccgcctgaaaggttccgaaaagtcatataccttccatggtcgcgatgtatatgcctaca

SEQ ID NO: 612368 - DNA, 75 bp, synthetic construct
  source 1..75: mol_type = other DNA
ttcttgcctgagggcgacgcaatcagcgccagccgtcagaaactggaaagccagatttctacgctttacggtggt

SEQ ID NO: 612369 - DNA, 75 bp, synthetic construct
  source 1..75: mol_type = other DNA
ggtgaacgaagctgcactattcgccgcgcgtggcaataaacgtgtcgtttcgatggttgaattcgagaaagcgaa

SEQ ID NO: 612370 - DNA, 75 bp, synthetic construct
  source 1..75: mol_type = other DNA
gggcggtggtcacgatgaacgtgaacagactctgaaccagatgctggttgagatggatggcttcgaaggtaacga

SEQ ID NO: 612371 - DNA, 75 bp, synthetic construct
  source 1..75: mol_type = other DNA
atgaataataacaatactccaagatccccaactctggtggaatcattattaccaatactagcgatgatactattg

SEQ ID NO: 612372 - DNA, 75 bp, synthetic construct
  source 1..75: mol_type = other DNA
gaaaacttgccgcaggcggggcaatcgcggcagttaatctgcgtaccaattattggcggaccgtccggtaaactc

SEQ ID NO: 612373 - DNA, 75 bp, synthetic construct
  source 1..75: mol_type = other DNA
tacggttgaatacgactacgtgtggtttgtcccttctggcgctgtaaaagacgacctgcgtcatgccacgctggt

SEQ ID NO: 612374 - DNA, 75 bp, synthetic construct
  source 1..75: mol_type = other DNA
tatctgcacgctggatgaccgttccgggcggctggaagtgatgttgtttactgacgccctggataaataccagca

SEQ ID NO: 612375 - DNA, 75 bp, synthetic construct
  source 1..75: mol_type = other DNA
cgaaacaccaacatgggcacgattaatggcctgggcggggattgtgctcgcatcaattatctggcgagtctttct

SEQ ID NO: 612376 - DNA, 75 bp, synthetic construct
  source 1..75: mol_type = other DNA
aattctgccctggactgccgcgggtgcctacatggcaggtacacttggcgttgctacattaagctatcttccgtg

SEQ ID NO: 612377 - DNA, 75 bp, synthetic construct
  source 1..75: mol_type = other DNA
cgcctggtgccggaacatgatccggtgcacaaagtgacgattatcccacgcggtcgtgcgctgggtgtgactttc

SEQ ID NO: 612378 - DNA, 75 bp, synthetic construct
  source 1..75: mol_type = other DNA
atcaaagcgccagacttcctgaaagatatcggtggtcttgaaaccaaccgtatcaaccagctggtggtggaaccg

SEQ ID NO: 612379 - DNA, 75 bp, synthetic construct
  source 1..75: mol_type = other DNA
tcaaagagaactgcattttcctcgataacccgcaccaggcgcgtcgcttccaccaggagatgctgaatctgttcc

SEQ ID NO: 612380 - DNA, 75 bp, synthetic construct
  source 1..75: mol_type = other DNA
cgtactgacgcaaacgatggtgaccagtgccgatgaaggcggtttgcacactaaagatggcgaatatattcaggc

SEQ ID NO: 612381 - DNA, 75 bp, synthetic construct
  source 1..75: mol_type = other DNA
agtctgatgggtaacctgacgcgtggttcaatgatgattgaagggcgtattgcgcgctttgtgtacatctcgctg

SEQ ID NO: 612382 - DNA, 75 bp, synthetic construct
  source 1..75: mol_type = other DNA
cgcaccagatggctacctgcgcaatgaacaatattctggcgcagatgagcggtaaaccgctgaaaaattatcagt

SEQ ID NO: 612383 - DNA, 75 bp, synthetic construct
  source 1..75: mol_type = other DNA
gaacaacattctggcgcagatgaacggtaagccgctgaaaaattatcagtataaagatcacggttcgctggtatc

SEQ ID NO: 612384 - DNA, 75 bp, synthetic construct
  source 1..75: mol_type = other DNA
gaatgttgtttcttgatgagattggcgaactgggcgcagacgaacaggcaatgctgctgaaagccattgaagaga

SEQ ID NO: 612385 - DNA, 75 bp, synthetic construct
  source 1..75: mol_type = other DNA
gcaggtgaagtgacgattatcgatctcgatttaagccgttataacgccatcgccagccgctttgccgaggaacgc

SEQ ID NO: 612386 - DNA, 75 bp, synthetic construct
  source 1..75: mol_type = other DNA
ctgacctggcgaacctggtgaacgaagcggcactgttcgctgctcgtggcaacaaacgcgttgtgtcgatggttg

SEQ ID NO: 612387 - DNA, 75 bp, synthetic construct
  source 1..75: mol_type = other DNA
tccgcgcttacgcaactgctgggcgcagaggcagaaaacatcgatctcttcgaccgtatgcaactggaacacgtt

SEQ ID NO: 612388 - DNA, 75 bp, synthetic construct
  source 1..75: mol_type = other DNA
atgacgcccgctcgcgctcgctatttgaaacgcttaaacgcgatatcgccagaaaccgaagtggtgagcgttgag

SEQ ID NO: 612389 - DNA, 75 bp, synthetic construct
  source 1..75: mol_type = other DNA
gcattactctggacgtggttgaagatgagataaaccgtctgcgctataactggcaggagagccgcccctccgcgc

SEQ ID NO: 612390 - DNA, 75 bp, synthetic construct
  source 1..75: mol_type = other DNA
gccaacgccgtcgggccgaataaacgtccgctgtcgtcaatgtcaccaaccattgtggtgaaagacggtaaaacc

SEQ ID NO: 612391 - DNA, 75 bp, synthetic construct
  source 1..75: mol_type = other DNA
atcgtgcagatcctcaatattctggaaaacttcgatatgaagaaatacggctttggcagtgccgatgcgatgcaa

SEQ ID NO: 612392 - DNA, 75 bp, synthetic construct
  source 1..75: mol_type = other DNA
gcagccagcgtttaaactggcacgcgatggttttatcgttaacgacgcgctggctgacgatctcaaaacctacgg

SEQ ID NO: 612393 - DNA, 75 bp, synthetic construct
  source 1..75: mol_type = other DNA
ggtaacgcggtggcggtgacctatacgctgaacaccaccttcggtacgggcattgtcgcgggcgagagcggtatt

SEQ ID NO: 612394 - DNA, 75 bp, synthetic construct
  source 1..75: mol_type = other DNA
atgataaaaccgacgtttttacgccgggtggccattgctgctctgttcacaggaagttgttttagcgccgccgcc

SEQ ID NO: 612395 - DNA, 75 bp, synthetic construct
  source 1..75: mol_type = other DNA
cgcggtcgggccgaataaacgcccgctgtcgtcgatgtcaccaaccattgtggtgaaagacggtaaaacctggtt

SEQ ID NO: 612396 - DNA, 75 bp, synthetic construct
  source 1..75: mol_type = other DNA
gcctgagcgtcgcccaggtcgaagagatgtatcgttacctcgccattgccaactatgaagaccgttttgtcatcc

SEQ ID NO: 612397 - DNA, 75 bp, synthetic construct
  source 1..75: mol_type = other DNA
ggggagtttgcctggtttaggatggattcctggtacggttcgagcattcagcagtaatatctcttcaagaagcct

SEQ ID NO: 612398 - DNA, 75 bp, synthetic construct
  source 1..75: mol_type = other DNA
attttcccgaaaggatatcgacgcatggatagaacaacagaaacatacaacaaaagatttcggtgagggtaatac

SEQ ID NO: 612399 - DNA, 75 bp, synthetic construct
  source 1..75: mol_type = other DNA
ccattactctgtagtggataaagacggtaacgcggtggcggtgacctatacgctgaacaccacctgtcgcgggcg

SEQ ID NO: 612400 - DNA, 75 bp, synthetic construct
  source 1..75: mol_type = other DNA
aacatttgcatagcgcaccagaaggcaaacatatccctactgctcgcccgcgttcgctgattgacggtaagcgga

SEQ ID NO: 612401 - DNA, 75 bp, synthetic construct
  source 1..75: mol_type = other DNA
cgatgccttcgcagaacgcaatggctgcggttttacctttggcgacggttgccacggctcggacagcaaattcaa

SEQ ID NO: 612402 - DNA, 75 bp, synthetic construct
  source 1..75: mol_type = other DNA
tggcggtaacgcatccgcaggcggggaatctgggcggcggcggttttatgctgatccgcactaaagatggcaata

SEQ ID NO: 612403 - DNA, 75 bp, synthetic construct
  source 1..75: mol_type = other DNA
tggtacgacaactatctcaatatggggaaaaccgaccgcagcgccaacccttcgccgggtaacaaaaaaggcggt

SEQ ID NO: 612404 - DNA, 75 bp, synthetic construct
  source 1..75: mol_type = other DNA
tgcaggttgccgagcgccacctgcacaagttgaatcaacgccagcgagaaacctgtccggcttcagaactggtgg

SEQ ID NO: 612405 - DNA, 75 bp, synthetic construct
  source 1..75: mol_type = other DNA
ctggaaggatacacctttgagggctatcgcaatgccgatggcagcgtgggcaccaaaaacctgctcggcatcacc

SEQ ID NO: 612406 - DNA, 75 bp, synthetic construct
  source 1..75: mol_type = other DNA
cagccaatgcgtctgtttgacttcgttttcggcccgctggttcttccgctacaggatctcgacgcccgcgaaggt

SEQ ID NO: 612407 - DNA, 75 bp, synthetic construct
  source 1..75: mol_type = other DNA
gccgcgcctcttcctgcgccgcaaacgcattatcaatggcgctggacgccccttaacgtcgccagcattgaccat

SEQ ID NO: 612408 - DNA, 75 bp, synthetic construct
  source 1..75: mol_type = other DNA
gctaaccttcaggatctgttcaaccattcgacgctgagcgacttctgcacccatctacaggcggctacgtcagga

SEQ ID NO: 612409 - DNA, 75 bp, synthetic construct
  source 1..75: mol_type = other DNA
atggcgtaaagagatggaaaagcgcgccaccgaactgatggcatcctacggtttttccctcgacgtgcgtgaacc

SEQ ID NO: 612410 - DNA, 75 bp, synthetic construct
  source 1..75: mol_type = other DNA
tctcggaaatcccctcgccaccgatctaacatccaaaatgttcgcgcactatcgcgataagcgcctgacgggtga

SEQ ID NO: 612411 - DNA, 75 bp, synthetic construct
  source 1..75: mol_type = other DNA
cgcacaccgataagcggcgattatcgcgggtatcaggtttactccatgccaccgccatcttccggcgggattcat

SEQ ID NO: 612412 - DNA, 75 bp, synthetic construct
  source 1..75: mol_type = other DNA
cagtagaaagcgccagcattgtcagtttgcaggatgaaaagcatgtcggttttcagtccatggtcgaggatattt

SEQ ID NO: 612413 - DNA, 75 bp, synthetic construct
  source 1..75: mol_type = other DNA
ttggagacgagtttcaagatggttctggtcctcgtctttctgagttggttgctcgttggtttgagatgtacggta

SEQ ID NO: 612414 - DNA, 75 bp, synthetic construct
  source 1..75: mol_type = other DNA
gccgagatcatccgcctgattgaaacgctatgcgccgatggtctggcgctgctggtgatctcctccgaactggaa

SEQ ID NO: 612415 - DNA, 75 bp, synthetic construct
  source 1..75: mol_type = other DNA
ctgccacggttcagataccaaattcaatctgttcaacagccgccgtatcgatgccatcgacgtaaccagcaaaac

SEQ ID NO: 612416 - DNA, 75 bp, synthetic construct
  source 1..75: mol_type = other DNA
tactcttctcagcaggattcttcgcagcccactcagttgccagcagctggatcggcccccgcgcaaaacgcgcta

SEQ ID NO: 612417 - DNA, 75 bp, synthetic construct
  source 1..75: mol_type = other DNA
gggcgtttaatcagcggcgtcttcaccgacttcttcaactggcgaatcgcgctggcggcaatcggctgtttcgcg

SEQ ID NO: 612418 - DNA, 75 bp, synthetic construct
  source 1..75: mol_type = other DNA
cacgccattttagcccgacttcgctgcgacctaaaacgttgtttatcaactttcgtctgcactggcgtgaccggg

SEQ ID NO: 612419 - DNA, 75 bp, synthetic construct
  source 1..75: mol_type = other DNA
atgatgaaatatctgtacgtaaacaacctggcatatccttacgaacttcagtctctttatgttgaaaaaggtgaa

SEQ ID NO: 612420 - DNA, 75 bp, synthetic construct
  source 1..75: mol_type = other DNA
catcaatacccatcagtggcctggcaaagctgctattggtcgtctgaaaggcgaggaactggcgcaatataattc

SEQ ID NO: 612421 - DNA, 75 bp, synthetic construct
  source 1..75: mol_type = other DNA
cgtcggtgcatttattgccctgatgctggtggtcgctattctggtcggaacacgtttacatcatcgcctgcacgc

SEQ ID NO: 612422 - DNA, 75 bp, synthetic construct
  source 1..75: mol_type = other DNA
atttcattgttagtcttggtttgtttgcctttgttaatttacctgtattgtttgcgatagcgattcccttaggat

SEQ ID NO: 612423 - DNA, 75 bp, synthetic construct
  source 1..75: mol_type = other DNA
tatgccagctatgcgcggcttaaaaatgtgaatgccgatttgccacctggcgcgaatgaagaaaatgcgggtagt

SEQ ID NO: 612424 - DNA, 75 bp, synthetic construct
  source 1..75: mol_type = other DNA
atgcaaccgcagattggcgtcagttactgctatgtgcgctcgccagtgaatcatatctacctgctgctgggagag

SEQ ID NO: 612425 - DNA, 75 bp, synthetic construct
  source 1..75: mol_type = other DNA
attattcgtcgaaggttttttgctgatggggtcgttcgtcactctgtttaattacattggttatcggttgatgct

SEQ ID NO: 612426 - DNA, 75 bp, synthetic construct
  source 1..75: mol_type = other DNA
agacattctaaggaaagtagcaaaactgatctatcaggatcctgaactgcaagactcagagattggcgtaaaaag

SEQ ID NO: 612427 - DNA, 75 bp, synthetic construct
  source 1..75: mol_type = other DNA
agtttctgttcttatttgtcagtccactgctgtttgtcttccatgcctttatgaatggattcgctaacatggttc

SEQ ID NO: 612428 - DNA, 75 bp, synthetic construct
  source 1..75: mol_type = other DNA
catgaacagtaagcaatggcccggtaaagccgctattggtcgtctgaaaggtgaagaactggcgcaatataattt

SEQ ID NO: 612429 - DNA, 75 bp, synthetic construct
  source 1..75: mol_type = other DNA
tgccgatgcttggcgggccaatctccacagcgggtaacgtactgtttatcgccgctacggcagataactacctgc

SEQ ID NO: 612430 - DNA, 75 bp, synthetic construct
  source 1..75: mol_type = other DNA
cgtctcttatcatgaagccaaagcagaaacggcctcgccagaagtgatggcggattgcccgcgtcgtatcattct

SEQ ID NO: 612431 - DNA, 75 bp, synthetic construct
  source 1..75: mol_type = other DNA
tgccgatgctgggcgggccaatctccacggcgggtaacgtgctgtttatcgccgctacggcagacaactacctgc

SEQ ID NO: 612432 - DNA, 75 bp, synthetic construct
  source 1..75: mol_type = other DNA
tcctgacctgggccggatttaacgatccgcaggaaatcagcggcaccttaagcgccgataccacgccagcagaag

SEQ ID NO: 612433 - DNA, 75 bp, synthetic construct
  source 1..75: mol_type = other DNA
agcgcctgtttgcgctcgatgccgccagcggcaaagagaaatggcattacgatcctgagctgaaaaccaacgagt

SEQ ID NO: 612434 - DNA, 75 bp, synthetic construct
  source 1..75: mol_type = other DNA
tctggcgtcgcctggtcattcctgccagcggcgcagttgccgctctggtggtcgcactgctgattagtggcggaa

SEQ ID NO: 612435 - DNA, 75 bp, synthetic construct
  source 1..75: mol_type = other DNA
gtattttctcagtaacgttaaatgctgaaacaccaacttgggcacgtttaatggcctgggcgggaattgtgttcg

SEQ ID NO: 612436 - DNA, 75 bp, synthetic construct
  source 1..75: mol_type = other DNA
atcgcacactgccgatggtctggtacgtgccgcctctgtctccgattcagtctgcagcagacgcgggtgagctgg

SEQ ID NO: 612437 - DNA, 75 bp, synthetic construct
  source 1..75: mol_type = other DNA
catgaacagtaagcaatggcccggtaaagccgctattggtcgtctgaaaggggatgaactggcgcaatataattt

SEQ ID NO: 612438 - DNA, 75 bp, synthetic construct
  source 1..75: mol_type = other DNA
aagatccgaacgcaatcccgtctgacgaacacacctttacctttaactcgccaaactcgtgggcacctgcggcct

SEQ ID NO: 612439 - DNA, 75 bp, synthetic construct
  source 1..75: mol_type = other DNA
gccgcagtacggtgtaccgtatggtgtcacgctcaacccgttcctctcaccgtttggtctgccatgtaaacagcc

SEQ ID NO: 612440 - DNA, 75 bp, synthetic construct
  source 1..75: mol_type = other DNA
gatgcgttctattccgggttagggttgtttggcatggcgacactcattacccaatgtgaagagattttctcgctc

SEQ ID NO: 612441 - DNA, 75 bp, synthetic construct
  source 1..75: mol_type = other DNA
cgcggccccgttacgttgcgaattgccgaagtgattaatctggtgacagcgaaaaatattacggctgatttgcaa

SEQ ID NO: 612442 - DNA, 75 bp, synthetic construct
  source 1..75: mol_type = other DNA
cgctctggtcagcgggcgactgagtgtgctgacccaggggcaagcgggtaaaggcaacgcggtgcttaattttgg

SEQ ID NO: 612443 - DNA, 75 bp, synthetic construct
  source 1..75: mol_type = other DNA
ggtgcttaattttggcccaggaaaattaagcatggataacagtcagctgcctctgcagctgaccggtgaagcgaa

SEQ ID NO: 612444 - DNA, 75 bp, synthetic construct
  source 1..75: mol_type = other DNA
ggcaattgcttgtgatgacacgggataacggcgatccattgctcgatttgccgtggcaaattacccgtcagcaat

SEQ ID NO: 612445 - DNA, 75 bp, synthetic construct
  source 1..75: mol_type = other DNA
ttgccatgtccggggaattcagtggggccttgccactatggctgaacaatgaaaaatggatagtgaaagatggtt

SEQ ID NO: 612446 - DNA, 75 bp, synthetic construct
  source 1..75: mol_type = other DNA
gctggcctttggctggcgttaaagtgacgcaacgtggtgtcgatggtcgtttgcaggctattttgcaagctcatg

SEQ ID NO: 612447 - DNA, 75 bp, synthetic construct
  source 1..75: mol_type = other DNA
gatctttttgcccgcagggttatcggctggagtctgtcagcgcatgccgataccgcactgataagcagtgccctg

SEQ ID NO: 612448 - DNA, 75 bp, synthetic construct
  source 1..75: mol_type = other DNA
gcaaattaatgattacatattgaactactacaacagcgtcagacctcaccattataacggtgggctgacgccgga

SEQ ID NO: 612449 - DNA, 75 bp, synthetic construct
  source 1..75: mol_type = other DNA
tcgggtggtggcagccaggatattattgctgaccatcaggggcatcaggccattattgagcaaagaacgcaggac

SEQ ID NO: 612450 - DNA, 75 bp, synthetic construct
  source 1..75: mol_type = other DNA
gcgggatctcaagattgtgggatagcggcggctttatgcccaacggcttcggtgcggtattaagcgcgatgttga

SEQ ID NO: 612451 - DNA, 75 bp, synthetic construct
  source 1..75: mol_type = other DNA
cggcggctttatgcccaacggcttcggcgcagtattaagcgcgatgttgatcaccatgttctcgtttatgggcgc

SEQ ID NO: 612452 - DNA, 75 bp, synthetic construct
  source 1..75: mol_type = other DNA
acctcggaatgccggaatcagaatccggtgccttaccgcttggcgataccccaactgggtgcacttacaaggtaa

SEQ ID NO: 612453 - DNA, 75 bp, synthetic construct
  source 1..75: mol_type = other DNA
agtgggcgattgggtgttaaagtcgataactggcagaccgggcttgagaacgcgttggtcagtggacgcctgagt

SEQ ID NO: 612454 - DNA, 75 bp, synthetic construct
  source 1..75: mol_type = other DNA
ggcactcacggcaccacttatggtggtaatccgctggcctcggcggtggcgggtaaagtgcttgatctcatcaac

SEQ ID NO: 612455 - DNA, 75 bp, synthetic construct
  source 1..75: mol_type = other DNA
gcttaggtttgttgattggctgtgtgctgaatgccgattacgccgggcaagcgaaacagatctctcaggaagcgg

SEQ ID NO: 612456 - DNA, 75 bp, synthetic construct
  source 1..75: mol_type = other DNA
gaagaagaggtgacgaccggactggatcgctttgctgcggcctgtgaacgctttgtgagcggaggttcatcatga

SEQ ID NO: 612457 - DNA, 75 bp, synthetic construct
  source 1..75: mol_type = other DNA
agccataagagcggcatcgtggcgtttaacaatgcgttccacgggcgcacgctgtttaccgttagcgcaggcggc

SEQ ID NO: 612458 - DNA, 75 bp, synthetic construct
  source 1..75: mol_type = other DNA
gctccggcgctgaatgtcagcgaagaagaagtgacgacggggctggatcgctttgcagcagcctgcgaacgtttt

SEQ ID NO: 612459 - DNA, 75 bp, synthetic construct
  source 1..75: mol_type = other DNA
ggcaagtaagttctggcataccggtaatggctataccaacgaaccggcattacggctggcgaaaaaacttatcga

SEQ ID NO: 612460 - DNA, 75 bp, synthetic construct
  source 1..75: mol_type = other DNA
cccaggaagtggtcgcccaggagcagaaagagctgcgtatccgtcaaattcaggaagcgttgcagtatgcgaatc

SEQ ID NO: 612461 - DNA, 75 bp, synthetic construct
  source 1..75: mol_type = other DNA
tgttgtggttgccggtcgtccaggcatggggaaaacggaatttaccctgaagattatcgatggcgttaccgcaga

SEQ ID NO: 612462 - DNA, 75 bp, synthetic construct
  source 1..75: mol_type = other DNA
gatttggatgcaattaacgagctttccgaactcgtctgcgccgcagaatgcggagagcgcattgagccatataaa

SEQ ID NO: 612463 - DNA, 75 bp, synthetic construct
  source 1..75: mol_type = other DNA
gtacgtggcgaaggttcgcgcttgtgggatcagcaggggaaagagtatatcgacttcgcgggtggcattgcggtg

SEQ ID NO: 612464 - DNA, 75 bp, synthetic construct
  source 1..75: mol_type = other DNA
gcagtgctgctgggcggtatggtgggttcggggattgtgttggggcgtaacgctctgcgtaattacaacgcgaag

SEQ ID NO: 612465 - DNA, 75 bp, synthetic construct
  source 1..75: mol_type = other DNA
ttgctgaccatcagggacatcaggccattattgaacaaagaacgcagaatagtaatatccgtaatgatgtgaaac

SEQ ID NO: 612466 - DNA, 75 bp, synthetic construct
  source 1..75: mol_type = other DNA
aatataatgaagaaaagctggctcaggaaagaatacctggtgctgatagtccgaaagagcttttagagaaagcaa

SEQ ID NO: 612467 - DNA, 75 bp, synthetic construct
  source 1..75: mol_type = other DNA
tgccgggtatatctctgtcatgatacctccgttgtcatgggtgatgataaaaggccttggggcaggattttccag

SEQ ID NO: 612468 - DNA, 75 bp, synthetic construct
  source 1..75: mol_type = other DNA
caaaatcaccataaaacagagacattatctcagaataataaatataatgaagaaaagctggttcaggaaagaata

SEQ ID NO: 612469 - DNA, 75 bp, synthetic construct
  source 1..75: mol_type = other DNA
catgatacccccgttgtcatggatgatggtaaaaggccttggcgcaggtttttccagcgtgtacagccatttcgc

SEQ ID NO: 612470 - DNA, 75 bp, synthetic construct
  source 1..75: mol_type = other DNA
atgaagagcgagaaagtcaaaagataatacctgagccatcaggagaggctgtgaaagaaatgattgatggtaaaa

SEQ ID NO: 612471 - DNA, 75 bp, synthetic construct
  source 1..75: mol_type = other DNA
accggtcggtatcaatgcaacgcgtcagattgcggcggcacaacaggaaatggcccgggaggcgtcgaacagagc

SEQ ID NO: 612472 - DNA, 75 bp, synthetic construct
  source 1..75: mol_type = other DNA
ggatggttacgtaggcaaggacgaggcccggcaacaaattagcggttatatcctgaattattacaatagcgtcag

SEQ ID NO: 612473 - DNA, 75 bp, synthetic construct
  source 1..75: mol_type = other DNA
cgcgtggccaaccccgggatgtcgtgttccatagcggccagggaagccagtatacaggccttaaatatcaacaac

SEQ ID NO: 612474 - DNA, 75 bp, synthetic construct
  source 1..75: mol_type = other DNA
tgagccgttatcgtgccgggcggctgatgaaatacctgaacctgagcagttgtcagcccggaaaacatcaataca

SEQ ID NO: 612475 - DNA, 75 bp, synthetic construct
  source 1..75: mol_type = other DNA
cagatacagctgaaatactccgacctggcgtccactgccggatatatatctgtcatgatacccccgttgtcatgg

SEQ ID NO: 612476 - DNA, 75 bp, synthetic construct
  source 1..75: mol_type = other DNA
acagcttctctggcgttacaggataaagcaaagtgtcagccgacggggaaactgctgggataacagtcctatgga

SEQ ID NO: 612477 - DNA, 75 bp, synthetic construct
  source 1..75: mol_type = other DNA
tctttgaggtgccgaaaaacgaaactaaagaaaacggtattcgtctttctgaacgtaaagagacactgggcgatg

SEQ ID NO: 612478 - DNA, 75 bp, synthetic construct
  source 1..75: mol_type = other DNA
caagagaactggcatcaagaagcacgagaggttctgccgggatgtatggggatgttcatgctggatggcagtttg

SEQ ID NO: 612479 - DNA, 75 bp, synthetic construct
  source 1..75: mol_type = other DNA
cctgtaaagatgcgtcggtcacgctgaaagacaggctgaatctcgatacaaagacgggaggcaagacctggcatt

SEQ ID NO: 612480 - DNA, 75 bp, synthetic construct
  source 1..75: mol_type = other DNA
agaccgcacgaatataacggtgggttacccccaaacgaatcggaaaatcgatactggaaaaactctaactcggtg

SEQ ID NO: 612481 - DNA, 75 bp, synthetic construct
  source 1..75: mol_type = other DNA
cgcgtggccaaccccgggatgtcgtgttccatagcgaccaggaaagccagtatacaggccttaaatatcaacaac

SEQ ID NO: 612482 - DNA, 75 bp, synthetic construct
  source 1..75: mol_type = other DNA
atatccgtaatgatgtaaaacatcaggttgataatatggtcacagaatatcggggcaatatcggagatactcaga

SEQ ID NO: 612483 - DNA, 75 bp, synthetic construct
  source 1..75: mol_type = other DNA
gcagtatggtgatggacgccagtggggcaatgtcccgtttgccggttggtattaatgcaacgcgtcagattgcag

SEQ ID NO: 612484 - DNA, 75 bp, synthetic construct
  source 1..75: mol_type = other DNA
cagcctgctggttaatgtccgcacatcggtgcagattattgataacagtgacctggtcaaagttcaccgggtgga

SEQ ID NO: 612485 - DNA, 75 bp, synthetic construct
  source 1..75: mol_type = other DNA
ataagcagtgccctgcggatggcctatgagacgcgtggccaaccccgggatgtcgtgttccatagcgaccaggga

SEQ ID NO: 612486 - DNA, 75 bp, synthetic construct
  source 1..75: mol_type = other DNA
ccatgatggccagccgtatgcgcagtgcggtggaaagctatgcgaaggcgcataatatcagtaatgaacaggcga

SEQ ID NO: 612487 - DNA, 75 bp, synthetic construct
  source 1..75: mol_type = other DNA
aaccgaattttatgggggttggcggtggtattggtgtgaaggctggagttaaagggagtattgatggtagtgatc

SEQ ID NO: 612488 - DNA, 75 bp, synthetic construct
  source 1..75: mol_type = other DNA
cgatactgccctgataagcagtgccttgcggatggcgtatgaggtgcgtggtcagccgcgggacgtcatgttcca

SEQ ID NO: 612489 - DNA, 75 bp, synthetic construct
  source 1..75: mol_type = other DNA
ggaaccaaagtaggggctctgcgggggcgcgcacgctggctgaaatgctgacccaaaacggcgtcccgatgagcc

SEQ ID NO: 612490 - DNA, 75 bp, synthetic construct
  source 1..75: mol_type = other DNA
actgctgggataacagccccatggaacgcttcttccgcagtctgaaaacagaatgggtgccaacgaatggttacg

SEQ ID NO: 612491 - DNA, 75 bp, synthetic construct
  source 1..75: mol_type = other DNA
acgaattgcttgagacgttggaagaagaagctctaagcgaatttgatgcgacagatgatggaagtgaaggggagg

SEQ ID NO: 612492 - DNA, 75 bp, synthetic construct
  source 1..75: mol_type = other DNA
aatgacgaggaagaaattccgaacctggtatttggtgagcttacgccttcccaggtggcgaaattacgtcaggaa

SEQ ID NO: 612493 - DNA, 75 bp, synthetic construct
  source 1..75: mol_type = other DNA
tgatgaatattcgcgccagagcacaactgctattgatgggcctacaacgtgccggaatgctcctgcaggcagcag

SEQ ID NO: 612494 - DNA, 75 bp, synthetic construct
  source 1..75: mol_type = other DNA
tcggcttcccaaggctaattgaaattctagaatgggttgggatggatatcaccggcaaggcttattacgaaaaaa

SEQ ID NO: 612495 - DNA, 75 bp, synthetic construct
  source 1..75: mol_type = other DNA
atgctgacgctcggtcaggctgcgctggaagatgcctgggaatatatggcaccgcgagagtgtgcgctgcttatc

SEQ ID NO: 612496 - DNA, 75 bp, synthetic construct
  source 1..75: mol_type = other DNA
gatgatgagccggatctgattgatgacgatctgcttgagtcactcgaagaggaagcactgagcgaagctgagggc

SEQ ID NO: 612497 - DNA, 75 bp, synthetic construct
  source 1..75: mol_type = other DNA
gaggtgttgagctggcgctggaatatccaccaggagtccaccatgcacgcgggtagcggtctgggatccggcaag

SEQ ID NO: 612498 - DNA, 75 bp, synthetic construct
  source 1..75: mol_type = other DNA
tctcgattacatcattaaaaaagcgtttacaccacgcaaaaccaaaacatcgacagcgacccacaacgtttatag

SEQ ID NO: 612499 - DNA, 75 bp, synthetic construct
  source 1..75: mol_type = other DNA
atggaaacgaaactggatgtatcactggcggctcacgactgcccgcagaccacgacaactggcaactcacgccgt

SEQ ID NO: 612500 - DNA, 75 bp, synthetic construct
  source 1..75: mol_type = other DNA
ccggcgataacatgtcagcggcgttcaccacactgggggccagcgcaaaagcggccggtattgatgcggctgaac

SEQ ID NO: 612501 - DNA, 75 bp, synthetic construct
  source 1..75: mol_type = other DNA
gggacaaaatacaaggcatttcttgccgcagtaggcagcgcccagaaaaagctggggcttaatttcgtgaataaa

SEQ ID NO: 612502 - DNA, 75 bp, synthetic construct
  source 1..75: mol_type = other DNA
ttcttgaactgacagaccgcctgacaaggccgttgcgtgcagccgggcgacaggttcagggatttgctgcaacaa

SEQ ID NO: 612503 - DNA, 75 bp, synthetic construct
  source 1..75: mol_type = other DNA
taccgcatccgatccgcctttgggcggatatgtcactcataaaaacgcatttttttactactgatggcggcattc

SEQ ID NO: 612504 - DNA, 75 bp, synthetic construct
  source 1..75: mol_type = other DNA
cgcctgaaaccgctgattgcggcgctacgtatcggcccgggagagctgcgcggcaaagatgaaaatgaaatgggc

SEQ ID NO: 612505 - DNA, 75 bp, synthetic construct
  source 1..75: mol_type = other DNA
gcactggtgccgtccgcatcgttacgtatggcgcagcttctgcaggaggctggcctgccggacggcgtgtttaac

SEQ ID NO: 612506 - DNA, 75 bp, synthetic construct
  source 1..75: mol_type = other DNA
ctttatatattaagggttattattgctgttagtgtatttgttgggttctttttcgctgattctactgatgattta

SEQ ID NO: 612507 - DNA, 75 bp, synthetic construct
  source 1..75: mol_type = other DNA
gaacgatggcgtgcgtttctacacccgaatgaaaaccatcactgcacgctggccggaaatgcagcaggagacagc

SEQ ID NO: 612508 - DNA, 75 bp, synthetic construct
  source 1..75: mol_type = other DNA
tagaattcgcctgcggcatcccacatctgcaaaaaggcgaacactctgcgaacgttggcacaggtgtcgacagcc

SEQ ID NO: 612509 - DNA, 75 bp, synthetic construct
  source 1..75: mol_type = other DNA
tgggccggatggcgtgcgcttctatacccggatgaaaaccgttacctcgcgttggccgaacggacagcagatcgt

SEQ ID NO: 612510 - DNA, 75 bp, synthetic construct
  source 1..75: mol_type = other DNA
ttagcatgacgccatctgagcagaaaaaggtcctgcagcaggcgacccgtgaagcgctggatacggccatcctgt

SEQ ID NO: 612511 - DNA, 75 bp, synthetic construct
  source 1..75: mol_type = other DNA
atacgggctttctgtgaagaccgggggatcagcctgatggccgtcagcgtggacggtaaactcagcgaccagctt

SEQ ID NO: 612512 - DNA, 75 bp, synthetic construct
  source 1..75: mol_type = other DNA
aaatgtggctggaattggtggtatcaatgctggtcaaaatcaaaaatataattatccagaactgaaaattgactc

SEQ ID NO: 612513 - DNA, 75 bp, synthetic construct
  source 1..75: mol_type = other DNA
ttattggatggttattttgttcttttttcgtattctcatgtatagctacggtttttattggaattttatgtggtg

SEQ ID NO: 612514 - DNA, 75 bp, synthetic construct
  source 1..75: mol_type = other DNA
tataaatattttttcattagacatgaaagtctatatgatggtgtattaatatttttagcaattatgaacggtttg

SEQ ID NO: 612515 - DNA, 75 bp, synthetic construct
  source 1..75: mol_type = other DNA
cggcaccaaagcgccgccataccggtattgcagcggcacgacgagcagaaaagagacgcaggagagcaaagcgat

SEQ ID NO: 612516 - DNA, 75 bp, synthetic construct
  source 1..75: mol_type = other DNA
gcagctggtttggaaagtaacctcactgtctataccggtggtcacgattatgcctggtggcgcggagcaattatt

SEQ ID NO: 612517 - DNA, 75 bp, synthetic construct
  source 1..75: mol_type = other DNA
cacatcagctcaccatgcgtctgttacccgccatgttgccgcatggtgaagggcgtattgtcatgacctcatcgg

SEQ ID NO: 612518 - DNA, 75 bp, synthetic construct
  source 1..75: mol_type = other DNA
tcagcctgatcgaacccggtcccattcgtactcgcttcaccgacaacgtcaaccagacgcaaagtgataaaccag

SEQ ID NO: 612519 - DNA, 75 bp, synthetic construct
  source 1..75: mol_type = other DNA
taaccttccgtgccgccgcagcggacacgttattgattctgggtgatagcctgagcgccgggtatcgaatgtctg

SEQ ID NO: 612520 - DNA, 75 bp, synthetic construct
  source 1..75: mol_type = other DNA
ttcaggatttggtgagtttgttgatcacctcggaatggctgctcttggcccgattgattacttcaatgttcagga

SEQ ID NO: 612521 - DNA, 75 bp, synthetic construct
  source 1..75: mol_type = other DNA
gggacttgtttgatgtgtttgtatgcttcagtatgttcctgtatcgctatttcacaaggaagcaacagttaaaaa

SEQ ID NO: 612522 - DNA, 75 bp, synthetic construct
  source 1..75: mol_type = other DNA
cgattgattacttcaatgttcaggacaagatggctggtcgtgaaattgaccgaggcaggctggcagagacaatcc

SEQ ID NO: 612523 - DNA, 75 bp, synthetic construct
  source 1..75: mol_type = other DNA
ctctattttcttataatatggtgaaagttaatagagttcttttatggacaggagttattgtaggcacgatttctg

SEQ ID NO: 612524 - DNA, 75 bp, synthetic construct
  source 1..75: mol_type = other DNA
ttcttttcctgtaaatcaattgttctttatctcatgcggatattatatatataaatataaattagttaaaagctc

SEQ ID NO: 612525 - DNA, 75 bp, synthetic construct
  source 1..75: mol_type = other DNA
agccgcgtcaggttcgttttacagaaaaggttgattcacatatccgcgaatcagcaaaaagatgccataggtcaa

SEQ ID NO: 612526 - DNA, 75 bp, synthetic construct
  source 1..75: mol_type = other DNA
tatgcgctggaggcgtggtcagacgcgctgcgcatggaactgcgccacagcggaatcaaggtcagcctgattgag

SEQ ID NO: 612527 - DNA, 75 bp, synthetic construct
  source 1..75: mol_type = other DNA
atgcaaaaatcggtcttaattaccggatgttccagtggaattggcctggaaagcgcgctcgaattaaaacgccag

SEQ ID NO: 612528 - DNA, 75 bp, synthetic construct
  source 1..75: mol_type = other DNA
ggttcgttttccacctatgccgacaaggcaattggccgctgggcgggctataccatcggctggctgtactggtgg

SEQ ID NO: 612529 - DNA, 75 bp, synthetic construct
  source 1..75: mol_type = other DNA
gaaattgaccgaggcaggctggcagagacaatccgcagcaatcaggctggtgaagcacttcaggcgagagggcaa

SEQ ID NO: 612530 - DNA, 75 bp, synthetic construct
  source 1..75: mol_type = other DNA
cggatggaacactcgatgtggcagctacggcagcagcatgtacgaatgccacaagtaatacattagttttcacgt

SEQ ID NO: 612531 - DNA, 75 bp, synthetic construct
  source 1..75: mol_type = other DNA
cggttcaggttcttctgcaacacctatcaatgcattcaaaggaaatgttgtcgtagaatcagccgatacagggcc

SEQ ID NO: 612532 - DNA, 75 bp, synthetic construct
  source 1..75: mol_type = other DNA
aaaatcaatgagttagcagagttgctgcatgttcatcgtaatagcgtcagtgcactgatcaataataatcgtaaa

SEQ ID NO: 612533 - DNA, 75 bp, synthetic construct
  source 1..75: mol_type = other DNA
aacaaactctgtggctgttcaggctaaaatcttcccggataacatgttaagtggttctggctcctctgcaacgcc

SEQ ID NO: 612534 - DNA, 75 bp, synthetic construct
  source 1..75: mol_type = other DNA
atggttttattaaataacaaaagaaaaaacaagaaaggtttttcactactcgaactattgcttgttttaggcatc

SEQ ID NO: 612535 - DNA, 75 bp, synthetic construct
  source 1..75: mol_type = other DNA
tccctgacaatatgttaagtggttcaggaacggcagctaaacccatcaatgcctttaaaggtaatgtgacgctgg

SEQ ID NO: 612536 - DNA, 75 bp, synthetic construct
  source 1..75: mol_type = other DNA
tgacgatcaatgtgaaacctttctgctggcgctaaaacgcggtagcggccctgccgggctttcggctatggcgga

SEQ ID NO: 612537 - DNA, 75 bp, synthetic construct
  source 1..75: mol_type = other DNA
gagacaatccgcagcaatcaggctggagaagcacttcaggcgagagggcaaaacctttcctatcagtctgcaatg

SEQ ID NO: 612538 - DNA, 75 bp, synthetic construct
  source 1..75: mol_type = other DNA
tttctttcctcaagttatggagatagccaacctcaacagcaattgtccgatgacgaattaattagcaaatatctc

SEQ ID NO: 612539 - DNA, 75 bp, synthetic construct
  source 1..75: mol_type = other DNA
tgtcactttcccaaacagctcaaaccactatcgacttcccgaagcgtatctacaaagagggccaggaatgtactt

SEQ ID NO: 612540 - DNA, 75 bp, synthetic construct
  source 1..75: mol_type = other DNA
gattgcaaagaagcttataatgcaatgagttttgcacataacccatatggcaatggtacatcatctaaaataatc

SEQ ID NO: 612541 - DNA, 75 bp, synthetic construct
  source 1..75: mol_type = other DNA
caagatggctggtcgtgaaattgaccgaggcagactggcagagacaatccgcagcaatcaggctggagaagcact

SEQ ID NO: 612542 - DNA, 75 bp, synthetic construct
  source 1..75: mol_type = other DNA
acgagtcaccaaaagtctttttcaaagatggtcgcctggttaccacctctcaagctgttgccgactacttcgata

SEQ ID NO: 612543 - DNA, 75 bp, synthetic construct
  source 1..75: mol_type = other DNA
agcgttccgcgcgtctttcgctggtccgtgattatgtgctctccctctctgcacgcctgcctgccggggaggtgg

SEQ ID NO: 612544 - DNA, 75 bp, synthetic construct
  source 1..75: mol_type = other DNA
caaagtatcggtatttaaaaccgcatatacccctggtgcttatcgtcgagatgccaataaacgtctgcagcgtaa

SEQ ID NO: 612545 - DNA, 75 bp, synthetic construct
  source 1..75: mol_type = other DNA
caagctgttgccgactacttcgataaacaacataaacacgttttagctaagattgacgcactcgactgctctccc

SEQ ID NO: 612546 - DNA, 75 bp, synthetic construct
  source 1..75: mol_type = other DNA
tgctacctgatcacaaaagacggcttcatgttcctcgtaatgggatttactggcaaaaaagcagccagactaaaa

SEQ ID NO: 612547 - DNA, 75 bp, synthetic construct
  source 1..75: mol_type = other DNA
gaatttacatcagccaacttttcggccgatgttcagactgtcgaaattggcaacggcgcagaacgtgaatcacga

SEQ ID NO: 612548 - DNA, 75 bp, synthetic construct
  source 1..75: mol_type = other DNA
gtattaataattatcttcattcaaacccatactaccttgatgatgactgtctgctgataggcgcacaaattttta

SEQ ID NO: 612549 - DNA, 75 bp, synthetic construct
  source 1..75: mol_type = other DNA
atgattacaagtatacgctatcgcggcttctcattttattacaaagataacgataataaatataaagaaatcttt

SEQ ID NO: 612550 - DNA, 75 bp, synthetic construct
  source 1..75: mol_type = other DNA
tgattggtgccggattaacaaagtgcggtgagttacgccccggcacacgtatatctgatgaggatgttcgtctta

SEQ ID NO: 612551 - DNA, 75 bp, synthetic construct
  source 1..75: mol_type = other DNA
ttcggtgatggttggctggtcagtaaaaccggtaatcagtttttcgtgaccaaaggcaccggctacgtggcgggg

SEQ ID NO: 612552 - DNA, 75 bp, synthetic construct
  source 1..75: mol_type = other DNA
gaacgtgcaatcaggtggtagtgactggggggtaccacgtagcgatcaggggcgagccgccaccagttcggcggg

SEQ ID NO: 612553 - DNA, 75 bp, synthetic construct
  source 1..75: mol_type = other DNA
ccgacagcacagattgttcaccggcaatctgttacccgcaccggtgtggtgaatgaaaacggggtggtctattcc

SEQ ID NO: 612554 - DNA, 75 bp, synthetic construct
  source 1..75: mol_type = other DNA
tgcttcgcaccgttgccggtgatgagcacgccgcacgcctttctcttgttcgcgattacgtcctctcgttcgctg

SEQ ID NO: 612555 - DNA, 75 bp, synthetic construct
  source 1..75: mol_type = other DNA
aaaagcttgcgggaatacttatgccaagaggcgggaatcttcaagctgggtatgcatgacctgcgacgaactttc

SEQ ID NO: 612556 - DNA, 75 bp, synthetic construct
  source 1..75: mol_type = other DNA
tgcacatgctgatgacagcacctaagttatacaatacattgttagcttcagcacagtatccgccgttgccagagg

SEQ ID NO: 612557 - DNA, 75 bp, synthetic construct
  source 1..75: mol_type = other DNA
ctaaaaacaggaacgatcatgaattgcctatatgtgatgctgttaaacgcatccttgaagacaggcacgatattg

SEQ ID NO: 612558 - DNA, 75 bp, synthetic construct
  source 1..75: mol_type = other DNA
cgaattcttgaagaccgaagagatttagtcaacgagactgaaaaacgagcagataaacgcaaatgggtttttcct

SEQ ID NO: 612559 - DNA, 75 bp, synthetic construct
  source 1..75: mol_type = other DNA
taacttcatatgcagttgtgaaaaagttgcttaaccaccgcaataccaccgatcctacggaaaggtatgctgtgc

SEQ ID NO: 612560 - DNA, 75 bp, synthetic construct
  source 1..75: mol_type = other DNA
ttgaaaacaactctcaatcaggcttttattatcaataagttaagtattaatgttaagcctgaactcagtagttct

SEQ ID NO: 612561 - DNA, 75 bp, synthetic construct
  source 1..75: mol_type = other DNA
cgggagtccgatgcttctgaactcactatcagtgaagtgtttgctcaataccgccagcatctgctgggtagagcg

SEQ ID NO: 612562 - DNA, 75 bp, synthetic construct
  source 1..75: mol_type = other DNA
tgttgtttcttattgtgtctcattttgagtctatgtcaagcagcgttgctcttttagagtctctttatgctctta

SEQ ID NO: 612563 - DNA, 75 bp, synthetic construct
  source 1..75: mol_type = other DNA
acgaagcgccggtttccaatgttgccggttacgccaaccccgtctgggctaccaccagtgaaattggcgtttcca

SEQ ID NO: 612564 - DNA, 75 bp, synthetic construct
  source 1..75: mol_type = other DNA
ttctgaatggtcagggcttcgagtgaaggatttaacaggcaatgaaattcttcgcaagtttgatgaaatcgcaag

SEQ ID NO: 612565 - DNA, 75 bp, synthetic construct
  source 1..75: mol_type = other DNA
cgaaaacctgtgccaagaggcagggatagtgaagttaggtatgcatgatcttcgaagaacttttggtcgtgtagc

SEQ ID NO: 612566 - DNA, 75 bp, synthetic construct
  source 1..75: mol_type = other DNA
aaaaacgaccagttatgttgatctcgaaagccgaatgattcgattttacgacaccaaaaaccgtaatgaccatga

SEQ ID NO: 612567 - DNA, 75 bp, synthetic construct
  source 1..75: mol_type = other DNA
atgtctcagttagatagcaatgccattaaagaaattgtaaaactcaccactactgctttttctggtgaaaatttg

SEQ ID NO: 612568 - DNA, 75 bp, synthetic construct
  source 1..75: mol_type = other DNA
agcggtgcttacggaaaagcagcaagcgtgttgcatcaggtgatgagtggtatctgtcagggaattacgtggggg

SEQ ID NO: 612569 - DNA, 75 bp, synthetic construct
  source 1..75: mol_type = other DNA
tcagagtggccgtgtggctcactgttgtgaagggaaaacacgcagacatttcccacaccaggctgagatatcgca

SEQ ID NO: 612570 - DNA, 75 bp, synthetic construct
  source 1..75: mol_type = other DNA
cgcgtcgtgaacggtgtttacggaaaagcagtaagcgggctgcatcaggtgaagagtggtatctctcagggaatt

SEQ ID NO: 612571 - DNA, 75 bp, synthetic construct
  source 1..75: mol_type = other DNA
aagggtgcgatatccgctgtctggtcgtcggtgatgaagttgtcgcggcgattgaacggcgggcgaaagagggcg

SEQ ID NO: 612572 - DNA, 75 bp, synthetic construct
  source 1..75: mol_type = other DNA
tccagcggcgtcttccattcactataaaggccgcaaactcccccattttgacgcggtgatcccacgcattggcac

SEQ ID NO: 612573 - DNA, 75 bp, synthetic construct
  source 1..75: mol_type = other DNA
cctgattcagcaggcagaggatctggaatcaagagggttattccggcgtgctgcaacggtgtggatggcggcatt

SEQ ID NO: 612574 - DNA, 75 bp, synthetic construct
  source 1..75: mol_type = other DNA
atgagtctgttaaatgacgttcagaaattcattgaagcccatccggggtgtacttccggcgacattgcggatgct

SEQ ID NO: 612575 - DNA, 75 bp, synthetic construct
  source 1..75: mol_type = other DNA
atgagtctcttgaatgacgttcagaaattcattgaagcccatccggggtgtacttccggagacattgcggatgct

SEQ ID NO: 612576 - DNA, 75 bp, synthetic construct
  source 1..75: mol_type = other DNA
atgagtctctttaatgacgttcagaaattcattgaagcccatccggggtgtacttccggtgacattgcggatgct

SEQ ID NO: 612577 - DNA, 75 bp, synthetic construct
  source 1..75: mol_type = other DNA
gaagaactggagtcgaggggcttataccgtcgtgctgcaacggtgtggatggcggcattccgtgaaagccactcc

SEQ ID NO: 612578 - DNA, 75 bp, synthetic construct
  source 1..75: mol_type = other DNA
cagccagaacgaaacaattttctggcgcgtcgtgaacggtgtttacggaaaagcagtaagcgggctgcatcaggt

SEQ ID NO: 612579 - DNA, 75 bp, synthetic construct
  source 1..75: mol_type = other DNA
atgagtctgttcaatgacgttcagaaattcattgaagcccatccggggtgtacttccggagacattgcggatgct

SEQ ID NO: 612580 - DNA, 75 bp, synthetic construct
  source 1..75: mol_type = other DNA
cattcctgccgagcggcttcgctcatggttggataaaatgaataaatggagcaggttaaaccattgttcgcttgg

SEQ ID NO: 612581 - DNA, 75 bp, synthetic construct
  source 1..75: mol_type = other DNA
actacgacgaacgcggcatcgtatggcctgacgctatcgcaccgttccaggtggcgattctgccgatgaacatgc

SEQ ID NO: 612582 - DNA, 75 bp, synthetic construct
  source 1..75: mol_type = other DNA
gaaattcgtgccgtggttaaagccggtccgggttcactgggtccggtaaacatgccgattccggtggtgattgac

SEQ ID NO: 612583 - DNA, 75 bp, synthetic construct
  source 1..75: mol_type = other DNA
cgtgatgtttgccgatatggaactgatcggtattccgcacactattgtgctgggcgaccgtaacctcgacaacga

SEQ ID NO: 612584 - DNA, 75 bp, synthetic construct
  source 1..75: mol_type = other DNA
agtcgccagatagctcttcaaacgctctcagaagctctcaggcgcacgaaacgggttttaaatgcccgtcagggc

SEQ ID NO: 612585 - DNA, 75 bp, synthetic construct
  source 1..75: mol_type = other DNA
atgcttactctttccatacttctcaggaatccctgcaggaaacctacgatgcaatgtatgcggcctacagcaaaa

SEQ ID NO: 612586 - DNA, 75 bp, synthetic construct
  source 1..75: mol_type = other DNA
ttgctgctggtgctaacatcgatggcaaacactacttcggtatcaactgggatcgcgatgtcgcaaccccggaag

SEQ ID NO: 612587 - DNA, 75 bp, synthetic construct
  source 1..75: mol_type = other DNA
aaacagctaccgctgaacttctatcagatccagaccaagttccgcgacgaagtgcgtccgcgttttggcgtcatg

SEQ ID NO: 612588 - DNA, 75 bp, synthetic construct
  source 1..75: mol_type = other DNA
actacgacgaacgcggcatcgtatggcctgacgctatcgcgccgttccaggtggcgattctgccaatgaacatgc

SEQ ID NO: 612589 - DNA, 75 bp, synthetic construct
  source 1..75: mol_type = other DNA
agaaccgcgcgctgctgctacccaggaaatgacgctggttgatacgccgaacgcgaaaaccatcgcggaactggt

SEQ ID NO: 612590 - DNA, 75 bp, synthetic construct
  source 1..75: mol_type = other DNA
actgaaagcctccgtacagggtgaagatggccgtaaccaaatcctgacgatgggttgctacggtatcggggtaac

SEQ ID NO: 612591 - DNA, 75 bp, synthetic construct
  source 1..75: mol_type = other DNA
ctcaggaactggcatccagaagtacgagagcttctgccgggatgtatggagatgctcatgctgaatggggggtta

SEQ ID NO: 612592 - DNA, 75 bp, synthetic construct
  source 1..75: mol_type = other DNA
gggaggcgtcgaacagagcagaaagtgccctgcatggtttcagcagcagtattgccagtgcctggaacacgctca

SEQ ID NO: 612593 - DNA, 75 bp, synthetic construct
  source 1..75: mol_type = other DNA
ttatttctcgacgaaattggtgatatgccgctggatgtgcagacgcgtttgctgcgcgtgctggcagacggtcag

SEQ ID NO: 612594 - DNA, 75 bp, synthetic construct
  source 1..75: mol_type = other DNA
gcattatctcagaataataaatatgatgaagagcgagaaagtcaaaagataatacctgagccatcaggagaggct

SEQ ID NO: 612595 - DNA, 75 bp, synthetic construct
  source 1..75: mol_type = other DNA
ggcgcaggtgtcagaggtggtggtcgggcaggtattgactggagcgatgatgatgcgcatcaggccagcagtggt

SEQ ID NO: 612596 - DNA, 75 bp, synthetic construct
  source 1..75: mol_type = other DNA
tctggtactggctgcagcatttaacaaaatgacactgccggtgctgaaggggtatgtgtttgcccttatgtggct

SEQ ID NO: 612597 - DNA, 75 bp, synthetic construct
  source 1..75: mol_type = other DNA
tttgttcaaaaccagacgatgggaatatgattttaaattatattttatatgaaggtaaatatggtaatgcaataa

SEQ ID NO: 612598 - DNA, 75 bp, synthetic construct
  source 1..75: mol_type = other DNA
gtttcagcagcagtattgccagtgcctggaactcgctcagtcagtttggttctaaccgggggagcagtgattctg

SEQ ID NO: 612599 - DNA, 75 bp, synthetic construct
  source 1..75: mol_type = other DNA
cggcacaacgtgatggatttgctgggctgggtggccgtgtttgtgcttatcagcctgctggttaatgtccgtaca

SEQ ID NO: 612600 - DNA, 75 bp, synthetic construct
  source 1..75: mol_type = other DNA
cagaacagtatccgtggcgaggaaaatattgtaagagggcagtattctgaactgcaaaatcatcataaaacagag

SEQ ID NO: 612601 - DNA, 75 bp, synthetic construct
  source 1..75: mol_type = other DNA
atgaagagcgagaaagtcaaaagataatacctgagccatcaggagaggctgtgaaaaaaatgattgatgataaaa

SEQ ID NO: 612602 - DNA, 75 bp, synthetic construct
  source 1..75: mol_type = other DNA
gtcgatgaataaggcggaaagtgccctgcatggtttcagcagcagtattgccagtgcctggaacacgctcagcca

SEQ ID NO: 612603 - DNA, 75 bp, synthetic construct
  source 1..75: mol_type = other DNA
gaatgccattgccgcttttatggggacccggacgtgggattccattgaaaaaattgcgctcacattgtctgttct

SEQ ID NO: 612604 - DNA, 75 bp, synthetic construct
  source 1..75: mol_type = other DNA
agaacggcgcggaagtgctggaggcgctggcgagcaaaacgccggatgtgctgctttcagatatccgtatgccgg

SEQ ID NO: 612605 - DNA, 75 bp, synthetic construct
  source 1..75: mol_type = other DNA
aactggaaaacacctgccgctggttaacggtgatggccgccggacaggaagtgttgattcaggatttgcccggcg

SEQ ID NO: 612606 - DNA, 75 bp, synthetic construct
  source 1..75: mol_type = other DNA
gtcagcaggcccttcctgcgtatagtcagcacattagcgttgagagtactcagttttctaaccagggcacgatgg

SEQ ID NO: 612607 - DNA, 75 bp, synthetic construct
  source 1..75: mol_type = other DNA
cggtgcggcgtttttaacggtggtggtgaactattacgcacctgccaaagtgtttaaatttctgatcgacagctc

SEQ ID NO: 612608 - DNA, 75 bp, synthetic construct
  source 1..75: mol_type = other DNA
tatcgcgctgaatatggcagctatcccaaaagatttgatcgaatcagaactgtttggtcacgagaaaggcgcgtt

SEQ ID NO: 612609 - DNA, 75 bp, synthetic construct
  source 1..75: mol_type = other DNA
agccagtatacaggcctgaaatatcaacaaattctctggcgttacagaataaagcaaagtgtcagtcggcgggga

SEQ ID NO: 612610 - DNA, 75 bp, synthetic construct
  source 1..75: mol_type = other DNA
accgagcgcggaaatcgaagcagcgaagaacgatatggaccctaaatcgttcgcacaggaatacctggccagctt

SEQ ID NO: 612611 - DNA, 75 bp, synthetic construct
  source 1..75: mol_type = other DNA
cggcgctcagctcgaagaataataaaaagcttactaaagaaagaacatctacctggagtggcgctgacaatgaca

SEQ ID NO: 612612 - DNA, 75 bp, synthetic construct
  source 1..75: mol_type = other DNA
ccgtgctggagaggcagcggaagggaaaaggagtattaccgttcaagaaatcgaaagctgttatggaaggcgctg

SEQ ID NO: 612613 - DNA, 75 bp, synthetic construct
  source 1..75: mol_type = other DNA
atgccgctcggcgaggctctggagcagcataccggcgttccggtttatattcagcatgatatcagcgcatggacg

SEQ ID NO: 612614 - DNA, 75 bp, synthetic construct
  source 1..75: mol_type = other DNA
ggtggtgattgatcacaacgtgggtgctggtgtgattaccgatggtcatttgctacatgcgggaagcagtagcct

SEQ ID NO: 612615 - DNA, 75 bp, synthetic construct
  source 1..75: mol_type = other DNA
tgtggagataggccacactcaggtcgacccctatggaaaacgctgttattgcggtaaccacggctgcctggaaac

SEQ ID NO: 612616 - DNA, 75 bp, synthetic construct
  source 1..75: mol_type = other DNA
gaaacacgcaccgcaggatgccgaagctattctgacaaataccagttcgccggagattgcagaacgccgtcgggc

SEQ ID NO: 612617 - DNA, 75 bp, synthetic construct
  source 1..75: mol_type = other DNA
actgggaaagcatataatatagatcctttaatattaaaggcaattgcatggaatgaatccagaaatcaaaatgga

SEQ ID NO: 612618 - DNA, 75 bp, synthetic construct
  source 1..75: mol_type = other DNA
ttccgattgttttgaaattacaggaaaagcatataacatagatccattaatattaaaagcaattgcatggaatga

SEQ ID NO: 612619 - DNA, 75 bp, synthetic construct
  source 1..75: mol_type = other DNA
agtggacttaatggatgctaaaaaattcaaaattgcgaatagccttatggacatacttgaatcccgaacaatacc

SEQ ID NO: 612620 - DNA, 75 bp, synthetic construct
  source 1..75: mol_type = other DNA
atgaagaaaagctggctcaggaaagaatacctggtgctgatagtccgaaagagcttttagagaaagcaaagagtt

SEQ ID NO: 612621 - DNA, 75 bp, synthetic construct
  source 1..75: mol_type = other DNA
gcatgcaatggtggtcagctacgagatgatattcacccaaccggacagcgtcacctacagcaagacaggcatgct

SEQ ID NO: 612622 - DNA, 75 bp, synthetic construct
  source 1..75: mol_type = other DNA
gtggtgctacgtcacgtattcctatgagtatcaacatgactcgtcagattgcaaccgcacagcaggcaatggccc

SEQ ID NO: 612623 - DNA, 75 bp, synthetic construct
  source 1..75: mol_type = other DNA
agctccatatgcttatgactgcaccagagttatataatacacttctggcttcggcgaaatatcaaccattgccaa

SEQ ID NO: 612624 - DNA, 75 bp, synthetic construct
  source 1..75: mol_type = other DNA
atgtgctgaacaaagccgaaaaccgcctgaaagagtgggaaaatcttagagtaaaagatctgacaggcaacgaga

SEQ ID NO: 612625 - DNA, 75 bp, synthetic construct
  source 1..75: mol_type = other DNA
cagacgaaatccgaatgcagtaaagcgagaagcagaggcttctgagctaacgatcagtgaagtttttgcgcaata

SEQ ID NO: 612626 - DNA, 75 bp, synthetic construct
  source 1..75: mol_type = other DNA
ccggtgttctttacccctgtcgataaacagggcgggctaaaagaagcggaactgaaattcttaatcctagagcaa

SEQ ID NO: 612627 - DNA, 75 bp, synthetic construct
  source 1..75: mol_type = other DNA
cgcaatgcccgtccggcggtgatgacgctctctcaatcgctgggcgattttgtcgtcgccagtgccggaccgcat

SEQ ID NO: 612628 - DNA, 75 bp, synthetic construct
  source 1..75: mol_type = other DNA
cggtaagacatgcgattgagatcgaagcgggaaatgctcagacacaacaacgacaaccgacactaagctacaacc

SEQ ID NO: 612629 - DNA, 75 bp, synthetic construct
  source 1..75: mol_type = other DNA
gtgaatgaagtttatgtgattgccggtggcgagtggttgcggaataacctgaacgccattgccgcctttatggga

SEQ ID NO: 612630 - DNA, 75 bp, synthetic construct
  source 1..75: mol_type = other DNA
actcagaatagtattcgtggcgaggaaaatattgtaagaggcagtattctgagttgcaaaatcatcataaacaga

SEQ ID NO: 612631 - DNA, 75 bp, synthetic construct
  source 1..75: mol_type = other DNA
tgtcgcaacagtttgcacagtatgtgatgaaacgcgcaccgcaggatgcagaagctattctgacaaataccagtt

SEQ ID NO: 612632 - DNA, 75 bp, synthetic construct
  source 1..75: mol_type = other DNA
tggtggggttggtgtcagaggcgggtttaagggaagtcttgatcgaacggatgatgattcacattctgcaagtag

SEQ ID NO: 612633 - DNA, 75 bp, synthetic construct
  source 1..75: mol_type = other DNA
atattgtagaaagacagtattcagaattacaaaatcaccacaaacaagaagcattatctcaaaacaatagatata

SEQ ID NO: 612634 - DNA, 75 bp, synthetic construct
  source 1..75: mol_type = other DNA
gcggtaagtcacgcaccattcgccgtattcagtcgattcactatctggatcgcaaagatccggaaatgcaggtgc

SEQ ID NO: 612635 - DNA, 75 bp, synthetic construct
  source 1..75: mol_type = other DNA
atgaagaaaagtcggctcaggaaagaatgcccggggctgacagtccacaggaactgatgaaaagggcaaaggagt

SEQ ID NO: 612636 - DNA, 75 bp, synthetic construct
  source 1..75: mol_type = other DNA
tccgcacgctggcattacctgacccatgaacaaagttctcccgattttgttccctgggaggctgaacattttgaa

SEQ ID NO: 612637 - DNA, 75 bp, synthetic construct
  source 1..75: mol_type = other DNA
aacgctggtcgacgctacgccagcgtttcagttgggttgaggagatgcatcacacgccacaagacccggagcatc

SEQ ID NO: 612638 - DNA, 75 bp, synthetic construct
  source 1..75: mol_type = other DNA
aggtcaatccgccgtcttctataacggtgaagtgtgcctcggcggcggcatcattgagcagcgtctgccgctgcc

SEQ ID NO: 612639 - DNA, 75 bp, synthetic construct
  source 1..75: mol_type = other DNA
cataatatcagtaatgagcaggcgactcaggaactggcatcaacaggttctaagttctcgtatggcggaatgtat

SEQ ID NO: 612640 - DNA, 75 bp, synthetic construct
  source 1..75: mol_type = other DNA
aactgtttcttgccgaatataaagccggtcgcacgccgaatccggatattctgtgcaacaaagagatcaaattta

SEQ ID NO: 612641 - DNA, 75 bp, synthetic construct
  source 1..75: mol_type = other DNA
tgggcgcaatggaagcagcaaaatgccagacgcgagtatgcagttcctgaagcggtcgtgatgcggatggcctca

SEQ ID NO: 612642 - DNA, 75 bp, synthetic construct
  source 1..75: mol_type = other DNA
cgcggcccctttcattacgcggacgttctgatgggggcttctgtttcttcatgcctgtcatttgtctgtttctga

SEQ ID NO: 612643 - DNA, 75 bp, synthetic construct
  source 1..75: mol_type = other DNA
atgattttaccttcgataatgaggttaacgtcatcgatcagttgggcaaaacgaccagtgatgcgcttgggttgt

SEQ ID NO: 612644 - DNA, 75 bp, synthetic construct
  source 1..75: mol_type = other DNA
gaaccggcgttgttgtggcatgtgcagccgggcatgatgccgataccagcgtcctcaaagaaatcactgaaatcg

SEQ ID NO: 612645 - DNA, 75 bp, synthetic construct
  source 1..75: mol_type = other DNA
ggactgaatgaattcaaagcagccaaaaaaggtgtcgttgttgcctgtgctgccggtcacgatgccgacacaggg

SEQ ID NO: 612646 - DNA, 75 bp, synthetic construct
  source 1..75: mol_type = other DNA
tttgacgagcggatgggcgagcgtatctctgacgaaattattgcgcattgccatcagtgcggcgcactttgcgac

SEQ ID NO: 612647 - DNA, 75 bp, synthetic construct
  source 1..75: mol_type = other DNA
ccgtatcaccggtacccgtgcaaaataccagcgtcagctggctcgcgctatcaaacgcgctcgctacctgtccct

SEQ ID NO: 612648 - DNA, 75 bp, synthetic construct
  source 1..75: mol_type = other DNA
cgtttcagactcgcgtaaataaaaccacgcgcacgctggaaatcgccgagtcgttcgggcttggcttggacgaaa

SEQ ID NO: 612649 - DNA, 75 bp, synthetic construct
  source 1..75: mol_type = other DNA
tgagccgcgcccataacccgtatggtgatggtcaggcatgctctcgcattctggaagcgttaaaaaataatcgga

SEQ ID NO: 612650 - DNA, 75 bp, synthetic construct
  source 1..75: mol_type = other DNA
cttcggtcgtggctttgaagaaatctgccacgcgctggcagacatcgccaccacgcaccaggacatccagattgt

SEQ ID NO: 612651 - DNA, 75 bp, synthetic construct
  source 1..75: mol_type = other DNA
acttcccggcaaaacttgctgcgtgaaaatgttgctgacagccgaatcttcattaccggtaatacagtcattgat

SEQ ID NO: 612652 - DNA, 75 bp, synthetic construct
  source 1..75: mol_type = other DNA
ccagagagcagcttgcagagctaccgcgtgaaggcggtttacccgtcgcatttttatggcttggcattgcgctga

SEQ ID NO: 612653 - DNA, 75 bp, synthetic construct
  source 1..75: mol_type = other DNA
ccgcgtcgctgcacgaacaacgcgatttagccgtcggcacggcgcttggctcaaacattatcaatatcttgctga

SEQ ID NO: 612654 - DNA, 75 bp, synthetic construct
  source 1..75: mol_type = other DNA
gcagcgtaatgcgctggagtgtgcaggatgtgagctgattttgaggataaaatcagcggcacgaagtccgaccga

SEQ ID NO: 612655 - DNA, 75 bp, synthetic construct
  source 1..75: mol_type = other DNA
ctttgccagcgagtaccaaatgagaaacccagatagcggccagagttgttcttacattgtcgctttcagtcaaaa

SEQ ID NO: 612656 - DNA, 75 bp, synthetic construct
  source 1..75: mol_type = other DNA
gatgtgctgctgctgaacacctgctcaatccgcgagaaggctcaggaaaaagtcttccatcagttgggtcgctgg

SEQ ID NO: 612657 - DNA, 75 bp, synthetic construct
  source 1..75: mol_type = other DNA
ccagatagacaaactggaagatgtggtaaaagtgcagcgtaatcagtccgacccgaccatgtttaacaagattgc

SEQ ID NO: 612658 - DNA, 75 bp, synthetic construct
  source 1..75: mol_type = other DNA
tcactgtcgtacccgcgcatttctgcgcagaccggtgtcagcaaaaccaccaatttttctctggtgaggcgattt

SEQ ID NO: 612659 - DNA, 75 bp, synthetic construct
  source 1..75: mol_type = other DNA
agcaggttttacgcatatctccattctgagtgacgcgctaagcgaaccttcccgtctacaaaaactgccgcactt

SEQ ID NO: 612660 - DNA, 75 bp, synthetic construct
  source 1..75: mol_type = other DNA
ttggttatcagttctacccacggtgccggagatattccagacaacctttctcctttctataaagcgttgcaggaa

SEQ ID NO: 612661 - DNA, 75 bp, synthetic construct
  source 1..75: mol_type = other DNA
aacattcttgatcacgacattccggaagatccggcagaagaatggctgggatcgtggattaatttactcaaataa

SEQ ID NO: 612662 - DNA, 75 bp, synthetic construct
  source 1..75: mol_type = other DNA
cgattatgcccttaagccagttttaagtgcgctgaaagcccaggagatcctgcacggcgtgtttgccgatgactc

SEQ ID NO: 612663 - DNA, 75 bp, synthetic construct
  source 1..75: mol_type = other DNA
atggatatctgcattcttgaaaagccatcaatgaccagcattgagatcgcggagctggtgggaagtcgcccggat

SEQ ID NO: 612664 - DNA, 75 bp, synthetic construct
  source 1..75: mol_type = other DNA
tgtcggaggctgaacaccgaggaaaacgctggtatcacccaaggatgggacaattccaggtgatcggttggggag

SEQ ID NO: 612665 - DNA, 75 bp, synthetic construct
  source 1..75: mol_type = other DNA
tttatcactggaatctgcaaaacttcgccccggaagatttgctctatgcccgtttcgatggtccggcactcaaga

SEQ ID NO: 612666 - DNA, 75 bp, synthetic construct
  source 1..75: mol_type = other DNA
cactgaaaacgctcctcgacctgctgccagaacgcgcgctgcaaggcaaagtcgtgttgccgctggcgacgggcg

SEQ ID NO: 612667 - DNA, 75 bp, synthetic construct
  source 1..75: mol_type = other DNA
ccttcaccgaacagctgcaacaggctgatggactgatagtcgctacacctgtgtataaagccgcctattccggtg

SEQ ID NO: 612668 - DNA, 75 bp, synthetic construct
  source 1..75: mol_type = other DNA
aagaaatctgccacgcgctggcagacatcgccaccacgcaccaggacatccagattgtctatccggtgcatctca

SEQ ID NO: 612669 - DNA, 75 bp, synthetic construct
  source 1..75: mol_type = other DNA
tgaaggatgcgcagaaaatgatggcctcattgtcgacggaaaagggcgttattcagcctgttcacattgatgatg

SEQ ID NO: 612670 - DNA, 75 bp, synthetic construct
  source 1..75: mol_type = other DNA
atctctggaacactatgttgcagcactgcgacgcaatgccgcactgcgtgatgcagaaaaaacactggccgaagc

SEQ ID NO: 612671 - DNA, 75 bp, synthetic construct
  source 1..75: mol_type = other DNA
ttgaagatgaagactggacgcgtttctcacaaggggtggggcggatgaccgggcgcaatatctggatggtggacc

SEQ ID NO: 612672 - DNA, 75 bp, synthetic construct
  source 1..75: mol_type = other DNA
tgaggtatacaacccggaaacgcaggccggaggcatagcagaaatcaacatcacgaaacagcgtaatggcacgct

SEQ ID NO: 612673 - DNA, 75 bp, synthetic construct
  source 1..75: mol_type = other DNA
aaacactgaacgaggcattacagaaattacgcgatgcgcatacctgtgaagcagctgaagatgccctgaaggatg

SEQ ID NO: 612674 - DNA, 75 bp, synthetic construct
  source 1..75: mol_type = other DNA
atgcagaaaaaacactggccgaagcattgcagaaattacgtgatgcgcatacctgtgaagcagctgaagatgccc

SEQ ID NO: 612675 - DNA, 75 bp, synthetic construct
  source 1..75: mol_type = other DNA
ataacgagtttcatccggataatgattttaccatcgatacggttaattcatccgtaatgcgtattcaaagaagca

SEQ ID NO: 612676 - DNA, 75 bp, synthetic construct
  source 1..75: mol_type = other DNA
tgaacgatgaaacgacactcaggcacgcagtatatcatcagttgtcgcatttaattacgcttcgtcgccggcata

SEQ ID NO: 612677 - DNA, 75 bp, synthetic construct
  source 1..75: mol_type = other DNA
ggtacgcgcagtccgtatgaaatgaatgtgacctacatggacgcattgagccatcgcgattgcagtgacgaagaa

SEQ ID NO: 612678 - DNA, 75 bp, synthetic construct
  source 1..75: mol_type = other DNA
tatgtcggcaaaaagtgaatggtttaaaaactatttgcaacagcttccgggttttgaagatttctttattgcggt

SEQ ID NO: 612679 - DNA, 75 bp, synthetic construct
  source 1..75: mol_type = other DNA
caccattgatgcgattaattcatttgtaatgcgaattcaaagaagcaatgcggatggcgattgcctgacgggatt

SEQ ID NO: 612680 - DNA, 75 bp, synthetic construct
  source 1..75: mol_type = other DNA
gcaacggcgatgatgaagcgcatatggtgtatcagttctcgctgccgccgctggtgttacatgcggtgcaaaaac

SEQ ID NO: 612681 - DNA, 75 bp, synthetic construct
  source 1..75: mol_type = other DNA
ttgaagacgaagattgggcacgtttctcacaaggagtggggcggatgaccgggcgcaatatctggatggtggacc

SEQ ID NO: 612682 - DNA, 75 bp, synthetic construct
  source 1..75: mol_type = other DNA
gggggaacggagaagatttttcacgtagtctccgataaagtgactattgatattagcaatgaacataaggagggt

SEQ ID NO: 612683 - DNA, 75 bp, synthetic construct
  source 1..75: mol_type = other DNA
ttgcccgcagggggcggccctgtcgccaatactcgctaatatctacctgcatcatgtaatagacgaatggtttgc

SEQ ID NO: 612684 - DNA, 75 bp, synthetic construct
  source 1..75: mol_type = other DNA
gtcaacaaacagcagcaggctgccctggcggcgaagcgttctgcctcagagcagaaattgcagcagtgggtagcc

SEQ ID NO: 612685 - DNA, 75 bp, synthetic construct
  source 1..75: mol_type = other DNA
accgcacgctgaccggtcatctggcaatgtaccatttctccccaactgagacctcacggcaaaacctgctacgtg

SEQ ID NO: 612686 - DNA, 75 bp, synthetic construct
  source 1..75: mol_type = other DNA
gtgaaagtactgactgtatttggtacgcgcccggaagccatcaagatggcgccgttggtgcatgcgttggcaaaa

SEQ ID NO: 612687 - DNA, 75 bp, synthetic construct
  source 1..75: mol_type = other DNA
aaaactgtcttagcgaaatgattaaaagcgttgtattgtcacataacagatatgtagaaaatgccataagaaaca

SEQ ID NO: 612688 - DNA, 75 bp, synthetic construct
  source 1..75: mol_type = other DNA
atgatcaaagcacaaggtgccattttcggttgggttactgattccaaagccattattgcaggtctggaaggctaa

SEQ ID NO: 612689 - DNA, 75 bp, synthetic construct
  source 1..75: mol_type = other DNA
agcgtcgcatccggcatcagcgcacgaacgccttatccgcctaaaaacattaaacccgcaacagcgcccttccca

SEQ ID NO: 612690 - DNA, 75 bp, synthetic construct
  source 1..75: mol_type = other DNA
gcgcggtaaaaacgtccagtcacgccatcggacgctggaaaaacgtccagtcacgccatcggacgctggaaaaac

SEQ ID NO: 612691 - DNA, 75 bp, synthetic construct
  source 1..75: mol_type = other DNA
ggcgcgactgaagaaaaacgacggcacaacaatggcatgtggtggtcactggcacaccactcccgcacaggtgaa

SEQ ID NO: 612692 - DNA, 75 bp, synthetic construct
  source 1..75: mol_type = other DNA
agacaggcagagacagctgcgccatcaggcgcagtggccttacacaccgtcaggtgtgcagggagcgccgcatcc

SEQ ID NO: 612693 - DNA, 75 bp, synthetic construct
  source 1..75: mol_type = other DNA
gtgctggcgaaacacgatgaaaactacacgccgccagaagttgagaaagcgatggaagctaaccaccgtcgcccg

SEQ ID NO: 612694 - DNA, 75 bp, synthetic construct
  source 1..75: mol_type = other DNA
atgattgatgcaaaagtgcttgaaggggttaaaaactggctgagtatttacggacgtctgacctgcggcattctg

SEQ ID NO: 612695 - DNA, 75 bp, synthetic construct
  source 1..75: mol_type = other DNA
aattaacatttcacccgacttcaggatttggacgttttcaaccccaatattatgattataaatttggtagtagat

SEQ ID NO: 612696 - DNA, 75 bp, synthetic construct
  source 1..75: mol_type = other DNA
gaattcatatataaaaatgcctcataactttgttaaggctcgtgaattagctgaaaggcttgcagagccctttcc

SEQ ID NO: 612697 - DNA, 75 bp, synthetic construct
  source 1..75: mol_type = other DNA
gaatgtaacggtttttatgatattccgcgtccccgcccggtgcagccggttcgtcgcaaatgcagccaggagtct

SEQ ID NO: 612698 - DNA, 75 bp, synthetic construct
  source 1..75: mol_type = other DNA
cttcaatggtgtatttcctgcgtgatgcggttgatgccggaatgctgacagaatgcaacgggttttatgatgttc

SEQ ID NO: 612699 - DNA, 75 bp, synthetic construct
  source 1..75: mol_type = other DNA
aaacaggggatgccccgttttgtgatggcgtatatcgatatccgactgggacgttttatttgtggctccagtggc

SEQ ID NO: 612700 - DNA, 75 bp, synthetic construct
  source 1..75: mol_type = other DNA
ggtccccgcgatgaaatactgaaaaaactgtcagggaaacagcagagtggggagagcagagcgataacttcatga

SEQ ID NO: 612701 - DNA, 75 bp, synthetic construct
  source 1..75: mol_type = other DNA
tctgcagctttcgcgtcttccgggaagcctgtcggatgtggatatgattaatgcagccggacgtttcgggtttga

SEQ ID NO: 612702 - DNA, 75 bp, synthetic construct
  source 1..75: mol_type = other DNA
gtcatcacccatgcgggcttgatatgcagataggggaaggaggtcaggggctgtcaggaggacagcgtcagatgg

SEQ ID NO: 612703 - DNA, 75 bp, synthetic construct
  source 1..75: mol_type = other DNA
atgaattctattaccaaagaacgtatcgaattattcattaaaaatccgcttgaaaacgggcttacccgtggtgaa

SEQ ID NO: 612704 - DNA, 75 bp, synthetic construct
  source 1..75: mol_type = other DNA
atggtggagcgtctgatagtgatgagtgaagggcgtgttgtgatggatggtccgcgggacgaaatactgaaaaga

SEQ ID NO: 612705 - DNA, 75 bp, synthetic construct
  source 1..75: mol_type = other DNA
ctgttagggagtttatgaccagtgccacgttgctggcttttgtggatttgccttttatcctgcttttcatcggtg

SEQ ID NO: 612706 - DNA, 75 bp, synthetic construct
  source 1..75: mol_type = other DNA
tgacctgtgaaaccgtttatgtggtggctgaagttgatgagcaggccatgaaagaaggcgtgccccagtttgtga

SEQ ID NO: 612707 - DNA, 75 bp, synthetic construct
  source 1..75: mol_type = other DNA
caacggctatgctgaccagatcacttccgtattgaaagcggctggcgtagaaactgaagtcttcttcgaagttga

SEQ ID NO: 612708 - DNA, 75 bp, synthetic construct
  source 1..75: mol_type = other DNA
cgaaaatgggtgtgaaagcgaaaatgatcgccgtcactaccacttccggtactggttctgaagtaactccatttg

SEQ ID NO: 612709 - DNA, 75 bp, synthetic construct
  source 1..75: mol_type = other DNA
atgaaaaactgtccccaacgctggcaatgtaccgtgcgaaagatttcgaagacgcagtagagaaagcagagaaac

SEQ ID NO: 612710 - DNA, 75 bp, synthetic construct
  source 1..75: mol_type = other DNA
taaagatgcaaccaacaaagctgcagatattgttctgcaggctgctatcgctgctggtgcgccgaaagacctgat

SEQ ID NO: 612711 - DNA, 75 bp, synthetic construct
  source 1..75: mol_type = other DNA
gatcgccgtcaccaccacttccggtacgggttctgaagtgactccgtttgcggttgtaaccgacgatgcaacagg

SEQ ID NO: 612712 - DNA, 75 bp, synthetic construct
  source 1..75: mol_type = other DNA
gctgaaaaactggttgcaatgggcggtatcggtcacacctcttgcctgtacacagaccaggacaaccagccagag

SEQ ID NO: 612713 - DNA, 75 bp, synthetic construct
  source 1..75: mol_type = other DNA
atgaagaacgtcaaaaacacggaaaatcgtatagccgcgatgctgaaagcaaaaggatggactcaagctcaactg

SEQ ID NO: 612714 - DNA, 75 bp, synthetic construct
  source 1..75: mol_type = other DNA
tcgcaagagaaacaccagacaagaacagatagcgtcgtgtttaatgtccttgatgttgagtttagttgcggtgat

SEQ ID NO: 612715 - DNA, 75 bp, synthetic construct
  source 1..75: mol_type = other DNA
gaggaagcccgccagcttggcgttgcaacggtgattgccggcggtggcgatggcactattaatgaagtctccacg

SEQ ID NO: 612716 - DNA, 75 bp, synthetic construct
  source 1..75: mol_type = other DNA
acgttatcctgaaaaacggtgcgctgaacgcagctatcgttggtcagccagcctataaaattgctgaactggcag

SEQ ID NO: 612717 - DNA, 75 bp, synthetic construct
  source 1..75: mol_type = other DNA
tcttccgcgccgccgctctggctgctgcagatgctcgaatcccactcgcgaaaatggccgttgccgaatccggca

SEQ ID NO: 612718 - DNA, 75 bp, synthetic construct
  source 1..75: mol_type = other DNA
tcagctgaaaaacaccatacaagagaagacagcgttgtgttcaatgtactggatgttgaattcagctgcggcgac

SEQ ID NO: 612719 - DNA, 75 bp, synthetic construct
  source 1..75: mol_type = other DNA
acaaattacccttgacggggttgctatgcagcaactggatccctgttttgttcgggataaggttttcctgcttga

SEQ ID NO: 612720 - DNA, 75 bp, synthetic construct
  source 1..75: mol_type = other DNA
ttcttgctttgcttactccattttcatcaatggcaaatgtaagcaaatggtcaaccggcgagactcatggtgttc

SEQ ID NO: 612721 - DNA, 75 bp, synthetic construct
  source 1..75: mol_type = other DNA
ttcagcgcattaatacccttgtgaagcgcgaccttctcaatgtggaggaggttgtcgctgcaaccggattcgacc

SEQ ID NO: 612722 - DNA, 75 bp, synthetic construct
  source 1..75: mol_type = other DNA
atgacagttctgagcctgaccgatatccagcgcatcaatacccttgttaagcgcgatcttctcaatgtggaagaa

SEQ ID NO: 612723 - DNA, 75 bp, synthetic construct
  source 1..75: mol_type = other DNA
tttaaaggaattgcttgtgtttcagggaaagctgaaataaagcaaaatgatggaaatatattaatggcatttatt

SEQ ID NO: 612724 - DNA, 75 bp, synthetic construct
  source 1..75: mol_type = other DNA
ggtttatttcaacaaatggtcaaaaagttatctataaaaaacatcagttacgaaagattgatatgcgtccagcga

SEQ ID NO: 612725 - DNA, 75 bp, synthetic construct
  source 1..75: mol_type = other DNA
gtgactaattttaaatcagacttaaatctaataagaaaagaatggtataatgcattttattcaggtaatactgaa

SEQ ID NO: 612726 - DNA, 75 bp, synthetic construct
  source 1..75: mol_type = other DNA
agaaacctttatgtatgcgcgggcaatgggctggaataatgtctctgtttacgacggtggttggtacgaatggag

SEQ ID NO: 612727 - DNA, 75 bp, synthetic construct
  source 1..75: mol_type = other DNA
ggcctgctgcatcgccaggatgcatcgctggtcagcattcgctcctggccggaatttatcggcactaccagtggc

SEQ ID NO: 612728 - DNA, 75 bp, synthetic construct
  source 1..75: mol_type = other DNA
ttagcagcggtattgagtgaaaaacggcttttacagcaagtcatcgtgctggattcgctgggctacagccgctgg

SEQ ID NO: 612729 - DNA, 75 bp, synthetic construct
  source 1..75: mol_type = other DNA
atcaagttgaaaaaatgatagatattggaagtgcttctaactatatgtatgtacatgtagcttatttccttgcac

SEQ ID NO: 612730 - DNA, 75 bp, synthetic construct
  source 1..75: mol_type = other DNA
cgttaaccgctgcttaaagagccgctggccgtatggtgacattctggaaaatgttaatgcgaaatggggagccga

SEQ ID NO: 612731 - DNA, 75 bp, synthetic construct
  source 1..75: mol_type = other DNA
cccgtctgcaaaaactgccgcactttgagcagctggtttatccgcaatggctgcatgacctgcaacaaggaaaag

SEQ ID NO: 612732 - DNA, 75 bp, synthetic construct
  source 1..75: mol_type = other DNA
actttgataactcaacttgtcagttagtttttctgaaaaaagaagttatcaagctattaccgcacttcgctgcag

SEQ ID NO: 612733 - DNA, 75 bp, synthetic construct
  source 1..75: mol_type = other DNA
tcgggtaaaaaataccagtaatgtcataatcagcttttccacagcaattcagcaaattaatactgttctgctggt

SEQ ID NO: 612734 - DNA, 75 bp, synthetic construct
  source 1..75: mol_type = other DNA
gttacggcttaatattgcgctggatgatgacgggaaatccttctgggtactgcgcatgaaggtgcgcgaccgaat

SEQ ID NO: 612735 - DNA, 75 bp, synthetic construct
  source 1..75: mol_type = other DNA
atgacttcatcagtaaccgttccggccgtctacgtgggcacatatcaccagtacaacggcggcagtatttttggc

SEQ ID NO: 612736 - DNA, 75 bp, synthetic construct
  source 1..75: mol_type = other DNA
cgtaccttattcacagtgatgacccacataaccgtatcaccatgggggcactgattgcagccgttattctttccg

SEQ ID NO: 612737 - DNA, 75 bp, synthetic construct
  source 1..75: mol_type = other DNA
tgggaaacgttatggatgctgagtatcggggtgattacagcaattctgtttgagtgtgctgcaaagttaatccgg

SEQ ID NO: 612738 - DNA, 75 bp, synthetic construct
  source 1..75: mol_type = other DNA
tatttcatcaagcagcgtgaagcagaatacaaagactggaccatcgagcagatcacccgcgaaacctacaaatat

SEQ ID NO: 612739 - DNA, 75 bp, synthetic construct
  source 1..75: mol_type = other DNA
acttatcgcagtaaagtcaaagaccaaaattactattctgttgcagtcaatgcaggttattacgtaacacctaac

SEQ ID NO: 612740 - DNA, 75 bp, synthetic construct
  source 1..75: mol_type = other DNA
acgggctggagcgtaatacgaataaacgttttgcgcagcttaaagaggatatagacaaaaacagaaaacgtgcag

SEQ ID NO: 612741 - DNA, 75 bp, synthetic construct
  source 1..75: mol_type = other DNA
tttaacttggcagccctgcttgatttacagggtttggagaaagtgctaatccgccaggaggatggtaaagctaat

SEQ ID NO: 612742 - DNA, 75 bp, synthetic construct
  source 1..75: mol_type = other DNA
cactgaaaacgcttctcgacctgctaccagaacgcgcactacaaggaaaagtggtgttgccgctggcgacaggtg

SEQ ID NO: 612743 - DNA, 75 bp, synthetic construct
  source 1..75: mol_type = other DNA
gattttgtcgccgcctacaaacaggctgaagaagagggcagggaggctgctttcatcgcctgggcggagtatacc

SEQ ID NO: 612744 - DNA, 75 bp, synthetic construct
  source 1..75: mol_type = other DNA
gataacagaaaagacatggatgcgataatggcaagcccgctgtggcaggctgcccgcgttctggacaaaaccatt

SEQ ID NO: 612745 - DNA, 75 bp, synthetic construct
  source 1..75: mol_type = other DNA
ctcatatcgctgaaaaaggtaatcacaccacattgaataaagatgaagtacaatcaatgaatggtgtgctcaaaa

SEQ ID NO: 612746 - DNA, 75 bp, synthetic construct
  source 1..75: mol_type = other DNA
cgccctgattaagcagcttacaggtaaggcaggtagctggctgattgctgcatcgggtgatgatgcaatatgcgt

SEQ ID NO: 612747 - DNA, 75 bp, synthetic construct
  source 1..75: mol_type = other DNA
ttgattttctggcgcacgacgatattgatttatatacagtgcctgcaatcttggttccggtatggaaagaatgtt

SEQ ID NO: 612748 - DNA, 75 bp, synthetic construct
  source 1..75: mol_type = other DNA
gattgcgccaatgctggcgatgagtgatgcccgccgcgcggcgattatccgccgctggctggcagggcagaatgc

SEQ ID NO: 612749 - DNA, 75 bp, synthetic construct
  source 1..75: mol_type = other DNA
ttctttcatcacgccagattctggtggcctttagcggcggccttgattcaactgttctgctgcatcagctggtgc

SEQ ID NO: 612750 - DNA, 75 bp, synthetic construct
  source 1..75: mol_type = other DNA
gtatttgtgacgcaagaaggtgtggctgaaggtgagaatggcgtaagttttgtctggcagaaaacgcttagttaa

SEQ ID NO: 612751 - DNA, 75 bp, synthetic construct
  source 1..75: mol_type = other DNA
tgcgctggcaggaactttccgtggcgcaggttcgcgtggaaggcgatatcaaatccaccgaccagattgcgggta

SEQ ID NO: 612752 - DNA, 75 bp, synthetic construct
  source 1..75: mol_type = other DNA
aaatccaccgatcagattgcgggtaaactcgatgtgcgcgttgagcaaatttcgcagccggatgtgaatatcaac

SEQ ID NO: 612753 - DNA, 75 bp, synthetic construct
  source 1..75: mol_type = other DNA
tgccaacttacgtctgggtggtgatgtgcaaagcccgcagttgtttgggcagctacaggttacgggtgtggatat

SEQ ID NO: 612754 - DNA, 75 bp, synthetic construct
  source 1..75: mol_type = other DNA
tggcggaagtggcgcaggaagaagtggtcgaaccgaagattgaaaatccgcagccggatgaaaaaccgctcggcg

SEQ ID NO: 612755 - DNA, 75 bp, synthetic construct
  source 1..75: mol_type = other DNA
gaatatccgtaactttaacctcgcgatggtaaaccccatctttacccgtggggaaaaagcagcagggacggtgaa

SEQ ID NO: 612756 - DNA, 75 bp, synthetic construct
  source 1..75: mol_type = other DNA
ccgactggagccagattgaaaactggcgggcgagggtaaccgcgaaaggcagtaaggtacggatcaccgtgccgc

SEQ ID NO: 612757 - DNA, 75 bp, synthetic construct
  source 1..75: mol_type = other DNA
tattgtcgggcgcaacggtgggcgtaagttaaagaaaatctggcaggaactgggcgtgccgccgtggttgcgcga

SEQ ID NO: 612758 - DNA, 75 bp, synthetic construct
  source 1..75: mol_type = other DNA
aaggatggataatttaatttacgggacctgtaacaaaactgatgcggctaatgaccctccagatgatgacacaca

SEQ ID NO: 612759 - DNA, 75 bp, synthetic construct
  source 1..75: mol_type = other DNA
atgatcgattacgattatatgactaaccgtccctctcctgttgtacctaccaatgccaaggcagagattcaagct

SEQ ID NO: 612760 - DNA, 75 bp, synthetic construct
  source 1..75: mol_type = other DNA
tatttaattgcggattcgtttgagaattcaggggcttttgaaagtgatggtggtgggggaaggattcgaaccttc

SEQ ID NO: 612761 - DNA, 75 bp, synthetic construct
  source 1..75: mol_type = other DNA
ttgccattgcagagcagccgcatggatttattgattatcgtcatgaatatctagatgatactcgcacccacgcgg

SEQ ID NO: 612762 - DNA, 75 bp, synthetic construct
  source 1..75: mol_type = other DNA
attgtggcctcaaccttcgcccgccaccaacttaccgactacgatcgacttttggcgatctccggtatggctcgc

SEQ ID NO: 612763 - DNA, 75 bp, synthetic construct
  source 1..75: mol_type = other DNA
ggagttattgcccaacgccgatatgattattattcctggctggcgcggaatagatgccaaagtgccggagatgct

SEQ ID NO: 612764 - DNA, 75 bp, synthetic construct
  source 1..75: mol_type = other DNA
tatgagtcggcttatttccagtggttgtggctggaagacgcccggcgtggcggcattattccgcgtgatgccgat

SEQ ID NO: 612765 - DNA, 75 bp, synthetic construct
  source 1..75: mol_type = other DNA
gcagtagagatgcaatatctgccgggtcagggtctgcagtcttatcagttaatgaccaaaatctggtctaacgac

SEQ ID NO: 612766 - DNA, 75 bp, synthetic construct
  source 1..75: mol_type = other DNA
gcagtagaaatgcaatatctgccaggtcagggtctgcaatcttaccagttaatgactaaaatctggtcaaatgac

SEQ ID NO: 612767 - DNA, 75 bp, synthetic construct
  source 1..75: mol_type = other DNA
gcgctgcgcgcttcgccctacgggtcgttgcctgcggcaacgctctctcgctggcgctcgagtcgaaccttggtc

SEQ ID NO: 612768 - DNA, 75 bp, synthetic construct
  source 1..75: mol_type = other DNA
gaagcttctcatccttccccgcatgggcagaatatttaattgcggattcgcttgagagttcagggacttttgaaa

SEQ ID NO: 612769 - DNA, 75 bp, synthetic construct
  source 1..75: mol_type = other DNA
gagtaccgtgctgtacttgcaggactgcgcccagcaggcagggcaggagtcgcggtttatctacattgaagatct

SEQ ID NO: 612770 - DNA, 75 bp, synthetic construct
  source 1..75: mol_type = other DNA
atcaacagcaacctgattgttcacgttggcaacaatgtgcgcattgatgccttcggcctgaaagcgcgactgacg

SEQ ID NO: 612771 - DNA, 75 bp, synthetic construct
  source 1..75: mol_type = other DNA
gtgcaatacttgcagaggttattggaacaaccttgatgaagttttcagaaggctttacacggttatggccctctg

SEQ ID NO: 612772 - DNA, 75 bp, synthetic construct
  source 1..75: mol_type = other DNA
ctggcttatatacctacagggattgcttatgctatctggtcaggagtcggtatgagctggccccctgaaatacca

SEQ ID NO: 612773 - DNA, 75 bp, synthetic construct
  source 1..75: mol_type = other DNA
gcaattattgcgctgatatatgcagcatcacattcattaccggtcaatgccttccctgactatcttgtaataagt

SEQ ID NO: 612774 - DNA, 75 bp, synthetic construct
  source 1..75: mol_type = other DNA
ggttctgtgggcgccgattcgctttggcgctaccagtatcaacttttccaccgacaaacccttcccctccccgcc

SEQ ID NO: 612775 - DNA, 75 bp, synthetic construct
  source 1..75: mol_type = other DNA
tgacctgaatgaccgtcacgcgccccctgaagttgtgcgtgagctggcacgaattgcgctggcatcgctgggagc

SEQ ID NO: 612776 - DNA, 75 bp, synthetic construct
  source 1..75: mol_type = other DNA
tttacgactggttctctcgtgggatacggacgataccgacctcgaccttcacgttgttacgcccgatggcgaaca

SEQ ID NO: 612777 - DNA, 75 bp, synthetic construct
  source 1..75: mol_type = other DNA
cgatccggcggtgcgctatgtggtgctcgacgccctcagcgaacaggatctgctcacccagggcgtggcgctgcg

SEQ ID NO: 612778 - DNA, 75 bp, synthetic construct
  source 1..75: mol_type = other DNA
ggcttttgcgcagcgtcacaacatggcgaagctggccgagcgtgcgggtatgaacgttcaaacgttacgtaacaa

SEQ ID NO: 612779 - DNA, 75 bp, synthetic construct
  source 1..75: mol_type = other DNA
gtgagcattcgttcgtggccagaatttatcggtacgaccagcggttacagctatattaaaccaaaaggtgaaata

SEQ ID NO: 612780 - DNA, 75 bp, synthetic construct
  source 1..75: mol_type = other DNA
cgctggcaatggcattagggctggcttgcgcttcttcgtgggccgctgaactggcgaagcctcttacacttgacc

SEQ ID NO: 612781 - DNA, 75 bp, synthetic construct
  source 1..75: mol_type = other DNA
ttctgccacaaacacccggccaccggcgtgatggtgggcaaaccgggcggcatcgaggtctggccggtacaggtc

SEQ ID NO: 612782 - DNA, 75 bp, synthetic construct
  source 1..75: mol_type = other DNA
ttgagggacgctaatgccgcgactcagcccgtcaatcaggcccgttgggcgcgttttcgccataaccgtcgcggc

SEQ ID NO: 612783 - DNA, 75 bp, synthetic construct
  source 1..75: mol_type = other DNA
cttggtgatgggtatgaacagcgccaggcgaaagggatcaacacattgcttgatagctacaccctggtttttaaa

SEQ ID NO: 612784 - DNA, 75 bp, synthetic construct
  source 1..75: mol_type = other DNA
agcttgatcagatgggcggcgagcagctacgtcgcaaaatcgaaagcatgggcgtgcgcgttcacaccagcaaaa

SEQ ID NO: 612785 - DNA, 75 bp, synthetic construct
  source 1..75: mol_type = other DNA
cagcgcctggcgatgtttggcgcacagaaagacgatctgccggagatctggcgtcagctgattgaagccggcttc

SEQ ID NO: 612786 - DNA, 75 bp, synthetic construct
  source 1..75: mol_type = other DNA
gcggattcagggcgagccggtttccgggcagctaaacctggcgggaagctttgatcgtaaagaagaacgctggaa

SEQ ID NO: 612787 - DNA, 75 bp, synthetic construct
  source 1..75: mol_type = other DNA
acggtgtcggtgatggacttcacctccggcctgaactggcaggagaaaaccctgaccctgaaaccgacatcgctg

SEQ ID NO: 612788 - DNA, 75 bp, synthetic construct
  source 1..75: mol_type = other DNA
cacaaagaagctacagcgtaaacagtgagcctaacgtgtctgtcattaaactgggtgatgggtatgaacagcgcc

SEQ ID NO: 612789 - DNA, 75 bp, synthetic construct
  source 1..75: mol_type = other DNA
tttgccgacggcagcgaactggaagtcgactttatcgtcttctctaccggtatccgtccgcgcgataagctggca

SEQ ID NO: 612790 - DNA, 75 bp, synthetic construct
  source 1..75: mol_type = other DNA
gtcattctgtacgggcgtgacgtatacgctgcagcgcgtgtggcacaaattatgctctacgctggcgtgaaagat

SEQ ID NO: 612791 - DNA, 75 bp, synthetic construct
  source 1..75: mol_type = other DNA
cgttgagcgcggaacgccaccgaaagtgaaaacggaaccggatttcggcgtgaagatcccggcacaaccgcaact

SEQ ID NO: 612792 - DNA, 75 bp, synthetic construct
  source 1..75: mol_type = other DNA
ctgccacaccgttgcggcgctgaaagccgaaaccaaagccggtactggctgcggtggctgtatcccgctggtcac

SEQ ID NO: 612793 - DNA, 75 bp, synthetic construct
  source 1..75: mol_type = other DNA
ggctggaacctgtatgtttgcggtaacggcggcatgaaaccgcgtcatgcggatctgctggcggcggatatcgat

SEQ ID NO: 612794 - DNA, 75 bp, synthetic construct
  source 1..75: mol_type = other DNA
cgcgtgggggtatcgtcattaatgattcctgccagacttccgatccggatatctacgccatcggtgaatgcgcaa

SEQ ID NO: 612795 - DNA, 75 bp, synthetic construct
  source 1..75: mol_type = other DNA
cggcctgattaaaacccgcagcacggggcgtcacgaccttgctgtgggggaaatctcaaagggacttaaaagcct

SEQ ID NO: 612796 - DNA, 75 bp, synthetic construct
  source 1..75: mol_type = other DNA
ccccatgaactcggacctgaaaaattccggagaaatagaggcggatgcagacatcattctgatgctttacaggga

SEQ ID NO: 612797 - DNA, 75 bp, synthetic construct
  source 1..75: mol_type = other DNA
agtccaaagagagtttcaaaggagtaccgttgtcaaaggcacacgaatatgaacacgggcaacacgatgaatgct

SEQ ID NO: 612798 - DNA, 75 bp, synthetic construct
  source 1..75: mol_type = other DNA
ggcgcgtttctcacaaggggtggggcggatgaccgggcgcaatatctggatggtggaccaggcgaacctgaccat

SEQ ID NO: 612799 - DNA, 75 bp, synthetic construct
  source 1..75: mol_type = other DNA
gcgttgaatgtctttgggcgggtctatctggcgcatgaagggatcaacgcacaaatcagcgtaccggcgagcaac

SEQ ID NO: 612800 - DNA, 75 bp, synthetic construct
  source 1..75: mol_type = other DNA
acgttgatgaccggtattgatgaactggacgcaaaaacaggcggcatggagcccggcgacctggtatttattgct

SEQ ID NO: 612801 - DNA, 75 bp, synthetic construct
  source 1..75: mol_type = other DNA
cgcgacgtcaaccagttaacgccgcgcgagcgcgatattctgaaactgattgctcagggcttaccgaataagatg

SEQ ID NO: 612802 - DNA, 75 bp, synthetic construct
  source 1..75: mol_type = other DNA
gtgatctcgcgcacattaatgaaggcataaaaaaaagccggcatcatgccggcccaaaaaatataaacaagacga

SEQ ID NO: 612803 - DNA, 75 bp, synthetic construct
  source 1..75: mol_type = other DNA
gtgatctcgcgcacattaatgaaggcataaaaaaagccggcatcatgccggccaaaaaaaatataaacaagacga

SEQ ID NO: 612804 - DNA, 75 bp, synthetic construct
  source 1..75: mol_type = other DNA
agaaactggtgtctgagtacaacgcgacgcagaaaatgatcaaccgcatggagcgtcgttatccgaaagcaatgc

SEQ ID NO: 612805 - DNA, 75 bp, synthetic construct
  source 1..75: mol_type = other DNA
ggtaaaatcctcaacgtcgagaaagcgcgcttcgataagatgctctcttctcaggaagtggcgacgcttatcacc

SEQ ID NO: 612806 - DNA, 75 bp, synthetic construct
  source 1..75: mol_type = other DNA
gtcgcgctcgaactggcccagcgcgccgaacacgtggaagatgagccgcccgcctggcgtggtggtgtcgatggg

SEQ ID NO: 612807 - DNA, 75 bp, synthetic construct
  source 1..75: mol_type = other DNA
aaatccaggacgttgatgaccggtattgatgaactggacgcaaaaacaggcggcatggaacccggtgacctggta

SEQ ID NO: 612808 - DNA, 75 bp, synthetic construct
  source 1..75: mol_type = other DNA
agtaaactggaaaaataatcccgacggtacgcgcagtccctatgaaataaatgtcacctatatggatgcgttaag

SEQ ID NO: 612809 - DNA, 75 bp, synthetic construct
  source 1..75: mol_type = other DNA
agtaaactggaaaaataatcccgacggtacgcgcagtccgtatgaaataaatgtgacctatatggatgcgttaag

SEQ ID NO: 612810 - DNA, 75 bp, synthetic construct
  source 1..75: mol_type = other DNA
cgcagaacatgatggcctcattgtcgacggaaaagggcgttattcagccggtacatattgatgatgtgcttccgg

SEQ ID NO: 612811 - DNA, 75 bp, synthetic construct
  source 1..75: mol_type = other DNA
cgatgaagaacgttgcgccaggtttatccttgcccatgcgattttgttaagtttccccggtgtgccagcgatata

SEQ ID NO: 612812 - DNA, 75 bp, synthetic construct
  source 1..75: mol_type = other DNA
tgtttaatgtcagtaaaaatattcagcatgtaaatattactaatctgcatggtcgggatctgattagtgaagttg

SEQ ID NO: 612813 - DNA, 75 bp, synthetic construct
  source 1..75: mol_type = other DNA
tcgcctctcacgatggcatcgggctgaacccactgcgtggcttgttacccgaaagcgaaatattagcgctggtcg

SEQ ID NO: 612814 - DNA, 75 bp, synthetic construct
  source 1..75: mol_type = other DNA
ccgggcgtaaaacctgggtgaagtcatctctggaacactatgttgcagcactgcgacgcaatgccgcactgcgtg

SEQ ID NO: 612815 - DNA, 75 bp, synthetic construct
  source 1..75: mol_type = other DNA
ttatcggcgtttttataacggacattttctgcctgtggatcaggaaagcgcacagattctttccaccccaatgca

SEQ ID NO: 612816 - DNA, 75 bp, synthetic construct
  source 1..75: mol_type = other DNA
aactggcgctggacatcatcgacaaggtgactgagcaggggcatggcgtgcttctgttcaccatggagatggcga

SEQ ID NO: 612817 - DNA, 75 bp, synthetic construct
  source 1..75: mol_type = other DNA
acgtatggtgtctgctgccggtggaatgccggtatcccgtcttaagtctgttgcccgttttgaagatgaagactg

SEQ ID NO: 612818 - DNA, 75 bp, synthetic construct
  source 1..75: mol_type = other DNA
ggcgtaacgatgacctggaaggcgctgtcatcggtgcgttctttctgcgtggggcagatcctgaagtgatggata

SEQ ID NO: 612819 - DNA, 75 bp, synthetic construct
  source 1..75: mol_type = other DNA
atgaccagccagaacaccccggcatggcgtaacgatgacctggaaggtgcggtgattggcgcgttttttctgcgt

SEQ ID NO: 612820 - DNA, 75 bp, synthetic construct
  source 1..75: mol_type = other DNA
atagaaaagaacttgccagaaatgtgatttatagtgattatggagtacagcaccccgactttaataggctttcga

SEQ ID NO: 612821 - DNA, 75 bp, synthetic construct
  source 1..75: mol_type = other DNA
ggaaacgaaggaaactgccggtaaatccagtgatgtcggtagggagatttctcgcttacgccaagaccttgagag

SEQ ID NO: 612822 - DNA, 75 bp, synthetic construct
  source 1..75: mol_type = other DNA
cacgttctcacagacaaaaacacccgtgagatcgggatagattcgttgtctgccgatgtgaagatggtgtctcgt

SEQ ID NO: 612823 - DNA, 75 bp, synthetic construct
  source 1..75: mol_type = other DNA
ctggcggtgctgctgggcggcatggttggcgcggggattgtgctggggcgtaatgctctacgcaattacaacgcg

SEQ ID NO: 612824 - DNA, 75 bp, synthetic construct
  source 1..75: mol_type = other DNA
cagcatcatctcaggtactttgatcacaggtttggatgcacctactcacgagtctgcaagacgtgaaccttttcc

SEQ ID NO: 612825 - DNA, 75 bp, synthetic construct
  source 1..75: mol_type = other DNA
taatagaagtcgatgctggccgtcaggtggacatcattgtgacaaagggaaccaatctacaaattcgttccaccg

SEQ ID NO: 612826 - DNA, 75 bp, synthetic construct
  source 1..75: mol_type = other DNA
ttcaaaaagaagccatattgcctaatcgtttccgtgcggatgtcagagagtgtttcctgattgtttcgggctatg

SEQ ID NO: 612827 - DNA, 75 bp, synthetic construct
  source 1..75: mol_type = other DNA
caggacacgttgttcctgttaggtagcgaagcgctggagtcgatgatcaagcatgaagcgactcgtccgctggtg

SEQ ID NO: 612828 - DNA, 75 bp, synthetic construct
  source 1..75: mol_type = other DNA
ctggcagtgctactgggtggcatggttggcgcggggattgtgctggggcgtaacgctctacgcaattacaacgcg

SEQ ID NO: 612829 - DNA, 75 bp, synthetic construct
  source 1..75: mol_type = other DNA
agccagaaaaacttaccatcgaaccttctgttaagaaccagcaattaccattgactgtttcttatgttgggcaaa

SEQ ID NO: 612830 - DNA, 75 bp, synthetic construct
  source 1..75: mol_type = other DNA
gcggtgctgctgggtggcatagtcggcgctggtattgtgctggggcgtaacgcgctgcgtaattacaacgcgaag

SEQ ID NO: 612831 - DNA, 75 bp, synthetic construct
  source 1..75: mol_type = other DNA
aaaaacttgcaggactctttaagaacccaggaagtagtcgcgcaggagcagaaagatctgcgtatccgtcagatt

SEQ ID NO: 612832 - DNA, 75 bp, synthetic construct
  source 1..75: mol_type = other DNA
tgatcttgatattcatgcttaccgctatgtaatgaaaccgacgttacctattcgtcgcgatagcccgaaaaaggc

SEQ ID NO: 612833 - DNA, 75 bp, synthetic construct
  source 1..75: mol_type = other DNA
atggaagaattaagaatatttctcaattctctttcgtcagatgaacagcgtatgtttgcatgcgagtgtggtacc

SEQ ID NO: 612834 - DNA, 75 bp, synthetic construct
  source 1..75: mol_type = other DNA
ctctatgagaaaggagggcatggttttagtattcagtgggccacagatcttcctgttggaggatggataaaactg

SEQ ID NO: 612835 - DNA, 75 bp, synthetic construct
  source 1..75: mol_type = other DNA
atttatttcagtcaggaggacatgggttcggtgtgcaatgggccagtgaattgccagttcatgtatggcctgagt

SEQ ID NO: 612836 - DNA, 75 bp, synthetic construct
  source 1..75: mol_type = other DNA
aaagaaatgcggaacaatgggcgctgcaaaaaaacagaattggtgtactggggttttcagccggggggcatattg

SEQ ID NO: 612837 - DNA, 75 bp, synthetic construct
  source 1..75: mol_type = other DNA
tctggggatttctgcgtggcttctgcaaatggtgattcagaggcaacgttcaagaagtatgagaaggatgcaggg

SEQ ID NO: 612838 - DNA, 75 bp, synthetic construct
  source 1..75: mol_type = other DNA
atgacttacatgaaattaacggcggctaaacacattgttttttatatatttatttgtaatccagttttggaaaaa

SEQ ID NO: 612839 - DNA, 75 bp, synthetic construct
  source 1..75: mol_type = other DNA
ttttctgctggggggcatatcgcctcaacgggtggggaatcagattcgtgatttcaaacgttcttctgacagtaa

SEQ ID NO: 612840 - DNA, 75 bp, synthetic construct
  source 1..75: mol_type = other DNA
gcaccggcccgatggggctgctggcgattgattatgcgttgcatggaccggttaacccgtcgctgctcgtcatta

SEQ ID NO: 612841 - DNA, 75 bp, synthetic construct
  source 1..75: mol_type = other DNA
gaaccgcaaacactgattcattatctcaatgccaccgatgcagcatttgatacgttaatggcgctgagtggcggt

SEQ ID NO: 612842 - DNA, 75 bp, synthetic construct
  source 1..75: mol_type = other DNA
tcactgacagcctgtgcctctcttcctggaaagaggccaatctgggtgaaaaccataaaaaagtacccgacgatg

SEQ ID NO: 612843 - DNA, 75 bp, synthetic construct
  source 1..75: mol_type = other DNA
gttctgaatctggcagacattgttgcggaatacgcccgtattcaaaaggaagaaacatcaaaaatattgtatcaa

SEQ ID NO: 612844 - DNA, 75 bp, synthetic construct
  source 1..75: mol_type = other DNA
tactccagactccagaagacagaaatacggatgtatacctgactaccatacagaacaatgtatttagtcgtcagg

SEQ ID NO: 612845 - DNA, 75 bp, synthetic construct
  source 1..75: mol_type = other DNA
tgatttagtggatcgcgtagagtaccgccagagggtcgttaacagtttacacaagcttcctgctatccttgacga

SEQ ID NO: 612846 - DNA, 75 bp, synthetic construct
  source 1..75: mol_type = other DNA
aggcgatctggtctctaagccttatattgatatcacgctgaacatgatgaaagcgtttggtgttgagattgaaaa

SEQ ID NO: 612847 - DNA, 75 bp, synthetic construct
  source 1..75: mol_type = other DNA
ggcacgatgattctgattacgttctttaagccgtggcggctgcgttttgccaaagaacaacgtttacccctgttg

SEQ ID NO: 612848 - DNA, 75 bp, synthetic construct
  source 1..75: mol_type = other DNA
cggtctggttaccgatattaatattgctcgttgccatggcgtctattcagggtggggcctcattagcaaaatcac

SEQ ID NO: 612849 - DNA, 75 bp, synthetic construct
  source 1..75: mol_type = other DNA
gcgctggcgctcggtgccggtgcttgttgggctatctacatattaagtgggcaacgtgctggtgctgaacacggc

SEQ ID NO: 612850 - DNA, 75 bp, synthetic construct
  source 1..75: mol_type = other DNA
gtcgccccggatatcgtctgggacttccgcctgccgcgtgtgaaatcgatcagtgcttcaggccataaattcggt

SEQ ID NO: 612851 - DNA, 75 bp, synthetic construct
  source 1..75: mol_type = other DNA
ttccggccttcactctcggcggtgaagccaccgacatcgtggtgatgcgcattatgtgtcgtcgcggcttcgaaa

SEQ ID NO: 612852 - DNA, 75 bp, synthetic construct
  source 1..75: mol_type = other DNA
gcaccgttcgttgccccggatatcgtctgggacttccgcctgccgcgtgtgaaatcgatcagtgcttcaggccat

SEQ ID NO: 612853 - DNA, 75 bp, synthetic construct
  source 1..75: mol_type = other DNA
ggcaccgttcgtcgccccggatatcgtctgggacttccgcctgccgcgtgtgaaatcgatcagtgcttcaggcca

SEQ ID NO: 612854 - DNA, 75 bp, synthetic construct
  source 1..75: mol_type = other DNA
caccatcgtcagcaacgaatcagcggaaatcatccgcatgttcaataccgcgtttgatgcgctgggtgcgaaagc

SEQ ID NO: 612855 - DNA, 75 bp, synthetic construct
  source 1..75: mol_type = other DNA
ggaaaacggctggacctttgatgacagtttcccgggcgcaaccggcgatacactctatcaacacgaatttctgta

SEQ ID NO: 612856 - DNA, 75 bp, synthetic construct
  source 1..75: mol_type = other DNA
gggacactgattcttatcgctttctttaagccgtggcggctgcgttttgccaaagaacaacggttgccactgttg

SEQ ID NO: 612857 - DNA, 75 bp, synthetic construct
  source 1..75: mol_type = other DNA
cctgcgacggtggcaattggttcgttgattgcagcgttaattttcgtgccaattggagcgcttcaggctggtgaa

SEQ ID NO: 612858 - DNA, 75 bp, synthetic construct
  source 1..75: mol_type = other DNA
ttctgctgccgttgaatcaggatgtttctcatgttgatttaaccggttgtgcactggcgcttggtgcgggtgcct

SEQ ID NO: 612859 - DNA, 75 bp, synthetic construct
  source 1..75: mol_type = other DNA
aacaccatcggcgtggtgccgactttcggcgtgacctacaccggtaactatgagttcccacaaccgctgcacgat

SEQ ID NO: 612860 - DNA, 75 bp, synthetic construct
  source 1..75: mol_type = other DNA
gccttgatgctgctaaattgacagtccccattcaggcttatatttaccgaatgaacacccgactgaatagaaccg

SEQ ID NO: 612861 - DNA, 75 bp, synthetic construct
  source 1..75: mol_type = other DNA
cggacgcacgatatttatctcttcgatgagcgaattattaaaaaatatggcgctcaatggatatggtattgcctg

SEQ ID NO: 612862 - DNA, 75 bp, synthetic construct
  source 1..75: mol_type = other DNA
gccgacgcacaggggcaccctgtattcgatatcactcagccccaggttcctttgctcaactataccgccacatct

SEQ ID NO: 612863 - DNA, 75 bp, synthetic construct
  source 1..75: mol_type = other DNA
atgagcgtattgcatgaattactggcgggaagctggctggataattggttgatgatcattccgcttatgttcatc

SEQ ID NO: 612864 - DNA, 75 bp, synthetic construct
  source 1..75: mol_type = other DNA
ttatggccgggatcctgccgggtctgttgtgttctgctatgttgattgtaaccgtatggctggtggcgattcgtc

SEQ ID NO: 612865 - DNA, 75 bp, synthetic construct
  source 1..75: mol_type = other DNA
caaaaattctccaccattccaacttgtaaaactaacatccgacattaacaatattaaagaaatttattccaatga

SEQ ID NO: 612866 - DNA, 75 bp, synthetic construct
  source 1..75: mol_type = other DNA
ctgggctgcggctgggttatctggcgtgacgaagaagcgctgccgcaggaactggtgttcaacgttgactacctg

SEQ ID NO: 612867 - DNA, 75 bp, synthetic construct
  source 1..75: mol_type = other DNA
ggacgacgataatgtccataagttgatggatttatccattaacaaaaactggatcgacaaagaagaatatccgca

SEQ ID NO: 612868 - DNA, 75 bp, synthetic construct
  source 1..75: mol_type = other DNA
atgtcgcattccagattatcaatgatgaattatatcttgatggcaacgctcgtcagaacctggccactttctgcc

SEQ ID NO: 612869 - DNA, 75 bp, synthetic construct
  source 1..75: mol_type = other DNA
ttcgatcgcatgaccacccctttacaactaacggaaggaggcaagctctttcattcccagacccgcagtttattg

SEQ ID NO: 612870 - DNA, 75 bp, synthetic construct
  source 1..75: mol_type = other DNA
cattttgttgtataaaactgtttgaatctgagttgtatccggtatgtgctgctgatcaacagggaaaaccgattt

SEQ ID NO: 612871 - DNA, 75 bp, synthetic construct
  source 1..75: mol_type = other DNA
ggaaacgctgtctctggacactgcatctgcaaccgggaacggtctgtggatgaccctgtggctggcaattccggt

SEQ ID NO: 612872 - DNA, 75 bp, synthetic construct
  source 1..75: mol_type = other DNA
gaatcgctggcgcgactggaacagattttaggtcagcaccgttacctgaccggcaaccagctaaccgaagccgat

SEQ ID NO: 612873 - DNA, 75 bp, synthetic construct
  source 1..75: mol_type = other DNA
acctggccactttctgccagacctgggacgacgagaaggtccataaattgatggatttatcgataaagaaaaact

SEQ ID NO: 612874 - DNA, 75 bp, synthetic construct
  source 1..75: mol_type = other DNA
acctggccactttctgccagacctgggacgacgagaatgtccataaattgatggatttgtctataaagaaaaact

SEQ ID NO: 612875 - DNA, 75 bp, synthetic construct
  source 1..75: mol_type = other DNA
acctggccactttctgccagacctgggacgacgagaaagtccataaattgatggatttgtcgataaagaaaaact

SEQ ID NO: 612876 - DNA, 75 bp, synthetic construct
  source 1..75: mol_type = other DNA
gcacagtactatgaattcctgcgcctcggtcgtgaaggctatacaaaagtacagaacgcatcccaccgcacgttc

SEQ ID NO: 612877 - DNA, 75 bp, synthetic construct
  source 1..75: mol_type = other DNA
gcacagtactatgaattcctgcgcctcggtcgtgaaggctatacaaaagtacagaacgcatccaaacgcacgttc

SEQ ID NO: 612878 - DNA, 75 bp, synthetic construct
  source 1..75: mol_type = other DNA
acctggccactttctgccagacctgggacgacgagaaggtccataaattgatggatttgtcaataaagaaaaact

SEQ ID NO: 612879 - DNA, 75 bp, synthetic construct
  source 1..75: mol_type = other DNA
gacgtgtttggcgtaggccgtatgctgcatggcatggcagagcagggtagtgcgccgaaaatcttcagcaaaacg

SEQ ID NO: 612880 - DNA, 75 bp, synthetic construct
  source 1..75: mol_type = other DNA
ctttcggtatctatatgggcgtctggtttccgacggtgccgcactggatttgggtgctgagcgtagtgctgatta

SEQ ID NO: 612881 - DNA, 75 bp, synthetic construct
  source 1..75: mol_type = other DNA
ggcgctgaaatttaaagtaccgggtggggtagcaacgaccatcggcggtttgattttcctgctctttattatcgg

SEQ ID NO: 612882 - DNA, 75 bp, synthetic construct
  source 1..75: mol_type = other DNA
cataaattcgcccgctactgggatgtggagctgcgtgagatccctatgcgccccggtcagttgtttatggacccg

SEQ ID NO: 612883 - DNA, 75 bp, synthetic construct
  source 1..75: mol_type = other DNA
acgcatgattgaagcctgcgacgaaaataccatcggcgtggtgccgactttcggcgtgacctacaccggtaacta

SEQ ID NO: 612884 - DNA, 75 bp, synthetic construct
  source 1..75: mol_type = other DNA
ggggtggcaacgactatcgcggggctgattttcctggtctttatcatcggactgatcggttatcaccctgaaacg

SEQ ID NO: 612885 - DNA, 75 bp, synthetic construct
  source 1..75: mol_type = other DNA
gcacagtactatgaattcctgcgcctcggtcgtgaaggctatacaaaagtacagaacgcatccgagcgcacgttc

SEQ ID NO: 612886 - DNA, 75 bp, synthetic construct
  source 1..75: mol_type = other DNA
ggtccgaactactcgattcacgttttggcgcgaagccgatttcgactatcgcagaatcaaaacggtttccgctgc

SEQ ID NO: 612887 - DNA, 75 bp, synthetic construct
  source 1..75: mol_type = other DNA
gctccgaactactcgattcacgttttggcgcgaagccgatttcgactatcgcagaatcaaaacgctttccgctgc

SEQ ID NO: 612888 - DNA, 75 bp, synthetic construct
  source 1..75: mol_type = other DNA
gctccgaactactcgattcacgttttggcgccaagccgatttcgactatcgcagaatcaaaacggtttccgctgc

SEQ ID NO: 612889 - DNA, 75 bp, synthetic construct
  source 1..75: mol_type = other DNA
gtaaacatggttgccgatctgtggcatgcgcctgcaccgaaaaatggtcaggccgttggcaccaacaccattggc

SEQ ID NO: 612890 - DNA, 75 bp, synthetic construct
  source 1..75: mol_type = other DNA
atcccggcggtttgcttcaaactgaaagatggtgaagatccgggatacaccctgtatgacctctctgaacgtctg

SEQ ID NO: 612891 - DNA, 75 bp, synthetic construct
  source 1..75: mol_type = other DNA
atcgacatgcacatcgacgctgccagcggtggcttcctggcaccgttcgtcgccccggatatcgtctgggacttc

SEQ ID NO: 612892 - DNA, 75 bp, synthetic construct
  source 1..75: mol_type = other DNA
gcacagtactatgaattcctgcgcctcggtcgtgaaggctatacaaaagtacagaacgcgtccaagcgcacgttc

SEQ ID NO: 612893 - DNA, 75 bp, synthetic construct
  source 1..75: mol_type = other DNA
gcacagtactatgaattcctgcgcctcggtcgtgaaggctatacaaaagtacagaacgcctccaaccgcacgttc

SEQ ID NO: 612894 - DNA, 75 bp, synthetic construct
  source 1..75: mol_type = other DNA
gcacagtactatgaattcctgcgcctcggtcgtgaaggctatacaaaagtacagaacgcttcctagcgcacgttc

SEQ ID NO: 612895 - DNA, 75 bp, synthetic construct
  source 1..75: mol_type = other DNA
gttccgaactactcgattcacgttttggcgcgaagccgatttcgactatcgcagaatcaaaacgttttccgctgc

SEQ ID NO: 612896 - DNA, 75 bp, synthetic construct
  source 1..75: mol_type = other DNA
gatccgaactactcgattcacgttttggcgcgaagccgatttcgactatcgcagaatcaaaacgatttccgctgc

SEQ ID NO: 612897 - DNA, 75 bp, synthetic construct
  source 1..75: mol_type = other DNA
gatccgaactactcgattcacgttttggcgcaaagccgatttcgactatcgcagaatcaaaacggtttccgctgc

SEQ ID NO: 612898 - DNA, 75 bp, synthetic construct
  source 1..75: mol_type = other DNA
tcaccctgaccaggagcgcactcttcgccgcattctgcagcgccctgaaggtattatcacgctatcaggccccac

SEQ ID NO: 612899 - DNA, 75 bp, synthetic construct
  source 1..75: mol_type = other DNA
ggctgggtggactccattaaatcagcactgcgtcttgaccctgacgggatcctgaacggcgaaatccgtgaccac

SEQ ID NO: 612900 - DNA, 75 bp, synthetic construct
  source 1..75: mol_type = other DNA
gacagtcagcaaatcccgaccttcagcatgctgggctaccaccctgagcaggagcgcaccctgcgccgtattctg

SEQ ID NO: 612901 - DNA, 75 bp, synthetic construct
  source 1..75: mol_type = other DNA
atgcagtcacttgatccactcttcgtgcgtttatcccgttcaaaatttcgctcccgctttcgtttgggtgtgaaa

SEQ ID NO: 612902 - DNA, 75 bp, synthetic construct
  source 1..75: mol_type = other DNA
ttaagcgaggaacaacaacgttatatcgtggcggtaatctatcactggctggttgtacagatgaatcagccatga

SEQ ID NO: 612903 - DNA, 75 bp, synthetic construct
  source 1..75: mol_type = other DNA
tcaccctgaccaggagctcaccctgcgccgtattctgcagcgccctgaaggtattatcacgctctcaggaccaac

SEQ ID NO: 612904 - DNA, 75 bp, synthetic construct
  source 1..75: mol_type = other DNA
atccccgccggaagggcgtattcccggtgccattcagaccgccgtcatggataccgcgcagggctgggtggactc

SEQ ID NO: 612905 - DNA, 75 bp, synthetic construct
  source 1..75: mol_type = other DNA
gtcatcaagggaacacaatttgatcctggtgttccccaggacgcccgactggcggaaaagtttctgaaacttgcg

SEQ ID NO: 612906 - DNA, 75 bp, synthetic construct
  source 1..75: mol_type = other DNA
tgatagggcgctgggcgaaagaacgtgaagcgggtgaaggcttcggcgactttacggtgcgtgcgggcatcattc

SEQ ID NO: 612907 - DNA, 75 bp, synthetic construct
  source 1..75: mol_type = other DNA
tcatgaaggctgcccgcactgctggcgtggcgtgacaggacgaacggtgatcgcagaagtcatctccccggatgc

SEQ ID NO: 612908 - DNA, 75 bp, synthetic construct
  source 1..75: mol_type = other DNA
gcagaagtcatctccccggatgcgcgttttttccagttgtaccgggaaaagggtcgtattgaggctaaaacctac

SEQ ID NO: 612909 - DNA, 75 bp, synthetic construct
  source 1..75: mol_type = other DNA
ccggaccaggtgtatctgcgaaatcatgaaggctgctcacactgctggcgtggcgtgacggggcgaacggttatc

SEQ ID NO: 612910 - DNA, 75 bp, synthetic construct
  source 1..75: mol_type = other DNA
cgaagtgggtgaaggcttcggcgactttacggtgcgtgcggacatcattcgcccggtgctcgatccggcgcgcga

SEQ ID NO: 612911 - DNA, 75 bp, synthetic construct
  source 1..75: mol_type = other DNA
ctgctggtgggcggtgggctttccatcgaacacggcaacaagaaaacctacgcccgcacggcgagtgagtttggc

SEQ ID NO: 612912 - DNA, 75 bp, synthetic construct
  source 1..75: mol_type = other DNA
gatcgtaaaaatgccaaaaccaaatacacgctggagcgcgtgggggttgagacgtttaaagcggaagtggagcgt

SEQ ID NO: 612913 - DNA, 75 bp, synthetic construct
  source 1..75: mol_type = other DNA
gaaatcctggcgttgcttgatgaactgatagggcgctgggcgaaagagcgcgaagcgggtgaaggcttcggcgac

SEQ ID NO: 612914 - DNA, 75 bp, synthetic construct
  source 1..75: mol_type = other DNA
ggattatattgcacaaggcaaaaatattttatgtcgggaatgcggttacttttttcctgtgatatctgaacgatc

SEQ ID NO: 612915 - DNA, 75 bp, synthetic construct
  source 1..75: mol_type = other DNA
ctggcgcgcattttctacccgtgactattccatggctgtttgcaatcttaccgggagcaagaatattaacgatat

SEQ ID NO: 612916 - DNA, 75 bp, synthetic construct
  source 1..75: mol_type = other DNA
aatctttatcgtaatatcgttaatcattcatggcgaggcgtgattcaacagtgtcctgtttgcgggagcacatct

SEQ ID NO: 612917 - DNA, 75 bp, synthetic construct
  source 1..75: mol_type = other DNA
gctcgatcaggaaaaagtcgccaccaccgatgaagaaccgatcctcggtcagacttatttgccgcgtaagttcaa

SEQ ID NO: 612918 - DNA, 75 bp, synthetic construct
  source 1..75: mol_type = other DNA
aaaaccggcttgctggagatcgcgaagatccacaaaggtgatttccgcattacggcgaaccagaatctgatcatc

SEQ ID NO: 612919 - DNA, 75 bp, synthetic construct
  source 1..75: mol_type = other DNA
acatgaacttcgtggcgatcgccgaaaacggcaagctgatgggctttaacctgctggtgggcggtgggctttcca

SEQ ID NO: 612920 - DNA, 75 bp, synthetic construct
  source 1..75: mol_type = other DNA
agttaacgctgttgccaaaagattcaacgtttcgcgtatgactatttatcgctatgcaaatagcactaaagaggc

SEQ ID NO: 612921 - DNA, 75 bp, synthetic construct
  source 1..75: mol_type = other DNA
cgaagatcgagaagatcgccaaagagagcgggttaatgaatgccgtcacgccgcagcgtgaaaactcgatggcct

SEQ ID NO: 612922 - DNA, 75 bp, synthetic construct
  source 1..75: mol_type = other DNA
gaaatcctggcgtcgcttgatgaactgatagggtgctgggcgaaagagcgcgaagcgggtgaaggcttcggcgac

SEQ ID NO: 612923 - DNA, 75 bp, synthetic construct
  source 1..75: mol_type = other DNA
actgacgaagaaccgatcctcggtcagacctatctgccgcgtaaattcaaaaccacggtagtgatcccgccgcag

SEQ ID NO: 612924 - DNA, 75 bp, synthetic construct
  source 1..75: mol_type = other DNA
gtccgctgttgtggatttatggcgtcaccattaccaatacctttatgaccttctgggaaaaccagttgggctttg

SEQ ID NO: 612925 - DNA, 75 bp, synthetic construct
  source 1..75: mol_type = other DNA
caagcggctaacgtccaggcaccgcgtgagacaagcatcatcacgtttaataattcaatcaatccgtttaaataa

SEQ ID NO: 612926 - DNA, 75 bp, synthetic construct
  source 1..75: mol_type = other DNA
tagccaagcaacaaaatggtaaagaacaagtaggttattcaggatttgttacctctaacggggataagtcatgct

SEQ ID NO: 612927 - DNA, 75 bp, synthetic construct
  source 1..75: mol_type = other DNA
tttactctgtctccggcaaacatggcagaagcaaaagcgcagaacattccggtgctctcttacctggctaaccac

SEQ ID NO: 612928 - DNA, 75 bp, synthetic construct
  source 1..75: mol_type = other DNA
ctaaacgcgaagagtatgaaaaagattttggtcgcgactttaccgagcagaaatgttcccaaatcatctcccgcg

SEQ ID NO: 612929 - DNA, 75 bp, synthetic construct
  source 1..75: mol_type = other DNA
gctatcttcaaatctttcttcggtcactatctggggacgctggaaggcttgaatggcctgattctgaagttcggt

SEQ ID NO: 612930 - DNA, 75 bp, synthetic construct
  source 1..75: mol_type = other DNA
gcagatgccattactgggcagcggcaaacctgactttatcacgttgaaaagctgggtagacgaagcggaaaaaca

SEQ ID NO: 612931 - DNA, 75 bp, synthetic construct
  source 1..75: mol_type = other DNA
agcaaaggcgaggcgttggtgctctttaccacagacaatgaattgactcgcgataagctgcaacaatatgcccgc

SEQ ID NO: 612932 - DNA, 75 bp, synthetic construct
  source 1..75: mol_type = other DNA
tgttctcgctattattccaaccgctgtttggtctgctttctgacaaactcgggctgcgcaaatacctgctgtgga

SEQ ID NO: 612933 - DNA, 75 bp, synthetic construct
  source 1..75: mol_type = other DNA
aaaagacatagctaaacttgagatggaaaacgttactcaaggcgggagaataaaatattcaatcaccgatactgg

SEQ ID NO: 612934 - DNA, 75 bp, synthetic construct
  source 1..75: mol_type = other DNA
gtttgtcgggcgcattcttgaaaaatacagtgttgaaggggaacgcatcggcttaatgctgcccaatgcgggcat

SEQ ID NO: 612935 - DNA, 75 bp, synthetic construct
  source 1..75: mol_type = other DNA
attcccaaactggcggcggcgcgtccggggcagtcctggaatctcatcaacatgacccgcagtttcctgaatgcc

SEQ ID NO: 612936 - DNA, 75 bp, synthetic construct
  source 1..75: mol_type = other DNA
cgatgggtaaactgaacacccttagtatgatttttatcatgggttccacttgggtagttgcttacgccaacccaa

SEQ ID NO: 612937 - DNA, 75 bp, synthetic construct
  source 1..75: mol_type = other DNA
tatcgtggcccggatgctgattccctgttctcttaccgcggtctgttctggcatcgtccgatcctcgcggcggtg

SEQ ID NO: 612938 - DNA, 75 bp, synthetic construct
  source 1..75: mol_type = other DNA
tattgggcttaacgcggcgctggtttcgctctggtttgtcggccaggcgggcgctatggacgttacgccgctgat

SEQ ID NO: 612939 - DNA, 75 bp, synthetic construct
  source 1..75: mol_type = other DNA
acacgctggagcgcgtgggtgttgagacatttaaagcggaagtggaacgtcgcgcggggatcaaattcgaaccga

SEQ ID NO: 612940 - DNA, 75 bp, synthetic construct
  source 1..75: mol_type = other DNA
cgcggaagcgtatgagtgggcgaagaaaatctctgaacatctgctgccgcgtacccgcgcctacgcggagatctg

SEQ ID NO: 612941 - DNA, 75 bp, synthetic construct
  source 1..75: mol_type = other DNA
tttcgattttacaacgcttgatgttatcgctgcactcaacagcagaaatattgctcaaaacacctccaatgaggc

SEQ ID NO: 612942 - DNA, 75 bp, synthetic construct
  source 1..75: mol_type = other DNA
gccgcctgaagatatccgggatttcgtcgcagtgctatctgaaaccaacggcgatatacgggtgaaggttgtgga

SEQ ID NO: 612943 - DNA, 75 bp, synthetic construct
  source 1..75: mol_type = other DNA
gttgaaagcgcccttaatcagacaataactgacttagaagtatgcatatgcgatgatggttccacagatgataca

SEQ ID NO: 612944 - DNA, 75 bp, synthetic construct
  source 1..75: mol_type = other DNA
caggaggattttaacaccactaaaatttccacatcgttaagcattcatatgtgtgtggcaaagctaggtaaaatc

SEQ ID NO: 612945 - DNA, 75 bp, synthetic construct
  source 1..75: mol_type = other DNA
tttgcgtccatgaccggcaccaaaacgacgttcgctattacgctggaatatgcggcttccatcatcgcactggtg

SEQ ID NO: 612946 - DNA, 75 bp, synthetic construct
  source 1..75: mol_type = other DNA
aacgatatcgatctgcatgccaacgacatgaacttcgtggcaatcgccgaaaacggcaagctggtaggctttaac

SEQ ID NO: 612947 - DNA, 75 bp, synthetic construct
  source 1..75: mol_type = other DNA
atagggcgctgggcgaaagagcgcgaagcgggtgaaggcttcggcgactttacggtgcgtgcgggcatcattcgc

SEQ ID NO: 612948 - DNA, 75 bp, synthetic construct
  source 1..75: mol_type = other DNA
cgctgtagcgggtttgatttatttgtgggtgtgttttataaaaataccgcccatacacaacaaaatacaaaaagt

SEQ ID NO: 612949 - DNA, 75 bp, synthetic construct
  source 1..75: mol_type = other DNA
gtggcgctttatttgacgcctgtgagcagtgcggggggagtggcgattaaagcaggctcattaattgccgtgctt

SEQ ID NO: 612950 - DNA, 75 bp, synthetic construct
  source 1..75: mol_type = other DNA
tttcgacgcaaatcttttgccataacgattacccggaaaccattacagactatgtcacactgcaacgaggttcgg

SEQ ID NO: 612951 - DNA, 75 bp, synthetic construct
  source 1..75: mol_type = other DNA
gctgattctggccgtgggtggtgaactcgacacggcgttcgttctgccggggatttattccggcgataaccccgc

SEQ ID NO: 612952 - DNA, 75 bp, synthetic construct
  source 1..75: mol_type = other DNA
atgaacattctgttagcgtttaaagccgaaccggatgccgggatgctggcggaaaaagagtggctggcggcggct

SEQ ID NO: 612953 - DNA, 75 bp, synthetic construct
  source 1..75: mol_type = other DNA
cgctactgcgaagtttactcggtgctgatgaacaggccgctgccgcgctgctgttggcgcagagaaaaaacggta

SEQ ID NO: 612954 - DNA, 75 bp, synthetic construct
  source 1..75: mol_type = other DNA
cagtaatgccagcgtgactattcatacgtcaccagcatattctgctaataagccggaagggttaacggacggtac

SEQ ID NO: 612955 - DNA, 75 bp, synthetic construct
  source 1..75: mol_type = other DNA
aaatgaagaaagaatagaaaggaaaaaggcaaatgttctccgtgagatatctctgaataaaggggaaacatttaa

SEQ ID NO: 612956 - DNA, 75 bp, synthetic construct
  source 1..75: mol_type = other DNA
tcatcaaacggtaaggtactgcatacccataaacaccccggcgacagtggcggcacaacaggggggcctctatga

SEQ ID NO: 612957 - DNA, 75 bp, synthetic construct
  source 1..75: mol_type = other DNA
accctggacacaccggaggtggtctgcactaacaaactgactaccggcacgctggaagtgcagaagggcgggacg

SEQ ID NO: 612958 - DNA, 75 bp, synthetic construct
  source 1..75: mol_type = other DNA
tcatgagtaatggggagcgaggatgcctgatccttgataaaaatagtaatctaccagcttactatcaaaatctat

SEQ ID NO: 612959 - DNA, 75 bp, synthetic construct
  source 1..75: mol_type = other DNA
tcgccagacatttaactatgaactggatggtaaaaaatacacgtatgatgaagttagcaaccaatctattcttac

SEQ ID NO: 612960 - DNA, 75 bp, synthetic construct
  source 1..75: mol_type = other DNA
ctgacaacgttggtcagtacgaaaaatcattggttatcgatctcggtggtacaactctggatgtcggggttattg

SEQ ID NO: 612961 - DNA, 75 bp, synthetic construct
  source 1..75: mol_type = other DNA
catgggggatgaacgggcgttgcactggctgcgctatctcatggctcttgggtttgaggaagctgtattgctgga

SEQ ID NO: 612962 - DNA, 75 bp, synthetic construct
  source 1..75: mol_type = other DNA
ccgaatacaccgggattacgcactctgcaatatggtgaagcgctggatgacttattaatcgcgatcaaaaataaa

SEQ ID NO: 612963 - DNA, 75 bp, synthetic construct
  source 1..75: mol_type = other DNA
tattgcaaccaataccacactcgatcgttctctggttcagggaatgaaaaattgcgatcaaaccggtggcttaag

SEQ ID NO: 612964 - DNA, 75 bp, synthetic construct
  source 1..75: mol_type = other DNA
tgatcaaccgcatgggctttaataatctcggcgttgataacctcgttgagaatgttaaaaaagcccactacgacg

SEQ ID NO: 612965 - DNA, 75 bp, synthetic construct
  source 1..75: mol_type = other DNA
caaactctgggtaatacgctgaataaactggcgtccgtgatgacactcaaccgccctgatgtcgacgtttctgtc

SEQ ID NO: 612966 - DNA, 75 bp, synthetic construct
  source 1..75: mol_type = other DNA
atggcaatacaacaccctgacatccagcctgctgttaaccatagcgttcaggtggcgatcgctggtgccggcccg

SEQ ID NO: 612967 - DNA, 75 bp, synthetic construct
  source 1..75: mol_type = other DNA
aaccgaagaacagctccgcgagccgcaaaatatgcgcaagctgttaagcaaagtgctgcctaatccggacaacgt

SEQ ID NO: 612968 - DNA, 75 bp, synthetic construct
  source 1..75: mol_type = other DNA
aggattcacagtatcaagtaagcccggggacttcttcccgtagatcgtattatcaacgtattcagacacagtcag

SEQ ID NO: 612969 - DNA, 75 bp, synthetic construct
  source 1..75: mol_type = other DNA
cgtcaacaagtgcggggcaggcctcagccagtgctagcgccgccggaaaatcggcagaaagcgctgcatcgtccg

SEQ ID NO: 612970 - DNA, 75 bp, synthetic construct
  source 1..75: mol_type = other DNA
tttttgctggcggaaatgctgggctggccctgcttcacccaggtggagcgttttactctcgacgcgccgtttatc

SEQ ID NO: 612971 - DNA, 75 bp, synthetic construct
  source 1..75: mol_type = other DNA
gagttgatccaggttgccgacagtttagttcgacataatattgatggcgttattgcaactaatacgacgctcgat

SEQ ID NO: 612972 - DNA, 75 bp, synthetic construct
  source 1..75: mol_type = other DNA
ttacgccgcattaccggaaggccgtttgaagcactgattcggcaaaaagttccagcaaaacccgttagttgcatg

SEQ ID NO: 612973 - DNA, 75 bp, synthetic construct
  source 1..75: mol_type = other DNA
tgcaatatggtgaagcactggatgatttattaacagcaattaaaaataaacaaaatgatctgcaagcggtccatc

SEQ ID NO: 612974 - DNA, 75 bp, synthetic construct
  source 1..75: mol_type = other DNA
gattcgcaccggccttgtcgtcgaaaccaaccttaaagccggtcgctgccgtgtgcagaccggtggcatgtgcac

SEQ ID NO: 612975 - DNA, 75 bp, synthetic construct
  source 1..75: mol_type = other DNA
agttacctacaatgaagcaaaggaactgctcattgcctgcgatgcggcaatcaggatcatagagataatgctaat

SEQ ID NO: 612976 - DNA, 75 bp, synthetic construct
  source 1..75: mol_type = other DNA
agttacttacaatgaagcaaaggaactgctcattgcatgcgatgcggcaattaaggtcattgagattatgtcaat

SEQ ID NO: 612977 - DNA, 75 bp, synthetic construct
  source 1..75: mol_type = other DNA
accgaccttaacgccggtcgctgccgtgtgcagaccggcggcatgtgcaccgactggcttcagtggctgacctgt

SEQ ID NO: 612978 - DNA, 75 bp, synthetic construct
  source 1..75: mol_type = other DNA
gcgacgcatctcgaactctaccgccgttatccgtcgttgggcggcattgtccatacccactccactcatgccacc

SEQ ID NO: 612979 - DNA, 75 bp, synthetic construct
  source 1..75: mol_type = other DNA
aggtgcagggcgagtatgaactgaacaccggcaaagtgattatcgaaacgctgggtggcgctgaaccgctgcata

SEQ ID NO: 612980 - DNA, 75 bp, synthetic construct
  source 1..75: mol_type = other DNA
cgcacgccgactacttctttggcgacattccgtgtacgcgcgggttaagcgaagaagaggtgcagggcgagtatg

SEQ ID NO: 612981 - DNA, 75 bp, synthetic construct
  source 1..75: mol_type = other DNA
ggaaagttggcctgggctgtcattgtatgacaaatataatacgttggcctgggaattaatatcacacctgtggtt

SEQ ID NO: 612982 - DNA, 75 bp, synthetic construct
  source 1..75: mol_type = other DNA
atttacgcatcccattgttgaagtttttgttctcaggcaagccgatcgtgaagcgtgaaaatgataaagcgccag

SEQ ID NO: 612983 - DNA, 75 bp, synthetic construct
  source 1..75: mol_type = other DNA
tgttcaattttattttcatgcagacgctgttttatataccgttttttatccttggtgcattagcttttattttcc

SEQ ID NO: 612984 - DNA, 75 bp, synthetic construct
  source 1..75: mol_type = other DNA
atgaaaggcaacatcgagcataccggcgggtcactgtcgtctaacggcaagatactccacacccataaacacccc

SEQ ID NO: 612985 - DNA, 75 bp, synthetic construct
  source 1..75: mol_type = other DNA
ccatcaccgcaaccgtgccgctggtactggtgaaagcctcgaccagtatcaccctcgacacccctgaggtgattt

SEQ ID NO: 612986 - DNA, 75 bp, synthetic construct
  source 1..75: mol_type = other DNA
tcggagagtctggtaagaaaggtcgtagagtttctgaaataccgggaagccggtgctgaagaaaaatccataagc

SEQ ID NO: 612987 - DNA, 75 bp, synthetic construct
  source 1..75: mol_type = other DNA
ggaatatcgtccgtcttccgacaccgcgacgcatctcgaactctaccgtcgttacccgtcgcttggcggcattgt

SEQ ID NO: 612988 - DNA, 75 bp, synthetic construct
  source 1..75: mol_type = other DNA
aactcgcgcgcgcactgcgcaacatgattcgcaccggcgttatcgtcgaaaccgaccttaacgccggtcgctgcc

SEQ ID NO: 612989 - DNA, 75 bp, synthetic construct
  source 1..75: mol_type = other DNA
gcttgaggtacaacaaggcggcaccatgcgcggaaacatcgaacacaccgacggtacgtttaaatcaaacggcgt

SEQ ID NO: 612990 - DNA, 75 bp, synthetic construct
  source 1..75: mol_type = other DNA
atgaatactttaaacaatatccaagaactggcccgcgcgattcgcaacctcatccgctcaggcgtggtgacggaa

SEQ ID NO: 612991 - DNA, 75 bp, synthetic construct
  source 1..75: mol_type = other DNA
gtgtgcagaccggcggcatgtgcactgactggcttcagtggctgactcatcgtgccggacgttcacgcacatggt

SEQ ID NO: 612992 - DNA, 75 bp, synthetic construct
  source 1..75: mol_type = other DNA
gccgtcggcctcgtccgatgcgtttcacgtcacttttcctgacggggcggttatcgagtacgaacccgaaaacgg

SEQ ID NO: 612993 - DNA, 75 bp, synthetic construct
  source 1..75: mol_type = other DNA
gcactaacaagctgattaccggcacgctggaagtgcagaagggcgggacgatgcgcggcaacattgaacacaccg

SEQ ID NO: 612994 - DNA, 75 bp, synthetic construct
  source 1..75: mol_type = other DNA
tgcgctgacggtcagtggcattaagactgctgatgtgacggcatcggagtccatcaccgccactgtgccggtggt

SEQ ID NO: 612995 - DNA, 75 bp, synthetic construct
  source 1..75: mol_type = other DNA
gtcaatcccgatgaggggctctgtcgtgtccagaccggcgggatgcaaaccacctggttaaactggctgacctgc

SEQ ID NO: 612996 - DNA, 75 bp, synthetic construct
  source 1..75: mol_type = other DNA
cgactacttctttggcgacatcccgtgcacgcgcggattaagcgaagaagaggtgcagggtgagtatgaactgaa

SEQ ID NO: 612997 - DNA, 75 bp, synthetic construct
  source 1..75: mol_type = other DNA
tgcgctgacggtcagcggcatcaaaacggccgacgtgacggcatcgggatccatcaccgcaaccgtgccgctggt

SEQ ID NO: 612998 - DNA, 75 bp, synthetic construct
  source 1..75: mol_type = other DNA
gttgataccgtgcaagggctgtgccgcgtacaaagcggcgggatccagactacatggctgaactggctgaccacc

SEQ ID NO: 612999 - DNA, 75 bp, synthetic construct
  source 1..75: mol_type = other DNA
acgggaaattcacgtctaacggcgttcaggtggatgaacacggtcacggtggtgttaagtcaggagacaactgga

SEQ ID NO: 613000 - DNA, 75 bp, synthetic construct
  source 1..75: mol_type = other DNA
ccaaacctggtgtgcggtccggtgcaaatctgctggcataaattcgcccgctactgggatgtggagctgcgtgag

SEQ ID NO: 613001 - DNA, 75 bp, synthetic construct
  source 1..75: mol_type = other DNA
tccggccttcactctcggcggtgaagccaccgacatcgtggtgatgcgcattatgtgtcgtcgcggcttcgaaat

SEQ ID NO: 613002 - DNA, 75 bp, synthetic construct
  source 1..75: mol_type = other DNA
atccgcagccatcgacctacgttgcgtaaatatggttgccgatctgtggcatgcgcctgcgccgaaaaatggtca

SEQ ID NO: 613003 - DNA, 75 bp, synthetic construct
  source 1..75: mol_type = other DNA
acagctatgaagcctcgctgatggcgctgcacgatcgtgatgtctatcgcaccatggcttgcggcatcgcgggtc

SEQ ID NO: 613004 - DNA, 75 bp, synthetic construct
  source 1..75: mol_type = other DNA
tgaacgcgactttaaagccggtgtgctcaatgagcagcaggcgcaggaactgatcgaccacttcatcatgaagat

SEQ ID NO: 613005 - DNA, 75 bp, synthetic construct
  source 1..75: mol_type = other DNA
cggcatcagttatctggtacgtgaacgcgaactgcaatttgccgatctccagtctcgtctggaaaaaggcgaaga

SEQ ID NO: 613006 - DNA, 75 bp, synthetic construct
  source 1..75: mol_type = other DNA
ctgtgcgtattgaaggggcggagcttactcacttcagtcgcctgaaaggtctggttaaacgacgcttatttccac

SEQ ID NO: 613007 - DNA, 75 bp, synthetic construct
  source 1..75: mol_type = other DNA
tgtgtcgtgttttgtaccgtgttcgcgttaccggagacactgaggcattgaaagacgagcgagttctcatcacgc

SEQ ID NO: 613008 - DNA, 75 bp, synthetic construct
  source 1..75: mol_type = other DNA
ccaccactggctcgctgatgaaaatctacgatggcgcgggttttgtcgcggcgaagtctggtgcaacggttattc

SEQ ID NO: 613009 - DNA, 75 bp, synthetic construct
  source 1..75: mol_type = other DNA
cgtctgggacttccgcctgccgcgtgtgaaatcgatcagtgcttcaggccataaattcggtctggctccgctggg

SEQ ID NO: 613010 - DNA, 75 bp, synthetic construct
  source 1..75: mol_type = other DNA
tcactacgcgcgctttgccaatccttatgacttctatcgcctacgctatgtagtggcgggtgctgaaaaactgca

SEQ ID NO: 613011 - DNA, 75 bp, synthetic construct
  source 1..75: mol_type = other DNA
aagggccgaacataatgaacggctatctgcgggtggagaagccaggtgtactggaagtgcccaccgccgagaatg

SEQ ID NO: 613012 - DNA, 75 bp, synthetic construct
  source 1..75: mol_type = other DNA
acagctacgaagcctcactgatggcgctgcacgatcgtgacgtctatcgcaccatggcttgcggcatcgcgggtc

SEQ ID NO: 613013 - DNA, 75 bp, synthetic construct
  source 1..75: mol_type = other DNA
ctgttggtgacgcatgatgtgagcgaagcggtagcaatggctgaccgggtgttgttaattgaagagggaaaaatt

SEQ ID NO: 613014 - DNA, 75 bp, synthetic construct
  source 1..75: mol_type = other DNA
ggctgcggtaggactggagaatcgcgccggggaatggcctgccgcactttctggcgggcagaaacagcgagtggc

SEQ ID NO: 613015 - DNA, 75 bp, synthetic construct
  source 1..75: mol_type = other DNA
tgtgagcgaagcggtggcgatggctgaccgggtgctgttaattgaagaaggaaaaattggtctggatttgacggt

SEQ ID NO: 613016 - DNA, 75 bp, synthetic construct
  source 1..75: mol_type = other DNA
ctttatggcactgggttcagcaattggcaccgggctgttttacggttcggcagacgccatcaaaatggccggtcc

SEQ ID NO: 613017 - DNA, 75 bp, synthetic construct
  source 1..75: mol_type = other DNA
atgtgagcgaagcggtagcaatggctgaccgggtgttgttaattgaagagggaaaaattggtctggatttgacgg

SEQ ID NO: 613018 - DNA, 75 bp, synthetic construct
  source 1..75: mol_type = other DNA
gccatggaaatcggtgattgataacgttgggttaggtcttaaaggccaatggcgcgatgcggcgcatcaggcact

SEQ ID NO: 613019 - DNA, 75 bp, synthetic construct
  source 1..75: mol_type = other DNA
gcggcagcgtcacaacaatcagcagccacttctgcatccaccgcgaccacgaaagcgtcagaagctgccacctca

SEQ ID NO: 613020 - DNA, 75 bp, synthetic construct
  source 1..75: mol_type = other DNA
tgagcgcgactttaaagccggtgtactcaatgagcaacaggcacaggaactgatcgaccacttcatcatgaagat

SEQ ID NO: 613021 - DNA, 75 bp, synthetic construct
  source 1..75: mol_type = other DNA
cggcatactgaccggtctgccggacggttatggtcgtgggcgcattattggtgattatcgccgtgtggcgctgta

SEQ ID NO: 613022 - DNA, 75 bp, synthetic construct
  source 1..75: mol_type = other DNA
cgcgactcgagatgcaggatttgattgtgtcactttggcaggagcacggctttaccgtactgttggtgacgcatg

SEQ ID NO: 613023 - DNA, 75 bp, synthetic construct
  source 1..75: mol_type = other DNA
ggctggaaacgccaaccgcaggcgatgtgttagcgggtacaacgccacttgccgaaattcaggacgatacacgca

SEQ ID NO: 613024 - DNA, 75 bp, synthetic construct
  source 1..75: mol_type = other DNA
gggtcggtacgattagcagagctggaagcggaagtattgcagcgggtgatgaagcgtggtgaatctgaaactcgc

SEQ ID NO: 613025 - DNA, 75 bp, synthetic construct
  source 1..75: mol_type = other DNA
cataaattgatggatttgtcgatcaataaaaactggatcgacaaagaagaatatccgcaatccgctgcaatcgac

SEQ ID NO: 613026 - DNA, 75 bp, synthetic construct
  source 1..75: mol_type = other DNA
cgaagccgttggccgttacgtcgacaccgtctgggcgctgtcgcagggcaatgagctgctggtcgagcagcgtgt

SEQ ID NO: 613027 - DNA, 75 bp, synthetic construct
  source 1..75: mol_type = other DNA
tacagccaggttggcctgattgagtctttttgcaaagcggtgtgcgaccgggtgaacagtgagctgaacgcaggg

SEQ ID NO: 613028 - DNA, 75 bp, synthetic construct
  source 1..75: mol_type = other DNA
atgtctgccaaacatccggtcattgcggtaacaggatccagcggtgcggggaccactaccaccagcctcgcgttt

SEQ ID NO: 613029 - DNA, 75 bp, synthetic construct
  source 1..75: mol_type = other DNA
accgtcgttcccgagtcagacccacgccccgcactcaatatcaaccctgtaaatgatttcgacgacgtatccgac

SEQ ID NO: 613030 - DNA, 75 bp, synthetic construct
  source 1..75: mol_type = other DNA
ttgaaattaacttaaaagtcgcgcatatcgtgctaggaaaaaacaattacgactgggatccagaaaagaaagaag

SEQ ID NO: 613031 - DNA, 75 bp, synthetic construct
  source 1..75: mol_type = other DNA
agggtgacaaaggtacgcattgaagccagaaaacgccgcaaatacaggccacggaaggccagagccactgtatta

SEQ ID NO: 613032 - DNA, 75 bp, synthetic construct
  source 1..75: mol_type = other DNA
cgaccacgccaaagcgatgatcgacctctccgtgaccgctggcaatgtacttgcgccgcccaaacgctggcacgg

SEQ ID NO: 613033 - DNA, 75 bp, synthetic construct
  source 1..75: mol_type = other DNA
cgcgccgtaacgcctttattcagcctcaggtcgatgcggtgatgctggaagggttgtcgcgttttccgaatgtgc

SEQ ID NO: 613034 - DNA, 75 bp, synthetic construct
  source 1..75: mol_type = other DNA
tggtgatgcgcccggatcgctttgttgccgccatcgccattccgcaaactctgggtaatacgctgaataaactgg

SEQ ID NO: 613035 - DNA, 75 bp, synthetic construct
  source 1..75: mol_type = other DNA
atgtctgccaaacatccggtcattgcagtaacagggtccagcggcgcgggaaccaccaccaccagcctcgcgttt

SEQ ID NO: 613036 - DNA, 75 bp, synthetic construct
  source 1..75: mol_type = other DNA
attcggcagcgagcgacaaaaatgctctgtgcgctcactggctaactgaggccgacgacgcactcaattctgagt

SEQ ID NO: 613037 - DNA, 75 bp, synthetic construct
  source 1..75: mol_type = other DNA
agctggttcgcgcaacacaatgcttcgctggtggtgatgcgcccggctttgttgccgccaccgccattccgcaaa

SEQ ID NO: 613038 - DNA, 75 bp, synthetic construct
  source 1..75: mol_type = other DNA
atgaaactttttcgtatcctcgatcctttcaccttaaccctgatcacggtggtgttgctggcctctttctttccg

SEQ ID NO: 613039 - DNA, 75 bp, synthetic construct
  source 1..75: mol_type = other DNA
ctgggttatctggcgtgatgaagaagcgctgccgcaggaactggtgttcaacgttgactacctcggtggtcagat

SEQ ID NO: 613040 - DNA, 75 bp, synthetic construct
  source 1..75: mol_type = other DNA
ggcgcgatgccgcgcgtcgggcgttggctgcagtaggactggagaatcgcgcaggggaatggcctgccgcacttt

SEQ ID NO: 613041 - DNA, 75 bp, synthetic construct
  source 1..75: mol_type = other DNA
caccagaaaattgataacagagggcgttgcagcggggttgtcacttaagcgtatggtcaacctgacaacccggtg

SEQ ID NO: 613042 - DNA, 75 bp, synthetic construct
  source 1..75: mol_type = other DNA
cccgcccggcgggtcaggtgattgcacagtattatgaattcctgcgcctcggtcgtgaaggctataccaaagtac

SEQ ID NO: 613043 - DNA, 75 bp, synthetic construct
  source 1..75: mol_type = other DNA
gtaattgcacagtactatgaattcctgcgcctcggtcgtgaaggctacaccaaagtacagaacgcctcttaccag

SEQ ID NO: 613044 - DNA, 75 bp, synthetic construct
  source 1..75: mol_type = other DNA
tgcgcctgtttgcaccgtggagcggcatacccagaccgttgtatgctttatttgcggggcgaaaggggatgcctg

SEQ ID NO: 613045 - DNA, 75 bp, synthetic construct
  source 1..75: mol_type = other DNA
cagatccaactgatggtctgcgcggtgctggcgcgtcgttataagcgccagaccgagcagttacaggcacaacag

SEQ ID NO: 613046 - DNA, 75 bp, synthetic construct
  source 1..75: mol_type = other DNA
ctttcaccttaaccctgatcacggtggtgttgctggcctctttctttccggccagaggcgatttcgttcccttct

SEQ ID NO: 613047 - DNA, 75 bp, synthetic construct
  source 1..75: mol_type = other DNA
gtcgcggcggcggtttgttctgcgtcagcatccagcctgctggggattttcctttcaccattgctggttggtctg

SEQ ID NO: 613048 - DNA, 60 bp, synthetic construct
  source 1..60: mol_type = other DNA
atgcagtatgcgaaacctgtcactctgaacgttgaagagtgcgaccgtctgtcttttctg

SEQ ID NO: 613049 - DNA, 75 bp, synthetic construct
  source 1..75: mol_type = other DNA
cattgattcgacagcaattgggccaacaggagcttgatgatttggcggcggattttctgtcctacaaaaaagacg

SEQ ID NO: 613050 - DNA, 75 bp, synthetic construct
  source 1..75: mol_type = other DNA
atacggcatttagcgaagcagtcgttaacggtatctggcataaagtcggctggggatcgctattgtttattgtgg

SEQ ID NO: 613051 - DNA, 75 bp, synthetic construct
  source 1..75: mol_type = other DNA
ttttggcgtcgagctgtatgatctgaatcacccgtatcagggaattgtccacgtgatggggccagaacaaggcgt

SEQ ID NO: 613052 - DNA, 75 bp, synthetic construct
  source 1..75: mol_type = other DNA
tgtctctttctgttcagaaaaacaattttctattaatgataaatgggactttaaggggaaaaggattagtgtctc

SEQ ID NO: 613053 - DNA, 75 bp, synthetic construct
  source 1..75: mol_type = other DNA
tcttaagaaagcatatctttacaatgataatagcaataaaaaagccaatgacagtaccgagaaacaagccaatga

SEQ ID NO: 613054 - DNA, 75 bp, synthetic construct
  source 1..75: mol_type = other DNA
tatctgaacaatgatagtattgtgaaacaagccaaaaataataccgagaaacaagccaatgacaatatcgataaa

SEQ ID NO: 613055 - DNA, 75 bp, synthetic construct
  source 1..75: mol_type = other DNA
caacagatacgaaagcggctatccgtaagatgaaagcggagctgcgacagcagatcggtgatgtgcaacatgtct

SEQ ID NO: 613056 - DNA, 75 bp, synthetic construct
  source 1..75: mol_type = other DNA
agattatgaaacaaactgggatggccgatttacgctggatgatctgaacattcacggtaagcgcgcgctgggcat

SEQ ID NO: 613057 - DNA, 75 bp, synthetic construct
  source 1..75: mol_type = other DNA
catcaccgggcgatttccctcgagaagattatgaaacaaactgggatggccgatttacgctggatgatctgaaca

SEQ ID NO: 613058 - DNA, 75 bp, synthetic construct
  source 1..75: mol_type = other DNA
tacaatgataatatcgataaaaaagccaatgacagtaccgagaaacaagccaatgacagtatcgagaaacaagcc

SEQ ID NO: 613059 - DNA, 75 bp, synthetic construct
  source 1..75: mol_type = other DNA
ctccgacctcctgattaaaggaaacggattcggtgacatccataactcaaagatattttcattaaagtcattggc

SEQ ID NO: 613060 - DNA, 75 bp, synthetic construct
  source 1..75: mol_type = other DNA
cccaaacgaaacattaaaaacagcagttacaacggaatggtttgaacgaaataaagtcgaatcaggctattggta

SEQ ID NO: 613061 - DNA, 75 bp, synthetic construct
  source 1..75: mol_type = other DNA
aaagttcgccacttgacttatgtaaatttcaaaaacgcaaatctacgaaacagtaacttcaacggaaaagttctc

SEQ ID NO: 613062 - DNA, 75 bp, synthetic construct
  source 1..75: mol_type = other DNA
aaaattaaaaatacaatatccacctctgaaattattgaatgcgcctctcctgaaataagaagtagcgtcctgaac

SEQ ID NO: 613063 - DNA, 75 bp, synthetic construct
  source 1..75: mol_type = other DNA
ataacgagactgaaactttctcgttcacaaacctacaatgggaaaatgtgctgcaatactacaaagaaaaccagc

SEQ ID NO: 613064 - DNA, 75 bp, synthetic construct
  source 1..75: mol_type = other DNA
gtcaaaatggcgctggaaaaaggcgcatcacctggcgacttcccgcgggaagattatgaagcaaactgggaaggc

SEQ ID NO: 613065 - DNA, 75 bp, synthetic construct
  source 1..75: mol_type = other DNA
acactacggcatcatgttcttttaccgggggcaggaccccatcgacgggccaactggcggcaggtcattaatggc

SEQ ID NO: 613066 - DNA, 75 bp, synthetic construct
  source 1..75: mol_type = other DNA
aaagccatgctggcgcatcccgaactggactataacctgcagtacagccattacaacggcacggtacggaaccag

SEQ ID NO: 613067 - DNA, 75 bp, synthetic construct
  source 1..75: mol_type = other DNA
agtgttatctccgtctctgttgatggcgtggttaacccgttactaccggactcacgcgtggaccagggacaggca

SEQ ID NO: 613068 - DNA, 75 bp, synthetic construct
  source 1..75: mol_type = other DNA
acggtttacaggtggatttgtggagctgatgaatgtgccatttatcccggtgatgattggtttatttgctgcttc

SEQ ID NO: 613069 - DNA, 75 bp, synthetic construct
  source 1..75: mol_type = other DNA
atgtttgaaagtgaacttttaactcaggggttttcgacattactcagtaatcctcaggcgctgctgtttgccacg

SEQ ID NO: 613070 - DNA, 75 bp, synthetic construct
  source 1..75: mol_type = other DNA
atgtttttttaccgggggcaggaccccatcgacgggcagctggcgcaggtcattaatggcttccgggatacgtat

SEQ ID NO: 613071 - DNA, 75 bp, synthetic construct
  source 1..75: mol_type = other DNA
cggggctgttcacgctgtgtgaaggggagtggataagcggcgagaacagggtgtttgtaacggcgaatacgttgt

SEQ ID NO: 613072 - DNA, 75 bp, synthetic construct
  source 1..75: mol_type = other DNA
agattatgaagcaaactgggaaggccgctttacgctggaggatctgaacattcacggtaagcgcgcactgggcat

SEQ ID NO: 613073 - DNA, 75 bp, synthetic construct
  source 1..75: mol_type = other DNA
tgcggtgtcgcgcctggtaaggttctgccaatttcagagaaatggcacccattgttgataaaagcactcacgtca

SEQ ID NO: 613074 - DNA, 75 bp, synthetic construct
  source 1..75: mol_type = other DNA
atgaaagaaaaagtgatgaaaagaatgaagatgaataaagcattactgccactgttactctgctgctttattttt

SEQ ID NO: 613075 - DNA, 75 bp, synthetic construct
  source 1..75: mol_type = other DNA
tgggcaaaccgatcactcatgggattcccgtttttggggaacagtaaagctgaattcagtaattgggaaaacata

SEQ ID NO: 613076 - DNA, 75 bp, synthetic construct
  source 1..75: mol_type = other DNA
ctcctggcgtttcgtaccacggcaaaaagtctccgccggcgagctggcgggttggtggatttattatctacgagg

SEQ ID NO: 613077 - DNA, 75 bp, synthetic construct
  source 1..75: mol_type = other DNA
cgtcagatttctgttgatattgattcaatagttcctttacctgtcagtactgataaaaaattaggtgagagggat

SEQ ID NO: 613078 - DNA, 75 bp, synthetic construct
  source 1..75: mol_type = other DNA
gacagccagcgtcaggcggcagcaagtcagtttcagcaacgaacacacagcgcaccagtcattacacgagatacc

SEQ ID NO: 613079 - DNA, 75 bp, synthetic construct
  source 1..75: mol_type = other DNA
tgaacagcgccaggcgttccgtgagagaatgcaaactaacccgcagaaccagcagcgaagagaggcggcgcgtca

SEQ ID NO: 613080 - DNA, 75 bp, synthetic construct
  source 1..75: mol_type = other DNA
cgtcgtcaaatccgcattcagcactgctcaaatagatcaatgggttgcacctgtcgcgctataccccgactctct

SEQ ID NO: 613081 - DNA, 75 bp, synthetic construct
  source 1..75: mol_type = other DNA
aaatcgattgccaccatcagcatgtttaattcaggtcttgtgcggcgtaatggttttcagaattcacagttggat

SEQ ID NO: 613082 - DNA, 75 bp, synthetic construct
  source 1..75: mol_type = other DNA
caacgtttgcggcaactggcgcaacaaaccgggtcactgaagtcatcaactgaacagaaagttattacgaccacg

SEQ ID NO: 613083 - DNA, 75 bp, synthetic construct
  source 1..75: mol_type = other DNA
ctccaacacgcgacagccagcgtcaggcggcagcaagtcagtttcagcaacgaacacacgccgcccccgtcatta

SEQ ID NO: 613084 - DNA, 75 bp, synthetic construct
  source 1..75: mol_type = other DNA
tcatgatcaggatatggcaaagcggtttcatcaaaccgatgtcaacggcggaatgagcgccacgcagttacctgc

SEQ ID NO: 613085 - DNA, 75 bp, synthetic construct
  source 1..75: mol_type = other DNA
tgccgggctttgtgccgcctctgccgggctatatataaaaagccgcacagtggaagcgcctgtggaaccgcaatc

SEQ ID NO: 613086 - DNA, 75 bp, synthetic construct
  source 1..75: mol_type = other DNA
acccgcagaaccagcagagaagagaagcggcacgtgagcgtattcagtcagcctcgcctgagcagcgtcaggcgt

SEQ ID NO: 613087 - DNA, 75 bp, synthetic construct
  source 1..75: mol_type = other DNA
gtactgccaggctgaataacgagcaacggtcagcagtacgcgaacggctgtctgaacgtggagcaagacggctgg

SEQ ID NO: 613088 - DNA, 75 bp, synthetic construct
  source 1..75: mol_type = other DNA
caggcggttcgcgagaaaatgcagactaacccacagatccagcagcgaagagacgcagcgcgtgagcgtattcag

SEQ ID NO: 613089 - DNA, 75 bp, synthetic construct
  source 1..75: mol_type = other DNA
gacagccagcgtcaggcggcagcaagccagtttcagcaacgaacacacgcagcaccagtcactacgcgagatacc

SEQ ID NO: 613090 - DNA, 75 bp, synthetic construct
  source 1..75: mol_type = other DNA
tatataacgagtacttttttgatttgcggcagtcattttttgtgagcgttacagatctgatggtctctggcgcaa

SEQ ID NO: 613091 - DNA, 75 bp, synthetic construct
  source 1..75: mol_type = other DNA
atattttcccaacactcggcatgtattcgggactaaaagcttgtcatgaaaaaaacaaccaaccatttgatatta

SEQ ID NO: 613092 - DNA, 75 bp, synthetic construct
  source 1..75: mol_type = other DNA
tgtctgcatgtttaccaatttttcaaacgctaatttaacaaaatgcaaactctttaatacaaacttttcggctgc

SEQ ID NO: 613093 - DNA, 75 bp, synthetic construct
  source 1..75: mol_type = other DNA
tatcagagaaaaatctttcagacaaagatcttactaatattagctgcatgtataccaattttactaacgctaatt

SEQ ID NO: 613094 - DNA, 75 bp, synthetic construct
  source 1..75: mol_type = other DNA
gagaaaaactcggcaaaattccagcgtgcgcagaagaagaaaaaagcccttgttgatgaaataacccaactacag

SEQ ID NO: 613095 - DNA, 75 bp, synthetic construct
  source 1..75: mol_type = other DNA
cagttacaccggaccatgcaggcatttgtccgggcattgaaccagaagctgaatggtaccggaatctctgcgggg

SEQ ID NO: 613096 - DNA, 75 bp, synthetic construct
  source 1..75: mol_type = other DNA
tcagtctttcattagtaattttacttttgatgttatgtaccaaaaaacttactatttatacgaaagtttattaaa

SEQ ID NO: 613097 - DNA, 75 bp, synthetic construct
  source 1..75: mol_type = other DNA
gccagctcgcgctgtttaaagagatgcagggcgtgaaaagcaataaaggactgaatgagcaggacaagctggcaa

SEQ ID NO: 613098 - DNA, 75 bp, synthetic construct
  source 1..75: mol_type = other DNA
atttcggcattatttcaacggaatcacagcaaaacctgaaaccgcaatggacgccgttcttacaggatatggaga

SEQ ID NO: 613099 - DNA, 75 bp, synthetic construct
  source 1..75: mol_type = other DNA
ctgaatgagcaggacaagctggcaaaaaccaccgcgattcaggcgcaactggatgacctggaccgcctgaacaac

SEQ ID NO: 613100 - DNA, 75 bp, synthetic construct
  source 1..75: mol_type = other DNA
gaatcagttcttaataataaaacagggtttcttatttctcgaaatgatgtccatactttaaaagaaaagattgaa

SEQ ID NO: 613101 - DNA, 75 bp, synthetic construct
  source 1..75: mol_type = other DNA
ctgtgctcaaatatccatctttttatgtttttattatgcttttggctgtgttgtgtgaaaataagagtcgagtaa

SEQ ID NO: 613102 - DNA, 75 bp, synthetic construct
  source 1..75: mol_type = other DNA
atggaatttctatcaactctgcgattgtgcagcgactggctaaaagcctgagagaggaaagagctaatgcccagt

SEQ ID NO: 613103 - DNA, 75 bp, synthetic construct
  source 1..75: mol_type = other DNA
gcggcactgacggtggagaactacaaaaaagccaatgagttactgcggggcatgaagggcaccaacggtgaacca

SEQ ID NO: 613104 - DNA, 75 bp, synthetic construct
  source 1..75: mol_type = other DNA
aaagatttaccggagattaaggaatgggtcagcgcccgtcagatggcaacgctggacggttatggttacaccctt

SEQ ID NO: 613105 - DNA, 75 bp, synthetic construct
  source 1..75: mol_type = other DNA
tcggcactggcgagtgtccgccggagtgggatgctgattactggttcgatggggcgaattatcttagcgaactga

SEQ ID NO: 613106 - DNA, 75 bp, synthetic construct
  source 1..75: mol_type = other DNA
atttcaacctcaaccagccgcatctgcgcgaagttcttcgcacattaaaggaagcggagttatcaccgccaaaag

SEQ ID NO: 613107 - DNA, 75 bp, synthetic construct
  source 1..75: mol_type = other DNA
aaagaacataagctgcttcagaatgcgaaagctaaaaaagaatctctttccgaatggagcaggcgaatatatgaa

SEQ ID NO: 613108 - DNA, 75 bp, synthetic construct
  source 1..75: mol_type = other DNA
attgaccttaaaacgaccttgaaggaagcgttagctgaacgggataacataccaccaagcctggatgagcttggg

SEQ ID NO: 613109 - DNA, 75 bp, synthetic construct
  source 1..75: mol_type = other DNA
tgaacatcttgataaagaacttcgcctgaattcccagcaaatcaaggttctcaccctgttcttcattgataaggt

SEQ ID NO: 613110 - DNA, 75 bp, synthetic construct
  source 1..75: mol_type = other DNA
gggcgtgaatcgttctgagattaccgtgtatgacggcacggcacttgatgacgaaacggggcgtgatatttatca

SEQ ID NO: 613111 - DNA, 75 bp, synthetic construct
  source 1..75: mol_type = other DNA
acaaaacggcgaccccgcgaaaccggtcattgcggcagggcagacttattttgctatccagacccgacggcagga

SEQ ID NO: 613112 - DNA, 75 bp, synthetic construct
  source 1..75: mol_type = other DNA
gaagaacagccactgccagatgttcttggtgttctacaggaaaaaacgggcctgacaagacgcagtttatgcacc

SEQ ID NO: 613113 - DNA, 75 bp, synthetic construct
  source 1..75: mol_type = other DNA
acagtcatgattttactgttgagatggaaacagggacaggtaaaacgtatgtttatcttcgcaccatgctggagc

SEQ ID NO: 613114 - DNA, 75 bp, synthetic construct
  source 1..75: mol_type = other DNA
caaaacctgcggatgtgcgaaattttgcaaccagctctgttatgcagatcatggtaatgacagttggtgcgatta

SEQ ID NO: 613115 - DNA, 75 bp, synthetic construct
  source 1..75: mol_type = other DNA
catgctgcaggccggtctggtgatcaacatcctgagggagcaggagaaaaaacagacatgggaaatcaggatccc

SEQ ID NO: 613116 - DNA, 75 bp, synthetic construct
  source 1..75: mol_type = other DNA
atctgggccagcacgccagcacgggaacttggctttacgcttgccgatcgcatgatgcaaaaaattggtcacgaa

SEQ ID NO: 613117 - DNA, 75 bp, synthetic construct
  source 1..75: mol_type = other DNA
gaatccgcggcaacgcgcgccgagacagcggcaaaacgggcagaggatattgcatccgccgtggcgcttgaggat

SEQ ID NO: 613118 - DNA, 75 bp, synthetic construct
  source 1..75: mol_type = other DNA
cggccataaaattgtatatattatcattacattatagttttaatgttaaaacttgtgtttctcttttgatttctt

SEQ ID NO: 613119 - DNA, 75 bp, synthetic construct
  source 1..75: mol_type = other DNA
atggctaccgccaaaaaaatcaccattcatgatgttgcgctggctgcgggcgtgtcggtcagtaccgtttcgctg

SEQ ID NO: 613120 - DNA, 75 bp, synthetic construct
  source 1..75: mol_type = other DNA
gtatcgcctggctgggagggcaaagttcctcattaacccgggcagaacgggtgggggctattgtgcgactctact

SEQ ID NO: 613121 - DNA, 75 bp, synthetic construct
  source 1..75: mol_type = other DNA
acctgggccagcacgccagcgcgggaacttggtaccacacttgcggatcgcatgatgcaaaaaatcacccatgaa

SEQ ID NO: 613122 - DNA, 75 bp, synthetic construct
  source 1..75: mol_type = other DNA
gtgcttctggtgtatcagcttttaaaaatgattatcgccaaaagtacacgattcaatttcagcattaagcttttc

SEQ ID NO: 613123 - DNA, 75 bp, synthetic construct
  source 1..75: mol_type = other DNA
gaaaagtgtccgccttttcttcaaaaaaggggattacaacaccggctctcatggtggggcggtcgcgtgggtgca

SEQ ID NO: 613124 - DNA, 75 bp, synthetic construct
  source 1..75: mol_type = other DNA
aactggcgcaggtcattaatggcttcagggatacctatggtctgagtgttattcccgtttccgtggatggcgtga

SEQ ID NO: 613125 - DNA, 75 bp, synthetic construct
  source 1..75: mol_type = other DNA
ccgatcacggtggcatcagtggtaaaagttttattgatccggaagttttgcgtcgtcagcgtgcggaagaaaccc

SEQ ID NO: 613126 - DNA, 75 bp, synthetic construct
  source 1..75: mol_type = other DNA
gcgattgttcgcgcctggtttatccagagtgtaacgccgcgttttaaagaagccttgcgctggatggcggcaaac

SEQ ID NO: 613127 - DNA, 75 bp, synthetic construct
  source 1..75: mol_type = other DNA
ctgcgcgcacttcggcgtgaaaggcgttgtggtgcaggatgcggcgttgctggaatcgggtgcggcaattcgtac

SEQ ID NO: 613128 - DNA, 75 bp, synthetic construct
  source 1..75: mol_type = other DNA
atggataagaagcaagtaacggatttaaggtcggaactactcgattcacgttttggcgcgaagtcaatttctact

SEQ ID NO: 613129 - DNA, 75 bp, synthetic construct
  source 1..75: mol_type = other DNA
acctggccactttctgccagacctgggacgacgagaatgtccataaattgatggatttatcgattaaaaaaaact

SEQ ID NO: 613130 - DNA, 75 bp, synthetic construct
  source 1..75: mol_type = other DNA
acctggccactttctgccagacctgggacgacgagaaagtccataaattgatggatttgtcgatgaaaaaaaact

SEQ ID NO: 613131 - DNA, 75 bp, synthetic construct
  source 1..75: mol_type = other DNA
acctggccactttctgccagacctgggacgacgagaaagtccataaattgatggatttctcgatcaaaaaaaact

SEQ ID NO: 613132 - DNA, 75 bp, synthetic construct
  source 1..75: mol_type = other DNA
gatccgaactactcgattcacgttttggtgctaaggccatttcgactatcgcagaatcaaaacgctttccgctgc

SEQ ID NO: 613133 - DNA, 75 bp, synthetic construct
  source 1..75: mol_type = other DNA
acctggccactttctgccagacctgggacgacgagaaggtccataaattgatggatttatcgatgaaaaaaaact

SEQ ID NO: 613134 - DNA, 75 bp, synthetic construct
  source 1..75: mol_type = other DNA
acctggccactttctgccagacctgggacgacgagaacgtccataaattgatggatttatcgatcaaaaaaaact

SEQ ID NO: 613135 - DNA, 75 bp, synthetic construct
  source 1..75: mol_type = other DNA
gactttctgtatacccgaccgatcactctggcattgctgactctggcagcctttacgctactgacgccaataatc

SEQ ID NO: 613136 - DNA, 75 bp, synthetic construct
  source 1..75: mol_type = other DNA
ccgaccgatcactctggcattgctgactctggcagcctttacgctactgacgccaataatccgcaaaataatgcg

SEQ ID NO: 613137 - DNA, 75 bp, synthetic construct
  source 1..75: mol_type = other DNA
gtggcctcctgtgaggcaggcgcgaatggctgcaccggtggcgcattgttacctatgctgacgctggggatccct

SEQ ID NO: 613138 - DNA, 75 bp, synthetic construct
  source 1..75: mol_type = other DNA
acctggccactttctgccagacctgggacgacgagaaagtccataaattgatggatttatcgataaaaaaaaact

SEQ ID NO: 613139 - DNA, 75 bp, synthetic construct
  source 1..75: mol_type = other DNA
catcgtggtgatgcgcattatgtgccgtcgcggcttcgaaatggactttgctgaactgttgctggaagactacaa

SEQ ID NO: 613140 - DNA, 75 bp, synthetic construct
  source 1..75: mol_type = other DNA
aacaccatcggcgtggtgccgactttcggcgtgacctacaccggtaactatgagttcccgcagccgctgcacgat

SEQ ID NO: 613141 - DNA, 75 bp, synthetic construct
  source 1..75: mol_type = other DNA
gttcagaactactcgattcacgttttggtgcaaaggccatttcgactatcgcagaatcaaaacgctttccgctgc

SEQ ID NO: 613142 - DNA, 75 bp, synthetic construct
  source 1..75: mol_type = other DNA
cgcctcttaccaggttgccgcttatctggcggatgaaatcgccaaactggggccgtatgagttcatctgtacggg

SEQ ID NO: 613143 - DNA, 75 bp, synthetic construct
  source 1..75: mol_type = other DNA
ggatcgacaaagaagaatatccgcaatctgcagctatcgacctgcgttgcgtaaatatggttgctgacttgtggc

SEQ ID NO: 613144 - DNA, 75 bp, synthetic construct
  source 1..75: mol_type = other DNA
tccgctcagaactactcgattcacgttttggtgccaaggccatttcaactatcgctgactcaaaacgatttccgc

SEQ ID NO: 613145 - DNA, 75 bp, synthetic construct
  source 1..75: mol_type = other DNA
atggataagaagcaagtaacggatttaaggtcggaactactcgattcacgttttggcgccaagtctatttccact

SEQ ID NO: 613146 - DNA, 75 bp, synthetic construct
  source 1..75: mol_type = other DNA
agaagcgctgccgcaggaactggtgttcaacgttgactacctcggtggtcagattgggactttcgccatcaactt

SEQ ID NO: 613147 - DNA, 75 bp, synthetic construct
  source 1..75: mol_type = other DNA
atcgcggagtcaaaacgatttccgctgcacgaaatgcgcgatgatgttgcatttcagattatcaatgatgaatta

SEQ ID NO: 613148 - DNA, 75 bp, synthetic construct
  source 1..75: mol_type = other DNA
attatatcttgatggcaacgctcgtcagaacctggccactttctgccagacctgggacgacgaaaacgtccataa

SEQ ID NO: 613149 - DNA, 75 bp, synthetic construct
  source 1..75: mol_type = other DNA
ctggtgtgcggtccggtgcaaatctgctggcataaattcgcccgctactgggatgtggagctgcgtgagatccct

SEQ ID NO: 613150 - DNA, 75 bp, synthetic construct
  source 1..75: mol_type = other DNA
ggtctgaactactcgattcacgttttggtgcaaaggccatttcgactatcgcagaatcaaaacgctttccgctgc

SEQ ID NO: 613151 - DNA, 75 bp, synthetic construct
  source 1..75: mol_type = other DNA
tccgctcagaactactcgattcacgttttggtgccaagccaatttccactatcgctgactcaaaacgatttccgc

SEQ ID NO: 613152 - DNA, 75 bp, synthetic construct
  source 1..75: mol_type = other DNA
tccgctcagaactactcgattcacgttttggtgccaagtccatttctactatcgctgactcaaaacgatttccgc

SEQ ID NO: 613153 - DNA, 75 bp, synthetic construct
  source 1..75: mol_type = other DNA
tccgctcagaactactcgattcacgttttggtgccaagaccatttcgactatcgctgactcaaaacgatttccgc

SEQ ID NO: 613154 - DNA, 75 bp, synthetic construct
  source 1..75: mol_type = other DNA
aggtactccttacgaacaacgagctctagcgccaggaactaaagctgaaaaatactatgaatatgaggtaataaa

SEQ ID NO: 613155 - DNA, 75 bp, synthetic construct
  source 1..75: mol_type = other DNA
cgaagaaaaacacacccggtttaaggctgcatgtgccaaaaaaggtacatcgatcacagatgtggtgaaccagct

SEQ ID NO: 613156 - DNA, 75 bp, synthetic construct
  source 1..75: mol_type = other DNA
ggtttgatgtcactgtggggaatcacactcagctcaatggtgcggtaattgcgtccacggcaacggatgacaaaa

SEQ ID NO: 613157 - DNA, 75 bp, synthetic construct
  source 1..75: mol_type = other DNA
cggaagccaaagcgcagaatattccagtgctttcttatctggctaaccactttgcgtcgctaaccactttgcgtc

SEQ ID NO: 613158 - DNA, 75 bp, synthetic construct
  source 1..75: mol_type = other DNA
aaccaatggcggaggcctcagtatcttcgccggtatcaatggttcagagggcagggagaaaggcaacggcacgac

SEQ ID NO: 613159 - DNA, 75 bp, synthetic construct
  source 1..75: mol_type = other DNA
atcagcattaccggtgacagtgtggtggttgacccggggcatgaccgtcgtactgtggacgaaaaatttgagcag

SEQ ID NO: 613160 - DNA, 75 bp, synthetic construct
  source 1..75: mol_type = other DNA
ggcaaaaagctgggtatcatcggctatggtcatattggtactcaattgggcattctggctgaatcgctgggaatg

SEQ ID NO: 613161 - DNA, 75 bp, synthetic construct
  source 1..75: mol_type = other DNA
tgtggtggatattccggcgctgtgtgatgcgctggcgagcaaacatctggcgggggcggcaatcgacgtattccc

SEQ ID NO: 613162 - DNA, 75 bp, synthetic construct
  source 1..75: mol_type = other DNA
caatggttcaacgctctctgcggtgaacttcccggaagtctcgctgccactgcacggtggtcgtcgtctgatgca

SEQ ID NO: 613163 - DNA, 75 bp, synthetic construct
  source 1..75: mol_type = other DNA
tgcacggtgggcgtcgtctgatgcacatccacgaaaaccgtccgggcgtgctaactgcgctcaacaaaatttttg

SEQ ID NO: 613164 - DNA, 75 bp, synthetic construct
  source 1..75: mol_type = other DNA
tggcgaacttctgctgctattgcgcggcgtaccggaagccaacgctaaagcgcaccgtggtgtctggaacaagct

SEQ ID NO: 613165 - DNA, 75 bp, synthetic construct
  source 1..75: mol_type = other DNA
ctggtcgctattggctgtttctgtatcggaacaaaccaggttgatctggatgcagctgcaaaacgcgggatcccg

SEQ ID NO: 613166 - DNA, 75 bp, synthetic construct
  source 1..75: mol_type = other DNA
agtgctttcttatctggctaaccactttgcgtccatgaccggtaccaaaacaacgttcgcaattacactggaata

SEQ ID NO: 613167 - DNA, 75 bp, synthetic construct
  source 1..75: mol_type = other DNA
tacatcatactttatataagtcaaagttttttagtagctctcgttattcttttaacattaatgatttctacaaga

SEQ ID NO: 613168 - DNA, 75 bp, synthetic construct
  source 1..75: mol_type = other DNA
gtgctgtcttacttaatggcaattcactttgttttatttgggaactctactaatttaaaaaacttctggaaatat

SEQ ID NO: 613169 - DNA, 75 bp, synthetic construct
  source 1..75: mol_type = other DNA
ataatgtaaaaataggtgcaatgtcttttataaataaagatataccatcaaactgcacatatataactaaaaaga

SEQ ID NO: 613170 - DNA, 75 bp, synthetic construct
  source 1..75: mol_type = other DNA
cattgtcctggtcagcctggtcagagctggtgttccactgggggtcatgctgcaccaggctctgcgtgcgatggg

SEQ ID NO: 613171 - DNA, 75 bp, synthetic construct
  source 1..75: mol_type = other DNA
aggaattgtgctgttagtaattgctttcttcatattcgctatcagtcaaagttttatattaactgtcgttatcta

SEQ ID NO: 613172 - DNA, 75 bp, synthetic construct
  source 1..75: mol_type = other DNA
gctgcggcgagcggccctctgggaagcaacgcacaatacctgttttctctggagcaggagcttatcaaactgggg

SEQ ID NO: 613173 - DNA, 75 bp, synthetic construct
  source 1..75: mol_type = other DNA
atgatctgggtattcgtgaaagcatactggaaacagttgcttattgtcgtgatgcttgctgcgctggtggtcatc

SEQ ID NO: 613174 - DNA, 75 bp, synthetic construct
  source 1..75: mol_type = other DNA
cgctgggtaaactgaatactctcagcatgatcttcatcatgggctccacctgggttgttgcctacgccaacccga

SEQ ID NO: 613175 - DNA, 75 bp, synthetic construct
  source 1..75: mol_type = other DNA
tttctcctttaacttctcgccaatcgtctcttccttcgtggtttctaaacgtgaagagtatgagaaagacttcgg

SEQ ID NO: 613176 - DNA, 75 bp, synthetic construct
  source 1..75: mol_type = other DNA
ttgttgttcattttgctgttgatgctggtgaaaatctggtgttacgacagaatactaccattggacagatagatg

SEQ ID NO: 613177 - DNA, 75 bp, synthetic construct
  source 1..75: mol_type = other DNA
agcacattaccgtcaaattgcaccagcccgtgaagttgatgtggcacgctgcctctcaaccgaaactctggccgc

SEQ ID NO: 613178 - DNA, 75 bp, synthetic construct
  source 1..75: mol_type = other DNA
ggagtggttgcctggaatatacacggcagtcgccagtacgatgccgggtatgcgcaggcggaagaagaccgcaaa

SEQ ID NO: 613179 - DNA, 75 bp, synthetic construct
  source 1..75: mol_type = other DNA
tgctgcggcaaaacgtgggatcccggtatttaacgcaccgttttcgaatacgcgttccgttgctgagctggtgat

SEQ ID NO: 613180 - DNA, 75 bp, synthetic construct
  source 1..75: mol_type = other DNA
cgatatccgctttgacaacgtcagctatcgctacgaagaaggcgacggccacgcgcttaatcatgtttctttgac

SEQ ID NO: 613181 - DNA, 75 bp, synthetic construct
  source 1..75: mol_type = other DNA
ttgggcgccgtggatcgagcgctggcggcttccgcccggtagccaggaacgccgttcccgcatgttaatcctgcg

SEQ ID NO: 613182 - DNA, 75 bp, synthetic construct
  source 1..75: mol_type = other DNA
ccgtggtcatctggcgcaggctacccatgagttgcgcctgcgacttggcgagcagttacgccgcgtgccgctgga

SEQ ID NO: 613183 - DNA, 75 bp, synthetic construct
  source 1..75: mol_type = other DNA
gtgataactgaacgccggaacgtattgctacaaggcgctggctggttattgttgctggccccgtttttcttcttc

SEQ ID NO: 613184 - DNA, 75 bp, synthetic construct
  source 1..75: mol_type = other DNA
cctgcaagataaagctctcggcggggaatatccattcacgatagcaacctggaatctgcggttggcaatggagaa

SEQ ID NO: 613185 - DNA, 75 bp, synthetic construct
  source 1..75: mol_type = other DNA
atgatggatgtaaaagagaaggttttgcaggtgatgcgttcccgggctgccctgcaagataaagctctcggcggg

SEQ ID NO: 613186 - DNA, 75 bp, synthetic construct
  source 1..75: mol_type = other DNA
cgcattgaagatttacgcgcggcggctgaaatcgccaaagggcgaaaagtcgcgccaggcgtacaggcactggtg

SEQ ID NO: 613187 - DNA, 75 bp, synthetic construct
  source 1..75: mol_type = other DNA
tgaccgaagtggctatcgacaaagtgtttatcggttcctgtaccaactcgcgcattgaagatttacgcgcggcgg

SEQ ID NO: 613188 - DNA, 75 bp, synthetic construct
  source 1..75: mol_type = other DNA
aacgacaatattcccgatcccgcttcgtttgccgatccggttgagcgcgcgtcagcagaaaaagcgttggcctat

SEQ ID NO: 613189 - DNA, 75 bp, synthetic construct
  source 1..75: mol_type = other DNA
gatgaagcgattagttatattcgagccagacgttcgcatattgtgctgacagacgagcacaaagcgatgctgaaa

SEQ ID NO: 613190 - DNA, 75 bp, synthetic construct
  source 1..75: mol_type = other DNA
cagcgcaggtggcaccgggcatgtggtggagttttgcggcgaagcaatccgtgatttaagcatggaaggccgcat

SEQ ID NO: 613191 - DNA, 75 bp, synthetic construct
  source 1..75: mol_type = other DNA
gcatctggtcagcccggctatggctgccgccgctgctgtgaccggacatttcgccgacattcgcaacattaaata

SEQ ID NO: 613192 - DNA, 75 bp, synthetic construct
  source 1..75: mol_type = other DNA
tggtcagaatactgaccgatgagcattccaacaacgttcagcattaccttgatcacgaatgctttatattgggcg

SEQ ID NO: 613193 - DNA, 75 bp, synthetic construct
  source 1..75: mol_type = other DNA
gagcctgaatcgatttataatttacccaataacgagtttaataaagaaataatatattggctcagtcagtatctt

SEQ ID NO: 613194 - DNA, 75 bp, synthetic construct
  source 1..75: mol_type = other DNA
tcgctgctgaacaggttgttacgctggagggaccaaaaggcaaattgcacaacgttcgcttgttggggccgctac

SEQ ID NO: 613195 - DNA, 75 bp, synthetic construct
  source 1..75: mol_type = other DNA
ttactggctacgttactcaatcacttcaataaggtgaatctgggcgttgcaagtgttcgtgacgatgatatgggg

SEQ ID NO: 613196 - DNA, 75 bp, synthetic construct
  source 1..75: mol_type = other DNA
tgcacggtggccgccgtctgatgcacatccacgaaaaccgtccgggcgtgctgactgcgctgaacaaaatctttg

SEQ ID NO: 613197 - DNA, 75 bp, synthetic construct
  source 1..75: mol_type = other DNA
cctgtgaccagagtcataatagttaccgatgcgggaagcgctccgtcgtatcgggacactgtacgctttcgaggc

SEQ ID NO: 613198 - DNA, 75 bp, synthetic construct
  source 1..75: mol_type = other DNA
atgaatatcgaagaatttgtgagtgaagaaaaccatatgtgcaatttgggcgatgatcttttttacaagatcttc

SEQ ID NO: 613199 - DNA, 75 bp, synthetic construct
  source 1..75: mol_type = other DNA
gtacgggaagcgacggaatatctcattcaacaagggcacagagatatcgtgtttattggtggtcttacgcaccat

SEQ ID NO: 613200 - DNA, 75 bp, synthetic construct
  source 1..75: mol_type = other DNA
attggcaacaattgcccgtcgattacgttggcgtggacagccacgcaggtgtacgggaagcgacggaatatctca

SEQ ID NO: 613201 - DNA, 75 bp, synthetic construct
  source 1..75: mol_type = other DNA
cgcgtctctccggatatgcgtcttgaaatgcatattgataccgatgaggccaacgccgcaggggctgatagccct

SEQ ID NO: 613202 - DNA, 75 bp, synthetic construct
  source 1..75: mol_type = other DNA
atgacactgattaacctaaaagatctcgaggcccatctttggcatgcagcccatattatcactgggcctattgat

SEQ ID NO: 613203 - DNA, 75 bp, synthetic construct
  source 1..75: mol_type = other DNA
tccccatcctgttcttcaagcgcatttgtgacgtgtatgacgaagaatttgccgatgcgatggagagcgttgggg

SEQ ID NO: 613204 - DNA, 75 bp, synthetic construct
  source 1..75: mol_type = other DNA
ttgcccagcggcacattcatatgactccccttgacgcgctggtctatcgcgtgactcacggcgataaagtctctg

SEQ ID NO: 613205 - DNA, 75 bp, synthetic construct
  source 1..75: mol_type = other DNA
agatcctgatgtgattttgctcggagagctgcgtgacagcgagacaatccgtctggcgctgacggcggcagaaac

SEQ ID NO: 613206 - DNA, 75 bp, synthetic construct
  source 1..75: mol_type = other DNA
atgaatatggaagaaattgtggcccttagtgtaaagcataatgtctcggatctacacctgtgcagcgcctggccc

SEQ ID NO: 613207 - DNA, 75 bp, synthetic construct
  source 1..75: mol_type = other DNA
gacaaagctgaaaaacccatgcagggggatattgtcatcgcggaaacagatggcgagttcaccgttaagcgcctg

SEQ ID NO: 613208 - DNA, 75 bp, synthetic construct
  source 1..75: mol_type = other DNA
gttttgccctgttctatgaagtgggcttcgtactgatgctgccgctggtgtttaccatcgccgctgctgcaaata

SEQ ID NO: 613209 - DNA, 75 bp, synthetic construct
  source 1..75: mol_type = other DNA
gttttgccctgttctatgaagtaggcttcgtgctgatgctgccgctggtattcaccatcgctgctgctgcaaata

SEQ ID NO: 613210 - DNA, 75 bp, synthetic construct
  source 1..75: mol_type = other DNA
tgccgatgaacccggcctatcccactctctatccggaagacctgcagatttttggggtggtgacagccttcatac

SEQ ID NO: 613211 - DNA, 75 bp, synthetic construct
  source 1..75: mol_type = other DNA
caccatataaaacaccttcctgttgttggggatatccagattatacagatttcctgtcgttggggaacgacggaa

SEQ ID NO: 613212 - DNA, 75 bp, synthetic construct
  source 1..75: mol_type = other DNA
aagatgcatcaagagtttaatgttgatgtaaattggttgctcactggaatgagcacagatggtatgactagaaac

SEQ ID NO: 613213 - DNA, 75 bp, synthetic construct
  source 1..75: mol_type = other DNA
ctggcgatgacaccacaatcgcaggctctgcgtagtatcttttttgccagtaccgaagtgaagaaagatccgggc

SEQ ID NO: 613214 - DNA, 75 bp, synthetic construct
  source 1..75: mol_type = other DNA
ttgtttgccgatcgttgccaggccggttttccttcgcctgccactgattatgctgagcaggaactggatctgaac

SEQ ID NO: 613215 - DNA, 75 bp, synthetic construct
  source 1..75: mol_type = other DNA
ggataaacctgtctcactggcccttaaatccggcaatttcggtgacgaagcctttttttcacgagcccaaagaga

SEQ ID NO: 613216 - DNA, 75 bp, synthetic construct
  source 1..75: mol_type = other DNA
aaaacacaaacaaaaagatggacgaagatttaaaacaagaaattttaaagaaacatatcaatatggttatacaaa

SEQ ID NO: 613217 - DNA, 75 bp, synthetic construct
  source 1..75: mol_type = other DNA
tggcgcgatgctgggcaaaatgctggcagactgcggtagtgcacaacgtatcgccaccacgctgattgccaaatt

SEQ ID NO: 613218 - DNA, 75 bp, synthetic construct
  source 1..75: mol_type = other DNA
atggataagaagcaagtaacggatttaaggtcggaactactcgattcacgttttggtgctaagtcgatttctact

SEQ ID NO: 613219 - DNA, 75 bp, synthetic construct
  source 1..75: mol_type = other DNA
atggataagaagcaagtaacggatttaaggtcggaactactcgattcacgttttggagctaagtctatttctact

SEQ ID NO: 613220 - DNA, 75 bp, synthetic construct
  source 1..75: mol_type = other DNA
gctgcacgatgcgctggataaattccaggccgataccggtatcgacatcgacatgcacatcgacgctgccagcgg

SEQ ID NO: 613221 - DNA, 75 bp, synthetic construct
  source 1..75: mol_type = other DNA
tggaagcgcctgtggaagcgcaatcgacacaacagactgcgcctgacatctccgcagttacgcttcctgcaacgg

SEQ ID NO: 613222 - DNA, 75 bp, synthetic construct
  source 1..75: mol_type = other DNA
gtccggccagactgaataacgaacaacggtcagcggtacgcgaacggttgtctgagcgtggagcaaggagactgg

SEQ ID NO: 613223 - DNA, 75 bp, synthetic construct
  source 1..75: mol_type = other DNA
atggataagaagcaagtaacggatttaaggtcggaactactcgattcacgttttggggctaagtcaatttccact

SEQ ID NO: 613224 - DNA, 75 bp, synthetic construct
  source 1..75: mol_type = other DNA
ctttacggcgtatcacacaaatagttttactcttgaacaacaagcgcatctggcggagattgctgaaggtctggt

SEQ ID NO: 613225 - DNA, 75 bp, synthetic construct
  source 1..75: mol_type = other DNA
tcctgccctccaggcaatgaatcccgcctatccgacactctatcccgatccggaacacctgcagatttttggtgt

SEQ ID NO: 613226 - DNA, 75 bp, synthetic construct
  source 1..75: mol_type = other DNA
gctgatggtgcacgtcaccgcgcaccgtatcgatccgggctggtctggctgcattgtgctggagttctacaactc

SEQ ID NO: 613227 - DNA, 75 bp, synthetic construct
  source 1..75: mol_type = other DNA
agcagagctggaatcagaattaagtcagtcaatcaacgctgatgataccgctcagcgcattatgacaattcctgg

SEQ ID NO: 613228 - DNA, 75 bp, synthetic construct
  source 1..75: mol_type = other DNA
ttttgggcatgaaactaagctaatttctccacagttcgttcgcccgtttgtcaaaagtaataagaatgattttgt

SEQ ID NO: 613229 - DNA, 75 bp, synthetic construct
  source 1..75: mol_type = other DNA
ttctactagaaagaaaacattaagatgttatgagggagttatcgagaccttagactacctcaagaatcaaggggt

SEQ ID NO: 613230 - DNA, 75 bp, synthetic construct
  source 1..75: mol_type = other DNA
cggtgcttggtttaccggaagtccaactgggattattgcccggttcgggcggaactcagcgtttaccccgactgg

SEQ ID NO: 613231 - DNA, 75 bp, synthetic construct
  source 1..75: mol_type = other DNA
ttcgcattgcaaacatcgatgtcagcaatctttcagaaccttcctctgccgcaaatattgcgaagttgatggtta

SEQ ID NO: 613232 - DNA, 75 bp, synthetic construct
  source 1..75: mol_type = other DNA
ttctctggcgatcagcgtgaaagagacagaaggcgaatggtggacagcacttcgtggtgtgccgattcgcgaaac

SEQ ID NO: 613233 - DNA, 75 bp, synthetic construct
  source 1..75: mol_type = other DNA
ctggattaaactgggtgtgccgaaagatcaactgaatcctgttccagcaatgttgttgggggcgttgaacttaac

SEQ ID NO: 613234 - DNA, 75 bp, synthetic construct
  source 1..75: mol_type = other DNA
gcgagggagtttttcctgccggagaaccgccgttatatcccggactttgacgaatcctggctgataatctgtgat

SEQ ID NO: 613235 - DNA, 75 bp, synthetic construct
  source 1..75: mol_type = other DNA
tgactatgaactaaaccgtgttcgtcagcagctggccccggagctgatcgcacagatagaaaactggaaagagca

SEQ ID NO: 613236 - DNA, 75 bp, synthetic construct
  source 1..75: mol_type = other DNA
attccgttggcatgttggaaacctatgctgaagtcgataagtcactggctgatctgaacggcaataccgccgaat

SEQ ID NO: 613237 - DNA, 75 bp, synthetic construct
  source 1..75: mol_type = other DNA
ttgccggtagtgattgcaggtgatcttagctggtctggctttcgtccggacatgatcaaccgcctgcatccagcg

SEQ ID NO: 613238 - DNA, 75 bp, synthetic construct
  source 1..75: mol_type = other DNA
caaacgggcgatggaaaaccggggctttgattttgaaatgattaatgtcgatcgcgttcctgaagcggcggaagc

SEQ ID NO: 613239 - DNA, 75 bp, synthetic construct
  source 1..75: mol_type = other DNA
gcgctctgtctgggccgaagaaggcctgcatggctgtgtggtttgcgatcaccttcagtcttttgaatgcagcca

SEQ ID NO: 613240 - DNA, 75 bp, synthetic construct
  source 1..75: mol_type = other DNA
atgaagaggacgaatttgccggtattaagaacacatatcctgatgaaatgctgaaagagttggttgaacgcacgc

SEQ ID NO: 613241 - DNA, 75 bp, synthetic construct
  source 1..75: mol_type = other DNA
atgcctgcaaaacggcggtcattgtcagggttatctcttccgctgtctccactgcggcaagctgagactatgggg

SEQ ID NO: 613242 - DNA, 75 bp, synthetic construct
  source 1..75: mol_type = other DNA
gagccagcgcctacacaatggcatcttgatttgtttcaccgggcgctggatcggggcgcagagaggcttgcaaaa

SEQ ID NO: 613243 - DNA, 75 bp, synthetic construct
  source 1..75: mol_type = other DNA
atcgctatctggagtatggtctgcaggcgttactgaaggggcacagtgtgatactggcgagggagtttttcctgc

SEQ ID NO: 613244 - DNA, 75 bp, synthetic construct
  source 1..75: mol_type = other DNA
gttaatggcggagattcatgctttgcccgttccggttatcgcggctattcatggcgcttgcctgggcggtgggct

SEQ ID NO: 613245 - DNA, 75 bp, synthetic construct
  source 1..75: mol_type = other DNA
atggaaatggcatcagcatttaccctcaatatgcgtctggacaacattgccatcatcaccatcgacgttcccggt

SEQ ID NO: 613246 - DNA, 75 bp, synthetic construct
  source 1..75: mol_type = other DNA
aactgcaaaacggcgcaagaagcggaagcactggcgcggcaggggcaaaagttaatggcagagattcatgctttg

SEQ ID NO: 613247 - DNA, 75 bp, synthetic construct
  source 1..75: mol_type = other DNA
gttgatggcggagattcatgctttgcccattccggttatcgcggctattcatggcgcttgcctgggcggtgggct

SEQ ID NO: 613248 - DNA, 75 bp, synthetic construct
  source 1..75: mol_type = other DNA
tattaaacaactccgcgaaaataaagatctgcgcggcgtggtgtttatctccgcgaaaccggacaactttattgc

SEQ ID NO: 613249 - DNA, 75 bp, synthetic construct
  source 1..75: mol_type = other DNA
cttgatgggcggcggtattgcttacgtcactgcctgtaaagcgggtctgccggtacgaattaaagatatcaacgc

SEQ ID NO: 613250 - DNA, 75 bp, synthetic construct
  source 1..75: mol_type = other DNA
cgctcaccggccgctttctgcaggcaagtgttattgaaccgaattgtagcctgcgtgcacagtatctggcgtcac

SEQ ID NO: 613251 - DNA, 75 bp, synthetic construct
  source 1..75: mol_type = other DNA
acattaacccttgcgtttctgactgtcttcgcctgcgtactggtatttatcccttttaaagccgtccgttatatc

SEQ ID NO: 613252 - DNA, 75 bp, synthetic construct
  source 1..75: mol_type = other DNA
agatcattgctactgacggcatgaccactcattacggtcaaattactcatctacaaggtcgacgtatattccctg

SEQ ID NO: 613253 - DNA, 75 bp, synthetic construct
  source 1..75: mol_type = other DNA
ctcacgcctcacgaccagggcaggttatcggcctgcatttcttcagcccggtagaaaaaatgccgctggtagaaa

SEQ ID NO: 613254 - DNA, 75 bp, synthetic construct
  source 1..75: mol_type = other DNA
gtccactattctctcaggaatttcaggatctgccagacggtgctgagacgacgcttacgtctgatgagctcgagc

SEQ ID NO: 613255 - DNA, 75 bp, synthetic construct
  source 1..75: mol_type = other DNA
acaggaaaaatggacaatgccgatccagagctggaatttgacattgtcgcagttagccatttattttgaagggcg

SEQ ID NO: 613256 - DNA, 75 bp, synthetic construct
  source 1..75: mol_type = other DNA
gacagggccgacttttcggcctttatggagagtagtggctattatgatgacgagtcgatgcaggatgatattctt

SEQ ID NO: 613257 - DNA, 75 bp, synthetic construct
  source 1..75: mol_type = other DNA
gacagggccgacttttcggcctttatggatagaagtggctattatgatgacgagtcgatgcaggatgatattctt

SEQ ID NO: 613258 - DNA, 75 bp, synthetic construct
  source 1..75: mol_type = other DNA
gacagggccgacttttcggcctttatggaaagcattggctattatgatgacgagtcgatgcaggatgatattctt

SEQ ID NO: 613259 - DNA, 75 bp, synthetic construct
  source 1..75: mol_type = other DNA
aggtatgagcgcctgtatttgtatcctgggttgcgtggctgggcgatactttcgtttccaacaacatcgactgga

SEQ ID NO: 613260 - DNA, 75 bp, synthetic construct
  source 1..75: mol_type = other DNA
cgctgttgcttctttcgctgcggtgtctggtctgttcattctgccgacctacccgacgctggttgctgcggtaca

SEQ ID NO: 613261 - DNA, 75 bp, synthetic construct
  source 1..75: mol_type = other DNA
atcggtaaattcgtcttcaaccatccgttcttcatcccgggtactctgggccctggccgtttgcttcggcttcgt

SEQ ID NO: 613262 - DNA, 75 bp, synthetic construct
  source 1..75: mol_type = other DNA
gtgggcgaagccattgctgacttcaatatgattgaagaaggcgatcgcatcatggtttgcctctccgggggtaaa

SEQ ID NO: 613263 - DNA, 75 bp, synthetic construct
  source 1..75: mol_type = other DNA
atgcagagcgataaagtgcgcgccgttttaatgaaagcagaggctattgtgttggggacgatagggatgggattt

SEQ ID NO: 613264 - DNA, 75 bp, synthetic construct
  source 1..75: mol_type = other DNA
gcttctcgttcggcgtatccgcgctggctactaccggcttgcatcttggcagcggcaacgataatggttttttcc

SEQ ID NO: 613265 - DNA, 75 bp, synthetic construct
  source 1..75: mol_type = other DNA
aagacggatattttgtaaacgtgcgcatcattaatgatgcaaaaaaatcgtcaatattcgatgaatacgcggttg

SEQ ID NO: 613266 - DNA, 75 bp, synthetic construct
  source 1..75: mol_type = other DNA
aagacggatattttgtaaacgtgcgcatcattaatgatgcaaaaaaatcgtcaatattcgataaatacgcgattg

SEQ ID NO: 613267 - DNA, 75 bp, synthetic construct
  source 1..75: mol_type = other DNA
tcttaaatatgttctacggcggcaagatgaaaggtatgcctccgaaactgatgagcgatgatggcaaacatattg

SEQ ID NO: 613268 - DNA, 75 bp, synthetic construct
  source 1..75: mol_type = other DNA
acgtctgagacaaacgctaagtcctctgaaacggcagcagaacagagtgcctccgcagcagcaggctcaaaaaca

SEQ ID NO: 613269 - DNA, 75 bp, synthetic construct
  source 1..75: mol_type = other DNA
atggctccactgccaacagtaaccgaatcttctgaatgcgttaaagagggtacaaattctgtcgaactggggtat

SEQ ID NO: 613270 - DNA, 75 bp, synthetic construct
  source 1..75: mol_type = other DNA
acttctggtcttatctggatggcggtgctgatggggcaaatcgcccgtcgcggcctgaccagcactaaccgtacc

SEQ ID NO: 613271 - DNA, 75 bp, synthetic construct
  source 1..75: mol_type = other DNA
ccccgaaattacgctgtacggcgtcggcagcgtggaagaagaagttgggctacgcggggcacaaacctcggctga

SEQ ID NO: 613272 - DNA, 75 bp, synthetic construct
  source 1..75: mol_type = other DNA
atgattgccttctacgccttaagcggctttttccagagtaccggcggttcgtgcagttactccaccatcaccaaa

SEQ ID NO: 613273 - DNA, 75 bp, synthetic construct
  source 1..75: mol_type = other DNA
tggacgccgcgtcgtaaacgcgggacgttcctcggtttctggaacatttctcacaaccttggcggtgcaggcgca

SEQ ID NO: 613274 - DNA, 75 bp, synthetic construct
  source 1..75: mol_type = other DNA
ctctaaagcggtggcgattcagggctttacgctgtttgaagctggtgcgctggtcggtacgctgctgtggggctg

SEQ ID NO: 613275 - DNA, 75 bp, synthetic construct
  source 1..75: mol_type = other DNA
agcgtcagtgggctgggcgatcgcttcattgataaagtaaatgacgcgaaagaagatgtactgaccgacggtatt

SEQ ID NO: 613276 - DNA, 75 bp, synthetic construct
  source 1..75: mol_type = other DNA
tcgctaccagaccaccaccattgtcaacaccaacgacgcaattccaggatccggcatgtttgtacgcagtagcct

SEQ ID NO: 613277 - DNA, 75 bp, synthetic construct
  source 1..75: mol_type = other DNA
atggcgtcgcgcgcggtgcctggcagctggatgaagaaagttccgctgtagtggtgctggataaagacggtcgcg

SEQ ID NO: 613278 - DNA, 75 bp, synthetic construct
  source 1..75: mol_type = other DNA
gttaaccgaaaagcaaaagcaacagccgctgtcatttgatgagatgttcattgatattggcgcgaacagtcgcga

SEQ ID NO: 613279 - DNA, 75 bp, synthetic construct
  source 1..75: mol_type = other DNA
gcttcagaaacgcaaaaagtcaccaaagagaaacctgcacatctggcgcaatccattcgcgttgcgaaacgttaa

SEQ ID NO: 613280 - DNA, 75 bp, synthetic construct
  source 1..75: mol_type = other DNA
cccaggtaaaagcctcttttgcattacagggcgcacaccttctctcgtggaaacctgcaggtgaagaagaagttc

SEQ ID NO: 613281 - DNA, 75 bp, synthetic construct
  source 1..75: mol_type = other DNA
tgcagcgtctgcgcagttcaggagagttaccgacggcactgcgtacatcgctgggaattcaactggcgcctgcgc

SEQ ID NO: 613282 - DNA, 75 bp, synthetic construct
  source 1..75: mol_type = other DNA
atgaaggctggaataccaaatatggtgttattcagctcactatcactgatgacaacgtggtgctgaaatccattc

SEQ ID NO: 613283 - DNA, 75 bp, synthetic construct
  source 1..75: mol_type = other DNA
aaatccggcgcagtgcagtgcgggttttgtacgcctggcctgattatggctaccgtaagcgtaaagccaatgccg

SEQ ID NO: 613284 - DNA, 75 bp, synthetic construct
  source 1..75: mol_type = other DNA
ggaatctttatccagcaagggaaaacaggaaaaaaacagataaaagcatggagtccacgattacaggcggcgatc

SEQ ID NO: 613285 - DNA, 75 bp, synthetic construct
  source 1..75: mol_type = other DNA
tgaaacgcttgccgcgacaccgaaagcagtgaaagcagctaatgacaatgcgaatggtcgggtaccttctgcccg

SEQ ID NO: 613286 - DNA, 75 bp, synthetic construct
  source 1..75: mol_type = other DNA
gatggcgaaccggtatgtgttaaggaagacggatattttgtaaacgtgcgcatcattaatgatgcaaaaaaatcg

SEQ ID NO: 613287 - DNA, 75 bp, synthetic construct
  source 1..75: mol_type = other DNA
ccatagtttaagtggcagcacgaatgcagctggtaatcacagccatagagatggccgtcgatttaaccccagtgt

SEQ ID NO: 613288 - DNA, 75 bp, synthetic construct
  source 1..75: mol_type = other DNA
tttaccgctgaattatgtccgtcgcgaggattatatccgtggccagacagttatcgaggccaaactggacgcgct

SEQ ID NO: 613289 - DNA, 75 bp, synthetic construct
  source 1..75: mol_type = other DNA
agtttaaacgcgaatccgctcaactggtggttgaccagaaatacacggtggcagatgccgccaaagctatggatg

SEQ ID NO: 613290 - DNA, 75 bp, synthetic construct
  source 1..75: mol_type = other DNA
agtttaaacgcgaatccgctcaactggtcgttgaccagaaatacaccgtggcagatgccgccaaagctatggatg

SEQ ID NO: 613291 - DNA, 75 bp, synthetic construct
  source 1..75: mol_type = other DNA
tattttaaccgacttcacctttcatgatctgaaggcgaaaggaatttcagactatgaaggaagcagccgggataa

SEQ ID NO: 613292 - DNA, 75 bp, synthetic construct
  source 1..75: mol_type = other DNA
cagcagccgtaaattcctgtactagcgatgtagaaaatttcaataagcatttggcatgcaaagcagctgttaaag

SEQ ID NO: 613293 - DNA, 75 bp, synthetic construct
  source 1..75: mol_type = other DNA
gagtcaggctggtcacggctggagcgcgagttcctggagttccgcgccgatatgccattgaactacgtgcggcgc

SEQ ID NO: 613294 - DNA, 75 bp, synthetic construct
  source 1..75: mol_type = other DNA
aaagagttcgaccttagtaacccgctggttcaggcaaagctcaaagaacgctacggcaaaaatattccgcttgag

SEQ ID NO: 613295 - DNA, 75 bp, synthetic construct
  source 1..75: mol_type = other DNA
gatggcgaaccggtatgtgttaaggaagatggatattttgtaaacgtgcgcattattaaggatacgcaaatatcg

SEQ ID NO: 613296 - DNA, 75 bp, synthetic construct
  source 1..75: mol_type = other DNA
caaagaaaccggagaacttaccgaagatggcgagccggtatgtgttaaggaagacggatattttgtaaacgtgcg

SEQ ID NO: 613297 - DNA, 75 bp, synthetic construct
  source 1..75: mol_type = other DNA
gtttcaccccaagccgttttcgacgcgccacaactcaccacagtcgccaaagaatggccgctgttttcgtggtaa

SEQ ID NO: 613298 - DNA, 75 bp, synthetic construct
  source 1..75: mol_type = other DNA
ctgctcatccgtactttcgcgcttctgatgcagggaaaattgttagtcagaaccgagcgcgccgttttaatgaaa

SEQ ID NO: 613299 - DNA, 75 bp, synthetic construct
  source 1..75: mol_type = other DNA
ggattatggcgcggatctcaccctgaagaagctaccacgcctggactgtatctgccgacagttgccaacaacttt

SEQ ID NO: 613300 - DNA, 75 bp, synthetic construct
  source 1..75: mol_type = other DNA
gacgagtcgatgcaggatgatattctgattgatgtgataggtaacgtgtacaaagaaaccggagagctgactgaa

SEQ ID NO: 613301 - DNA, 75 bp, synthetic construct
  source 1..75: mol_type = other DNA
gaaacggtggtctcgccacaagccgttttcgatgcgccacaactcaccacagtcgccaaagaatggccgctgttt

SEQ ID NO: 613302 - DNA, 75 bp, synthetic construct
  source 1..75: mol_type = other DNA
gcacgtgggtgaacagcaaaaactgaaagagttcgatctcagcaacccgctggttcaggcgaagctcaaagaacg

SEQ ID NO: 613303 - DNA, 75 bp, synthetic construct
  source 1..75: mol_type = other DNA
cagtactgttcggaagtagtgtggaaggtttaccagaacgcactgggaatgcacgtgggtgaacagcaaaaactg

SEQ ID NO: 613304 - DNA, 75 bp, synthetic construct
  source 1..75: mol_type = other DNA
agccctacgtctttgaagcggtcggcccggtgaaatacaccccactcaaacagtggatcgcccacggtgaaaatg

SEQ ID NO: 613305 - DNA, 75 bp, synthetic construct
  source 1..75: mol_type = other DNA
gcctgctggtttctgtacctgcctttgcctggcagccgcaaactggcgacatcatctttcagatctctcgctcat

SEQ ID NO: 613306 - DNA, 75 bp, synthetic construct
  source 1..75: mol_type = other DNA
ggattggcatcgaagtccgatcagcgattcgcatccattcgatcaaccgggaacttaactttttctaccgctttt

SEQ ID NO: 613307 - DNA, 75 bp, synthetic construct
  source 1..75: mol_type = other DNA
ctgtggattattttttggtgatgttcattttagcggcatctattccattccacctgatattagcggtgttattgg

SEQ ID NO: 613308 - DNA, 75 bp, synthetic construct
  source 1..75: mol_type = other DNA
gttactggatgatatctaacattccgttaagtttacgtattggtatcaccagtggcatcgggttatttattgcct

SEQ ID NO: 613309 - DNA, 75 bp, synthetic construct
  source 1..75: mol_type = other DNA
tacggatttggggacgaaaaccacatcgtcgtttgattacggaactaaatccacaaataacaccggagcacatac

SEQ ID NO: 613310 - DNA, 75 bp, synthetic construct
  source 1..75: mol_type = other DNA
ctgaaacacaggctgcaacaccaaaggcggtaaaggcagcatatgaccttgctaacgggaaatatactgcgcagg

SEQ ID NO: 613311 - DNA, 75 bp, synthetic construct
  source 1..75: mol_type = other DNA
cagggcaaaacaccaaaagcctctccgatgacaccagaacaaatcgaattacgtgagctgaggaaaaagctacaa

SEQ ID NO: 613312 - DNA, 75 bp, synthetic construct
  source 1..75: mol_type = other DNA
ccgccggggcgttaatctttgttggtgtgttgatgacttcaagtctggcgcgcgttaactgggatgattttaccg

SEQ ID NO: 613313 - DNA, 75 bp, synthetic construct
  source 1..75: mol_type = other DNA
atggggacgctgttactcaatgaggcggcagacgctatcaaaatatgttgccagccaccggaggttcaccttgat

SEQ ID NO: 613314 - DNA, 75 bp, synthetic construct
  source 1..75: mol_type = other DNA
tattgaaaggtgcggcggcacaagcggtacagtgcgccaatattcgttttggctatgcccaaacgcagtctctta

SEQ ID NO: 613315 - DNA, 75 bp, synthetic construct
  source 1..75: mol_type = other DNA
ccagtggctacgctggcgcagagctagtgacctatgtaaatcgccatccgcatatgaacataaccgctttgactg

SEQ ID NO: 613316 - DNA, 75 bp, synthetic construct
  source 1..75: mol_type = other DNA
attcaataaaaaatcatatcttacattcacaattcatcattccggtttcttccaccattgcaccggacaggcgat

SEQ ID NO: 613317 - DNA, 75 bp, synthetic construct
  source 1..75: mol_type = other DNA
cgtttctttgcctggcgattacccggaaaataccaccaccctggcacctgctacgccatatgatacgtggaacgg

SEQ ID NO: 613318 - DNA, 75 bp, synthetic construct
  source 1..75: mol_type = other DNA
gataagtcggtgacactatgccatctcaggcagttcacggacggctttaatggcccattggttccggatcttcgt

SEQ ID NO: 613319 - DNA, 75 bp, synthetic construct
  source 1..75: mol_type = other DNA
acatggggttgcggaggtttgaaccgccccgggtttcctggagagtgttttatctgtgaactcaggctgccagat

SEQ ID NO: 613320 - DNA, 75 bp, synthetic construct
  source 1..75: mol_type = other DNA
tgtccgccgcgtggtcacgcttccttcgaaagcccggttcagtttccaggaggcgagaacagcctgggggaatgc

SEQ ID NO: 613321 - DNA, 75 bp, synthetic construct
  source 1..75: mol_type = other DNA
ccgtggggccaatgcgttttacagcgtgatggagcagatgaaaatgctcgataccctgcaaaatacccagctcca

SEQ ID NO: 613322 - DNA, 75 bp, synthetic construct
  source 1..75: mol_type = other DNA
ggacgacttttgcgggattgatgccgagcgtaagcgaacgtttacgatgatgatccgagaaggtgtggccatgca

SEQ ID NO: 613323 - DNA, 75 bp, synthetic construct
  source 1..75: mol_type = other DNA
caataatagtggtgctgcgctgggatattacgtcagcgatgacggttatcctggttggatggcgcagaactggac

SEQ ID NO: 613324 - DNA, 75 bp, synthetic construct
  source 1..75: mol_type = other DNA
aagccgcctggaatgagtatgccgaagatgacttctgcgggattgatgccgaacgcaagcgaacgtttacgatga

SEQ ID NO: 613325 - DNA, 75 bp, synthetic construct
  source 1..75: mol_type = other DNA
aggcgagaacagcctgggggaatgccaactggattggctctggtcgaatggcaattgacgggctgaaagaggtac

SEQ ID NO: 613326 - DNA, 75 bp, synthetic construct
  source 1..75: mol_type = other DNA
agtttaaacgcgaatccgctcaactggttgttgacctgaaatacacggtggcagatgccgccaaagctatggatg

SEQ ID NO: 613327 - DNA, 75 bp, synthetic construct
  source 1..75: mol_type = other DNA
cagggcaaaacaccaaaaaaacctccggtaacaccagaacaaatcgaaatagatgagctgagaaaaaagctacaa

SEQ ID NO: 613328 - DNA, 75 bp, synthetic construct
  source 1..75: mol_type = other DNA
agtttaaacgcgaatccgctcaactggttgttgaccagaactacacggtggcagatgccgtcaaagctatggatg

SEQ ID NO: 613329 - DNA, 75 bp, synthetic construct
  source 1..75: mol_type = other DNA
ggtgatatgctcacctcagaacaacacaggtgctccaatgaaaaaagaaattttagcgcagagtttaaacgcgaa

SEQ ID NO: 613330 - DNA, 75 bp, synthetic construct
  source 1..75: mol_type = other DNA
tattgaaaggtgcggcggcacaggcaatccagtgtgccaatattcgtttcggctatgcggaaacgcagtctctta

SEQ ID NO: 613331 - DNA, 75 bp, synthetic construct
  source 1..75: mol_type = other DNA
cagctaaaaggcatcgttgatctgccgttgcagccgatgtcggatatcagcgagtttagcccaggggtggacgtg

SEQ ID NO: 613332 - DNA, 75 bp, synthetic construct
  source 1..75: mol_type = other DNA
ttaatcaaggaggaaaagcggcaatcgagcgaatagttatcgcctatggatttaagacaaggcaagctctagcgg

SEQ ID NO: 613333 - DNA, 75 bp, synthetic construct
  source 1..75: mol_type = other DNA
cattagcaaagaggagtatcttagcgatggtctatggttagtatctattaacggagaatttacttttagagacat

SEQ ID NO: 613334 - DNA, 75 bp, synthetic construct
  source 1..75: mol_type = other DNA
tgatatcaatgcgcccgcgcccgaaaccgttaaccctagcctgtggcgtcagtcgcagttaaacggtatttccgg

SEQ ID NO: 613335 - DNA, 75 bp, synthetic construct
  source 1..75: mol_type = other DNA
acatgatgaaggctacttagcatttgacaagacgcttataccttccggattgaaaaaaccgattggagttaccgc

SEQ ID NO: 613336 - DNA, 75 bp, synthetic construct
  source 1..75: mol_type = other DNA
gtgccaggctgttatccgacggcggcacagctggcgctgaaaccgttgattgatgccgatcttcttgacctcaat

SEQ ID NO: 613337 - DNA, 75 bp, synthetic construct
  source 1..75: mol_type = other DNA
catttggtttagatgctgaagaaggagtgccagctccttcgccagaacggcatgctgaaaaacagtctgcagatg

SEQ ID NO: 613338 - DNA, 75 bp, synthetic construct
  source 1..75: mol_type = other DNA
aaaggacgagtttatatttcatcccaaaatcactcttttgaatgttcgcttacagatattgagtttattgcaaaa

SEQ ID NO: 613339 - DNA, 75 bp, synthetic construct
  source 1..75: mol_type = other DNA
cgttcctcggtttctggaatatttctcacaatcttggcggtgcgggcgcggcaggtgtggcgctgttcggcgcaa

SEQ ID NO: 613340 - DNA, 75 bp, synthetic construct
  source 1..75: mol_type = other DNA
ttagactgctatgatctacgtgacggcaaacttactgatcaaagagaattaatcgtttcgagcgaaattttacct

SEQ ID NO: 613341 - DNA, 75 bp, synthetic construct
  source 1..75: mol_type = other DNA
aagttagcagtggtcaaacattttttgaatgtatgcttgacgatataaaacccatcgcaagatgctatcgaaaag

SEQ ID NO: 613342 - DNA, 75 bp, synthetic construct
  source 1..75: mol_type = other DNA
cttgaaactggtatatcactagattggctcgttactggaaaaggctcaaaatcgaacgatgtaaatactgatgta

SEQ ID NO: 613343 - DNA, 75 bp, synthetic construct
  source 1..75: mol_type = other DNA
cagatgaagcgaaagccgccactcaatatacccaacaggttaatcagaattacgccaaatcattaccgtttagcg

SEQ ID NO: 613344 - DNA, 75 bp, synthetic construct
  source 1..75: mol_type = other DNA
tgaaaacgtactggcgggtaacattatgagccgccgtgcgctctactcttacggcctgttactgccgcacaacgc

SEQ ID NO: 613345 - DNA, 75 bp, synthetic construct
  source 1..75: mol_type = other DNA
gaactaccgtaaagtactgcaaccgaaggtagacgcatcgttttacatgagccgcagcgatctgcacgacgtgct

SEQ ID NO: 613346 - DNA, 75 bp, synthetic construct
  source 1..75: mol_type = other DNA
tcatcggcgatggcgcaaaattgggggaaattattgcttgtctggataatttcgaactgtgggttaatatcgtta

SEQ ID NO: 613347 - DNA, 75 bp, synthetic construct
  source 1..75: mol_type = other DNA
tatgaaaaatattacggctttacccatcaatacccggaactgttggaacaggcagcctacggtctggcggagtgg

SEQ ID NO: 613348 - DNA, 75 bp, synthetic construct
  source 1..75: mol_type = other DNA
acggtctgttactgccgcacaacgcgcaaggcaacgtgggtaatggcctgggcgtgacgctggcaaccggcgacc

SEQ ID NO: 613349 - DNA, 75 bp, synthetic construct
  source 1..75: mol_type = other DNA
ccgcccttgacctttacttccagcatcgtccgcaaaaaccgattgttgcggttatctacacccacagccacaccg

SEQ ID NO: 613350 - DNA, 75 bp, synthetic construct
  source 1..75: mol_type = other DNA
aaacgttacgtgcaggcgctgggcggttctgcccgtgtcatcaacctggcgcaagaagcgaacaagcaaggtgat

SEQ ID NO: 613351 - DNA, 75 bp, synthetic construct
  source 1..75: mol_type = other DNA
atcaagtacattcacgaccagaccctgcacctggcgaaccagggctacaccatgaatgaaatcggcgacatgatt

SEQ ID NO: 613352 - DNA, 75 bp, synthetic construct
  source 1..75: mol_type = other DNA
cgaacatcaccttcattgaaggtgatacgggcatcatcgtcattgacccgctggtgacgccaaatgcagcaaaag

SEQ ID NO: 613353 - DNA, 75 bp, synthetic construct
  source 1..75: mol_type = other DNA
taccgctggtcagctgaattgctgaaacaggtgatttccgccaatccgggagaccaggtagcgaagaatctgcag

SEQ ID NO: 613354 - DNA, 75 bp, synthetic construct
  source 1..75: mol_type = other DNA
gcattattgcaccgactaaaactatcgtcagaactggcgagaagatgattatcgacggcctggagtttgacttcc

SEQ ID NO: 613355 - DNA, 75 bp, synthetic construct
  source 1..75: mol_type = other DNA
tgaccaggtcgcgaagaatctgcaagcgaataactttgaacagctgggctatcaggccgagtccgccacctggcg

SEQ ID NO: 613356 - DNA, 75 bp, synthetic construct
  source 1..75: mol_type = other DNA
aaaacacgtacgtactgccggcgtcgctgacggggcaaatcagggaggaggatgccatcatgctgaccagccagt

SEQ ID NO: 613357 - DNA, 75 bp, synthetic construct
  source 1..75: mol_type = other DNA
gggatgctgggcagtcagtcactgcagaacccggtgggctggctgcttgcggtgctgaagcgtgcccgggaggga

SEQ ID NO: 613358 - DNA, 75 bp, synthetic construct
  source 1..75: mol_type = other DNA
cagacaccggggcagatggctgcccgtcagcgagtgacggaggaaagaatgcggccgggttcggaaaccgaaccg

SEQ ID NO: 613359 - DNA, 75 bp, synthetic construct
  source 1..75: mol_type = other DNA
cgctggcagatccagaccaacgatgaactgaaaaccgccgctgaatatcagccgttgattattcattacaacaac

SEQ ID NO: 613360 - DNA, 75 bp, synthetic construct
  source 1..75: mol_type = other DNA
ctattggtattgatatcgacccgcaggctattcaggcaagccgtgacaacgctgaacgcaatggcgtttccgagc

SEQ ID NO: 613361 - DNA, 75 bp, synthetic construct
  source 1..75: mol_type = other DNA
aattgacggtgaagaggtttaccgggcagaacgcgaagcagaatcccagccagcgccagcagagcctgtaccgca

SEQ ID NO: 613362 - DNA, 75 bp, synthetic construct
  source 1..75: mol_type = other DNA
tccggcaggtcagaaaaagaaacgtgatgcggagcatggcgaatgtggaaccttttgcggcgaccccgaaaaaac

SEQ ID NO: 613363 - DNA, 75 bp, synthetic construct
  source 1..75: mol_type = other DNA
aacaatggcggcagcgcccgttccgctcacctcatcacagtgcatcgttaactgcgatggtaggcggtggtgcaa

SEQ ID NO: 613364 - DNA, 75 bp, synthetic construct
  source 1..75: mol_type = other DNA
agatccatctttcacgcacacgagcaaaaataacctatccagcccgtttccagcttgttgcggcgatgaatccca

SEQ ID NO: 613365 - DNA, 75 bp, synthetic construct
  source 1..75: mol_type = other DNA
atggcgttacctgcggaaagcctgattgcgtataccctggaaaaaatgaagcaccgtatggccaccggagcccgg

SEQ ID NO: 613366 - DNA, 75 bp, synthetic construct
  source 1..75: mol_type = other DNA
aacgtacggaaccgatttcagcagaacgtctgagtggcattgtggctggactacgggcctcgctgcgcagatgtt

SEQ ID NO: 613367 - DNA, 75 bp, synthetic construct
  source 1..75: mol_type = other DNA
cagacgccggggcagatggctgcccgtcagcgggtgacggagggccgaatgcagccgggttcggaaaccgaaccg

SEQ ID NO: 613368 - DNA, 75 bp, synthetic construct
  source 1..75: mol_type = other DNA
atattgcccgtcatctggaggcggggatgaaaccgctacaggccgcgctacaaggcactcgtgaagtcggcttta

SEQ ID NO: 613369 - DNA, 75 bp, synthetic construct
  source 1..75: mol_type = other DNA
ccgttcagcctcatcgccctgatagggatcatgctattaatcggcatcgtgaagaaaaacgccattatgatggtc

SEQ ID NO: 613370 - DNA, 75 bp, synthetic construct
  source 1..75: mol_type = other DNA
ccatcgccacggtatatatcgtactgggtatactttacgagagttacgtgcatccactgacgattctctccaccc

SEQ ID NO: 613371 - DNA, 75 bp, synthetic construct
  source 1..75: mol_type = other DNA
tttgctgcccagcgggatgcccagccgtccgacctatcgcaaagcgaacccgtcggatgcgccaattatgatcct

SEQ ID NO: 613372 - DNA, 75 bp, synthetic construct
  source 1..75: mol_type = other DNA
tgatgtgtggctggatgctaaaagccagcaagccgcgcgagcaaaagcgactgcgtggttttggtcgcatgttgg

SEQ ID NO: 613373 - DNA, 75 bp, synthetic construct
  source 1..75: mol_type = other DNA
catccgctgaccattctctccaccctgccctcggcgggcgttggagcgctactggcgctggagctgtttaatgct

SEQ ID NO: 613374 - DNA, 75 bp, synthetic construct
  source 1..75: mol_type = other DNA
cgagcgcagcgaaacggcgcagcaaattatcgaccgtctgcgggtgaagctggcgaaagaaccgggggcgaatct

SEQ ID NO: 613375 - DNA, 75 bp, synthetic construct
  source 1..75: mol_type = other DNA
gaagtggatccgcgctatacccaggacatcagcgcgctggaaaaaatgttcgtcattaataacgaaggcaaagcg

SEQ ID NO: 613376 - DNA, 75 bp, synthetic construct
  source 1..75: mol_type = other DNA
tcagagtatttcgtttcaggcaatgcgcggcaaattgcaggatttcatgaaaattatccgtgacgatccggcagt

SEQ ID NO: 613377 - DNA, 75 bp, synthetic construct
  source 1..75: mol_type = other DNA
ttgatgggcggattgccggggcgcctgttacgcgagtttgccgtgacactttctgtcgccattggtatttcgttg

SEQ ID NO: 613378 - DNA, 75 bp, synthetic construct
  source 1..75: mol_type = other DNA
accgcgacaccatggcacggctgggaatcgacgtgcaggccgccaacagcctgttaaataacgccttcggtcagc

SEQ ID NO: 613379 - DNA, 75 bp, synthetic construct
  source 1..75: mol_type = other DNA
caccatcgccactggtttcgtggtggatgacgccatcgtggtgctggaaaacattgcccgtcatctggaagcggg

SEQ ID NO: 613380 - DNA, 75 bp, synthetic construct
  source 1..75: mol_type = other DNA
aactgaaaactgccgctgaatatcagccgctgattattcattacaacaacggcggcgcggttcgtctgggcgatg

SEQ ID NO: 613381 - DNA, 75 bp, synthetic construct
  source 1..75: mol_type = other DNA
aaagaaggagggcgatatgatttacctatcgctattgctttgctggcggcctctgaacagcttacagccaataag

SEQ ID NO: 613382 - DNA, 75 bp, synthetic construct
  source 1..75: mol_type = other DNA
gctgcgactcctgcaactcgatatcgactgtaaagtgagtgagccatcttttattgcccaggaactcctgtttct

SEQ ID NO: 613383 - DNA, 75 bp, synthetic construct
  source 1..75: mol_type = other DNA
aggggcaataatcccccattcgctggcctacgcacagcttaccgctgatatggcactgaatgaggctaaagccat

SEQ ID NO: 613384 - DNA, 75 bp, synthetic construct
  source 1..75: mol_type = other DNA
gcaacgcggtcgctgaatgacgctaaaaatattcttgttgctgattgtgaaaatgggggggggttatgcgtgatg

SEQ ID NO: 613385 - DNA, 75 bp, synthetic construct
  source 1..75: mol_type = other DNA
ggatgtccgataatgattttactttgtttattttttacgcctgcctctatttttgctctttctttatgacttatg

SEQ ID NO: 613386 - DNA, 75 bp, synthetic construct
  source 1..75: mol_type = other DNA
aagatttaaacaggacgctttttttgattacttttgcaggcataacaccattaatcattatttttataacttata

SEQ ID NO: 613387 - DNA, 75 bp, synthetic construct
  source 1..75: mol_type = other DNA
ttaaggctcaagcaatagaacaaaaggccaacagcatagcttggatgtttggatcaacacatattgatcatgagg

SEQ ID NO: 613388 - DNA, 75 bp, synthetic construct
  source 1..75: mol_type = other DNA
cgcctacaacctgaaaagtggcaaaaacgaaacgttccccgcgcctgcttatgcgtgcggccttcgtgcgtacat

SEQ ID NO: 613389 - DNA, 75 bp, synthetic construct
  source 1..75: mol_type = other DNA
gccaggcgacgccgctggatacgttcaaaacctctgtccgcgccggtcattcggttgagcaaattatgcagtatc

SEQ ID NO: 613390 - DNA, 75 bp, synthetic construct
  source 1..75: mol_type = other DNA
cttatacccataaccagcgccagacatcgcgcattatgttgctggtactgatcgcagccgtgcccggaatcgctg

SEQ ID NO: 613391 - DNA, 75 bp, synthetic construct
  source 1..75: mol_type = other DNA
cggggctttcgttcctcattcgctggcggttatgcaacttagtgctgatatggctctgaatgaggccaaagctat

SEQ ID NO: 613392 - DNA, 75 bp, synthetic construct
  source 1..75: mol_type = other DNA
tcccccgctggaagatatggagctttaccagacgtttactgatgaatactttgaacccgcatttgcggtgctggg

SEQ ID NO: 613393 - DNA, 75 bp, synthetic construct
  source 1..75: mol_type = other DNA
ggcatgtgttctggtcgttgcaggccgaagacagcgatgccaacagcctcaacaacaaagaaatcacgaccatta

SEQ ID NO: 613394 - DNA, 75 bp, synthetic construct
  source 1..75: mol_type = other DNA
gaattgctcgacagcgtcaccatcgcacgctcacgcaagcatatccagactttctacgacaccaaggaaataggc

SEQ ID NO: 613395 - DNA, 75 bp, synthetic construct
  source 1..75: mol_type = other DNA
atccagcccgtttccagcttgtcgcggcgatgaatcccagccctaccggacattatcagggaaaccataaccgct

SEQ ID NO: 613396 - DNA, 75 bp, synthetic construct
  source 1..75: mol_type = other DNA
aactggcgcttacaggcgctctgcgtggcgttcccggcgcaatctccagtgcaactgaagccattaagtcgggca

SEQ ID NO: 613397 - DNA, 75 bp, synthetic construct
  source 1..75: mol_type = other DNA
ttagatgaatatgaattagtcggagaactggcgcttacaggcgctctgcgtggcgttcccggcgcaatctccagt

SEQ ID NO: 613398 - DNA, 75 bp, synthetic construct
  source 1..75: mol_type = other DNA
cagtctgacgtcatcacacgccagcatttacaggaggcagttagctatcgagctatggatcgcttgcttattcat

SEQ ID NO: 613399 - DNA, 75 bp, synthetic construct
  source 1..75: mol_type = other DNA
tcacgcacacgagcaaaaataacctatccagcccgtttccagcttgttgcggcgatgaatcccagcccaacagga

SEQ ID NO: 613400 - DNA, 75 bp, synthetic construct
  source 1..75: mol_type = other DNA
ggcgcataacggcgtactttttcttgatgaattacctgaatttgaacggcgtacactggatgccttgcgggaacc

SEQ ID NO: 613401 - DNA, 75 bp, synthetic construct
  source 1..75: mol_type = other DNA
gccaggccggttttccttcgcctgccactgattatgctgagcaggaactggatctgaacagctattgcatcagca

SEQ ID NO: 613402 - DNA, 75 bp, synthetic construct
  source 1..75: mol_type = other DNA
caagaaggtgctgatcttcacagccttcgccgacaccgctgactacctatatgccaatttggctccggaattgct

SEQ ID NO: 613403 - DNA, 75 bp, synthetic construct
  source 1..75: mol_type = other DNA
tttgtcataccgacctcagccgtacgagcggtgagtcgttcggcacaccgctgaatcgcatcaactggggtaact

SEQ ID NO: 613404 - DNA, 75 bp, synthetic construct
  source 1..75: mol_type = other DNA
aaagaaggagggcgatatgatttacctatcgccattgcattgctggcggcctctgaacagcttacagcgaatcag

SEQ ID NO: 613405 - DNA, 75 bp, synthetic construct
  source 1..75: mol_type = other DNA
gtcgctgaaaagtggactggtttgtcatcttggggcgatggagagcatttcggctatctatctcgacaagatcga

SEQ ID NO: 613406 - DNA, 75 bp, synthetic construct
  source 1..75: mol_type = other DNA
ggcactggagccggtttcagacagcccggagttccgcacactgtatccggaaaacatctgtatttttggtgttgt

SEQ ID NO: 613407 - DNA, 75 bp, synthetic construct
  source 1..75: mol_type = other DNA
atgagtcaacaacacacaacccaggcttctggccaggggatgctggaacgcgtgtttaaactgcgcgaacatggc

SEQ ID NO: 613408 - DNA, 75 bp, synthetic construct
  source 1..75: mol_type = other DNA
aattgggtattgatttccagtccgatgcgcagcatgtgaccatcagggccgtgcctttacccttacgccaacaaa

SEQ ID NO: 613409 - DNA, 75 bp, synthetic construct
  source 1..75: mol_type = other DNA
taaaggcagtctgattcagacgggaacaggggatttttcgctgagtctgccgggaagcgtggataaccgggaagg

SEQ ID NO: 613410 - DNA, 75 bp, synthetic construct
  source 1..75: mol_type = other DNA
tattgaaagtacttctggtgtggcagtcggtggtcgcacggggctaacggctgtcgtggtcggcgttatgttcct

SEQ ID NO: 613411 - DNA, 75 bp, synthetic construct
  source 1..75: mol_type = other DNA
cgctggcgcgatctgaacctgtgtgtggtggtggtcgcagctctgtttgcactgaagattattttggtggattag

SEQ ID NO: 613412 - DNA, 75 bp, synthetic construct
  source 1..75: mol_type = other DNA
tggacccgaaagtggtgtttgttaccacctgtttgattgccggtatcggcagtattgcgatggggatatttgcta

SEQ ID NO: 613413 - DNA, 75 bp, synthetic construct
  source 1..75: mol_type = other DNA
gctacaagacctttgtttgtgtagaaacggcttacgcttcagaaacgcaaaaagtcaccaaagaaaaacctgcac

SEQ ID NO: 613414 - DNA, 75 bp, synthetic construct
  source 1..75: mol_type = other DNA
ggcagtgtggaagaagaagttggcctgcgcggggcgcaaacctcggcggaacacattaaaccggatgttgtgatc

SEQ ID NO: 613415 - DNA, 75 bp, synthetic construct
  source 1..75: mol_type = other DNA
ggttttctgcgtttcaccaccattggtggctggtggaatcagtcgatgctcaaccaccgggtaaccatacgcaca

SEQ ID NO: 613416 - DNA, 75 bp, synthetic construct
  source 1..75: mol_type = other DNA
ttctacaacactccggcgcggcgcaaattcctgcgcaccgagaaaaccgaatttaaccatatcgatgaaatcatc

SEQ ID NO: 613417 - DNA, 75 bp, synthetic construct
  source 1..75: mol_type = other DNA
gaactgataggctacctggcgaagcagtccgtattcgaacctggcaatattgcgcagtggattgcacgaaatctg

SEQ ID NO: 613418 - DNA, 75 bp, synthetic construct
  source 1..75: mol_type = other DNA
agcatgggcgatatgccggatgatggctacaagacctttgtttgtgtagaaacagcttacgcttcagaaactcaa

SEQ ID NO: 613419 - DNA, 75 bp, synthetic construct
  source 1..75: mol_type = other DNA
ttatatcaaggtgccagcagcggaaacagatccagaccttgagacaattcgcattgctatatcaccacaaaagcc

SEQ ID NO: 613420 - DNA, 75 bp, synthetic construct
  source 1..75: mol_type = other DNA
agtttaaacgcgaatccgctcaactggtagttgaccagaaatacacagtggcagatgccgccaaagctatggatg

SEQ ID NO: 613421 - DNA, 75 bp, synthetic construct
  source 1..75: mol_type = other DNA
gcgcagattgatcagcatatcgccgatggcgagctgaatctgtggcagggggggtccggtaaaagattttttaat

SEQ ID NO: 613422 - DNA, 75 bp, synthetic construct
  source 1..75: mol_type = other DNA
aaaatacgtgagctgaggaaaaagctacaacgaattgaaatgaagaatgaaatattaaaaaaggctaccgcgctc

SEQ ID NO: 613423 - DNA, 75 bp, synthetic construct
  source 1..75: mol_type = other DNA
agtttaaacgcgaatccgctcaactggtagttgaccagagatacacggtggcagatgccgccaaagctatggatg

SEQ ID NO: 613424 - DNA, 75 bp, synthetic construct
  source 1..75: mol_type = other DNA
agtttaaacgcgaatccgctcaactggtagttgaccagacatacaccgtggcagatgccgccaaagctatggatg

SEQ ID NO: 613425 - DNA, 75 bp, synthetic construct
  source 1..75: mol_type = other DNA
agtttaaacgcgaatccgctcaactggtagttgaccagatatacactgtggcagatgccgccaaagctatggatg

SEQ ID NO: 613426 - DNA, 75 bp, synthetic construct
  source 1..75: mol_type = other DNA
aggttcggcattacccgtcggtgtgcctgttccgtggccttcagccactccgccgacaggctggctgaaatgcaa

SEQ ID NO: 613427 - DNA, 75 bp, synthetic construct
  source 1..75: mol_type = other DNA
aggctctgcattacctgttggtgtgcctgttccgtggccttccgccactccgccgacaggctggctgaaatgcaa

SEQ ID NO: 613428 - DNA, 75 bp, synthetic construct
  source 1..75: mol_type = other DNA
tctcctggcagaccgggatgggcgcgatattctggggcgcagttgggctatttttgctcacgctgtttcgtatcc

SEQ ID NO: 613429 - DNA, 75 bp, synthetic construct
  source 1..75: mol_type = other DNA
attgaaatggagaatgaaatattaaaaaaggctaccgcgctcttgatgtcagactccctgaacagttctcgataa

SEQ ID NO: 613430 - DNA, 75 bp, synthetic construct
  source 1..75: mol_type = other DNA
cagcggctttttttaatatgtcccgttcgtcggtaacccgtttcagctctttctggagacggcggatctcggcct

SEQ ID NO: 613431 - DNA, 75 bp, synthetic construct
  source 1..75: mol_type = other DNA
cgtaaacccaggaatactggctacatacggtgacgggggaatagttaaaacggacgaacccggtattaaggtacc

SEQ ID NO: 613432 - DNA, 75 bp, synthetic construct
  source 1..75: mol_type = other DNA
gattacgatgctctgctcatgctgatacgggattttctgacgaccttaactgcggagaaagtcaacgcgtttagc

SEQ ID NO: 613433 - DNA, 75 bp, synthetic construct
  source 1..75: mol_type = other DNA
agagccagaggcgcaccgcgatccgctcgctatgcagcaattctttgccgaatatggcgtaacgaccacgcattt

SEQ ID NO: 613434 - DNA, 75 bp, synthetic construct
  source 1..75: mol_type = other DNA
aacgccgtgcagttttgatgtctcggtgtgggagtttttctggccgtttattgccggggctaaactggtgatggc

SEQ ID NO: 613435 - DNA, 75 bp, synthetic construct
  source 1..75: mol_type = other DNA
catggactacgccgccggatttatctttatgcgtcgactgggctcggcggcgctgacggctaccggacccgtgct

SEQ ID NO: 613436 - DNA, 75 bp, synthetic construct
  source 1..75: mol_type = other DNA
gcctggagcgtggcgcattacgttgagttaaccggagaggttgatgcgccattactggcccgcgcggtggttgcc

SEQ ID NO: 613437 - DNA, 75 bp, synthetic construct
  source 1..75: mol_type = other DNA
cgctgatgctgtgcgcctgctgacgactgctcatagcgtaccgtttgacggtaaagcgacgctgtttgttgctga

SEQ ID NO: 613438 - DNA, 75 bp, synthetic construct
  source 1..75: mol_type = other DNA
tattgagatcctcgccaataaacagcgttacgatgagccaacgttaatccagcatgctgaacgcctgaaaatgct

SEQ ID NO: 613439 - DNA, 75 bp, synthetic construct
  source 1..75: mol_type = other DNA
agctaaaaattcgtggtcagcggattgaactgggcgaaatcgatcgcgtgatgcaggcgctgccggatgtcgagc

SEQ ID NO: 613440 - DNA, 75 bp, synthetic construct
  source 1..75: mol_type = other DNA
ttatcgacctgcgaaccaatattgatccgcacggtactgcgcaggcattaatgctggcggatttgcaacaagatt

SEQ ID NO: 613441 - DNA, 75 bp, synthetic construct
  source 1..75: mol_type = other DNA
taacggcatatttatgcgctgcgatgatagcttgtctttcgactcctggtggaagggtgtctaccggcttaaaac

SEQ ID NO: 613442 - DNA, 75 bp, synthetic construct
  source 1..75: mol_type = other DNA
gaaatccctgaaaccacgctgagagcgctggtggcagaacaggcagccaaaacgccggatgctccggcactggct

SEQ ID NO: 613443 - DNA, 75 bp, synthetic construct
  source 1..75: mol_type = other DNA
ccggggcaggtgatggtggcgtcaacggtggcaaaactggcaacagttattgatggtgaagaggagagtgcccac

SEQ ID NO: 613444 - DNA, 75 bp, synthetic construct
  source 1..75: mol_type = other DNA
gatgcgcgtcagttggtgggctatctggtgtcgcaatcgggcctgccgttggataccagcgcattacaggcgcag

SEQ ID NO: 613445 - DNA, 75 bp, synthetic construct
  source 1..75: mol_type = other DNA
tgcgtattcttgatgcgatgatgcatccggtgccgccgggtgtggcgggtgatctctatctcaccggcattcaac

SEQ ID NO: 613446 - DNA, 75 bp, synthetic construct
  source 1..75: mol_type = other DNA
tcttgaatttggtgttctgaaggactggaaagaaaatccggtaaaagaacttcctgatattgatgaatctgctca

SEQ ID NO: 613447 - DNA, 75 bp, synthetic construct
  source 1..75: mol_type = other DNA
tggaacgaaaatttttgctggatgctcttgaatttggtgttctgaaggactggaaagaaaatccggtaaaagaac

SEQ ID NO: 613448 - DNA, 75 bp, synthetic construct
  source 1..75: mol_type = other DNA
tgttcgatttcaaaggcattacccacggttctgaagtggttaacgggggtgatctggcgtttgatcgcgcagaga

SEQ ID NO: 613449 - DNA, 75 bp, synthetic construct
  source 1..75: mol_type = other DNA
atgcaatatgcattgcttgatggatttgaacgaaagtttttgctggatgctcttgaattcggtgttctgaaggac

SEQ ID NO: 613450 - DNA, 75 bp, synthetic construct
  source 1..75: mol_type = other DNA
tctggttttgccgtaacagcctttttgagaattaaagaccaggatatcgcaacgaatatacttaaccgtgagggg

SEQ ID NO: 613451 - DNA, 75 bp, synthetic construct
  source 1..75: mol_type = other DNA
ggacgatgccacttcaggactggcggatagccatgagtcgctttattatcgaattcggtgaccgccttgacggtc

SEQ ID NO: 613452 - DNA, 75 bp, synthetic construct
  source 1..75: mol_type = other DNA
acaaccgcaccacacggcttatatcatcttcacctccggttccaccggcagaccaaaaggggtaatggtcgggca

SEQ ID NO: 613453 - DNA, 75 bp, synthetic construct
  source 1..75: mol_type = other DNA
ggggtagcacaggctgatacgctgcggatgcgttttacggaagataacggcgaagtctggcaatgggtcgatgac

SEQ ID NO: 613454 - DNA, 75 bp, synthetic construct
  source 1..75: mol_type = other DNA
cagcgcaatctggcatctggatggcagaaaaactgtctgatttaccttccgcctggagcgtggcgcattacgttg

SEQ ID NO: 613455 - DNA, 75 bp, synthetic construct
  source 1..75: mol_type = other DNA
atttttgcttttaatggctgtgaacacaggttcagacaacctgtaggtgaagataactggaaacaggcaatatca

SEQ ID NO: 613456 - DNA, 75 bp, synthetic construct
  source 1..75: mol_type = other DNA
aacagcgccggaagcaggacaaatcgcaccggctctcgcacacattgggccagagtcaacagaatccagcctctc

SEQ ID NO: 613457 - DNA, 75 bp, synthetic construct
  source 1..75: mol_type = other DNA
ggataccagcgcattgcaggcgcagcttcgcgaaaaattgcctccgcatatggtgcccgtggttctactgcaact

SEQ ID NO: 613458 - DNA, 75 bp, synthetic construct
  source 1..75: mol_type = other DNA
ctggcttgggatgcgggagtccgcggcaaaaatctttgtcgatgaggtggaggcggcctggtcggaatacgcgga

SEQ ID NO: 613459 - DNA, 75 bp, synthetic construct
  source 1..75: mol_type = other DNA
gcgttttttcaccaagatggaaagcggcaaggctgcgttcccgtgcggtgatccaggcttatgaggccgtaaaaa

SEQ ID NO: 613460 - DNA, 75 bp, synthetic construct
  source 1..75: mol_type = other DNA
ttgcgaagaaagggccgtgcgttcttctgttagatgaaattgattcaatcgccaaaaagagaagtgatgattctg

SEQ ID NO: 613461 - DNA, 75 bp, synthetic construct
  source 1..75: mol_type = other DNA
ctaatgcggtttttgattatgtacacccttatgtacacgtttttttaaagcgttcagcaattacgctggtggatg

SEQ ID NO: 613462 - DNA, 75 bp, synthetic construct
  source 1..75: mol_type = other DNA
ggcaccctacaggattggatttgcccctatatttccagacatctgttatcacttaacccattacaagcccgctgc

SEQ ID NO: 613463 - DNA, 75 bp, synthetic construct
  source 1..75: mol_type = other DNA
ttatatttttacgttgaaaggtaaaatagatattatcaatgcattaaataagaatcctgatgtattatgctatcc

SEQ ID NO: 613464 - DNA, 75 bp, synthetic construct
  source 1..75: mol_type = other DNA
tgaagtcgtttggtcatacgacatagccgcccctgtagatcagagcggcgatagctggaccaatgggaaacatca

SEQ ID NO: 613465 - DNA, 75 bp, synthetic construct
  source 1..75: mol_type = other DNA
gcgatacgtgatacagtcggaaacgaagagtttcagcgattagcgagagctgggattgtggcatcgctaagcgga

SEQ ID NO: 613466 - DNA, 75 bp, synthetic construct
  source 1..75: mol_type = other DNA
ctcaaaacgctcgattcaggccttccaaagatcgtcggcgtgattatgaacggagttcaacagtcaggtgcgatc

SEQ ID NO: 613467 - DNA, 75 bp, synthetic construct
  source 1..75: mol_type = other DNA
gctcaactgatgccctcagtaatgagtgatgctggttatcgtggaacagatccgcgctcactgccatttgaaaag

SEQ ID NO: 613468 - DNA, 75 bp, synthetic construct
  source 1..75: mol_type = other DNA
agaagccaaaatacccacgtaaaaaaatgctaagaaggcaggggaagagaccgatcaggatactgacccacagcc

SEQ ID NO: 613469 - DNA, 75 bp, synthetic construct
  source 1..75: mol_type = other DNA
gcagggaggctagccagcaggcatatcatgtcccgatgtttatctggtatagccccgttcttggggatggcgtgg

SEQ ID NO: 613470 - DNA, 75 bp, synthetic construct
  source 1..75: mol_type = other DNA
aggtaagcggtttgcatacgagatggctgcattatgggctgctgtgcatggtctctctgaccattgtggcgacgc

SEQ ID NO: 613471 - DNA, 75 bp, synthetic construct
  source 1..75: mol_type = other DNA
tgcagttcacctttatgagtcacgcactgctgatttcactggttgtttccataccctgtgcgctgctgtcggtct

SEQ ID NO: 613472 - DNA, 75 bp, synthetic construct
  source 1..75: mol_type = other DNA
aaaaattacttccctgcttggaagaaaatctgcgagcacatataaaatggaaacagcacggcggcccttgtgaaa

SEQ ID NO: 613473 - DNA, 75 bp, synthetic construct
  source 1..75: mol_type = other DNA
tcatcatgacgtttgccgttaccagcatcaacgcacgcacaaaggaaaatgccgaaccacgggatttgttatcat

SEQ ID NO: 613474 - DNA, 75 bp, synthetic construct
  source 1..75: mol_type = other DNA
cctcatcgccacccgcatacttttgaactgctgacatcccttaccggtcgctttttggtattgaactttgatgac

SEQ ID NO: 613475 - DNA, 75 bp, synthetic construct
  source 1..75: mol_type = other DNA
acgtttaccgttaccagcatcaacgcacgcacaaagggaaactcccatacacaggatctgttatcacccaattag

SEQ ID NO: 613476 - DNA, 75 bp, synthetic construct
  source 1..75: mol_type = other DNA
aacaggcgttgctgaaacaggctggggtgcaggtgctggcgtttgaggcgaattcactgcgggcgttaacgcagc

SEQ ID NO: 613477 - DNA, 75 bp, synthetic construct
  source 1..75: mol_type = other DNA
ggcggccagcctgcacgcagaaaatacgcacaaggaggtgcgtatcgcgtcaccgtggccggcgcaaaataccat

SEQ ID NO: 613478 - DNA, 75 bp, synthetic construct
  source 1..75: mol_type = other DNA
tcccccggtctggctatattcgtcgctttcgcatgccggaattactgggcgtttccatgcctactattgatcgct

SEQ ID NO: 613479 - DNA, 75 bp, synthetic construct
  source 1..75: mol_type = other DNA
ctgcattatgggctgctgtgcatggtctccctgaccattgtggcgacgctgaaagcggtaggtatcattctctct

SEQ ID NO: 613480 - DNA, 75 bp, synthetic construct
  source 1..75: mol_type = other DNA
tgactggtgtctggttgtccttttttatcgacagcgcaccagctccgacgattgtcgtcttattcgcggtcgtgt

SEQ ID NO: 613481 - DNA, 75 bp, synthetic construct
  source 1..75: mol_type = other DNA
tcggcagtcaggagtacgatgaaggttactggcatgatgtgggggagttgaaagagcttgtggaagatctgatta

SEQ ID NO: 613482 - DNA, 75 bp, synthetic construct
  source 1..75: mol_type = other DNA
gctgtatctaaaattgccaccacacgtagtggtcggtatgcgatagagaaagcagttcaggaagccactaaagca

SEQ ID NO: 613483 - DNA, 75 bp, synthetic construct
  source 1..75: mol_type = other DNA
accatgccaccgtggggactaccgggcgcagcgacgcaaagcgggttttacagccacactatcggcggcggccca

SEQ ID NO: 613484 - DNA, 75 bp, synthetic construct
  source 1..75: mol_type = other DNA
ttacagttcagatggatgatacctcccttgccggacaaaataaaacgattcaggccgtacagaatttacgccttg

SEQ ID NO: 613485 - DNA, 75 bp, synthetic construct
  source 1..75: mol_type = other DNA
accaggacaccatgccgccgtgggggctaccgggcatggcgtctcaaagcgggatattcagccactcgctgtatg

SEQ ID NO: 613486 - DNA, 75 bp, synthetic construct
  source 1..75: mol_type = other DNA
ttgtatatatgacatctttaacaaatagtatatctacactattaaccgatggcaatccacatggacatctaatat

SEQ ID NO: 613487 - DNA, 75 bp, synthetic construct
  source 1..75: mol_type = other DNA
tcgacgaactgaacgccaccagcgataacacaatggtggcgcatctgggaattgtgtatacccgtctgggagatg

SEQ ID NO: 613488 - DNA, 75 bp, synthetic construct
  source 1..75: mol_type = other DNA
tctttttgtcattttttgtaaattatttgttcgtggttgttccacgttgttcactgacaggatcggcatatttta

SEQ ID NO: 613489 - DNA, 75 bp, synthetic construct
  source 1..75: mol_type = other DNA
aaacggcgacccggatttacccatcatcgtggggcgcacctataaccaggacaccatgccgccctgggggctgcc

SEQ ID NO: 613490 - DNA, 75 bp, synthetic construct
  source 1..75: mol_type = other DNA
tggctggtgcagttcaggatgcggcggcgtcgattgcagccggtggtccgggggcgcataacgtcacagtaagtg

SEQ ID NO: 613491 - DNA, 75 bp, synthetic construct
  source 1..75: mol_type = other DNA
gcagtggcattgatatgaatccggatggcggtacagccatgactgcggatgatattgccccgttacctaccccgg

SEQ ID NO: 613492 - DNA, 75 bp, synthetic construct
  source 1..75: mol_type = other DNA
gataattatggaaatcctgtttatgaaatgatagaggagaaaaggatcagtgaaaatgatatgaaacttgttctt

SEQ ID NO: 613493 - DNA, 75 bp, synthetic construct
  source 1..75: mol_type = other DNA
gcagtggtattgatatgaatccggatggcggaaaagccattactgcgaatgatattgccccagtacccactccgg

SEQ ID NO: 613494 - DNA, 75 bp, synthetic construct
  source 1..75: mol_type = other DNA
cgactaacggaaacatgctgcgcttcgatgacaaaacgggtgcggaagaggtgaagttccatgcggaaaaagacc

SEQ ID NO: 613495 - DNA, 75 bp, synthetic construct
  source 1..75: mol_type = other DNA
atgcagtcagtcagtaaatcaatctaccgtgggaagttgcttggcagtttacctgctgtcggcgaaattcataaa

SEQ ID NO: 613496 - DNA, 75 bp, synthetic construct
  source 1..75: mol_type = other DNA
gcgctggttcaccaagttgttgttgcttatgcagctggtgctcgtcagggtactcgtgctcagaagactcgtgct

SEQ ID NO: 613497 - DNA, 75 bp, synthetic construct
  source 1..75: mol_type = other DNA
atcccggaaaaccgcgtggcggcggggcgcaatcattttgctgaaccggcagttcgtgagccagtagctccgcgc

SEQ ID NO: 613498 - DNA, 75 bp, synthetic construct
  source 1..75: mol_type = other DNA
gctggaggtgctggacctgttctacaacaccccggcgcggcgcaaattcctgcgcaccgagaaaaccgaatttaa

SEQ ID NO: 613499 - DNA, 75 bp, synthetic construct
  source 1..75: mol_type = other DNA
aaatggatccgtctgtggcgtaaagaaggccgggtattccgccggctgccagctcccgtttcatctgtatcccct

SEQ ID NO: 613500 - DNA, 75 bp, synthetic construct
  source 1..75: mol_type = other DNA
gaagcgattcatcgtcacaccacaccctacgggctggtgtggttcgatcgcagttatcacgcgctgatgcgccct

SEQ ID NO: 613501 - DNA, 75 bp, synthetic construct
  source 1..75: mol_type = other DNA
tggctacgcctctggcagagagaaggccgtatttctcgtagaatgcccccaactattgtagaccctacagtacca

SEQ ID NO: 613502 - DNA, 75 bp, synthetic construct
  source 1..75: mol_type = other DNA
tttaccggattcgaccgaagaaagaagggagggattattatttcgtcgatggtgtgacagatttaaagattgacg

SEQ ID NO: 613503 - DNA, 75 bp, synthetic construct
  source 1..75: mol_type = other DNA
ggcggtgcacagcaacacgatagcgtacgcctcgatccgtgggtgtttatgttctcagcaggatatcgtttttaa

SEQ ID NO: 613504 - DNA, 75 bp, synthetic construct
  source 1..75: mol_type = other DNA
tcaatgcgaatcgatagatattctaagtttgtagttcaatctatacaaacaagcaactttgagtttttagaaatt

SEQ ID NO: 613505 - DNA, 75 bp, synthetic construct
  source 1..75: mol_type = other DNA
atcccggaaaaccgcgtggcggcagggcgtaatcattttgcagaaccggcagttcgtgagcctgcagctccgcgc

SEQ ID NO: 613506 - DNA, 75 bp, synthetic construct
  source 1..75: mol_type = other DNA
aacggcgcttaggcgcgatttgcggcaccgcttttctcgaacaagcgctggcgattgaatggcaacacggcgatc

SEQ ID NO: 613507 - DNA, 75 bp, synthetic construct
  source 1..75: mol_type = other DNA
ttacagcatttctcgtgaaggttacttgatgaaagatactcacggggaagtttaccggattcgaccgaagaagga

SEQ ID NO: 613508 - DNA, 75 bp, synthetic construct
  source 1..75: mol_type = other DNA
tttgaccatgacgcgacagaaaaactacgcacttacttttcaaatgtatgtgctgattttgaagctgaacttgtt

SEQ ID NO: 613509 - DNA, 75 bp, synthetic construct
  source 1..75: mol_type = other DNA
aacacctggtcaggtggaaaaccgcgccttatatccccgccctgaaggacggggttttacggcgcaccggataaa

SEQ ID NO: 613510 - DNA, 75 bp, synthetic construct
  source 1..75: mol_type = other DNA
tgaaccaacagcaacgtgataacgcccgccagcgtgttcaatcagcatcacctgaacaacgtcaggtttttcggg

SEQ ID NO: 613511 - DNA, 75 bp, synthetic construct
  source 1..75: mol_type = other DNA
gctatataatttacattactttgatgatctcaatgcttttaatagtaaaaaacgtaaaatattgcatttggagct

SEQ ID NO: 613512 - DNA, 75 bp, synthetic construct
  source 1..75: mol_type = other DNA
aagtcaccaacccggacgccgtcattatcgacacttttcaggtcctgcgtcaggatgtcagcggattctcgccgg

SEQ ID NO: 613513 - DNA, 75 bp, synthetic construct
  source 1..75: mol_type = other DNA
gcctgtagtcgtttcacaggtcaaattatattttggtctgtgaaaaaagaaacagatatccggcgtggaaggcat

SEQ ID NO: 613514 - DNA, 75 bp, synthetic construct
  source 1..75: mol_type = other DNA
tatccccgccctgaaggacggggttttacggcgcaccggataaaccaggccaagcgtatgctggttgatcaaata

SEQ ID NO: 613515 - DNA, 75 bp, synthetic construct
  source 1..75: mol_type = other DNA
caaacgcacagccggacatagccaacatcaaccgcaaaaaaagcccaggattcccggggcggttcagaggagagt

SEQ ID NO: 613516 - DNA, 75 bp, synthetic construct
  source 1..75: mol_type = other DNA
atgttgactcactcattgatccaatacctaactttaccagcaacacctccgtccccagtagcactggctgctggg

SEQ ID NO: 613517 - DNA, 75 bp, synthetic construct
  source 1..75: mol_type = other DNA
gcgacttcagccgtcgccaaccactgacccagcaacaaaaggacgccgctcgtcagcgttatcagtcggcctcgc

SEQ ID NO: 613518 - DNA, 75 bp, synthetic construct
  source 1..75: mol_type = other DNA
ttatctgccaccaccagccggagaaccgtttattgacagctttgtgcgcggattcggctatagcatgggtgttgc

SEQ ID NO: 613519 - DNA, 75 bp, synthetic construct
  source 1..75: mol_type = other DNA
atgatactttggtctgtgaataaagaaaccgatatccgacggggaaggcattgtgttttcctgatgcatgttcac

SEQ ID NO: 613520 - DNA, 75 bp, synthetic construct
  source 1..75: mol_type = other DNA
ggtgggctttccgtgtttagcaagcaacaagcagccggtagaagttggtcccggcattttcattaatcgcgtgta

SEQ ID NO: 613521 - DNA, 75 bp, synthetic construct
  source 1..75: mol_type = other DNA
cggctacttttcctacatgctttttttacgctatcccttgaaaaaatggtggaaagtacgtgtcgaacgtgtagg

SEQ ID NO: 613522 - DNA, 75 bp, synthetic construct
  source 1..75: mol_type = other DNA
atggaaaagggcttttcccgcgtttatcagcgttacttgctgaacctgttaaaagccaatgccgcgcgcaagctg

SEQ ID NO: 613523 - DNA, 75 bp, synthetic construct
  source 1..75: mol_type = other DNA
attcaccccgtactggcagcggctggagttgcccgacggcgattttgtcgatctcgcgtggagtgaagaccctgc

SEQ ID NO: 613524 - DNA, 75 bp, synthetic construct
  source 1..75: mol_type = other DNA
ctgcggtctgatatttgtggtagggattgcgataattctgtacgaaattcatttacgcattccgttgttgaagtt

SEQ ID NO: 613525 - DNA, 75 bp, synthetic construct
  source 1..75: mol_type = other DNA
ggaaagttcgcgtagaacgcgtggggatcccaatgttaacggctattcccctgctgaccttgccacaattcatta

SEQ ID NO: 613526 - DNA, 75 bp, synthetic construct
  source 1..75: mol_type = other DNA
tatccacccattttaagcgatggcatgttcaattttattttcatgcagacactgttttatatgccgttctttatt

SEQ ID NO: 613527 - DNA, 75 bp, synthetic construct
  source 1..75: mol_type = other DNA
gcggtctttatgcctgcattgctggggattgtggccgataaatggatgagtgcgaaatgggtatacgctatttgc

SEQ ID NO: 613528 - DNA, 75 bp, synthetic construct
  source 1..75: mol_type = other DNA
acctttacgctgccgcatattccggttgctaaacagcaagcgaatcagagctggacgactttgctggggcttgat

SEQ ID NO: 613529 - DNA, 75 bp, synthetic construct
  source 1..75: mol_type = other DNA
tgtccggagatagggaagtttcgctggtgggctttccgtgtttagcaagcaacaggcagccggtagaagttggtc

SEQ ID NO: 613530 - DNA, 75 bp, synthetic construct
  source 1..75: mol_type = other DNA
tggaagcctgtagctatcatatggaaaagggcttttcccgcgtttatcagcgttacttgctgaacctgttaaaag

SEQ ID NO: 613531 - DNA, 75 bp, synthetic construct
  source 1..75: mol_type = other DNA
tttccgccattctggttctgtttaccctgactctgccgcatattccggttgctaaacagcaagcgaatcagagct

SEQ ID NO: 613532 - DNA, 75 bp, synthetic construct
  source 1..75: mol_type = other DNA
gtatcctcggcggcatcgtgagcggtaaagttgttgagatgtacacccaaaacggcattaccgactggcagaccg

SEQ ID NO: 613533 - DNA, 75 bp, synthetic construct
  source 1..75: mol_type = other DNA
atgcaaaagctgaaacagcaggtgtttgaagccaacatggatttaccgcattacgggttggtgacctttacctgg

SEQ ID NO: 613534 - DNA, 75 bp, synthetic construct
  source 1..75: mol_type = other DNA
agatggggaaaaatctctataaagaaagcgatgaaaatgacgcgcaaattgcggagcggttaacgggcgtcagtg

SEQ ID NO: 613535 - DNA, 75 bp, synthetic construct
  source 1..75: mol_type = other DNA
aagtaggaaaaaatctctacaacgaaagcgacgaaaatgacgcgcagattgcagaacgattaacgggcgtgagtg

SEQ ID NO: 613536 - DNA, 75 bp, synthetic construct
  source 1..75: mol_type = other DNA
agttgcgctggcctggttgttgagcaaaccaggtattgctgcacccattattggtacatcgcgggaagaacaact

SEQ ID NO: 613537 - DNA, 75 bp, synthetic construct
  source 1..75: mol_type = other DNA
cggtggcgagcagcgtgatgtatgacatgagccgtgcaatggggcatggcgtgggcgatggcaaagaccgctata

SEQ ID NO: 613538 - DNA, 75 bp, synthetic construct
  source 1..75: mol_type = other DNA
acagttattctgacggcagcagcgaagagatcgtcggtcgcgcactgcgggatttcgcccgtcgtgaagacgtgg

SEQ ID NO: 613539 - DNA, 75 bp, synthetic construct
  source 1..75: mol_type = other DNA
ggcataaatttctttgataccgccaacagttattctgacggcagcagcgaagagatcgtcggtcgcgcactgcgg

SEQ ID NO: 613540 - DNA, 75 bp, synthetic construct
  source 1..75: mol_type = other DNA
tctcttaccggatctccattacatttatgctttcgataacgtcgcttttccgtatggcgaaaaaagcgaagagtt

SEQ ID NO: 613541 - DNA, 75 bp, synthetic construct
  source 1..75: mol_type = other DNA
tgacgccagaagctgaacagttattgtccgttttacagcgttacggctttaaaacgctcgaaaaactgacagttt

SEQ ID NO: 613542 - DNA, 75 bp, synthetic construct
  source 1..75: mol_type = other DNA
cgaaacgctcgaaaaactggcagttttagactgatttggttgaatgttgcgcggtcggaaaattattttaaattt

SEQ ID NO: 613543 - DNA, 75 bp, synthetic construct
  source 1..75: mol_type = other DNA
cataattaaacgcgcgctggaaggcggcataaatttctttgataccgccaacagttattctgacggcagcagcga

SEQ ID NO: 613544 - DNA, 75 bp, synthetic construct
  source 1..75: mol_type = other DNA
agaagagcgcgagatgctgccgctgtgttatcaggaaggcgtggcggtgattccgtggagcccgctggcgcgggg

SEQ ID NO: 613545 - DNA, 75 bp, synthetic construct
  source 1..75: mol_type = other DNA
attgagcaatataaaacgtgtttcgaattatacgaaaaaggtttgctggatactctgaccatcgttcgcgcttaa

SEQ ID NO: 613546 - DNA, 75 bp, synthetic construct
  source 1..75: mol_type = other DNA
gtttatcaactggctgattatctggcaaccgagtgtagcgatatctgggcgctgcacggtaaatcaaccgaaact

SEQ ID NO: 613547 - DNA, 75 bp, synthetic construct
  source 1..75: mol_type = other DNA
cgaacgcgcccgtttcgcaggtcgagaaatgggataaaacttttgctgagagcacgaaagttgatcaccgtaagg

SEQ ID NO: 613548 - DNA, 75 bp, synthetic construct
  source 1..75: mol_type = other DNA
ttctgccaggtcatcgacaactacgatccccgcgccgagcaactgattgatgattttaaagggctggatgaaagc

SEQ ID NO: 613549 - DNA, 75 bp, synthetic construct
  source 1..75: mol_type = other DNA
cggtttaccaacaagtaccggcaatcgttaattgttcaggctacgggtacaggcaaaactcgcgtggcaattgca

SEQ ID NO: 613550 - DNA, 75 bp, synthetic construct
  source 1..75: mol_type = other DNA
atgcaaaagctgaaacagcaggtgtttgaggccaacatggagctgccgcgttacgggttggtgacctttacctgg

SEQ ID NO: 613551 - DNA, 75 bp, synthetic construct
  source 1..75: mol_type = other DNA
gttacccgtcgtttggcggcattgtccatacccactccactcatgccaccgcatgggcgcaggcggggctggcga

SEQ ID NO: 613552 - DNA, 75 bp, synthetic construct
  source 1..75: mol_type = other DNA
attgtgccaaccgcttaatgccagcgcaatcgcgtcaggaagcccgcaagtatggcgacggtagctggcaaaata

SEQ ID NO: 613553 - DNA, 75 bp, synthetic construct
  source 1..75: mol_type = other DNA
tttttcaacgattattgccccgacggctgtggctggcggggttgccttgtctggcgttgctgggttgtgtgcaga

SEQ ID NO: 613554 - DNA, 75 bp, synthetic construct
  source 1..75: mol_type = other DNA
cggaaattttgtgccggatacgtcgcacgagactgaaaagtctgcgccatccaccaatgaggtcactccaaatga

SEQ ID NO: 613555 - DNA, 75 bp, synthetic construct
  source 1..75: mol_type = other DNA
aagatgaaagccgtgagcgagaactggcgttacaacgcgcactacagcaagagcaggaaaaggccgaacacctca

SEQ ID NO: 613556 - DNA, 75 bp, synthetic construct
  source 1..75: mol_type = other DNA
acgcaaatgcaattattacagctctccccccagctatacacggaaaagccatagagttaacttactctggttgtg

SEQ ID NO: 613557 - DNA, 75 bp, synthetic construct
  source 1..75: mol_type = other DNA
acaccactgccgatcgtcgtgccgtattgcagtatctgaacatgcagcgctggaaggatgctgaaaatggcgctt

SEQ ID NO: 613558 - DNA, 75 bp, synthetic construct
  source 1..75: mol_type = other DNA
taaagacgctcagggtggcgaggtgtatctcctttccggcccgacgatgatgatgccaggccacggtcacggcat

SEQ ID NO: 613559 - DNA, 75 bp, synthetic construct
  source 1..75: mol_type = other DNA
atggtaaaggatgccataaaactcacctctgatttctacagaacgatatatgatgagttcggtaaacaagcatcc

SEQ ID NO: 613560 - DNA, 75 bp, synthetic construct
  source 1..75: mol_type = other DNA
gctgcagaagatttaggaatacagttgtttaatggtttttctgggctacatacacggcagttttatccccagaat

SEQ ID NO: 613561 - DNA, 75 bp, synthetic construct
  source 1..75: mol_type = other DNA
gcgttgttcataaatgggtttggtttcggtgattatcatataaatagaataatattaggcgcgttactgaatcca

SEQ ID NO: 613562 - DNA, 75 bp, synthetic construct
  source 1..75: mol_type = other DNA
tgccgtttgcttacgctaaagatggtatctcctacaccttctctatcgttccgaacgcactgggtaaagacgacg

SEQ ID NO: 613563 - DNA, 75 bp, synthetic construct
  source 1..75: mol_type = other DNA
acgcaggccatcaacttgatcggcgaacacaaaccctcagtcccggcccagacaatggcggcgctagcctgtatc

SEQ ID NO: 613564 - DNA, 75 bp, synthetic construct
  source 1..75: mol_type = other DNA
caatggcggcactagcctgtatcgcgcaaaatgacaaccaacagttgctcgacgaaatcgtccaacaagaggggc

SEQ ID NO: 613565 - DNA, 75 bp, synthetic construct
  source 1..75: mol_type = other DNA
ggatttagtgtgaccaataacacccaactggggctgacctttacctatatggcgaccgataacattggcgttgaa

SEQ ID NO: 613566 - DNA, 75 bp, synthetic construct
  source 1..75: mol_type = other DNA
acgcaggccatcaacttgatcggcgaacacaaaccctcaatcacggcccggacaatggcgacgctagcctgtatc

SEQ ID NO: 613567 - DNA, 75 bp, synthetic construct
  source 1..75: mol_type = other DNA
atataaaaaaggcaaaacaccactcagccatcgcaattggccaggcgaaccggtacctgttatcactgaaaacat

SEQ ID NO: 613568 - DNA, 75 bp, synthetic construct
  source 1..75: mol_type = other DNA
cttactggttgacaatactgaatctgaacaagacatagttaatgttgaacttctgattgatgaagtaactaaatt

SEQ ID NO: 613569 - DNA, 75 bp, synthetic construct
  source 1..75: mol_type = other DNA
ccgcaaatttcagccgcgggcgttgagcatctagatactatcctccagccgtatatcaacgtcgaaccaggccgg

SEQ ID NO: 613570 - DNA, 75 bp, synthetic construct
  source 1..75: mol_type = other DNA
tagaagcttgtgaacgtttagaagtaaagcacagcttaactcttaccaaaggtttacaaggccaaaaatcagacg

SEQ ID NO: 613571 - DNA, 75 bp, synthetic construct
  source 1..75: mol_type = other DNA
gcgattttttcgaagatgaagattggaaagatggctgaacaaattatcagttcttatttcgaggaagaagataat

SEQ ID NO: 613572 - DNA, 75 bp, synthetic construct
  source 1..75: mol_type = other DNA
ctggttggctgatttgggacagttatcaggaccggggtaataccgtcaccatcgactttatgtcggcggatggta

SEQ ID NO: 613573 - DNA, 75 bp, synthetic construct
  source 1..75: mol_type = other DNA
tgcttcgtgaaaatacccgcatcgaattacgcaacccgaaattatcccttagcgatgccaatctcagcgccctgc

SEQ ID NO: 613574 - DNA, 75 bp, synthetic construct
  source 1..75: mol_type = other DNA
aggccaccattactgattcgcgttacctggatggcttaagcattattgttgaagcgccggaagccggttcgttag

SEQ ID NO: 613575 - DNA, 75 bp, synthetic construct
  source 1..75: mol_type = other DNA
agaggctgaatatgcaacatgcaaaaagaaaaaaagattgttcggattttgcataaagcagcaaccccaatcact

SEQ ID NO: 613576 - DNA, 75 bp, synthetic construct
  source 1..75: mol_type = other DNA
ttcgagaacgatgatctaccaggggatgtgattcgaattattgatgagatacttcatgaacaaggcttaactgtt

SEQ ID NO: 613577 - DNA, 75 bp, synthetic construct
  source 1..75: mol_type = other DNA
aagatggttatttccatggtcaacacttaatttaccccggtgcaaataaatatagccatactattggttttgtgt

SEQ ID NO: 613578 - DNA, 75 bp, synthetic construct
  source 1..75: mol_type = other DNA
aaaattcgtgctgaggagatttcagaagaagaaaaggaagttataaaattactcagaaggcaaagttcaagagca

SEQ ID NO: 613579 - DNA, 75 bp, synthetic construct
  source 1..75: mol_type = other DNA
aatttacgaaagatttccaagatactttgatcttactttagaacaactagagaagataaaaaatatagaaataga

SEQ ID NO: 613580 - DNA, 75 bp, synthetic construct
  source 1..75: mol_type = other DNA
agtggaagttgttaaacgagcatttgacctgagattacagggtttaagcttttgggctatcaccagaactttaaa

SEQ ID NO: 613581 - DNA, 75 bp, synthetic construct
  source 1..75: mol_type = other DNA
aaccccaataacgccggagacacgcgaaactgtcgggcgggggtcagaacaaatgacagtggcgccgcgctggga

SEQ ID NO: 613582 - DNA, 75 bp, synthetic construct
  source 1..75: mol_type = other DNA
accccgcgagttacccggcggtcgtgcttcgttcattcacgtctttgaacccgtggaggacgggcagacccgcgg

SEQ ID NO: 613583 - DNA, 75 bp, synthetic construct
  source 1..75: mol_type = other DNA
gcagctgcagagcgccattgtgaaggcgatttatgtctatcatctccccgtagttgtccgcatcgttcgccaact

SEQ ID NO: 613584 - DNA, 75 bp, synthetic construct
  source 1..75: mol_type = other DNA
tctaccttctgcccgtaaggtgaatggtaaggcgctttcagcggatataacactgacgccgaaagatattggtac

SEQ ID NO: 613585 - DNA, 75 bp, synthetic construct
  source 1..75: mol_type = other DNA
attggtatcgaccagtggtcaaccgtatacgcgttccaggaactgaaactctctaaagcggtggcgattcagggc

SEQ ID NO: 613586 - DNA, 75 bp, synthetic construct
  source 1..75: mol_type = other DNA
cattcctcggtttctggaacatttctcacaaccttggcggtgcaggcgcagcaggtgtggcgctgttcggggcaa

SEQ ID NO: 613587 - DNA, 75 bp, synthetic construct
  source 1..75: mol_type = other DNA
tggtctttattggctacctgacgatgtatctgattcgcaagaactttaacattgcgcagaacgacatgatctcca

SEQ ID NO: 613588 - DNA, 75 bp, synthetic construct
  source 1..75: mol_type = other DNA
gggccagcgcgaacgtgagctggcgattttttatgggccgtcgacgttttatcgccgcgagacaagcgtcgctga

SEQ ID NO: 613589 - DNA, 75 bp, synthetic construct
  source 1..75: mol_type = other DNA
gcagcgcaacacagcataatgcccgctgaaacagagtcggaaaaggaacgaacacgtgcattattattcactgta

SEQ ID NO: 613590 - DNA, 75 bp, synthetic construct
  source 1..75: mol_type = other DNA
tcgacacgctgcagcaaacacaactgcagagcgccattgtgaaggcgatgtatgccgcgacaatcgaatcagagc

SEQ ID NO: 613591 - DNA, 75 bp, synthetic construct
  source 1..75: mol_type = other DNA
caaatccccgtctggcagcgtagcgccgctccctttcttaccttaccatgcctgacgccagacgtctttcgcgtc

SEQ ID NO: 613592 - DNA, 75 bp, synthetic construct
  source 1..75: mol_type = other DNA
cagaaactgagtcagaaaaggaacgaacacgtgcattattattcactgtgctatcccgttttctcgacagtaaaa

SEQ ID NO: 613593 - DNA, 75 bp, synthetic construct
  source 1..75: mol_type = other DNA
acagtcctgcggctacaacagtacgtcgtactttatggatttgcccctatatttccagacatctgttatcactta

SEQ ID NO: 613594 - DNA, 75 bp, synthetic construct
  source 1..75: mol_type = other DNA
aatggcagcttttatgcgaaggacttaatgcgcttgggaagattgccaatgcgcacgggctgaagctcgctttcc

SEQ ID NO: 613595 - DNA, 75 bp, synthetic construct
  source 1..75: mol_type = other DNA
atattttctcttcaggctatcaaacatatgacaactgttgatggtggaattctgtacattaaagacaacgagcag

SEQ ID NO: 613596 - DNA, 75 bp, synthetic construct
  source 1..75: mol_type = other DNA
ggctggtggaaaacctgtgtttgccgatgttgatgtcttctcgggtaatctttctcctgaatcaattaaggaaaa

SEQ ID NO: 613597 - DNA, 75 bp, synthetic construct
  source 1..75: mol_type = other DNA
caatacccaaaaacaggctggcaaaaattgcccgtctgactaacgagcgatgggctgatgttgaaccatccttgc

SEQ ID NO: 613598 - DNA, 75 bp, synthetic construct
  source 1..75: mol_type = other DNA
aacgttaactcactgactgatgatcgggtactgaaagaagttatgagactgggggcgttacagaaaaaactcttt

SEQ ID NO: 613599 - DNA, 75 bp, synthetic construct
  source 1..75: mol_type = other DNA
aatggcaacaattatgctcaggattgaacgagttaggcatgatcgccaatacatatgggcttaaacttgctttcc

SEQ ID NO: 613600 - DNA, 75 bp, synthetic construct
  source 1..75: mol_type = other DNA
actggcgagcagcaattttcattacactcaatattcctctctctcgctggctgccagattcatgggcgatgtata

SEQ ID NO: 613601 - DNA, 75 bp, synthetic construct
  source 1..75: mol_type = other DNA
tacagcacgcagatccgcgccacaggcgtgggaaccgccgtcgcagtcgggcgtctgggggcgatgagcggtccg

SEQ ID NO: 613602 - DNA, 75 bp, synthetic construct
  source 1..75: mol_type = other DNA
gccatcgcaggcggcaggcgtaatgtttgctctgcaaattggcgcggccagcggcacgttaattctcggggcgtt

SEQ ID NO: 613603 - DNA, 75 bp, synthetic construct
  source 1..75: mol_type = other DNA
tttgttaataataataacttaactccgggagtatatcttacctctgttatgtgggggcaagagtatcttgataag

SEQ ID NO: 613604 - DNA, 75 bp, synthetic construct
  source 1..75: mol_type = other DNA
ggtgccagcatgaatggacgttatcgtagctcagtgggtgaattcggtctgggatatagctatgataaaaatagt

SEQ ID NO: 613605 - DNA, 75 bp, synthetic construct
  source 1..75: mol_type = other DNA
cagcgttacaagtaatggatgatgacgctgatgttggcgatatttcacagattattgatggcgcacgttatgact

SEQ ID NO: 613606 - DNA, 75 bp, synthetic construct
  source 1..75: mol_type = other DNA
gccaggcattgcgtaaaccgattcgaacggagcagggtgctaacggggcgatacgggagctggaaaaattccgcc

SEQ ID NO: 613607 - DNA, 75 bp, synthetic construct
  source 1..75: mol_type = other DNA
tcttacagttcagacggatgatacttcccttgccggaggagataaaacaattcagaccgtacagaatttacgcct

SEQ ID NO: 613608 - DNA, 75 bp, synthetic construct
  source 1..75: mol_type = other DNA
acaccatgccgccgtggggattgccgggcgcagcgacgcaaagtgggttttacagccacacaattggtggtgggc

SEQ ID NO: 613609 - DNA, 75 bp, synthetic construct
  source 1..75: mol_type = other DNA
ccacgaggtttgcagggagaaacaggaagacagggcccgacaggtccacagggcccgacaggtgaacccggacca

SEQ ID NO: 613610 - DNA, 75 bp, synthetic construct
  source 1..75: mol_type = other DNA
tgccaccatcacaaaaaatgatggtctttccgtcaaattggctcaaaccatcaatgtcggaacgacatatcgtct

SEQ ID NO: 613611 - DNA, 75 bp, synthetic construct
  source 1..75: mol_type = other DNA
tcctgctggatccgcgtcagctacccgtgggcaggtaaaggattcgggatgatccagatcccgcgcatcggctag

SEQ ID NO: 613612 - DNA, 75 bp, synthetic construct
  source 1..75: mol_type = other DNA
caaaggcccgcaaagcgccattgtcaccggcccggcggggcaggaaatctggacagataaatatggccgggtgaa

SEQ ID NO: 613613 - DNA, 75 bp, synthetic construct
  source 1..75: mol_type = other DNA
atgtcggcactaccttacatgcaattgtatatagctgattatctggcagataccatgcatttgtctacagaagag

SEQ ID NO: 613614 - DNA, 75 bp, synthetic construct
  source 1..75: mol_type = other DNA
aaaagtttgaccctctggatattgctttgccgaactggatttctgttaccagtacaggaagcggcaacacaggaa

SEQ ID NO: 613615 - DNA, 75 bp, synthetic construct
  source 1..75: mol_type = other DNA
acagaaaggaatcatatgctcaaacaaaacacgagcgaaatttaacaggtgttcaaacagacgttgaaatggtgt

SEQ ID NO: 613616 - DNA, 75 bp, synthetic construct
  source 1..75: mol_type = other DNA
ccgcaggccctcggggagaaaccggccctgcaggtcctgcgggtcccgcaggcagtgtcgccagtgttccggatg

SEQ ID NO: 613617 - DNA, 75 bp, synthetic construct
  source 1..75: mol_type = other DNA
gccggggccgaaaggtgacaccggcccacgtggagaggccggaccacccggaccacagggtccggcagggcaaac

SEQ ID NO: 613618 - DNA, 75 bp, synthetic construct
  source 1..75: mol_type = other DNA
tttacgggcggcagctctcggtaagaaagttaactcactgactgatgatcgggtactgaaagaagttatgagact

SEQ ID NO: 613619 - DNA, 75 bp, synthetic construct
  source 1..75: mol_type = other DNA
gccggaatttacacctgcagagcttgccgcattccgggattactggatggcggaggggaaggttttcacgcaggt

SEQ ID NO: 613620 - DNA, 75 bp, synthetic construct
  source 1..75: mol_type = other DNA
gtgactcacctgccattcaaattttcggataccagacaaccatgccttatatcgatataacaactatgcgcggga

SEQ ID NO: 613621 - DNA, 75 bp, synthetic construct
  source 1..75: mol_type = other DNA
tttttcattaccgtgacgatttctggtttgcatggccggatgtggtggatgtgatccgcagtccgatcgctcagg

SEQ ID NO: 613622 - DNA, 75 bp, synthetic construct
  source 1..75: mol_type = other DNA
gcttgaagcatccgtgctcagttacacggacaacataccggcgaaaaacctcggaccttctcttgcaacatggga

SEQ ID NO: 613623 - DNA, 75 bp, synthetic construct
  source 1..75: mol_type = other DNA
agtctgaatctcggaaacggcggtttggtatttgatacgaaccagaaatattccgtcaaaggcaataatgtaacg

SEQ ID NO: 613624 - DNA, 75 bp, synthetic construct
  source 1..75: mol_type = other DNA
gatatttttgagctacagaaatggttggggcattcttcacctgaatctacccgacattatgtcgaaattacaccg

SEQ ID NO: 613625 - DNA, 75 bp, synthetic construct
  source 1..75: mol_type = other DNA
gtatggtgcttttagggacgagcacctttaccgggaatatatgggctgcggattgggggccgtgcaggacggcaa

SEQ ID NO: 613626 - DNA, 75 bp, synthetic construct
  source 1..75: mol_type = other DNA
tggcaacgtcgccggagtatcatttggtatcaaaaataatgaaaaaaatattttcttcaaggggtcatctcttgg

SEQ ID NO: 613627 - DNA, 75 bp, synthetic construct
  source 1..75: mol_type = other DNA
ggttcgttagtctatttccgtaaaatcccggtcggacgcgtgtatgactacaccatcaatcccaataaacaaggg

SEQ ID NO: 613628 - DNA, 75 bp, synthetic construct
  source 1..75: mol_type = other DNA
tggttccttcagtatgattaacggagatcaactggttcaggttgctcgcggtattgcacagggggctgcaattta

SEQ ID NO: 613629 - DNA, 75 bp, synthetic construct
  source 1..75: mol_type = other DNA
gatgaattacgcattatttcttatatcggcattccaacaattcttgattctcttcagacgtttgatgtccctgaa

SEQ ID NO: 613630 - DNA, 75 bp, synthetic construct
  source 1..75: mol_type = other DNA
aacatccagaatcaaaagtacgcgcggttgagtgctgaagatgaaactgaaaccgagtctggcaacgcctcaact

SEQ ID NO: 613631 - DNA, 75 bp, synthetic construct
  source 1..75: mol_type = other DNA
gttgcgtccctctttgggacaaaaaagaaaggtgtttacaatgatagtcagcccatggccaatgtcagtatttcc

SEQ ID NO: 613632 - DNA, 75 bp, synthetic construct
  source 1..75: mol_type = other DNA
ggttaccgttaccatgtaactgactctgcatggattgagccgcaggcggaacttgtttacggtgctgtatccggg

SEQ ID NO: 613633 - DNA, 75 bp, synthetic construct
  source 1..75: mol_type = other DNA
atcaagaattgctatgcagaaagaaatggaagaagatgcaccacctttcattagggggcgttttgttgcattcat

SEQ ID NO: 613634 - DNA, 75 bp, synthetic construct
  source 1..75: mol_type = other DNA
tgtttgcctcatctatatccatagcatcgatcgcactcatgagatatatctggttgtttactaaatttagtaagt

SEQ ID NO: 613635 - DNA, 75 bp, synthetic construct
  source 1..75: mol_type = other DNA
cggagacttaggatacgttccggacgcgctgggctgcgttttgaaagtgctgaatgaaatggctgccgacgatgc

SEQ ID NO: 613636 - DNA, 75 bp, synthetic construct
  source 1..75: mol_type = other DNA
gaatatcgatctggtcagcgcaccaaaaggaactgcagtagatgtctttaaagctacgactcggagtattggctt

SEQ ID NO: 613637 - DNA, 75 bp, synthetic construct
  source 1..75: mol_type = other DNA
ctgcatggattgagccgcaggcggaacttgtttacggtgctgtatccgggaaacagttctcctggaaggaccagg

SEQ ID NO: 613638 - DNA, 75 bp, synthetic construct
  source 1..75: mol_type = other DNA
ggcgtctctggaggtaacactccgtactccggggactgcggtacaactgacgctggctccggtgccattgcagaa

SEQ ID NO: 613639 - DNA, 75 bp, synthetic construct
  source 1..75: mol_type = other DNA
cagctatctgtcgctgaataacgttactgcactgcgcgaacatcatgtggtgctcgacggctcgctgtacgggat

SEQ ID NO: 613640 - DNA, 75 bp, synthetic construct
  source 1..75: mol_type = other DNA
actgatgaaaaaaataaagatatagcgactccgttttctgaaatgaatgaacatgaaagagctattattgctcat

SEQ ID NO: 613641 - DNA, 75 bp, synthetic construct
  source 1..75: mol_type = other DNA
ccgaagtgaatcgtcacacaacggctgaagatatcgtggcagtctgtccgctaggaacatcactggtggtggcga

SEQ ID NO: 613642 - DNA, 75 bp, synthetic construct
  source 1..75: mol_type = other DNA
caaaaacaatttttcattaccgtgatgatttctggtttgcgtggccggatgtggtggatgtgatccgtagtcccg

SEQ ID NO: 613643 - DNA, 75 bp, synthetic construct
  source 1..75: mol_type = other DNA
atttttcattaccgtgacgatttctggtttgcatggccggatgtggtggatgtgatccgcagtccgatcgctcag

SEQ ID NO: 613644 - DNA, 75 bp, synthetic construct
  source 1..75: mol_type = other DNA
catgatgcaaaaaatcacccatgaagagacgcattctcgcaatcttattattcccgcccggctcattgcggagaa

SEQ ID NO: 613645 - DNA, 75 bp, synthetic construct
  source 1..75: mol_type = other DNA
gtgtttacgcttaatgtgctggacgataaaaactacactttgagcagcgacggcggctttagcgctcgtgggcaa

SEQ ID NO: 613646 - DNA, 75 bp, synthetic construct
  source 1..75: mol_type = other DNA
ctgattatcctcggcgcaattatcctcggcctgatgctctctatcgtgggtgtgctgctgcgctcgttgtttaat

SEQ ID NO: 613647 - DNA, 75 bp, synthetic construct
  source 1..75: mol_type = other DNA
tggaagaacacggtatcagcgtctatgccagcatcccgttgtcggaatggcagaaagcgcgcgatagcgtcaaaa

SEQ ID NO: 613648 - DNA, 75 bp, synthetic construct
  source 1..75: mol_type = other DNA
tgccggaatactatctgcctccgcaatcacaaaaagcggctttcgtggtttttccagcgtagcgactgccgtaaa

SEQ ID NO: 613649 - DNA, 75 bp, synthetic construct
  source 1..75: mol_type = other DNA
acgcactggtacaaatcgagcaaagcagcggcaattcgttagtgcaggatatcggctcggcgttagccaacaagc

SEQ ID NO: 613650 - DNA, 75 bp, synthetic construct
  source 1..75: mol_type = other DNA
accgtcaccaaatactccacgctggggatgatcaaccaactgcaaaacagcctgacggtaacggagaacggcaaa

SEQ ID NO: 613651 - DNA, 75 bp, synthetic construct
  source 1..75: mol_type = other DNA
aattaagaaataaattatcatatgatgatgttttaggtgtacttagatggaaagtgtctccttctaataatgtta

SEQ ID NO: 613652 - DNA, 75 bp, synthetic construct
  source 1..75: mol_type = other DNA
ttaggctcaactcgtattgtttataaccctgattcgtcgggggaaacaatgacagtgattaatgaccaagattat

SEQ ID NO: 613653 - DNA, 75 bp, synthetic construct
  source 1..75: mol_type = other DNA
tccgatgcctgtaaatggggggggggacgtccgatggaaagtggtaactgattacggtggtattagtaaaacatt

SEQ ID NO: 613654 - DNA, 75 bp, synthetic construct
  source 1..75: mol_type = other DNA
aaaactacgacctggtgttgattgatacgccgccgattctggcagtgaccgatgcagcaattgtcgggcgtcacg

SEQ ID NO: 613655 - DNA, 75 bp, synthetic construct
  source 1..75: mol_type = other DNA
taaacgacctgaacccgcaggcggttgagcgggcgatcgatcgtcttcgctccaatagcgagtttgtaccgctgt

SEQ ID NO: 613656 - DNA, 75 bp, synthetic construct
  source 1..75: mol_type = other DNA
gatgaagaagggcgcttgttacatcgtccactggcggagcatgtggttaaccgcattagtggtcaaccagctatt

SEQ ID NO: 613657 - DNA, 75 bp, synthetic construct
  source 1..75: mol_type = other DNA
attacatcaaatcagttccgcggtttttcaagcatagcgactgctgcaaatgctgtattaggtcgttatatcgct

SEQ ID NO: 613658 - DNA, 75 bp, synthetic construct
  source 1..75: mol_type = other DNA
ctgatgatgatattgttaaaaatatagataaattgcgtgagcgttctcgtgatctcttcatgggaaacccgctat

SEQ ID NO: 613659 - DNA, 75 bp, synthetic construct
  source 1..75: mol_type = other DNA
tgttaccgaaacggataacgagactgacgcagccgctgcgcgtaaagcgaaggcgctgccgttcggcggcaggct

SEQ ID NO: 613660 - DNA, 75 bp, synthetic construct
  source 1..75: mol_type = other DNA
agcaccggtctccgagaactcaaatgcagtagttattcaataccaggataaaccgtacgttcgcctgaacggcgg

SEQ ID NO: 613661 - DNA, 75 bp, synthetic construct
  source 1..75: mol_type = other DNA
agacaacgccgcagatgcagctgccgcacgcaaggcgaaggcgctgccgttcggcgggcggcttgacccgtataa

SEQ ID NO: 613662 - DNA, 75 bp, synthetic construct
  source 1..75: mol_type = other DNA
cgccgtgagttggggcttattacacctcctgtttctgaggtaaatgaacaaaatatggagactgatgatgcctaa

SEQ ID NO: 613663 - DNA, 75 bp, synthetic construct
  source 1..75: mol_type = other DNA
ttgaaggtgatcgtgtttgcaatccagaggatcgttttataccaaatctttacggtggcgtagaggttggtgaat

SEQ ID NO: 613664 - DNA, 75 bp, synthetic construct
  source 1..75: mol_type = other DNA
tgccctcgtcggtctgcaacccgcaatgctcgacgactacggcggcagcctgagcgaactggcacgggagcaact

SEQ ID NO: 613665 - DNA, 75 bp, synthetic construct
  source 1..75: mol_type = other DNA
ctgtctcaattatgactgtctgtcgatggaaaactacgaaggcgttcgcttgcgccagtaccggatgacgctgga

SEQ ID NO: 613666 - DNA, 75 bp, synthetic construct
  source 1..75: mol_type = other DNA
tacaagtttgatccttctaacgcagtaaaaatcgtcatgccacgagatattatctccgggaatgtaggtgacaat

SEQ ID NO: 613667 - DNA, 75 bp, synthetic construct
  source 1..75: mol_type = other DNA
cgccggatgtcttctcgcaaacgctgttggcgatcccgatgtactgtctgtttgaaatcggtgtcttcttctcac

SEQ ID NO: 613668 - DNA, 75 bp, synthetic construct
  source 1..75: mol_type = other DNA
tgattacgggctggaacccggaacgctgcgaacctatgccggagaacgcattccggcttatctcagcgcgaagaa

SEQ ID NO: 613669 - DNA, 75 bp, synthetic construct
  source 1..75: mol_type = other DNA
gactgtctgtcgatggaaaattacgaaggcgttcgcttgcgccagtaccggatgacactggaggagcagggatga

SEQ ID NO: 613670 - DNA, 75 bp, synthetic construct
  source 1..75: mol_type = other DNA
gtgaactgatccagattgatggctcacctcatgactggtttgaaaatcgaggccccagatgtacactgatcgttt

SEQ ID NO: 613671 - DNA, 75 bp, synthetic construct
  source 1..75: mol_type = other DNA
ggacgatccactcaatctgaaaggttcctttgccggtgcgatgggctacggtcagtttatgccttcttcttacaa

SEQ ID NO: 613672 - DNA, 75 bp, synthetic construct
  source 1..75: mol_type = other DNA
gcatggccttctggcatgatttagcggctccggtcattgctggcattcttgccagtatgatcgtgaactggctga

SEQ ID NO: 613673 - DNA, 75 bp, synthetic construct
  source 1..75: mol_type = other DNA
agcgggttggttttttatgcctacaacaagatcctcgaggcgaaactcccgcgcacggccaatgagatgtatcac

SEQ ID NO: 613674 - DNA, 75 bp, synthetic construct
  source 1..75: mol_type = other DNA
atcgtcagcagttgcaggaaattctctcccaggcgaaacgtctggattcggtactgcggctgatggataaccagg

SEQ ID NO: 613675 - DNA, 75 bp, synthetic construct
  source 1..75: mol_type = other DNA
acagagactgaaacgaccactggaacgccgtccggcggcttcctgcttgagccgcagcacaacgtgatgcagatg

SEQ ID NO: 613676 - DNA, 75 bp, synthetic construct
  source 1..75: mol_type = other DNA
atgttcaagcgtcgttatgtaacattgcttcccctttttgtgttgcttgccgcctgtagcagcaagccaaaacct

SEQ ID NO: 613677 - DNA, 75 bp, synthetic construct
  source 1..75: mol_type = other DNA
tctgccaccagccagctatcaactcgcgccctggaagggatttttgaagcaactcatcgattgatttacggcgct

SEQ ID NO: 613678 - DNA, 75 bp, synthetic construct
  source 1..75: mol_type = other DNA
taatccgcgaaaaagaatgcagagagctaacaggcgtcagccgtactacacgctacgaactggagaagaaagggg

SEQ ID NO: 613679 - DNA, 75 bp, synthetic construct
  source 1..75: mol_type = other DNA
cggtcgttctgttggttgggttaagtctgaggttgtagcgtggatcaaaaaccgcgaacgcattaattcaggcaa

SEQ ID NO: 613680 - DNA, 75 bp, synthetic construct
  source 1..75: mol_type = other DNA
cggataagccgattaaccgaacctttctggcaggaccattttttgggcgcgcgacggattttgacggaagagacg

SEQ ID NO: 613681 - DNA, 75 bp, synthetic construct
  source 1..75: mol_type = other DNA
cgccacaccctgcgccgcgccatcgaccaactggtggaaaaaggctgggtacagcgccgtcagggcgtcggcgta

SEQ ID NO: 613682 - DNA, 75 bp, synthetic construct
  source 1..75: mol_type = other DNA
atggctgaaaatcaatactacggcactggtcgccgcaaaagttccgcagctcgcgttttcatcaaaccgggcaac

SEQ ID NO: 613683 - DNA, 75 bp, synthetic construct
  source 1..75: mol_type = other DNA
tttctggaatcagtatgaagacgcgttgaatcgtgcgtggcaggtgtatggtgtaccgccggaaattatcgtcgg

SEQ ID NO: 613684 - DNA, 75 bp, synthetic construct
  source 1..75: mol_type = other DNA
ggggctgaatacggcttctgtctccggtatgaatctgctggcggatgatgcctgcgtgccattaacctcaatgat

SEQ ID NO: 613685 - DNA, 75 bp, synthetic construct
  source 1..75: mol_type = other DNA
aggtatgggaggattcgcgccggatacaggctgcactgactacgcacggggcaaccctgttttgccgccagaccc

SEQ ID NO: 613686 - DNA, 75 bp, synthetic construct
  source 1..75: mol_type = other DNA
acatctggcaaggctgggacggaagttactgtcgttctcaaaatcggtggagttgcatgacaaggtcatcgggca

SEQ ID NO: 613687 - DNA, 75 bp, synthetic construct
  source 1..75: mol_type = other DNA
caccggggaaaccattcgggtaagtcggttagccgaacctttctggcaggaccattttttaggcgcgcgacggat

SEQ ID NO: 613688 - DNA, 75 bp, synthetic construct
  source 1..75: mol_type = other DNA
accggggaaaccattcgggtaagccggttagccgaacctttctggcaggaccattttttgggcgcgcgcaggatt

SEQ ID NO: 613689 - DNA, 75 bp, synthetic construct
  source 1..75: mol_type = other DNA
ttccatatccacagccgcgagatagccgaacctttctggcaggaccattttttgggcgcgcgcaggattttgacg

SEQ ID NO: 613690 - DNA, 75 bp, synthetic construct
  source 1..75: mol_type = other DNA
ttactgatgatgacagacagcttttgctttcatatattccattcatcgacagtcttggtcagttcctgggagagt

SEQ ID NO: 613691 - DNA, 75 bp, synthetic construct
  source 1..75: mol_type = other DNA
tttctggaatcagtatgaagatgcgctgaatcgtgcgtggcaagtgtatggcgtaccgccagaaatcatcgtcgg

SEQ ID NO: 613692 - DNA, 75 bp, synthetic construct
  source 1..75: mol_type = other DNA
gacgggcatatcaacctgtgggatccggttgatgcgatcggtagtgtggcgaactatttcaaagcgcacggctgg

SEQ ID NO: 613693 - DNA, 75 bp, synthetic construct
  source 1..75: mol_type = other DNA
aaaattgccttacagcaagccgcatccgcaagtatatctcgactgcgcagcaaaactgggggttgaccctctgac

SEQ ID NO: 613694 - DNA, 75 bp, synthetic construct
  source 1..75: mol_type = other DNA
cacctgtgcgctaatcccggtgactgatgtttcccgtgagggtgcactggggatggcatcggccacactgcgttt

SEQ ID NO: 613695 - DNA, 75 bp, synthetic construct
  source 1..75: mol_type = other DNA
cacctgcaccctgacgccggagacgaatgtgtctccgggcgggccgttcggcttagcatcagccacgctgcgttt

SEQ ID NO: 613696 - DNA, 75 bp, synthetic construct
  source 1..75: mol_type = other DNA
ggcgttatccctctggtatcaacaacagcttatggtggtgtatccagtaatattacaggttcatacgcgacggcg

SEQ ID NO: 613697 - DNA, 75 bp, synthetic construct
  source 1..75: mol_type = other DNA
gttgcaggaggagctttgcagcgttgtggaggcgtccggtgccagcctggagaaggggcggcacgaccagctact

SEQ ID NO: 613698 - DNA, 75 bp, synthetic construct
  source 1..75: mol_type = other DNA
tttaatatacctttccctaaaaaagctgatattgccttgctttcacattctggtgatggtggttcaactgccggg

SEQ ID NO: 613699 - DNA, 75 bp, synthetic construct
  source 1..75: mol_type = other DNA
tttgagtggaaaggatgtagctggtcttctcacataccttggtttaggagaagcggcgaaaagggatgtgggcac

SEQ ID NO: 613700 - DNA, 75 bp, synthetic construct
  source 1..75: mol_type = other DNA
gcaataccaattattgtgttgttgcatcgtacgataatgcacggtcaggtgtgtcaacaatggttagttttgcag

SEQ ID NO: 613701 - DNA, 75 bp, synthetic construct
  source 1..75: mol_type = other DNA
tcagatacctgatatgggtagcttcacgctttctgtttcaggtactggatatcaaaaattaccatcaggttttat

SEQ ID NO: 613702 - DNA, 75 bp, synthetic construct
  source 1..75: mol_type = other DNA
cttcaacagccacaacgaaggctggcgaagccactgaacaggccagcgcagcagcgagttctgcttccgcagcga

SEQ ID NO: 613703 - DNA, 75 bp, synthetic construct
  source 1..75: mol_type = other DNA
ttccccaaaaaagcggactgcgccatgcttactcattctggtgatggcggtgcgcctttaggcgctgggcgaggg

SEQ ID NO: 613704 - DNA, 75 bp, synthetic construct
  source 1..75: mol_type = other DNA
cagcgcattatgttgcaggccatgtactcctggggctaacggcaatttgcgcttgtcttattggtctggtcgcca

SEQ ID NO: 613705 - DNA, 75 bp, synthetic construct
  source 1..75: mol_type = other DNA
ttttcataaacgttggtttgagagaagcggcaaaacgggatgtggggacaggggaaaatcagataccggacatgg

SEQ ID NO: 613706 - DNA, 75 bp, synthetic construct
  source 1..75: mol_type = other DNA
aatacccggaactggcaaaggcttatccgacaaataattgcctgatttacgtggtgagtttatcgtggctgggat

SEQ ID NO: 613707 - DNA, 75 bp, synthetic construct
  source 1..75: mol_type = other DNA
ttttcataaacgttcaattgggagaagcggcaaaacgggatgtcggaaccggtaataatcaactcccggacatgt

SEQ ID NO: 613708 - DNA, 75 bp, synthetic construct
  source 1..75: mol_type = other DNA
ttttcataaacgttggtttgggagaagcggcgaaacggggggttggaacaggggaaaatcagataccggacatgg

SEQ ID NO: 613709 - DNA, 75 bp, synthetic construct
  source 1..75: mol_type = other DNA
cgatgtttttgatttccagtcacatacccattttttacatcgggttgatggttatcgccgacccatattacttag

SEQ ID NO: 613710 - DNA, 75 bp, synthetic construct
  source 1..75: mol_type = other DNA
atgacttataacatcactataggaaacaaaactattgaaataactgagagcggataccacattttaaaagctgtc

SEQ ID NO: 613711 - DNA, 75 bp, synthetic construct
  source 1..75: mol_type = other DNA
ttggaaatagagttttcaccaccgacagtggttagcttttgtagtttaggcggctacagcgcactatcagaaatt

SEQ ID NO: 613712 - DNA, 75 bp, synthetic construct
  source 1..75: mol_type = other DNA
aactattactttattcgatgatttttctgctgatgatatgcagtatggggatatggaagaacaagattttctctc

SEQ ID NO: 613713 - DNA, 75 bp, synthetic construct
  source 1..75: mol_type = other DNA
atgaacaacatattaggctcatcaattaatatgccctgtacacttttcgaaactattactttattcgatgatttt

SEQ ID NO: 613714 - DNA, 75 bp, synthetic construct
  source 1..75: mol_type = other DNA
actggaaggatatttgcataattcgataaatcttccagctcgcgcggttgtgctgacttttgatgatggcttaaa

SEQ ID NO: 613715 - DNA, 75 bp, synthetic construct
  source 1..75: mol_type = other DNA
ccggatttacagcagggaaagcctccagtgcgcaagtcaataaggttattcggcaggccagctttattgctgcag

SEQ ID NO: 613716 - DNA, 75 bp, synthetic construct
  source 1..75: mol_type = other DNA
ccgtagccaactgcgcggaaacctataagccgcagttgcaggaaggtagcgggcgcgttcagattgtccgcatga

SEQ ID NO: 613717 - DNA, 75 bp, synthetic construct
  source 1..75: mol_type = other DNA
ttttcataaacgttggtttgggagaagcggcaaaacgggatgtagggacaggggaaaatcagataccggacatgg

SEQ ID NO: 613718 - DNA, 75 bp, synthetic construct
  source 1..75: mol_type = other DNA
acaaaccttggtttgggagaagcagctaaaaggaatgtaggtacaggggcgaatcagatacctgatatgagcctg

SEQ ID NO: 613719 - DNA, 75 bp, synthetic construct
  source 1..75: mol_type = other DNA
ggctctcgaaaaccttggtttgggagaaggctctgcattacctgttggtgtcccggttccgtggccttcagccac

SEQ ID NO: 613720 - DNA, 75 bp, synthetic construct
  source 1..75: mol_type = other DNA
caatgtttcattcccaattccatttacacagacaccgggcattgtaattgtgtgcgatggtggtttcgggggcgg

SEQ ID NO: 613721 - DNA, 75 bp, synthetic construct
  source 1..75: mol_type = other DNA
tggtgctattgggttattttgctcggctcacttaccgttattcagggtatctacgtattaatcagttcagatgca

SEQ ID NO: 613722 - DNA, 75 bp, synthetic construct
  source 1..75: mol_type = other DNA
atggaaaaaggcccactgactggctcccaccagaatgatgagcttggcgctggcaacaccgacgagcaatccctc

SEQ ID NO: 613723 - DNA, 75 bp, synthetic construct
  source 1..75: mol_type = other DNA
atggcattgaacaatttaaaaggcctgtccgaacttgctaaagccgccaaaggcaagaaaggcaaagaggttctt

SEQ ID NO: 613724 - DNA, 75 bp, synthetic construct
  source 1..75: mol_type = other DNA
agtgggacaagtacgcagcccaactggttgatgaagctccgacagaatggcatgactggaaaaatcgcattagtt

SEQ ID NO: 613725 - DNA, 75 bp, synthetic construct
  source 1..75: mol_type = other DNA
tatatcgatatgttatttgttgaccctgaatacccccgccgtggggttgccagcgctttgttaaaacctttgatt

SEQ ID NO: 613726 - DNA, 75 bp, synthetic construct
  source 1..75: mol_type = other DNA
gcggtgttatgtcaacgcacgctaactctgcgcgcgatgcctttaaccgtattgggctgcttatcaaggcgaccc

SEQ ID NO: 613727 - DNA, 75 bp, synthetic construct
  source 1..75: mol_type = other DNA
taacacattagacattatttttaatgatgcaaataaaacaagccaaaaatccacatctaaaagcaagcatgctat

SEQ ID NO: 613728 - DNA, 75 bp, synthetic construct
  source 1..75: mol_type = other DNA
tgcacccggaacaactggatgcccctgcaccacataccgaagtggccagtctgcatcccaatcatgtctggcaga

SEQ ID NO: 613729 - DNA, 75 bp, synthetic construct
  source 1..75: mol_type = other DNA
accggagataataatgtccgggcaggcacatttgttttcagaatgcgggctgcgggagtgttgcgtcatgtgcgg

SEQ ID NO: 613730 - DNA, 75 bp, synthetic construct
  source 1..75: mol_type = other DNA
ctggctgaagattactgctgagcagttgaaaaaagcgccttccgttgaggtttgccgtgaactggctgtggcagc

SEQ ID NO: 613731 - DNA, 75 bp, synthetic construct
  source 1..75: mol_type = other DNA
acacaatacggatttggtgacgctttaacctctaatcaactgggggtcataaatggcaaaaagtggatatttgat

SEQ ID NO: 613732 - DNA, 75 bp, synthetic construct
  source 1..75: mol_type = other DNA
ataatggcgggctacggggaattgcgtcttggtggtgaggtgcctgaacgctggcaggcatccctgccggtgagt

SEQ ID NO: 613733 - DNA, 75 bp, synthetic construct
  source 1..75: mol_type = other DNA
ggcggtatttggcgaaagttacaaagccctgccggaaaccccggcacagatggcggcaaaagaaaccgaagcgct

SEQ ID NO: 613734 - DNA, 75 bp, synthetic construct
  source 1..75: mol_type = other DNA
agccgcaaaaatccgtttggcgatatcaaagcggatggcacggtgaaaacggctctcgaaaaccttggtttggga

SEQ ID NO: 613735 - DNA, 75 bp, synthetic construct
  source 1..75: mol_type = other DNA
caaagctacagccgccgagtttggcattgaactgacggcaattggcgaactggtgccagcgcgcggcggtcgtgc

SEQ ID NO: 613736 - DNA, 75 bp, synthetic construct
  source 1..75: mol_type = other DNA
gggcgcaggtgtgcaggcgcgcgtcgactatgacgcgatcccgaaattgccgggggttgaagagtacattaagtt

SEQ ID NO: 613737 - DNA, 75 bp, synthetic construct
  source 1..75: mol_type = other DNA
gcagcattacctgtttcaccatcgcaattttccctgatgtcatctgtgactgagcaaggagtaaatccttttgct

SEQ ID NO: 613738 - DNA, 75 bp, synthetic construct
  source 1..75: mol_type = other DNA
cagcgcattatattgcaggccatgtattcctggggctaacggcaatttgcgcttgtcttattggcctggtcgcca

SEQ ID NO: 613739 - DNA, 75 bp, synthetic construct
  source 1..75: mol_type = other DNA
tcgcaacgggtaaaaatgccaatgttatgtcgcaggaggaatgggaagcgttgcctgcgcttttatctggattta

SEQ ID NO: 613740 - DNA, 75 bp, synthetic construct
  source 1..75: mol_type = other DNA
cgcacaggccgggtgcaaattgttcctcactaaaccgctgggaattggcgttctcaccactgccgagaagaaatc

SEQ ID NO: 613741 - DNA, 75 bp, synthetic construct
  source 1..75: mol_type = other DNA
gtggtacagaaacagggcaatacccacttctctccgggacaacgtgttattctggccagcaacggtagccaggtg

SEQ ID NO: 613742 - DNA, 75 bp, synthetic construct
  source 1..75: mol_type = other DNA
agaaggcgcggcacgaccagctgcttaccgcgcttcgtgcgctgctgttaagccgcaagaatccgtttggcgata

SEQ ID NO: 613743 - DNA, 75 bp, synthetic construct
  source 1..75: mol_type = other DNA
ggctctcgaaaaccttggtttgggagatctcgggacagcatctggccgtaatgtcggtaatactcaatcgtttga

SEQ ID NO: 613744 - DNA, 75 bp, synthetic construct
  source 1..75: mol_type = other DNA
ttatggagttaactcaactggtacttcaagaacgggttttacagcccgtatgtcaggcgccggtgggtttaatct

SEQ ID NO: 613745 - DNA, 75 bp, synthetic construct
  source 1..75: mol_type = other DNA
gtacagattcagggcggtgatgattccaacgttatcggcgcaattggcggtgctgttcttggtggtttcctggga

SEQ ID NO: 613746 - DNA, 75 bp, synthetic construct
  source 1..75: mol_type = other DNA
atgattaagcgcgtactggttgtatcaatggtcggtctgtctcttgtcggttgtgtcaacaacgataccctttct

SEQ ID NO: 613747 - DNA, 75 bp, synthetic construct
  source 1..75: mol_type = other DNA
gcgcagtcgtcgataataccgcgctgctgacctgcctgaatgaaggccagaagttaagcgtagtgctggatgtct

SEQ ID NO: 613748 - DNA, 75 bp, synthetic construct
  source 1..75: mol_type = other DNA
gtggggatgagggtgatttccgctcgctggatgagttagtccagcatgcggatattctgactttccatacgccac

SEQ ID NO: 613749 - DNA, 75 bp, synthetic construct
  source 1..75: mol_type = other DNA
ttgcgctggatacgttgctgcccgcgccagagtttggccgcattacgctgcatggtccgctcgatcaaccgacgc

SEQ ID NO: 613750 - DNA, 75 bp, synthetic construct
  source 1..75: mol_type = other DNA
cgttgacgcattttattccccgtactgactggcaacccgcgaccggcgcaccacaaccagaacaacagcaactct

SEQ ID NO: 613751 - DNA, 75 bp, synthetic construct
  source 1..75: mol_type = other DNA
gaagggagatgataaacctgaaaacatcctgaaaatcgtcaaagaatggcggcgttcgcaaggattgcctttgtt

SEQ ID NO: 613752 - DNA, 75 bp, synthetic construct
  source 1..75: mol_type = other DNA
actgatccgcagcctgaaaccaggagcgattctgattaacgcctgccgtggcgcagtcgtcgataataccgccct

SEQ ID NO: 613753 - DNA, 75 bp, synthetic construct
  source 1..75: mol_type = other DNA
atgactactgttaaccagatctctgatgcaaacattacatcctccctcccaccgaaaattcgcgaagcggtggaa

SEQ ID NO: 613754 - DNA, 75 bp, synthetic construct
  source 1..75: mol_type = other DNA
agacaatcacccagccctgcagcgcgttcccggatgcttaaacagcgtgacatggttaaagggggcgagaaggaa

SEQ ID NO: 613755 - DNA, 75 bp, synthetic construct
  source 1..75: mol_type = other DNA
tatgagcgctctgacaccctgagagggttaattaccggagcctggtacagtgccttagggttagggaaggtgcga

SEQ ID NO: 613756 - DNA, 75 bp, synthetic construct
  source 1..75: mol_type = other DNA
tctctgtatgtgatttgcgatgacgccagcgcggcggcattactgtgtaaattgggttttaacgccgttcatcat

SEQ ID NO: 613757 - DNA, 75 bp, synthetic construct
  source 1..75: mol_type = other DNA
gctgcatctggcggatgaaaaactgatccgtagcctgaagccgggagcgattctgattaacgcctgccgtggcgc

SEQ ID NO: 613758 - DNA, 75 bp, synthetic construct
  source 1..75: mol_type = other DNA
tactgtggggatcgtgggcgttggtaacgttgggcgtcgattacaggcgcgactggaagcgttagggatcaaaac

SEQ ID NO: 613759 - DNA, 75 bp, synthetic construct
  source 1..75: mol_type = other DNA
atcatgcgcttaagttgcgtgatgccttacctggcgactggctgtggatttcgccgcagccagtcgctgaaaacc

SEQ ID NO: 613760 - DNA, 75 bp, synthetic construct
  source 1..75: mol_type = other DNA
ttgtgctggtgcggataggtaaccatcgcgaagccagcagcggctgttatacggcgatagcgctgttacctgtta

SEQ ID NO: 613761 - DNA, 75 bp, synthetic construct
  source 1..75: mol_type = other DNA
gcacgcaccacaaggcgagatcaccatttctccatttgaacagatattatggcgcagtgagccggaaacaccgtt

SEQ ID NO: 613762 - DNA, 75 bp, synthetic construct
  source 1..75: mol_type = other DNA
tggtggtcgatgaagctgcagccattcccgcaccgttactgcatcaactggtatcgcgttttccgcgtactttgt

SEQ ID NO: 613763 - DNA, 75 bp, synthetic construct
  source 1..75: mol_type = other DNA
cagaaacgatgatctggcagcctgagttcacagataaaacactctccaggaaaaccggggcggttcagctgaaat

SEQ ID NO: 613764 - DNA, 75 bp, synthetic construct
  source 1..75: mol_type = other DNA
tattcgctgcggctgttgctcttactggttgtgctgttgacaaagatgctgcattgcacaacctgccaaatagcg

SEQ ID NO: 613765 - DNA, 75 bp, synthetic construct
  source 1..75: mol_type = other DNA
aacgtcgttaggttgtttaacgcgtctgctacaaaccagtgaactggcgttaccggcgctgcgtggacgcttgca

SEQ ID NO: 613766 - DNA, 75 bp, synthetic construct
  source 1..75: mol_type = other DNA
gcgcactaccggacttcgccgctggatttacgccgcatgatggatgcaccagggcaacattttttacaggcggct

SEQ ID NO: 613767 - DNA, 75 bp, synthetic construct
  source 1..75: mol_type = other DNA
taccggcgctgcgtgggcgtttacagaaaaacgtcagtgacgcgcagttatgtaccacacttaaactttcaggcc

SEQ ID NO: 613768 - DNA, 75 bp, synthetic construct
  source 1..75: mol_type = other DNA
acgtgagcattatcgtttacgccgcgacgtgcaaattctcatgcagtggaatggtgaaagcatcccggttgatcc

SEQ ID NO: 613769 - DNA, 75 bp, synthetic construct
  source 1..75: mol_type = other DNA
tggttgtcgatgaagctgctgcaatacccgccccactattacatcaactggtatcacgctttccgcgtactttgt

SEQ ID NO: 613770 - DNA, 75 bp, synthetic construct
  source 1..75: mol_type = other DNA
tggcattaccggcgctgcgtgggcgtttacagaaaaacgccagtgatgcgcagttatgtaccacacttaaacttt

SEQ ID NO: 613771 - DNA, 75 bp, synthetic construct
  source 1..75: mol_type = other DNA
tcgccgcagccaacttctgaaaaccactgtacgccagcggcgctacaaactttacttgggcgcgagttccagcat

SEQ ID NO: 613772 - DNA, 75 bp, synthetic construct
  source 1..75: mol_type = other DNA
acccgatcgctgatatttctatccctgcttcgacgcaacaggcgcttgaaaaagtgaatgtcgctaaatcagcct

SEQ ID NO: 613773 - DNA, 75 bp, synthetic construct
  source 1..75: mol_type = other DNA
gacaggcttaatgatattattgccagacactacccggaagccctggcaagcacagtgaacaaaagccgcaagaca

SEQ ID NO: 613774 - DNA, 75 bp, synthetic construct
  source 1..75: mol_type = other DNA
tgggcacgtttgaacaactgcatcagaataaagatgaggtgtttgagcgaggagtcatcaacgtcttcaggggac

SEQ ID NO: 613775 - DNA, 75 bp, synthetic construct
  source 1..75: mol_type = other DNA
gtacgataattttccggaaatcagtgaagagaatattctgagtacgtttgagcagctacaccagaataaggatga

SEQ ID NO: 613776 - DNA, 75 bp, synthetic construct
  source 1..75: mol_type = other DNA
ttacaggctaaccatgaactgttgaccttgacgcttccgcaaggttggctaacccaacatccgctgggtaaagag

SEQ ID NO: 613777 - DNA, 75 bp, synthetic construct
  source 1..75: mol_type = other DNA
gcgccgctttatgatcgatattgatcaggcgcagcgcgtagccaaagttgcggctaacttcttcgatcaggtgga

SEQ ID NO: 613778 - DNA, 75 bp, synthetic construct
  source 1..75: mol_type = other DNA
tgaaggcctggtctacggcatgttgcatctggccgtcgagcaggatattcgcagccgtacactgcgtaatattca

SEQ ID NO: 613779 - DNA, 75 bp, synthetic construct
  source 1..75: mol_type = other DNA
tgagcacatttgaacaactgcaccagaataacgatgatgtgtttgaccggggagtgatcaacgtcttcagagggc

SEQ ID NO: 613780 - DNA, 75 bp, synthetic construct
  source 1..75: mol_type = other DNA
gacctggaaagaatgctacacctgttcagcggcaaaccgatccccgacagccgggaaaatatcatcattcggctg

SEQ ID NO: 613781 - DNA, 75 bp, synthetic construct
  source 1..75: mol_type = other DNA
ccggaaatcagtgaagcgaacattctgagcacatttgaacaactgcaccagaataaggataaggtgtttgagcgg

SEQ ID NO: 613782 - DNA, 75 bp, synthetic construct
  source 1..75: mol_type = other DNA
cgttatctgttccacctcaatcggacacattctggctgtacgaaagaccacactgatgcaaatcgacacacttat

SEQ ID NO: 613783 - DNA, 75 bp, synthetic construct
  source 1..75: mol_type = other DNA
tgagcacatttgaacaactgcaccagaataacgatgaggtgtttgaccggggtgtgatcaacgtcttcagagggc

SEQ ID NO: 613784 - DNA, 75 bp, synthetic construct
  source 1..75: mol_type = other DNA
tgagcacatttgaacaactgcaccagaataacgatgaggtgtttgaccggggagtgatcaacgtcttcatagggc

SEQ ID NO: 613785 - DNA, 75 bp, synthetic construct
  source 1..75: mol_type = other DNA
cagtaccgaactggtaaccggcacaggcgcacaaacaaccgccttgttcagcctgtcgatgggctgcgttacttg

SEQ ID NO: 613786 - DNA, 75 bp, synthetic construct
  source 1..75: mol_type = other DNA
ttgcccctgtaaatttggcaataaaattatcgtcaacaatctggtgaggtgggaccggtggggattgcatcttat

SEQ ID NO: 613787 - DNA, 75 bp, synthetic construct
  source 1..75: mol_type = other DNA
ttgtcgtctcatatctgctcaaccagcattcgccacattctggctgtacgaaagagtacactgttgcaaatcgac

SEQ ID NO: 613788 - DNA, 75 bp, synthetic construct
  source 1..75: mol_type = other DNA
accggtgggggtttcatcttatcaccgggcaacaggcagatcgacttgccgaccgggaaagaatgctacacctgt

SEQ ID NO: 613789 - DNA, 75 bp, synthetic construct
  source 1..75: mol_type = other DNA
tatcagcgcttattggcacgtctggattatctgacgaagctcgacactaaagcatcaggccagcgtaactttggc

SEQ ID NO: 613790 - DNA, 75 bp, synthetic construct
  source 1..75: mol_type = other DNA
gcacgtctggattatctgacgaagctcgacactaaagcatcaggccagcgtaactttggctacagcggtttttga

SEQ ID NO: 613791 - DNA, 75 bp, synthetic construct
  source 1..75: mol_type = other DNA
atgattacgattgaaactctttacggtgaatgtcatgaggctcacgggttaaaaataagaaacttggtggataac

SEQ ID NO: 613792 - DNA, 75 bp, synthetic construct
  source 1..75: mol_type = other DNA
tcacggctggaaagtgtgcgttggcgcttccggcaccgtgcaggcgttacaggaaatcatgatggcacaggggat

SEQ ID NO: 613793 - DNA, 75 bp, synthetic construct
  source 1..75: mol_type = other DNA
tgccgtaccgccgcgcgtcgcagaacaactctgccgtttactacgtctggcaattatttttgccagccgtcgccg

SEQ ID NO: 613794 - DNA, 75 bp, synthetic construct
  source 1..75: mol_type = other DNA
cgccattcattgcggtcgtctggaagaactggagattgatgggttaacgctggagcgcgcgttagtcttcccgag

SEQ ID NO: 613795 - DNA, 75 bp, synthetic construct
  source 1..75: mol_type = other DNA
atcgtcaacaatctggtgagatgggaccggtggggatttcatctgaacagcgggcaacaggcagatcgacttgcc

SEQ ID NO: 613796 - DNA, 75 bp, synthetic construct
  source 1..75: mol_type = other DNA
ccggcgattagcgaagccaacatcctgagtacctttgaacaactccaccacaataagcaggacgttttcgaacgt

SEQ ID NO: 613797 - DNA, 75 bp, synthetic construct
  source 1..75: mol_type = other DNA
gggatggatgaacggattaccctggaaaagttgcagcaactgaaacaacgcgccattcattgtggtcgactggag

SEQ ID NO: 613798 - DNA, 75 bp, synthetic construct
  source 1..75: mol_type = other DNA
tccggggcgaatacgtcaccttttctgcaacaaatcctgaatacgctacacggtttcactgaccaggtgtttggt

SEQ ID NO: 613799 - DNA, 75 bp, synthetic construct
  source 1..75: mol_type = other DNA
cggccgacccttatgcactgatattcagccgtcccagcccgttgcgtggactctacgataaaaatcgcaattttc

SEQ ID NO: 613800 - DNA, 75 bp, synthetic construct
  source 1..75: mol_type = other DNA
gcaggcgattgacggtaactggtcctataacaatatgacgacggggaatgtacagggtaataagtgggataccaa

SEQ ID NO: 613801 - DNA, 75 bp, synthetic construct
  source 1..75: mol_type = other DNA
accgctatgcccgcgatgagaatgtcagtctggctgaagccgtgagggaagccgcgacaaaaagccaggatatga

SEQ ID NO: 613802 - DNA, 75 bp, synthetic construct
  source 1..75: mol_type = other DNA
caggcgaccagtgcgtcgattgcggctaacacactaccggtgatgtacagcgtactgttgggcatgacaatagcg

SEQ ID NO: 613803 - DNA, 75 bp, synthetic construct
  source 1..75: mol_type = other DNA
ctataactattttcacggtacttccctgacatccacggagatcatccgaaagaatgtggtcatgaacggcctgcg

SEQ ID NO: 613804 - DNA, 75 bp, synthetic construct
  source 1..75: mol_type = other DNA
acggtacgcgccgcgccattacgccggaacattaccagcaggtgatggagaaagcccgcgctgaggatgcggggc

SEQ ID NO: 613805 - DNA, 75 bp, synthetic construct
  source 1..75: mol_type = other DNA
atccatattacaaaacggttcagtgaacatttacgggcgctgaatatccagacccagcgggtggagcagatcaag

SEQ ID NO: 613806 - DNA, 75 bp, synthetic construct
  source 1..75: mol_type = other DNA
ttttacccgttttaaaggcgtaaaactctatgaaatcatcgatatcatcagtaaagagcaggacgtgacgatggt

SEQ ID NO: 613807 - DNA, 75 bp, synthetic construct
  source 1..75: mol_type = other DNA
aaccaaaataaacactgattcgagtgatatcagtggacggaatatgttcccgtttctccagcaggtgcttaaccg

SEQ ID NO: 613808 - DNA, 75 bp, synthetic construct
  source 1..75: mol_type = other DNA
gacaggctggacgcaggcaggtggtggagcatccgcgcctgaccaataaggcgctgggggtgtcgggcgcttcac

SEQ ID NO: 613809 - DNA, 75 bp, synthetic construct
  source 1..75: mol_type = other DNA
gctgatggggctgcgttcgcaggaggcggtacagagttcacagtcgctgaaaacgtggctgaacgcggtgaaacc

SEQ ID NO: 613810 - DNA, 75 bp, synthetic construct
  source 1..75: mol_type = other DNA
cgacaaggttcctgcaggactggccgcgcccgccagtatgatcacccggatcggcgccggaatggcgcaggtgta

SEQ ID NO: 613811 - DNA, 75 bp, synthetic construct
  source 1..75: mol_type = other DNA
aagctacggtaagagcatccttcacaacaaccctgcaaaattctcaaaagtctatgcaactcagcatctaagcca

SEQ ID NO: 613812 - DNA, 75 bp, synthetic construct
  source 1..75: mol_type = other DNA
tgatagcagagtttgatactgcaagtaagctcagaaccgacattgctaaaccagcctggcacaattcgctcaggt

SEQ ID NO: 613813 - DNA, 75 bp, synthetic construct
  source 1..75: mol_type = other DNA
cccctttttacaacggctcatagagcttctcagaaaatatggaaagagcatcctccacaaggttcctacaaactt

SEQ ID NO: 613814 - DNA, 75 bp, synthetic construct
  source 1..75: mol_type = other DNA
aactaaactggtcgagcgatggatttccgtctctggtgtagctgatgatccgaataactacctgttttgccgggt

SEQ ID NO: 613815 - DNA, 75 bp, synthetic construct
  source 1..75: mol_type = other DNA
aatgcgacaaagcttctacgctcagatgtcagtaaacctgtttggcacaattctctgcgtctgcctgctggtgag

SEQ ID NO: 613816 - DNA, 75 bp, synthetic construct
  source 1..75: mol_type = other DNA
aatgacacaaaacagcttcggccagatgttcagaaaccggtttggcacaactcacttcgcttacctgatggtgaa

SEQ ID NO: 613817 - DNA, 75 bp, synthetic construct
  source 1..75: mol_type = other DNA
tacattgagcttctgagaagctttggtaagaccattcttcacaaaacccacacgaccttctcaaatatctactca

SEQ ID NO: 613818 - DNA, 75 bp, synthetic construct
  source 1..75: mol_type = other DNA
aaatccataactcagggcgtcgttcacgagaaattgtgattggcatagataatacttatccgacaattaaagaaa

SEQ ID NO: 613819 - DNA, 75 bp, synthetic construct
  source 1..75: mol_type = other DNA
gtgatctcatccggagaatcttccgggaaggaatacagggacttgcagggggagcatgagcagggtaataaaagc

SEQ ID NO: 613820 - DNA, 75 bp, synthetic construct
  source 1..75: mol_type = other DNA
tgatcgcagaattcgatagcaccaagcatctacgccaagatatcgcaaaaccagtttggcacaactcgctaagat

SEQ ID NO: 613821 - DNA, 75 bp, synthetic construct
  source 1..75: mol_type = other DNA
agctatggtaagagcattcttcacaagcccctccctggattctcaaatctctatgtaacccgacctttacataaa

SEQ ID NO: 613822 - DNA, 75 bp, synthetic construct
  source 1..75: mol_type = other DNA
gatacgaaccaacacaccaacaaaagccccccctgctgctcctgctcctgctcctgctcctgctcctgctcctgc

SEQ ID NO: 613823 - DNA, 75 bp, synthetic construct
  source 1..75: mol_type = other DNA
accgatcgttcacccgaaagtcaccacctttaccgagctggcgcagctgcctgcgctctggaaggcacgcggctg

SEQ ID NO: 613824 - DNA, 75 bp, synthetic construct
  source 1..75: mol_type = other DNA
gatgatgtatgtcctgtttggcggcatgttagcaaccacctgggtacagattatcaaagccgttttgctgctgtt

SEQ ID NO: 613825 - DNA, 75 bp, synthetic construct
  source 1..75: mol_type = other DNA
atcatgaagccgggcgggctggtgaaagatccgatctccgcgctgtcgctggggcttggattgatgtttggtacg

SEQ ID NO: 613826 - DNA, 75 bp, synthetic construct
  source 1..75: mol_type = other DNA
gagcgtgaactgttccgtgcgcagtttatccgctcccagaccggctttggcgttgagcaaggccgcgcgcattaa

SEQ ID NO: 613827 - DNA, 75 bp, synthetic construct
  source 1..75: mol_type = other DNA
tctcgcccgttttgagaaagctgcgcagtgtggttttcgcggcgttgaatttatgggtaatgctgccaacttact

SEQ ID NO: 613828 - DNA, 75 bp, synthetic construct
  source 1..75: mol_type = other DNA
atgacaacaagaaaacttattcgcttgccagaagtaatgaataaaacaggatttagcaaagcatggatctataga

SEQ ID NO: 613829 - DNA, 75 bp, synthetic construct
  source 1..75: mol_type = other DNA
tggcgtttgctatcgccgcgagctgtaacttcccaatcattctgctttccatgtactggtcgaaactgactacgc

SEQ ID NO: 613830 - DNA, 75 bp, synthetic construct
  source 1..75: mol_type = other DNA
aaaagcgccgctcgccaggtgacgaatcagattgtacgcggggatgttggggagtttgctgggggggagaaaaag

SEQ ID NO: 613831 - DNA, 75 bp, synthetic construct
  source 1..75: mol_type = other DNA
aatgagcttaatctttctaatattttgcttaaacgctatagccatttgttgtcacaacacgctaaagaacataaa

SEQ ID NO: 613832 - DNA, 75 bp, synthetic construct
  source 1..75: mol_type = other DNA
gagaaagtcaaaagataatacctgagccatcagaagaggctgtgaaaaaaatggttgatgataaaaaggatagac

SEQ ID NO: 613833 - DNA, 75 bp, synthetic construct
  source 1..75: mol_type = other DNA
acgctggcgggcgcatcagcggtttcgcatgacctgtacgctaacgtcttcaaaaaaggcgcgaccgaacgtgaa

SEQ ID NO: 613834 - DNA, 75 bp, synthetic construct
  source 1..75: mol_type = other DNA
cgcatgacctgtacgctaacgtcttcaaaaaaggcgcgactgaacgtgaagaactgcgagtatcgaaaatcaccg

SEQ ID NO: 613835 - DNA, 75 bp, synthetic construct
  source 1..75: mol_type = other DNA
atccgaaactgattcgtttgccagaagtaaaaagaagaacagggtttggtaaaacgtggatatataccttaataa

SEQ ID NO: 613836 - DNA, 75 bp, synthetic construct
  source 1..75: mol_type = other DNA
ggggatcaccagccttgaagagtatgcccgccactttaactgtgtggagggcaacaccacgctttacgccctgcc

SEQ ID NO: 613837 - DNA, 75 bp, synthetic construct
  source 1..75: mol_type = other DNA
gcgatggatttggggcacggcgacgggcgcgggcggtatgtggcgcaggtttacgggagaaaggatactgactga

SEQ ID NO: 613838 - DNA, 75 bp, synthetic construct
  source 1..75: mol_type = other DNA
gtgttcggtaccaaaggtggaaggcctcgtgagacgattattcttgatgctggtgtagtcagaaaggcggttgat

SEQ ID NO: 613839 - DNA, 75 bp, synthetic construct
  source 1..75: mol_type = other DNA
ggcaatgacggcgatggatttggggcacggcgacgggcgcgggcggtatgtggcgcaggtttacggaagaagaga

SEQ ID NO: 613840 - DNA, 75 bp, synthetic construct
  source 1..75: mol_type = other DNA
atggtacgcggaaagccatcacgccggaatattatcaacagatggcagaggctgcccggctgaaagatgcggggc

SEQ ID NO: 613841 - DNA, 75 bp, synthetic construct
  source 1..75: mol_type = other DNA
gagtgaacggatatcgaataaatcgctggggctggctggcgtatcccgcaatggtacgcggaaagccatcacgcc

SEQ ID NO: 613842 - DNA, 75 bp, synthetic construct
  source 1..75: mol_type = other DNA
gactggcggcagcgctggaactctcaaggctgatgggcctgcgttcgcaggaggcggtgcagagcgcgcagtcgc

SEQ ID NO: 613843 - DNA, 75 bp, synthetic construct
  source 1..75: mol_type = other DNA
gggtaagtaaaaaagaggcgctggcgcaggtctccaccgatctgggccacggcgatgggcgcgggcgctatatcc

SEQ ID NO: 613844 - DNA, 75 bp, synthetic construct
  source 1..75: mol_type = other DNA
tgatggcagccataacgctacctgtcgcagcagagcagtacgtaaaacccggagcggttctgaccctgaatccgg

SEQ ID NO: 613845 - DNA, 75 bp, synthetic construct
  source 1..75: mol_type = other DNA
gaaagggcaatgctgaattcaacattaatgcctcaacaggggatggttcgggcgtatgcaatatggatggtacgg

SEQ ID NO: 613846 - DNA, 75 bp, synthetic construct
  source 1..75: mol_type = other DNA
gagacggcccgcgcaaaagatccgggactggcggcagcgctggaactctcaaggctgatgggattacgttcgcag

SEQ ID NO: 613847 - DNA, 75 bp, synthetic construct
  source 1..75: mol_type = other DNA
gttcgccacattgaaaactacattcatgaaaggctggcgcaggggatcggcaagcgcacgctacaaaatgaaatg

SEQ ID NO: 613848 - DNA, 75 bp, synthetic construct
  source 1..75: mol_type = other DNA
aaagtcaccacctttacccatctttcgcagttaccggaactgtggaaagcgcgtggttgggatattacggcatag

SEQ ID NO: 613849 - DNA, 75 bp, synthetic construct
  source 1..75: mol_type = other DNA
cactcatccaggatctgattgatcattttagatatggaaatggcaacagtttccatagccaggaattgaacttat

SEQ ID NO: 613850 - DNA, 75 bp, synthetic construct
  source 1..75: mol_type = other DNA
tctgggcgcaaattggtgacaagatggtgaccgtggggaatattcgggccgggcaaatcattgccgtggagccca

SEQ ID NO: 613851 - DNA, 75 bp, synthetic construct
  source 1..75: mol_type = other DNA
aaccagatggcctggctgcgtgacagggggatacgcgacactgagcatggtgcagctggaaggctacgtgaagaa

SEQ ID NO: 613852 - DNA, 75 bp, synthetic construct
  source 1..75: mol_type = other DNA
caaatcattgccgtggagcccactgccgcaagttattacgtatttaattttggctttggcaaagggtttatcgat

SEQ ID NO: 613853 - DNA, 75 bp, synthetic construct
  source 1..75: mol_type = other DNA
gcgcggggggctgataagtctaaaaacagcattcatagaggttgcccaaatgatgcccactctggaagagcttcg

SEQ ID NO: 613854 - DNA, 75 bp, synthetic construct
  source 1..75: mol_type = other DNA
ttatacattgttgctcatggtaatacatccgttattggtactggttcaagaacagggccaacgttgagtcccggg

SEQ ID NO: 613855 - DNA, 75 bp, synthetic construct
  source 1..75: mol_type = other DNA
tctcaggttactgagttgcaattcaggtatacattcaagagtcccagctttcgcacaacgcctgaaagagattat

SEQ ID NO: 613856 - DNA, 75 bp, synthetic construct
  source 1..75: mol_type = other DNA
gcgtattctgaatgtttcaccgcgccgcttactgaacttccttgaatctcgcggtatggcaccaattgcagaatt

SEQ ID NO: 613857 - DNA, 75 bp, synthetic construct
  source 1..75: mol_type = other DNA
ggccgcgagtggtcgatggggtagggatcctgcgtggaatcgaagccaacatcaaaaacgttgatggtgaaattg

SEQ ID NO: 613858 - DNA, 75 bp, synthetic construct
  source 1..75: mol_type = other DNA
ttgatatatcgagagactggagattaaaaaatgatgatggtatggcgttttattcctcaagaaaaaagggattat

SEQ ID NO: 613859 - DNA, 75 bp, synthetic construct
  source 1..75: mol_type = other DNA
atgtacaaacaagctgttattctcctgctgatgctgtttaccgcaagcgtcagtgccgcgttacctgcccgttat

SEQ ID NO: 613860 - DNA, 75 bp, synthetic construct
  source 1..75: mol_type = other DNA
ggcgatgatgacaatatcgccgacgctggcgcagtgggctgccgcaccgttaacagaaataattctcgaaccgcg

SEQ ID NO: 613861 - DNA, 75 bp, synthetic construct
  source 1..75: mol_type = other DNA
ctgccgcaagttattacgcatttaattttggctttggtaaagggtttatcgataaagggcatctcgagccagttc

SEQ ID NO: 613862 - DNA, 75 bp, synthetic construct
  source 1..75: mol_type = other DNA
atggtgaggctcgctccatgctattgcttaatcttattaataaagagattaagcacagtgtgaagaacaccgagt

SEQ ID NO: 613863 - DNA, 75 bp, synthetic construct
  source 1..75: mol_type = other DNA
tctgcataacttcccggaagggattgccacctttgtcacggcgagcagcaacctggagctgggctttggcatcgc

SEQ ID NO: 613864 - DNA, 75 bp, synthetic construct
  source 1..75: mol_type = other DNA
agagcaggctattttacggcgttttccgggatcggatgtgattatccatcaggacccctgttccgtcgtacccag

SEQ ID NO: 613865 - DNA, 75 bp, synthetic construct
  source 1..75: mol_type = other DNA
cattgcctgatgaggaacggcaagaaattattgatatcgtgacttcctggccgggtgttagcggcgctcacgatc

SEQ ID NO: 613866 - DNA, 75 bp, synthetic construct
  source 1..75: mol_type = other DNA
tctcgtcgtctggcgaaaaatatgggcggcgatattacggttaccagcgaacagggcaaaggttcaacctttacg

SEQ ID NO: 613867 - DNA, 75 bp, synthetic construct
  source 1..75: mol_type = other DNA
tcagccgcagtctgaaagacggcggctataaaggcgcgatgggcttgtttcatgaagttgacgagcaacgtaccg

SEQ ID NO: 613868 - DNA, 75 bp, synthetic construct
  source 1..75: mol_type = other DNA
aacgcgctggcggagaaatccgtcttaatggcaaagatatctctccacgttcccccctggatgcagtgaaaaaag

SEQ ID NO: 613869 - DNA, 75 bp, synthetic construct
  source 1..75: mol_type = other DNA
agccactttgtgcgctttggcgcatcgccggcgatagtcccatcagcggtaatccatcaactgtcggtatataaa

SEQ ID NO: 613870 - DNA, 75 bp, synthetic construct
  source 1..75: mol_type = other DNA
ccgaaagatattgtcgatccatcgacgccgtatcctggtgataaagtgattattactgaaggcgcgttcgaaggc

SEQ ID NO: 613871 - DNA, 75 bp, synthetic construct
  source 1..75: mol_type = other DNA
acggtgaagcgcgttccatgctactccttaatctgatcaataaagagattaagcacagtgtgaagaacaccgagt

SEQ ID NO: 613872 - DNA, 75 bp, synthetic construct
  source 1..75: mol_type = other DNA
tgatgaacggcgcaattctgctggcgctggggttgtcctggtacggctggcatcgcgccgatgctctgtttgcat

SEQ ID NO: 613873 - DNA, 75 bp, synthetic construct
  source 1..75: mol_type = other DNA
gaacgccaacaacaccaactgcgcgacagggaacgaataatacccaaatcgcaagcacggcttatgttatggctg

SEQ ID NO: 613874 - DNA, 75 bp, synthetic construct
  source 1..75: mol_type = other DNA
ggatacagaaaccgatgcgaagggcattattcccgaggatttcgttcctcaggaaagacgtaaagtcttttatcc

SEQ ID NO: 613875 - DNA, 75 bp, synthetic construct
  source 1..75: mol_type = other DNA
attgaaggctacatgctgcgccataaagtgaaaccgggcattaccggctgggcgcagattaacggctggcgcggc

SEQ ID NO: 613876 - DNA, 75 bp, synthetic construct
  source 1..75: mol_type = other DNA
acgccagcactattcagcagaacttgcgcacctgatcaccgacagtatgcacgcactctccatgccgcatgggca

SEQ ID NO: 613877 - DNA, 75 bp, synthetic construct
  source 1..75: mol_type = other DNA
cttgaacagcgcatctcaaaacagatttcgctggcacgtaaacatcacgttagtccggaagcattgccacagtat

SEQ ID NO: 613878 - DNA, 75 bp, synthetic construct
  source 1..75: mol_type = other DNA
gcgcgaactgggtcagttgctcattcagatccatggtcagcacgctcatcagttactcaccaaacccgagcacca

SEQ ID NO: 613879 - DNA, 75 bp, synthetic construct
  source 1..75: mol_type = other DNA
ccgaccggcaacccgacactgaaaacactccgcagcgtcgtccacgccgcaggttttcagttctctgcgctggca

SEQ ID NO: 613880 - DNA, 75 bp, synthetic construct
  source 1..75: mol_type = other DNA
aacggacggcagaatccgccaccgcgctgttgctggcaaaccggttgacgcaaaccgcgctgacgccgctggccc

SEQ ID NO: 613881 - DNA, 75 bp, synthetic construct
  source 1..75: mol_type = other DNA
ctgattttcatatcaacgtactactggaaattgatgcgccgctttcaggggcctccgtgagaactatctggcagg

SEQ ID NO: 613882 - DNA, 75 bp, synthetic construct
  source 1..75: mol_type = other DNA
cacgctggggcaatggacgcggtcgcttgctgttcacctggattgtcctgctcggtgctgccgttgcagctctgt

SEQ ID NO: 613883 - DNA, 75 bp, synthetic construct
  source 1..75: mol_type = other DNA
ctgacagaatacttgtctaacgtgctgaacgtacttgctgataaaggtctttgggctgctaccttaggtactggc

SEQ ID NO: 613884 - DNA, 75 bp, synthetic construct
  source 1..75: mol_type = other DNA
cctgctgctggatgagtccggcttttttgaatgggcggcgctgcacgtttcacgctggggcaatggacgcggtcg

SEQ ID NO: 613885 - DNA, 75 bp, synthetic construct
  source 1..75: mol_type = other DNA
gtacggctgtcccgctgtctcagctacgcgaactgggtcagttgctgattcagatccatggtcaacacgctcatc

SEQ ID NO: 613886 - DNA, 75 bp, synthetic construct
  source 1..75: mol_type = other DNA
tgaccgcacgttatcagttgtggcatcaaagctgccgcgacctcgcgcatcatcaacagttaagtcaggaacgcg

SEQ ID NO: 613887 - DNA, 75 bp, synthetic construct
  source 1..75: mol_type = other DNA
cggttacaagagctggcgcgcctgcttggtggcagtgaagtcacacgtaacacactggcgaatgcgaaagaactg

SEQ ID NO: 613888 - DNA, 75 bp, synthetic construct
  source 1..75: mol_type = other DNA
tggcacttcattaacatgcgtatctggccgcgagtggttgatggggttgggatcctgcgcggcatcgaagctaac

SEQ ID NO: 613889 - DNA, 75 bp, synthetic construct
  source 1..75: mol_type = other DNA
tgtgggcccgtcgtccgtctggcaccatccatcacagcgataaaggcactcagtatgtgtcactggcctatacgg

SEQ ID NO: 613890 - DNA, 75 bp, synthetic construct
  source 1..75: mol_type = other DNA
tgaaagcttcacacaaaacacctttatcctttcttaaaccgagcgatacgttatacatcgttgctcatggcaaca

SEQ ID NO: 613891 - DNA, 75 bp, synthetic construct
  source 1..75: mol_type = other DNA
gactatcaacgcgacccgcggtgtcagccacttcgtgcgctttggcgcgtcgccagcgatagtcccatcggcggt

SEQ ID NO: 613892 - DNA, 75 bp, synthetic construct
  source 1..75: mol_type = other DNA
gcagaagacattgtgctggcgacgcttattctgctgctgatctccccggtgctgtgctgcattgcgctggcggtg

SEQ ID NO: 613893 - DNA, 75 bp, synthetic construct
  source 1..75: mol_type = other DNA
gctgtgctgtattgcgctggcggtaaaactcagttcaccagggccggttatttttcgccagactcgctacggcat

SEQ ID NO: 613894 - DNA, 75 bp, synthetic construct
  source 1..75: mol_type = other DNA
gaagagatgaacggcgttccggtggtgccgctgtacgacacgccgctttccggggttaaccgcctgctcaaacgt

SEQ ID NO: 613895 - DNA, 75 bp, synthetic construct
  source 1..75: mol_type = other DNA
aaccatgattgttgagcgctacgggtcgctaggcggcgtattgacgcaggtcggggtagaaagttttgcctggta

SEQ ID NO: 613896 - DNA, 75 bp, synthetic construct
  source 1..75: mol_type = other DNA
ccctgagccgcaatcgaatagtcaggctattaacgccgagcgtttcaaactggttgcggatgcaatgcttgaaca

SEQ ID NO: 613897 - DNA, 75 bp, synthetic construct
  source 1..75: mol_type = other DNA
ccgttatcgcctggtgtgcgcaactggccttaggcggctggcaaatttctcgttttaaccgtgccttcgacacac

SEQ ID NO: 613898 - DNA, 75 bp, synthetic construct
  source 1..75: mol_type = other DNA
cgccagcgatagtcccatcggcggtgattcatcagttatcagtgtataaaccgaaagatattgtcgatccatcga

SEQ ID NO: 613899 - DNA, 75 bp, synthetic construct
  source 1..75: mol_type = other DNA
ccacatgataagagccgacgctgggttgaaccgtttatcggcggtggcgccgtgtttctgaacatgtttgccacc

SEQ ID NO: 613900 - DNA, 75 bp, synthetic construct
  source 1..75: mol_type = other DNA
ggggcaattctggcgaaaagaatcgtcgattgcacgggggatgctgatattgccgctcgtgcaggcgcgccctgg

SEQ ID NO: 613901 - DNA, 75 bp, synthetic construct
  source 1..75: mol_type = other DNA
cattgtaccgttgctggacgtactgctggtgctgttgctgatctttatggcgacagcgcccatcatcacccagag

SEQ ID NO: 613902 - DNA, 75 bp, synthetic construct
  source 1..75: mol_type = other DNA
actgaaagtgaacaaggcagcaccatactggcgctaaagaagcctatcagaacgaatgttattacaacgggatgg

SEQ ID NO: 613903 - DNA, 75 bp, synthetic construct
  source 1..75: mol_type = other DNA
ctcttttcgaccaccttgttcaggtgggcaatgcctggctggagccgcgttacctctttgatactgctattgaat

SEQ ID NO: 613904 - DNA, 75 bp, synthetic construct
  source 1..75: mol_type = other DNA
ccaccgctgcgggtgactctttcagcgccgggtatctggcggtacgtctgacaggcggtagtgcggaagatgccg

SEQ ID NO: 613905 - DNA, 75 bp, synthetic construct
  source 1..75: mol_type = other DNA
ctggtgctgttgctgatctttatggcgacagcgcccatcattacccagagcgtggaggtcgatctgccagacgct

SEQ ID NO: 613906 - DNA, 75 bp, synthetic construct
  source 1..75: mol_type = other DNA
agcgtttaccaccagagcaggtggtggcggaagtgtccagccgtttcaaggccaacccgaaaacggtctttctga

SEQ ID NO: 613907 - DNA, 75 bp, synthetic construct
  source 1..75: mol_type = other DNA
taatgactcttggccatgtggtgctgggcattgatacaaattcaacctttagcctgtatctggcgctggcaatca

SEQ ID NO: 613908 - DNA, 75 bp, synthetic construct
  source 1..75: mol_type = other DNA
gtatgcagcgggcaatatcggctctatcgccgcccccatcgcctgtggtctggctgcacagtggtatggatggca

SEQ ID NO: 613909 - DNA, 75 bp, synthetic construct
  source 1..75: mol_type = other DNA
cgacagagtcgcaaattagcggtatggcaattgcagcttaccagcgattcttttctcagatgggagagtggacgt

SEQ ID NO: 613910 - DNA, 75 bp, synthetic construct
  source 1..75: mol_type = other DNA
cgaatggctggaacagctgtcagacggcacaaccattcgccgcttctggtacatccataaaatattcaattacgg

SEQ ID NO: 613911 - DNA, 75 bp, synthetic construct
  source 1..75: mol_type = other DNA
agcaagccagagcctggacagcgcctaggcacctcttcgatgcggccaatgaatattgttcggggcagaagatcg

SEQ ID NO: 613912 - DNA, 75 bp, synthetic construct
  source 1..75: mol_type = other DNA
ggtccggctatttgctggcgatcgtttgccttattgctgcacaaatcattgcacgcctgatgatcaaataccctg

SEQ ID NO: 613913 - DNA, 75 bp, synthetic construct
  source 1..75: mol_type = other DNA
ggtgattggcgagggcaaacgcgccgacctggtgctggcgcatcgcaagggcaatcacattcatatcgaccacgt

SEQ ID NO: 613914 - DNA, 75 bp, synthetic construct
  source 1..75: mol_type = other DNA
gtgactggtgtgacatctgggtaacgaggatgtatcgtgtggtggacctctgtgtgacaacgtactgccggaaaa

SEQ ID NO: 613915 - DNA, 75 bp, synthetic construct
  source 1..75: mol_type = other DNA
aaagaggtgactggtgtgacatctggggtaacgaggatgtatcggtgtcaacgccaagattattggccgtttttc

SEQ ID NO: 613916 - DNA, 75 bp, synthetic construct
  source 1..75: mol_type = other DNA
tggatctttatcgggtaatgcaagcacagcaaccaaattgcaaactgcaaggacaattaacggcgtaaaatttga

SEQ ID NO: 613917 - DNA, 75 bp, synthetic construct
  source 1..75: mol_type = other DNA
atgccaaactggtgcgccaatcgtatgtatttttttgccgaaccggcacagattgctgagattaaacgactggct

SEQ ID NO: 613918 - DNA, 75 bp, synthetic construct
  source 1..75: mol_type = other DNA
gcgttatcctgctggttgaaggttttccgccttcacatgccgggaccattaccgtctatgaaggttccagaccag

SEQ ID NO: 613919 - DNA, 75 bp, synthetic construct
  source 1..75: mol_type = other DNA
ctggatgttgaagtgaacggcttcaatggcggtgttctgaacggtgttccttctgcatatcactggtatacagaa

SEQ ID NO: 613920 - DNA, 75 bp, synthetic construct
  source 1..75: mol_type = other DNA
tccgtaatggcattgaccgctatctcacaccttcccgggctcagccccgcacaacgtcgactgtgaacggtcatt

SEQ ID NO: 613921 - DNA, 75 bp, synthetic construct
  source 1..75: mol_type = other DNA
acccggattggacaaagaattttgaagaagagaaaataaaattgctccattttttcggttctcatgccgtagcca

SEQ ID NO: 613922 - DNA, 75 bp, synthetic construct
  source 1..75: mol_type = other DNA
gagttgcgcaatcgctgggcgtgccgcacgagcaaattatcaccctggatttgccaaaagataccgaagaagaag

SEQ ID NO: 613923 - DNA, 75 bp, synthetic construct
  source 1..75: mol_type = other DNA
tgctcaggacgctacgacagcacaaaaaggaattgtccagctcagtagtgcaaccaacagcacatctgaaatgct

SEQ ID NO: 613924 - DNA, 75 bp, synthetic construct
  source 1..75: mol_type = other DNA
aaaatggagtaaaagtaaagttgataactcaactccaatcattatgaaagatagtgatattgaaatggtaataat

SEQ ID NO: 613925 - DNA, 75 bp, synthetic construct
  source 1..75: mol_type = other DNA
atgttccagagtcgactgaaatctatatttttgatgccaatgaagatgaagttaacgatttgaaattgtctcacg

SEQ ID NO: 613926 - DNA, 75 bp, synthetic construct
  source 1..75: mol_type = other DNA
gcaataataacatcttttacttcgatatctggtggattaatttcactaactataatttaccataaaaaatgggta

SEQ ID NO: 613927 - DNA, 75 bp, synthetic construct
  source 1..75: mol_type = other DNA
ctcgaacgcgccagccgcgacaaaacgacgtttatttccaccatcagtcacgaattgcgtacacctctgaacggt

SEQ ID NO: 613928 - DNA, 75 bp, synthetic construct
  source 1..75: mol_type = other DNA
ttgaatgtgttgctggtggaagacattgaactgaacgtcattgttgctcgttcggtactggaaaaactgggtaac

SEQ ID NO: 613929 - DNA, 75 bp, synthetic construct
  source 1..75: mol_type = other DNA
tggaattgctaaccgggaagagcgaaaaacaactggttcacctgaaacctgctgatgtttactcgccggaagccg

SEQ ID NO: 613930 - DNA, 75 bp, synthetic construct
  source 1..75: mol_type = other DNA
ctacgctgccattaccgcatcaggtcattaccgacgggacgcgtttacggcagatcctgtggaacctcatcagta

SEQ ID NO: 613931 - DNA, 75 bp, synthetic construct
  source 1..75: mol_type = other DNA
ttgaactgaacgttattgtcgcgcgttctgtactggaaaaattaggtaacagcgttgatgtagcaatgaccggca

SEQ ID NO: 613932 - DNA, 75 bp, synthetic construct
  source 1..75: mol_type = other DNA
gggtgaatacgacctggtgctgttggatattcaactgccggacatgaccggactggatatatctcgtgaactaac

SEQ ID NO: 613933 - DNA, 75 bp, synthetic construct
  source 1..75: mol_type = other DNA
cagatcctgtggaatctcatcagtaacgccgtcaaattcacccagcaaggccaggttaccgtgcgcgtgcgctac

SEQ ID NO: 613934 - DNA, 75 bp, synthetic construct
  source 1..75: mol_type = other DNA
cgaatctgacggcgcaggataaaaaaggcattgttgaggaaggacataaaattaaaggtgcggcggggtcagtgg

SEQ ID NO: 613935 - DNA, 75 bp, synthetic construct
  source 1..75: mol_type = other DNA
gccagatatgaccgggctggatatctctcgtgaactgacgaagcgttatccgcgcgaggatttaccgccgctggt

SEQ ID NO: 613936 - DNA, 75 bp, synthetic construct
  source 1..75: mol_type = other DNA
gtgggcggtctactttctttcggtggtcgtcgagcaactggaggagtcacgacaacgtctgtcacggctggtgca

SEQ ID NO: 613937 - DNA, 75 bp, synthetic construct
  source 1..75: mol_type = other DNA
aacgggccagccgcgacaaaacgacgtttatctccaccatcagtcacgaattgcgtacaccgctgaacggtatcg

SEQ ID NO: 613938 - DNA, 75 bp, synthetic construct
  source 1..75: mol_type = other DNA
cttgaacgcgccagccgtgacaaaacgacctttatctccaccatcagccatgagttacgtacaccgctgaacggt

SEQ ID NO: 613939 - DNA, 75 bp, synthetic construct
  source 1..75: mol_type = other DNA
ttcgccatgtattaccaggtgaaagacagtcacggcggtaagcccgccactggcaccggtattggtctggccgtt

SEQ ID NO: 613940 - DNA, 75 bp, synthetic construct
  source 1..75: mol_type = other DNA
gtagcccggaatacgctcaaagacatgctttaaccaacacggtaattaacctgtgtcactgtacgttgctccatg

SEQ ID NO: 613941 - DNA, 75 bp, synthetic construct
  source 1..75: mol_type = other DNA
gaaatgccatcagcattattacatcaccacattaccgggcaggcagtggccaaaaattgaggcatttattacttg

SEQ ID NO: 613942 - DNA, 75 bp, synthetic construct
  source 1..75: mol_type = other DNA
aatagtacagctcagcagtgcgaccaacagcacttccgagtcactggcggcaacgccaaaagcggttaaggcggt

SEQ ID NO: 613943 - DNA, 75 bp, synthetic construct
  source 1..75: mol_type = other DNA
accttaacgttaagtataatactcatgatgttcgcaagtgttatcgttaaaatcttatttggaaacggtttcgaa

SEQ ID NO: 613944 - DNA, 75 bp, synthetic construct
  source 1..75: mol_type = other DNA
tcctaaatgctgtatatctatttgttgtacagggcgtaacatatttagttcccttaattactctaccctatttag

SEQ ID NO: 613945 - DNA, 75 bp, synthetic construct
  source 1..75: mol_type = other DNA
cggaagaggcattttcggattttacggggcatatgtgccgtgccggatttaccaattctatctccgatgaacctt

SEQ ID NO: 613946 - DNA, 75 bp, synthetic construct
  source 1..75: mol_type = other DNA
gtggccaaaaattgaggcatttattacctggctaagagagcaggtatgtcagtcttgtcagtaacggcgataccg

SEQ ID NO: 613947 - DNA, 75 bp, synthetic construct
  source 1..75: mol_type = other DNA
gcagacctgtcgcgggatttctgaactgcaggtgccactgcgtgacttgtgggatccggcaacctgtccggtcag

SEQ ID NO: 613948 - DNA, 75 bp, synthetic construct
  source 1..75: mol_type = other DNA
aatgttgatggtgtacgcagcattgatacaggtacagcaatgactaagcctcagcgtcaggttaactccagtatg

SEQ ID NO: 613949 - DNA, 75 bp, synthetic construct
  source 1..75: mol_type = other DNA
acgactccggtacggatgaatggcatagttgggcgcaacattatgcggttaatttgccgacatcttctggaattg

SEQ ID NO: 613950 - DNA, 75 bp, synthetic construct
  source 1..75: mol_type = other DNA
gtggccaaaaattgaggcatttattacctggctaagagagcaggtatgtcagtcttgtcagtagcagggataccg

SEQ ID NO: 613951 - DNA, 75 bp, synthetic construct
  source 1..75: mol_type = other DNA
gtggccaaaaattgaggcatttattacctggctaagagagcaggtatgtcagtcttgtcagtaccggagataccg

SEQ ID NO: 613952 - DNA, 75 bp, synthetic construct
  source 1..75: mol_type = other DNA
gtttttattgagatctggtgtgcgttttcactggtgaaagggcgtcgctgggcgcgctggctatatctgctgaca

SEQ ID NO: 613953 - DNA, 75 bp, synthetic construct
  source 1..75: mol_type = other DNA
atgtagtgtcccgcaacgccgtcaatcccgacttcttgcctgacgaggacaagaacagaccacagcaggaactct

SEQ ID NO: 613954 - DNA, 75 bp, synthetic construct
  source 1..75: mol_type = other DNA
ttattgacctcctccagccagcctggcaaaaagagccagaccttaacctgctgcaatttttgcagaaactggcga

SEQ ID NO: 613955 - DNA, 75 bp, synthetic construct
  source 1..75: mol_type = other DNA
gagcgtgaccgcctcatttggctcaaaggtcgaggtgtggcttgccccgagggcatcaactggcaggaggaacag

SEQ ID NO: 613956 - DNA, 75 bp, synthetic construct
  source 1..75: mol_type = other DNA
gacaagagtacgccgcagctcgatcttttggctcgtgtcgaacgagagctaccggtgcggctcgaccaagagcgc

SEQ ID NO: 613957 - DNA, 75 bp, synthetic construct
  source 1..75: mol_type = other DNA
gattttcaatacgctgggcgtgcgcggtattggcgagttcattcatcgcagcgtacaaacctggagtttaacgct

SEQ ID NO: 613958 - DNA, 75 bp, synthetic construct
  source 1..75: mol_type = other DNA
ttggtggcgagcattccggaaccggtacagtatttggtcttccaccaacaaatttatcaggtggaacagatgacg

SEQ ID NO: 613959 - DNA, 75 bp, synthetic construct
  source 1..75: mol_type = other DNA
cctcggaacagacgttgtcgagtcgataaacgcatatctgcacaaattagaggagcagggcgcgattaacggagg

SEQ ID NO: 613960 - DNA, 75 bp, synthetic construct
  source 1..75: mol_type = other DNA
actgcccgacggttcgagaaaattaacaatgatcacggacggtgccatgaccccgtcaaaaatgtacgatcagaa

SEQ ID NO: 613961 - DNA, 75 bp, synthetic construct
  source 1..75: mol_type = other DNA
ccgggtttgcagaaagattatgaagaagatttcaaaacggcgctgttacgcgctcgcggcgtaattaaagagtaa

SEQ ID NO: 613962 - DNA, 75 bp, synthetic construct
  source 1..75: mol_type = other DNA
tcgaactaatattttttttggtgaatcgcattctgactggttgcctgtcagaggcggagaatctggtgattttgt

SEQ ID NO: 613963 - DNA, 75 bp, synthetic construct
  source 1..75: mol_type = other DNA
ccgctggcaaataatgtagtcacctttttcccggtctattatggggattacggaaataaatttgcagttgaaatt

SEQ ID NO: 613964 - DNA, 75 bp, synthetic construct
  source 1..75: mol_type = other DNA
aggcagcggcaaatctgcggtcgccagtgaagtggcgcatcaacttcatgccgcgtttcttgatggcgatttcct

SEQ ID NO: 613965 - DNA, 75 bp, synthetic construct
  source 1..75: mol_type = other DNA
gtgttgttactgatcccggttattgaggctgaagatgcccgcacagaagaggatattgccccatggctgagataa

SEQ ID NO: 613966 - DNA, 75 bp, synthetic construct
  source 1..75: mol_type = other DNA
acgggtatcgatctcgatgatactgaactgacgaagctggcggcagaactgaagaagaaatgcggctgtggcggg

SEQ ID NO: 613967 - DNA, 75 bp, synthetic construct
  source 1..75: mol_type = other DNA
gcagttaaagatggaattattgaaatccagggcgataagcgtgatttattaaaatcactgcttgaagcgaaaggg

SEQ ID NO: 613968 - DNA, 75 bp, synthetic construct
  source 1..75: mol_type = other DNA
ggtctatggtctgcgtaatgccggactaacagaatacctctccggtgtgttgaacgtgctggcagataaaggact

SEQ ID NO: 613969 - DNA, 75 bp, synthetic construct
  source 1..75: mol_type = other DNA
agcactgcaacaggcgttatcaaagaagcgatgatctacgccaacgtgattggctgcgatctgggcccgaaaatt

SEQ ID NO: 613970 - DNA, 75 bp, synthetic construct
  source 1..75: mol_type = other DNA
tatttgccgtcgctaaacgcggtcatgcgattaatacgggtaaagtgctgcgcggtgcgccctggcagattgtca

SEQ ID NO: 613971 - DNA, 75 bp, synthetic construct
  source 1..75: mol_type = other DNA
atgagcgctgggcagtgagacacaggctaggggcgagctggcattccttagggaattatttggagtacagtctac

SEQ ID NO: 613972 - DNA, 75 bp, synthetic construct
  source 1..75: mol_type = other DNA
ttgcttctgattttgtccggctggacaatgttaccgataacagttacccgtaacatttctttcttgtactgtagg

SEQ ID NO: 613973 - DNA, 75 bp, synthetic construct
  source 1..75: mol_type = other DNA
acgacgatcgcaaaccgtggttgcaggcgctgaacgacgccgcgtttgctatgcagcgcaccaataaagtgtcgc

SEQ ID NO: 613974 - DNA, 75 bp, synthetic construct
  source 1..75: mol_type = other DNA
accggcgtcgatctcgatgatgccgaactgacaaggctggcggctgaactgaagaaaaaatgcggctgcggcggg

SEQ ID NO: 613975 - DNA, 75 bp, synthetic construct
  source 1..75: mol_type = other DNA
gccgacactggcctccgggctgcggttgcgtattccggtgatcggcccgatgcaggtgcataacgttgatgaggt

SEQ ID NO: 613976 - DNA, 75 bp, synthetic construct
  source 1..75: mol_type = other DNA
agaaaaaatgcaatcatatgaattatatagcggatgtcaatgctcaattagctatgagtaaaaaaataacaggat

SEQ ID NO: 613977 - DNA, 75 bp, synthetic construct
  source 1..75: mol_type = other DNA
tgggatgtggatagcctggaaagtgccattcgccttggattaaacaaggtgtgcgagcaagggattcgtatcgat

SEQ ID NO: 613978 - DNA, 75 bp, synthetic construct
  source 1..75: mol_type = other DNA
gccaacaatcttgcaaaaaaaatgcgatcgctaaaacaaaagtgcaatttgcggcaatatagttattccatgacc

SEQ ID NO: 613979 - DNA, 75 bp, synthetic construct
  source 1..75: mol_type = other DNA
ttagggcaagcgcgttctggagcgacaatagtttccagcagcaaacagatacttgatgacgattatgaccctccg

SEQ ID NO: 613980 - DNA, 75 bp, synthetic construct
  source 1..75: mol_type = other DNA
attaaagctggagatacattcaccagaattgacgggcaagtttcagacattttctctgcacagcttctggcacct

SEQ ID NO: 613981 - DNA, 75 bp, synthetic construct
  source 1..75: mol_type = other DNA
atctaccggtccggcaaacgccgatgtttacgctgctgcgtgaggcgggattttcaagttcgccacaagggctgg

SEQ ID NO: 613982 - DNA, 75 bp, synthetic construct
  source 1..75: mol_type = other DNA
ttgcaggtggagccactaaacgataccgaaaggatgctggcgctggcggaaaatatgctcgaccgctacggcatc

SEQ ID NO: 613983 - DNA, 75 bp, synthetic construct
  source 1..75: mol_type = other DNA
gcattacgtagcagattgaagtatgatgaaaaagatcgtccctttattgatgtttttatgctcagtcaccccgat

SEQ ID NO: 613984 - DNA, 75 bp, synthetic construct
  source 1..75: mol_type = other DNA
aatggtcattgctgttggttcagaaagaaccgtacaatatgtttatcaaacaaaatctgaaatgatacagaacta

SEQ ID NO: 613985 - DNA, 75 bp, synthetic construct
  source 1..75: mol_type = other DNA
cgtccgggataatcaccgcaaatacagcgatatcagcaatccgaaaattgaggcgtttcggccatcaaatatggc

SEQ ID NO: 613986 - DNA, 75 bp, synthetic construct
  source 1..75: mol_type = other DNA
cgctgcataacactaaaaatatcaagctgatggccattgttcaccgtctacaacagattatggtcaatgagaatc

SEQ ID NO: 613987 - DNA, 75 bp, synthetic construct
  source 1..75: mol_type = other DNA
ccagcaactatatgaaagctttattttctcgatagatataaaaaatataaaccacgacatgcttgaaaatctcag

SEQ ID NO: 613988 - DNA, 75 bp, synthetic construct
  source 1..75: mol_type = other DNA
tatcatatttatagggtatagtattagcgataaaaacattaagtacttattaaaaaccatattctcatacgttga

SEQ ID NO: 613989 - DNA, 75 bp, synthetic construct
  source 1..75: mol_type = other DNA
agattatttaacaaaaccagggcataaaattgatacccaatacaggcgacttttatgcttgtatgattatttatc

SEQ ID NO: 613990 - DNA, 75 bp, synthetic construct
  source 1..75: mol_type = other DNA
cgcaacccgtctcgccgctggtatcttacaacacaccaaatctggctggacgctggtcgttattgcaggtggagc

SEQ ID NO: 613991 - DNA, 75 bp, synthetic construct
  source 1..75: mol_type = other DNA
ggcaagaactagatcatgctttctctgcaatgggctataaaaccttttggaaacttcatcatgcctctgattacg

SEQ ID NO: 613992 - DNA, 75 bp, synthetic construct
  source 1..75: mol_type = other DNA
tagccaataccgatccgttctttcttctccgtttcttccaccataccgttctgattgaagaaggaacaacgctgg

SEQ ID NO: 613993 - DNA, 75 bp, synthetic construct
  source 1..75: mol_type = other DNA
atgagtaactctaagcaaccggaatatgacatggccaaagtacaagggctctttgttggataccgaaaatttgct

SEQ ID NO: 613994 - DNA, 75 bp, synthetic construct
  source 1..75: mol_type = other DNA
agagtggcaggctttcgttgaatctgagcaattagtgtttgagcgtgatgatcctacccacgtaatatggacaca

SEQ ID NO: 613995 - DNA, 75 bp, synthetic construct
  source 1..75: mol_type = other DNA
ctactggcactggtatggagacgtacctgttcgttagccaacagaataccgatgattcccgtcttggtgatgctg

SEQ ID NO: 613996 - DNA, 75 bp, synthetic construct
  source 1..75: mol_type = other DNA
aataccgatgattcccgtcttcacctgcctgttttgccttttcctggcatcgtttcttgcggaaatggcgcagac

SEQ ID NO: 613997 - DNA, 75 bp, synthetic construct
  source 1..75: mol_type = other DNA
ttgattcgtgattacaccgatctggaaattctggcagagacggaagaaggggatgcatatctgtttgccagcaaa

SEQ ID NO: 613998 - DNA, 75 bp, synthetic construct
  source 1..75: mol_type = other DNA
aactcagtgacgctcccaatgagcaaatgtacgtcaacctgaaagtcaaatctatggatgacctttctccggacc

SEQ ID NO: 613999 - DNA, 75 bp, synthetic construct
  source 1..75: mol_type = other DNA
tccacacccaggcgcgttttagccagaacctgctggatcaggggagccatcccaccagcgaaaaactgctgtctg

SEQ ID NO: 614000 - DNA, 75 bp, synthetic construct
  source 1..75: mol_type = other DNA
tttttctctgaaagatacgccagcggccctgcgttggctggaagaaaaccagcttgaagacgggcatgaatgttt

SEQ ID NO: 614001 - DNA, 75 bp, synthetic construct
  source 1..75: mol_type = other DNA
aaaactatggcgcagcgcagccaggccgcaccatgaccgtaccgaagacggcaatggcaccaaaaccggcgacca

SEQ ID NO: 614002 - DNA, 75 bp, synthetic construct
  source 1..75: mol_type = other DNA
gtggcagtattgccccaaaagaaagagtaaatattaaatttaagccaaaaacggggaatcagacagcagaagtgg

SEQ ID NO: 614003 - DNA, 75 bp, synthetic construct
  source 1..75: mol_type = other DNA
ttatattgataaccaggatatttatcatcagccgtccagtgtctttttcgttattaaaccgtctgcgtggggaaa

SEQ ID NO: 614004 - DNA, 75 bp, synthetic construct
  source 1..75: mol_type = other DNA
caatgagaaggccaaaaaactggagcagtcctcagaagcaaagccggttgcggcatcactgccgtgcctggctga

SEQ ID NO: 614005 - DNA, 75 bp, synthetic construct
  source 1..75: mol_type = other DNA
gctgataagaaaaaggctgcaccgcgtaaacgtagtgcgaaaaaaagtccgccagcagatgaagccggaagtggg

SEQ ID NO: 614006 - DNA, 75 bp, synthetic construct
  source 1..75: mol_type = other DNA
cggcatcactgccgcgcctggctgaagggaacttccggaccacgtcggtgcaggccgttgcggcgacaacgccgt

SEQ ID NO: 614007 - DNA, 75 bp, synthetic construct
  source 1..75: mol_type = other DNA
ccccgcccgctaagaacgggtgagcagacggctgcattatggatagcgccttatattgataatcaggatgtttat

SEQ ID NO: 614008 - DNA, 75 bp, synthetic construct
  source 1..75: mol_type = other DNA
cctgcagatgcaaagccggctgcggcatcactgccgcgcctggctgaagggaacttccggaccacgtcggtgcag

SEQ ID NO: 614009 - DNA, 75 bp, synthetic construct
  source 1..75: mol_type = other DNA
tgtggcaccggggaacggagacgtgaaaaaaagggtcaaaaaaactgcgcagaaaaaggatgctacagttaagcg

SEQ ID NO: 614010 - DNA, 75 bp, synthetic construct
  source 1..75: mol_type = other DNA
agtatttgatgcagttctgcccggatgcggtgttccgcaagtgtgttatcgaactggacattgccaaaggcaaat

SEQ ID NO: 614011 - DNA, 75 bp, synthetic construct
  source 1..75: mol_type = other DNA
ttcgctttcggcgttgcagattgaagcggcaaaacgctttggtctgagtgcgcagaacgtgcttgatatctgcca

SEQ ID NO: 614012 - DNA, 75 bp, synthetic construct
  source 1..75: mol_type = other DNA
acgatggtacaccgctgccggtggtagcgaaaggcgatgagttattgtgtgaaaaaggtgaagtggtagagcggc

SEQ ID NO: 614013 - DNA, 75 bp, synthetic construct
  source 1..75: mol_type = other DNA
gccggagacccggatcgcgaagggcaattgctggtggatgaagtgctggactacctgcaactggcaccggaaaag

SEQ ID NO: 614014 - DNA, 75 bp, synthetic construct
  source 1..75: mol_type = other DNA
accgggatagcacgttttgtgcaggacaaagatctgaaaaagatccttcgtgcgaccgatggtctggggacagaa

SEQ ID NO: 614015 - DNA, 75 bp, synthetic construct
  source 1..75: mol_type = other DNA
tttgagtgtaacgccaccacatccgatacctgtatgacgatggagcaggccaatgagaaggccaaaaagctggag

SEQ ID NO: 614016 - DNA, 75 bp, synthetic construct
  source 1..75: mol_type = other DNA
gtccgttctgatgcggtaaaagccattcttgcgcaacatcctgatgtgcagctcatcgtaaccgacgacggtcta

SEQ ID NO: 614017 - DNA, 75 bp, synthetic construct
  source 1..75: mol_type = other DNA
caatggcggggattggtcatccgccgcgcttttttgccacgctgaagatgtgtggtgtgcaaccggaaaaatgtg

SEQ ID NO: 614018 - DNA, 75 bp, synthetic construct
  source 1..75: mol_type = other DNA
gttggaaacctgactgcaggcggcaacggaaaaacgccggttgttatctggctggtggaacaactgcaacaatgt

SEQ ID NO: 614019 - DNA, 75 bp, synthetic construct
  source 1..75: mol_type = other DNA
tgctctggctgcacgtactttcgcagaagaatatgacgattacctggggatattacttccgcacagggattctca

SEQ ID NO: 614020 - DNA, 75 bp, synthetic construct
  source 1..75: mol_type = other DNA
tcttttcatgcctgctatctcggttattcgattgggcaaaaatggcagggcaaaggactcatgtttgaagccctg

SEQ ID NO: 614021 - DNA, 75 bp, synthetic construct
  source 1..75: mol_type = other DNA
gcaatggctggtggttgccggcggggccaatgcgtgagcgagcggggcgcttaaagtcggttgatgcggtaatcg

SEQ ID NO: 614022 - DNA, 75 bp, synthetic construct
  source 1..75: mol_type = other DNA
gctataaggcgttgttctggttatcgttatttcatctgctggtgatcacctccagtaactatctggttcagcttc

SEQ ID NO: 614023 - DNA, 75 bp, synthetic construct
  source 1..75: mol_type = other DNA
accgccgagtgcatcacactggaaagcgactggcgcagcaaagaagaagtgctcaaaggcatgaccgataacctg

SEQ ID NO: 614024 - DNA, 75 bp, synthetic construct
  source 1..75: mol_type = other DNA
atgctggaagtgccgtcggtgatgttcatcatcgatcaatgctgcgaagagattgatttcttcagtatcggcagt

SEQ ID NO: 614025 - DNA, 75 bp, synthetic construct
  source 1..75: mol_type = other DNA
aagcctgattaaaaaactgatgcgcgagctggcggataccacctgctcggtgctgatcatccccgatgtgttcac

SEQ ID NO: 614026 - DNA, 75 bp, synthetic construct
  source 1..75: mol_type = other DNA
caggttattcttcgcaacaatcatttagtcgtgcattcaagaaagagttttctttatctccaatgaaataccgag

SEQ ID NO: 614027 - DNA, 75 bp, synthetic construct
  source 1..75: mol_type = other DNA
gtttcaaagtgttaatcagcatcgttttcttcctgccaatgtatggcgtattactcaatatgctattgaaaagac

SEQ ID NO: 614028 - DNA, 75 bp, synthetic construct
  source 1..75: mol_type = other DNA
ccagtgcttgggctggtggtgcgccgcgacgaagaaattgaacactttgtggcgaaagatttctttgaagtcaaa

SEQ ID NO: 614029 - DNA, 75 bp, synthetic construct
  source 1..75: mol_type = other DNA
ctaacagaatacctctccggtgtgttgaacgtgctggcagataaaggactttgggccgcgacgtttggtactggc

SEQ ID NO: 614030 - DNA, 75 bp, synthetic construct
  source 1..75: mol_type = other DNA
cgcggtgcgccatggcagatcgtcatcttctcgctggggatgtatctggtggtctatggcctgcgcaacgccggt

SEQ ID NO: 614031 - DNA, 75 bp, synthetic construct
  source 1..75: mol_type = other DNA
cgccgggtttattgccgatacggccagtctgccgcttatcgtgtccaacctggttaacatcgtttctgcagactt

SEQ ID NO: 614032 - DNA, 75 bp, synthetic construct
  source 1..75: mol_type = other DNA
cctttattgccgtgattattatcagccttctgctcgatgaatcgggctttttcgaatgggcggcgctgcacgttt

SEQ ID NO: 614033 - DNA, 75 bp, synthetic construct
  source 1..75: mol_type = other DNA
catcaaagatcctgcgacgttcagaaccggctgggttgttctcctccttctgctggtcggtttttttgtccttga

SEQ ID NO: 614034 - DNA, 75 bp, synthetic construct
  source 1..75: mol_type = other DNA
tcttctcattggggatgtacctggtggtctacggtctgcgcaacgccgggctaaccgaatacctttcaggtgtgc

SEQ ID NO: 614035 - DNA, 75 bp, synthetic construct
  source 1..75: mol_type = other DNA
tattcacgctcgtcctggttatctggcaacccagagggctggggattggctggagtgcctcactgggcgcaattc

SEQ ID NO: 614036 - DNA, 75 bp, synthetic construct
  source 1..75: mol_type = other DNA
gaaattgccgttgagttgggcaatggtcaggaaccaaaagcagataccacactgaataatggcctgaaagatgtg

SEQ ID NO: 614037 - DNA, 75 bp, synthetic construct
  source 1..75: mol_type = other DNA
actgccgcagaaattgccgttgaattgggcaatggtcaggagccaaaagcagatacctcactgaataatggcctg

SEQ ID NO: 614038 - DNA, 75 bp, synthetic construct
  source 1..75: mol_type = other DNA
aactatcatggatgttcgagcctttgttaaacattcttaatggaaatattgagaccgagtcgacagatgatcttt

SEQ ID NO: 614039 - DNA, 75 bp, synthetic construct
  source 1..75: mol_type = other DNA
gtagcagctacgttggctgttttaattgatttctctttacgaagcagaaaaaaaataaattttataatttaccca

SEQ ID NO: 614040 - DNA, 75 bp, synthetic construct
  source 1..75: mol_type = other DNA
gcactattagaggatcagactctggttatattctgattatcctatatggtggttgggtaggttttattttctttc

SEQ ID NO: 614041 - DNA, 75 bp, synthetic construct
  source 1..75: mol_type = other DNA
tacccgccgtcaatttcttgcgtgaagaaaacgtctttgtgatgacaacttctcgtgcgtctggtcaggaaattc

SEQ ID NO: 614042 - DNA, 75 bp, synthetic construct
  source 1..75: mol_type = other DNA
agattaagcccggcgagtatggtttccccctcaaattaaaagcccgctacgacaactttatcggtggcgaatggg

SEQ ID NO: 614043 - DNA, 75 bp, synthetic construct
  source 1..75: mol_type = other DNA
atcttctttgctgacgtaatggatgaagaagatgcctttttcgataaagcgctggaaggctttgcactgtttgcc

SEQ ID NO: 614044 - DNA, 75 bp, synthetic construct
  source 1..75: mol_type = other DNA
gccgaggcactatggaaattactggtactctcggttacttcagaagtgatagcagtagtttctatacagcaagtg

SEQ ID NO: 614045 - DNA, 75 bp, synthetic construct
  source 1..75: mol_type = other DNA
ttatattgataaccaggatgtttatcatcagccatctagcgtgttttttgttattaaaccgtctgtgtggggaaa

SEQ ID NO: 614046 - DNA, 75 bp, synthetic construct
  source 1..75: mol_type = other DNA
acgagcgcagcctcgagcgccagtagttccgcttcctcggcaacggcggcaggcaattccgcgaaagcggcaaaa

SEQ ID NO: 614047 - DNA, 75 bp, synthetic construct
  source 1..75: mol_type = other DNA
tttgaatgggcggcgctgcacgtctcacgctggggcaatggacgcggtcgcttgctgtttacctggattgtcctg

SEQ ID NO: 614048 - DNA, 75 bp, synthetic construct
  source 1..75: mol_type = other DNA
tacacgatcagatttctgttcaggatattggtatcgacaaccttaccgcagcggatggccttgcagttggtcgcg

SEQ ID NO: 614049 - DNA, 75 bp, synthetic construct
  source 1..75: mol_type = other DNA
atgattcatttctggcaccgcattcgcgatatgcagactttccggcagcgttgattcgtgattacaccgatctgg

SEQ ID NO: 614050 - DNA, 75 bp, synthetic construct
  source 1..75: mol_type = other DNA
ggaagctcgtcagaaaaaccagttgatcgccattgccagccagggctatgatttatccgcacctcataaaacggg

SEQ ID NO: 614051 - DNA, 75 bp, synthetic construct
  source 1..75: mol_type = other DNA
tattacttccgtacagggattatcatgaccctgccggtgctgtttgtgacgctcgccgcgctggcgcttcgtctc

SEQ ID NO: 614052 - DNA, 75 bp, synthetic construct
  source 1..75: mol_type = other DNA
tgttggtgggatttttcgtcctggaaccactcggcattccggtaagcgccattgcggcagtgggcgcactgatat

SEQ ID NO: 614053 - DNA, 75 bp, synthetic construct
  source 1..75: mol_type = other DNA
ttgcaggccagcttgggatcagccgcctgacggatgcggtatccggcgacagcctgactgccggagaggcacccg

SEQ ID NO: 614054 - DNA, 75 bp, synthetic construct
  source 1..75: mol_type = other DNA
cagaaaaaccgtctcgtcgtctcggcgatgccaaaccggcaggcgaacaacaacgtcgccgccgtccgcgtaaac

SEQ ID NO: 614055 - DNA, 75 bp, synthetic construct
  source 1..75: mol_type = other DNA
taaggcaagtgcagggctgacttctcaagtcagagaatcaattgaaaaatttgctctatccatcaacgagcagtt

SEQ ID NO: 614056 - DNA, 75 bp, synthetic construct
  source 1..75: mol_type = other DNA
agcgaactctcccgccatttagaaacctttgtcgccatccgcgataaagctacaaccgtattacctgaaatacag

SEQ ID NO: 614057 - DNA, 75 bp, synthetic construct
  source 1..75: mol_type = other DNA
tccggcattgatgccgggctggcggatgaattagtcaatgcgtcggatgccatcagtgtgatggccacggcgctg

SEQ ID NO: 614058 - DNA, 75 bp, synthetic construct
  source 1..75: mol_type = other DNA
cagcggtacagggtggcgtgccacagacgtcagcagacggtgatgcggacgtgaaaatgctcatggctatgccat

SEQ ID NO: 614059 - DNA, 75 bp, synthetic construct
  source 1..75: mol_type = other DNA
gctatgacggcattgtcgcctgtcttcagcaggcaatggcagatagccaggtgcggggcatactgctggacattg

SEQ ID NO: 614060 - DNA, 75 bp, synthetic construct
  source 1..75: mol_type = other DNA
aaaacagcgggctttacgctgccgctgttgcaacacctgatttcccgcgagccgcacgccaaagggcgtcgtccg

SEQ ID NO: 614061 - DNA, 75 bp, synthetic construct
  source 1..75: mol_type = other DNA
tagagatgtctattgcccggcttgagaacgaaaaagccgctatccaggcccagcatgacgtagttctgaaccgga

SEQ ID NO: 614062 - DNA, 75 bp, synthetic construct
  source 1..75: mol_type = other DNA
aatggtggcgcgtgggaccgtccatccgtgcttggttttgtagataactatgatgaagcctgtgaacttgccgaa

SEQ ID NO: 614063 - DNA, 75 bp, synthetic construct
  source 1..75: mol_type = other DNA
gcatatgaacccgaatctgtgggtgcagatccgacacttccagaatattgccggtggatgaaaaattggataaag

SEQ ID NO: 614064 - DNA, 75 bp, synthetic construct
  source 1..75: mol_type = other DNA
tatcattttaatacctataattcattatttttcgccacaattattattacgaaatacatggtgtttggcgattct

SEQ ID NO: 614065 - DNA, 75 bp, synthetic construct
  source 1..75: mol_type = other DNA
atgtcggtggcttcttcattggagtacatatgctccctcgaacctcaaaagcatgccgagttcgcggctgccgcc

SEQ ID NO: 614066 - DNA, 75 bp, synthetic construct
  source 1..75: mol_type = other DNA
cgccggcgtgaagccgccctgaaggggaagcgcgagaagaagctgaaagcgctggcagaaaagccctttgacgac

SEQ ID NO: 614067 - DNA, 75 bp, synthetic construct
  source 1..75: mol_type = other DNA
gtcatcggtaacaagttcggtgcccataaccagcatgcaaaacagcagatcgcactggagtcacagagaacccag

SEQ ID NO: 614068 - DNA, 75 bp, synthetic construct
  source 1..75: mol_type = other DNA
tggcggctggaagcgaaaaacgctcgagattttgctctgtggcgctctgacactgacctttgcatccgcgcttga

SEQ ID NO: 614069 - DNA, 75 bp, synthetic construct
  source 1..75: mol_type = other DNA
aaaatctgcaagcgcgaaacctgcagaaaaaccgtctcgccgatgccaaaccggcaggcgaacaacaacgtcgcc

SEQ ID NO: 614070 - DNA, 75 bp, synthetic construct
  source 1..75: mol_type = other DNA
tttacagccaagacgtcatgcctaacatcaatccagatgatctccaatggcatgattacgaaaaggctagcagta

SEQ ID NO: 614071 - DNA, 75 bp, synthetic construct
  source 1..75: mol_type = other DNA
tccttctggcgcagttaagcggttgcacgaatacgcgaacggtatacgtgtcggtgccggtcgttccgttaccag

SEQ ID NO: 614072 - DNA, 75 bp, synthetic construct
  source 1..75: mol_type = other DNA
ccctggtttctcccggtaagcggcacgaacaaccagcgttgtgtgaatcatatttctgaaccggataacgaaatt

SEQ ID NO: 614073 - DNA, 75 bp, synthetic construct
  source 1..75: mol_type = other DNA
ctgggcgtatgcgccttttctgctgtaggtgctgagcatcagacagcacgaaaagatatcgtatgtgcagatgac

SEQ ID NO: 614074 - DNA, 75 bp, synthetic construct
  source 1..75: mol_type = other DNA
gcagcctaagagcaatatcatggggtattttgggaactctctctttggtgcttggagtgtgtgcgttttctgctg

SEQ ID NO: 614075 - DNA, 75 bp, synthetic construct
  source 1..75: mol_type = other DNA
cgatggcaacgggggccgtgcttggttgggtcagttacagtgtagtcgctcacgttatatcgaaacggcaaatta

SEQ ID NO: 614076 - DNA, 75 bp, synthetic construct
  source 1..75: mol_type = other DNA
gatgatgcctgcctattacctgatggtagtggcggtggttggtttaatcaccggcgtaaccatgaaagagacggc

SEQ ID NO: 614077 - DNA, 75 bp, synthetic construct
  source 1..75: mol_type = other DNA
tgtgggacgagtggattatcctgatgtgttcgaacaggtctggcgggaatacccgttgcgtgccggggcaaaccc

SEQ ID NO: 614078 - DNA, 75 bp, synthetic construct
  source 1..75: mol_type = other DNA
ccttcttctggtgcacacacccactcagtatcaggcactgctgcaagtgcaggggcgcatgcacatacagttggt

SEQ ID NO: 614079 - DNA, 75 bp, synthetic construct
  source 1..75: mol_type = other DNA
agttcaacaaaccgtggagcgaaatcggcacgggtctttctgataaatgcgttctcagctacggcgcattcccgg

SEQ ID NO: 614080 - DNA, 75 bp, synthetic construct
  source 1..75: mol_type = other DNA
tgatgtcggcgctgaacctgccgctttccggtatccagtcaacgttaggccgcattctgtgccgcgcgcacgaag

SEQ ID NO: 614081 - DNA, 75 bp, synthetic construct
  source 1..75: mol_type = other DNA
catctcaacagatttttgaaaaatatctttggcacgaccagaccaaacgaaccatacaaatcttcggtcaacagg

SEQ ID NO: 614082 - DNA, 75 bp, synthetic construct
  source 1..75: mol_type = other DNA
gtggcttctgtttctatcagttgtccctcctgctcagctactgaaggcgtagtgcgtaacggtaaaagtactgcc

SEQ ID NO: 614083 - DNA, 75 bp, synthetic construct
  source 1..75: mol_type = other DNA
aaatggcgcaaggcttctcggtgggtggcgaatataccggagcgtcgatatttgtcgcggaatattctcccgatc

SEQ ID NO: 614084 - DNA, 75 bp, synthetic construct
  source 1..75: mol_type = other DNA
aacattgcgcgattcgcatcaacccgaatcgtagcggtgaagagacggtgctgcggattttgcgtgatagtattg

SEQ ID NO: 614085 - DNA, 75 bp, synthetic construct
  source 1..75: mol_type = other DNA
ctgaagcaggtcgtcgacgagcaacaaccagatgccgcgctggtgcagcatacgcgccagcagccgcaggacggc

SEQ ID NO: 614086 - DNA, 75 bp, synthetic construct
  source 1..75: mol_type = other DNA
cagattcagggcgctcaggcgctggaagtcttgcgtgggctggttttcgcgccggtgatgcatgcggtgcaggcg

SEQ ID NO: 614087 - DNA, 75 bp, synthetic construct
  source 1..75: mol_type = other DNA
aacctgatgccgcgttggtacagcatacacgtcagcaaccgcaggacagctatgtactggcagaggtactggcaa

SEQ ID NO: 614088 - DNA, 75 bp, synthetic construct
  source 1..75: mol_type = other DNA
aacctgatgccgcgctggtgcagcatacgcgccagcagccgcaggaccgctatgtgctggcagacgtgctggcaa

SEQ ID NO: 614089 - DNA, 75 bp, synthetic construct
  source 1..75: mol_type = other DNA
cagattcagggggcgcaggcattagaggtgttgcgtggtctggtgctcgcgccagtgatgcacgcggtgcaggcg

SEQ ID NO: 614090 - DNA, 75 bp, synthetic construct
  source 1..75: mol_type = other DNA
atgaagacgtttcctctgcaaagcctgacgattattgaggcgcagcaaaagcagtttgcgctggtggatagcatt

SEQ ID NO: 614091 - DNA, 75 bp, synthetic construct
  source 1..75: mol_type = other DNA
gcctttgttgaaaaagaagtaaatagagcatatcaacgcttacaggatgaaaaagctaaagtattagcatttcag

SEQ ID NO: 614092 - DNA, 75 bp, synthetic construct
  source 1..75: mol_type = other DNA
tggccaagttgaacaaagaacttgcacttaaagcacatttccagagtgatagtgcagattatttctcgcggttgc

SEQ ID NO: 614093 - DNA, 75 bp, synthetic construct
  source 1..75: mol_type = other DNA
cggagtcgaaatatgagatcccgccgctcttttatcgcctttccggaacgtttcgccaggcgaatccgcaattag

SEQ ID NO: 614094 - DNA, 75 bp, synthetic construct
  source 1..75: mol_type = other DNA
aagtattgcgtggtctggtgtttgcgccagtgatgcacgcggtgcaggcgggggtatctgaacggttgctggctt

SEQ ID NO: 614095 - DNA, 75 bp, synthetic construct
  source 1..75: mol_type = other DNA
ggtgcgttgccatatcctgttggtgcggagtcaaaatacgaaattccgccgctgttttaccgtctttctggaacg

SEQ ID NO: 614096 - DNA, 75 bp, synthetic construct
  source 1..75: mol_type = other DNA
aaactctgtggagtttcgcactctacggcacagccgttggtgcaggcacgctcttccttcctattcagttaggtt

SEQ ID NO: 614097 - DNA, 75 bp, synthetic construct
  source 1..75: mol_type = other DNA
acgtatctcatcccggcgcttaaaccctggcgttccatcggaaatctgattaccctgatcgtgggtatcctgtgc

SEQ ID NO: 614098 - DNA, 75 bp, synthetic construct
  source 1..75: mol_type = other DNA
atgaaaattaactatccgttgctggcgctggcgattttcacgcttggcaacgtactttccgccatcgcgccggat

SEQ ID NO: 614099 - DNA, 75 bp, synthetic construct
  source 1..75: mol_type = other DNA
agcgactggggtatctgcgaagttaacctgatgccaggtaacgaccgcgtgctgatcgaaaacctgaaaaaacag

SEQ ID NO: 614100 - DNA, 75 bp, synthetic construct
  source 1..75: mol_type = other DNA
ctgcacccggaaatcgacggctgcgaaggtattctcaacgcgatggcgcgtccgcaaacggcgattgtctctctg

SEQ ID NO: 614101 - DNA, 75 bp, synthetic construct
  source 1..75: mol_type = other DNA
gcccggctgcggataagcctgttcgcgatatttatcaggaagtgactgaccgtattgtgaccgcactggaaaaag

SEQ ID NO: 614102 - DNA, 75 bp, synthetic construct
  source 1..75: mol_type = other DNA
cggcggcagctggcgtcacctggcgctgggcgtggctggctggatgcgctacacccagggcgtggatgagcaggg

SEQ ID NO: 614103 - DNA, 75 bp, synthetic construct
  source 1..75: mol_type = other DNA
agcgaattaccgcttttttatggttcgcatttcaggaaatccgggaagccgcacgattacgacaagacgtgtgcc

SEQ ID NO: 614104 - DNA, 75 bp, synthetic construct
  source 1..75: mol_type = other DNA
agcgactggggcatctgcgaagttaacctgatgccaggcaacgaccgcgtgctgatcgaaaacctgaaaaaacag

SEQ ID NO: 614105 - DNA, 75 bp, synthetic construct
  source 1..75: mol_type = other DNA
ggttctgttaaggcttattcaggtatctggtctaaagcaacgtccaccaacgcaacactggagaaaaacttccct

SEQ ID NO: 614106 - DNA, 75 bp, synthetic construct
  source 1..75: mol_type = other DNA
cttctgggcggaaaaagcgtttgttctcggctgggaaatttcgatggtaaatgatgaccaacacgataattattt

SEQ ID NO: 614107 - DNA, 75 bp, synthetic construct
  source 1..75: mol_type = other DNA
aaacctggtgaaacgctggtgctaaagccggggcagggcatttgcctgccgccgcgtctgtatcatcgcttctgg

SEQ ID NO: 614108 - DNA, 75 bp, synthetic construct
  source 1..75: mol_type = other DNA
tgaacaggatgtatggcatcagccgtcactggtggcctttgaggtcacgccgtcgcgctggttacatcagcaggg

SEQ ID NO: 614109 - DNA, 75 bp, synthetic construct
  source 1..75: mol_type = other DNA
cttgctgaacgcatcggtgttgctgccgcagcccgtgaactcagcctgtatgaatcacagctctacaactggcgc

SEQ ID NO: 614110 - DNA, 75 bp, synthetic construct
  source 1..75: mol_type = other DNA
ccgcttacttgcgcaaaatattgaaccggttgaagcacttcgtcacctttcaggtatctcgccaatacagttcaa

SEQ ID NO: 614111 - DNA, 75 bp, synthetic construct
  source 1..75: mol_type = other DNA
gtgattgatgacgatggctaccgcccaaacgtaggtatcgtgatttgtaatcgtcaggggcaagtgatgtgggcc

SEQ ID NO: 614112 - DNA, 75 bp, synthetic construct
  source 1..75: mol_type = other DNA
cctgaccgatggtcttgatggcctggcgattatgccgactgtattcgtcgccggtggttttgcgctggtggcatg

SEQ ID NO: 614113 - DNA, 75 bp, synthetic construct
  source 1..75: mol_type = other DNA
ttgtgggtactggcaacgcggtaaacctgaccgatggtctcgacggcctggcaattatgccgaccgtatttgtcg

SEQ ID NO: 614114 - DNA, 75 bp, synthetic construct
  source 1..75: mol_type = other DNA
gaacattttaaacccaagggtgatgatgtggaaagagcttttgattgggataatttatatctatcatgttccaga

SEQ ID NO: 614115 - DNA, 75 bp, synthetic construct
  source 1..75: mol_type = other DNA
cggtgttgaagggatgcctgatgggctggatctcgatttacaaaatgtactactctccccagatgtagttaaagc

SEQ ID NO: 614116 - DNA, 75 bp, synthetic construct
  source 1..75: mol_type = other DNA
ctgacggtgacagcacgcgccagaaatcccggcgtgcggcacaggagcccgtccggttacaggcgacaacggccc

SEQ ID NO: 614117 - DNA, 75 bp, synthetic construct
  source 1..75: mol_type = other DNA
gagtaccggattcagtggcattaccggcatcatcccgggcatcaggaaacacagcgacggggagccgcattgttc

SEQ ID NO: 614118 - DNA, 75 bp, synthetic construct
  source 1..75: mol_type = other DNA
atgcttcctacatcgcaattacgaccgaccgggacattctgctcctattccgctgaaacatcagcaggcatcaaa

SEQ ID NO: 614119 - DNA, 75 bp, synthetic construct
  source 1..75: mol_type = other DNA
agcaagactcgcttatcaaaagagcattaaatgaacatgaaagaggaacaaaatttaaacagtgcttaaaaaatc

SEQ ID NO: 614120 - DNA, 75 bp, synthetic construct
  source 1..75: mol_type = other DNA
aaaaatctacatattgaattaactgattcaccatttatacacatcatatctgaaggcatcgaatgcctgacggtt

SEQ ID NO: 614121 - DNA, 75 bp, synthetic construct
  source 1..75: mol_type = other DNA
gaccgcatcgttccggcggcgacgccagaaaccttacaggaaattgctgaccagctgggtgtttatgacccgtgc

SEQ ID NO: 614122 - DNA, 75 bp, synthetic construct
  source 1..75: mol_type = other DNA
ggtggagcagtcatggcggcaggtgctgacgcctgcggcagacagcctgaaccgacagtggcaacgggcgattgt

SEQ ID NO: 614123 - DNA, 75 bp, synthetic construct
  source 1..75: mol_type = other DNA
cgataccgcctttgccagcggcgatgccggaatacatttcgaactgcgggcaaaaccggcgcgtgacgtgatgaa

SEQ ID NO: 614124 - DNA, 75 bp, synthetic construct
  source 1..75: mol_type = other DNA
ttccgtggctgcgtaccgcactgatgtccgctgtctgcgtgctggtgatatggggggccggaatgacgacctcgt

SEQ ID NO: 614125 - DNA, 75 bp, synthetic construct
  source 1..75: mol_type = other DNA
taaagaagggctggatattcatgtcattgcccgaaagatggaattaagcaatcgagctgtatccagcggatatta

SEQ ID NO: 614126 - DNA, 75 bp, synthetic construct
  source 1..75: mol_type = other DNA
tgtgtataccgaatcagtgaacacgacaaatatttatgtcgtgaactttataaagaaggactggatattcatgtc

SEQ ID NO: 614127 - DNA, 75 bp, synthetic construct
  source 1..75: mol_type = other DNA
cagagcaactggtagcgctgcataccttacagggtgaactggagcgcctgcaataccgtatccgggagggtgcgc

SEQ ID NO: 614128 - DNA, 75 bp, synthetic construct
  source 1..75: mol_type = other DNA
gaactgataaacggcggtaagcgactcggttttcaggccccactctatttgtggcaggtctgtgacaacggtgat

SEQ ID NO: 614129 - DNA, 75 bp, synthetic construct
  source 1..75: mol_type = other DNA
tgtgttcgccgttctggtggatccggaagcaaaggaaagcgcaatttatttacagaccaaaaaattcggcagaaa

SEQ ID NO: 614130 - DNA, 75 bp, synthetic construct
  source 1..75: mol_type = other DNA
ttgcaatgtcaattagcacaattctggcacctaaggtcgccagtttatacagccaaagtaaaatgaatgaaataa

SEQ ID NO: 614131 - DNA, 75 bp, synthetic construct
  source 1..75: mol_type = other DNA
ctgaaaaacttccgcctgccgggacaggtatttctgaccggcaggagtatgaaggatgcggaagaatacggggaa

SEQ ID NO: 614132 - DNA, 75 bp, synthetic construct
  source 1..75: mol_type = other DNA
gaaaccgctgctggcaggcggcgcattttcttccctgcgcctgcgtggcctgatgttcagcccgccgcttgccgc

SEQ ID NO: 614133 - DNA, 75 bp, synthetic construct
  source 1..75: mol_type = other DNA
ttcgccaactgcgctcttgttcaggaaaccagcatccagactgcacgtgcgcttgatacccgcctgccgcaggca

SEQ ID NO: 614134 - DNA, 75 bp, synthetic construct
  source 1..75: mol_type = other DNA
ttgccccaaccgccctacaggcgcatgccagaaggcacggaatatcgttgtgtgcataccgggtcagtgagcacg

SEQ ID NO: 614135 - DNA, 75 bp, synthetic construct
  source 1..75: mol_type = other DNA
gcctgaatctattaaagcaaaacccaacgcagtatggcaggaccagctggtgctgaataagaccggtggagggta

SEQ ID NO: 614136 - DNA, 75 bp, synthetic construct
  source 1..75: mol_type = other DNA
tccggttatcgcaattgccgggtatatcgatgatcaacttgatctgaatgagttacgccagtgtggaatagaagc

SEQ ID NO: 614137 - DNA, 75 bp, synthetic construct
  source 1..75: mol_type = other DNA
atgaagatagttatctcccccgactcctttaaagaatgccttcctgcatggaaagtcgccgaagcgctggcaacc

SEQ ID NO: 614138 - DNA, 75 bp, synthetic construct
  source 1..75: mol_type = other DNA
aaggcagcatatgaccttgctaacgggaaatatactgcgcaggacgccaccacagcgcggaaaggccttgtccag

SEQ ID NO: 614139 - DNA, 75 bp, synthetic construct
  source 1..75: mol_type = other DNA
agaacttgagttaaaaatagatgctttttccgaacagtttgataattactttaataatgaaaagagcagtttaaa

SEQ ID NO: 614140 - DNA, 75 bp, synthetic construct
  source 1..75: mol_type = other DNA
aattcgtttagatgagcttgaagcacgtattagtttaattgccgataatgttgagaaaaaaaataatcatattaa

SEQ ID NO: 614141 - DNA, 75 bp, synthetic construct
  source 1..75: mol_type = other DNA
atttgatcatcttaaaaacccacagttacgatcaaattaccgccgaagcaaaccataaaacgtttcgtaccgccg

SEQ ID NO: 614142 - DNA, 75 bp, synthetic construct
  source 1..75: mol_type = other DNA
ttcgctggtagatggccttatcttcgcatctgctaccaccaaatttatgcgtgacgaagatccggagttcttaca

SEQ ID NO: 614143 - DNA, 75 bp, synthetic construct
  source 1..75: mol_type = other DNA
gatattcatgtcattgcccgaaagatggaattaagcaatcgagctgtatccagcattgtatacggcggatattaa

SEQ ID NO: 614144 - DNA, 75 bp, synthetic construct
  source 1..75: mol_type = other DNA
tacgtgactgtaattggcattggcggcagcgaaaagcaggccagagaaggtgaatttgatgctgtgatgctggca

SEQ ID NO: 614145 - DNA, 75 bp, synthetic construct
  source 1..75: mol_type = other DNA
tcatgggcgccagctgcccatgacagattacccaatcgacaccctggagctggaacgcaccgttgataaggtgtt

SEQ ID NO: 614146 - DNA, 75 bp, synthetic construct
  source 1..75: mol_type = other DNA
gctgctgagcagcaacatttcgaggcttccctgaattgtatccccgaacgccttcaggaggccttggatgagtta

SEQ ID NO: 614147 - DNA, 75 bp, synthetic construct
  source 1..75: mol_type = other DNA
cggaagtgtctagattatccgtggcgattcagaatagtcgagtaacaaaccctgagtcgtacatattttctgcaa

SEQ ID NO: 614148 - DNA, 75 bp, synthetic construct
  source 1..75: mol_type = other DNA
agtcgtacatattttctgcaatcatctatattggcaaagataacttcaccagtaacgaagtagcaaaaattctta

SEQ ID NO: 614149 - DNA, 75 bp, synthetic construct
  source 1..75: mol_type = other DNA
agtcgtacatattttctgcaatcatttatattgggaaggataacttcaccagtaacgatgtagcgaaaattctta

SEQ ID NO: 614150 - DNA, 75 bp, synthetic construct
  source 1..75: mol_type = other DNA
ctaacgcctggcttgcgctcggtacgctgacgctgctggagatcgttcttgggatcgacaatattattttccttt

SEQ ID NO: 614151 - DNA, 75 bp, synthetic construct
  source 1..75: mol_type = other DNA
cgccgccgtgcaccacagctcaccgattgccgtaaagtgcaacatactgaccagcacctacatccctcatccgct

SEQ ID NO: 614152 - DNA, 75 bp, synthetic construct
  source 1..75: mol_type = other DNA
atgagtaaacgcaaaaattacaccggaaagcgtgggcagcattcgctacccgatgcactgaaatcaacaccggca

SEQ ID NO: 614153 - DNA, 75 bp, synthetic construct
  source 1..75: mol_type = other DNA
taataacgctgacaatgaaacagaatgatgttgattctgtggatggtcgcttttgtaagtcagcgcaaaacatca

SEQ ID NO: 614154 - DNA, 75 bp, synthetic construct
  source 1..75: mol_type = other DNA
cataccaaaaacggcaaactccgccgtgtaccggtatgtgataaggctttcgttcttctgacagaacagcgtcag

SEQ ID NO: 614155 - DNA, 75 bp, synthetic construct
  source 1..75: mol_type = other DNA
gctgccggatgcagccctgctgtcggagggggatgaccgggcccggttccagacgctgctgcccggattctggaa

SEQ ID NO: 614156 - DNA, 75 bp, synthetic construct
  source 1..75: mol_type = other DNA
aaaggttaccgagaggtacctacatggcagcccggtgcgctaccacgaggccattaacaaggcgatggatacgtt

SEQ ID NO: 614157 - DNA, 75 bp, synthetic construct
  source 1..75: mol_type = other DNA
gcgggtattcctccgttcaccatccatgagatgcgtcatacctttgcgacaaagctcattgagagcggggcagac

SEQ ID NO: 614158 - DNA, 75 bp, synthetic construct
  source 1..75: mol_type = other DNA
aaaccagcgttgacgttgaagattgctgcgttgaagtgatggttcgacatcacagcccaaagaatcaaagagagg

SEQ ID NO: 614159 - DNA, 75 bp, synthetic construct
  source 1..75: mol_type = other DNA
gctgaaaacacgcgtttcatcattcctcggcgctatcgtgcagattatgctgctggatattatcttcagcctcga

SEQ ID NO: 614160 - DNA, 75 bp, synthetic construct
  source 1..75: mol_type = other DNA
aacggttcattcggtgatattgagaaagcggcccgcgtgttcgccgtcaacgagctgacaccctacatggaagcc

SEQ ID NO: 614161 - DNA, 75 bp, synthetic construct
  source 1..75: mol_type = other DNA
gggatgccggagtatatcggtgggttgctgtcggtgagtctgtcgaactcggcggatacgttccgcaagctctac

SEQ ID NO: 614162 - DNA, 75 bp, synthetic construct
  source 1..75: mol_type = other DNA
catgccgaataatgttggggggtttggggatgtggagaaggcgagtaaggtttttgttagaaacgaactacttcc

SEQ ID NO: 614163 - DNA, 75 bp, synthetic construct
  source 1..75: mol_type = other DNA
tgcggcgcaggttgaccgtgaaagcatggaaaaactgcgggaaacactgcaaagcgcgcgtggtggcggggcgtt

SEQ ID NO: 614164 - DNA, 75 bp, synthetic construct
  source 1..75: mol_type = other DNA
ggcgcacctgaatacatggcctcgttacaaagcgccatgctcaacagtgaagcgaccatgttccgccgcaactac

SEQ ID NO: 614165 - DNA, 75 bp, synthetic construct
  source 1..75: mol_type = other DNA
gctgagcaggcaggaaatgagcgcgtgggtgctggattatctggtattcggcaacaactacatggaggtgcgccg

SEQ ID NO: 614166 - DNA, 75 bp, synthetic construct
  source 1..75: mol_type = other DNA
cttgggctggcgggagccatggtcatgcgtctggcactgctggcgtcgatcgcctgggtaacgcgattgaccaat

SEQ ID NO: 614167 - DNA, 75 bp, synthetic construct
  source 1..75: mol_type = other DNA
tgcctgggttacgcgcctgacgaatccgctttttacaattttcagtcaggaaatttccgctcgtgatttgattct

SEQ ID NO: 614168 - DNA, 75 bp, synthetic construct
  source 1..75: mol_type = other DNA
gggatcgataatattattttcctttctctggtggtcgcaaagttgcccaccgcacagcgtggtcacgcgcggcgt

SEQ ID NO: 614169 - DNA, 75 bp, synthetic construct
  source 1..75: mol_type = other DNA
cattccagcagatcaccgcccgggatgagttcatgaacgtcaaggcggcctcccgtgatgatgtgctggccgctc

SEQ ID NO: 614170 - DNA, 75 bp, synthetic construct
  source 1..75: mol_type = other DNA
gcaccggctgctctcccggcaggcgttctccgcctttgcgctggactggtttgtcttcgggaatgcgtttcttga

SEQ ID NO: 614171 - DNA, 75 bp, synthetic construct
  source 1..75: mol_type = other DNA
gccggtgatggaggcgatgaagcacgttaatgactggctgggcgaagaggtgatccgttttaacccttacgcact

SEQ ID NO: 614172 - DNA, 75 bp, synthetic construct
  source 1..75: mol_type = other DNA
taaacacagcgatcgcacctatgatcgcctgaccagggacagcacgcctgatcacataaaatgcagtgaattcaa

SEQ ID NO: 614173 - DNA, 75 bp, synthetic construct
  source 1..75: mol_type = other DNA
gaagggaaaatcacggtgttcgccgccgcatcactgactaacgcaatgcaggacattgctacgcagtataaaaaa

SEQ ID NO: 614174 - DNA, 75 bp, synthetic construct
  source 1..75: mol_type = other DNA
gataacgatgctgattgttgcctcttcatatgcagtgattgcgtttctttgtacctacctggcgcaaggcgcgat

SEQ ID NO: 614175 - DNA, 75 bp, synthetic construct
  source 1..75: mol_type = other DNA
gacaacgatgctcatcgtcgcttcagcgtatgcggtgattgctttcctctgtacttacctggcacagggggcgat

SEQ ID NO: 614176 - DNA, 75 bp, synthetic construct
  source 1..75: mol_type = other DNA
tcttgcaggcaatgcgctggcagacgaagggaagattacagtttttgcggcagcatcactgaccaacgcaatgca

SEQ ID NO: 614177 - DNA, 75 bp, synthetic construct
  source 1..75: mol_type = other DNA
aaagcattttacgattatctgaaaggaccgcaggcagcggaaatctttaaacgttacggatttacaactaagtaa

SEQ ID NO: 614178 - DNA, 75 bp, synthetic construct
  source 1..75: mol_type = other DNA
gcggatctgtttatctctgccgatcagaaatggatggattatgcggttgataaaaaagcgatcgatacggcttcg

SEQ ID NO: 614179 - DNA, 75 bp, synthetic construct
  source 1..75: mol_type = other DNA
ctgccgtttagtttgttaatgcagtacgtcattctgttcttctattctgctttctcattatttatgaccaaagcc

SEQ ID NO: 614180 - DNA, 75 bp, synthetic construct
  source 1..75: mol_type = other DNA
caacggctgtgtcaatcatcactttgtcagctacatgatgcggaactcgatcatgcaggcattcatggacatggc

SEQ ID NO: 614181 - DNA, 75 bp, synthetic construct
  source 1..75: mol_type = other DNA
cttcatgtacgcgacatggcaatgaatcaggcgaaaattattgcctccaatgacagtgtcatctctgcggtgaaa

SEQ ID NO: 614182 - DNA, 75 bp, synthetic construct
  source 1..75: mol_type = other DNA
aaatcccggcagcaagcgcaaccgcagcccgttgccagtaaaaatgaagaagaggactacagcaatgggatctga

SEQ ID NO: 614183 - DNA, 75 bp, synthetic construct
  source 1..75: mol_type = other DNA
ttgctacatccaggtcagcaacctgttgccggttgccgtactgggcgcaggctttgcggtgtatgagtttttcaa

SEQ ID NO: 614184 - DNA, 75 bp, synthetic construct
  source 1..75: mol_type = other DNA
ttaattaccggtggcctaacagaactggctttcgccggattaacccccgcaggtggtgtacagccgcccaaccca

SEQ ID NO: 614185 - DNA, 75 bp, synthetic construct
  source 1..75: mol_type = other DNA
ttgccggggcggcgctttctttcactgtcgctggcaacgcattggcggacgaaggtaaaattacagtttttgcgg

SEQ ID NO: 614186 - DNA, 75 bp, synthetic construct
  source 1..75: mol_type = other DNA
ccgaggcttttgagctgagagcggcagagcgtgaagcgattgagcacgagatgcaccactacgaagacccgcgtg

SEQ ID NO: 614187 - DNA, 75 bp, synthetic construct
  source 1..75: mol_type = other DNA
tacagccagatcttccgccagccggttggccgccatgtgatccgttattgcgacagcgtggtctgtcatatcaac

SEQ ID NO: 614188 - DNA, 75 bp, synthetic construct
  source 1..75: mol_type = other DNA
tatgaaacgccaagcacctggctttcatttatgccccaggtttttgaatccgtaaaagaagaatattttaccgta

SEQ ID NO: 614189 - DNA, 75 bp, synthetic construct
  source 1..75: mol_type = other DNA
tttccggtgtggatgttgttttcgaaccgaacgaagtcgcctataactcttttatcaatgaaatggcaatggata

SEQ ID NO: 614190 - DNA, 75 bp, synthetic construct
  source 1..75: mol_type = other DNA
gtggtgttgatattgtttttgagccaaatcagactgcctacaacaaatttattaatgaaatggcgatggataata

SEQ ID NO: 614191 - DNA, 75 bp, synthetic construct
  source 1..75: mol_type = other DNA
ccggatggcgcgatccacgcgatcgccgatgtgctgggtattccggcaagcgacgtcgaaggcgtggcaacgttc

SEQ ID NO: 614192 - DNA, 75 bp, synthetic construct
  source 1..75: mol_type = other DNA
aaggcaatttctttatcgtcgggaggaacttcagggtgcgtttcgcttttttgtcctctcgcaggaacgcccggc

SEQ ID NO: 614193 - DNA, 75 bp, synthetic construct
  source 1..75: mol_type = other DNA
agcgcttgaagccacttatgcatctgtccgccgcatgagtgatatggggatgtcgacagaagtcattaagcaggc

SEQ ID NO: 614194 - DNA, 75 bp, synthetic construct
  source 1..75: mol_type = other DNA
ggctggcaggccgtcaaatccggcgcaatggcaaccgacacggttgtgaataccggcgcggaagggggaccagat

SEQ ID NO: 614195 - DNA, 75 bp, synthetic construct
  source 1..75: mol_type = other DNA
aaattccgtctgatgtagaaatcattcgtgtatacaccatgcatgatgctgaccgccatcaggatcatcttgcag

SEQ ID NO: 614196 - DNA, 75 bp, synthetic construct
  source 1..75: mol_type = other DNA
ttggggtgtcaacaaactattcattttaattttgctgacacccgtactcatttacaacttaatgatatgatttcc

SEQ ID NO: 614197 - DNA, 75 bp, synthetic construct
  source 1..75: mol_type = other DNA
gattatacggggatgcttacggtcaccgatcctgggttatttgtgcaacgcctgagccaggggtatggtaaaagc

SEQ ID NO: 614198 - DNA, 75 bp, synthetic construct
  source 1..75: mol_type = other DNA
atatggccatgaatggcgtcggatgtcgcgccagtgcacgcattatgggcgttggcctcaacacggttttacgtc

SEQ ID NO: 614199 - DNA, 75 bp, synthetic construct
  source 1..75: mol_type = other DNA
aatatgaatatggcgcagctccagacggaaatcgcgaagcatttcccgtcgcgtctgggttacgtgacaccgctt

SEQ ID NO: 614200 - DNA, 75 bp, synthetic construct
  source 1..75: mol_type = other DNA
tcgcgccagtgcacgcattatgggcgttggcctcaacacggttttacgtcacttaaaaaactcaggccgcagtcg

SEQ ID NO: 614201 - DNA, 75 bp, synthetic construct
  source 1..75: mol_type = other DNA
ggcaaaactatggtcatcatacaattgcagatgaaggaggtaaaggagatcgcctgcacttatctgatattagct

SEQ ID NO: 614202 - DNA, 75 bp, synthetic construct
  source 1..75: mol_type = other DNA
ttatgataaaacagacaccggttatctgaccattgatggcacaaaagcaaccgaagcgggtaattacacggtaac

SEQ ID NO: 614203 - DNA, 75 bp, synthetic construct
  source 1..75: mol_type = other DNA
aagtggcgcgccgcaataccgcgtctgatcaggtaacccaacacgttcattttgttgataagaaacgcaaacgcg

SEQ ID NO: 614204 - DNA, 75 bp, synthetic construct
  source 1..75: mol_type = other DNA
catcagcgctatctctgctctccttgccgtaaaacatggcaactacagttcacttacaccgcctctcagcccggt

SEQ ID NO: 614205 - DNA, 75 bp, synthetic construct
  source 1..75: mol_type = other DNA
gcttccatttccatcagatgtcctgcctgcgccgctactgaagtcgtggtgcgtaacggcaaaagcactgccgga

SEQ ID NO: 614206 - DNA, 75 bp, synthetic construct
  source 1..75: mol_type = other DNA
atacggcgatgatggggatgattatatatccggaggacagggagacgaccagttatttggtggtagtggaaacga

SEQ ID NO: 614207 - DNA, 75 bp, synthetic construct
  source 1..75: mol_type = other DNA
aagcatttcccgtcgcgtcttgggtacgtgacaccacttgcggcaggtgcgtttccgctgacgcgccgccatgcg

SEQ ID NO: 614208 - DNA, 75 bp, synthetic construct
  source 1..75: mol_type = other DNA
tggccatgaatggcgtcggatgtcgcgccagtgcacgcattatggacgttggcctcaacacggttttacgtcact

SEQ ID NO: 614209 - DNA, 75 bp, synthetic construct
  source 1..75: mol_type = other DNA
ggatcgctactcgtggatcaaagcgccacgctggcgcggtcacgcgatggaagtagggccgctggctcgcacgtt

SEQ ID NO: 614210 - DNA, 75 bp, synthetic construct
  source 1..75: mol_type = other DNA
cgtaaaacatggcaactacagttcacttacaccgcctctcaacccggtacacaccagaaaatcattgatatggcc

SEQ ID NO: 614211 - DNA, 75 bp, synthetic construct
  source 1..75: mol_type = other DNA
gtggcttccatttccatcagttgtccctcctgctcagctactgaaggcgtggtgcgtaacggcaaaagcactgcc

SEQ ID NO: 614212 - DNA, 75 bp, synthetic construct
  source 1..75: mol_type = other DNA
catcagcgctatctctgctatcattgccgtaaaacatggcaactacagttcacttacaccgcctctcagcccggt

SEQ ID NO: 614213 - DNA, 75 bp, synthetic construct
  source 1..75: mol_type = other DNA
cgcgatttagtggtagacatgggacaattctatgcgcaatatgagaaaattaagccttacctgttgaataatgga

SEQ ID NO: 614214 - DNA, 75 bp, synthetic construct
  source 1..75: mol_type = other DNA
ccattgtcggcggaggaatggtcggcggcgcactggcgctggggctggcacagcacgggtttacggtaacggtga

SEQ ID NO: 614215 - DNA, 75 bp, synthetic construct
  source 1..75: mol_type = other DNA
taaagaggaaagagctgcagcttctttattgcagttgtccggtaatgccagtgatttttcatatggacggaactc

SEQ ID NO: 614216 - DNA, 75 bp, synthetic construct
  source 1..75: mol_type = other DNA
accgccatccagcagcatcgtggctgggttaaagcggaagacagcccgctgggcggtttacggctggtgatttgg

SEQ ID NO: 614217 - DNA, 75 bp, synthetic construct
  source 1..75: mol_type = other DNA
gctgaaaaacgcggccgatgaagttgcccagggaaacttacgccagcacccggaactggaagcggggccacagga

SEQ ID NO: 614218 - DNA, 75 bp, synthetic construct
  source 1..75: mol_type = other DNA
cagcatgtcgaagcagagctggcgaacgatccgcccaacgatttaatgtggtggcgtcgcctgttccgtgccatt

SEQ ID NO: 614219 - DNA, 75 bp, synthetic construct
  source 1..75: mol_type = other DNA
agtgtgactaccggagcagcccagaatggaaggattttgcatcacgcattggtaatgcgctatgcggggccgggg

SEQ ID NO: 614220 - DNA, 75 bp, synthetic construct
  source 1..75: mol_type = other DNA
atttaccctatcgaatcattggggctattcaggaaatggcttcacgataactatgccatggaaaaactacccaaa

SEQ ID NO: 614221 - DNA, 75 bp, synthetic construct
  source 1..75: mol_type = other DNA
gggaacaaaaagattagtaacgcctccgagctattagagtcgataaaaaaaccagcactcccaaataagcattga

SEQ ID NO: 614222 - DNA, 75 bp, synthetic construct
  source 1..75: mol_type = other DNA
gcctgttgtctgccagtctgtcgcattcggcagatcgttttcgcaaactctactatgacaacggttcacacgcag

SEQ ID NO: 614223 - DNA, 75 bp, synthetic construct
  source 1..75: mol_type = other DNA
cccgccgcgatgacggcgtggagctggcagaggcactgcgccgccagccgtcgctaagcgctttctcgttcgatg

SEQ ID NO: 614224 - DNA, 75 bp, synthetic construct
  source 1..75: mol_type = other DNA
cccgccgcgatgacggcgtggagctggcagaggcactgcgccgccagccgtcgttaagcgccttctcgttcgatg

SEQ ID NO: 614225 - DNA, 75 bp, synthetic construct
  source 1..75: mol_type = other DNA
ttaacttcccgcctgggccgtggccgctgtacggcaacccaaacgccctggaaagtgcgctggaaaacattgttc

SEQ ID NO: 614226 - DNA, 75 bp, synthetic construct
  source 1..75: mol_type = other DNA
tgggttaaagcggaagacagcccgctgggcggtttacggctggtgatttggttgccgctgtataagcggagttaa

SEQ ID NO: 614227 - DNA, 75 bp, synthetic construct
  source 1..75: mol_type = other DNA
agttctcaatccgatttcattaacttactgtttgaccgcccgttattactgctgattgtcaccatgttggtcagt

SEQ ID NO: 614228 - DNA, 75 bp, synthetic construct
  source 1..75: mol_type = other DNA
atggacaagcactctgggatatagtgacacttatagtgaatcagtttataaaagtcatattctttctgaatatgg

SEQ ID NO: 614229 - DNA, 75 bp, synthetic construct
  source 1..75: mol_type = other DNA
atcatattattgacgatgaaggggggaaagacgataaactcagtttagctgatatagatttccgggacgttgcct

SEQ ID NO: 614230 - DNA, 75 bp, synthetic construct
  source 1..75: mol_type = other DNA
tttatgcaggggcattgcccttactgtcaccagtttgacccggtactgaaacagctggcacagcagtatggcttt

SEQ ID NO: 614231 - DNA, 75 bp, synthetic construct
  source 1..75: mol_type = other DNA
gtgacatgaatggtacaataagtattaataaaaacggtaataatttcaactactctctaacttctggttacaatt

SEQ ID NO: 614232 - DNA, 75 bp, synthetic construct
  source 1..75: mol_type = other DNA
tgaaaaaacgcaatatcggagttatgaattcactcatatcaatggtaaaaatttaacagagactgataacttata

SEQ ID NO: 614233 - DNA, 75 bp, synthetic construct
  source 1..75: mol_type = other DNA
aaccgaagcgggtaattacacggtaacacgtgtacttggtggcgatgttaaggttttacaggaagttgtgaagga

SEQ ID NO: 614234 - DNA, 75 bp, synthetic construct
  source 1..75: mol_type = other DNA
attaacaacgataagcactgtactggcttcagtatcttcaggtattagtgctgctgcaacgacatctctggttgg

SEQ ID NO: 614235 - DNA, 75 bp, synthetic construct
  source 1..75: mol_type = other DNA
agtcgtttctcaatcgtctgtggacatttgaaagtgatggaaagcaatggtttaacccggatgtgagcgtcatct

SEQ ID NO: 614236 - DNA, 75 bp, synthetic construct
  source 1..75: mol_type = other DNA
cgggcgcagcttggcgacgtccagcagatctttaatcagctaagcgatgacattgccacgcgagtggctgaaatc

SEQ ID NO: 614237 - DNA, 75 bp, synthetic construct
  source 1..75: mol_type = other DNA
ctggatgaggacggaggattttcgtttgaatatacaggtaatgagaaaacactttttttattaaagggcagaact

SEQ ID NO: 614238 - DNA, 75 bp, synthetic construct
  source 1..75: mol_type = other DNA
ctcaatggtaacgtgagtttcctggcgggtgagtccgcacgaggaaattaccaaaatattacatataatgatgga

SEQ ID NO: 614239 - DNA, 75 bp, synthetic construct
  source 1..75: mol_type = other DNA
ttgatgtaactgctaatgtgacagtttcttatatagggagagctcttgatgataaaggaaatccattatcaaatg

SEQ ID NO: 614240 - DNA, 75 bp, synthetic construct
  source 1..75: mol_type = other DNA
ttttttagatggtcgtataacgacaaatacttttggctatagtgaattaggctctcgtataaatacgaacaaaaa

SEQ ID NO: 614241 - DNA, 75 bp, synthetic construct
  source 1..75: mol_type = other DNA
gcatcattggcttcgttgatgactatcgcaaagtcgtgcgcaaagacaccaaagggttgatcgcacgctggaagt

SEQ ID NO: 614242 - DNA, 75 bp, synthetic construct
  source 1..75: mol_type = other DNA
ttacgttttgatgtggaagaccggttggtcgatttggtcaatgaaggggtcgatctggatattcgtattggcgac

SEQ ID NO: 614243 - DNA, 75 bp, synthetic construct
  source 1..75: mol_type = other DNA
cttttggtgtctggcaattacgcaataaagaaggcccccatgcgattaaagtcaccggcccactgtcgtctaatc

SEQ ID NO: 614244 - DNA, 75 bp, synthetic construct
  source 1..75: mol_type = other DNA
gctttggttttggacgacaggtggtggctccggcgttatcagcgctggcgaaagcgtatccgcaactggaattac

SEQ ID NO: 614245 - DNA, 75 bp, synthetic construct
  source 1..75: mol_type = other DNA
tccggatgaagccgggcgttacagcatggacgtcgagtatggtcagtacagcgttattctgatggtggaaggatt

SEQ ID NO: 614246 - DNA, 75 bp, synthetic construct
  source 1..75: mol_type = other DNA
gtaaatatcagcaatacctacggtgcgattcggggcacggatgttttttatccgcagcagggcgcggggaatacg

SEQ ID NO: 614247 - DNA, 75 bp, synthetic construct
  source 1..75: mol_type = other DNA
tggttttagcggattaggtcatcgcctggcgcggttatttacgccgtcggtgatggtcttgtttatgttgatgct

SEQ ID NO: 614248 - DNA, 75 bp, synthetic construct
  source 1..75: mol_type = other DNA
gcaaaaggctttgttcaactcagtagcgccactaacagcgtgtctgaaacacaagctgcaacgccgaaagcagta

SEQ ID NO: 614249 - DNA, 75 bp, synthetic construct
  source 1..75: mol_type = other DNA
acagtggcggtatgaatttcgactggctggatggtgcatcaagtggcacggtggtagggaatggaactgtgcctt

SEQ ID NO: 614250 - DNA, 75 bp, synthetic construct
  source 1..75: mol_type = other DNA
ccgggaaaacatcactattcgtctggatgatcacatccactcagttcagggtaaagaggactatgaagatgagat

SEQ ID NO: 614251 - DNA, 75 bp, synthetic construct
  source 1..75: mol_type = other DNA
ataaagaaggccaccatgcgattaaagtcaccggcccactgtcgtctaatcatggagaaattgtccatcagtggt

SEQ ID NO: 614252 - DNA, 75 bp, synthetic construct
  source 1..75: mol_type = other DNA
ataatttaccgctgctgaacgatttgcgcgtctttatgctggtggctcgccgggctggttttgccgccgtggcgg

SEQ ID NO: 614253 - DNA, 75 bp, synthetic construct
  source 1..75: mol_type = other DNA
tctctgcgcatcgccggggtttattgcgcgatatggtgcaccgaaacatttaacggatctttctgcgttaccctg

SEQ ID NO: 614254 - DNA, 75 bp, synthetic construct
  source 1..75: mol_type = other DNA
ccgccctggactgggccatgaaacaggattttcgctgcggctgctggctgatggagaaaccggaaaccgcaatga

SEQ ID NO: 614255 - DNA, 75 bp, synthetic construct
  source 1..75: mol_type = other DNA
cgcagcaaattgccgcttgggcgcagattgatgaaacacgctggaagaaaaaaatcgcgcaatcacaagtgcggg

SEQ ID NO: 614256 - DNA, 75 bp, synthetic construct
  source 1..75: mol_type = other DNA
ctgctgcaaatcgacacacttatccggcaactggctgaaatctcagcaatgacagaaagtattggcggtaaaacc

SEQ ID NO: 614257 - DNA, 75 bp, synthetic construct
  source 1..75: mol_type = other DNA
aaccgattcccgacaaccgggaaaacatcactattcgtctggatggtcacatccagtccgttcagggtaaagagc

SEQ ID NO: 614258 - DNA, 75 bp, synthetic construct
  source 1..75: mol_type = other DNA
agggtggatctgcacacatcactttcaaaaggctggagctgattgacagaattaacgatataatagccaagcact

SEQ ID NO: 614259 - DNA, 75 bp, synthetic construct
  source 1..75: mol_type = other DNA
gacctggaaagaatactgcatctgttcagcagcaaccccatccccgattgcagggaaaacatcacccttcgtctg

SEQ ID NO: 614260 - DNA, 75 bp, synthetic construct
  source 1..75: mol_type = other DNA
tatatcgatatgttatttgttgaacctgaatacacccgacgcggggttgccagcgctttgttaaaaccattgatt

SEQ ID NO: 614261 - DNA, 75 bp, synthetic construct
  source 1..75: mol_type = other DNA
cgaaatctggcgtgatctgatgcaacgttccgggatgctgtcattaatggatacgcaggcccgtgatacatggta

SEQ ID NO: 614262 - DNA, 75 bp, synthetic construct
  source 1..75: mol_type = other DNA
ccggcacatcagcccgtgaggcggcaacccatgcggctgatgctgcaggctcagcacgtgcagccagcacatcag

SEQ ID NO: 614263 - DNA, 75 bp, synthetic construct
  source 1..75: mol_type = other DNA
gtacaaggggcggttggtctgggcattggcacgatggcgaatacgaactctgctggcgcgcatacccactcactg

SEQ ID NO: 614264 - DNA, 75 bp, synthetic construct
  source 1..75: mol_type = other DNA
acccgggactgggccatgaaacaggattttcgctgcggctgctggctcatggagaaacctgaaacggcaatgaaa

SEQ ID NO: 614265 - DNA, 75 bp, synthetic construct
  source 1..75: mol_type = other DNA
catgacggaggatgatgcccgtcctgaggcactgcgccgttttgaactgatggtggaagaggtggagcgtaacgc

SEQ ID NO: 614266 - DNA, 75 bp, synthetic construct
  source 1..75: mol_type = other DNA
cctgtaaatttggcaataaaattatcgtcaacaatctggtgaggtgggaccggtggggattgcatcttatcaccg

SEQ ID NO: 614267 - DNA, 75 bp, synthetic construct
  source 1..75: mol_type = other DNA
agcttgctggattcggtaaccactggcggtaaggcgttggctggctgtggccgtggtcagatgaacgctttttcg

SEQ ID NO: 614268 - DNA, 75 bp, synthetic construct
  source 1..75: mol_type = other DNA
gtctggcaaagcgtggggtgattcaacttccttcaatgcaaaaagttgaaaataaacaaacaattagccctaaca

SEQ ID NO: 614269 - DNA, 75 bp, synthetic construct
  source 1..75: mol_type = other DNA
ccgttcccctttgcattggtttagggttgggttcgaaagtcatccctccgcgcctgttatttgccggaatcgtcc

SEQ ID NO: 614270 - DNA, 75 bp, synthetic construct
  source 1..75: mol_type = other DNA
aacaacgtattgatgctgaccggcgtcagcccatcgattggtaaaacgtttgtctgcgccaacctggcggcagtc

SEQ ID NO: 614271 - DNA, 75 bp, synthetic construct
  source 1..75: mol_type = other DNA
gcagccagtacaacgcagccagtacaacgcagccagtacaacgcagccagtacaacgcagccagtgaacgtatcg

SEQ ID NO: 614272 - DNA, 75 bp, synthetic construct
  source 1..75: mol_type = other DNA
agaatcaataacttagggttcaatgttcagtacgagcattacgtcttcgagggcgaacaaggtaagcgagacagt

SEQ ID NO: 614273 - DNA, 75 bp, synthetic construct
  source 1..75: mol_type = other DNA
cagagttcaccgctcgccttgttgaccgctggcgagatcttgaagaagctgcggttaatatccccaaaacgctac

SEQ ID NO: 614274 - DNA, 75 bp, synthetic construct
  source 1..75: mol_type = other DNA
ttcgccacgccgatttacagcgccgacgcactggtgcgcattgagcaaaatcagggcagcgcgctggtgcaggat

SEQ ID NO: 614275 - DNA, 75 bp, synthetic construct
  source 1..75: mol_type = other DNA
cgtcaccttcccgtgcaccatggttgaccgcatcgttccggcggcgacgccagaaaccttacaggaaattgctga

SEQ ID NO: 614276 - DNA, 75 bp, synthetic construct
  source 1..75: mol_type = other DNA
gccattgcctgcgaaccgttccgtcagtgggtgattgaagataacttcgttaatggtcgcccggactgggataaa

SEQ ID NO: 614277 - DNA, 75 bp, synthetic construct
  source 1..75: mol_type = other DNA
ctggaagatgagaaaagtaagctgaacgggcgcgtaacggcgatgctgaaaacgcagcaggaaattgttcgtctg

SEQ ID NO: 614278 - DNA, 75 bp, synthetic construct
  source 1..75: mol_type = other DNA
cctgatggtgacggaaacgggcaaagacaccggcgtattgagcctgacctttaccggcgaagaccgcgagcaaat

SEQ ID NO: 614279 - DNA, 75 bp, synthetic construct
  source 1..75: mol_type = other DNA
agacggtgaaggtcagcgcctttaatcgcccggcctcgatggccgacagcacctttacgctggaggttatcaacc

SEQ ID NO: 614280 - DNA, 75 bp, synthetic construct
  source 1..75: mol_type = other DNA
aaagtacaggggtaactaccggcattagtagcaacctgaccagttggctctcttccaccgggataatccaggccg

SEQ ID NO: 614281 - DNA, 75 bp, synthetic construct
  source 1..75: mol_type = other DNA
caaaccgatccccgacaacagggaaaacataactattcatctggacgatcacatccggtctcttcagggaaaaga

SEQ ID NO: 614282 - DNA, 75 bp, synthetic construct
  source 1..75: mol_type = other DNA
ttgttaaggaaaatgaactacaaaaagtaagagcatcatactttccggcatttcgaacgatgttagaagcgtgga

SEQ ID NO: 614283 - DNA, 75 bp, synthetic construct
  source 1..75: mol_type = other DNA
tgacttaagaagaaaatatcccaaggtcggtctaaaattccctgatggttcatggagcccgattagggtattatc

SEQ ID NO: 614284 - DNA, 75 bp, synthetic construct
  source 1..75: mol_type = other DNA
cgccgtttgcattgtctcgttacaccacgccgtacgggcatcaggtgattatttctgaattgatgtgggtgtggt

SEQ ID NO: 614285 - DNA, 75 bp, synthetic construct
  source 1..75: mol_type = other DNA
atgccaaccgttattacgcacgccgccgttcccctatgcattggtttagggttgggttcgaaagtcatccctccg

SEQ ID NO: 614286 - DNA, 75 bp, synthetic construct
  source 1..75: mol_type = other DNA
aggctacacccacgagctgttgggcaccaataacgtcaatggcctgtcggaaattctgattggtcagggcgatat

SEQ ID NO: 614287 - DNA, 75 bp, synthetic construct
  source 1..75: mol_type = other DNA
ttgccggactgggagcgattgatgatagcgtgacagacgttgccaaaggtatgggaatgagccggagtcagcgat

SEQ ID NO: 614288 - DNA, 75 bp, synthetic construct
  source 1..75: mol_type = other DNA
tctggctcattgctctgtttgtggcactgattttctggctgccttacagccagccgctgtttgctgccttgttcc

SEQ ID NO: 614289 - DNA, 75 bp, synthetic construct
  source 1..75: mol_type = other DNA
tagcttaaccaaatacaccgctgtcgatgccggagcagaaagtcaggactccagtaatggcgcattactcggtga

SEQ ID NO: 614290 - DNA, 75 bp, synthetic construct
  source 1..75: mol_type = other DNA
tagagctttcaaaaattcataatagatataatttaactgtggacttctttaatgacctgaatgtgattcatggaa

SEQ ID NO: 614291 - DNA, 75 bp, synthetic construct
  source 1..75: mol_type = other DNA
cgatgagtcctggctggcgcgacatgctgcgatgaaacggtgtccgcgcaagggggccacggctgccagcggata

SEQ ID NO: 614292 - DNA, 75 bp, synthetic construct
  source 1..75: mol_type = other DNA
gttgctggtggcactggcggcgatcatcgtagaccgcctgtttgaacggttggtgcagctactcagccagcacgc

SEQ ID NO: 614293 - DNA, 75 bp, synthetic construct
  source 1..75: mol_type = other DNA
atgacagaaagtattggcggtaaaaccgtactggactgggccatgaaacaggattttcgctgcggctgctggctg

SEQ ID NO: 614294 - DNA, 75 bp, synthetic construct
  source 1..75: mol_type = other DNA
agcgcgggctgctgtcgctggaacagcaaggcgccgcgcacttctttggcgagccgatgctggacatcaaagact

SEQ ID NO: 614295 - DNA, 75 bp, synthetic construct
  source 1..75: mol_type = other DNA
aaaagcgccgcccgccaggtgacgaatcagattgtgcgtggtgtgctggggagtttgctgggggggagaaaaagg

SEQ ID NO: 614296 - DNA, 75 bp, synthetic construct
  source 1..75: mol_type = other DNA
tgagcacatttgaacaactgcaccagaataaggatgaagtgtttgagcgaggtgtgatcaacctcttcagagggc

SEQ ID NO: 614297 - DNA, 75 bp, synthetic construct
  source 1..75: mol_type = other DNA
atgggacagaggaatggaactggccagacactggagtacgataattttccggaaatcagtgaagcgaacattctg

SEQ ID NO: 614298 - DNA, 75 bp, synthetic construct
  source 1..75: mol_type = other DNA
ggctccgcacacatcacgttcaggaaaccagagctgattgacaggcttaatgatattattgccaggcactatccc

SEQ ID NO: 614299 - DNA, 75 bp, synthetic construct
  source 1..75: mol_type = other DNA
tgtacgccgccagcctgctgtggatgctttctgagttgtatgagcaactgccagaagcaggcgatttggataaac

SEQ ID NO: 614300 - DNA, 75 bp, synthetic construct
  source 1..75: mol_type = other DNA
ggcggcatgattggcgatcaggtactttacctgtgtggaaggcgttttggcggcaagttgctgcgtcgtttctcg

SEQ ID NO: 614301 - DNA, 75 bp, synthetic construct
  source 1..75: mol_type = other DNA
cggaagtggtcaccgggcatacggacgttatctgctccacctcagtcagtcacattctggctgtgcgaaagacta

SEQ ID NO: 614302 - DNA, 75 bp, synthetic construct
  source 1..75: mol_type = other DNA
cactctccggtgtatggcaagtacgaggatgacgtggaccgggaatccgcctatgagatgttgcaaaaaggcttt

SEQ ID NO: 614303 - DNA, 75 bp, synthetic construct
  source 1..75: mol_type = other DNA
agtagcgcatctgttggtgcaatccaacgcggattactgtcgctggagcagcaaggagcgacgcatttctttggt

SEQ ID NO: 614304 - DNA, 75 bp, synthetic construct
  source 1..75: mol_type = other DNA
ctgctcgctcggttaaaaagtatcggtgtcaacgactggcaaccgcattcgaatccagcggtggtgtgggatatt

SEQ ID NO: 614305 - DNA, 75 bp, synthetic construct
  source 1..75: mol_type = other DNA
accgatggggattgcatcttatcaccgggcaacaggcagatagacttgccgacctggaaagaatgctgcacctgt

SEQ ID NO: 614306 - DNA, 75 bp, synthetic construct
  source 1..75: mol_type = other DNA
atgtcagatatcacaatcccccgtccggaagttgtcaacgggcatacggacgttatctgctcaaccagtatccgc

SEQ ID NO: 614307 - DNA, 75 bp, synthetic construct
  source 1..75: mol_type = other DNA
tctgttcagcggcaaaccgatccctgacaaccgggaaaatatcatcattcggctggatgatcacatccgctccgt

SEQ ID NO: 614308 - DNA, 75 bp, synthetic construct
  source 1..75: mol_type = other DNA
gaagggctccacgcatatcacgttcagaaaaccagaactggttgacagactgaatgatattatcgcaaaacacta

SEQ ID NO: 614309 - DNA, 75 bp, synthetic construct
  source 1..75: mol_type = other DNA
ccgggaaaacatcactattcgtctggatggtcacatccagtccgttcagggtaaagagcgctatgaagatgaaat

SEQ ID NO: 614310 - DNA, 75 bp, synthetic construct
  source 1..75: mol_type = other DNA
gaggtgatcaacgtcttcaggggactgagctgggattacaaaaccaaatcctcctgtaaatttggcagtaaaatt

SEQ ID NO: 614311 - DNA, 75 bp, synthetic construct
  source 1..75: mol_type = other DNA
aagccatcacccgcaatcttgaccgcgaaatctggcgtgacctgatgcaacgttccgggatgctgtcattaatgg

SEQ ID NO: 614312 - DNA, 75 bp, synthetic construct
  source 1..75: mol_type = other DNA
tgggaccggtggggatttcatcttatcaccggacaacaggctgaccgactcgccgatctggaaagaatgttgtac

SEQ ID NO: 614313 - DNA, 75 bp, synthetic construct
  source 1..75: mol_type = other DNA
ggaaagaggattatgaagatgagatgttcagtatcagatactttaagaagggctccgcgtatatcacgttcagaa

SEQ ID NO: 614314 - DNA, 75 bp, synthetic construct
  source 1..75: mol_type = other DNA
accctgtaaatttggcagtaaaattatcgtcaacaatctggtgaggtgggaccggtgggggcttcatctgaacag

SEQ ID NO: 614315 - DNA, 75 bp, synthetic construct
  source 1..75: mol_type = other DNA
ttttccggaaatcagcgaagcgaatatcctgagcacgtttgaacaactgcaccagaacaaagatgaagtgtttga

SEQ ID NO: 614316 - DNA, 75 bp, synthetic construct
  source 1..75: mol_type = other DNA
cgttccgggatgctgagtctgatggatgcgcagacccgggacacatggtacaggtcactggaatatgataatttt

SEQ ID NO: 614317 - DNA, 75 bp, synthetic construct
  source 1..75: mol_type = other DNA
ctgttcagcggtaaaccaatccccgacaaccgggaaaacatcactattcgtctggatgatcacattcagtctgtt

SEQ ID NO: 614318 - DNA, 75 bp, synthetic construct
  source 1..75: mol_type = other DNA
tgacggcagagatctggtttggccgccgcttaggtcaggatgccgcgccagagaaactgggcgttgaccgcgcac

SEQ ID NO: 614319 - DNA, 75 bp, synthetic construct
  source 1..75: mol_type = other DNA
ccgacaactggctgaaatctcggtgctgacggaaagcatcggaagtaaaactgccccggactgggccatgaaaca

SEQ ID NO: 614320 - DNA, 75 bp, synthetic construct
  source 1..75: mol_type = other DNA
accctgtaaatttggcagtaaaattatcgtcaacaacctggtgaggtgggaccggtgggggtttcatcttatcac

SEQ ID NO: 614321 - DNA, 75 bp, synthetic construct
  source 1..75: mol_type = other DNA
aacaaattgccgcctgggcgcagattgacgaatctcgctggaaggagaaactcgcgaaatcacaagtgcgggttg

SEQ ID NO: 614322 - DNA, 75 bp, synthetic construct
  source 1..75: mol_type = other DNA
cccgacaaccgggaaaacatcactattcgtctggatggtcacatccagtccgttcagggtaaagagcgctatgaa

SEQ ID NO: 614323 - DNA, 75 bp, synthetic construct
  source 1..75: mol_type = other DNA
atgtcagacctcacaatctcccgtccggaactggtcaccgggcatacggacgttatttgctcaaccagtatccac

SEQ ID NO: 614324 - DNA, 75 bp, synthetic construct
  source 1..75: mol_type = other DNA
tgtaaatttggcagtaaaattatcgtcaacaatctggtgagatgggaccagtggggatttcatcttatcagtgga

SEQ ID NO: 614325 - DNA, 75 bp, synthetic construct
  source 1..75: mol_type = other DNA
agacggttcaggctgtacgcttacgcacatttgaacaactgcaccagaacaaagatgaagtgtttgaacggggag

SEQ ID NO: 614326 - DNA, 75 bp, synthetic construct
  source 1..75: mol_type = other DNA
atggagaaacctgaaaccgcaatgaaagccatcactcgcaatctcgatcgcgaaatctggcgtgacctgatgcaa

SEQ ID NO: 614327 - DNA, 75 bp, synthetic construct
  source 1..75: mol_type = other DNA
ggacgttatctgctccacctcagtcagccacatcctggctgtacgaaagagtacgctgctgcaaattgacacact

SEQ ID NO: 614328 - DNA, 75 bp, synthetic construct
  source 1..75: mol_type = other DNA
cactgcaacaaaccgaaatgcttatccgtcaactggctgaaatctcagcaatgacagaaagtattggcggtaaaa

SEQ ID NO: 614329 - DNA, 75 bp, synthetic construct
  source 1..75: mol_type = other DNA
tctgagcacatttgaacaactgcaccagaataaagatgaggtgtttgatcggggcgtgatcaacgtcttcatagg

SEQ ID NO: 614330 - DNA, 75 bp, synthetic construct
  source 1..75: mol_type = other DNA
tggtacttcaccggttttaacgaaccggaagcggtgctggtgctgattaaaagcgatgacactcataaccacagc

SEQ ID NO: 614331 - DNA, 75 bp, synthetic construct
  source 1..75: mol_type = other DNA
tcggcagcggtgaaaacggctgcattctgcactacaccgaaaacgagtgtgaaatgcgcgacggcgacctggtgt

SEQ ID NO: 614332 - DNA, 75 bp, synthetic construct
  source 1..75: mol_type = other DNA
aagcgatgacactcataaccacagcgttctgtttaaccgcgttcgcgacctgacggcggagatctggtttggccg

SEQ ID NO: 614333 - DNA, 75 bp, synthetic construct
  source 1..75: mol_type = other DNA
ccctgttgttcatgaaatgcgcctgttcaaatcgccagaagagattgccgtacttcgccgcgctggtgaaatcac

SEQ ID NO: 614334 - DNA, 75 bp, synthetic construct
  source 1..75: mol_type = other DNA
ctcaggcccagcgtgaaatctacgacattgtgctggagtctcttgaaaccagcctgcgcctgtatcgtccgggaa

SEQ ID NO: 614335 - DNA, 75 bp, synthetic construct
  source 1..75: mol_type = other DNA
tggtcaggatcgctcgcgtattctggaaccgggtatggttctgaccgtagaaccagggctgtatattgcgccgga

SEQ ID NO: 614336 - DNA, 75 bp, synthetic construct
  source 1..75: mol_type = other DNA
tctgagcacatttgaacaactgcaccagaagaacgatgaggtgtttgaacggggcgtgatcaacgtcttcatagg

SEQ ID NO: 614337 - DNA, 75 bp, synthetic construct
  source 1..75: mol_type = other DNA
tctgagcacatttgaacaactgcaccagaacaaggatgaggtgtttgaacggggcgtgatcaacgtcttcatagg

SEQ ID NO: 614338 - DNA, 75 bp, synthetic construct
  source 1..75: mol_type = other DNA
tctgagcacatttgaacaactgcaccagaataatgatgaggtgtttgagcggggcgtgatcaacgtcttcatagg

SEQ ID NO: 614339 - DNA, 75 bp, synthetic construct
  source 1..75: mol_type = other DNA
tgtttgaggacgctacactgataccttccgggttgaaagcggcattcctgaaagcgacagatgagctgatcgccg

SEQ ID NO: 614340 - DNA, 75 bp, synthetic construct
  source 1..75: mol_type = other DNA
ctgagtaataccgtcagttcttccaactataaaacgctggcgcagattggtatcacgaccgatcccagcgatggc

SEQ ID NO: 614341 - DNA, 75 bp, synthetic construct
  source 1..75: mol_type = other DNA
aagaacaatttacccaactggacgttttaatgacctcgttaaacagcacaagcagctacttaacgcagcagttcg

SEQ ID NO: 614342 - DNA, 75 bp, synthetic construct
  source 1..75: mol_type = other DNA
ctgcgccgcgctgcgggagctgaacaagcaccgggatattgttcgacagattactgattcttcccgccgtgttgt

SEQ ID NO: 614343 - DNA, 75 bp, synthetic construct
  source 1..75: mol_type = other DNA
gacattgtgcagccgttgccatcgtttaccgaaacgcaagcagatgagctgatttttccgtcccttcgcagggca

SEQ ID NO: 614344 - DNA, 75 bp, synthetic construct
  source 1..75: mol_type = other DNA
tcgtgcatcatgcgcctatacgactgagaattaaggcgaaaagctcctggtcaatgctggaatatgtcttcaacg

SEQ ID NO: 614345 - DNA, 75 bp, synthetic construct
  source 1..75: mol_type = other DNA
ttggcagcatcacccccgtggcgtttaaagcgtaccgcaacagctgctgaaattagtcagtttggcaatacactt

SEQ ID NO: 614346 - DNA, 75 bp, synthetic construct
  source 1..75: mol_type = other DNA
cgaatcatcggcatcaatatagtcagcgattgattgcacgatctcatcggtgtttccgcgatcgataccggcgtt

SEQ ID NO: 614347 - DNA, 75 bp, synthetic construct
  source 1..75: mol_type = other DNA
aacccgtggaagaaatacgaaccggcgaaagcatggtccgcatccactgtgtacgtgaaaggtgatcgcgttgtt

SEQ ID NO: 614348 - DNA, 75 bp, synthetic construct
  source 1..75: mol_type = other DNA
attgtggccgccctgatggcaatcgatgcgggactggagcggctgcggcatgcggtgctggaaaaagggggggat

SEQ ID NO: 614349 - DNA, 75 bp, synthetic construct
  source 1..75: mol_type = other DNA
gacggcgaggaaggtgaacagcgggcagtggtcttccggtgaccgggttcaggtggtggccgcactgatggccat

SEQ ID NO: 614350 - DNA, 75 bp, synthetic construct
  source 1..75: mol_type = other DNA
ggaggccagatcctgcctgcgcaacgcagagggaacagagcttgcggcagtaaccgaatttctggcgttcatttc

SEQ ID NO: 614351 - DNA, 75 bp, synthetic construct
  source 1..75: mol_type = other DNA
ctggatgtttccgggcttcgtgaacatcctgacgcggtgctgttcccgccgatacaccgtagcaataaggccagg

SEQ ID NO: 614352 - DNA, 75 bp, synthetic construct
  source 1..75: mol_type = other DNA
tcacaatgcggactgccgcaactatctgatgacaaaagcgtatccctggcgatgcggcgcatccggcgcgaagct

SEQ ID NO: 614353 - DNA, 75 bp, synthetic construct
  source 1..75: mol_type = other DNA
tggatgcggcagacctgcctggacgaaaagccggcacgttccggaaagcttccctcaatctcgccggcgctgctg

SEQ ID NO: 614354 - DNA, 75 bp, synthetic construct
  source 1..75: mol_type = other DNA
atgcagcattattatgacatcgttgataacctgaacctcagagtcctggacttcgatatcgaaggcacctgggtt

SEQ ID NO: 614355 - DNA, 75 bp, synthetic construct
  source 1..75: mol_type = other DNA
ttcttgatccggataaagtcacacccttagttgctgatgatggttctgttttttatcaaattagccctgaccaga

SEQ ID NO: 614356 - DNA, 75 bp, synthetic construct
  source 1..75: mol_type = other DNA
caaatattccgcagccggcagacggtaaaagtatcaccccggatgatgtgcgtccgatgcttgaacagatggtga

SEQ ID NO: 614357 - DNA, 75 bp, synthetic construct
  source 1..75: mol_type = other DNA
gagtccattgaactgttactggatgaggcgctggaaacgggggaaaacgagagtacagaatttgatgtcaccacg

SEQ ID NO: 614358 - DNA, 75 bp, synthetic construct
  source 1..75: mol_type = other DNA
tgccctgatgcaggggcagacttttgacaaatctgcatacccgaaacttgcagtcgcttatccgtcaggcgtgat

SEQ ID NO: 614359 - DNA, 75 bp, synthetic construct
  source 1..75: mol_type = other DNA
gaggcggtaagccatatccctgttccgcgcgacggtcgtgactatgatcccgatgttctgcagaaggcggtgaat

SEQ ID NO: 614360 - DNA, 75 bp, synthetic construct
  source 1..75: mol_type = other DNA
tggcagtttatatcggctttattttactgatcgccttcgcgcccggctggctgggcaccccgctgaatccgaaca

SEQ ID NO: 614361 - DNA, 75 bp, synthetic construct
  source 1..75: mol_type = other DNA
gtaaaaggcgttaaacctgcaccacttgatgcagtcagatttggttatggggcaataaaaaaattaattagctat

SEQ ID NO: 614362 - DNA, 75 bp, synthetic construct
  source 1..75: mol_type = other DNA
acaactgactttatccgacaattcctttacttcatgaacaaaaatagccatttgaagcaaatgaaagtctcagat

SEQ ID NO: 614363 - DNA, 75 bp, synthetic construct
  source 1..75: mol_type = other DNA
aacgacgcagcgcacaccattggatttcgcggcggaaaggcagaacgcgctaaagaaattcgcgccgcgctggaa

SEQ ID NO: 614364 - DNA, 75 bp, synthetic construct
  source 1..75: mol_type = other DNA
catcgaaagcagtgaaagcagctaatgacaatgcgaatggtcgggtaccttctgcccgtaaggtgaatggtaagg

SEQ ID NO: 614365 - DNA, 75 bp, synthetic construct
  source 1..75: mol_type = other DNA
tcaatgatatttatcaagcccatcttgttcatggaattaaaaatattgatctaatttctgtaagaaattccccgc

SEQ ID NO: 614366 - DNA, 75 bp, synthetic construct
  source 1..75: mol_type = other DNA
atttcttaagacaatttaacttttttattaataaaaatcagcatgttaaagaaatgagagtttcggatgttatga

SEQ ID NO: 614367 - DNA, 75 bp, synthetic construct
  source 1..75: mol_type = other DNA
gactcacccgaacgatcacatgtgaaaccaatcatcgttacatgtagcgataaaacatactacaacttacaaacg

SEQ ID NO: 614368 - DNA, 75 bp, synthetic construct
  source 1..75: mol_type = other DNA
tgatgaaacgaaactgttactggcatggaaaaaatatcgcgcactattgatgcgtgttgatataaaaaatacaga

SEQ ID NO: 614369 - DNA, 75 bp, synthetic construct
  source 1..75: mol_type = other DNA
tacagcaaagatcgcattcttgagctgtatatgaatgaggtgtatctcggtcagagcggcgacaacgaaattcgt

SEQ ID NO: 614370 - DNA, 75 bp, synthetic construct
  source 1..75: mol_type = other DNA
cgtctgctgcaacagcaacagattattgatcaagaactctatgacatgttgagtgcacgtccgctgggggttcag

SEQ ID NO: 614371 - DNA, 75 bp, synthetic construct
  source 1..75: mol_type = other DNA
gtcctgcaagatgtcgccccgcgttcttcatggcgggccagtaaagagtttcgtctgcatctcatccagacgatg

SEQ ID NO: 614372 - DNA, 75 bp, synthetic construct
  source 1..75: mol_type = other DNA
atttcagcgaattacgcctggcatttggtgttgccgcgccaacgccgattcgctgccaacatgccgaacagactg

SEQ ID NO: 614373 - DNA, 75 bp, synthetic construct
  source 1..75: mol_type = other DNA
cgcgctgcgaatcggctccgcgacaacatttactcagctcattgaagatcctgtaactcaacgtcatctcccggc

SEQ ID NO: 614374 - DNA, 75 bp, synthetic construct
  source 1..75: mol_type = other DNA
gttcagccgcgcggtggggtaatctctccacagccagcctttatgcaactggtgcgtcaggagctgcaggcgaaa

SEQ ID NO: 614375 - DNA, 75 bp, synthetic construct
  source 1..75: mol_type = other DNA
gcaaacgcggctggctatggctgctgctaaaactggctatcgtttttgccgtgctgatcgccatttacggcgttt

SEQ ID NO: 614376 - DNA, 75 bp, synthetic construct
  source 1..75: mol_type = other DNA
gccattccgtcgtatatggtcggcgcgattgtcggctcaaccgccgctgtctggctgggcgcagtgcaatggttc

SEQ ID NO: 614377 - DNA, 75 bp, synthetic construct
  source 1..75: mol_type = other DNA
gaaaacagggactaccaacaacaacgttgatacctggtttgcgggcattgacggcagcacggtgaccatcacctg

SEQ ID NO: 614378 - DNA, 75 bp, synthetic construct
  source 1..75: mol_type = other DNA
gtgcgatggtcggaggttctgagccgcagtttgcgggctacaaccgtgcgatgcaggcgcgtcgttcgattggtt

SEQ ID NO: 614379 - DNA, 75 bp, synthetic construct
  source 1..75: mol_type = other DNA
accgtcatttctacgagcatgatgggatcagtctctactcaatcggacgtgcggtgctggcaaacctgaccgccg

SEQ ID NO: 614380 - DNA, 75 bp, synthetic construct
  source 1..75: mol_type = other DNA
gttatgtgctgcggcttcgtcaattgccgggccgcagatccgtaacgtcgcgacctacggtggaaatatttgcaa

SEQ ID NO: 614381 - DNA, 75 bp, synthetic construct
  source 1..75: mol_type = other DNA
ctggaggtcaaattaccgcactctcccgcccggttcttcgacgatggctttacccgcaagctgttgtggaaagat

SEQ ID NO: 614382 - DNA, 75 bp, synthetic construct
  source 1..75: mol_type = other DNA
aaaaaacgctcggcagtcgagaggcattggcgcgtcaatatcaacagctgacccgtaaccttggattgccgtctg

SEQ ID NO: 614383 - DNA, 75 bp, synthetic construct
  source 1..75: mol_type = other DNA
cagcgaagaacagctccagtcacagcttgatttgcaaaaaaaggtggttagcgactgtatgcagcgttatctcca

SEQ ID NO: 614384 - DNA, 75 bp, synthetic construct
  source 1..75: mol_type = other DNA
acgctttgtgaattgttaagaagtaaaccgctgttgctggtgctgagaaaagcgcgcttgaacatatccagagaa

SEQ ID NO: 614385 - DNA, 75 bp, synthetic construct
  source 1..75: mol_type = other DNA
aacaaattgatttcgatagcatcgatgttcccggcgcgaagagccaactggacgcgctcagggagcggctggaaa

SEQ ID NO: 614386 - DNA, 75 bp, synthetic construct
  source 1..75: mol_type = other DNA
ttgtgttgacagccctgaacaactgcgtgacacgcctcatgctatgacggtgcagggattaatgtctggtaaaca

SEQ ID NO: 614387 - DNA, 75 bp, synthetic construct
  source 1..75: mol_type = other DNA
attaaagtcgcggtcgtgggcgcaatgtccggtccggtggcccagtacggtgaccaggagtttactggtgctgag

SEQ ID NO: 614388 - DNA, 75 bp, synthetic construct
  source 1..75: mol_type = other DNA
agaaggtgatgagtgccttatcgtattctcttcgcgttcgattgatttctggtggcaaaacggcggtgtgcagga

SEQ ID NO: 614389 - DNA, 75 bp, synthetic construct
  source 1..75: mol_type = other DNA
ggcataacatcaccgttaaaacgccgggcaagcttacggctacggctgagggtggaacgacaatcacatccccga

SEQ ID NO: 614390 - DNA, 75 bp, synthetic construct
  source 1..75: mol_type = other DNA
tgaaaccgcagcgtattgctatcgttcatgacaaacagcagtacggtgaaggtctggcgcgtgcggtgcaggacg

SEQ ID NO: 614391 - DNA, 75 bp, synthetic construct
  source 1..75: mol_type = other DNA
gtcaggcacgcgcggcagggttgaaaactcagtttatggggccggaaggtgtggctaacgtttcgctgtctaaca

SEQ ID NO: 614392 - DNA, 75 bp, synthetic construct
  source 1..75: mol_type = other DNA
aactcagtttatggggccggaaggtgtggctaacgtctcgctgtctaatatcgcgggcgagtcagcggaaggact

SEQ ID NO: 614393 - DNA, 75 bp, synthetic construct
  source 1..75: mol_type = other DNA
atgagcgcaaaaggttgctgctacgataatgcctgcgtggaaagcttctttcattcgctgaaagtggaatgtatc

SEQ ID NO: 614394 - DNA, 75 bp, synthetic construct
  source 1..75: mol_type = other DNA
cgctgaaagtggaatgtatccatggagaacactttatcagccgggaaataatgcgggcaacggtgtttaattata

SEQ ID NO: 614395 - DNA, 75 bp, synthetic construct
  source 1..75: mol_type = other DNA
tctggattggcggcgagacaaacgagacggtaaccaaaacgactcaacgcatcctgtgcggtcgtattgaagaga

SEQ ID NO: 614396 - DNA, 75 bp, synthetic construct
  source 1..75: mol_type = other DNA
atgcagaataaacccacgcctgaagaagtaaaaaatgcacgggttgcagcaggtcttactcttaaagaagctgct

SEQ ID NO: 614397 - DNA, 75 bp, synthetic construct
  source 1..75: mol_type = other DNA
tctatcacgcgtcaactacagatcgagcagatgggaagcgctcatcgtggcatactcagcaattctcgcgggcga

SEQ ID NO: 614398 - DNA, 75 bp, synthetic construct
  source 1..75: mol_type = other DNA
cgttcgtgctgctattgccgatggcgcgaaaccgtcagatctgaatcgtccgggccacgttttcccacttcgcgc

SEQ ID NO: 614399 - DNA, 75 bp, synthetic construct
  source 1..75: mol_type = other DNA
ccggatgaaaccctctcttaaccgtgaattttatatccggtttgcggcagagtttggttatgaaatagatattca

SEQ ID NO: 614400 - DNA, 75 bp, synthetic construct
  source 1..75: mol_type = other DNA
gcgtgtttcctggaccggtaaccagatgctggcagaacgttttcctgattcatcccgtctgctgctggaagactg

SEQ ID NO: 614401 - DNA, 75 bp, synthetic construct
  source 1..75: mol_type = other DNA
gtgaaaccggctaccggaatatgaatgtgctggatgatattctcacgccgctgcgtatttatgaaggcggtgcgc

SEQ ID NO: 614402 - DNA, 75 bp, synthetic construct
  source 1..75: mol_type = other DNA
gatggtcgcttcaaggtattcaacacctgtgaaccattctttgaggaattccgcctctatcaccgtgatgaaaac

SEQ ID NO: 614403 - DNA, 75 bp, synthetic construct
  source 1..75: mol_type = other DNA
gcataaagtgccaacagcatggcctcatgacggaaaccagcacgagaagggcggcggtgagcagctcaaagggca

SEQ ID NO: 614404 - DNA, 75 bp, synthetic construct
  source 1..75: mol_type = other DNA
gcggtgagcagctcaaagggcagtatgcagacgctggttttatgatgttgcaggagcatgcgacatggcctgatg

SEQ ID NO: 614405 - DNA, 75 bp, synthetic construct
  source 1..75: mol_type = other DNA
gttccggcgaacaaacccattgttgacgcgatcaaagcgaaaaaacaggacccaagcggcgcgttcgtctggacc

SEQ ID NO: 614406 - DNA, 75 bp, synthetic construct
  source 1..75: mol_type = other DNA
gcgcaggggcgcgaccagaagtgaaaaaagagttggcggtgctgctgcgtccgcaggtgttatcggctttactga

SEQ ID NO: 614407 - DNA, 75 bp, synthetic construct
  source 1..75: mol_type = other DNA
gctgggctgggatacagctttgtgccggtgatgggagcgattgtcgcgggactggcattattgctggtgtttatg

SEQ ID NO: 614408 - DNA, 75 bp, synthetic construct
  source 1..75: mol_type = other DNA
tgatgacattattactttctcatcgtgcccgccgcagcgcgctaattttcctgatggcgatttttacccttggta

SEQ ID NO: 614409 - DNA, 75 bp, synthetic construct
  source 1..75: mol_type = other DNA
gcaaactggatttgcccctatatttccagacatctgttatcacttaacccattacaagcccgctgccgcagatat

SEQ ID NO: 614410 - DNA, 75 bp, synthetic construct
  source 1..75: mol_type = other DNA
gatgaattcatcataggtattgagcataaagttttggctgatacatataatccttttcccagctatgtaagtctc

SEQ ID NO: 614411 - DNA, 75 bp, synthetic construct
  source 1..75: mol_type = other DNA
aagtatcaattactgggaaggggaaagtgcttgaactgagtttttgggggaacaccagaagcaaaaaagatgcac

SEQ ID NO: 614412 - DNA, 75 bp, synthetic construct
  source 1..75: mol_type = other DNA
cgaaagcagtaaaggccgcgtatgatcttgctaacgggaaatatactgcgcaggatgccaccacagcgcgaaaag

SEQ ID NO: 614413 - DNA, 75 bp, synthetic construct
  source 1..75: mol_type = other DNA
tgacggaaccgcaacagacgcaaacgggaatgaggttagcaacacaataaccgtatataccgaactgcttcacaa

SEQ ID NO: 614414 - DNA, 75 bp, synthetic construct
  source 1..75: mol_type = other DNA
ctccgaccaggggccgacggcggcgaaatatattcttgagaaagtgaaaccgcagcgtattgctatcgttcacga

SEQ ID NO: 614415 - DNA, 75 bp, synthetic construct
  source 1..75: mol_type = other DNA
gctggtgctgattggtgtcggattctctattggtaactatctcggcggcaaactggcagatcgttcagttaacgg

SEQ ID NO: 614416 - DNA, 75 bp, synthetic construct
  source 1..75: mol_type = other DNA
gttggcgtaatggtgggcgcgccgctgatgacgcttctactttctcatcgtgcccgccgcagtgcgttgattttc

SEQ ID NO: 614417 - DNA, 75 bp, synthetic construct
  source 1..75: mol_type = other DNA
ttgtctgaattgtataacatgcagcatgtgagtcagataacccgtcatatctgtgttgaaggatggagtgcaata

SEQ ID NO: 614418 - DNA, 75 bp, synthetic construct
  source 1..75: mol_type = other DNA
tggctggtaaccagcttggtaagtcatttactggtgctgctgaagtcgcgtttcaccttaccgggcgttatccgg

SEQ ID NO: 614419 - DNA, 75 bp, synthetic construct
  source 1..75: mol_type = other DNA
cctctacagtccggcagaaatgctgacgctgccgaaggaggagaaacggcttccggcgcaggtgttcagcgagca

SEQ ID NO: 614420 - DNA, 75 bp, synthetic construct
  source 1..75: mol_type = other DNA
gccatgtggcgctggagtgggtgatgcgctatctgcgcgatgtgcggcctcacctgacgcaacgcgccgacagcg

SEQ ID NO: 614421 - DNA, 75 bp, synthetic construct
  source 1..75: mol_type = other DNA
cagacgtggacttcacgcgcggcgtggtgaacgtgcggcagggcaaggggaagaaggatcgggttgtgccggtgg

SEQ ID NO: 614422 - DNA, 75 bp, synthetic construct
  source 1..75: mol_type = other DNA
gtgcgtccgatgcttgagcagatggtgaaagaggccgtaagccatatccctgctccgcgtgacggtcgtgattac

SEQ ID NO: 614423 - DNA, 75 bp, synthetic construct
  source 1..75: mol_type = other DNA
acgctgccgaaggaagaaaaacggcttccggcgcaggtgttcagcgaacaggagacgcggcaggtgctggggagt

SEQ ID NO: 614424 - DNA, 75 bp, synthetic construct
  source 1..75: mol_type = other DNA
acgccacgtcatcctctacagtccggcagagatgctgacgctgccgaaggaagaaaaacggcttccggcgcaggt

SEQ ID NO: 614425 - DNA, 75 bp, synthetic construct
  source 1..75: mol_type = other DNA
aaatagccgcgcaggcacaaacgtttgaagaaaaactggcgtccctgtctgtggtattacagaagtgcgtgacgg

SEQ ID NO: 614426 - DNA, 75 bp, synthetic construct
  source 1..75: mol_type = other DNA
tccgtgcactgggcgaagaattcgccgcggtgataacggatttacagcgtacatttgaagaaaagatggccgcgc

SEQ ID NO: 614427 - DNA, 75 bp, synthetic construct
  source 1..75: mol_type = other DNA
ctggaaatactccccgccattgacgatcaaaaatcctttccccggggcacgtatgccacacaccagggcggactc

SEQ ID NO: 614428 - DNA, 75 bp, synthetic construct
  source 1..75: mol_type = other DNA
ggggcacgtatgccacacaccagggcggactctggcgggcgtatgaaaaaacgcacgggatgcggggatgggaat

SEQ ID NO: 614429 - DNA, 75 bp, synthetic construct
  source 1..75: mol_type = other DNA
cactgcaacagtatgaccggtgataaacccggagaagctcattcatcaggctgggccctggctgcaaaacgtggg

SEQ ID NO: 614430 - DNA, 75 bp, synthetic construct
  source 1..75: mol_type = other DNA
gcggtattacagaagcatgtgacggtggatgaggtgcgtccggttctgcaggcgatggtggatgacgctgtgggg

SEQ ID NO: 614431 - DNA, 75 bp, synthetic construct
  source 1..75: mol_type = other DNA
aacgtgaaaaagatgatccgcagagctcaacgaccgccaggaccggagaaacgccgcgtattgaaggattcacca

SEQ ID NO: 614432 - DNA, 75 bp, synthetic construct
  source 1..75: mol_type = other DNA
ccggtcgattccatcgaacgtattgaagtggttcgtggcccgatgtcgtcgctatacggctccgatgcgctcggc

SEQ ID NO: 614433 - DNA, 75 bp, synthetic construct
  source 1..75: mol_type = other DNA
cgggtaatgggatttttggttttcccgctgattgcctacttcttatttctttccatctacctggtcggtagctgg

SEQ ID NO: 614434 - DNA, 75 bp, synthetic construct
  source 1..75: mol_type = other DNA
tccgtttggtaagtacaaaaaaacctactttcctgctgatgaaatccgcgcttttgcagaaaaagcgaaacgtgc

SEQ ID NO: 614435 - DNA, 75 bp, synthetic construct
  source 1..75: mol_type = other DNA
gtttccgggccgcgctgctgggtgggatttgattattcgcgtggcgtggatagttctgccgtgtacggagtacgt

SEQ ID NO: 614436 - DNA, 75 bp, synthetic construct
  source 1..75: mol_type = other DNA
gtggtttatgtcgctataacaagagcgggcatttcaacattccctacggcaattataaaaatccgtatttccctg

SEQ ID NO: 614437 - DNA, 75 bp, synthetic construct
  source 1..75: mol_type = other DNA
caataaacacaatatggcgctcgtgactattgaagacttggtggcataccgtcaggcacatgagcgtaaagccag

SEQ ID NO: 614438 - DNA, 75 bp, synthetic construct
  source 1..75: mol_type = other DNA
taaccgcgcttattctcttctctgcgcagagctttgcggaacaaaccacgcagccggttgttacttcctgtggca

SEQ ID NO: 614439 - DNA, 75 bp, synthetic construct
  source 1..75: mol_type = other DNA
gaaaaaaccagaaatcaggacgtgacgtaagagaagtgggctggaccagcctgtttcaggcggtggctgagcctt

SEQ ID NO: 614440 - DNA, 75 bp, synthetic construct
  source 1..75: mol_type = other DNA
tgaggcagaaaaacagcgggcaaaggatctgtttatggaaaatgctcggcttaagtcaggtatagccggtctgat

SEQ ID NO: 614441 - DNA, 75 bp, synthetic construct
  source 1..75: mol_type = other DNA
ggcggccatactgaagcaactattgatctaatgacgctggcaggctttaaaccggctggtgtgctgtgtgagctg

SEQ ID NO: 614442 - DNA, 75 bp, synthetic construct
  source 1..75: mol_type = other DNA
cgcctgctgggaattaccgacgcccgtaccgtcactctgtaccatccacagggctgtcccgcctgtaatcacaaa

SEQ ID NO: 614443 - DNA, 75 bp, synthetic construct
  source 1..75: mol_type = other DNA
gtcaggggcagtggttgcccgtttccgcgacccggttatcggcacaggttacggtgccaaaacaggtgcagatgc

SEQ ID NO: 614444 - DNA, 75 bp, synthetic construct
  source 1..75: mol_type = other DNA
ctctgtaccatccgcagggctgccccgcctgtaatcacaaaggttttcgcggacgtactgccatccatgagctga

SEQ ID NO: 614445 - DNA, 75 bp, synthetic construct
  source 1..75: mol_type = other DNA
atggaatgtcaaaaccgttctgataaatacatctggtctccccatgacgcctacttctataaaggactatctgaa

SEQ ID NO: 614446 - DNA, 75 bp, synthetic construct
  source 1..75: mol_type = other DNA
gtgcgcgccacgacatttccatcgcgctgcgctatccacattgagacgtttgaaaagagtctggtgatccgtttt

SEQ ID NO: 614447 - DNA, 75 bp, synthetic construct
  source 1..75: mol_type = other DNA
gttgacggcacattacatgaaatgctgcgtccggggcgcaaactggcctcgctgctggtatcgcgtatcaaggtg

SEQ ID NO: 614448 - DNA, 75 bp, synthetic construct
  source 1..75: mol_type = other DNA
tggagctggaacgttatgtccggcaacactctgcgggtagccgagcgtggggagaatattcaggtctggatagat

SEQ ID NO: 614449 - DNA, 75 bp, synthetic construct
  source 1..75: mol_type = other DNA
cctttcctgctctcttccagtctgacgggcgtgatggcgcagcgactggttcgcacgctgtgtcccgactgccgc

SEQ ID NO: 614450 - DNA, 75 bp, synthetic construct
  source 1..75: mol_type = other DNA
catacgctgtacagtgaaaacctgtacgacaaaaacttcctcgctaactactgtgtgggttttgagcagttcctg

SEQ ID NO: 614451 - DNA, 75 bp, synthetic construct
  source 1..75: mol_type = other DNA
gtttaagtctcgaactgactgcgcagttgcgccagctgttacacaaaccgcacggcatttttctggtgacggggc

SEQ ID NO: 614452 - DNA, 75 bp, synthetic construct
  source 1..75: mol_type = other DNA
cagcgggactcttccgaggcccgccagctgatggaagatctcggttctgctgaggacttttttactctcgcggaa

SEQ ID NO: 614453 - DNA, 75 bp, synthetic construct
  source 1..75: mol_type = other DNA
acgctgcataccaacacggcggtgggggcgatcacacgtttgcaggatatgggcgtggagcctttcctgctctct

SEQ ID NO: 614454 - DNA, 75 bp, synthetic construct
  source 1..75: mol_type = other DNA
gagctgctactggagctgatgctgctggctgacgtcggtatgttggggatgccaaacgcgggtaaatcgaccttt

SEQ ID NO: 614455 - DNA, 75 bp, synthetic construct
  source 1..75: mol_type = other DNA
tggtaccgtcagcatcatgctgacagcaactggtatgaaaacgtgtatgaggacttcagggcggtctgtgacatt

SEQ ID NO: 614456 - DNA, 75 bp, synthetic construct
  source 1..75: mol_type = other DNA
cacaattggtatcgctcagaacgtgaaggctgttaatgttcagacggctattgctgcggtgagaagcgaatcatc

SEQ ID NO: 614457 - DNA, 75 bp, synthetic construct
  source 1..75: mol_type = other DNA
atacgctggatgaactttcctgcccggcacgggaaaaagcccgcgactggtaccgtcagcatcatgctgacagca

SEQ ID NO: 614458 - DNA, 75 bp, synthetic construct
  source 1..75: mol_type = other DNA
aaacttgagcaatattttgaccgaatcaaccaggtctatgttgttctgaaagtggagaaagtcacccacacctca

SEQ ID NO: 614459 - DNA, 75 bp, synthetic construct
  source 1..75: mol_type = other DNA
atgagcagaattatcatcaccaccgtgtatacgccggatgaactttccgccacagcacgggagaaggcccgtgaa

SEQ ID NO: 614460 - DNA, 75 bp, synthetic construct
  source 1..75: mol_type = other DNA
ggggacgttactgccatccgtactgcatggatatcaccgtcacccggaacagtccgactggtcaggctatgacaa

SEQ ID NO: 614461 - DNA, 75 bp, synthetic construct
  source 1..75: mol_type = other DNA
gagaacctgaacacgcttatcgattatcgttttgaaaaatctttccgtgcagagcgcggtcagaacggcgcaagc

SEQ ID NO: 614462 - DNA, 75 bp, synthetic construct
  source 1..75: mol_type = other DNA
agcgaaacagccagagaaagtcgaattcatgtgggatgattatcaccgtcagcagcttgaagagattgctgaaga

SEQ ID NO: 614463 - DNA, 75 bp, synthetic construct
  source 1..75: mol_type = other DNA
tggctgacgtcggtatgctggggatgccaaatgcgggtaaatcgacatttattcgcgctgtctcggcggctaaac

SEQ ID NO: 614464 - DNA, 75 bp, synthetic construct
  source 1..75: mol_type = other DNA
ttctggtcgttgcaggtgatggcggtaatggttgcgtgagcttccgccgcgaaaaatatattccgaaaggcggcc

SEQ ID NO: 614465 - DNA, 75 bp, synthetic construct
  source 1..75: mol_type = other DNA
aagacgtgacgattaaagtgccggtaggtacgcgtgtaatcgaccagggtactggtgaaaccatgggcgatatga

SEQ ID NO: 614466 - DNA, 75 bp, synthetic construct
  source 1..75: mol_type = other DNA
agagcgcggtcagaatggcgcaagccgcgactgtaccggtaagcgcggtaaagacgtgacgattaaagtgccggt

SEQ ID NO: 614467 - DNA, 75 bp, synthetic construct
  source 1..75: mol_type = other DNA
taaatcggtaaaactgccgccgctgaaaatgtgtatttttgccggaactaacccgttccatcgccatcagcagat

SEQ ID NO: 614468 - DNA, 75 bp, synthetic construct
  source 1..75: mol_type = other DNA
gatccgcgcgcagcaggcgaaactgcttggtttccctcattatgccgcatggaaaatcgccgatcagatggcaaa

SEQ ID NO: 614469 - DNA, 75 bp, synthetic construct
  source 1..75: mol_type = other DNA
ggcaatagcgaagatttagaacgcttgtatcgccactggcgcggtaaagccccccatattacgccgatgctgcaa

SEQ ID NO: 614470 - DNA, 75 bp, synthetic construct
  source 1..75: mol_type = other DNA
ccggtgagcctgcgttgttactctgggatgatgtaataaccttattccatgaatttggtcatacgctgcacggcc

SEQ ID NO: 614471 - DNA, 75 bp, synthetic construct
  source 1..75: mol_type = other DNA
tataagatctaccgtgaaggctttaccggactggatctggcttcgtctgccgcgcagtcggtggtgttgatgttc

SEQ ID NO: 614472 - DNA, 75 bp, synthetic construct
  source 1..75: mol_type = other DNA
cgccgcttctttaagattgcgctgccgcttatcgccccggtgagtttcttcctgctggtggtgaacctggtgtat

SEQ ID NO: 614473 - DNA, 75 bp, synthetic construct
  source 1..75: mol_type = other DNA
tgtatggcgcactgggcgcccggttcgggcgcgtgcataaactggcagtgcagacatctgccgaagcggtcaaag

SEQ ID NO: 614474 - DNA, 75 bp, synthetic construct
  source 1..75: mol_type = other DNA
cagcagggcgggtttagcgcgcagccgtgggactgggcattttatgcggaacaggtacggcgggagaaatttgat

SEQ ID NO: 614475 - DNA, 75 bp, synthetic construct
  source 1..75: mol_type = other DNA
gtcaacgtgcgagcgatgaattagcgtctatacaggcggttatcgataatcagcagggcgggttcagcgcccagc

SEQ ID NO: 614476 - DNA, 75 bp, synthetic construct
  source 1..75: mol_type = other DNA
ctcggtggggttattcagctgctttcaccgcagccatcaggcatagccagtaaacaaagcgcagataaccgtgca

SEQ ID NO: 614477 - DNA, 75 bp, synthetic construct
  source 1..75: mol_type = other DNA
ttcgaattgcgggcgctggtggcggaaaatatggatcttcctgctataccgccacgctatcgcagcagttatttc

SEQ ID NO: 614478 - DNA, 75 bp, synthetic construct
  source 1..75: mol_type = other DNA
cgtgggactgggcattttatgccgagcaggtaagacgtgagaaattcgatctcgatgaagcgcagctcaagcctt

SEQ ID NO: 614479 - DNA, 75 bp, synthetic construct
  source 1..75: mol_type = other DNA
tccccattttgatctgattgagaataaccactatcgcccggcattcgacgaagggatgcggcaaaagcggattga

SEQ ID NO: 614480 - DNA, 75 bp, synthetic construct
  source 1..75: mol_type = other DNA
tggatcttcctgtttaaccccggtcgcgggctgatcacccattttctcgctgagttcggctacgactggaaccac

SEQ ID NO: 614481 - DNA, 75 bp, synthetic construct
  source 1..75: mol_type = other DNA
ggcaaaggacgcggcgttcatctgccagcgtttgatgacttctggaataacaaagagtatgtcgagtttgaccat

SEQ ID NO: 614482 - DNA, 75 bp, synthetic construct
  source 1..75: mol_type = other DNA
aggcatcacgtcggcgttttctgacacaactcggcggtttagcgctggccgggatgctgggaccatcgctgctga

SEQ ID NO: 614483 - DNA, 75 bp, synthetic construct
  source 1..75: mol_type = other DNA
agataaaggcggcgagcctggtgcgctgtgcaaatacggtaaccccaacgtgttgaccatcgacatcggtacttc

SEQ ID NO: 614484 - DNA, 75 bp, synthetic construct
  source 1..75: mol_type = other DNA
atctgtacgacaaaaacttcctcaccaactactgcgtgggctttgagcagttcctaccgtatctgctgggcgaga

SEQ ID NO: 614485 - DNA, 75 bp, synthetic construct
  source 1..75: mol_type = other DNA
ccgagcgccctgttgactgccagcggttggcaatcgacggggatgttccacaatgcttccggtatgttggcgaaa

SEQ ID NO: 614486 - DNA, 75 bp, synthetic construct
  source 1..75: mol_type = other DNA
ttgaggcagggatggaaaccagtggcaatttcaacgaatcggcagatcatctggcgatctatctcgagttgttga

SEQ ID NO: 614487 - DNA, 75 bp, synthetic construct
  source 1..75: mol_type = other DNA
cggtcgcaataactgggtgttttacgaacccaacatgggcgagtacttaattcagcgccgggaaatggaaaaaga

SEQ ID NO: 614488 - DNA, 75 bp, synthetic construct
  source 1..75: mol_type = other DNA
ccggttcgctgaaactgggcaccattcatgcttcagaactcattcgctctttgctgaaaagctcgcgcccatcag

SEQ ID NO: 614489 - DNA, 75 bp, synthetic construct
  source 1..75: mol_type = other DNA
gtggataaatcggcaaattacggtgcactggacgaactggcacgtggttgtgctgatctgtcgaaagccgaggat

SEQ ID NO: 614490 - DNA, 75 bp, synthetic construct
  source 1..75: mol_type = other DNA
cgacggggatgttccataacgcttcggggatgctggcgaaagctattgccttgcatggtaatagcgttggtacgg

SEQ ID NO: 614491 - DNA, 75 bp, synthetic construct
  source 1..75: mol_type = other DNA
ttggtacgggcggagattactctaccggtgctgcgcaggtgatcctgccgcgcgtggttggctcaatggaagtgt

SEQ ID NO: 614492 - DNA, 75 bp, synthetic construct
  source 1..75: mol_type = other DNA
gtcgagtttgaccatccgcagatgtttgttcgccaccaggcattccgcgaagatccggatctcgaaccgctgggc

SEQ ID NO: 614493 - DNA, 75 bp, synthetic construct
  source 1..75: mol_type = other DNA
atattctgattgcctgtgtagatagtctgacagggttcccggaagcgataaacagcatttaccccgatacagaag

SEQ ID NO: 614494 - DNA, 75 bp, synthetic construct
  source 1..75: mol_type = other DNA
agcgtacttccgctatccggcgaatatccgcaaggtgatctacacaaccaacgcgatagaatcagtccaccgcca

SEQ ID NO: 614495 - DNA, 75 bp, synthetic construct
  source 1..75: mol_type = other DNA
cgaagaacgctttcagacggtggacggcttcgcggcagattattactaccgttgtgcagtgatggcggcaacgct

SEQ ID NO: 614496 - DNA, 75 bp, synthetic construct
  source 1..75: mol_type = other DNA
tagttgggtcgcagcttctgtcggctctcttctagataaaggagcaaaagtatatcccgatacatcatgctctct

SEQ ID NO: 614497 - DNA, 75 bp, synthetic construct
  source 1..75: mol_type = other DNA
ccagatatatcatgctctctgagactgggagaaccattcattattacacttccagaaacagtcaggctggatgtt

SEQ ID NO: 614498 - DNA, 75 bp, synthetic construct
  source 1..75: mol_type = other DNA
aaacaaaaggcgctttcccgaatgaaaacagtctgttgaaattactgtatctggggtcaatgaatgcgcaggaaa

SEQ ID NO: 614499 - DNA, 75 bp, synthetic construct
  source 1..75: mol_type = other DNA
gtgatggcaataactactatagtattgtagatcgtaataacgcgccgaaccttgactttcatataccaagactaa

SEQ ID NO: 614500 - DNA, 75 bp, synthetic construct
  source 1..75: mol_type = other DNA
agctaggcggtagcgatcccgcggcgctggcgcagtgtgcgaagctggcagaagcacgtggatacgatgagatca

SEQ ID NO: 614501 - DNA, 75 bp, synthetic construct
  source 1..75: mol_type = other DNA
atgcacgaaaataaagaatcgcacaacccacaccagaacagcgttaacagaggaaaaacgccgggatacagccct

SEQ ID NO: 614502 - DNA, 75 bp, synthetic construct
  source 1..75: mol_type = other DNA
atgccggttatagcggaactaatatgacgggcgggaaaggtgctgctggaatttgtattatcgaggagtttgcat

SEQ ID NO: 614503 - DNA, 75 bp, synthetic construct
  source 1..75: mol_type = other DNA
atgctggcggagttccagaaggtcaacgcgcagtatcagggcgcagaccgcgtgaaagcgctgctgggcctgagc

SEQ ID NO: 614504 - DNA, 75 bp, synthetic construct
  source 1..75: mol_type = other DNA
ttcctggcatacctcggttacctcggcggctatgaaaccattgccgacaccatgactaacccggattatcgcaaa

SEQ ID NO: 614505 - DNA, 75 bp, synthetic construct
  source 1..75: mol_type = other DNA
gcgaatgggatgagcgcgatatggtgggctttgcccgcctgatggcggcgcatcgtcatgaaatcgcggcggtga

SEQ ID NO: 614506 - DNA, 75 bp, synthetic construct
  source 1..75: mol_type = other DNA
gaatgccgtcagcaaatctgccagtgcgttcaacaccgacaagctgctgtggctgaaccatcactacattaacgc

SEQ ID NO: 614507 - DNA, 75 bp, synthetic construct
  source 1..75: mol_type = other DNA
atttgccagaagcactgctgaactatctggtgcgtctgggctggtcccacggcgatcaggaaatcttcactcgtg

SEQ ID NO: 614508 - DNA, 75 bp, synthetic construct
  source 1..75: mol_type = other DNA
cccgcttttactcattcacggtaaagctgatcacgttatccatggcagcacagcgaaaagttgtatagcctggca

SEQ ID NO: 614509 - DNA, 75 bp, synthetic construct
  source 1..75: mol_type = other DNA
aaagaacgaagttccgatattcgaccgggaatagcctatgttcatgcttttcttgataatctggaaaagatcggg

SEQ ID NO: 614510 - DNA, 75 bp, synthetic construct
  source 1..75: mol_type = other DNA
ttgtgctttgtgggatctggcggcgcgtaaacagcagcgatcgctggctgatttgattggcataacgcttcccga

SEQ ID NO: 614511 - DNA, 75 bp, synthetic construct
  source 1..75: mol_type = other DNA
gtgaagagatgatcaaatacttcactttgaatgccgtcagcaaatctgccagtgcgttcaacaccgacaagctgc

SEQ ID NO: 614512 - DNA, 75 bp, synthetic construct
  source 1..75: mol_type = other DNA
ggtggtggattttaccggacggctgatgtcggtactggcagatggtgtgctggtggcgatggcgctggtcgtgct

SEQ ID NO: 614513 - DNA, 75 bp, synthetic construct
  source 1..75: mol_type = other DNA
atgtcgatactggcagatggtgtactggtggccggagtggttgcactgctctggcctttactgcgcaaatctgaa

SEQ ID NO: 614514 - DNA, 75 bp, synthetic construct
  source 1..75: mol_type = other DNA
aggatgcagggctctggcgcagggcatctgctcgttggctggttgtaatggggcacagtgaatacacagcggcac

SEQ ID NO: 614515 - DNA, 75 bp, synthetic construct
  source 1..75: mol_type = other DNA
gccatcaatgtggtgcgccatcgcagtgatgtaaacccacaacgtctggtgctgttcgggcagagtattggcggg

SEQ ID NO: 614516 - DNA, 75 bp, synthetic construct
  source 1..75: mol_type = other DNA
tccacttttactgattcacggtaaagccgatcacgttatcccgtggcagcacagcgaaaaattgtataacctggc

SEQ ID NO: 614517 - DNA, 75 bp, synthetic construct
  source 1..75: mol_type = other DNA
ctttttccgatcgtcacggtgatgtttatcgcgaacaaatagtggattttatccttagcacgttgaatccgcaca

SEQ ID NO: 614518 - DNA, 75 bp, synthetic construct
  source 1..75: mol_type = other DNA
cagctggttgccgactgcgtgaaagcgatgcgcgatgtggtgtcgattccggtgacggtgaaaacgcgtattggc

SEQ ID NO: 614519 - DNA, 75 bp, synthetic construct
  source 1..75: mol_type = other DNA
gtgaccttcatcgtatcgcggatgccctgcaggcggtacagaaacgtaacttctggcagttacaggctgaaatca

SEQ ID NO: 614520 - DNA, 75 bp, synthetic construct
  source 1..75: mol_type = other DNA
gtgatctacatcgtatcgcggatgccctgcaggcggtgcagaaacgtaacttctggcagttacaggctgaaatca

SEQ ID NO: 614521 - DNA, 75 bp, synthetic construct
  source 1..75: mol_type = other DNA
gtgaactacatcgtatcgcggatgccctgcaggcggttcagaaacgtaacttctggcagttacaggctgaaatca

SEQ ID NO: 614522 - DNA, 75 bp, synthetic construct
  source 1..75: mol_type = other DNA
gtaagtcctcagtattagacaaaggtctatattatgtttataccaaaaaaagtaattctgatgttaaccttctta

SEQ ID NO: 614523 - DNA, 75 bp, synthetic construct
  source 1..75: mol_type = other DNA
tatcctcaaaaacttcacaaagagctggacaaaataacaatacttcagaaaagtacgattttgaaaaaaaatatc

SEQ ID NO: 614524 - DNA, 75 bp, synthetic construct
  source 1..75: mol_type = other DNA
aagcttgttaagcaactgactggttatgaatatgaccagtgcttcggtaataacaatgttggctttaaatttgaa

SEQ ID NO: 614525 - DNA, 75 bp, synthetic construct
  source 1..75: mol_type = other DNA
actggaaaacgagtacgactggctgacctcagatgccgctgtggatgaggccctgctcatcaacgaatacacctt

SEQ ID NO: 614526 - DNA, 75 bp, synthetic construct
  source 1..75: mol_type = other DNA
gtgcttaaaaccttccgcgttttttcccgtgctgttaacaagcgcggctataccgttggcatcacgcagaacgtg

SEQ ID NO: 614527 - DNA, 75 bp, synthetic construct
  source 1..75: mol_type = other DNA
cggcgcgaaggtaagtgggaaatcggtaatgactccaacttactgatagtgttttatgttcagataatgcccgat

SEQ ID NO: 614528 - DNA, 75 bp, synthetic construct
  source 1..75: mol_type = other DNA
tttcgatagaggcgcttctggcaagtgcttcactacgcagtggactgacagcattgaataagtgtaaatatcatg

SEQ ID NO: 614529 - DNA, 75 bp, synthetic construct
  source 1..75: mol_type = other DNA
gccttctggttgtaccgtcagctggaaaacgagtacgacaggctgacctctgatgccgctgttggtgaggccctt

SEQ ID NO: 614530 - DNA, 75 bp, synthetic construct
  source 1..75: mol_type = other DNA
accgtgagcttcatcgtatcgcggatgccctgcaggtggtgcagaaacgtaacttctggcagcttcaggctgaaa

SEQ ID NO: 614531 - DNA, 75 bp, synthetic construct
  source 1..75: mol_type = other DNA
gcatgagcctgcaaaatcgcgaatctatcggtcagttaataagcgtactgcatcgtcgccattccgatattgttc

SEQ ID NO: 614532 - DNA, 75 bp, synthetic construct
  source 1..75: mol_type = other DNA
aatgatattaactggcaatttgtcaccggattggtgcttagctacgccctgaagcgtaaaattgatgcctatact

SEQ ID NO: 614533 - DNA, 75 bp, synthetic construct
  source 1..75: mol_type = other DNA
tctgcatgagctgctacgtggttttgagcaacgcggattttatctggataaccagtctacacaaatgctggttgc

SEQ ID NO: 614534 - DNA, 75 bp, synthetic construct
  source 1..75: mol_type = other DNA
atgttaaagaaacaactactatcaatatttgaagctctgttatatataatgcttgcttattggttggcagaaaat

SEQ ID NO: 614535 - DNA, 75 bp, synthetic construct
  source 1..75: mol_type = other DNA
tattcaccctgttcaccctgttcaccctgttcacgctgtccaccgttccggcccaggccgatattatcgatgaca

SEQ ID NO: 614536 - DNA, 75 bp, synthetic construct
  source 1..75: mol_type = other DNA
ttgttgcgaggccgagtttatgaaacgccactccacgctctttttttcaccctgctcacgctgaccaccgtaccg

SEQ ID NO: 614537 - DNA, 75 bp, synthetic construct
  source 1..75: mol_type = other DNA
gaacagcgcggattttatctggataaccagtcggcacaaacgctggtagcgttttatgaacgtatgggaaatgtg

SEQ ID NO: 614538 - DNA, 75 bp, synthetic construct
  source 1..75: mol_type = other DNA
taaccacctgtttgtcacttccaattttcaacttgacccttcggtaatgcagctcgacagcaatgtaccgttccc

SEQ ID NO: 614539 - DNA, 75 bp, synthetic construct
  source 1..75: mol_type = other DNA
tatttttggctggcgcttaatgcgcgatgtaaccggtccaattcgtaacatggtgaataccgtcgaccgcatccg

SEQ ID NO: 614540 - DNA, 75 bp, synthetic construct
  source 1..75: mol_type = other DNA
tttgctggcaattattaatgatgttctcgacttctcgaaactggaagcaggtaagctgattctggaaagtattcc

SEQ ID NO: 614541 - DNA, 75 bp, synthetic construct
  source 1..75: mol_type = other DNA
tttgggtatatgtattttcgctcggtatttgtctggtttgtggttggtggcttttttggggacggtttatatttt

SEQ ID NO: 614542 - DNA, 75 bp, synthetic construct
  source 1..75: mol_type = other DNA
gatgcagaaaacagactaaccctagaactttcaacatatgggttagaactcgttttcaatgagaaactggtagtc

SEQ ID NO: 614543 - DNA, 75 bp, synthetic construct
  source 1..75: mol_type = other DNA
caattatttctgagagttattctcccgacgaatcccccagcagcgatgctaaaaatagtcagaatatgttgggat

SEQ ID NO: 614544 - DNA, 75 bp, synthetic construct
  source 1..75: mol_type = other DNA
atgcatttttatgtggatgaaaccggtcataccggtcccaatctttttgaccgtacccagcctgtgctttcctac

SEQ ID NO: 614545 - DNA, 75 bp, synthetic construct
  source 1..75: mol_type = other DNA
tatgacaatggagaatgctatcaggaccaatttgcacacttttgatgatagaagagatatcacaggatttatcga

SEQ ID NO: 614546 - DNA, 75 bp, synthetic construct
  source 1..75: mol_type = other DNA
cgagtgactgcctttgaggatattttatcgggtgatataaaaaccgaaggcgatattaggacacttgatcctacc

SEQ ID NO: 614547 - DNA, 75 bp, synthetic construct
  source 1..75: mol_type = other DNA
atgaaaaaaaatatagagaactttgacacttttatcatagaacagaaagtttggttcgaagagaatctggcagca

SEQ ID NO: 614548 - DNA, 75 bp, synthetic construct
  source 1..75: mol_type = other DNA
atcttagtcattttcttaaaagtgaattcggtgataacagtgcaaatactccctgtactcatgcatgggcagaaa

SEQ ID NO: 614549 - DNA, 75 bp, synthetic construct
  source 1..75: mol_type = other DNA
cgcaaacatatcgaatatttacgatcaaaaaaattttctgattatttaccaaagccaatcagtgatattaccagt

SEQ ID NO: 614550 - DNA, 75 bp, synthetic construct
  source 1..75: mol_type = other DNA
aaaaaatacccggaggcggtgagagctgagctaatgacgctaggtgcgtttattgctgagctgacagagctttac

SEQ ID NO: 614551 - DNA, 75 bp, synthetic construct
  source 1..75: mol_type = other DNA
ccttccattaatcatacaagggatcttaacccgtctgtgacgctgaatgcgcatacctcctcgcacagttgcccg

SEQ ID NO: 614552 - DNA, 75 bp, synthetic construct
  source 1..75: mol_type = other DNA
tgcgggatgcaggagtcaagctggttgtaccatcatcattacacaggaaatatccggaagcggtgagaggcgtaa

SEQ ID NO: 614553 - DNA, 75 bp, synthetic construct
  source 1..75: mol_type = other DNA
ccgaaccggaaagccaatatcattgttgaccagcagtcgcagttcaataccactcagcgggagctgaacgagttt

SEQ ID NO: 614554 - DNA, 75 bp, synthetic construct
  source 1..75: mol_type = other DNA
cattctgagcgatgcccgttcagttgaactcattacagatgccctgtcctgggcgatggtcaacttcgatgagct

SEQ ID NO: 614555 - DNA, 75 bp, synthetic construct
  source 1..75: mol_type = other DNA
aagaaacaccggatacggtttgatatctggcaggtggttaaacgggatcacgccattatttcattcttcgatcag

SEQ ID NO: 614556 - DNA, 75 bp, synthetic construct
  source 1..75: mol_type = other DNA
gattttgcagaatcatgggatagtcttgtctggatatgtgggaaaaaaggttccggctggttacgtggcaatggt

SEQ ID NO: 614557 - DNA, 75 bp, synthetic construct
  source 1..75: mol_type = other DNA
tgaataagcagaagcaaacgggtatttacgttcaggatcaggcgcagtgggataaagtgctggtcaccctgggcg

SEQ ID NO: 614558 - DNA, 75 bp, synthetic construct
  source 1..75: mol_type = other DNA
ttaatattttattgagtgcatttggtgttggtgaaacttcatatagtgattttggctataaaggttttttctacg

SEQ ID NO: 614559 - DNA, 75 bp, synthetic construct
  source 1..75: mol_type = other DNA
ggtattaatgcattcccaaagcctcttacagagatcgatattgctgatataacaataatttatgggatgttaact

SEQ ID NO: 614560 - DNA, 75 bp, synthetic construct
  source 1..75: mol_type = other DNA
aaacagcgtatatggctacggtgtttgctccgatccggcgaatgcttatagcaaacaatgtgctgctctggcgcc

SEQ ID NO: 614561 - DNA, 75 bp, synthetic construct
  source 1..75: mol_type = other DNA
agagcagcgttatgctattgcaccggcgttcacctggcgtccggacgataaaaccaatttcaccttcctttctta

SEQ ID NO: 614562 - DNA, 75 bp, synthetic construct
  source 1..75: mol_type = other DNA
tggcaacctgcaggtgtctgtagaggagcttatcagaggcggggcgtttctggtggcgatgtccctgtggcataa

SEQ ID NO: 614563 - DNA, 75 bp, synthetic construct
  source 1..75: mol_type = other DNA
atcttcgaagatattacggcaaggtgtgtttaagcgttgatacgccagcgcaagggcttaacttactggttgcgc

SEQ ID NO: 614564 - DNA, 75 bp, synthetic construct
  source 1..75: mol_type = other DNA
aacatttcacgctgacaggccggatagatgagctacccaatctgattgccaaaaaacaggcgttacagcaagcac

SEQ ID NO: 614565 - DNA, 75 bp, synthetic construct
  source 1..75: mol_type = other DNA
agaaaattgcgttaaattgcctgttgttattggttatcaccggctttcgctccattgaagcgtttaatctcagac

SEQ ID NO: 614566 - DNA, 75 bp, synthetic construct
  source 1..75: mol_type = other DNA
gcgactcgttggcatttcttgtcgcttcgctgaccactactccttccgtctgggcgcatgcgcatttgacacatc

SEQ ID NO: 614567 - DNA, 75 bp, synthetic construct
  source 1..75: mol_type = other DNA
ctggattatgattgggatatcagttgtcagtgtcgctttttctatttttatgtctcgcaacatgaaggtaaaaac

SEQ ID NO: 614568 - DNA, 75 bp, synthetic construct
  source 1..75: mol_type = other DNA
atcagcagaaagcgcacaagataacaccatatctaacaacacatacaccagcgttgaaaacaaggtaggccaggg

SEQ ID NO: 614569 - DNA, 75 bp, synthetic construct
  source 1..75: mol_type = other DNA
tctatagatcatacgtcagaaaaaaatccttcggttttattgcgcgcaacttattcctctcatgaatgtgtagac

SEQ ID NO: 614570 - DNA, 75 bp, synthetic construct
  source 1..75: mol_type = other DNA
aaagcgccgcgcactaccgcagccaggaaccagaaaaacagccaggcaaaaacggcagcaaagaacaagacgacg

SEQ ID NO: 614571 - DNA, 75 bp, synthetic construct
  source 1..75: mol_type = other DNA
aataacgcttactgccaggataacgccctgacctggctggactggcagcaggcaaacagcggactaaccacattt

SEQ ID NO: 614572 - DNA, 75 bp, synthetic construct
  source 1..75: mol_type = other DNA
acaacgttgaatcgcttaccgctgcggttgaatacctgcgtcaggcggcagtgttgaacccgaaaaagcaggcgt

SEQ ID NO: 614573 - DNA, 75 bp, synthetic construct
  source 1..75: mol_type = other DNA
aactggctaaagaagtggcaaaagacgctctggacagtgcacgggaggtaagagcgattcatgaccggctggaga

SEQ ID NO: 614574 - DNA, 75 bp, synthetic construct
  source 1..75: mol_type = other DNA
tcaatatataaataatgccattgataatgatgatggcaccatatctatggaaattgtcatgggaaagcatagcgg

SEQ ID NO: 614575 - DNA, 75 bp, synthetic construct
  source 1..75: mol_type = other DNA
atggcggggaatcgtaatattgaaaggtataagagtggtttgttttcaatggacagagtcattcttgatgacgtt

SEQ ID NO: 614576 - DNA, 75 bp, synthetic construct
  source 1..75: mol_type = other DNA
agcaacagtcaatatcacggacaaggggttggactggctgtaagcggcaattttaagcagctactcaattattct

SEQ ID NO: 614577 - DNA, 75 bp, synthetic construct
  source 1..75: mol_type = other DNA
tctgtatactggatgaagaaaatggtgatattgattgtcagcattatgcattggtgaattttgaaacactggcaa

SEQ ID NO: 614578 - DNA, 75 bp, synthetic construct
  source 1..75: mol_type = other DNA
cagcgaaagaactgtttctggggttagtggaatattttaagcaggaaaaagagcatgctatttcggtgcatgtaa

SEQ ID NO: 614579 - DNA, 75 bp, synthetic construct
  source 1..75: mol_type = other DNA
aagttagcgcttatggggaaaatccccgcctttttcctgccggtccccggacagagcacaaaggaagttgccgcc

SEQ ID NO: 614580 - DNA, 75 bp, synthetic construct
  source 1..75: mol_type = other DNA
ccggtatctggcaaagcggagcttcagtgaactacaatgcttgcaaatggtacgagtcctcagtggcatttaatc

SEQ ID NO: 614581 - DNA, 75 bp, synthetic construct
  source 1..75: mol_type = other DNA
atcagtgtgaatacatcgtctggggcagcaaaggccatttagataaatcgccttcggggccgttcgacggctgca

SEQ ID NO: 614582 - DNA, 75 bp, synthetic construct
  source 1..75: mol_type = other DNA
gataaccactgacaatggttttttcagcagcacaacggaattggaaaagcgtctggcacgaaaggtcctgcgaga

SEQ ID NO: 614583 - DNA, 75 bp, synthetic construct
  source 1..75: mol_type = other DNA
gaactgccggaaacggaagatctgctggaaagtgacgacgatgcgccgatcatcaaactgatcaacgctatgctg

SEQ ID NO: 614584 - DNA, 75 bp, synthetic construct
  source 1..75: mol_type = other DNA
ttcacgggcaagatgctgaacacgaaggaaggctcaattacggtatcagaggaccaggccacggacatcgagttt

SEQ ID NO: 614585 - DNA, 75 bp, synthetic construct
  source 1..75: mol_type = other DNA
tggtgatcaacgtacaagcgtttaacgccactggcaaagataaccgccgtatctatgaagcgctcgatgattttc

SEQ ID NO: 614586 - DNA, 75 bp, synthetic construct
  source 1..75: mol_type = other DNA
cagcaccctgttaaatccggcatacgccgaagagcaggaaaaggcgctgaatttcggcattatttcaacggaatc

SEQ ID NO: 614587 - DNA, 75 bp, synthetic construct
  source 1..75: mol_type = other DNA
ccactggcactgctgcgacgcgggcttgcttcatcgggcaacgccgcaggtttacttactgcgccgttgtcgtct

SEQ ID NO: 614588 - DNA, 75 bp, synthetic construct
  source 1..75: mol_type = other DNA
tgttacccggagctaaagcgccccccatttttagcgcggttctgatgattgtggccgggttagcctgggctgcat

SEQ ID NO: 614589 - DNA, 75 bp, synthetic construct
  source 1..75: mol_type = other DNA
cggtattctcctggtaacagggccgacaggctccggtaaaagcaccacgctctacgccattctttcggcgcttaa

SEQ ID NO: 614590 - DNA, 75 bp, synthetic construct
  source 1..75: mol_type = other DNA
cataaatccgatattgcccaggaatgggtaaagaaggatgctttcggcacaccgcaatatacggtgatgaaaacc

SEQ ID NO: 614591 - DNA, 75 bp, synthetic construct
  source 1..75: mol_type = other DNA
ttgtcactgttctggccgttatcagtgctatcagtgtttccggttgtgacagcaaggaagatgctggcgtgaaag

SEQ ID NO: 614592 - DNA, 75 bp, synthetic construct
  source 1..75: mol_type = other DNA
gtcgttggaaatcacggccgagcactttcaggagacctatcacaagaaggcacgcttctttatttacaactctaa

SEQ ID NO: 614593 - DNA, 75 bp, synthetic construct
  source 1..75: mol_type = other DNA
cttccgcctggggcgagcgcgtggtactgcgactgctggacaaaaaccaggctcgcctgacgctggaacgtctgg

SEQ ID NO: 614594 - DNA, 75 bp, synthetic construct
  source 1..75: mol_type = other DNA
tccgcctgctggataaaaacagcctccagctttcattgaacaacctggggatgacggcagcggataagcaggatt

SEQ ID NO: 614595 - DNA, 75 bp, synthetic construct
  source 1..75: mol_type = other DNA
agtgaataacgtgacgctggtggtgctctttttgcccttattaactgcgcctattccgtttttgctaccgtgttg

SEQ ID NO: 614596 - DNA, 75 bp, synthetic construct
  source 1..75: mol_type = other DNA
tcgtatatcggaactgaccgggcttgatttgggcaattttgatgacaggttgctgctgtatgtggcgttacaact

SEQ ID NO: 614597 - DNA, 75 bp, synthetic construct
  source 1..75: mol_type = other DNA
ttgttatcaggacataaaattaccggttcttctggatagcctgcgtaatggctggcaggcggctgaactggcaat

SEQ ID NO: 614598 - DNA, 75 bp, synthetic construct
  source 1..75: mol_type = other DNA
gcacctcaaaaacaccatcatacactaaatcagtaagttggcagcatcaccttgcatataaaagtaatattcagc

SEQ ID NO: 614599 - DNA, 75 bp, synthetic construct
  source 1..75: mol_type = other DNA
gcgagaaattatgatggtgcaccaggattacttcttgcgtatcaaaaatttcattatatgagaacaccaataaga

SEQ ID NO: 614600 - DNA, 75 bp, synthetic construct
  source 1..75: mol_type = other DNA
aaatcgccgcaacacttgccagtaccggcacaccggcttttttgtccatccggcagaagcactgcacggcgatct

SEQ ID NO: 614601 - DNA, 75 bp, synthetic construct
  source 1..75: mol_type = other DNA
cgtattggcttatgacgcgtactatcgctatttcatgggcgataaaccgacgttgatgagcgccacggaatgggg

SEQ ID NO: 614602 - DNA, 75 bp, synthetic construct
  source 1..75: mol_type = other DNA
gaagatgttctctattcctggttatagcagccctgggcaattgctggatccggaaacgaacatcaacattggcac

SEQ ID NO: 614603 - DNA, 75 bp, synthetic construct
  source 1..75: mol_type = other DNA
gctgatgtactggaatctcgataataccgcgcgtagcgagtgggctaatctggtgaagagcaggtcgaaaaccga

SEQ ID NO: 614604 - DNA, 75 bp, synthetic construct
  source 1..75: mol_type = other DNA
aagcatagcgaaatttgagcctcgtgacagggcattgacgccagttgaaattggtctgatgtatcggtacatgga

SEQ ID NO: 614605 - DNA, 75 bp, synthetic construct
  source 1..75: mol_type = other DNA
cgtgctggcttatgacgcgtactatcgctatttcatgggcgataaaccgacgcttttgagcgccacagaatgggg

SEQ ID NO: 614606 - DNA, 75 bp, synthetic construct
  source 1..75: mol_type = other DNA
gaaagcgggcaataccgggttggtgacggtactcgcaggtcagatgcctgccgattatcaaactatcgcctcggc

SEQ ID NO: 614607 - DNA, 75 bp, synthetic construct
  source 1..75: mol_type = other DNA
cggaccctgagggttccttcttctcggttgaaggtggcgagatccgcgcacgtggcgtagaaatcgaagcgaaag

SEQ ID NO: 614608 - DNA, 75 bp, synthetic construct
  source 1..75: mol_type = other DNA
cgatggcggtgatgtggcgctggataaatatgttcagcgcctgacggcgaaacgtaatggcggacagggtgtttc

SEQ ID NO: 614609 - DNA, 75 bp, synthetic construct
  source 1..75: mol_type = other DNA
aaatacgtcgaacgactgacagccagacgtaatggcggacagggtgtttccacgctggcgtggtgtcacggagaa

SEQ ID NO: 614610 - DNA, 75 bp, synthetic construct
  source 1..75: mol_type = other DNA
tggaacgcgctgaaattatgcgtggccctgtttctgttctttacggtaaaagtagccctggcggcctgttaaata

SEQ ID NO: 614611 - DNA, 75 bp, synthetic construct
  source 1..75: mol_type = other DNA
ttaactttcgcggtgttcaaagggaaaagaaatattgccgcagatgagatgggttttccctctgaaggcgatgta

SEQ ID NO: 614612 - DNA, 75 bp, synthetic construct
  source 1..75: mol_type = other DNA
tgcttaatttcacaccctgggctgcggcatcaccattcttatacaaattcggtgccgcaatgatgattggcgggg

SEQ ID NO: 614613 - DNA, 75 bp, synthetic construct
  source 1..75: mol_type = other DNA
cacgagtaacactaattggctatccatatggttttcatgatgctgcaaatatgcttcctgtttggaaaacaggaa

SEQ ID NO: 614614 - DNA, 75 bp, synthetic construct
  source 1..75: mol_type = other DNA
tagctgctatatcattaattagtgtttttcttatgtctggttgtgctgtgcataatgatgagacaagtatcggta

SEQ ID NO: 614615 - DNA, 75 bp, synthetic construct
  source 1..75: mol_type = other DNA
gcagtgatattgagcgattttattacaatgaagatttcgtagaaaaggatagcaatgatgttgtttgcgaaatat

SEQ ID NO: 614616 - DNA, 75 bp, synthetic construct
  source 1..75: mol_type = other DNA
gaaccaacaaaggtaaaggtatcgccagcctggcatggtgccgtggcgataatcttctgatggtgctggaaagcc

SEQ ID NO: 614617 - DNA, 75 bp, synthetic construct
  source 1..75: mol_type = other DNA
taatccatgttgcccgtcgcaatctacagctggacgatgacacctaccgttcagtgctttatcgcgtaacgggaa

SEQ ID NO: 614618 - DNA, 75 bp, synthetic construct
  source 1..75: mol_type = other DNA
gctgcatcagcctaagtcggtgaaagaagcgcttagctacacgccgggtgtctctgttggtacgcgtggcgcatc

SEQ ID NO: 614619 - DNA, 75 bp, synthetic construct
  source 1..75: mol_type = other DNA
gtatgtatgagtttgttgtgaatgatgcccctgaacaggcagaggacgccgggcctgcagagcctgtttctgcgg

SEQ ID NO: 614620 - DNA, 75 bp, synthetic construct
  source 1..75: mol_type = other DNA
cgaacaggaggtgctcaccacctggcctgcggatgccattgcccgggcggaagatgtggtgttgcgtctgtccgg

SEQ ID NO: 614621 - DNA, 75 bp, synthetic construct
  source 1..75: mol_type = other DNA
atgcacaggcagcggttgaaccgaaagaagacactatcaaccgttaccgctgcacctgcgccgcaagaaagcgca

SEQ ID NO: 614622 - DNA, 75 bp, synthetic construct
  source 1..75: mol_type = other DNA
tgaacagttttccgctgaactggcggaactggctaatgatatctatctgaacggtgaattattcgcgcgggtaga

SEQ ID NO: 614623 - DNA, 75 bp, synthetic construct
  source 1..75: mol_type = other DNA
agcagtcctggtggcttgttgaatatggtcagcaagcgtccgaccaccgaaccactgaaagaagttcagtttaaa

SEQ ID NO: 614624 - DNA, 75 bp, synthetic construct
  source 1..75: mol_type = other DNA
tattacggctggttgccgaaagagggaaccgtcgagccgctgccaaatggtaagcgtctgccgactgacttcaac

SEQ ID NO: 614625 - DNA, 75 bp, synthetic construct
  source 1..75: mol_type = other DNA
cgtctgaccggtcttgcgcgctctgccaatgcccagcaaaagggcgcggaagagcagcgttatgccattgcgcca

SEQ ID NO: 614626 - DNA, 75 bp, synthetic construct
  source 1..75: mol_type = other DNA
gccacgctatcgcagcagttatttcgcccatatttttggtggcggatatgccgcaggttattacgcttatctgtg

SEQ ID NO: 614627 - DNA, 75 bp, synthetic construct
  source 1..75: mol_type = other DNA
gttatcgataagcagcagggcgggtttagcgcgcagccgtgggactgggcattttatgccgaacaggtacggcgg

SEQ ID NO: 614628 - DNA, 75 bp, synthetic construct
  source 1..75: mol_type = other DNA
ttctgaactgtcagccctgcagcgtattgagcatcttgccctcctgaaacggcgggcagaagaggctgaagccag

SEQ ID NO: 614629 - DNA, 75 bp, synthetic construct
  source 1..75: mol_type = other DNA
ggcttctgtctccggtatgaatctgctggcggatgatgcctgcgtgccattaacctccatgatccatgacgctac

SEQ ID NO: 614630 - DNA, 75 bp, synthetic construct
  source 1..75: mol_type = other DNA
tgatgtcacgtttaatacgggtgacagtgagcaaggtattgtcccttgcctgactcgcgctcaactcgccagtat

SEQ ID NO: 614631 - DNA, 75 bp, synthetic construct
  source 1..75: mol_type = other DNA
gtcatctgccgaactctattttaacccgcgctttttagcggatgatccccaggctgtggccgatttatcgcgttt

SEQ ID NO: 614632 - DNA, 75 bp, synthetic construct
  source 1..75: mol_type = other DNA
aacttctctgaaagtattgaacccgggttcagcggcgcaaaagtcattggctcaaagaatgaaaatattaaaacg

SEQ ID NO: 614633 - DNA, 75 bp, synthetic construct
  source 1..75: mol_type = other DNA
gctacgcgctggcaatcctgaccacttcgttggtgacaccttccgtctgggcacatgcgcatttaacgcatcagt

SEQ ID NO: 614634 - DNA, 75 bp, synthetic construct
  source 1..75: mol_type = other DNA
cctcagatgacaatatgttacccgatagccaaagaggatttgccccggtgatccacggtattgctcgtggtactg

SEQ ID NO: 614635 - DNA, 75 bp, synthetic construct
  source 1..75: mol_type = other DNA
atccacggtattgcacgtggtactgcacaagtatctattaaacagaacgggtatgacatttataatagtacggtg

SEQ ID NO: 614636 - DNA, 75 bp, synthetic construct
  source 1..75: mol_type = other DNA
agatgtcacgtttaatacgggggagagtgaacaagggattgtcccttgtctgacacgcgcacaactcgccagtat

SEQ ID NO: 614637 - DNA, 75 bp, synthetic construct
  source 1..75: mol_type = other DNA
ataggcgaaatccgtcgaagttcgtcgacatcgaaaacgaattatctgtccaacccttgaaaatcggcgctcctg

SEQ ID NO: 614638 - DNA, 75 bp, synthetic construct
  source 1..75: mol_type = other DNA
ggatatgacgcaggctaattccacacttcccgatgacagtcagcatgacggacaatcggtgcgttttctctataa

SEQ ID NO: 614639 - DNA, 75 bp, synthetic construct
  source 1..75: mol_type = other DNA
acatttataatagtacggtgccaccggggccttttaccatcaacgatatctatgccgcaggtaatagtggtgact

SEQ ID NO: 614640 - DNA, 75 bp, synthetic construct
  source 1..75: mol_type = other DNA
tcacagtgattatggcgagtatatcgggcaggactttttgctgttgggtgaatcaatggggttagcgcccagatt

SEQ ID NO: 614641 - DNA, 75 bp, synthetic construct
  source 1..75: mol_type = other DNA
aaccactggcaggtggagaataagctgcactggcgtctggacgtggtaatgaatgaagacgactgcaaaataaga

SEQ ID NO: 614642 - DNA, 75 bp, synthetic construct
  source 1..75: mol_type = other DNA
agagaagttcgccacagcaatccgaaaccactggcaggtggagaataagctgcactggcgtctggacgtggtaat

SEQ ID NO: 614643 - DNA, 75 bp, synthetic construct
  source 1..75: mol_type = other DNA
atggaacttaaaaaattgatggaacatatttctgttattcccgattacagacaagcctggaaagtggaacataat

SEQ ID NO: 614644 - DNA, 75 bp, synthetic construct
  source 1..75: mol_type = other DNA
gagcccgaaatgacggtcagatattatatcagttctgctgatttaaccgcagagaagttcgccacagcaatccga

SEQ ID NO: 614645 - DNA, 75 bp, synthetic construct
  source 1..75: mol_type = other DNA
ggcagggttaagacgtaagatgcgaaaagcagccatggacagaaactacctggcgtcagtccttgcggggagcgg

SEQ ID NO: 614646 - DNA, 75 bp, synthetic construct
  source 1..75: mol_type = other DNA
tcattagtgcgttctcaacaatgcacattctggtcctggggcagatcaggacggatgagaaatctaatgagatca

SEQ ID NO: 614647 - DNA, 75 bp, synthetic construct
  source 1..75: mol_type = other DNA
agagaagaaatccgtcttcatatttttgcgatgtccctgatgaacttattgatttcacgtttgaatggaaaggac

SEQ ID NO: 614648 - DNA, 75 bp, synthetic construct
  source 1..75: mol_type = other DNA
tgtccctgatgaacttattgatttcacgtttgaatggaaagagctgaagaaattatgcgtggcagtctcctttcg

SEQ ID NO: 614649 - DNA, 75 bp, synthetic construct
  source 1..75: mol_type = other DNA
tgccagaaagatattgcagagaagatacaaagacagggaggtgaatatttattcgcggtaaaaggaaaccagggg

SEQ ID NO: 614650 - DNA, 75 bp, synthetic construct
  source 1..75: mol_type = other DNA
ccaggggcggctaaataaagccttcgaggaaaaatttccgctgaaagaattaaataatcccaagcatgacagtta

SEQ ID NO: 614651 - DNA, 75 bp, synthetic construct
  source 1..75: mol_type = other DNA
ttaacatgttggatattaaaggaaaaattatcacaactgatgcgatgggttgccagaaagatattgcagagaaga

SEQ ID NO: 614652 - DNA, 75 bp, synthetic construct
  source 1..75: mol_type = other DNA
ttgaatggaaagggctgaagaaattatgcgtggcagtttcctttcggtccataatagcagagcaaaagaaagagc

SEQ ID NO: 614653 - DNA, 75 bp, synthetic construct
  source 1..75: mol_type = other DNA
cgcaattagtgaaaagagtcacggcagagaagaaatccgtcttcatattgtttgcgatgtccctgatgagcttat

SEQ ID NO: 614654 - DNA, 75 bp, synthetic construct
  source 1..75: mol_type = other DNA
gaaaaaagtcagccgcgaaacgcctgatttgctcaactttgaaaaaagcatgttgatcaaagagggcgcagaaaa

SEQ ID NO: 614655 - DNA, 75 bp, synthetic construct
  source 1..75: mol_type = other DNA
cgggaaatccgcgataccgccgatgcgctgaacaagctgaacttacgccataccgaaatcttgccgctttatgcg

SEQ ID NO: 614656 - DNA, 75 bp, synthetic construct
  source 1..75: mol_type = other DNA
taccattgccagagttgtatcctgtatctgtcctgcgaaatttcatgagagctttattaactggatgcttgacta

SEQ ID NO: 614657 - DNA, 75 bp, synthetic construct
  source 1..75: mol_type = other DNA
aattcttgcaggttgatacctctaagatcctgtttatctgtggcggtgcgtttgctggtctggataaagtgattt

SEQ ID NO: 614658 - DNA, 75 bp, synthetic construct
  source 1..75: mol_type = other DNA
tgctgctgcaactggcggaagaccgacgccgtctcaagggcgttcagtccacggtgaaaaaagcggaaatcaagg

SEQ ID NO: 614659 - DNA, 75 bp, synthetic construct
  source 1..75: mol_type = other DNA
aaacgcacctacagcgaaccgcactgggaacgggcgcagggcgcggtgatggcaaccgaaaaagtcaccgtttat

SEQ ID NO: 614660 - DNA, 75 bp, synthetic construct
  source 1..75: mol_type = other DNA
atctatcatcctgttgatgatcgttctggtagtgggtagctctgttaaaggggcatcgcgttggatcgatctcgg

SEQ ID NO: 614661 - DNA, 75 bp, synthetic construct
  source 1..75: mol_type = other DNA
gtgatggcgtctatctgatcctggcattcattctggcgatcattacgctgcgtctgccgatggagttctggcaac

SEQ ID NO: 614662 - DNA, 75 bp, synthetic construct
  source 1..75: mol_type = other DNA
gtgcataaattgtcaggcatcctactattgactatttttgccgttatttctggtgcagaaagttgggaagatata

SEQ ID NO: 614663 - DNA, 75 bp, synthetic construct
  source 1..75: mol_type = other DNA
tggaaaaacgctccggcactcttatgacaagagtcgccgcaggggagcgattcatgtcattagtgcgttctcaac

SEQ ID NO: 614664 - DNA, 75 bp, synthetic construct
  source 1..75: mol_type = other DNA
attcatgtcattagtgcgttctcaacaatgcacagtgtggttctcggcagattaagacggatgagaaatccaatg

SEQ ID NO: 614665 - DNA, 75 bp, synthetic construct
  source 1..75: mol_type = other DNA
gtcaatcatcctgctgatgattgtgctggtggtggggagctcggttaaaggggcatcgcgttggatcgatctcgg

SEQ ID NO: 614666 - DNA, 75 bp, synthetic construct
  source 1..75: mol_type = other DNA
ataaggtattcaaggcagggttaagacgtaagatgcgaaaagcagccatggacagaaactacctggcgtcagtcc

SEQ ID NO: 614667 - DNA, 75 bp, synthetic construct
  source 1..75: mol_type = other DNA
gacggatgagaaatccaatgagattacagctatccctgaacttcttaacatgctggatattaaaggaaaaatcat

SEQ ID NO: 614668 - DNA, 75 bp, synthetic construct
  source 1..75: mol_type = other DNA
agtcctgcaaaatttcacgagtgctttattaactggatgcgtgactgccattcttcagataataaagacgtcatc

SEQ ID NO: 614669 - DNA, 75 bp, synthetic construct
  source 1..75: mol_type = other DNA
accgctatcccggcttcatttttatggctgcataactatttcacatgcatgattgatgagatgtgtcgtcgttaa

SEQ ID NO: 614670 - DNA, 75 bp, synthetic construct
  source 1..75: mol_type = other DNA
cggcagttggagcggtggttattggtggtggtatagtaatatacaacaatcgcgaggctgttggggatgcgattg

SEQ ID NO: 614671 - DNA, 75 bp, synthetic construct
  source 1..75: mol_type = other DNA
ggccctccagggatgttagtcggtgcggcagttggagcggtggttattggtggtggtatagtaatatacaacaat

SEQ ID NO: 614672 - DNA, 75 bp, synthetic construct
  source 1..75: mol_type = other DNA
tccctgatgaacttattgatttcacgtttgaatggaaagggctgaagaaattatgcgtggcagtctcctttcggt

SEQ ID NO: 614673 - DNA, 75 bp, synthetic construct
  source 1..75: mol_type = other DNA
tttcacgtttgaatggaaaggactgaaaaaattatgcgtggcagtctcctttaggtcaataatagcagaacataa

SEQ ID NO: 614674 - DNA, 75 bp, synthetic construct
  source 1..75: mol_type = other DNA
gagaagatacaaaaacagggaggtgattatttattcgctgtaaaaggaaaccaggggcggcttaataaagccttt

SEQ ID NO: 614675 - DNA, 75 bp, synthetic construct
  source 1..75: mol_type = other DNA
agccggatcgctggttgccgttactgctggggcaagttccggcgatgatcctgccgcgcgaatgggaaaccctca

SEQ ID NO: 614676 - DNA, 75 bp, synthetic construct
  source 1..75: mol_type = other DNA
actatacggcgttaagtgaactcgccagcgaatatttattggacgtgatctgtagcaacccgaatgccgtgattt

SEQ ID NO: 614677 - DNA, 75 bp, synthetic construct
  source 1..75: mol_type = other DNA
gctggggctacgtgaagaccagctcatcagctttcgctccgaagagataaatgagacagagtgcgaacgggtaac

SEQ ID NO: 614678 - DNA, 75 bp, synthetic construct
  source 1..75: mol_type = other DNA
aaggaaaaatcatcacaactgatgcgatgggatgccagaaagatattgcagagaagatacaaaaacagggcggtg

SEQ ID NO: 614679 - DNA, 75 bp, synthetic construct
  source 1..75: mol_type = other DNA
aactggatgcgtgactgccattcttcagatgataaagacgtcattgcaattgatggaaaaacgctccggcactct

SEQ ID NO: 614680 - DNA, 75 bp, synthetic construct
  source 1..75: mol_type = other DNA
gccacagcgatccgaaatcactggcacgtggagaataagctgcactggcgtctggacgtggtaatgaatgaagac

SEQ ID NO: 614681 - DNA, 75 bp, synthetic construct
  source 1..75: mol_type = other DNA
agaagatacaaaaacagggaggtgattatttattcgcggtaaaaggaacccaggggcggctaaataaagcctttg

SEQ ID NO: 614682 - DNA, 75 bp, synthetic construct
  source 1..75: mol_type = other DNA
aggcctggcccttacataccccgtttgtgattgcccggggaagtcgcagtgaagcgcgcgtggtggtggttgaac

SEQ ID NO: 614683 - DNA, 75 bp, synthetic construct
  source 1..75: mol_type = other DNA
agagttgtatcctgtatcagtcctgcaaaatttcacgagtgctttattaacttgatgcgtgattgtcattcttca

SEQ ID NO: 614684 - DNA, 75 bp, synthetic construct
  source 1..75: mol_type = other DNA
aaacagggaggtgattatttattcgctgtaaaaggaaaccaggggcggctaaataaagccttcgaggaaaaattt

SEQ ID NO: 614685 - DNA, 75 bp, synthetic construct
  source 1..75: mol_type = other DNA
gcacagtctggtcatcggacagatcaggacggatgagaaatctaatgagattacagctatcccagaacttcttaa

SEQ ID NO: 614686 - DNA, 75 bp, synthetic construct
  source 1..75: mol_type = other DNA
taatgccgataaagtggtcgttacccgtccgggcggcgagcagggcaaagaagtgatcgatggctacggtaagcc

SEQ ID NO: 614687 - DNA, 75 bp, synthetic construct
  source 1..75: mol_type = other DNA
acttctggccgccagcattccggcatttgccgtaaccggagacactgatcagccgatccacattgaatcggacca

SEQ ID NO: 614688 - DNA, 75 bp, synthetic construct
  source 1..75: mol_type = other DNA
aaggcagggttaagacgtaagatgcgaaaagcagccatggacagaaactacctggcgtcagtccttacggggagc

SEQ ID NO: 614689 - DNA, 75 bp, synthetic construct
  source 1..75: mol_type = other DNA
ttgatcggcataacgcttcccgagacagtcaccactgcacagacggtagtcatcggtacgcctgatcagatggcc

SEQ ID NO: 614690 - DNA, 75 bp, synthetic construct
  source 1..75: mol_type = other DNA
gtcatcggtacgcctgatcagatggccaatagtgcatcaacactctggcaggcaggcgcgaaattactgaaagtg

SEQ ID NO: 614691 - DNA, 75 bp, synthetic construct
  source 1..75: mol_type = other DNA
gcgtaaccaccgttctggtgccgtcgcagctgcaggacaaaacaacaaaggccagaccccggcacagaagaaggg

SEQ ID NO: 614692 - DNA, 75 bp, synthetic construct
  source 1..75: mol_type = other DNA
atacggtcggtgcggttctcacgccgctgtctgttccggcctttacgttaattgcgggcgatcgcagtgtctctg

SEQ ID NO: 614693 - DNA, 75 bp, synthetic construct
  source 1..75: mol_type = other DNA
tggttgccgggcatgaggtgattggtcgcgtagtggcgctcgggagtgccgcgcagaataaaggtttgcaggtcg

SEQ ID NO: 614694 - DNA, 75 bp, synthetic construct
  source 1..75: mol_type = other DNA
ttgtgcggcggtatcacggtctttaaaccgctgttgatgcaccatatcactgccaccagccgcgttggggtaatt

SEQ ID NO: 614695 - DNA, 75 bp, synthetic construct
  source 1..75: mol_type = other DNA
aatggcacaaaacagcttcggccagatgttcaaaaaccggtttggcacaactcgcttcgcttacccaacggtgaa

SEQ ID NO: 614696 - DNA, 75 bp, synthetic construct
  source 1..75: mol_type = other DNA
atggtgtttttttggtgtgtgtttgggtatgttttgggttttaagtgggtttgtttgtcaagtttaccccatttc

SEQ ID NO: 614697 - DNA, 75 bp, synthetic construct
  source 1..75: mol_type = other DNA
agaagttatgagttattatatttatgagtctctttttttagaaggtccggcattgagtgacgctgcaaaaaaagt

SEQ ID NO: 614698 - DNA, 75 bp, synthetic construct
  source 1..75: mol_type = other DNA
gaaacggggtctggtaaaacgactcagttaccgaaaatctgtatggagctggggcgcgggattaaagggctgatc

SEQ ID NO: 614699 - DNA, 75 bp, synthetic construct
  source 1..75: mol_type = other DNA
ctgccgccagcacgtcgtgaggatgaagacgtgaaagagattcgctggatgatagaggagttgcgcgtcagttac

SEQ ID NO: 614700 - DNA, 75 bp, synthetic construct
  source 1..75: mol_type = other DNA
cgggaaatccgcgataccgctgatgcactgaacaaactgaacttacgccatacggaaattcttccgctttatgcg

SEQ ID NO: 614701 - DNA, 75 bp, synthetic construct
  source 1..75: mol_type = other DNA
atgtccggtaaaatgactggtattgtaaaatggttcaacgctgacaaaggcttcggcttcatcactcctgacgat

SEQ ID NO: 614702 - DNA, 75 bp, synthetic construct
  source 1..75: mol_type = other DNA
gtgctggcgactaacgtcgcggaaacctcgctgactgtgccgggtattaaatacgtgatcgacccaggtacggcg

SEQ ID NO: 614703 - DNA, 75 bp, synthetic construct
  source 1..75: mol_type = other DNA
accaggttgaggagagcgggtttgagtggcagatccccggcctgcgtcgtgagctgatcatcgccctgattaaat

SEQ ID NO: 614704 - DNA, 75 bp, synthetic construct
  source 1..75: mol_type = other DNA
ctatgggaagagcattcttcataagacccctacaaacttctcagaagtctattcaacacatcatctaaaacctgc

SEQ ID NO: 614705 - DNA, 75 bp, synthetic construct
  source 1..75: mol_type = other DNA
acgcgataacggctttctgtttgaccttaaagcaactatcactaaagcgaatgcaaacgaaatattaaaggaaaa

SEQ ID NO: 614706 - DNA, 75 bp, synthetic construct
  source 1..75: mol_type = other DNA
tgtagctgttccaaacatctcatctactggtcgtatgaatggcttctcgtttaaatatggaaatatggctttcaa

SEQ ID NO: 614707 - DNA, 75 bp, synthetic construct
  source 1..75: mol_type = other DNA
cttgcactttgtaaaacttctcatgacgatagatacgataccgattataccaaagaatgtatctcgacaattcct

SEQ ID NO: 614708 - DNA, 75 bp, synthetic construct
  source 1..75: mol_type = other DNA
tactgacaatcaagcggtggcgcgaaacatacggacctggtagcaacgttgtactgccagcagaagaagcggaag

SEQ ID NO: 614709 - DNA, 75 bp, synthetic construct
  source 1..75: mol_type = other DNA
ttatctcggatgggagtaagcgtattgctgaactggaagcacgggaaataaaaccagccaaaggtgaagttcttg

SEQ ID NO: 614710 - DNA, 75 bp, synthetic construct
  source 1..75: mol_type = other DNA
catcggcttctcggaaacgcatctcagatgctacgtgttgcatgacgatgcggtcggtcaacacatccacattat

SEQ ID NO: 614711 - DNA, 75 bp, synthetic construct
  source 1..75: mol_type = other DNA
gaatacgttaaccgccccatagaagcacttatcctcgataaacgagctactggtcaggacgaatactctatcgct

SEQ ID NO: 614712 - DNA, 75 bp, synthetic construct
  source 1..75: mol_type = other DNA
tctactggacgcatgaacggcttctcattcgaatacaacgggattgctttcaaagcatctcaattgggaaaaggg

SEQ ID NO: 614713 - DNA, 75 bp, synthetic construct
  source 1..75: mol_type = other DNA
gtgagctatgcccaaaagcaatcatccaaaacgcccttaacgaactgcttgataccaggcaatcgattaccgact

SEQ ID NO: 614714 - DNA, 75 bp, synthetic construct
  source 1..75: mol_type = other DNA
gaggaaagagttttgctggtatcgtcctctatgcattaaagcccggttctcatcataaaaaagaccctatcgtga

SEQ ID NO: 614715 - DNA, 75 bp, synthetic construct
  source 1..75: mol_type = other DNA
gaatacatcccctacctcgatgtaatttatcgtatgttgaaaaacctcaaaatcccaacccttaaacgtcctcta

SEQ ID NO: 614716 - DNA, 75 bp, synthetic construct
  source 1..75: mol_type = other DNA
catcactggcgtaagaatgatagagataacatcatcaccccccaaaactgccattgaaacaccacataaatcgca

SEQ ID NO: 614717 - DNA, 75 bp, synthetic construct
  source 1..75: mol_type = other DNA
tgcgtttaagttatcagtttgagccgggggcggatgcggacggcgtgacggtacatattccgctgccgttactta

SEQ ID NO: 614718 - DNA, 75 bp, synthetic construct
  source 1..75: mol_type = other DNA
gcagaggaaatggcagatgcagcgcagagcgcatgcttgccgccaccggctttgccgatctgttgctgcagacgc

SEQ ID NO: 614719 - DNA, 75 bp, synthetic construct
  source 1..75: mol_type = other DNA
atgagcctgagtcccgcacggcagcatcgcctgcgcgttcaggctgaacaggccgcccgcgagggcggcagtgtt

SEQ ID NO: 614720 - DNA, 75 bp, synthetic construct
  source 1..75: mol_type = other DNA
gcagaggaaatggcagatgcagcgcagagtgcaatgcttgccaccaccgactttgatgccgatctgttgctgcag

SEQ ID NO: 614721 - DNA, 75 bp, synthetic construct
  source 1..75: mol_type = other DNA
gcagaggaaatggcagacgccgcacagagcgcaatgcttgccgccaccggttttgatgtcgatctgttgctgcag

SEQ ID NO: 614722 - DNA, 75 bp, synthetic construct
  source 1..75: mol_type = other DNA
ccctgaatcaccttaaccatgcgctgcagcttgatccccgctgcggtgtgaaaaaagaaaagcagcagctggagc

SEQ ID NO: 614723 - DNA, 75 bp, synthetic construct
  source 1..75: mol_type = other DNA
ggccgcccgtgagggcggcagcgttcgccacgcgtcgggctatgacctgatgctgctgcaactggcagaagaccg

SEQ ID NO: 614724 - DNA, 75 bp, synthetic construct
  source 1..75: mol_type = other DNA
ccctgaaccaccttacccatgcgctgcaactcgatccccgctgtggcgtgaaaaaagacaaacagcagctggagc

SEQ ID NO: 614725 - DNA, 75 bp, synthetic construct
  source 1..75: mol_type = other DNA
gacagttacgcaatgagtgaaaagagtcacggcagagaagaaatccgtcttcatattgtttgcgatgtccctgat

SEQ ID NO: 614726 - DNA, 75 bp, synthetic construct
  source 1..75: mol_type = other DNA
gaaacgcagcagaattattttcagggatacggcacattgctattattcttttgacgaatgagcaggtattctagg

SEQ ID NO: 614727 - DNA, 75 bp, synthetic construct
  source 1..75: mol_type = other DNA
atgagtaaatttaccaccccggcgatactggaaatgctgggccattacaaatggcgggtgtatgaacccttcgag

SEQ ID NO: 614728 - DNA, 75 bp, synthetic construct
  source 1..75: mol_type = other DNA
caacagtgatgtgattaaggtcccggctggggttgtgaccgatctggcgagcgtgccccggatattctggacatt

SEQ ID NO: 614729 - DNA, 75 bp, synthetic construct
  source 1..75: mol_type = other DNA
atgagcctgagtcccgcacggcagcatcgcctgcgcgttcaggctgaacaggccgctcgcgagggtggcagtgtt

SEQ ID NO: 614730 - DNA, 75 bp, synthetic construct
  source 1..75: mol_type = other DNA
aaaatatctccatatattggtgtgacacattcaactccttcatcaaaaggcattccaattggatttacttcttct

SEQ ID NO: 614731 - DNA, 75 bp, synthetic construct
  source 1..75: mol_type = other DNA
cattctgatctttatgagcggcgagcgagaaattcgcgataccgccgatgcgttgaataagttgaatttgcgtca

SEQ ID NO: 614732 - DNA, 75 bp, synthetic construct
  source 1..75: mol_type = other DNA
ctggaaaaactggcggttgatccacatcgcgaccgtgctcagatgctgaaagtcgaaaacgtccagcaggcgtgg

SEQ ID NO: 614733 - DNA, 75 bp, synthetic construct
  source 1..75: mol_type = other DNA
ggggcgtggaattaaaggtctgatcggacatacccaacctcgtcgtctggcggcacgtaccgtggcgaaccgtat

SEQ ID NO: 614734 - DNA, 75 bp, synthetic construct
  source 1..75: mol_type = other DNA
ggcgctggtggatgaacgcgacagcgtggcgatcaaactgtttgataacccgctcgaacaaaagcaagcgatgtg

SEQ ID NO: 614735 - DNA, 75 bp, synthetic construct
  source 1..75: mol_type = other DNA
aatcagcaagctggattacccgaacttctggcatcagggcaatctcaagctgcgtttgaggtatcagtttgagcc

SEQ ID NO: 614736 - DNA, 75 bp, synthetic construct
  source 1..75: mol_type = other DNA
aaagagtctgacttcctcgcgtttgtgaatctgtggaattatcttggcgagcagcaaaaggcgctttcttctaac

SEQ ID NO: 614737 - DNA, 75 bp, synthetic construct
  source 1..75: mol_type = other DNA
ggcgcagggcgcagtgatggcgacggaaaaagtcaccgtttatgggttgccgattgtcgccgcgcgtaaggttaa

SEQ ID NO: 614738 - DNA, 75 bp, synthetic construct
  source 1..75: mol_type = other DNA
ggcggttgcatcggttacaaagtgcgtttcagcgatcacgtaagtgataacacgatggtcaagctgatgaccgac

SEQ ID NO: 614739 - DNA, 75 bp, synthetic construct
  source 1..75: mol_type = other DNA
caactatctgcgcgtgcgcgaatggcaggacatctacactcagttgcgccaggtggtgaaagaactcggcattcc

SEQ ID NO: 614740 - DNA, 75 bp, synthetic construct
  source 1..75: mol_type = other DNA
cggaacgcttttcgcgccactttaataatgcgccgattatcgaagtctccggtcggacctatccggtggaagtgc

SEQ ID NO: 614741 - DNA, 75 bp, synthetic construct
  source 1..75: mol_type = other DNA
gaaaatctgtatggaactggggcgcggaattaaagggctgatcggtcatacccaaccgcgccgtctggcagcaag

SEQ ID NO: 614742 - DNA, 75 bp, synthetic construct
  source 1..75: mol_type = other DNA
gctcagcatttgattaaacgcacctacagcgaacctcactgggaacgggcgcagggcgcggtgatggcaacggaa

SEQ ID NO: 614743 - DNA, 75 bp, synthetic construct
  source 1..75: mol_type = other DNA
acgaaaatttaccccaccgtccctatcacacggatgatctcgcttttggtcttcgcatctccggcaaaggacgtg

SEQ ID NO: 614744 - DNA, 75 bp, synthetic construct
  source 1..75: mol_type = other DNA
gaacgcccccgccccgaacatcaccgtaaaaaatcccgtgaatggtcacgcacacctgctctatgcactcaatat

SEQ ID NO: 614745 - DNA, 75 bp, synthetic construct
  source 1..75: mol_type = other DNA
tcgaaatgtacaacgcatcgcttcccgttccgctttcacctcctgaatgtcgggctattggcaagagtattgcga

SEQ ID NO: 614746 - DNA, 75 bp, synthetic construct
  source 1..75: mol_type = other DNA
catcgtcatgaaatcgcggcggtgatcattgaaccgattgtccagggcgcaggcgggatgcgcatctaccatccg

SEQ ID NO: 614747 - DNA, 75 bp, synthetic construct
  source 1..75: mol_type = other DNA
ttttggcaaactgatttacctgatgccgccctatattattagcccgcaacagttgctgcgcctgaccgcagcggt

SEQ ID NO: 614748 - DNA, 75 bp, synthetic construct
  source 1..75: mol_type = other DNA
acaatcacccacagcttaatgcggcgatgaagtcgcaaattgatgccatgtcgcatgtgatgtttggcggtatca

SEQ ID NO: 614749 - DNA, 75 bp, synthetic construct
  source 1..75: mol_type = other DNA
aattgatccctgtgcgcggcagattgaaggggattttaaagataacccactgctgcacgcaggccacaatgagcc

SEQ ID NO: 614750 - DNA, 75 bp, synthetic construct
  source 1..75: mol_type = other DNA
cattaccgcgctggaactgctgccagtggcgcagtttgccagtgaaccacgtctgcaacgcatggggctaagtaa

SEQ ID NO: 614751 - DNA, 75 bp, synthetic construct
  source 1..75: mol_type = other DNA
ggcgcaaattgagcagtgtaaacaatggggcgcagaagcgattttgctcggtagcagcacgacgtcatttcccga

SEQ ID NO: 614752 - DNA, 75 bp, synthetic construct
  source 1..75: mol_type = other DNA
tcgctggtgggaagaaggcgacggcaatgtccgttggctgaatagatatgctcaacctttaagcacggatgagtg

SEQ ID NO: 614753 - DNA, 75 bp, synthetic construct
  source 1..75: mol_type = other DNA
atgtttgcgctgcatccggcgtatgcctgctcgccagaaacggcgctgaatgagtttcgcgatgcaatcaaagca

SEQ ID NO: 614754 - DNA, 75 bp, synthetic construct
  source 1..75: mol_type = other DNA
gaaacctgtcacgttgatggcttccgtttcgatctcgcaacagtcatggggcgaacgccggagtttcgtcaggat

SEQ ID NO: 614755 - DNA, 75 bp, synthetic construct
  source 1..75: mol_type = other DNA
ccgccctatattattctcccgcaacagttgcagcgtctgaccgcagcggttaaccgcgcggtacaggatgaaaca

SEQ ID NO: 614756 - DNA, 75 bp, synthetic construct
  source 1..75: mol_type = other DNA
ttcacgatttattacaggtgtccgtttaggaggactgtcatctgttcaaacatggaatgggcctggttggtctga

SEQ ID NO: 614757 - DNA, 75 bp, synthetic construct
  source 1..75: mol_type = other DNA
ttgcgcttttagccatttatggaatttaccgtactacggcggcagttatcgatcacatcaggtatatccgttccc

SEQ ID NO: 614758 - DNA, 75 bp, synthetic construct
  source 1..75: mol_type = other DNA
caaaaatgaacctggagaggatggttttgaaaaagataattttgattgtaattgcgcttttagccatttctggaa

SEQ ID NO: 614759 - DNA, 75 bp, synthetic construct
  source 1..75: mol_type = other DNA
tgaaccagcattcacctcgtttaacgcgcggcttaccggagcgtgaagacagtctggaagagtcttactgggatc

SEQ ID NO: 614760 - DNA, 75 bp, synthetic construct
  source 1..75: mol_type = other DNA
gcgcactggcagcgttgctgcatgacattaccgccaacagctaccaccgtagcaacgtaccaaactccagcaaac

SEQ ID NO: 614761 - DNA, 75 bp, synthetic construct
  source 1..75: mol_type = other DNA
ggtgtttatgatgcagacctaaaaggcgcatcaacattaattcttcatttcaatatgaacgcgggtagctgcccg

SEQ ID NO: 614762 - DNA, 75 bp, synthetic construct
  source 1..75: mol_type = other DNA
cccgccccgcaaagccgtatggacggcgaatgggatgagcgcgatatggtgggcttcgcgcggctaatggcggcg

SEQ ID NO: 614763 - DNA, 75 bp, synthetic construct
  source 1..75: mol_type = other DNA
ggacattttgtgcctcggtaaagccttaaccggcggtacgatgaccctttccgccacgctcactacgcgcgaagt

SEQ ID NO: 614764 - DNA, 75 bp, synthetic construct
  source 1..75: mol_type = other DNA
gctacgcgagcaacttgcccccgcctgtgacgccgaaatggttgccgatgtgcgcgtactgggggctatcggcgt

SEQ ID NO: 614765 - DNA, 75 bp, synthetic construct
  source 1..75: mol_type = other DNA
cagcaacagacccgcagtatcagctggcaccgcaacaggtataagcacgaacgccgcagcgtcaacactgacgcc

SEQ ID NO: 614766 - DNA, 75 bp, synthetic construct
  source 1..75: mol_type = other DNA
atgaaaaaaatcacacttttgctggcaggcagcgtcctgttgttgtccggctgtgccggcgttaaaagcagcttt

SEQ ID NO: 614767 - DNA, 75 bp, synthetic construct
  source 1..75: mol_type = other DNA
cacttctgctgcggtggttccatcagcatcccgctccgctgccagcagctcttccggtgtgcaggtaaccagcga

SEQ ID NO: 614768 - DNA, 75 bp, synthetic construct
  source 1..75: mol_type = other DNA
cgggcgataacttctgcgcgtattcaacaggcgcttaccctgaacgacaatcttacactgccgggcaatattggc

SEQ ID NO: 614769 - DNA, 75 bp, synthetic construct
  source 1..75: mol_type = other DNA
gtggcgcgaggaagcctataccctcgatgaactggctgattatctcgatttgagcgcttcagagcgtcgtagcat

SEQ ID NO: 614770 - DNA, 75 bp, synthetic construct
  source 1..75: mol_type = other DNA
cgcgccggacagctcggttaaggcgctgaaatacgccgctgcgattgaacgttcgctgtgtgagaaactttgtgc

SEQ ID NO: 614771 - DNA, 75 bp, synthetic construct
  source 1..75: mol_type = other DNA
gaacgcccccgcgccgaacatcaccgtaaaaaatcccgtgaacggtcatgctcacctgctctacgcactcaatat

SEQ ID NO: 614772 - DNA, 75 bp, synthetic construct
  source 1..75: mol_type = other DNA
tctgctttctgactgaactacacgttaaaggccgtaacaactactggaaagtgcgtcaggctgtcgagacggcaa

SEQ ID NO: 614773 - DNA, 75 bp, synthetic construct
  source 1..75: mol_type = other DNA
aagagacgctctacagtttcgatcagttgaaaacgaacaagagcgaaccgcgtcgtccgctgcgtaaaatggtgt

SEQ ID NO: 614774 - DNA, 75 bp, synthetic construct
  source 1..75: mol_type = other DNA
cacggtctggcgattgccgcagggattaaagccgcgaaagatctcggcaatatgccaccgaatatctgtaacgct

SEQ ID NO: 614775 - DNA, 75 bp, synthetic construct
  source 1..75: mol_type = other DNA
tggcgcgtaagccatcattttgacgatcgcgagcgggcggcgctggcatgggcggaatcggtgaccgatattgcc

SEQ ID NO: 614776 - DNA, 75 bp, synthetic construct
  source 1..75: mol_type = other DNA
atgactacattacgtcagccttactacgaacttagcccaacggtatataacgcgctggtgcaggccaaaacggcg

SEQ ID NO: 614777 - DNA, 75 bp, synthetic construct
  source 1..75: mol_type = other DNA
tgaataaacagaaacaaacgggcgtttatgttcaggatcaggcgcagtgggataaagtgctggtcaccctgggcg

SEQ ID NO: 614778 - DNA, 75 bp, synthetic construct
  source 1..75: mol_type = other DNA
tcggttaaggcgctgaaatacgccgctgcaattgaacgtgcgctgtgtgagaaacttgacgcagatgtgaactac

SEQ ID NO: 614779 - DNA, 75 bp, synthetic construct
  source 1..75: mol_type = other DNA
gatgaactggctgattatctcgatttgagcgcctcagcgcgccgtagcatcgataaacattacgggatggggcga

SEQ ID NO: 614780 - DNA, 75 bp, synthetic construct
  source 1..75: mol_type = other DNA
ggcgcaaccggtcgcccggtggcgttgctggcacagttcctgttaaaccgcgctgggtttaacggcgaagagtaa

SEQ ID NO: 614781 - DNA, 75 bp, synthetic construct
  source 1..75: mol_type = other DNA
tggcaacgctggcatcgctacaaaaagaagagcctgaagcctttgtcgccgaattgtttaaacatattgccgatt

SEQ ID NO: 614782 - DNA, 75 bp, synthetic construct
  source 1..75: mol_type = other DNA
gtggcgcgaggaaccctactccctcgatgaactggctgattatctcgatttgagcgcctcagcgcgccgtagcat

SEQ ID NO: 614783 - DNA, 75 bp, synthetic construct
  source 1..75: mol_type = other DNA
tttgacgttgaccgcgagggggcagcgattgactggagcgaccggaacgcccccgcgccgaacatcaccgttaaa

SEQ ID NO: 614784 - DNA, 75 bp, synthetic construct
  source 1..75: mol_type = other DNA
atcgctgggtcattgacgatattgccagcaatcatggtagcgtctggcaggcagttaatagcgagaatgaaaaaa

SEQ ID NO: 614785 - DNA, 75 bp, synthetic construct
  source 1..75: mol_type = other DNA
tcgttgggtcattgacgatattgtcagcaatcatggcagcgtcttacaagcagttaatagcgagaatgaaaaaac

SEQ ID NO: 614786 - DNA, 75 bp, synthetic construct
  source 1..75: mol_type = other DNA
tggcaacactggcttcattacaaaaagaagagcctgaagcctttgtcgctgaactgtttaaacatattgccgatt

SEQ ID NO: 614787 - DNA, 75 bp, synthetic construct
  source 1..75: mol_type = other DNA
tcagggctggccagcgttctcacagtggcttgaagcggtgatccagcgtgtcgaaatgtacaacgcatcgcttcc

SEQ ID NO: 614788 - DNA, 75 bp, synthetic construct
  source 1..75: mol_type = other DNA
gctatccgccaaggctggccgcagtatgaccaatggctacaagcctgcattgaacgcgctaaagcctacaacctg

SEQ ID NO: 614789 - DNA, 75 bp, synthetic construct
  source 1..75: mol_type = other DNA
catcgtcgtgggcgtcttcgaaccacgtcgcctttctccgattgcagaacagctcgataagatcagtgatgggta

SEQ ID NO: 614790 - DNA, 75 bp, synthetic construct
  source 1..75: mol_type = other DNA
caagaaagcgcatgggggcctgctgcaactattgcggcgcgacagtctgctaccggcactaaaaccgatacgccg

SEQ ID NO: 614791 - DNA, 75 bp, synthetic construct
  source 1..75: mol_type = other DNA
agcatcgataaacattacgggatggggcgaaactgccacctgttcgaaatgacgcgcaaatgggcttacagggcg

SEQ ID NO: 614792 - DNA, 75 bp, synthetic construct
  source 1..75: mol_type = other DNA
gctttgctgaaaacaaaacctcgcaaaacagcgtttatggttacggtgtctgctccgatccggcgaatgcttaca

SEQ ID NO: 614793 - DNA, 75 bp, synthetic construct
  source 1..75: mol_type = other DNA
cggatgcctggatttgcccggtaaccaataaaatcctggatacggcttttaaaggcttaaccccttatctgccta

SEQ ID NO: 614794 - DNA, 75 bp, synthetic construct
  source 1..75: mol_type = other DNA
catgcgtcgccctaaacggactaacagcctggaaacacaggggctggttcaggttggttaccaggggctggagaa

SEQ ID NO: 614795 - DNA, 75 bp, synthetic construct
  source 1..75: mol_type = other DNA
aaactggatgagatgacgcagcggttaaatgcgctgacaaaacagcattacagccagcaggaagtactgcgttgg

SEQ ID NO: 614796 - DNA, 75 bp, synthetic construct
  source 1..75: mol_type = other DNA
aagtacctgttgaacatgacactacagaggaaaaagtcgaaaaagagaacagtttccagcctccgttgattattg

SEQ ID NO: 614797 - DNA, 75 bp, synthetic construct
  source 1..75: mol_type = other DNA
ttccgcgatgacgtttctttccagttagtcaaaatggatcaagcttgtcaggaagggaatgtggtcaacagtgaa

SEQ ID NO: 614798 - DNA, 75 bp, synthetic construct
  source 1..75: mol_type = other DNA
ctgctgcgcgatctggctgccagaaccttcctgccgggatacggtttcccgacagatgtagtgacgtttgataac

SEQ ID NO: 614799 - DNA, 75 bp, synthetic construct
  source 1..75: mol_type = other DNA
tatcgcaccaaagtgcagcgtttgccgattgaacccatttcgcaggcgtctgccaatcagcgtaaaggccgctgt

SEQ ID NO: 614800 - DNA, 75 bp, synthetic construct
  source 1..75: mol_type = other DNA
taccgaaatcttgccgctttatgcgcggctttccaacagcgaacagaaccgcgtgttccagtcgcacagcgggcg

SEQ ID NO: 614801 - DNA, 75 bp, synthetic construct
  source 1..75: mol_type = other DNA
atgcacagtctggtcatcggacagatcaggacggatgagaaatccaatgagatcacagctatccctgaacttctt

SEQ ID NO: 614802 - DNA, 75 bp, synthetic construct
  source 1..75: mol_type = other DNA
cgaagacggcccgacacatcagcccgttgagcaactggcgtcgctgcgtctgacgccgaatatggaaacctggcg

SEQ ID NO: 614803 - DNA, 75 bp, synthetic construct
  source 1..75: mol_type = other DNA
gccacggctcggcgctgggtgcagatgaagtggcgctggtgcgtgaacgtctgcaatggccgtatgctcctttcg

SEQ ID NO: 614804 - DNA, 75 bp, synthetic construct
  source 1..75: mol_type = other DNA
tttttgggtgatggctgcctgatggaagggatctcccacgaggcctgtggtcttgcaggaacgctgaagctcggc

SEQ ID NO: 614805 - DNA, 75 bp, synthetic construct
  source 1..75: mol_type = other DNA
aagtacctgttgaacatgacgctacagaagaaaaagtcgaaaaagagaacagtttccagcctccgttgattattg

SEQ ID NO: 614806 - DNA, 75 bp, synthetic construct
  source 1..75: mol_type = other DNA
tttcgctgaggaacagtaccagcaactgtggttcccggcttatggactgctcccccgttggcaccatgcccgccc

SEQ ID NO: 614807 - DNA, 75 bp, synthetic construct
  source 1..75: mol_type = other DNA
cttcagcaacagcgggcggaagacctgctggagcaggatcgtatcgaccaactagtgcagttggttggcgacaaa

SEQ ID NO: 614808 - DNA, 75 bp, synthetic construct
  source 1..75: mol_type = other DNA
attcgcggtaaaaggaacccaggggcggctaaataaagcctttgaggaaaaatttccgctgaaagaattaaataa

SEQ ID NO: 614809 - DNA, 75 bp, synthetic construct
  source 1..75: mol_type = other DNA
ccgcacccaccgcggggcgaatcagcaagtcagagactgggtaagctatgtgctttctccgacgaatctggtcta

SEQ ID NO: 614810 - DNA, 75 bp, synthetic construct
  source 1..75: mol_type = other DNA
cgcagtatgcgcggcctgcgtatgaacaccctcggctggttcgattttaaatcagcgtggtttgcgccgccggat

SEQ ID NO: 614811 - DNA, 75 bp, synthetic construct
  source 1..75: mol_type = other DNA
aggcattcgatgacttcttcggttaccgggcattaatcgacgaagttaacgtctgggttctgccggaaattgccg

SEQ ID NO: 614812 - DNA, 75 bp, synthetic construct
  source 1..75: mol_type = other DNA
gaagtttagtctccaggattcccggggcggttcaaaaaaataagagtacgcgttgccaattctattggtcagaaa

SEQ ID NO: 614813 - DNA, 75 bp, synthetic construct
  source 1..75: mol_type = other DNA
tagtcaaaatggctcaggcctgtcaggaagggaatgtggtcaacagcgaagagagctgggcaacggatgtactgg

SEQ ID NO: 614814 - DNA, 75 bp, synthetic construct
  source 1..75: mol_type = other DNA
ccgcacctggacagaaatggttaacgagcttaaagataaagccgatatccgtggcccggttctgaaatataacca

SEQ ID NO: 614815 - DNA, 75 bp, synthetic construct
  source 1..75: mol_type = other DNA
gtcggacaatccgtctattacccgtgacgtttccggtgaaggcgtacagcaggcactgttgaaactgatcgaagg

SEQ ID NO: 614816 - DNA, 75 bp, synthetic construct
  source 1..75: mol_type = other DNA
gagattaaaggaaaaatcatcacaactgatgcgatgggttgccagaaagatattgcagagaagatacaaaaacag

SEQ ID NO: 614817 - DNA, 75 bp, synthetic construct
  source 1..75: mol_type = other DNA
cgagtttattctgccggctaaagccgccaacgctgtcgagcgggtcaaagacattcagatccacaaacagttgaa

SEQ ID NO: 614818 - DNA, 75 bp, synthetic construct
  source 1..75: mol_type = other DNA
tcttatgacaagagtcgccgtaagggagcgattcatgtcattagtgcgttctcaacaatgcacagtctggtcatc

SEQ ID NO: 614819 - DNA, 75 bp, synthetic construct
  source 1..75: mol_type = other DNA
catccggccgtttatggttatgccggacgggaatagcggtggttttgccctgccggtcaccttcagtatgcctga

SEQ ID NO: 614820 - DNA, 75 bp, synthetic construct
  source 1..75: mol_type = other DNA
caggtgcagggaaatatccggcagaagcacgccttcaccccgtatcccgtgggccacagcttattccggtattac

SEQ ID NO: 614821 - DNA, 75 bp, synthetic construct
  source 1..75: mol_type = other DNA
atgcgaagaatatttagagaaaaaacaatcaatacattactaataatcacactgttgacattctattggctgatt

SEQ ID NO: 614822 - DNA, 75 bp, synthetic construct
  source 1..75: mol_type = other DNA
gctgtttatcagtaactttgtctggctgggtagtcactatcgccgacgcttccgtgcggataacgcgattgctgc

SEQ ID NO: 614823 - DNA, 75 bp, synthetic construct
  source 1..75: mol_type = other DNA
taccgtcgctaaccgtattgccgaagagttgcaaacggagccgggcggctgcattggctacaaagtccgcttcag

SEQ ID NO: 614824 - DNA, 75 bp, synthetic construct
  source 1..75: mol_type = other DNA
gaccggcggcattggcctgccagtcagcttccgcctgcctgaacatcccgtcgacgttgatgctctgccggaaag

SEQ ID NO: 614825 - DNA, 75 bp, synthetic construct
  source 1..75: mol_type = other DNA
atgaaatttcccggcaaacgtaaatccaaacattattttcccgtaaacgcacgagatccgctgcttcagcaattc

SEQ ID NO: 614826 - DNA, 75 bp, synthetic construct
  source 1..75: mol_type = other DNA
gttcggtgctgctgggcgtcatgtgcagcaatattgaaattggcagctatgcctatcgttacctgtgtaacacct

SEQ ID NO: 614827 - DNA, 75 bp, synthetic construct
  source 1..75: mol_type = other DNA
atgaacactaatggagcgggggatggcgcattggcagcgttgctgcatgacattaccgccaacagctaccatcgt

SEQ ID NO: 614828 - DNA, 75 bp, synthetic construct
  source 1..75: mol_type = other DNA
caagccgaaactgttattactgcgggtaacaaggcggtggcggcgaatgcaagtttctttaaacaatactatgct

SEQ ID NO: 614829 - DNA, 75 bp, synthetic construct
  source 1..75: mol_type = other DNA
gaatcaaagaatcctatagcaaagagctaattgagcgatatataccaacaagtgaaaaaatagataaaatcctac

SEQ ID NO: 614830 - DNA, 75 bp, synthetic construct
  source 1..75: mol_type = other DNA
tttatgtgccgactgggagatgaacaggaggatcatactatgaatgcatttttgcgttttctggatgcagatatc

SEQ ID NO: 614831 - DNA, 75 bp, synthetic construct
  source 1..75: mol_type = other DNA
ggtgaactgtggttcttccgtccgaccgctccggcgctctctgcgtttgttggcgcttcgttgctgtttatcagt

SEQ ID NO: 614832 - DNA, 75 bp, synthetic construct
  source 1..75: mol_type = other DNA
ggcgtggcagcagtggatcaacaaactgccgcctgcacgtcgtgaggatgaagacgtgaaagagatccgttggat

SEQ ID NO: 614833 - DNA, 75 bp, synthetic construct
  source 1..75: mol_type = other DNA
gcaactacaaagtgaaggcgtggccagcgttggtggatgagcgcgacagcgtggcgatcaaactgtttgataatc

SEQ ID NO: 614834 - DNA, 75 bp, synthetic construct
  source 1..75: mol_type = other DNA
ttctcaacaatgcacagcctggtcatcggacagatcaagacggatgagaaatccaatgagattacagctatccca

SEQ ID NO: 614835 - DNA, 75 bp, synthetic construct
  source 1..75: mol_type = other DNA
tccgctgaaagaattaaataatccagagcatgacagttacgcaatcagtgaaaagagtcacggcagagaagaaat

SEQ ID NO: 614836 - DNA, 75 bp, synthetic construct
  source 1..75: mol_type = other DNA
aaattcgccacagcgatccgaaatcactggcacgtggagaataagctgcactggcgtctggacgtggtaatgaat

SEQ ID NO: 614837 - DNA, 75 bp, synthetic construct
  source 1..75: mol_type = other DNA
ctgggatcaggtgcctgatcacctgaaaatcaccttccgcgtggtggatgacaaaaacaagaagctaaaagaagg

SEQ ID NO: 614838 - DNA, 75 bp, synthetic construct
  source 1..75: mol_type = other DNA
gcgtccggggagaaacggataaaaggagagaaggacagtcggatgctgtttaatgttggtatgaatgcgcagata

SEQ ID NO: 614839 - DNA, 75 bp, synthetic construct
  source 1..75: mol_type = other DNA
tggggatttacaggcgcagacagactggtttgcaactggtgtggatattatcgcgactgactgggaggctttctg

SEQ ID NO: 614840 - DNA, 75 bp, synthetic construct
  source 1..75: mol_type = other DNA
attcagaagatgatctcgttttgagtgactttatagggcgacgagaatgctggacgcaaaagcgcgaggagcttt

SEQ ID NO: 614841 - DNA, 75 bp, synthetic construct
  source 1..75: mol_type = other DNA
ccaggaaagcgatggcgcgtaaaaccggtgctcgtggtctgcgttccatcgttgaagcggcgctactcgatacca

SEQ ID NO: 614842 - DNA, 75 bp, synthetic construct
  source 1..75: mol_type = other DNA
aagtgacagcccgtgccggtctgggctaccagttcgacctgctggctaacggcgaaaccgtattgcgggatgcat

SEQ ID NO: 614843 - DNA, 75 bp, synthetic construct
  source 1..75: mol_type = other DNA
cgtttgaatggaaaggactgaagaaattatgcgtggcagtctcctttcggtcaataatagcagaacaaaagaaag

SEQ ID NO: 614844 - DNA, 75 bp, synthetic construct
  source 1..75: mol_type = other DNA
gagcttgatcagtggatggaaagccggatttatccggcgatgactgcgatcccggcactggctggactgattacc

SEQ ID NO: 614845 - DNA, 75 bp, synthetic construct
  source 1..75: mol_type = other DNA
gagcttgatcagtggatggaaagccggatttatccggagatgaatgcgatcccggcactggctggactgattacc

SEQ ID NO: 614846 - DNA, 75 bp, synthetic construct
  source 1..75: mol_type = other DNA
agtcgcgatcggggtgatttacgccagagcaatggtgaaaccgcgccgaatgacgagtccattaataacatgctg

SEQ ID NO: 614847 - DNA, 75 bp, synthetic construct
  source 1..75: mol_type = other DNA
gagcttgatcagtggatggaaagccggatttatccggggatgagtgcgatcccggcactggctggactgattacc

SEQ ID NO: 614848 - DNA, 75 bp, synthetic construct
  source 1..75: mol_type = other DNA
gagtatcgtcgtgatgacgatatggcgttatggagctctgcagatctgacttattccattacatacgagatgtga

SEQ ID NO: 614849 - DNA, 75 bp, synthetic construct
  source 1..75: mol_type = other DNA
cccggcactggtaggactgattaccacgatggttacgcagggctatgactatcgtcgtgatgacgatatggcatt

SEQ ID NO: 614850 - DNA, 75 bp, synthetic construct
  source 1..75: mol_type = other DNA
gaagaatcatattgtgatatacatgatgttgatatagatgaaagcttcgatgttttattggcaggatttccttgt

SEQ ID NO: 614851 - DNA, 75 bp, synthetic construct
  source 1..75: mol_type = other DNA
tggcgttatggagttctgcagatctgacttattccattacatacgagatgtgaggacgatatggcaacaccaaat

SEQ ID NO: 614852 - DNA, 75 bp, synthetic construct
  source 1..75: mol_type = other DNA
cccacggcaatatctcgccctacatcatggcatggctgatcaccgtactgattcgtctggcgacgggtcagggtg

SEQ ID NO: 614853 - DNA, 75 bp, synthetic construct
  source 1..75: mol_type = other DNA
gccgggtccggtggcgctggtgaatgcttatggcgcggatatggggatggtttatatctatggcgtactggtgac

SEQ ID NO: 614854 - DNA, 75 bp, synthetic construct
  source 1..75: mol_type = other DNA
tggctatgaccatcgcggcgtgctgattcttgttgacggcgttcgtcagggaacagataccggacacttgaatgg

SEQ ID NO: 614855 - DNA, 75 bp, synthetic construct
  source 1..75: mol_type = other DNA
ctccaccattaccgtactggcgtctggtatggcggcgcacgcaggcgtagcgcgtctgatgtacgtaatgggtcg

SEQ ID NO: 614856 - DNA, 75 bp, synthetic construct
  source 1..75: mol_type = other DNA
tgcctttaacctgcgtagcctgaaatccgtagcgaacttcaacaccgtcattgtggtgttgcagattgtgctgat

SEQ ID NO: 614857 - DNA, 75 bp, synthetic construct
  source 1..75: mol_type = other DNA
atcccgatgattaccggggcgacaatcctgtgtttctcctttaccggctttgacggcatcagcaatctgtcggaa

SEQ ID NO: 614858 - DNA, 75 bp, synthetic construct
  source 1..75: mol_type = other DNA
acaatatttctgctcgcagcacactctctgatgcattactagaccacttgaaaacaaaatataaacttgaagcga

SEQ ID NO: 614859 - DNA, 75 bp, synthetic construct
  source 1..75: mol_type = other DNA
tgacgctgtttgatacgttcggtatcgtatctggcatgaccgatggtcacgtgccaacagcttatgccttcgctc

SEQ ID NO: 614860 - DNA, 75 bp, synthetic construct
  source 1..75: mol_type = other DNA
atcagcagcagttacagcaaacaaccaggctatggcgtgaatgatttctacgtcagttatcaaggacaacaggcg

SEQ ID NO: 614861 - DNA, 75 bp, synthetic construct
  source 1..75: mol_type = other DNA
gcgatctgccgattaccctgcttggcggaacccgctatgacagttatcgcggtagcagcgacggctacaaagatg

SEQ ID NO: 614862 - DNA, 75 bp, synthetic construct
  source 1..75: mol_type = other DNA
cgcggcaaagacactgataccggggaatatatctctactattaacccggataccgtcaccagtaccctgaatatt

SEQ ID NO: 614863 - DNA, 75 bp, synthetic construct
  source 1..75: mol_type = other DNA
tcttgctgcacgcttacgtttgatggtcgccccgctgtttttgatgaggcggattttccggcaattgctgtttat

SEQ ID NO: 614864 - DNA, 75 bp, synthetic construct
  source 1..75: mol_type = other DNA
gcgatggttacgcagggctatgagtatcgtcgtgatgacgatatggcattgtggagttctgcagatctgacttat

SEQ ID NO: 614865 - DNA, 75 bp, synthetic construct
  source 1..75: mol_type = other DNA
atggctacatacggcggtcagtttacgcttacgctttttgatggtcgccccgctgtttttgatgaggcggatttt

SEQ ID NO: 614866 - DNA, 75 bp, synthetic construct
  source 1..75: mol_type = other DNA
aaagatcgacgttttgtatccctcattcaggggctaactccggaacagatagatcgaattcagtgctggtttcca

SEQ ID NO: 614867 - DNA, 75 bp, synthetic construct
  source 1..75: mol_type = other DNA
aaggggaaaacccgtatgcgaacaagcgtaataccctgacgccgactcagatgcgcaagcgtaagcgtctgatga

SEQ ID NO: 614868 - DNA, 75 bp, synthetic construct
  source 1..75: mol_type = other DNA
aagcgtaacaccctgacgccgacccagatgcgcaagcgtaagcgtttgatgaagcatattaagaaaagtaagtaa

SEQ ID NO: 614869 - DNA, 75 bp, synthetic construct
  source 1..75: mol_type = other DNA
caggtgaaagacctgcctgattcctacaagcgttacctgatgaactacttccgcaaatcgctggacgtaatggga

SEQ ID NO: 614870 - DNA, 75 bp, synthetic construct
  source 1..75: mol_type = other DNA
aatgtgtccgccagccaggttgggccaacgttcgacgacgaggtaaagcgggtgctggccgatatggccctgccc

SEQ ID NO: 614871 - DNA, 75 bp, synthetic construct
  source 1..75: mol_type = other DNA
cgtggagcatttctgcgggctggagtgctatcagcgcttccaggcgcgggccagcactgcgaccgaaaccagcgt

SEQ ID NO: 614872 - DNA, 75 bp, synthetic construct
  source 1..75: mol_type = other DNA
gggctttatcgacttcgctcgcgtacattttatctctgcattgcacggtagcggtgttggtaacctgtttgaatc

SEQ ID NO: 614873 - DNA, 75 bp, synthetic construct
  source 1..75: mol_type = other DNA
gtcgtccgaacgtaggtaagtctacactcactaaccgtattcttggtgaagagcgcgttgttgtttatgacatgc

SEQ ID NO: 614874 - DNA, 75 bp, synthetic construct
  source 1..75: mol_type = other DNA
ggggtgccaccatgaatgcaaatgatccgactgccaccagttgctgcgtgtgctgcaaggaaatcccgctcgatg

SEQ ID NO: 614875 - DNA, 75 bp, synthetic construct
  source 1..75: mol_type = other DNA
tcaaaaaggttgataacaaaacgattgccaaagctggtctcagtgaactcggaccgatgaaaatccgagaaaaaa

SEQ ID NO: 614876 - DNA, 75 bp, synthetic construct
  source 1..75: mol_type = other DNA
actcactaaccgtatccttggcgaagaacgcgtcgtagtttacgacatgccgggcaccacgcgtgacagtattta

SEQ ID NO: 614877 - DNA, 75 bp, synthetic construct
  source 1..75: mol_type = other DNA
ctacattccaatggaacgtgatggacgtgagtatgtactcattgacacagcaggcgtacgtaaacgtggcaaaat

SEQ ID NO: 614878 - DNA, 75 bp, synthetic construct
  source 1..75: mol_type = other DNA
aaggggaaaacccgtatgcgaataagcgtaacaccctgacgccaacccagatgcgtaaacgtaagcgtctgatga

SEQ ID NO: 614879 - DNA, 75 bp, synthetic construct
  source 1..75: mol_type = other DNA
aaaatcctgacgttcctgaataaccaggatgttggctcgctggtggcgctgataacgcgccggggaggttcaggt

SEQ ID NO: 614880 - DNA, 75 bp, synthetic construct
  source 1..75: mol_type = other DNA
aaagataaagccacgcttaccaacgcccgccgtgatctggcgcgttatcagcaactggcaaaaaccaatctcgtc

SEQ ID NO: 614881 - DNA, 75 bp, synthetic construct
  source 1..75: mol_type = other DNA
gcgcagccgcgtcgacggccaactgatggccattcacttccaggaaggccagcaggtcaaagccggcgatctgct

SEQ ID NO: 614882 - DNA, 75 bp, synthetic construct
  source 1..75: mol_type = other DNA
ccaacaggcactggtcagtgaaaccgaaggcaccattaaggcggatgaagccagcgttgccagcgcacaactgca

SEQ ID NO: 614883 - DNA, 75 bp, synthetic construct
  source 1..75: mol_type = other DNA
ttacagcggcgagccatgaatacaacgccctcctcggtcaactcagcgcagcagacgcaggtgatccatctgcat

SEQ ID NO: 614884 - DNA, 75 bp, synthetic construct
  source 1..75: mol_type = other DNA
aaacttcttaccttcatcaacagtcaggatctaggaagcctgttcagtatgctttcgcgattgcgtggaggaggg

SEQ ID NO: 614885 - DNA, 75 bp, synthetic construct
  source 1..75: mol_type = other DNA
cggtagcggctggtggtctgatgggtgccagcatgttcggcctggcaaccggcatagattacggtgtggtttttg

SEQ ID NO: 614886 - DNA, 75 bp, synthetic construct
  source 1..75: mol_type = other DNA
gatggtcgcgttggtctcaagcaggttgatgttggtaaccaaatctccagtggcgacaccaccgggattgtggtg

SEQ ID NO: 614887 - DNA, 75 bp, synthetic construct
  source 1..75: mol_type = other DNA
tatcagcaactggcaaaaaccaatctcgtctcccgtcaggaactggatgcccaacaggcgctggtcagtgaaacc

SEQ ID NO: 614888 - DNA, 75 bp, synthetic construct
  source 1..75: mol_type = other DNA
aaaatcctgacgtttctgaataaccaggatatcggttcgctggtggcgcttataacgcgccggggaggttcaggt

SEQ ID NO: 614889 - DNA, 75 bp, synthetic construct
  source 1..75: mol_type = other DNA
gaagcccagagcgccactactccggaagagaaagccaccagccgcgaatacgcgaaaaaaggagcgcgctcctga

SEQ ID NO: 614890 - DNA, 75 bp, synthetic construct
  source 1..75: mol_type = other DNA
gcgcaaaaagccggaaaaccgctggtggtagaagcctgggatcgcaccaactcgaagaaattaagtgaaggcacg

SEQ ID NO: 614891 - DNA, 75 bp, synthetic construct
  source 1..75: mol_type = other DNA
gtggtgatcacccagacgcatcctatcgatttgctctttaccctgccggaaagcgatatcgctaccgtagtgcag

SEQ ID NO: 614892 - DNA, 75 bp, synthetic construct
  source 1..75: mol_type = other DNA
cagccatcgattacctttgtattgtacagagccttgttgatgccctgttttgttcgatgaatttagaaaatgacg

SEQ ID NO: 614893 - DNA, 75 bp, synthetic construct
  source 1..75: mol_type = other DNA
atgtcatcgcagtttcttaccatgacgcgactgatatttgccgggtttattctgctgacactctcatttgtccac

SEQ ID NO: 614894 - DNA, 75 bp, synthetic construct
  source 1..75: mol_type = other DNA
tgaacgttttgattgccgccgtattatgggggagttccggtgtctgcgcacaatacatcatggaacaaagccaga

SEQ ID NO: 614895 - DNA, 75 bp, synthetic construct
  source 1..75: mol_type = other DNA
cgtcagccgccgatgttcttcccgtacggcggttctactatcacaggccagggcaaggccggacgctttatctgg

SEQ ID NO: 614896 - DNA, 75 bp, synthetic construct
  source 1..75: mol_type = other DNA
ggatgaacagggcgagattatctgcccggatgcgccgatcccgtgcattaacgaagtggacatgggcagtgctat

SEQ ID NO: 614897 - DNA, 75 bp, synthetic construct
  source 1..75: mol_type = other DNA
gaaactgcaattttccctgccagacagtattaccgtatttggcgatcgcgaccgtttaatgcagttattcaataa

SEQ ID NO: 614898 - DNA, 75 bp, synthetic construct
  source 1..75: mol_type = other DNA
ttagtcggcgtaagaaagacgccgcgtattcctgccgttccgctcacggaacttaaccgcgagcagaagtggtag

SEQ ID NO: 614899 - DNA, 75 bp, synthetic construct
  source 1..75: mol_type = other DNA
ccgttccgctcacggaacttaaccgcgagcagaagtggcagatgatgttgtcaaagagtactgagagatcccctc

SEQ ID NO: 614900 - DNA, 75 bp, synthetic construct
  source 1..75: mol_type = other DNA
accgcattaggggctgtcatggggtacgaactgcgcgcctggcagcgtaaggaagctatcagcgacgatctcagc

SEQ ID NO: 614901 - DNA, 75 bp, synthetic construct
  source 1..75: mol_type = other DNA
gaaaccatctttgcctgggcgattaacccactttgctgggcaagaggattcacccttgtcgatggcaaggcacag

SEQ ID NO: 614902 - DNA, 75 bp, synthetic construct
  source 1..75: mol_type = other DNA
aaatcattcagagcggcgaaaaatcccgcccacagtcaaacacctggaacccgttcgcattcagcaccgaagcct

SEQ ID NO: 614903 - DNA, 75 bp, synthetic construct
  source 1..75: mol_type = other DNA
caaagacaagctgaaactcaaagacctgatcaatcttcaggcaggggaaaacgtcaccattttcaacggacatcc

SEQ ID NO: 614904 - DNA, 75 bp, synthetic construct
  source 1..75: mol_type = other DNA
caccttctgtatggggatgatcaacggcgtcttcccgcaaaaagcgatgattgacgtcggcatcccggtggagtc

SEQ ID NO: 614905 - DNA, 75 bp, synthetic construct
  source 1..75: mol_type = other DNA
gccgtcggatggattctgtgactgttcacgtgatgggcaaacaggcggaaattaacgggatcaagtatgacgtga

SEQ ID NO: 614906 - DNA, 75 bp, synthetic construct
  source 1..75: mol_type = other DNA
tcactggtggtgttttcagcgcagtaccggcctgcccgcgatgatgtggttgtgtttgacggtcgctcactggtg

SEQ ID NO: 614907 - DNA, 75 bp, synthetic construct
  source 1..75: mol_type = other DNA
tcgggtgatgggcaaacaggcggagattaacggcgtagtgtatgacgtgatgccggaggaagagtccgcggagat

SEQ ID NO: 614908 - DNA, 75 bp, synthetic construct
  source 1..75: mol_type = other DNA
ggaaaaaatcaaataataaatatcatcacaaaaacaataatccagaataccactattattcaccagcattagtag

SEQ ID NO: 614909 - DNA, 75 bp, synthetic construct
  source 1..75: mol_type = other DNA
atggtgcaattcgtgatttctgtcgggaacgaggtctaagtaatgtatctatggaattgggatgtgtcagggaac

SEQ ID NO: 614910 - DNA, 75 bp, synthetic construct
  source 1..75: mol_type = other DNA
atcgaaactacttagtaccgcaatcactagcttttgaatatgaacattttatattccatattcgtagggctatta

SEQ ID NO: 614911 - DNA, 75 bp, synthetic construct
  source 1..75: mol_type = other DNA
ttgctagagagaatgataaagttaaaggggataaggtagattcttggttttattttttacaaaaacaatttcagt

SEQ ID NO: 614912 - DNA, 75 bp, synthetic construct
  source 1..75: mol_type = other DNA
ctgtaagagaaaataacatatctcattcaggaactattgacagtttaaaaactttaaaggatgaggagatttcag

SEQ ID NO: 614913 - DNA, 75 bp, synthetic construct
  source 1..75: mol_type = other DNA
tgcgcgaagcctgcctggattggtatgaaacccgtgggatgcgcttcaacttcggcacccacagcgccgaagaac

SEQ ID NO: 614914 - DNA, 75 bp, synthetic construct
  source 1..75: mol_type = other DNA
gggggcgctttccggcagtcagttgtcactggtggtgttttcagcgcagtaccggccggcccgcgatgatgtggt

SEQ ID NO: 614915 - DNA, 75 bp, synthetic construct
  source 1..75: mol_type = other DNA
ttagatctgaaaaactgcactatgacgatgacgcgtaataacgaagaggtttccagcgggcgcggcagcgaatgt

SEQ ID NO: 614916 - DNA, 75 bp, synthetic construct
  source 1..75: mol_type = other DNA
atgacgaagcatactcttgagcaactggcggcggatttacgccgcgccgcagagcagggcgaagcgattgcgccg

SEQ ID NO: 614917 - DNA, 75 bp, synthetic construct
  source 1..75: mol_type = other DNA
ttattgaccgcatgagcgacggcggcgggtgcacgctgtcattcacctgggattcttaccgttccaagggggcag

SEQ ID NO: 614918 - DNA, 75 bp, synthetic construct
  source 1..75: mol_type = other DNA
cctaactccaacaacctggggacgttatgcgtgccaatggatgcacaaattctaatcaacgacggtcagcatcgc

SEQ ID NO: 614919 - DNA, 75 bp, synthetic construct
  source 1..75: mol_type = other DNA
taacctgcaatgcattgaaaatcgcactctctatccccctcactcctgaagaacaggagcttgaagctcaaatgg

SEQ ID NO: 614920 - DNA, 75 bp, synthetic construct
  source 1..75: mol_type = other DNA
ggctactcgtgcattgttgggtaaagatcccaaacagagcaattttgacgaatgtgttcagttagcaagtcgcta

SEQ ID NO: 614921 - DNA, 75 bp, synthetic construct
  source 1..75: mol_type = other DNA
tttaaagaaacacaacttacggatgtacggattggtcaatcggtcaatattatcagcgatctttatggtgaaaat

SEQ ID NO: 614922 - DNA, 75 bp, synthetic construct
  source 1..75: mol_type = other DNA
tcacggggaatgcagatccaatttctgcacaagtctcaggcagtgtcactgtcgttaatcataaagatacgaact

SEQ ID NO: 614923 - DNA, 75 bp, synthetic construct
  source 1..75: mol_type = other DNA
atcccaaagagaacaactttgaggaatgcacccaaattgctacccaatattggcaagctatttttagcgtgatgc

SEQ ID NO: 614924 - DNA, 75 bp, synthetic construct
  source 1..75: mol_type = other DNA
aacatcagcatattcagtgggatgcaatgcaccccggtatatgattactctttatttggatttaatctcttataa

SEQ ID NO: 614925 - DNA, 75 bp, synthetic construct
  source 1..75: mol_type = other DNA
gttcggatgttgaatataaaactggaaaatatgatgtatcatccataacaaatgacaatcgatttaataaatatc

SEQ ID NO: 614926 - DNA, 75 bp, synthetic construct
  source 1..75: mol_type = other DNA
ctccccttgtcgatactgtaactgttaaggttgctaacgttactaagtacgacgatcaccaggtagaaattcgcg

SEQ ID NO: 614927 - DNA, 75 bp, synthetic construct
  source 1..75: mol_type = other DNA
ataacattccggtgctgttttttgtcgatgagggattaaaacgcagccagcagatgttcgctgatctaaataaat

SEQ ID NO: 614928 - DNA, 75 bp, synthetic construct
  source 1..75: mol_type = other DNA
tttcaaagctctcatatgagcaagtaatagaaataaagaaatcaaagggagttaatcaaagagagcttgctaaaa

SEQ ID NO: 614929 - DNA, 75 bp, synthetic construct
  source 1..75: mol_type = other DNA
aattctgtcagaaatataatcatcagttcggatgttgaatataaaactggaaaatatgatgtatcatccataaca

SEQ ID NO: 614930 - DNA, 75 bp, synthetic construct
  source 1..75: mol_type = other DNA
gattctggcgtttttttatttggtggtcattggtacgtccctgacatttagtctgtacctgaaaggagcacaatt

SEQ ID NO: 614931 - DNA, 75 bp, synthetic construct
  source 1..75: mol_type = other DNA
atgaaacaactcaccaacgcttcacgaaatcacctgctcaccaataccaatacctggacacccgacagccagtgg

SEQ ID NO: 614932 - DNA, 75 bp, synthetic construct
  source 1..75: mol_type = other DNA
gggctttgtgctggataatcgaattgcttgtgcccatgcgcaaagcggcgaggttgagtatttaaccgaaaacca

SEQ ID NO: 614933 - DNA, 75 bp, synthetic construct
  source 1..75: mol_type = other DNA
ctgtaatccgcagggtacgcaaatcgcgtttttaatgcgtgatgataacggcattgtgcaactgtggcttatctc

SEQ ID NO: 614934 - DNA, 75 bp, synthetic construct
  source 1..75: mol_type = other DNA
gtattgtgcaattgtggcttatctccccacagggcggcgaaccgcgccagttaaccgataacaaaacggatattc

SEQ ID NO: 614935 - DNA, 75 bp, synthetic construct
  source 1..75: mol_type = other DNA
accgaaaaccacgccaatccaccttctgcggacgccgtggtcttctcgccggatggtcaatggctggcgtggatg

SEQ ID NO: 614936 - DNA, 75 bp, synthetic construct
  source 1..75: mol_type = other DNA
atcctgatgaaacatggcattacgacttccaccaccgtcgcggtgtgattgttgaagacggcaagatgagcaatc

SEQ ID NO: 614937 - DNA, 75 bp, synthetic construct
  source 1..75: mol_type = other DNA
atttgaaatcaggtatattcactcagtacgatatcaacaatgggaaagtgctaaaattaggcgatacttttatcg

SEQ ID NO: 614938 - DNA, 75 bp, synthetic construct
  source 1..75: mol_type = other DNA
agctttggaacagttaattcgttattttcaggcacaagtattcaatgtggaggattgcataagtgtgtattgtaa

SEQ ID NO: 614939 - DNA, 75 bp, synthetic construct
  source 1..75: mol_type = other DNA
tttcgataacgtgaaggtgatttcactggccgaaaataaagaatgtggcgatttactttttgaatttaatgaccg

SEQ ID NO: 614940 - DNA, 75 bp, synthetic construct
  source 1..75: mol_type = other DNA
gctctgtgatatttaccactgcgttgaaaattgccagagagtacaaatcaacatggtctaaggccgcaaccagaa

SEQ ID NO: 614941 - DNA, 75 bp, synthetic construct
  source 1..75: mol_type = other DNA
tgagcaggaaaagaagactttctatatactgtgcattattcagcgttactatgttaggtaaaaacaactggggtt

SEQ ID NO: 614942 - DNA, 75 bp, synthetic construct
  source 1..75: mol_type = other DNA
tttccaactttgtgaccactgaaaccggcgtcaataactcgccaacccttatcaagcgtgatgtaacaaccgaag

SEQ ID NO: 614943 - DNA, 75 bp, synthetic construct
  source 1..75: mol_type = other DNA
tagggtactcgttttctataatagacacacctttgagcaaagatggtgagattaatagctgttacagaaaggttg

SEQ ID NO: 614944 - DNA, 75 bp, synthetic construct
  source 1..75: mol_type = other DNA
ccggagcgcgtgtttggctatgtgcatccgaaatggcggactccggcactgaacgtcattatggtcgggattgtc

SEQ ID NO: 614945 - DNA, 75 bp, synthetic construct
  source 1..75: mol_type = other DNA
ttgctgcgcaacccggcaaaacccgtctgcgaaaatcactgaaattgtggcaggtggtaatgatgggtctggcct

SEQ ID NO: 614946 - DNA, 75 bp, synthetic construct
  source 1..75: mol_type = other DNA
gactccccgttccgctgattatcttcctgatatgtctcctcgttttctggctctggctgcataaaacccatgccg

SEQ ID NO: 614947 - DNA, 75 bp, synthetic construct
  source 1..75: mol_type = other DNA
atggcagagtcggaaccgaaagcaattgcattgggcgtactgtttcaaagtggtgtgccgatgccgctggcgata

SEQ ID NO: 614948 - DNA, 75 bp, synthetic construct
  source 1..75: mol_type = other DNA
ggttagtactggaatttattatagtaatgcaagattggatgtaaattctatatccttaaagcaattagatgattt

SEQ ID NO: 614949 - DNA, 75 bp, synthetic construct
  source 1..75: mol_type = other DNA
gaagtggggtatccactccacctacagcgacaacctgttgatgctgactttaggtcgcggtggtccggtggtctg

SEQ ID NO: 614950 - DNA, 75 bp, synthetic construct
  source 1..75: mol_type = other DNA
ttgccgttcctgccgataaaaaggatgcctatcgggaaatggccgctaaggccgcgccattgtttaaagagtttg

SEQ ID NO: 614951 - DNA, 75 bp, synthetic construct
  source 1..75: mol_type = other DNA
cgccgataaagcgaaaagctttaagcaggcgcgtggacgcggtggatttgttcgttcttcctggcaggaggtgaa

SEQ ID NO: 614952 - DNA, 75 bp, synthetic construct
  source 1..75: mol_type = other DNA
cggtatttgccctcaatcagaaataacacgtatccagaaggaatctaatttatctacaaagattaatatttgcat

SEQ ID NO: 614953 - DNA, 75 bp, synthetic construct
  source 1..75: mol_type = other DNA
ttgtttccatttcgtcgtaacgttcttgcatttgccgctctgttggctctctcctcccctgtatttgctggcaaa

SEQ ID NO: 614954 - DNA, 75 bp, synthetic construct
  source 1..75: mol_type = other DNA
tggcgtaaaagtcatcaaacggaaagtgtttctcgatgattcccagaacgaagcggacatccgtatgcagttcaa

SEQ ID NO: 614955 - DNA, 75 bp, synthetic construct
  source 1..75: mol_type = other DNA
ctgctgatattcctcggcgggcgaatgattattgagggttttcgtggcgcagatgatgaagatgaagagccgcgc

SEQ ID NO: 614956 - DNA, 75 bp, synthetic construct
  source 1..75: mol_type = other DNA
cagagcgtacgcttaattaccggacacttaaaaaccggtggcgagctggactgggaaaacctggcggcagaaaaa

SEQ ID NO: 614957 - DNA, 75 bp, synthetic construct
  source 1..75: mol_type = other DNA
cgctgaagctcgtcgcatcttctgtaacgtggtcgatgcgccgaaagccgccagctttattatgccgtcgattat

SEQ ID NO: 614958 - DNA, 75 bp, synthetic construct
  source 1..75: mol_type = other DNA
ctgggcgaactggcgcagcaaatgaacagtccatcgctaattattattggtcgggttgttggcctgcgcgataaa

SEQ ID NO: 614959 - DNA, 75 bp, synthetic construct
  source 1..75: mol_type = other DNA
aacagtccctcattaattattattggtcgggtcgttggcctgcgcgataaattgaactggttctctaaccattaa

SEQ ID NO: 614960 - DNA, 75 bp, synthetic construct
  source 1..75: mol_type = other DNA
cgtcggcaaacgcgcgggataccactgcgtaccgcaggaagagattaaccagatcctgctgcgggaagcgcaaaa

SEQ ID NO: 614961 - DNA, 75 bp, synthetic construct
  source 1..75: mol_type = other DNA
ctggttgctctgcctattcgggtattccgctcacgcatcgcgattatgcccagagcgtgcgcttaattaccggac

SEQ ID NO: 614962 - DNA, 75 bp, synthetic construct
  source 1..75: mol_type = other DNA
tatactcctgagttcaaacctaagaatggagtttccagtggaacattatcaccaggaaaaatcgcttcctggtat

SEQ ID NO: 614963 - DNA, 75 bp, synthetic construct
  source 1..75: mol_type = other DNA
aaagtttttcgtcgatgaaccgacctgtgcaacaattgccctggcacaagatcagggtaacgtcagcggcaacca

SEQ ID NO: 614964 - DNA, 75 bp, synthetic construct
  source 1..75: mol_type = other DNA
gccaccctccataaaccgaaattttctgaagccctgcgaactggccttatttttggtgccgtcgaaacgctgacg

SEQ ID NO: 614965 - DNA, 75 bp, synthetic construct
  source 1..75: mol_type = other DNA
gcatgggcagatgcaggcatgttaaccctcgtcgaagggccatttgatgaaagccttctcgacacctgctggctg

SEQ ID NO: 614966 - DNA, 75 bp, synthetic construct
  source 1..75: mol_type = other DNA
tccctttttctattcgtggcgactactgctacgccaataaaattactgtaaaactggatgcggctaatgatgcac

SEQ ID NO: 614967 - DNA, 75 bp, synthetic construct
  source 1..75: mol_type = other DNA
attgccccatagccctggatttaaaactaccaccatatggtgaagatagttttattctggatgataaggattggg

SEQ ID NO: 614968 - DNA, 75 bp, synthetic construct
  source 1..75: mol_type = other DNA
ggtctggttgagtgaagccgatgccaaagatctgggtatcgccgataacgactggattgaagtcttcaacagcaa

SEQ ID NO: 614969 - DNA, 75 bp, synthetic construct
  source 1..75: mol_type = other DNA
aactacgcaagctggaagcggcgggcgattacactgcgcgtctggcgctactggaagaacagaaatcgttgccgt

SEQ ID NO: 614970 - DNA, 75 bp, synthetic construct
  source 1..75: mol_type = other DNA
ctttatgaaccacaagcagatagtgattatttaggtacttacttatttaatatcaataggtcaggcgattattgg

SEQ ID NO: 614971 - DNA, 75 bp, synthetic construct
  source 1..75: mol_type = other DNA
ggcaccgtatacgtctgacaaaggacgggcggatcattgtgacctgtaagacgctggagatttacgccgatgaaa

SEQ ID NO: 614972 - DNA, 75 bp, synthetic construct
  source 1..75: mol_type = other DNA
cagagagctacacggttggctccaatgagttttacatggggtatgccaccagccgccagacggcgctgtgcctgg

SEQ ID NO: 614973 - DNA, 75 bp, synthetic construct
  source 1..75: mol_type = other DNA
cctgtttttcgcatccgctaagcgccgatggctttacgctttcccatgccgacgacagcattcgccagttctgga

SEQ ID NO: 614974 - DNA, 75 bp, synthetic construct
  source 1..75: mol_type = other DNA
ccagcgtcacgatacgccagcgggtagcgaatggctggaaagcgtgcgggcttatgagaatacgattttgcgtca

SEQ ID NO: 614975 - DNA, 75 bp, synthetic construct
  source 1..75: mol_type = other DNA
atgaatgatgaagtgttcagccgcctgattgccccggtaacgcgcggtattcgcctgttgtttggccggggcgtt

SEQ ID NO: 614976 - DNA, 75 bp, synthetic construct
  source 1..75: mol_type = other DNA
gtggaaagagtaaatgattccgccatgaaccgcctgctgacgccgctgatgcgtcgtgtgcgcctgatgcttgcg

SEQ ID NO: 614977 - DNA, 75 bp, synthetic construct
  source 1..75: mol_type = other DNA
tgcatcttcggcttcttacttcctggcagcagcagcaatcaaaggcggcactgtaaaagtgaccggcattggacg

SEQ ID NO: 614978 - DNA, 75 bp, synthetic construct
  source 1..75: mol_type = other DNA
ggcaccgtatacgtctgacaaagaacggccggatcattgtgacctgtaagacgctggagatttacgccgatgaag

SEQ ID NO: 614979 - DNA, 75 bp, synthetic construct
  source 1..75: mol_type = other DNA
ccggccatgtgcatcatgataacggcgaaggcagtagtgtcgttacggggaagtcatcttcacagggatcttcgg

SEQ ID NO: 614980 - DNA, 75 bp, synthetic construct
  source 1..75: mol_type = other DNA
atgaaagtatgaccgttgacaccccgaaagccacgtttaccggcgatgttgaaattctgaaaggtctcagtgtta

SEQ ID NO: 614981 - DNA, 75 bp, synthetic construct
  source 1..75: mol_type = other DNA
ctgggacagcgatcacgtagtgctgctggatgatgaaacccaggcaattgccagtgagattgtgcgtcacgatct

SEQ ID NO: 614982 - DNA, 75 bp, synthetic construct
  source 1..75: mol_type = other DNA
ttattccaaaaaaatcaaaaccgtggcgcaaataaaagaaggcgcgacagtggcgatccccaacgacccgaccaa

SEQ ID NO: 614983 - DNA, 75 bp, synthetic construct
  source 1..75: mol_type = other DNA
atgttgaactggtaggatttagcggttcgttgctaccgaacgatgcgacaaatcatggcgagcttgatgcgaacg

SEQ ID NO: 614984 - DNA, 75 bp, synthetic construct
  source 1..75: mol_type = other DNA
ggttacggcaatgccaacatcggttacagccatagcgatgatattaagcagctctattacggagtcagcggtggg

SEQ ID NO: 614985 - DNA, 75 bp, synthetic construct
  source 1..75: mol_type = other DNA
ggacagcgattcggctgagctggacgcctggtttgctgaaccgccgctgacacggcaggaagtgcgggaggggag

SEQ ID NO: 614986 - DNA, 75 bp, synthetic construct
  source 1..75: mol_type = other DNA
cagagcagcagcgatgaaaagcatattaaagttggcgttattaatggcgcagaacaagatgtcgcggaagtcgct

SEQ ID NO: 614987 - DNA, 75 bp, synthetic construct
  source 1..75: mol_type = other DNA
gtttaaccttgaacgtggcaaaacgctggcggtagtaggtgaatctggctgcggtaaatcgaccctcggtcggtt

SEQ ID NO: 614988 - DNA, 75 bp, synthetic construct
  source 1..75: mol_type = other DNA
tgcagatgataataacgcagaactcatcccatgcctgagtacagatcttcttgtcagtcttggtataaaaaaaat

SEQ ID NO: 614989 - DNA, 75 bp, synthetic construct
  source 1..75: mol_type = other DNA
aattcatgttcattatctattagttcgcctgaacctgtaacatatactattccaactgataaagtagataaatat

SEQ ID NO: 614990 - DNA, 75 bp, synthetic construct
  source 1..75: mol_type = other DNA
cgattacactgcgcgtctggcactgctggaagagcagaaatcgttgccgtggcaggcggtctgggaaatgtattg

SEQ ID NO: 614991 - DNA, 75 bp, synthetic construct
  source 1..75: mol_type = other DNA
gcctcctaccggagacaccagtgagcagacactatttattgattattttaatctgttctacagtaagcgtggtca

SEQ ID NO: 614992 - DNA, 75 bp, synthetic construct
  source 1..75: mol_type = other DNA
tcgctccggtgattcatggtattgcccgtggaaccgcacaagtgagtgtaaaacagaacggatacgatgtttatc

SEQ ID NO: 614993 - DNA, 75 bp, synthetic construct
  source 1..75: mol_type = other DNA
tttaaatttgtcggtgccaatattttgcgcgtctggcttaactttgaagaacgtcgcaacccaacgcaaggagcg

SEQ ID NO: 614994 - DNA, 75 bp, synthetic construct
  source 1..75: mol_type = other DNA
tcccgatcgcgcggtctcgttggcgattaactcccgaacgggacgcacgcaaaaccattttcatattcatatctc

SEQ ID NO: 614995 - DNA, 75 bp, synthetic construct
  source 1..75: mol_type = other DNA
ggctgccggtattggttactggaaattaaccggtgaagagtcagacacgttacgtaagattgttcttgagcaatg

SEQ ID NO: 614996 - DNA, 75 bp, synthetic construct
  source 1..75: mol_type = other DNA
tacgtaagattgtccttgaggaatgtttgcccaatcagcagcaaaatcaaaatccttcgccatgtgcggaagtca

SEQ ID NO: 614997 - DNA, 75 bp, synthetic construct
  source 1..75: mol_type = other DNA
gagttttcgccgcaatgaagacctgaccccgcttgtacgcattgcccagggaattgttgatgcttatgaaatctc

SEQ ID NO: 614998 - DNA, 75 bp, synthetic construct
  source 1..75: mol_type = other DNA
ggcgctccggcatgatgcggaacgcgtgtggaatgagttttgcctgatttcagacaccggcggcaaatccttcgg

SEQ ID NO: 614999 - DNA, 75 bp, synthetic construct
  source 1..75: mol_type = other DNA
atgagccgtaaaagttctaatgtgggggctgccatgctgcagcccggacgccagtcgcaggcggccggcaatatc

SEQ ID NO: 615000 - DNA, 75 bp, synthetic construct
  source 1..75: mol_type = other DNA
atgtcaattaaacgaaatcattccgttgatctgggagctgccatcatgcaaccgggccgtcaggccagcacgacg

SEQ ID NO: 615001 - DNA, 75 bp, synthetic construct
  source 1..75: mol_type = other DNA
aaactggcccgtcgtttgtggccagggatcaagtacagcaatatggcgttatataaaacacggaagctcaatgta

SEQ ID NO: 615002 - DNA, 75 bp, synthetic construct
  source 1..75: mol_type = other DNA
gggctatctgcgctggttatttaataacctggacagcatgagcccggagctgcgtttaacactgaaacattatct

SEQ ID NO: 615003 - DNA, 75 bp, synthetic construct
  source 1..75: mol_type = other DNA
acgctgtggaagcggggattgccgggtccgctgtgccatccgttatgaccggcgatacagcgccgtccggaacac

SEQ ID NO: 615004 - DNA, 75 bp, synthetic construct
  source 1..75: mol_type = other DNA
cggtgcaccggtatcccgtatcctgcctgaggtagcggaatgtctgccggatacggacgcagagccggtaccgga

SEQ ID NO: 615005 - DNA, 75 bp, synthetic construct
  source 1..75: mol_type = other DNA
cggatgcggaatttgaccgcgtgttcggggaaagctgccggaagtttaattcgccggaactgtggtcactggaga

SEQ ID NO: 615006 - DNA, 75 bp, synthetic construct
  source 1..75: mol_type = other DNA
ctttggcaggtttcgcggatcaaatggttttgcctttatgatcaccgcgccgctggtgatgccggatgtgatcac

SEQ ID NO: 615007 - DNA, 75 bp, synthetic construct
  source 1..75: mol_type = other DNA
atcggctggaacatgctgtaaatattctcgtcatacttcaagttgcatgtgctgcgtctgcgttcgctcacccca

SEQ ID NO: 615008 - DNA, 75 bp, synthetic construct
  source 1..75: mol_type = other DNA
ggtgtatttgtgctggcgctgctggggtggattttcagtaagactcttggggttgatgaatctaccgtggctatt

SEQ ID NO: 615009 - DNA, 75 bp, synthetic construct
  source 1..75: mol_type = other DNA
acatggtcaccaaaaccaccagctatatgttctttaccgcaatggcggggaacattctggcgctgaaaatgatca

SEQ ID NO: 615010 - DNA, 75 bp, synthetic construct
  source 1..75: mol_type = other DNA
ctgggaagacgtggttaaaaataaaggcggctggaataccttaatctggtacggcggtattatcggcttaagctc

SEQ ID NO: 615011 - DNA, 75 bp, synthetic construct
  source 1..75: mol_type = other DNA
tttaaaaccaccgccgtattaagcggttactcttccggtacaacctggctggtgttctctgcgttcaccttaagc

SEQ ID NO: 615012 - DNA, 75 bp, synthetic construct
  source 1..75: mol_type = other DNA
tatgttctttaccgcaatggcggggaacattctggcgctgaaaatgatcaacgatattctgcacctgcaaattag

SEQ ID NO: 615013 - DNA, 75 bp, synthetic construct
  source 1..75: mol_type = other DNA
gcaacggcagcggcgatcctcgggacgattgcggcggtagtgctggtgcgttttggcaggtttcgcggatcaaat

SEQ ID NO: 615014 - DNA, 75 bp, synthetic construct
  source 1..75: mol_type = other DNA
cgctggtgatgccagatgtcatcacgggtttgtcgctgttgttgttattcgtcgcgcttgctcatgccattggct

SEQ ID NO: 615015 - DNA, 75 bp, synthetic construct
  source 1..75: mol_type = other DNA
catctggctggcgcatgtcaccttttgtacggcttatgtggcggtggttatttcttcgcgactgcgagagttgga

SEQ ID NO: 615016 - DNA, 75 bp, synthetic construct
  source 1..75: mol_type = other DNA
ttcagttctttgatcatcagggcgatgcattactaaaagtttatgccaccgacaataccgatatggcggcatgga

SEQ ID NO: 615017 - DNA, 75 bp, synthetic construct
  source 1..75: mol_type = other DNA
gcatttgaacggacatgccggattgatcctcaatccgcgcgcgctggatttacgtctgtttctcaatcaatgggc

SEQ ID NO: 615018 - DNA, 75 bp, synthetic construct
  source 1..75: mol_type = other DNA
aagagtggcgggcgatgaccgacgttcatcagttttttacgttgctcaagcgccacaacctgacgcgccaacagg

SEQ ID NO: 615019 - DNA, 75 bp, synthetic construct
  source 1..75: mol_type = other DNA
taaaaggcacacaggaaaaactagttattttagagatagataggataatagctgaagctttgggctgtaatgaca

SEQ ID NO: 615020 - DNA, 75 bp, synthetic construct
  source 1..75: mol_type = other DNA
aggatgccagcagctcaacgacggcgtgaatacaattaatggagcaatcagctcgtcgttgtcttcagtaggtaa

SEQ ID NO: 615021 - DNA, 75 bp, synthetic construct
  source 1..75: mol_type = other DNA
agcgctggggggaacagccaccactcaaagccttggcccggtatcgtctgtatctggccttggtgctgtctgcaa

SEQ ID NO: 615022 - DNA, 75 bp, synthetic construct
  source 1..75: mol_type = other DNA
caggctgcactacagacaaaaccgttaaataacatacatgaaaagtatgattattttacggataccgcttgctga

SEQ ID NO: 615023 - DNA, 75 bp, synthetic construct
  source 1..75: mol_type = other DNA
aaaaacggcgtgaacgccgacatcggggcatataccgacctcgatgacaactggacgctgggtctggtggcgcag

SEQ ID NO: 615024 - DNA, 75 bp, synthetic construct
  source 1..75: mol_type = other DNA
tgttcaaaggttactttgacctgtcagtaaaagacacgttgaaaacctggggactgctggagctggtcaactccg

SEQ ID NO: 615025 - DNA, 75 bp, synthetic construct
  source 1..75: mol_type = other DNA
ggtactgaatttgaagttcaaaatcaattcaatggtggctttgttggtggcggcgctgtccgtcgggatgctggc

SEQ ID NO: 615026 - DNA, 75 bp, synthetic construct
  source 1..75: mol_type = other DNA
taccgctgacgttgattgtcttttttgccgcccgcaaactggcggcacggtataagtttcccctgcttaacccgt

SEQ ID NO: 615027 - DNA, 75 bp, synthetic construct
  source 1..75: mol_type = other DNA
agagcaatgctgcaggggcttatgatattgttataaacccaactcccttcagtatacagtcagcgatggtcacag

SEQ ID NO: 615028 - DNA, 75 bp, synthetic construct
  source 1..75: mol_type = other DNA
tgcgtaccgcaggaagagattaaccagatcctgctgcgggaagcgcaaaaaggcaaacgcgtggtgcgtctgaaa

SEQ ID NO: 615029 - DNA, 75 bp, synthetic construct
  source 1..75: mol_type = other DNA
gttatggctgcaagctggaaatttgaaaaatacgatgatttatcgaataaggatgatgacggcatgaataaagaa

SEQ ID NO: 615030 - DNA, 75 bp, synthetic construct
  source 1..75: mol_type = other DNA
gtgcgattatcgcaatatggcgcaagctattattgatggatgtatcggacacgttgaatacacggggaaaagata

SEQ ID NO: 615031 - DNA, 75 bp, synthetic construct
  source 1..75: mol_type = other DNA
agagtcggaaggtgaagtggcgggtattaaatccgtgacgatcaaaatctccggcgattacgcttacggctggct

SEQ ID NO: 615032 - DNA, 75 bp, synthetic construct
  source 1..75: mol_type = other DNA
ttaaccaatcacaaaacggatattcagtctgcatttaactggcatccgtcaggtgaatggttaggctttgtgcta

SEQ ID NO: 615033 - DNA, 75 bp, synthetic construct
  source 1..75: mol_type = other DNA
ggtgttaactgtacaggctcctgcagctggaaaatctacgttaaaaatggtctggtaacctgggaaacccaacag

SEQ ID NO: 615034 - DNA, 75 bp, synthetic construct
  source 1..75: mol_type = other DNA
ggtgttaactgtacaggctcctgcagctggaaaatctacgttaaaaaaggtctggtcacctgggaaatccaacag

SEQ ID NO: 615035 - DNA, 75 bp, synthetic construct
  source 1..75: mol_type = other DNA
atgccagtaaatacagcggtcacctgattgatttcaacgttcgcgccgaacgtatgggctggctaccttctgcgc

SEQ ID NO: 615036 - DNA, 75 bp, synthetic construct
  source 1..75: mol_type = other DNA
ctctcgcattaattattagcgccgctgcgcttgccctgccctggtttatcgttcgtgcgggatacagggatctgg

SEQ ID NO: 615037 - DNA, 75 bp, synthetic construct
  source 1..75: mol_type = other DNA
ggtgttaactgtacaggctcctgcagctggaaaatctacgttaaaaacggtctggtaacctgggaaatccaacag

SEQ ID NO: 615038 - DNA, 75 bp, synthetic construct
  source 1..75: mol_type = other DNA
ggtgttaactgtacaggctcctgcagctggaaaatctacgttaaaaatggtctggtcacctgggaaaaccaacag

SEQ ID NO: 615039 - DNA, 75 bp, synthetic construct
  source 1..75: mol_type = other DNA
atcttcccattatggtgtggcacctctggcaaacccggctttactgacaaagcacaacagcaatgatgatttcag

SEQ ID NO: 615040 - DNA, 75 bp, synthetic construct
  source 1..75: mol_type = other DNA
cgtgcagcgacgtttaacctttacccaccatcgggcttatccgggattagtcaacgtcccgcgccactgggtgcg

SEQ ID NO: 615041 - DNA, 75 bp, synthetic construct
  source 1..75: mol_type = other DNA
tggctgggatttgtgctggataatcggattgcttgtgcccatgcgcaaagcggcgaggttgagtatttaaccgaa

SEQ ID NO: 615042 - DNA, 75 bp, synthetic construct
  source 1..75: mol_type = other DNA
gatatgcatccgtttattcatccgctttctgcggcggtcgatccggcgtgggaatcacgcagcgactgggaaatc

SEQ ID NO: 615043 - DNA, 75 bp, synthetic construct
  source 1..75: mol_type = other DNA
ctgtccggtggtcagcgtttatgatttggtactggcgaattacggcctcgatcgcgggctggaagatgaaaacag

SEQ ID NO: 615044 - DNA, 75 bp, synthetic construct
  source 1..75: mol_type = other DNA
cacaccaaaatatcagcgtgtggacctgtttaactacaacgtaacggttcgtgattacgacaaagacgattttgg

SEQ ID NO: 615045 - DNA, 75 bp, synthetic construct
  source 1..75: mol_type = other DNA
agaaagcgtatggtacctttctgaactcgctgatgtcacttgtggaacaacagaaaaatactaacctttatgagt

SEQ ID NO: 615046 - DNA, 75 bp, synthetic construct
  source 1..75: mol_type = other DNA
atcttattaaggcattacagtcgtcaaatttctcgacagcagaaattatctggttaagtctcgccgtagttatcg

SEQ ID NO: 615047 - DNA, 75 bp, synthetic construct
  source 1..75: mol_type = other DNA
gaaagagctgaaacgggttaccgacgaacgggacatattaaaaaaagccgcgcgtacttcgcaaagctgtccgac

SEQ ID NO: 615048 - DNA, 75 bp, synthetic construct
  source 1..75: mol_type = other DNA
gaaagagctgaagcgggttaccgacgaacgggacatattaaaaaaagccgctgtagattcaattggtcaacgcaa

SEQ ID NO: 615049 - DNA, 75 bp, synthetic construct
  source 1..75: mol_type = other DNA
aagatgacattttctttcgcacgtccggcggcggcgtcacgctttctggcggcgaagtgttaatgcaggcggagt

SEQ ID NO: 615050 - DNA, 75 bp, synthetic construct
  source 1..75: mol_type = other DNA
gctgaacgtcagcgtctgaaagagctggagcgtgagaatcgtgaactgcgctgcagtaacgatatccttcgccag

SEQ ID NO: 615051 - DNA, 75 bp, synthetic construct
  source 1..75: mol_type = other DNA
aatgggcagacaatgaatttcatataattgaacttcatatgattccaggatggattgcaagcagttaccagccat

SEQ ID NO: 615052 - DNA, 75 bp, synthetic construct
  source 1..75: mol_type = other DNA
ctctgcggattatggaagtgtgtggcggtcatacccacgctatctttaaattcggcctcgaccagttactgccgg

SEQ ID NO: 615053 - DNA, 75 bp, synthetic construct
  source 1..75: mol_type = other DNA
cgtttaaaattgaagcagtcaaacaggttgttgatcgcggttattctgttgccagcgttgcaacacgtctcgata

SEQ ID NO: 615054 - DNA, 75 bp, synthetic construct
  source 1..75: mol_type = other DNA
gcatcgtgcagcagatttacccggactactatgtgaacatggttcagcaacagtttgccgggtattttgcatcac

SEQ ID NO: 615055 - DNA, 75 bp, synthetic construct
  source 1..75: mol_type = other DNA
tccagcgtggcaacacgtctcggtatcaccacccacagtctttatgcctggataaaggcatatggcccggattcc

SEQ ID NO: 615056 - DNA, 75 bp, synthetic construct
  source 1..75: mol_type = other DNA
acaggcgatagccgacgtgttctgtgttaacggcgatagcgaatggcgtggccttggggtgatcgaatcttctgg

SEQ ID NO: 615057 - DNA, 75 bp, synthetic construct
  source 1..75: mol_type = other DNA
aaattgccagccatccggaagtcatcttctgtacctttggtgacgccatgcgcgtacccggtaaacaggggtcgc

SEQ ID NO: 615058 - DNA, 75 bp, synthetic construct
  source 1..75: mol_type = other DNA
tggcggcggcgtcacgctttctggcggtgaagtgctaatgcaggcggagtttgctacccgttttttgcaacggct

SEQ ID NO: 615059 - DNA, 75 bp, synthetic construct
  source 1..75: mol_type = other DNA
acgctggaactgttcgaaaaagtgctcggcccaaccaccaccacgctggcatggaaaaaagcgcgactgattaac

SEQ ID NO: 615060 - DNA, 75 bp, synthetic construct
  source 1..75: mol_type = other DNA
accgggggcggtgatggagggctcaccaccgctgaacgtcagcgtctgaaagagctggagcgtgaaaatcgtgaa

SEQ ID NO: 615061 - DNA, 75 bp, synthetic construct
  source 1..75: mol_type = other DNA
atgactcacaatgggcggcaatttgctccattgccccaaagattggctgtacgtcagagactctgcgtgtatggg

SEQ ID NO: 615062 - DNA, 75 bp, synthetic construct
  source 1..75: mol_type = other DNA
ttggcggcattgaaaacccgcattttcgcagcgtaaaacacgatccgattctggtacgccagcttccggtgaaaa

SEQ ID NO: 615063 - DNA, 75 bp, synthetic construct
  source 1..75: mol_type = other DNA
aacaaaccgacgtaccggaatccgccgactggtataactccagctacatcatcgcatgggggtctaacgtaccac

SEQ ID NO: 615064 - DNA, 75 bp, synthetic construct
  source 1..75: mol_type = other DNA
gatatgcatccgtttattcatccgctttcagcggcggtcgatccggcgtgggagtctcgcagcgactgggaaatc

SEQ ID NO: 615065 - DNA, 75 bp, synthetic construct
  source 1..75: mol_type = other DNA
gaccggcgtcgagcgtgtgctctttctgtttcttaatgactttattgaacaatttccaatgatcagccccggcgt

SEQ ID NO: 615066 - DNA, 75 bp, synthetic construct
  source 1..75: mol_type = other DNA
ccgtcgtcagccgatgtggcaacgatgcgtgaaatggcagaacgggccggatttcaggttaccgtgggaggttaa

SEQ ID NO: 615067 - DNA, 75 bp, synthetic construct
  source 1..75: mol_type = other DNA
ttaaaaattatggacccgacaagagcgcgggacgtggtgaaaatgaatctgccgcgcgtgctggagaatctgcgt

SEQ ID NO: 615068 - DNA, 75 bp, synthetic construct
  source 1..75: mol_type = other DNA
cacttccacgctggaactgttcgaaaaagtgctcggcccgaccaccaccacgctggcatggaagaaagcgcgcct

SEQ ID NO: 615069 - DNA, 75 bp, synthetic construct
  source 1..75: mol_type = other DNA
gcggcaatttgttccattgccccaaagattggctgtacgccggagactctgcgtgtctgggttcgccagcatgag

SEQ ID NO: 615070 - DNA, 75 bp, synthetic construct
  source 1..75: mol_type = other DNA
tatttaataaccttgataacttatcatatattcagagaacctctttccggggtaacgacacgctatacaatgaaa

SEQ ID NO: 615071 - DNA, 75 bp, synthetic construct
  source 1..75: mol_type = other DNA
aagaaggctgttgtagattcaattggtcaacgcaacagttatgtgaaaacatggggttgcggaggttttttgaat

SEQ ID NO: 615072 - DNA, 75 bp, synthetic construct
  source 1..75: mol_type = other DNA
gcgatgaagataacgttgatccaggaccggtagttaaccagaacctgaaagtcgccatctttgttaaagacacta

SEQ ID NO: 615073 - DNA, 75 bp, synthetic construct
  source 1..75: mol_type = other DNA
ggcgacgtcgatcttggtacggcgggtaaagatgcaaaaaccatcgataccatccgctggatgagctacaaggac

SEQ ID NO: 615074 - DNA, 75 bp, synthetic construct
  source 1..75: mol_type = other DNA
gcagactttcatacggcaccgggaccgcactgacgggctgcggtgtctcagcaaaggcgtatgccggggcagtta

SEQ ID NO: 615075 - DNA, 75 bp, synthetic construct
  source 1..75: mol_type = other DNA
aattttcatttcgaatatggaacagcgcgcgcctggggatcttttggctatgctattggcgcgttctttgccggc

SEQ ID NO: 615076 - DNA, 75 bp, synthetic construct
  source 1..75: mol_type = other DNA
ggcgacgtggatcttgggggattgggcgataacgcgaaaactatcgatactatccgctggatgagctacaaggac

SEQ ID NO: 615077 - DNA, 75 bp, synthetic construct
  source 1..75: mol_type = other DNA
gtggccaaactgtactcggatgagaacaaaaacggcaagtttgatgcgggtaccgatgctgacgttaccgccaat

SEQ ID NO: 615078 - DNA, 75 bp, synthetic construct
  source 1..75: mol_type = other DNA
actcgtccttcaggtagcgagacggataaacgcctttactcaggagataccatcacgttggggtgggatatcggc

SEQ ID NO: 615079 - DNA, 75 bp, synthetic construct
  source 1..75: mol_type = other DNA
ctttcctcgcctgattcaggaaaagcgtaaggagtgggagcagattgcaggcatacctgtagccgaagtatttta

SEQ ID NO: 615080 - DNA, 75 bp, synthetic construct
  source 1..75: mol_type = other DNA
tatgtgggggacgccagcgagccggtgaacaaactccagccaccgtggcgtgaagaaacgccagatggcgtaacg

SEQ ID NO: 615081 - DNA, 75 bp, synthetic construct
  source 1..75: mol_type = other DNA
gcagactttcatatggatcaggaaccacgcttgccggctgcggtgtatcagcgaaggcatatgccgaaacagcta

SEQ ID NO: 615082 - DNA, 75 bp, synthetic construct
  source 1..75: mol_type = other DNA
gttggccgacagaattgcagggttaagcctgagcgactgggcaattattgtcggtatcgcatgcactgttattac

SEQ ID NO: 615083 - DNA, 75 bp, synthetic construct
  source 1..75: mol_type = other DNA
ctgacgttgttggatatttcaacggctagtggcggtggtagcgacagtgataacgtcgatcccggtccggttgtg

SEQ ID NO: 615084 - DNA, 75 bp, synthetic construct
  source 1..75: mol_type = other DNA
ccatgagccagcgactgaaactcttctctcgcctgcgtttgcgcgacttaatgcccgtaccacctgcggtagcag

SEQ ID NO: 615085 - DNA, 75 bp, synthetic construct
  source 1..75: mol_type = other DNA
gcgcacctgttaccgcgctcggtttaccggtagcgtttgtgctggtggcgttgagcctggtgtattggtatgaca

SEQ ID NO: 615086 - DNA, 75 bp, synthetic construct
  source 1..75: mol_type = other DNA
tgggccagacgtgacaatgaatttgtgacggtgaaatcgctgaatgaacagggccagccggtaggtgtggagata

SEQ ID NO: 615087 - DNA, 75 bp, synthetic construct
  source 1..75: mol_type = other DNA
cagtcacagcgctcggtttgccgatcgtgtttatgctggcagcgttaattctggtatatcgatacgacaggaaac

SEQ ID NO: 615088 - DNA, 75 bp, synthetic construct
  source 1..75: mol_type = other DNA
atgtcagatattacaatctcacttccgaaagaagtcaacgggcacgttatctgttcaaccagaatccgacacatt

SEQ ID NO: 615089 - DNA, 75 bp, synthetic construct
  source 1..75: mol_type = other DNA
gcgcgaaggatgccacgaaagataccggtgataacaaaccggaaggcagcgccggcgatcaggggcaggacaacg

SEQ ID NO: 615090 - DNA, 75 bp, synthetic construct
  source 1..75: mol_type = other DNA
ccaccttcaacctgattaacgaactggatgatgtcagcccgggcggttatcgctggactcaggcggtgctggtgg

SEQ ID NO: 615091 - DNA, 75 bp, synthetic construct
  source 1..75: mol_type = other DNA
attagggttgttaccgctggggtatctgcgcagttatgcatttaccgcgatagatgtctggcaggacatgctgct

SEQ ID NO: 615092 - DNA, 75 bp, synthetic construct
  source 1..75: mol_type = other DNA
ggcggtggatttggtttagtgaccgcctgtgctgcgggtgggcttggcgcggcaatggttgtggaggcggaataa

SEQ ID NO: 615093 - DNA, 75 bp, synthetic construct
  source 1..75: mol_type = other DNA
cttaatgccggtgcctccggcagtggcggaatactccactggattgcggatgggggacaccgcagagcaaatggc

SEQ ID NO: 615094 - DNA, 75 bp, synthetic construct
  source 1..75: mol_type = other DNA
atgggcagtcgtcttgctgtgggcgtcatcgttgggctactgacctggatcagctatcaaatcatggccaatctg

SEQ ID NO: 615095 - DNA, 75 bp, synthetic construct
  source 1..75: mol_type = other DNA
aacattacccgacacgcatgtacgggaggtatcgtgctgcccgtctcccgtctcccgtcaccatctggcagacac

SEQ ID NO: 615096 - DNA, 75 bp, synthetic construct
  source 1..75: mol_type = other DNA
taatgtaccggtcggactggcgatgccactttcactgacgacccgtatcgggcatgcaatggtggccagttacga

SEQ ID NO: 615097 - DNA, 75 bp, synthetic construct
  source 1..75: mol_type = other DNA
acggcatcaaaacgaacgccagccgatcattttgctctctgatcagaacgcgattgccactattaatcagctcgc

SEQ ID NO: 615098 - DNA, 75 bp, synthetic construct
  source 1..75: mol_type = other DNA
gttccattgctccaaagactggctgtacgccggagactctgcgtgtctgggttcgccagaatgagcgggataccg

SEQ ID NO: 615099 - DNA, 75 bp, synthetic construct
  source 1..75: mol_type = other DNA
gttccattgctccaaagactggctgtacgcctgagactctgcgtgtctgggttcgccagtatgagcgggataccg

SEQ ID NO: 615100 - DNA, 75 bp, synthetic construct
  source 1..75: mol_type = other DNA
gattgtgttgaacgctatagtggacagctggagaatgtgctgcctgagtttagtacaaaatttattcaggagcat

SEQ ID NO: 615101 - DNA, 75 bp, synthetic construct
  source 1..75: mol_type = other DNA
aagattggctgtacgccggagactctgcgtgtctgggttcgccagcatgagcgggatacaggggcggtgatggag

SEQ ID NO: 615102 - DNA, 75 bp, synthetic construct
  source 1..75: mol_type = other DNA
aaagctggcaacatattacccggcaaatatgtgcgcaattagtgacgcaacaccacattaccgccgatgaagcac

SEQ ID NO: 615103 - DNA, 75 bp, synthetic construct
  source 1..75: mol_type = other DNA
tgtacgccggagactctgcgtgtctgggttcgccagcatgagcgggataccgggggcggtgatggtgggctcacc

SEQ ID NO: 615104 - DNA, 75 bp, synthetic construct
  source 1..75: mol_type = other DNA
gccgcagtaacgatatccttcgccaggcttccgcttatttgcgaaggcggagttcgaccgcctctggaaaaaata

SEQ ID NO: 615105 - DNA, 75 bp, synthetic construct
  source 1..75: mol_type = other DNA
gccgcagtaacgatatccttcgccaggcttccgcttattttgcgaaggcggagggtgatgctgccaacttactga

SEQ ID NO: 615106 - DNA, 75 bp, synthetic construct
  source 1..75: mol_type = other DNA
gttccattgctccaaagactggctgtacgccagagactctgcgtgtctgggttcgccaggatgagcgggataccg

SEQ ID NO: 615107 - DNA, 75 bp, synthetic construct
  source 1..75: mol_type = other DNA
gttccattgctccaaagaatggctgtacgcccgagactctgcgtgtctgggttcgccagcatgagcgggataccg

SEQ ID NO: 615108 - DNA, 75 bp, synthetic construct
  source 1..75: mol_type = other DNA
gtgaactgcgccgcagtaacgatatccttcgccaggcttccgcttattttgcgaaggcggagttcgaccgcctct

SEQ ID NO: 615109 - DNA, 75 bp, synthetic construct
  source 1..75: mol_type = other DNA
agtcgagcagggacaattctggctaaacgatattcagcacttctaccgtgttgagccaagtaaagatcaaataac

SEQ ID NO: 615110 - DNA, 75 bp, synthetic construct
  source 1..75: mol_type = other DNA
cttattccatgaatttggtcatacgctgcacggcctttttgcctgccagcgttatgccacgctttccggcaccaa

SEQ ID NO: 615111 - DNA, 75 bp, synthetic construct
  source 1..75: mol_type = other DNA
tggatgggcaattttgttgagcaatcaacgctgaatgaaacgcacccggtaatttataacgtctgcaattatcag

SEQ ID NO: 615112 - DNA, 75 bp, synthetic construct
  source 1..75: mol_type = other DNA
cagcagggcgggtttagcgtgcagccgtgggactgggcattttatgccgagcaggtaagacgtgataaattcgat

SEQ ID NO: 615113 - DNA, 75 bp, synthetic construct
  source 1..75: mol_type = other DNA
gggcagattcggcagcttgaaaagcatttcagtctgtatgttgatggggataagcgggttagcaagatgcgagat

SEQ ID NO: 615114 - DNA, 75 bp, synthetic construct
  source 1..75: mol_type = other DNA
ggtggatggtgtcactgttatcgaattggctggctactcatcagagattcaaaacctggtggttgcgctaactct

SEQ ID NO: 615115 - DNA, 75 bp, synthetic construct
  source 1..75: mol_type = other DNA
tattaaaggatcaacgaacaacggtactggatgaaggtgcgaccgtatttggcttctcgtcgttgtatcgcctgc

SEQ ID NO: 615116 - DNA, 75 bp, synthetic construct
  source 1..75: mol_type = other DNA
taataccggcattattggaacaatgggcaccgggaaaacccagtttactaaatcgctggttacgcaactgatgcg

SEQ ID NO: 615117 - DNA, 75 bp, synthetic construct
  source 1..75: mol_type = other DNA
actgtcagtagctgagatgatccgcgtgtccggcaacgtcgggctgagaatgaaagaaagcgatttatcgcgcca

SEQ ID NO: 615118 - DNA, 75 bp, synthetic construct
  source 1..75: mol_type = other DNA
tgatgggacagattcggcagcttgagaagcattttagcctgtatgtggatggagataagcgggttaagaaaatgc

SEQ ID NO: 615119 - DNA, 75 bp, synthetic construct
  source 1..75: mol_type = other DNA
ttttgtccttgccggagccaaacttgagcaagctgataaagcaaaattaaaagtactgaatacagaagctgcgac

SEQ ID NO: 615120 - DNA, 75 bp, synthetic construct
  source 1..75: mol_type = other DNA
cagcacatacaccggaacacacaaaggtttatcagactgacaatgccacgctctgtcgtgggaatgcgctggaaa

SEQ ID NO: 615121 - DNA, 75 bp, synthetic construct
  source 1..75: mol_type = other DNA
tgaagttgtagatggacaacaacgtcttacaacgttaagcattattgtctccgagctaaaaaaaaatcatcccga

SEQ ID NO: 615122 - DNA, 75 bp, synthetic construct
  source 1..75: mol_type = other DNA
ctattgccagtacacctcagtgggctcaccagcgctgaacgtcagcgtctgaaagagctggaacgtgaaaatcgt

SEQ ID NO: 615123 - DNA, 75 bp, synthetic construct
  source 1..75: mol_type = other DNA
ctggatcagcgaaaccgatgcccgtgaactgaccattgtcgataacgactgggtggaagtgtttaacgccaacgg

SEQ ID NO: 615124 - DNA, 75 bp, synthetic construct
  source 1..75: mol_type = other DNA
atcgcgggctggaagatgaaaacagcgcgaaagattacgctgaaatcaaagcctacacgccggcctggggcgagc

SEQ ID NO: 615125 - DNA, 75 bp, synthetic construct
  source 1..75: mol_type = other DNA
ctgcccgcgtggtgcaagttactcctggtatctttacagcgccaaccgactgaaatacccgctaatacgtaaacg

SEQ ID NO: 615126 - DNA, 75 bp, synthetic construct
  source 1..75: mol_type = other DNA
gctgggcggtgagttcgaaaaacgtgctcgcgaccgcaactttgacgccatgcaaaaggagatgtacggtcagtt

SEQ ID NO: 615127 - DNA, 75 bp, synthetic construct
  source 1..75: mol_type = other DNA
accttcgactacgaacatttgcatagcgcgccagaaggtaaacacattcctactgcccgcccacgttcgctgatt

SEQ ID NO: 615128 - DNA, 75 bp, synthetic construct
  source 1..75: mol_type = other DNA
ttggcggcatcgaaaatccgcattttcgcagcgtaaaacacaatcctgtcctggtgcgtcaattacccgttaaaa

SEQ ID NO: 615129 - DNA, 75 bp, synthetic construct
  source 1..75: mol_type = other DNA
accgtggcagttaataccgcaggtgaactggtggtgccgaacggttcgattggttttcgctggggagaaaaaggc

SEQ ID NO: 615130 - DNA, 75 bp, synthetic construct
  source 1..75: mol_type = other DNA
ataactcggtcacccgcgtttgcccgaaaccaacgcatatgattggcggttacgcgcagctggcctggggcttta

SEQ ID NO: 615131 - DNA, 75 bp, synthetic construct
  source 1..75: mol_type = other DNA
acgcgggatacaccaacgttcatgagttaattccgtggcgcacgctgtcgggacgccagcagctctatcaggatc

SEQ ID NO: 615132 - DNA, 75 bp, synthetic construct
  source 1..75: mol_type = other DNA
ctggtgcgtcagttacctgttaaaaacctgacattagccgatggcaacacctgtcaggtcgtcagcgtttatgat

SEQ ID NO: 615133 - DNA, 75 bp, synthetic construct
  source 1..75: mol_type = other DNA
tggcgtgggcatcgattatgaacgatccgcaaaagtgcctgagctacaaacaagtgcgtgggcgcggcggcttta

SEQ ID NO: 615134 - DNA, 75 bp, synthetic construct
  source 1..75: mol_type = other DNA
ggattatctcccacagaattcaccgcccaggcgctgaaatcgggcgatttacgtatggcctgcgaacaaccagat

SEQ ID NO: 615135 - DNA, 75 bp, synthetic construct
  source 1..75: mol_type = other DNA
tctaatcgaactatggcgtgaagcgctcaaacagcacagcgatccggtgctggcgtgggaatcgatcatgaatga

SEQ ID NO: 615136 - DNA, 75 bp, synthetic construct
  source 1..75: mol_type = other DNA
cgcgtacaggaagtgactgccagcctcagtggtgtctatgaattaattctggttgcggccaccgacggcacgcta

SEQ ID NO: 615137 - DNA, 75 bp, synthetic construct
  source 1..75: mol_type = other DNA
tggcggtcaggtagatatcacctccggtaaatttgtcttctccacctcagaagcgtatctgattgaaaacggtaa

SEQ ID NO: 615138 - DNA, 75 bp, synthetic construct
  source 1..75: mol_type = other DNA
gaagaccgcattattaaagatggttcttacaacatcgatcagggtgttggtgtgcgcgcgattagcggtgaaaaa

SEQ ID NO: 615139 - DNA, 75 bp, synthetic construct
  source 1..75: mol_type = other DNA
tgaaaatcgtgaactgcgccgcagtaacgatatccttcgccaggcttccgcttattttgcgaaggcggagttcga

SEQ ID NO: 615140 - DNA, 75 bp, synthetic construct
  source 1..75: mol_type = other DNA
gttccattgctccaaagattggctgtacgccagagactctgcgtgtctgggtcgccagcatgagcgggataccgg

SEQ ID NO: 615141 - DNA, 75 bp, synthetic construct
  source 1..75: mol_type = other DNA
tacgccggagactctgcgtgtctgggttcgccagcatgagcgggataccggggcggtgatggagggctcaccacc

SEQ ID NO: 615142 - DNA, 75 bp, synthetic construct
  source 1..75: mol_type = other DNA
taatttcaggccatgacaagccgcagccgccaggctgcctactcggtcagcatgagcgggataccgggagtggtg

SEQ ID NO: 615143 - DNA, 75 bp, synthetic construct
  source 1..75: mol_type = other DNA
tggttttcgctggggagaaaaaggtaaatggaatctggaatccattgccgcaggtacagaaacggagttgtcgtt

SEQ ID NO: 615144 - DNA, 75 bp, synthetic construct
  source 1..75: mol_type = other DNA
cgactggtataactccagctatatcatcgcctggggttctaacgtaccgcaaacgcgcacaccagacgcccactt

SEQ ID NO: 615145 - DNA, 75 bp, synthetic construct
  source 1..75: mol_type = other DNA
cggatacacgtattattgccggtgccaaagcccgtgacattcacacttccacgctggaactgttcgaaaaagtgc

SEQ ID NO: 615146 - DNA, 75 bp, synthetic construct
  source 1..75: mol_type = other DNA
gttccattgctccaaagattggctgtacaccggagactctgcgtgtctgggtacgccagcatgagcgggataccg

SEQ ID NO: 615147 - DNA, 75 bp, synthetic construct
  source 1..75: mol_type = other DNA
atggtggactcaccaccgctgaacgtcagcgtctgaaagagctggaacgtgaaaatcgtgaactgcgccgcagta

SEQ ID NO: 615148 - DNA, 75 bp, synthetic construct
  source 1..75: mol_type = other DNA
tatcagtgaattaccaccgctgcgattgggctttctcgtttctcgccgttatgaagagcgtcaagagcaagagct

SEQ ID NO: 615149 - DNA, 75 bp, synthetic construct
  source 1..75: mol_type = other DNA
gtgattggcatagataatacttatccgacaattattttcgatcagttgattagtctcggagataagtatgaaggc

SEQ ID NO: 615150 - DNA, 75 bp, synthetic construct
  source 1..75: mol_type = other DNA
atgcatcagaaaacagcagaacacgagcaaaccagagtattgctgaccgtcaaaaacgggaaagtaatattaatt

SEQ ID NO: 615151 - DNA, 75 bp, synthetic construct
  source 1..75: mol_type = other DNA
gcagccgatggtgactgaggtccctgtcgccgccgctgtcgaaccggttgttagcgcgccagttgttgaagaagt

SEQ ID NO: 615152 - DNA, 75 bp, synthetic construct
  source 1..75: mol_type = other DNA
tattgcagaaagggcaggatatgacgttattgcaccagcagatgaagatgaagatgaagatgaagatgaagatga

SEQ ID NO: 615153 - DNA, 75 bp, synthetic construct
  source 1..75: mol_type = other DNA
ggaggaacaaattggttatacattgtttacccgtaaagataacaatattagtcttaataaagctggacaggaact

SEQ ID NO: 615154 - DNA, 75 bp, synthetic construct
  source 1..75: mol_type = other DNA
cttacccgccatcgaataaccgctattaccgacattcgcgtggttttcactatatcagcaaggtagggaaagaat

SEQ ID NO: 615155 - DNA, 75 bp, synthetic construct
  source 1..75: mol_type = other DNA
acggagaaataatgttatcacgcgaacttgccgaaatttactgtaacgtgaataacggtaaaaaattgaaaaagg

SEQ ID NO: 615156 - DNA, 75 bp, synthetic construct
  source 1..75: mol_type = other DNA
ctcttggcacaaaggacaagcggcaagctcaggagttgcacgacaagcgaaatgaaccgccccggaaatcctgga

SEQ ID NO: 615157 - DNA, 75 bp, synthetic construct
  source 1..75: mol_type = other DNA
aaaagaaacacacccgaaccctgcaggatgcggagcggtccctggcacaggcccgcctgtcggccaggcgactgg

SEQ ID NO: 615158 - DNA, 75 bp, synthetic construct
  source 1..75: mol_type = other DNA
aatactcgatatacccgatgtggatttattctccagtgagtcagatctgcatctgttgaatggtctttgcaaggg

SEQ ID NO: 615159 - DNA, 75 bp, synthetic construct
  source 1..75: mol_type = other DNA
gaaaatttgattaaaaatgctggtgggaacatcagtagtggaattactcaaaagttggattttttagtaattggg

SEQ ID NO: 615160 - DNA, 75 bp, synthetic construct
  source 1..75: mol_type = other DNA
gcccctgttgtccctgaggtagtcgttgagcataatcacgctaccgcgccgatgactcgcgctccggcgccggaa

SEQ ID NO: 615161 - DNA, 75 bp, synthetic construct
  source 1..75: mol_type = other DNA
cgaaagtactcgaactggcgcgtcagcatatcgccgcgttgggtcgcccggatttcagcagcaaaatcaaactgt

SEQ ID NO: 615162 - DNA, 75 bp, synthetic construct
  source 1..75: mol_type = other DNA
agcaagcgccgcgtcgtgaacgtagccgccgccgtaacgatgataaacgtcaggcgcaacaagaagcgaaggcgc

SEQ ID NO: 615163 - DNA, 75 bp, synthetic construct
  source 1..75: mol_type = other DNA
cctcccactaaaagaaattgcccgcgaatatttccctgctaactacagtgctcatggccgtcccaacattaaaga

SEQ ID NO: 615164 - DNA, 75 bp, synthetic construct
  source 1..75: mol_type = other DNA
ctgcccaacgtactgaactggtgaaagtaccattgccagtcgttgcacaaactgcgccggaacaacaagaagata

SEQ ID NO: 615165 - DNA, 75 bp, synthetic construct
  source 1..75: mol_type = other DNA
caacctgcactggcgacttttgccatgccggatgtgccaccagctccagccccggcagaacctgtaacgcctgcg

SEQ ID NO: 615166 - DNA, 75 bp, synthetic construct
  source 1..75: mol_type = other DNA
gatgcagccgatggtgactgaagttcctgtcgccgccgccgtcgaacccgtcgttactgcgccggttattgaaga

SEQ ID NO: 615167 - DNA, 75 bp, synthetic construct
  source 1..75: mol_type = other DNA
aggaaagcaacgttatcgttcgcgctttccgcgactacctgcgtcaggacataggtgaaatccttattgataacc

SEQ ID NO: 615168 - DNA, 75 bp, synthetic construct
  source 1..75: mol_type = other DNA
tgagcttccgtctgaaacactgggaagcgatcaaaaaagccgctgaaagccgccctgctccgttcctgattcacc

SEQ ID NO: 615169 - DNA, 75 bp, synthetic construct
  source 1..75: mol_type = other DNA
gccgagacgcgtgagagccgtcagcaggctgaggtaacggaaaaagacgcgtaccgccgacgagcagcaagcgcc

SEQ ID NO: 615170 - DNA, 75 bp, synthetic construct
  source 1..75: mol_type = other DNA
ttgccgtagcccaggaagttgcagaacaagcagaaccggtggttgaaccgcaggaagagacggcagatattgaag

SEQ ID NO: 615171 - DNA, 75 bp, synthetic construct
  source 1..75: mol_type = other DNA
aggaaaccgaacaggaagaacgtgtacgtccggttcagccgcgtcgtaaacagcgtcagctcaatcagaaagtgc

SEQ ID NO: 615172 - DNA, 75 bp, synthetic construct
  source 1..75: mol_type = other DNA
tgctcgagatgtcccgtcagcgccttagcccatcgctgggtgaatccagccatcacgtctgcccgcgttgctccg

SEQ ID NO: 615173 - DNA, 75 bp, synthetic construct
  source 1..75: mol_type = other DNA
gattatattttatgtttagacaaccctaacctctcatcttacacattgaacttggatttgcccctatatttccag

SEQ ID NO: 615174 - DNA, 75 bp, synthetic construct
  source 1..75: mol_type = other DNA
gcggggagatcaccgtttccgtccatgcggtgcagcccaacggcatcctggaaattcgcggcgagaaatggctca

SEQ ID NO: 615175 - DNA, 75 bp, synthetic construct
  source 1..75: mol_type = other DNA
gccgcgtaccacggtgggctggaaagggctgattaacgatccgcatatggataacagcttccagatcaacgacgg

SEQ ID NO: 615176 - DNA, 75 bp, synthetic construct
  source 1..75: mol_type = other DNA
tttagactggctgatagctcaggtattgcagaaagggtattacagccgccagttcccggttcaaattaccagacc

SEQ ID NO: 615177 - DNA, 75 bp, synthetic construct
  source 1..75: mol_type = other DNA
tctggagcagggcgggcagctggcgctactcggcgcgggcgatccggtgctgcaggaaggtttccttgcggcggc

SEQ ID NO: 615178 - DNA, 75 bp, synthetic construct
  source 1..75: mol_type = other DNA
cacgctgttgttcggtcattacaacggggttggcatatacctgattgacgcgccgcatctctatgatcgtccggg

SEQ ID NO: 615179 - DNA, 75 bp, synthetic construct
  source 1..75: mol_type = other DNA
cgtgggcgatatcctgacggtgatcctcgaagaatcgacccagtcgagcaaacaggcgaaaaccaacttcggcaa

SEQ ID NO: 615180 - DNA, 75 bp, synthetic construct
  source 1..75: mol_type = other DNA
agcaagagctgcttcaggagctaccctggctacaaatgcgctttcagaaccgggccaacttcgaagcaatgattg

SEQ ID NO: 615181 - DNA, 75 bp, synthetic construct
  source 1..75: mol_type = other DNA
cagtcccacgcgcaaaaaattaagaaggacatcaaatggatgcaggatcaagcgagcacccatggtttactcggt

SEQ ID NO: 615182 - DNA, 75 bp, synthetic construct
  source 1..75: mol_type = other DNA
agcggaataccccggtcaggtgggcgttcagattggctatcacgaagcattttcgcatcgcattatgggcggcgc

SEQ ID NO: 615183 - DNA, 75 bp, synthetic construct
  source 1..75: mol_type = other DNA
cgacccgcaattaacgaccgtgcgttatcccattgcttcaatggctaaattagccaccgaactggccttgcaggg

SEQ ID NO: 615184 - DNA, 75 bp, synthetic construct
  source 1..75: mol_type = other DNA
tacgcccatcgttgcgtttgcctggataatctcagcggtgcccgaatggcgacgcgcatgttgctgaataacggt

SEQ ID NO: 615185 - DNA, 75 bp, synthetic construct
  source 1..75: mol_type = other DNA
ctggctacaaatgcgctttcagaaccgggccaacttcgaagcaatgattgatgcgaatatgcgtccttgtgggat

SEQ ID NO: 615186 - DNA, 75 bp, synthetic construct
  source 1..75: mol_type = other DNA
ctcttgagaaccttgcagatggcgtcgccagtgggtttgtctttgaagatagtaatgcctggtcgctgttacggg

SEQ ID NO: 615187 - DNA, 75 bp, synthetic construct
  source 1..75: mol_type = other DNA
aaattgctcaatcagcggcgctgggcagatgcgtgccgacagttgccgcgctgggtgtatgtaaaaggtgtgttt

SEQ ID NO: 615188 - DNA, 75 bp, synthetic construct
  source 1..75: mol_type = other DNA
tgctgccacgctgccgggttttcagcagcttcacacctctgtggaggggctgaaactgattgctgattacgaagg

SEQ ID NO: 615189 - DNA, 75 bp, synthetic construct
  source 1..75: mol_type = other DNA
cagcagcttcacacctccgaggagggactgaaactgatcgccgattatgaaggctgtcgtctgcagccgtatcag

SEQ ID NO: 615190 - DNA, 75 bp, synthetic construct
  source 1..75: mol_type = other DNA
gtgctgtttcctaattatcttttcctctgctttgacgtcaacataacgcatacatcgactatcacatcaattccg

SEQ ID NO: 615191 - DNA, 75 bp, synthetic construct
  source 1..75: mol_type = other DNA
ttccaggtgcaattggcttcgtaagtttcggttccacaatatgtactgtaccggaaaaagtcgttatcgctatta

SEQ ID NO: 615192 - DNA, 75 bp, synthetic construct
  source 1..75: mol_type = other DNA
atacataaagatcacacctcggaaagattgcaacgcagtacgcaaggaagaaaaagttttatttcctaactacct

SEQ ID NO: 615193 - DNA, 75 bp, synthetic construct
  source 1..75: mol_type = other DNA
tgaaactgattgccgattacgaaggctgccgtctgcagccgtatcagtgcagcgcgggtgtctggaccgacggca

SEQ ID NO: 615194 - DNA, 75 bp, synthetic construct
  source 1..75: mol_type = other DNA
ggtgtacgtcaacggggagcgtagtaccggcctcgaaaatcgacgccagcgtgagcgtacttactgcctgaaggg

SEQ ID NO: 615195 - DNA, 75 bp, synthetic construct
  source 1..75: mol_type = other DNA
tcgcctgacgccttaccagtgcagcgcgggagtgtggacgtcgggcattggtcacactgccggtgtcgtcccgaa

SEQ ID NO: 615196 - DNA, 75 bp, synthetic construct
  source 1..75: mol_type = other DNA
gcagcagaagggctgatctccaacgtgctgcgtgtggagcgggcactggaaaggtgtgtgaagcaacagccgccg

SEQ ID NO: 615197 - DNA, 75 bp, synthetic construct
  source 1..75: mol_type = other DNA
cccgcgcctgcatcgccggattatggactctaaggatgcgcagatcgatgaattgaaaatgcgcccagagacgtt

SEQ ID NO: 615198 - DNA, 75 bp, synthetic construct
  source 1..75: mol_type = other DNA
cgtcgatacacacagtgaagtcctgatatttgaagtgattccggctgacgattttcttcagcaacagctacaaat

SEQ ID NO: 615199 - DNA, 75 bp, synthetic construct
  source 1..75: mol_type = other DNA
ccatcggcattgtacctatgcaggaggttttgccgctcctgacggaatacattgacgaagataatatttcccatc

SEQ ID NO: 615200 - DNA, 75 bp, synthetic construct
  source 1..75: mol_type = other DNA
gttaaactacgttctacacctagcgtatatgagtcaatgaggcgctttattgttgaaagccctaactcaccgctt

SEQ ID NO: 615201 - DNA, 75 bp, synthetic construct
  source 1..75: mol_type = other DNA
ttattgcacctttgaaagaggtgaagccatatatcgcagaagtagatcaggttacaggtcaggtaaatattgttt

SEQ ID NO: 615202 - DNA, 75 bp, synthetic construct
  source 1..75: mol_type = other DNA
cgtcattatattaatgagtacggcaaacattagtagtatgactgcgcgtaatacgatctttcttgagccgtcgcg

SEQ ID NO: 615203 - DNA, 75 bp, synthetic construct
  source 1..75: mol_type = other DNA
ccatcggcattgtacctatgcaggaagttttgccgctcctgacagaatacattgacgaagataatatttcccatc

SEQ ID NO: 615204 - DNA, 75 bp, synthetic construct
  source 1..75: mol_type = other DNA
attgttgaagatcatcaggtgggggttatcgttccggttgaggagatgctgaccgttcaggcgcaaaaatggcaa

SEQ ID NO: 615205 - DNA, 75 bp, synthetic construct
  source 1..75: mol_type = other DNA
cgaagggatgtaccgtgcctggggttatgcaggcgatacgccaaccacgggtatctaccgcgaaaaaggggacgc

SEQ ID NO: 615206 - DNA, 75 bp, synthetic construct
  source 1..75: mol_type = other DNA
gcgcagcacgccagaagaactggctgcacggattgcgcgtggtgacagcaagctggaaaaatatgaagaccaggc

SEQ ID NO: 615207 - DNA, 75 bp, synthetic construct
  source 1..75: mol_type = other DNA
atggccagaataccaaccaaaaaagctaaagcaaaaaaagggtttgaagaaacattatgggatgccgcaaatcag

SEQ ID NO: 615208 - DNA, 75 bp, synthetic construct
  source 1..75: mol_type = other DNA
ccgcttcaactgctggcaaaagataaaatcatgaaggtaggtattacctccaggccgacagtagacagtaataaa

SEQ ID NO: 615209 - DNA, 75 bp, synthetic construct
  source 1..75: mol_type = other DNA
gctcgaagcgggcgaaagcgcgctggatgtggtgacagaagcggtgcgcttgctggaagagtgtccgctctttaa

SEQ ID NO: 615210 - DNA, 75 bp, synthetic construct
  source 1..75: mol_type = other DNA
tgctggaagagtgcccactatttaacgccggtattggtgctgtcttcacccgtgatgaaactcatgagctggatg

SEQ ID NO: 615211 - DNA, 75 bp, synthetic construct
  source 1..75: mol_type = other DNA
atatgtccttgatttgatgggttgggaaagtacagaaactttgtacattggtgcttcgataaacgacatgcaaac

SEQ ID NO: 615212 - DNA, 75 bp, synthetic construct
  source 1..75: mol_type = other DNA
ttgttcagcagataaaagaaagcagtccctttgcgccgactagcgattacgagcaactgtcattctcgaagagtt

SEQ ID NO: 615213 - DNA, 75 bp, synthetic construct
  source 1..75: mol_type = other DNA
attcaagcatatctatatacttatggcagttggctcctattaatactcccatcactctggctatatatgaaaacc

SEQ ID NO: 615214 - DNA, 75 bp, synthetic construct
  source 1..75: mol_type = other DNA
cgttttacgaaaaggaggtaataaagaaaaagggttttttgtctatgaggagcagtggttctcactgctggaaaa

SEQ ID NO: 615215 - DNA, 75 bp, synthetic construct
  source 1..75: mol_type = other DNA
gattcaggatggcgcaacctacggcaccagcgataaccgtaacctgtcgctgtttttgcgcggtatgttactgga

SEQ ID NO: 615216 - DNA, 75 bp, synthetic construct
  source 1..75: mol_type = other DNA
cgataagcgcatcagcaccgcggcgttaatgctggcgcggcaatttacctcgcaaattcaaaagaccaaaacatc

SEQ ID NO: 615217 - DNA, 75 bp, synthetic construct
  source 1..75: mol_type = other DNA
ttaatgctggcgcggcaatttacttcacaaatccaaaaaacgaaaacctcaagtttatacatcaaccttaataac

SEQ ID NO: 615218 - DNA, 75 bp, synthetic construct
  source 1..75: mol_type = other DNA
tttccgccatgatggagaaattaatattttttgcgctcccaacccaaagcctgtcactatggggcgcgtatttca

SEQ ID NO: 615219 - DNA, 75 bp, synthetic construct
  source 1..75: mol_type = other DNA
atgctggaaattctccggcaggcaaatatcaaaccggacaaaaacacgaccaaccagattatgacggcgctgaaa

SEQ ID NO: 615220 - DNA, 75 bp, synthetic construct
  source 1..75: mol_type = other DNA
gtgggcatatagcgcggacgacgatacgtccaatcaccaaagtaacattcgtaataaactcgtaattacgtatac

SEQ ID NO: 615221 - DNA, 75 bp, synthetic construct
  source 1..75: mol_type = other DNA
agggaattgtctgaatatccaccggaaaaaatataccaggtccggagagagggagaccatctgtcattaaaaaat

SEQ ID NO: 615222 - DNA, 75 bp, synthetic construct
  source 1..75: mol_type = other DNA
attgcacaagaaatggtgtcattcctgtctactcaccctgtgttttcggaaatcacagacttcgaacacaacgta

SEQ ID NO: 615223 - DNA, 75 bp, synthetic construct
  source 1..75: mol_type = other DNA
accataccgctgcagattacttacgccagtttgatttgcttgtcctgaattttatctctcgcggtaattttgtca

SEQ ID NO: 615224 - DNA, 75 bp, synthetic construct
  source 1..75: mol_type = other DNA
atggccaaagcaccaactaaaaaagccaaagcaaagaaaggctttgaagaaacattatgggataccgcaaaccag

SEQ ID NO: 615225 - DNA, 75 bp, synthetic construct
  source 1..75: mol_type = other DNA
cgccgctgcttctatttaaaagtgtgcgaaaaactcagccgtgaacgcgcctgcgtaggctggcgtcgtgaagtg

SEQ ID NO: 615226 - DNA, 75 bp, synthetic construct
  source 1..75: mol_type = other DNA
accaaatctatcggtaacatgccgcctgccaatcaggatcacgatacgccgctattacagcagtatttttcgtga

SEQ ID NO: 615227 - DNA, 75 bp, synthetic construct
  source 1..75: mol_type = other DNA
gtacaaaatcgattggcaacctgccgcccgccaatcaggagcatgacgcgccgctgttgcagcagtatttttcgt

SEQ ID NO: 615228 - DNA, 75 bp, synthetic construct
  source 1..75: mol_type = other DNA
tagctggttcacctaacagcgctatagctcaccctgatgggcttgattgctatggccgtgtccctgaaattaatt

SEQ ID NO: 615229 - DNA, 75 bp, synthetic construct
  source 1..75: mol_type = other DNA
attcgaagtatcactttattgaagaagtgaagaagatggttatcgatcgtagtgaacaagagataatccctctga

SEQ ID NO: 615230 - DNA, 75 bp, synthetic construct
  source 1..75: mol_type = other DNA
ccagttcttcttcgaagaaacacacgatgagaacggctttaatatctacattctcgacgaaagtaaccgcgttga

SEQ ID NO: 615231 - DNA, 75 bp, synthetic construct
  source 1..75: mol_type = other DNA
tttatttatgtgccgccgggccgtgctaaccgttcaggttggtatctgtataaccgcgcgccaaatattgagtcg

SEQ ID NO: 615232 - DNA, 75 bp, synthetic construct
  source 1..75: mol_type = other DNA
acgaattttatcgtaccgccgtgcgtctcgccggtaagcgtattctgtggaatatggtgccgtgcgacgaagaag

SEQ ID NO: 615233 - DNA, 75 bp, synthetic construct
  source 1..75: mol_type = other DNA
caccatattaccgccgatgaagcacaacgcatcatcgcccgcgaaggcgaaggtgaaaacctgattgttaatcgc

SEQ ID NO: 615234 - DNA, 75 bp, synthetic construct
  source 1..75: mol_type = other DNA
ggaagattgatcaggtgcgtgaagcgcacaacgagttgctcgacgcgatgatgcagagctaccgtaatcttattc

SEQ ID NO: 615235 - DNA, 75 bp, synthetic construct
  source 1..75: mol_type = other DNA
cagcacccgccaggaaaccgggcgcttcaaggcgctgcgcgtttctggtcaaacctggggcttattcttcgaacg

SEQ ID NO: 615236 - DNA, 75 bp, synthetic construct
  source 1..75: mol_type = other DNA
ctgacctcgcgcacccgtttgtatattaaaggtaacggcattgtcgatttgcctaagttgcaggagatggtcgcc

SEQ ID NO: 615237 - DNA, 75 bp, synthetic construct
  source 1..75: mol_type = other DNA
catactggccctaaccggggctttggtgttcgccatatctgggctgagcacgagcaggaactggttaagctggga

SEQ ID NO: 615238 - DNA, 75 bp, synthetic construct
  source 1..75: mol_type = other DNA
atcttgaagagttatcgatgccgggaaatactttttctgtccgtcagcttaatcattacatccattatttgcagg

SEQ ID NO: 615239 - DNA, 75 bp, synthetic construct
  source 1..75: mol_type = other DNA
aaacggttcgatgagttctaacaccagcggtgaaggcgagatccgtgcacagatgatcgaaaatgatctaatcga

SEQ ID NO: 615240 - DNA, 75 bp, synthetic construct
  source 1..75: mol_type = other DNA
caccatgattagccgcaccaccaaagagctgacgacagaggatatcgccaccatcgccgatacctaccatgcatg

SEQ ID NO: 615241 - DNA, 75 bp, synthetic construct
  source 1..75: mol_type = other DNA
cagcacccggacctgaaagccgactacattctggcgaacccgccgttcaacctgaaagactggcgtaatgaagcc

SEQ ID NO: 615242 - DNA, 75 bp, synthetic construct
  source 1..75: mol_type = other DNA
caacctgaaagactggcgtaatgaagccgaattaaccaaagacccacgttttgctgggtatcgtatgccgccaac

SEQ ID NO: 615243 - DNA, 75 bp, synthetic construct
  source 1..75: mol_type = other DNA
ccgccttgcactgtgggaaaaactggggcaaccgatcctgaccctggcgatgattttgctggctgtgccgtttac

SEQ ID NO: 615244 - DNA, 75 bp, synthetic construct
  source 1..75: mol_type = other DNA
tctcgcggcaatcccccctatcgctcaggtactggtgtttatggcttctacgaagcgttgctggtgctggcggga

SEQ ID NO: 615245 - DNA, 75 bp, synthetic construct
  source 1..75: mol_type = other DNA
tggcgcattacattgatccgaacgcggcgatgacgttgctcaccaacttattgacgcagttatctaatgccatgt

SEQ ID NO: 615246 - DNA, 75 bp, synthetic construct
  source 1..75: mol_type = other DNA
ctgttttgcttctgggattaccgttgtgctctcaggctcttactcttaatctcaggggaggctaccgaagtgcca

SEQ ID NO: 615247 - DNA, 75 bp, synthetic construct
  source 1..75: mol_type = other DNA
gcggtccgtattgacaccgccctctcgaccattgagaaacgtaaccccaccctgaaaggcgcgctgccagacaac

SEQ ID NO: 615248 - DNA, 75 bp, synthetic construct
  source 1..75: mol_type = other DNA
ggctagggcgtgtaacacgcaagcacgatgatattgatctgacgtttcccggcgagaggcgcggcgagctcgagg

SEQ ID NO: 615249 - DNA, 75 bp, synthetic construct
  source 1..75: mol_type = other DNA
atgtcagcaggaagtcagtataacccttatctgaaaatttcgtatcaggcaacgccagatcttaatctggcctta

SEQ ID NO: 615250 - DNA, 75 bp, synthetic construct
  source 1..75: mol_type = other DNA
tgcgtgaggcagcagaaaaagcaacgtgtggtgtgtggtcgctcgaatatggagaggagagatttgatgctggtg

SEQ ID NO: 615251 - DNA, 75 bp, synthetic construct
  source 1..75: mol_type = other DNA
gtagagagcctgttcaaagcctttggtcgcaccctacgccaggccatccgcgtggaaggcgatactctgccctcg

SEQ ID NO: 615252 - DNA, 75 bp, synthetic construct
  source 1..75: mol_type = other DNA
gcgagcaactcactaaacgagaccgttacgctcacgtagtgcgtaacaccaaagagacgcaaattgacgtccagg

SEQ ID NO: 615253 - DNA, 75 bp, synthetic construct
  source 1..75: mol_type = other DNA
ggattttgatggtccgcacaacctgatgatgcagatcttcacctcgcaaggcgtgcagtttgatgaagtgctgat

SEQ ID NO: 615254 - DNA, 75 bp, synthetic construct
  source 1..75: mol_type = other DNA
gtagagagcttgttcaaagcctttggtcgcaccctgcgccaggccatccgcgtggaaggcgacaccttaccctcg

SEQ ID NO: 615255 - DNA, 75 bp, synthetic construct
  source 1..75: mol_type = other DNA
gaaaccctgaactggccgatgattggcgagcaactcaccaaacgtgatcgttacgctcacgtggtacgcaacacc

SEQ ID NO: 615256 - DNA, 75 bp, synthetic construct
  source 1..75: mol_type = other DNA
ttcttccgttcattgtcctacaccatgggcctgacgctgcaccttaagaccaaaggcaagaacgaccaccaccga

SEQ ID NO: 615257 - DNA, 75 bp, synthetic construct
  source 1..75: mol_type = other DNA
aatttaaggaagaagccgtccgacagataacggaacgcggttattccgttgccgaagtatctgatcgtctgggcg

SEQ ID NO: 615258 - DNA, 75 bp, synthetic construct
  source 1..75: mol_type = other DNA
agcgaacaacatgcccgggatttactggaagccaaaagcgaaatcctgaaactacgcgcgcagctaaaacgcacc

SEQ ID NO: 615259 - DNA, 75 bp, synthetic construct
  source 1..75: mol_type = other DNA
aaacgcatatccttatggctggtcggattgatggggtcaagaacgctgacattaggatatgcaatttcatttgct

SEQ ID NO: 615260 - DNA, 75 bp, synthetic construct
  source 1..75: mol_type = other DNA
cgcgaaacgcagattgatgtcgaagtgtggctggatcgcgaaggcggcagcaaaattaacaccggcgttggtttc

SEQ ID NO: 615261 - DNA, 75 bp, synthetic construct
  source 1..75: mol_type = other DNA
ttgcccgcacctgcccgccgacaactgcgaatgccgcaagccgaaaacgcagatggtcaccgcctggctggcgga

SEQ ID NO: 615262 - DNA, 75 bp, synthetic construct
  source 1..75: mol_type = other DNA
agagctatcggctcgcgttgcgctgggctatgacgttgcaggagagaagcagaagcgcaaaaccgaagcactggc

SEQ ID NO: 615263 - DNA, 75 bp, synthetic construct
  source 1..75: mol_type = other DNA
cgttttgacaaactcgcctttgaaccgggcgtgatcccggagctgctgaagttgcaaaaagcgggctataaactg

SEQ ID NO: 615264 - DNA, 75 bp, synthetic construct
  source 1..75: mol_type = other DNA
cagagcttgccgccgaatatttcgaacgccagatcctgccgcgctggaaacatcccgatatcctccgtcgtcgca

SEQ ID NO: 615265 - DNA, 75 bp, synthetic construct
  source 1..75: mol_type = other DNA
aacagctttatcagcctggtgaaagatacttcgctggcggcgacgattcaggtgccggagctgttccgtcaggcg

SEQ ID NO: 615266 - DNA, 75 bp, synthetic construct
  source 1..75: mol_type = other DNA
aggtcagaaaaaggttaaggacgtcaaaccccgagatattgatgccttgcttcaggccatcttaaaacgtggtgc

SEQ ID NO: 615267 - DNA, 75 bp, synthetic construct
  source 1..75: mol_type = other DNA
gccgaccatagcaacggacgttctgcgctggacacgccgcatatttgactacggcattaagcggcacgcactgga

SEQ ID NO: 615268 - DNA, 75 bp, synthetic construct
  source 1..75: mol_type = other DNA
cgatgagttaatccagctattcaaagccatgcgcacggctaagggtttcagtcgccagaatgaaatcacgttcaa

SEQ ID NO: 615269 - DNA, 75 bp, synthetic construct
  source 1..75: mol_type = other DNA
ttgccggggagaagcaggagcggaaatccgaagcactggcgaagatggaagcagaaaaaaacgccatgcgcgttt

SEQ ID NO: 615270 - DNA, 75 bp, synthetic construct
  source 1..75: mol_type = other DNA
ggccgaagccctggcaaaaattgaggcagaaaaaaaggccgtgcgcgtatcagagcttgctgccgaatatttcga

SEQ ID NO: 615271 - DNA, 75 bp, synthetic construct
  source 1..75: mol_type = other DNA
gcgagcaactcacccgccgcgaccgctacgcgcacgttgagcgtaaaaccaaagaaacgcagatcgacgtcaaag

SEQ ID NO: 615272 - DNA, 75 bp, synthetic construct
  source 1..75: mol_type = other DNA
ttgcccacacttcccggcgggtaactgcgactgccgcaaaccgaaaacaaagctggtcaccgcctggctggccga

SEQ ID NO: 615273 - DNA, 75 bp, synthetic construct
  source 1..75: mol_type = other DNA
ttcagataagggcatggataaaggccggagaacactttgaggggcgcgccgatggtaatggtctgtatttgtgct

SEQ ID NO: 615274 - DNA, 75 bp, synthetic construct
  source 1..75: mol_type = other DNA
gacgagatgctaaaagcaattgttgaccgtggagcgccaaccatagcaacggacgttctgcgctggacgcgtcgc

SEQ ID NO: 615275 - DNA, 75 bp, synthetic construct
  source 1..75: mol_type = other DNA
ggaactatccgcccgcgtcgcacttgggtacgacgtagcagcggagaaacaggagcgtaaagccgaagcactggc

SEQ ID NO: 615276 - DNA, 75 bp, synthetic construct
  source 1..75: mol_type = other DNA
acagcattcaattgggtgcggtaaaagccaacttgggtcacctgggagtcgcttccggtatcgtcagcttaatga

SEQ ID NO: 615277 - DNA, 75 bp, synthetic construct
  source 1..75: mol_type = other DNA
aggaatatggctgaaagtatcgacagggtagttcgtccggcaaccatgaagaccggaggcaggccgaaaaaatgg

SEQ ID NO: 615278 - DNA, 75 bp, synthetic construct
  source 1..75: mol_type = other DNA
atgttttataaatttaaatcttcttgtggtagttttaaatccaaagtgttagctgttcctgtattgtttgcatcc

SEQ ID NO: 615279 - DNA, 75 bp, synthetic construct
  source 1..75: mol_type = other DNA
gggcctggcggggagctttgccggacgtattggcagtggcatgttgccctttatgacaccggttttcctgcaaat

SEQ ID NO: 615280 - DNA, 75 bp, synthetic construct
  source 1..75: mol_type = other DNA
gtgtggatcactattgcaccgttcgtgacaccggtcatcactgtcaccgtgtccggtcctgtgggcagcggtaaa

SEQ ID NO: 615281 - DNA, 75 bp, synthetic construct
  source 1..75: mol_type = other DNA
ccgatgcactgcatgccaccattgcggcactgatgacagtttacgatcaggagctgctcatgaaggagttacgta

SEQ ID NO: 615282 - DNA, 75 bp, synthetic construct
  source 1..75: mol_type = other DNA
aggaactcggaaacagcgtcattgtcgatgctgctgacgtggagaatgagcgccgtatgaatggcgaagatctga

SEQ ID NO: 615283 - DNA, 75 bp, synthetic construct
  source 1..75: mol_type = other DNA
gtctctcaacatcaaacccgctctatgtcactgccatctatgacgatgacaacaacctgataatgagcatcccga

SEQ ID NO: 615284 - DNA, 75 bp, synthetic construct
  source 1..75: mol_type = other DNA
agagcagatgaccggtacagtcgagaaagagcaaaaaacaggcatactcgcttcgttcctgtccattattgggca

SEQ ID NO: 615285 - DNA, 75 bp, synthetic construct
  source 1..75: mol_type = other DNA
cagtggcaactgctgcattttcattaccttctttaacctatgccgcacaacagaacattcttagcgtgcatattt

SEQ ID NO: 615286 - DNA, 75 bp, synthetic construct
  source 1..75: mol_type = other DNA
ggcggggagctttgccggacgtatcggcagtggcatgttgccctttatgacgccggttttcctgcaaattggcct

SEQ ID NO: 615287 - DNA, 75 bp, synthetic construct
  source 1..75: mol_type = other DNA
ggtgcaggtggtgaatcgctttggctatcgccgggttctggtagcaaccacgctgggcctgtcgctggtcaccct

SEQ ID NO: 615288 - DNA, 75 bp, synthetic construct
  source 1..75: mol_type = other DNA
aacttctatgagaattaacttcccaagggtgaaaattatcaagcctgggatattcgaagttagagcatcactggt

SEQ ID NO: 615289 - DNA, 75 bp, synthetic construct
  source 1..75: mol_type = other DNA
cacagtgatcaggctggaggaatacacgggacagggcctgttgtcatacggcgaggagcgtatctgtcggacgaa

SEQ ID NO: 615290 - DNA, 75 bp, synthetic construct
  source 1..75: mol_type = other DNA
cgcgcctgatgctcaaggcgggtagtccggtgcatcgggaaattctctacaacgacatttacaactgggacaacg

SEQ ID NO: 615291 - DNA, 75 bp, synthetic construct
  source 1..75: mol_type = other DNA
ccctcgaccaacaccctggaagtgcatatccacaatctgcgcgacaaagtgggcaaagcccgtatccgcaccgtg

SEQ ID NO: 615292 - DNA, 75 bp, synthetic construct
  source 1..75: mol_type = other DNA
aggcactatacctgttggcacttgatcccgtctcggaaacaaaggcagatcgtaacagttatggctttcgtccgg

SEQ ID NO: 615293 - DNA, 75 bp, synthetic construct
  source 1..75: mol_type = other DNA
cggtgattaaaggaggtgcggtaaataacgacggcgggcgtcggctggggtttgtcgcccccagcgtagaaggac

SEQ ID NO: 615294 - DNA, 75 bp, synthetic construct
  source 1..75: mol_type = other DNA
tgcccgtttattcgggttgaacaaccaggattctcaacccagaaatcaagagcaggtgaagccgcgacggcttcc

SEQ ID NO: 615295 - DNA, 75 bp, synthetic construct
  source 1..75: mol_type = other DNA
tgggattacctttaaatctggtctggggatatatagcgattgctatctttatgaccggcgatggttttgaactgg

SEQ ID NO: 615296 - DNA, 75 bp, synthetic construct
  source 1..75: mol_type = other DNA
actatcatcggcatgtggtggcgaaggagacattcagctatgtggattaccgtgtctggaaattgctctggcgct

SEQ ID NO: 615297 - DNA, 75 bp, synthetic construct
  source 1..75: mol_type = other DNA
tgaaagagtttccccggaattacttcccctcgcactggctatcgggattatgcagacagcagataaacctcactt

SEQ ID NO: 615298 - DNA, 75 bp, synthetic construct
  source 1..75: mol_type = other DNA
cgctgtttgaaagagtttccccggaattacttcccctcgcactggctatcgggattatgcagacagcggataaac

SEQ ID NO: 615299 - DNA, 75 bp, synthetic construct
  source 1..75: mol_type = other DNA
atattgttgccaaagaaacgttcagctatatcgactatcgcgtctggaatttactctggcgctggtcatgccgtc

SEQ ID NO: 615300 - DNA, 75 bp, synthetic construct
  source 1..75: mol_type = other DNA
ctcaggcaggaaaaacgatgtccgttctgtaaccagttaattacaaagggaacaggctggcacgttcatcatatc

SEQ ID NO: 615301 - DNA, 75 bp, synthetic construct
  source 1..75: mol_type = other DNA
gacataccaagataaaggcggaagctaacccttatctgcctgaatgggaactgtacttcgagcagcgccttgagc

SEQ ID NO: 615302 - DNA, 75 bp, synthetic construct
  source 1..75: mol_type = other DNA
cctgtaccaccagcgatggtaagacgatcgaagttgagtttcgcaacgtcattatcgacaacattaacggcgata

SEQ ID NO: 615303 - DNA, 75 bp, synthetic construct
  source 1..75: mol_type = other DNA
caactcaaagttaaaacgtcgtcccccgaccttgctattggacgtttgagcggcggcaatcagcaaaaagcgatc

SEQ ID NO: 615304 - DNA, 75 bp, synthetic construct
  source 1..75: mol_type = other DNA
tgatacggcggttcgcgacccatcaatggaaatgaccttgagctggagtggcacacaaagcgattttgatgatgc

SEQ ID NO: 615305 - DNA, 75 bp, synthetic construct
  source 1..75: mol_type = other DNA
atacgatgaacaaggcgatcttatcgctcgcgcaggagaaagcgtagaagtacgcgaccgactggcgctcaacgg

SEQ ID NO: 615306 - DNA, 75 bp, synthetic construct
  source 1..75: mol_type = other DNA
accctggcgcgtcaggtgacgctgaacgttgcgccgctgatgcgtaccgactcaccggatgaaaaacgcattcag

SEQ ID NO: 615307 - DNA, 75 bp, synthetic construct
  source 1..75: mol_type = other DNA
atcgctacactggtttacgtcctcgctgggactttatgcacccggggagaggatgggctcaaaatttacgtgagc

SEQ ID NO: 615308 - DNA, 75 bp, synthetic construct
  source 1..75: mol_type = other DNA
ttattaggcgcaagaagtaccgtgcttatcgtggagaacaggggcgaacttgtaataatttactgaagagacaat

SEQ ID NO: 615309 - DNA, 75 bp, synthetic construct
  source 1..75: mol_type = other DNA
gcgtacggataagccaattggcgcgttactgctgctctggccaactttgtgggcgctgtgggtggcgacgccagg

SEQ ID NO: 615310 - DNA, 75 bp, synthetic construct
  source 1..75: mol_type = other DNA
tgcgcgctgccggatgtgtggtgaatgattatgctgaccgcaagtttgatggtcatgttaagcgcacggcgaacc

SEQ ID NO: 615311 - DNA, 75 bp, synthetic construct
  source 1..75: mol_type = other DNA
tctataaaacacgcagcattatcgtccccactctgataagtgcgctggcctacgggctggcctggaaagtgatgg

SEQ ID NO: 615312 - DNA, 75 bp, synthetic construct
  source 1..75: mol_type = other DNA
ctattattacagcggcgttgagttttcttggggtttattttttaatgcctctattactaataggtagagattttt

SEQ ID NO: 615313 - DNA, 75 bp, synthetic construct
  source 1..75: mol_type = other DNA
tgcactcaggatatatgatagcaaagttcgttcattgaaagaggaacaggaatctaaacagcccccaattcaatg

SEQ ID NO: 615314 - DNA, 75 bp, synthetic construct
  source 1..75: mol_type = other DNA
gacgccgatagctaccgttatctggcagaatctatccgtatgcatcccgatcaggatactttgaaagccatgatg

SEQ ID NO: 615315 - DNA, 75 bp, synthetic construct
  source 1..75: mol_type = other DNA
acggtgttgcatcccgaggatgaaaacggggatgtgcggctggtgaatccagagaactggaaagagctcgcggtc

SEQ ID NO: 615316 - DNA, 75 bp, synthetic construct
  source 1..75: mol_type = other DNA
tgggggaaacccgctatcagctggctgacggctcgctgctgtgcaaagacgtgccgataggtcgaacgggtaagc

SEQ ID NO: 615317 - DNA, 75 bp, synthetic construct
  source 1..75: mol_type = other DNA
tgcctcattcgaagggatgagcatcacgattctgcatcctgaagatgaaaacgggaatgtgcggctggtaaatcc

SEQ ID NO: 615318 - DNA, 75 bp, synthetic construct
  source 1..75: mol_type = other DNA
aaaacattactgaaagccctgctgactaagctggaaagaaatgccacgggcgataacgataataagcctgacgat

SEQ ID NO: 615319 - DNA, 75 bp, synthetic construct
  source 1..75: mol_type = other DNA
tgggggaaacccgctatcagctggctgacggctcgctgttgtgtaaagacgtgccgataggtcgaacgggtaagc

SEQ ID NO: 615320 - DNA, 75 bp, synthetic construct
  source 1..75: mol_type = other DNA
gatagtcggtgatgcggatatccgcaaattgccgaaacaatcagtcgacatggcgtttaatgccgtgtctgagat

SEQ ID NO: 615321 - DNA, 75 bp, synthetic construct
  source 1..75: mol_type = other DNA
ccgcaagctggcaccggaagtgaaagtgaattctattgcgccatcgctgatcctgtttaatgaacatgatgatgc

SEQ ID NO: 615322 - DNA, 75 bp, synthetic construct
  source 1..75: mol_type = other DNA
acgggcagatcatctttgttacccctgataactggcgccagctggctcacgggcacatccagaacgtacgacgtg

SEQ ID NO: 615323 - DNA, 75 bp, synthetic construct
  source 1..75: mol_type = other DNA
caacaagaagatgggcaatgcccgatacgttggtgattatcttttttgttgctattttaaccagccttgccacct

SEQ ID NO: 615324 - DNA, 75 bp, synthetic construct
  source 1..75: mol_type = other DNA
acgttaataccccataccttcttaaccacgctctggaaagattactgcgtgggcacggacacgccgccagcgata

SEQ ID NO: 615325 - DNA, 75 bp, synthetic construct
  source 1..75: mol_type = other DNA
gagaaaaagaagtcatcgatttagtcgattatctgctcaccagttgctttgttactggacgcagttttccgcttg

SEQ ID NO: 615326 - DNA, 75 bp, synthetic construct
  source 1..75: mol_type = other DNA
cgattacttaccagttgctttgtcaccggacgcagtttcccacttgatggcggtcgtcatctgcgttaatgcagc

SEQ ID NO: 615327 - DNA, 75 bp, synthetic construct
  source 1..75: mol_type = other DNA
cgatgatgatgtgaagattggcattaaatccacggcaatcctgttcggccaatacgataaattgattattggtat

SEQ ID NO: 615328 - DNA, 75 bp, synthetic construct
  source 1..75: mol_type = other DNA
atgatgctcggctggatgattgcatttttagcggttggttttttaatcggtattgtggtgatgtccagttgcatc

SEQ ID NO: 615329 - DNA, 75 bp, synthetic construct
  source 1..75: mol_type = other DNA
ccatgatccgccaacgcaaatttatgccgaatgattttgcgcgctatcacccgggcggttcattaggtcgtcgcc

SEQ ID NO: 615330 - DNA, 75 bp, synthetic construct
  source 1..75: mol_type = other DNA
atgacggcattactgacactggaagagagcaaggcacatctgcgtgttgaccatgacgcggatgatgacatgctg

SEQ ID NO: 615331 - DNA, 75 bp, synthetic construct
  source 1..75: mol_type = other DNA
ctgctggtgaccgacaagcacgttgaaggctgggatgacccgcgtatgccgaccatttccggtctgcgtcgtcgt

SEQ ID NO: 615332 - DNA, 75 bp, synthetic construct
  source 1..75: mol_type = other DNA
ggttgctgaagtgcttgtagaaacttgtcctgtgcccatgcgttgggtgggggttaaagagcggtatggccaggt

SEQ ID NO: 615333 - DNA, 75 bp, synthetic construct
  source 1..75: mol_type = other DNA
ttgataatgaactgtaaaggtcacgttattctttcgggaatgggtaaatcagggcatgtcggtcgtaaaatgtca

SEQ ID NO: 615334 - DNA, 75 bp, synthetic construct
  source 1..75: mol_type = other DNA
tgggggtcgatccggtagtcgcagaacgctgcctgaatcacaaaatcaaaggcgttgaggggatatacaatcgct

SEQ ID NO: 615335 - DNA, 75 bp, synthetic construct
  source 1..75: mol_type = other DNA
aagaattcgattttaatgaagcagtttggcgtttacccgcagagcgggttaagaatggcgatgcgattgatatac

SEQ ID NO: 615336 - DNA, 75 bp, synthetic construct
  source 1..75: mol_type = other DNA
ggcgctggcgcagtggtgtgatttgctggtggcactggaaagcggaaaagactacaacgtaacgccaatcagagc

SEQ ID NO: 615337 - DNA, 75 bp, synthetic construct
  source 1..75: mol_type = other DNA
tgcggaagagaagatgactaagcaccgcatttccacgctgttgatcactgatagcacccaggatgtcattggttt

SEQ ID NO: 615338 - DNA, 75 bp, synthetic construct
  source 1..75: mol_type = other DNA
tgtcgcgcacggtgctgcagctgacgtactggcggcgcgttttggaacgcgcgggatgctggcaaccgatctctt

SEQ ID NO: 615339 - DNA, 75 bp, synthetic construct
  source 1..75: mol_type = other DNA
ccgggagatcgaagatttatccccttcagtgtttccacggctaccatcagtgcggttaccgataaagtcattcct

SEQ ID NO: 615340 - DNA, 75 bp, synthetic construct
  source 1..75: mol_type = other DNA
tttggggtggcgcaacagctgccaatcaggtggaaggtgcctggctggaagatggcaaagggatcacgacctcag

SEQ ID NO: 615341 - DNA, 75 bp, synthetic construct
  source 1..75: mol_type = other DNA
tgttgatggcattcgttatcaggttgatattaataaccttacccaacgcgaagttgaaaacctgccgctgaacgg

SEQ ID NO: 615342 - DNA, 75 bp, synthetic construct
  source 1..75: mol_type = other DNA
cattactattgatgtggcctaccgctatttctctaccgagaagcgtaaatttattatcgccgacaccccagggca

SEQ ID NO: 615343 - DNA, 75 bp, synthetic construct
  source 1..75: mol_type = other DNA
gcggctgatgacgcgttaccggcggtgcagagcgcgtcggtagatgtggtatggatggcggaacaaccgctttcc

SEQ ID NO: 615344 - DNA, 75 bp, synthetic construct
  source 1..75: mol_type = other DNA
acccgccaaatctacgaagatcagctctcatcgctacataacgacagtaagcgtcatggtactcagggcgaaaaa

SEQ ID NO: 615345 - DNA, 75 bp, synthetic construct
  source 1..75: mol_type = other DNA
tgcccagccaatgcgctttccggtgcagtacgttaaccgcccgaatcttgattttcgtggctacgccggaacgct

SEQ ID NO: 615346 - DNA, 75 bp, synthetic construct
  source 1..75: mol_type = other DNA
ttcgaactggaattgaacgccctggttcgtcgtcacttcccacattggggcgcgcgcgatttgctgggagataaa

SEQ ID NO: 615347 - DNA, 75 bp, synthetic construct
  source 1..75: mol_type = other DNA
gtgatgttcggtctgcattggggtttgatacctttaattatcaataacttcaccgtgctgggctacgacaccatg

SEQ ID NO: 615348 - DNA, 75 bp, synthetic construct
  source 1..75: mol_type = other DNA
cttctcggtgggctggtttaccccctcacctgccagccacaggatatgttgcaggccatggaagagaaccggcgc

SEQ ID NO: 615349 - DNA, 75 bp, synthetic construct
  source 1..75: mol_type = other DNA
aaagagaatatcaaagatgtcgccatcgatttttatcaccgttacccggaagatatcgcgttatttgccgagatg

SEQ ID NO: 615350 - DNA, 75 bp, synthetic construct
  source 1..75: mol_type = other DNA
atcgagccgctgagcaaagcctatgatgcatactccttccatgtgctgccgcgtatcggttcgctggtcgcaaat

SEQ ID NO: 615351 - DNA, 75 bp, synthetic construct
  source 1..75: mol_type = other DNA
ctgctggtgaccgataagcacgttgaaggctgggatgacccgcgtatgccgaccatttctggtctgcgtcgtcgt

SEQ ID NO: 615352 - DNA, 75 bp, synthetic construct
  source 1..75: mol_type = other DNA
atggcgtaattagccgcgcttttgcctctctgaacgatatggtgagctggtgccaccatcttcctggtgagcaag

SEQ ID NO: 615353 - DNA, 75 bp, synthetic construct
  source 1..75: mol_type = other DNA
agttcagccgtaccgcccgcgaaggcggctgggacacgttcagtaatttctttggcctgaaatacgatccctccg

SEQ ID NO: 615354 - DNA, 75 bp, synthetic construct
  source 1..75: mol_type = other DNA
gttgatagtgaactggaaaaactcactgagacgctgatacagcttcctaacatcactcagattcaggaagcacta

SEQ ID NO: 615355 - DNA, 75 bp, synthetic construct
  source 1..75: mol_type = other DNA
tggcctgaggtgcaccctcacatgctgctgtcgcatagactccactacgatcacgcgagacaacctgtatttccg

SEQ ID NO: 615356 - DNA, 75 bp, synthetic construct
  source 1..75: mol_type = other DNA
agggctttgtcagcccggaatccttcacctttgccgaatcggcgtttgtgctggcgatagtggtgctcggcggta

SEQ ID NO: 615357 - DNA, 75 bp, synthetic construct
  source 1..75: mol_type = other DNA
atcgcgttatcttcctctacctggtggcgttgctgctggtggtgttttctttgttcgttattaaccgtttgctgc

SEQ ID NO: 615358 - DNA, 75 bp, synthetic construct
  source 1..75: mol_type = other DNA
cctcgtggcgctgctggtgcttgcggtggcgtggccgtttatggtgtcgcgtgggacggtggatatcgccactct

SEQ ID NO: 615359 - DNA, 75 bp, synthetic construct
  source 1..75: mol_type = other DNA
cgactgatcatccgcaacgcgcgcttattctggcagagctggaaaaactggatgctctttttgcggatgatgcag

SEQ ID NO: 615360 - DNA, 75 bp, synthetic construct
  source 1..75: mol_type = other DNA
gaccgggctgtctccggacgaaatcgttaatcaggtaaaagactctggtctgaaagggcgcggcggtgcgggctt

SEQ ID NO: 615361 - DNA, 75 bp, synthetic construct
  source 1..75: mol_type = other DNA
atcagaacatctcgaaaagtaaagatgctggcaccaagctgatgggcttctccggtcgggtgaaaaatccgggtc

SEQ ID NO: 615362 - DNA, 75 bp, synthetic construct
  source 1..75: mol_type = other DNA
tccttagaaggaagatatagtgtgtcccaactaatatctgattgtataaggaaagaggggtatgatggtatacaa

SEQ ID NO: 615363 - DNA, 75 bp, synthetic construct
  source 1..75: mol_type = other DNA
tgggtcaatgaagcgaacaagttcgggcttgaggctctttgcgagctgatgttggccatccttgacgatctggat

SEQ ID NO: 615364 - DNA, 75 bp, synthetic construct
  source 1..75: mol_type = other DNA
ttgcaatgggtactgattccgcggatgcacgatttgttagataacaaccagccgttaccgggcgcttttgctgtt

SEQ ID NO: 615365 - DNA, 75 bp, synthetic construct
  source 1..75: mol_type = other DNA
agggttgaaaagcgtttccggaccgaagtttattctgcccgcgattgatggctccacggtgaagcaaaagctgtt

SEQ ID NO: 615366 - DNA, 75 bp, synthetic construct
  source 1..75: mol_type = other DNA
tttagcgtttgcctgctctacatggtgcgcatttattatcgtagtgaatggcttaaccgtcgctggcatttgcag

SEQ ID NO: 615367 - DNA, 75 bp, synthetic construct
  source 1..75: mol_type = other DNA
tcggcatcaaatgcagcatgtatcttgtaggcaacttctttgatttcccgctaaaaatatcgacatttttcgggg

SEQ ID NO: 615368 - DNA, 75 bp, synthetic construct
  source 1..75: mol_type = other DNA
ggctgtttcaacgctttgcctgctgaattacaaccagaactttttgcaaggggtggaaaccgaatattcgctggc

SEQ ID NO: 615369 - DNA, 75 bp, synthetic construct
  source 1..75: mol_type = other DNA
agtttttgctgcctgcgcattgataatcttgagtttatgagtcgtcattacgggttaatgatgcgcgttcactgt

SEQ ID NO: 615370 - DNA, 75 bp, synthetic construct
  source 1..75: mol_type = other DNA
tgcgcatttatcatcgtagtgaatggcttaaccgacgctggcatttgcaggcgctgaccgatccgttaacgctct

SEQ ID NO: 615371 - DNA, 75 bp, synthetic construct
  source 1..75: mol_type = other DNA
gcttccgtattgcgattgatgattttggcactggttatgccaactacgagcgattaaaacgtttgcaggccgata

SEQ ID NO: 615372 - DNA, 75 bp, synthetic construct
  source 1..75: mol_type = other DNA
ttattcgtcattaatcgcctgctgcggatgccgctgggtcgcgcatgggaagcgttgcgtgaagatgaaatcgcc

SEQ ID NO: 615373 - DNA, 75 bp, synthetic construct
  source 1..75: mol_type = other DNA
gcggcggcgggcttcctgctcggcttcccggtgttgcgtttacgtggcgactatctggcgatcgttaccctcggt

SEQ ID NO: 615374 - DNA, 75 bp, synthetic construct
  source 1..75: mol_type = other DNA
cggtccgaacggcatcagccagatccctaaaccgaccttttttggcctcgagttcagtcgtactgcccgtgaagg

SEQ ID NO: 615375 - DNA, 75 bp, synthetic construct
  source 1..75: mol_type = other DNA
ctatctggcgatcgttaccctcggtttcggcgaaattgtgcgcatattgctgctcaataacactgaaatcaccgg

SEQ ID NO: 615376 - DNA, 75 bp, synthetic construct
  source 1..75: mol_type = other DNA
ggggttgaaaagcgtttccgggccgaagtttattttgcctgcgattgatggctccacggtgaagcagaaactgtt

SEQ ID NO: 615377 - DNA, 75 bp, synthetic construct
  source 1..75: mol_type = other DNA
cgtccacagggcttgctgcccatgacacgcccgcaactgaagctgaagaacggcgaagcgaaaggagagcaggca

SEQ ID NO: 615378 - DNA, 75 bp, synthetic construct
  source 1..75: mol_type = other DNA
aggagtgcgaaattcctgctggcggttctcttgtcgagtacgttgacgatatgcgcgagaagctggaagccgcag

SEQ ID NO: 615379 - DNA, 75 bp, synthetic construct
  source 1..75: mol_type = other DNA
gaagaaagcattattactgacgatgaacccccttttgtggcacatcgaccgtcagcggtgcagagggaagtaaga

SEQ ID NO: 615380 - DNA, 75 bp, synthetic construct
  source 1..75: mol_type = other DNA
caatgccctgcaacaacgcgcttctcactgcctgtataccattgccgaagaacaagcgacaaacagtgcttcaat

SEQ ID NO: 615381 - DNA, 75 bp, synthetic construct
  source 1..75: mol_type = other DNA
tggtggcaatttacatgccgatggtaccggaagccgccgttgcgatgctggcttgcgcgcgtattggtgcggtgc

SEQ ID NO: 615382 - DNA, 75 bp, synthetic construct
  source 1..75: mol_type = other DNA
ttgcgattatacggtcatggtcaaaggcaccgtcctggcaagcgggcgacaggtggaatcatcgtggtggcgcag

SEQ ID NO: 615383 - DNA, 75 bp, synthetic construct
  source 1..75: mol_type = other DNA
acttccaactggtcgaggagtgcgaaattcctgctggcggatctctggtcgagtacgttgatgatatgcgcgaga

SEQ ID NO: 615384 - DNA, 75 bp, synthetic construct
  source 1..75: mol_type = other DNA
ggcgtggtctggctggcgagatcagtaaggaaacgggtaaatccttgtgtgataacgctgaatacgttaatgcct

SEQ ID NO: 615385 - DNA, 75 bp, synthetic construct
  source 1..75: mol_type = other DNA
agaaaccgccgtaaacccgtgccttatgaactcattccgggttcgctggctcgtatgttatgcgccgactggtgg

SEQ ID NO: 615386 - DNA, 75 bp, synthetic construct
  source 1..75: mol_type = other DNA
gcgacacgctggatatggaagatgtggtaaacgccagcagcagcaacccggcgcaccgccgcaatgagatgatgg

SEQ ID NO: 615387 - DNA, 75 bp, synthetic construct
  source 1..75: mol_type = other DNA
aggattgctctcggtttgttctttatctctgtcggcatgtcgctcaacctcggggtgctttatacccatctgttg

SEQ ID NO: 615388 - DNA, 75 bp, synthetic construct
  source 1..75: mol_type = other DNA
agcaattccgcttctttggtattccggggcgtcaggcttaccgtgaacttcgcttgctggctggtcaggcggcaa

SEQ ID NO: 615389 - DNA, 75 bp, synthetic construct
  source 1..75: mol_type = other DNA
cgtcaggcttaccgtgaactgcgattgttggctggtcaggcggcaaggcaacagggtgacaaaaaagcaggtgcg

SEQ ID NO: 615390 - DNA, 75 bp, synthetic construct
  source 1..75: mol_type = other DNA
tgtttattctctacacctccggttctaccgggaagccgaaaggcgtgctgcacactaccggcggttatctggtgt

SEQ ID NO: 615391 - DNA, 75 bp, synthetic construct
  source 1..75: mol_type = other DNA
tggaattcgaaagtatcggtaaagcgggaagccgtctgggtacggcgctggcgatggcggttgaccatgagatca

SEQ ID NO: 615392 - DNA, 75 bp, synthetic construct
  source 1..75: mol_type = other DNA
gttacgaaggcgcgcgtaaggcgctgaccgggctgtctccggacgaaatcgttaatcaggtaaaagactctggtc

SEQ ID NO: 615393 - DNA, 75 bp, synthetic construct
  source 1..75: mol_type = other DNA
ctcgactggcctgaaatggagcctgatgccgaaagacgaatctatgaacatccgttacctgctgtgtaatgccga

SEQ ID NO: 615394 - DNA, 75 bp, synthetic construct
  source 1..75: mol_type = other DNA
tatggggcaaaccgacctgtgtcaacaacgtcgaaaccctgtgtaacgttccggcgatcctcgctaacggcgtgg

SEQ ID NO: 615395 - DNA, 75 bp, synthetic construct
  source 1..75: mol_type = other DNA
gttaatcaggtaaaagacgctggtctgaaagggcgcggtggcgcgggcttctcgactggcctgaaatggagcctg

SEQ ID NO: 615396 - DNA, 75 bp, synthetic construct
  source 1..75: mol_type = other DNA
gtattccgcacaatattaaaggtcaggcgatctacgcctacgtcacgcttaatcacggggaggaaccgtcaccag

SEQ ID NO: 615397 - DNA, 75 bp, synthetic construct
  source 1..75: mol_type = other DNA
cgactcctggccgggtcaggcgcgtacgctgtttggcgatcacgaacgttttgagcagacctacttctccacctt

SEQ ID NO: 615398 - DNA, 75 bp, synthetic construct
  source 1..75: mol_type = other DNA
ctgcctggcgctaccgagctaaaagccggttcggcaacacgtccgttcttcggcgtgcaaccggcgctggtcgat

SEQ ID NO: 615399 - DNA, 75 bp, synthetic construct
  source 1..75: mol_type = other DNA
tgggtatgttgcgtatcgccaaaaagagggatcgtcaaattgtcaccgatgcgctggaacgtgtcgatatggtga

SEQ ID NO: 615400 - DNA, 75 bp, synthetic construct
  source 1..75: mol_type = other DNA
gcactgcgcgatgcatccttcacagtaccaggcggatctattgccgctctggttggggtaaacggttccggaaaa

SEQ ID NO: 615401 - DNA, 75 bp, synthetic construct
  source 1..75: mol_type = other DNA
ctcagtcagaagaggttgactggtcatttcctgtactggtggaagatgtggtgatgatgggccgctatgggcata

SEQ ID NO: 615402 - DNA, 75 bp, synthetic construct
  source 1..75: mol_type = other DNA
ataaagaggcgcgttgcggtgtgcgttgtgccacccgcgatcatctgccaatggtaggcaatgttcccgattatg

SEQ ID NO: 615403 - DNA, 75 bp, synthetic construct
  source 1..75: mol_type = other DNA
gatggatgccagtacgctggcggcgttaaacccgaatcggttatgggtgcggaaattgttgaagggtaaagcggt

SEQ ID NO: 615404 - DNA, 75 bp, synthetic construct
  source 1..75: mol_type = other DNA
atggtaggcaatgtccccgattatgaggcaacgctcgcggaatatgcctctctggcggaacagaaagacaacgcg

SEQ ID NO: 615405 - DNA, 75 bp, synthetic construct
  source 1..75: mol_type = other DNA
caggaagctcgaagagtctgtagacaaggcattgagcttaaacaggcagaaaatcagagacgctatcagcgaaca

SEQ ID NO: 615406 - DNA, 75 bp, synthetic construct
  source 1..75: mol_type = other DNA
ggcgcaaacgggaaatgctttgcggggtgatggaacagacattacccctcccctgctccacgccgtggtttaacc

SEQ ID NO: 615407 - DNA, 75 bp, synthetic construct
  source 1..75: mol_type = other DNA
gagaaatttcccctcacccgtgctgatttagcgttagcgcatcaacactggccggaactggcgccgtgggcggaa

SEQ ID NO: 615408 - DNA, 75 bp, synthetic construct
  source 1..75: mol_type = other DNA
accatcgtcttggtgtctacactgctgacagcatcgggcgcaagcattctgtggtggcaggggcagcagatactc

SEQ ID NO: 615409 - DNA, 75 bp, synthetic construct
  source 1..75: mol_type = other DNA
aataaagtgaacgagcattatcatgtgcctttattactcagccaatatgggtattcaacctatcgtggcagttaa

SEQ ID NO: 615410 - DNA, 75 bp, synthetic construct
  source 1..75: mol_type = other DNA
gctgcgcgttgagctggaaggcaaagacagcaaaatagccaatcttaccgccgaacgcgatgctcttcgtgaagg

SEQ ID NO: 615411 - DNA, 75 bp, synthetic construct
  source 1..75: mol_type = other DNA
atcagcagcagaatcgccagcggttgattgattgtttcccacaggcgcagtgggcaaaagaggttgatgtcagtg

SEQ ID NO: 615412 - DNA, 75 bp, synthetic construct
  source 1..75: mol_type = other DNA
ggtgatggaacagacattatcactcccctgctccacgccgtggtttaatcgtacgggcagcagcaaacgggaagt

SEQ ID NO: 615413 - DNA, 75 bp, synthetic construct
  source 1..75: mol_type = other DNA
cggttgaacaaattacgggcgttgcgacaaattgcagcggtattacttatccgcaaggtggctggctgtgtccgg

SEQ ID NO: 615414 - DNA, 75 bp, synthetic construct
  source 1..75: mol_type = other DNA
atgatagttaaatttcatgccaggggaaaaggtggtggcagtggtccggttgattacctgctgggaagggagcgt

SEQ ID NO: 615415 - DNA, 75 bp, synthetic construct
  source 1..75: mol_type = other DNA
aacgtgactgttggtgccggtatggtgcatgagccgaaaaacgaggccgccgttgcgccgtcggaatttagcgcg

SEQ ID NO: 615416 - DNA, 75 bp, synthetic construct
  source 1..75: mol_type = other DNA
tatttctccaccgagaagcgtaaatttattatcgccgacaccccagggcacgagcagtacacccgcaatatggcg

SEQ ID NO: 615417 - DNA, 75 bp, synthetic construct
  source 1..75: mol_type = other DNA
tgaccagccaatgcgcttcccggtgcagtacgttaaccgcccgaatcttgattttcgaggctacgcaggaacgct

SEQ ID NO: 615418 - DNA, 75 bp, synthetic construct
  source 1..75: mol_type = other DNA
ttttctttcagtatcacgtacaggaaaggggttttcagtcctgggtattttgctattactgattatcgcatggag

SEQ ID NO: 615419 - DNA, 75 bp, synthetic construct
  source 1..75: mol_type = other DNA
atcagaagattaatttattttatttcagcggctattcagattgttctttattttctttcagtatcacgtacagga

SEQ ID NO: 615420 - DNA, 75 bp, synthetic construct
  source 1..75: mol_type = other DNA
accgccggaaaccggatctgcgcggcgggaaacgggcaagtgatatggtaattgagcaatacacacaaaatcata

SEQ ID NO: 615421 - DNA, 75 bp, synthetic construct
  source 1..75: mol_type = other DNA
cgggcatgatgttactggggatggtcattttcctgtttaccgtgagtggcgggacgctctggtatcttggcggga

SEQ ID NO: 615422 - DNA, 75 bp, synthetic construct
  source 1..75: mol_type = other DNA
aggggaaagagtgggtacatctgaaggagtgacacagaatgacagagctggaaacacatttgctgaacgccttag

SEQ ID NO: 615423 - DNA, 75 bp, synthetic construct
  source 1..75: mol_type = other DNA
tctctgataacctgccggaaacgaaacaggcgcttgctgagagcgttacacgggggatagacgctctttatcatg

SEQ ID NO: 615424 - DNA, 75 bp, synthetic construct
  source 1..75: mol_type = other DNA
aagccggtttaaaccaggattctttaaagaatgccctgtaccgcaaatgcccaaaatatgagcgcattattgctg

SEQ ID NO: 615425 - DNA, 75 bp, synthetic construct
  source 1..75: mol_type = other DNA
ttcgaactggaattgaatgctctggttcgccgccactttccgcactggggcgcgcgcgatttgctgggagataaa

SEQ ID NO: 615426 - DNA, 75 bp, synthetic construct
  source 1..75: mol_type = other DNA
aagatggacctggtcggctacgaccaggcgcgcttcgaggcgatcgtcaccgactaccgggcgttcgccgagcgc

SEQ ID NO: 615427 - DNA, 75 bp, synthetic construct
  source 1..75: mol_type = other DNA
tgaaccagcaaacaggaaaacctgctgccgatgtgacagtcactcttgaaaagaaaacggataatgattggttac

SEQ ID NO: 615428 - DNA, 75 bp, synthetic construct
  source 1..75: mol_type = other DNA
aaccacctatggcaacgtgttccatcagaacgaagtggagcagtccacttacaacttcgaatacgcggatgtgga

SEQ ID NO: 615429 - DNA, 75 bp, synthetic construct
  source 1..75: mol_type = other DNA
cagagattaagcaaatcatcgcgagctttaacgacgatgacaatgcggcgattgataagcaagttgagatgctgt

SEQ ID NO: 615430 - DNA, 75 bp, synthetic construct
  source 1..75: mol_type = other DNA
gtgaaatatcgcaaataatcgcaagttttactgatgaagattacgaacgaatcaacagtgaagttgatcgtctct

SEQ ID NO: 615431 - DNA, 75 bp, synthetic construct
  source 1..75: mol_type = other DNA
attgcccgctcacaccacggctccgtctctaaagaacaacgagcaatcaccgaacaggcgctgaaatcgggtgaa

SEQ ID NO: 615432 - DNA, 75 bp, synthetic construct
  source 1..75: mol_type = other DNA
ctggaaaacctgacaccgcccataatccactcgacgtccttgcgcagcaaaccgttgccgccgcggcgatggagg

SEQ ID NO: 615433 - DNA, 75 bp, synthetic construct
  source 1..75: mol_type = other DNA
tggcgctggaaaatccgctgccgctgccagcctacgagcgtattctgaaagccgctcacagcttcaacctgctgg

SEQ ID NO: 615434 - DNA, 75 bp, synthetic construct
  source 1..75: mol_type = other DNA
ttgctgtcacggaaataccctgacctggtgatgccggatgcgctggcagcagaaggaagcagtaaacgggaatgg

SEQ ID NO: 615435 - DNA, 75 bp, synthetic construct
  source 1..75: mol_type = other DNA
gccgtggctggaatgtcaacgtatcccgggtgatggataatgccacccatgtggcggtgtactctggctcttacc

SEQ ID NO: 615436 - DNA, 75 bp, synthetic construct
  source 1..75: mol_type = other DNA
tgtcatttattgacgcgttgggtcagtcgtctaatttcgatgtttacgtcaacaataacaaagttggctccttca

SEQ ID NO: 615437 - DNA, 75 bp, synthetic construct
  source 1..75: mol_type = other DNA
tgcaatgaagaaggcgttataaccaaggcgtataatatctacagaagctttatctatgatattcactttgacaat

SEQ ID NO: 615438 - DNA, 75 bp, synthetic construct
  source 1..75: mol_type = other DNA
gtcggttaaccgagctttccggcggtcagcgccagcgcgcatttctggcaatggtcctggcccagaatacgcccg

SEQ ID NO: 615439 - DNA, 75 bp, synthetic construct
  source 1..75: mol_type = other DNA
atgcaagcgcgagtgaagtgggtcgaagggttaacttttctgggcgaatccgcctctggtcatcagattttaatg

SEQ ID NO: 615440 - DNA, 75 bp, synthetic construct
  source 1..75: mol_type = other DNA
tcgtgaggaacgcagggagaacagccgctatgcctcgctgcgccagtgcagaatggaagtagctgaagtagaagc

SEQ ID NO: 615441 - DNA, 75 bp, synthetic construct
  source 1..75: mol_type = other DNA
tatcctcaccgcgcacgaagtgacaggtctgattcgtgaaggcgcgacggtgtgtggcgttcgtgtacgtaacca

SEQ ID NO: 615442 - DNA, 75 bp, synthetic construct
  source 1..75: mol_type = other DNA
gctatgcggtaaccgatgcggaatcggcccgcgaatgtattagtgaaaaccagattttaaaacgcattgcacgtc

SEQ ID NO: 615443 - DNA, 75 bp, synthetic construct
  source 1..75: mol_type = other DNA
cggcagaagaagtggatattctgctgcgtgaaggggagaaactggctccggtgatggcgaaaacgcgtattctgc

SEQ ID NO: 615444 - DNA, 75 bp, synthetic construct
  source 1..75: mol_type = other DNA
tgtctccactggtccagcgagctgctgacatctgtcgtattgttggcaatcaggcggtacatccgggtgaaatta

SEQ ID NO: 615445 - DNA, 75 bp, synthetic construct
  source 1..75: mol_type = other DNA
ttttggtctcactctctggctgataccgaaagagtttactgtcgcattcaatgcttatactgaaataccttggct

SEQ ID NO: 615446 - DNA, 75 bp, synthetic construct
  source 1..75: mol_type = other DNA
aaactttttgctaacgagccactcgaaagacttatgtatacgattatcatttttggtctcactctctggctgata

SEQ ID NO: 615447 - DNA, 75 bp, synthetic construct
  source 1..75: mol_type = other DNA
tctgtatctggcgatgcagtttggtatccgcgcggcaaactaccccttcattgctgatgacatggataatctggt

SEQ ID NO: 615448 - DNA, 75 bp, synthetic construct
  source 1..75: mol_type = other DNA
cctgcctgcgtcgctcaaaccacttcagcataagttgttcggcctgactattgacccggagcggctggcagccat

SEQ ID NO: 615449 - DNA, 75 bp, synthetic construct
  source 1..75: mol_type = other DNA
ctcgctgtggtaaaacccccaccagtctgtatctggcaatgcaatttggtatccgcgcggcaaactaccccttta

SEQ ID NO: 615450 - DNA, 75 bp, synthetic construct
  source 1..75: mol_type = other DNA
gctatgcggtaaccgatgcggaatcggcccgcgaatgtattagtgaaaaccagatcctgaaacgcattgcacgtc

SEQ ID NO: 615451 - DNA, 75 bp, synthetic construct
  source 1..75: mol_type = other DNA
cgctgaagttaccttgcgtaaagtcatctccctgcctgccccgctgcgcggttctgcggtttatcgtcatggcga

SEQ ID NO: 615452 - DNA, 75 bp, synthetic construct
  source 1..75: mol_type = other DNA
aagagatcgaggcgatgttccagagtatgcctgatggaccacggcagggcatcgaaaagcgcgacaaaaagacag

SEQ ID NO: 615453 - DNA, 75 bp, synthetic construct
  source 1..75: mol_type = other DNA
gtggacccgcatgcgcacggccatcaaaacgggggacgctgacaccatgaacgaactggtggagtcggctcccgc

SEQ ID NO: 615454 - DNA, 75 bp, synthetic construct
  source 1..75: mol_type = other DNA
catgttgatcgccagcggcaacgttgtgcacaatctgcgcacagtcaaatggcatggcgatagttcgccatatcc

SEQ ID NO: 615455 - DNA, 75 bp, synthetic construct
  source 1..75: mol_type = other DNA
aggtgcgtgggatgggcaggagccaattaccattccggtcgatggtatagaaatgggcagtttaagtatgctgtc

SEQ ID NO: 615456 - DNA, 75 bp, synthetic construct
  source 1..75: mol_type = other DNA
atgacacctttagttaaggatatcatcatgtcttcaacacgtatgccagcattgtttttaggtcacggtagtccg

SEQ ID NO: 615457 - DNA, 75 bp, synthetic construct
  source 1..75: mol_type = other DNA
gagcttgccaaatctgacaaggtggtgacgttccgtatcacgccggatatcgatgaacgggcattcattaagcgc

SEQ ID NO: 615458 - DNA, 75 bp, synthetic construct
  source 1..75: mol_type = other DNA
ttttactggttccggggctggttatagcgaagggcgtcagtctggagcttaacgccgttccgctgccgcaggcgc

SEQ ID NO: 615459 - DNA, 75 bp, synthetic construct
  source 1..75: mol_type = other DNA
agctttccagctttgcgaagacggatacgggcgtgaataacagcccgacgctgattaagcgcgaggttaatacgg

SEQ ID NO: 615460 - DNA, 75 bp, synthetic construct
  source 1..75: mol_type = other DNA
ccgcagtaagcgttttgagaagatcatggatgactcacttgattttttgctttacagccaagacgtcatgcctaa

SEQ ID NO: 615461 - DNA, 75 bp, synthetic construct
  source 1..75: mol_type = other DNA
cgaaaccggagcatggaaagacgctgttgactgggtgctcaaagaggcctgccaggttgtaaacgctggcatcaa

SEQ ID NO: 615462 - DNA, 75 bp, synthetic construct
  source 1..75: mol_type = other DNA
attgattttaatggtaaactggttgcgctgtttggttgtggcgaccaggaagattacgcagaatacttctgcgat

SEQ ID NO: 615463 - DNA, 75 bp, synthetic construct
  source 1..75: mol_type = other DNA
cggccgttggcgcagtcactggcgtcctgaccggcaatggtctggaaggcgcgattaaaggtgctgtgattggtg

SEQ ID NO: 615464 - DNA, 75 bp, synthetic construct
  source 1..75: mol_type = other DNA
atggtcaggcaaaagtgtagcggtattaggcgcagctatttaggcgcaggcgttggtttacttactggcaatggt

SEQ ID NO: 615465 - DNA, 75 bp, synthetic construct
  source 1..75: mol_type = other DNA
tgcatcaacgcgacgaaaagcatcaaattaaccagtttttagcggactggttgcgatactgtttagcacatggag

SEQ ID NO: 615466 - DNA, 75 bp, synthetic construct
  source 1..75: mol_type = other DNA
ttatccgggtgaatacaggctctcttgatgcgctgtatgagcttttcaggacggacagtcgttttcatgtcgtca

SEQ ID NO: 615467 - DNA, 75 bp, synthetic construct
  source 1..75: mol_type = other DNA
ccgatcccgcctaagtatgccgcacttatcgagaaccttcgtgaagggcttaagaacggtaagcaaattatcttt

SEQ ID NO: 615468 - DNA, 75 bp, synthetic construct
  source 1..75: mol_type = other DNA
aaccgcgcggacagaacgctaacgagtacctggacaaaatcgcccagcttgagacgagttttaacgactggttaa

SEQ ID NO: 615469 - DNA, 75 bp, synthetic construct
  source 1..75: mol_type = other DNA
taaggacggggtatttactggctaccagctacgaaccgtaaacggcaaaaacgggaacgagttcaagaaagcgaa

SEQ ID NO: 615470 - DNA, 75 bp, synthetic construct
  source 1..75: mol_type = other DNA
gagaagcaggggctggtgggcttccagaaccttgatggcctgcgtggtattttccatcgttggaccactctgaag

SEQ ID NO: 615471 - DNA, 75 bp, synthetic construct
  source 1..75: mol_type = other DNA
gttgccgatgtggactttgaccgtccggcctggatggtatcgacgcgctattcaattgatgaagtgcgtaaaatc

SEQ ID NO: 615472 - DNA, 75 bp, synthetic construct
  source 1..75: mol_type = other DNA
atgcgctcaaatcggcaacgtggcaagactatgtatcgctgaaaaacggcggagccaccgaatcagagatcgcag

SEQ ID NO: 615473 - DNA, 75 bp, synthetic construct
  source 1..75: mol_type = other DNA
aaagaaagttttcttacttgtttgtcttacgcaatggtgaacttgttcaccatgaggtcaacaaatcagagcttc

SEQ ID NO: 615474 - DNA, 75 bp, synthetic construct
  source 1..75: mol_type = other DNA
aaagaaagttttcttatctgtttgtcttatgcaatggtgaacttgtttaccatgaggtcaacaaatcagaacttc

SEQ ID NO: 615475 - DNA, 75 bp, synthetic construct
  source 1..75: mol_type = other DNA
acagctgaatcgtcttcctgactgcgactgggtacacctggtcttcaccctgccggacacgctgtgccggtgttc

SEQ ID NO: 615476 - DNA, 75 bp, synthetic construct
  source 1..75: mol_type = other DNA
gactatgtgaatgagttgccggatgcgctcaaatcggcaacgtggcaggactatgtatcgctgaaaaacggcggg

SEQ ID NO: 615477 - DNA, 75 bp, synthetic construct
  source 1..75: mol_type = other DNA
atctgtttgctgactacggtattgatggcgggcacgtactggaaccatcagcgggcacaggtattttccaggaga

SEQ ID NO: 615478 - DNA, 75 bp, synthetic construct
  source 1..75: mol_type = other DNA
agaaatgtcggttgatattccaccatttcctgaatggaacagtggtcattatatagaaattccaggcgagggcat

SEQ ID NO: 615479 - DNA, 75 bp, synthetic construct
  source 1..75: mol_type = other DNA
gcattgggcaccatccgcgacatcattgaaccgcgcggtgcaaccatcgttggtcactggccaaccgcgggctac

SEQ ID NO: 615480 - DNA, 75 bp, synthetic construct
  source 1..75: mol_type = other DNA
ggcggtttaccgcgctggaataccgacggcagcagcaacaattatgatcgtgcacgcagtaccgcacctgactgg

SEQ ID NO: 615481 - DNA, 75 bp, synthetic construct
  source 1..75: mol_type = other DNA
gtgaaaagaccttcttctccggcattgtcgatgctgatttaggcgatcttacgacgctttcagccggttacgaat

SEQ ID NO: 615482 - DNA, 75 bp, synthetic construct
  source 1..75: mol_type = other DNA
tctgatcctcggcgcacgttataccaactggcgggttgatacgctgacttacagcatggagaaaaaccacaccac

SEQ ID NO: 615483 - DNA, 75 bp, synthetic construct
  source 1..75: mol_type = other DNA
tcagcaacttcaaacgctgggcgaagtgatggaaaataccctcgggattagcaaaagccaggctgactctgaccg

SEQ ID NO: 615484 - DNA, 75 bp, synthetic construct
  source 1..75: mol_type = other DNA
atgctttcgacacaatttaacagggataatcagcatcaagccgcaaccgcagccgcgccgtcgctgctcgcagcc

SEQ ID NO: 615485 - DNA, 75 bp, synthetic construct
  source 1..75: mol_type = other DNA
ttcgacaaaacctacgataccaacgtggaaggttctatcgtctacggcgcaccgcgtaatttcagcattaccggc

SEQ ID NO: 615486 - DNA, 75 bp, synthetic construct
  source 1..75: mol_type = other DNA
gtgaaagcgaatctgacgtggcaagggccagtggaacagcatcctctggtgaattatctcgaccatgaaggtggc

SEQ ID NO: 615487 - DNA, 75 bp, synthetic construct
  source 1..75: mol_type = other DNA
cgaaccgattctgtttggtctgccaattatcatgaacccggtgatgtttatcccgtttgtactggtacaaccgat

SEQ ID NO: 615488 - DNA, 75 bp, synthetic construct
  source 1..75: mol_type = other DNA
gggattattgcctgggcgttgaatacctggggcaccaacttccatcagatcattatggataccatctcaacccca

SEQ ID NO: 615489 - DNA, 75 bp, synthetic construct
  source 1..75: mol_type = other DNA
ggctaccagaataacgactcatggctggaccgctacaacagtgaaaagaccttcttctccggcattgtcgatgct

SEQ ID NO: 615490 - DNA, 75 bp, synthetic construct
  source 1..75: mol_type = other DNA
ttatgcacatcttcatcctcagcgcttacagaacaccagtcagttactggcggaacgtatccgcgctcagttacc

SEQ ID NO: 615491 - DNA, 75 bp, synthetic construct
  source 1..75: mol_type = other DNA
cgtcgctcgatagcggaaacggcgatgtaccgggtaaaacagctgttcgggggggggcactgacgctgcgtgact

SEQ ID NO: 615492 - DNA, 75 bp, synthetic construct
  source 1..75: mol_type = other DNA
ctcggcggtagctacagtaaacaaaacaaccgctatttcagctcctgggccaacgttttccccaatgaaattggc

SEQ ID NO: 615493 - DNA, 75 bp, synthetic construct
  source 1..75: mol_type = other DNA
gatgagcatcgcaaaagaggatgctgaggggatatgtctttctgatgaatggctaactgaaaacggcattataat

SEQ ID NO: 615494 - DNA, 75 bp, synthetic construct
  source 1..75: mol_type = other DNA
ggcaagtacgttctcaatcatccatttatgttacctggattggtgggaattattgctggtgtgatattaggattt

SEQ ID NO: 615495 - DNA, 75 bp, synthetic construct
  source 1..75: mol_type = other DNA
aggttaacggcgtcagttttattgaggtgatgtcggtatgtcttcctacctcttttgccgccgcgatggtcgccg

SEQ ID NO: 615496 - DNA, 75 bp, synthetic construct
  source 1..75: mol_type = other DNA
tgatttcttcccgactctcgaagagattgattttaatggtaaactggttgcgctgtttggctgtggcgaccagga

SEQ ID NO: 615497 - DNA, 75 bp, synthetic construct
  source 1..75: mol_type = other DNA
gaactgaccgctgaacgtgtagaaaaatgggttaaacagatttctgaagagttgcatctcgacgaaattctcaat

SEQ ID NO: 615498 - DNA, 75 bp, synthetic construct
  source 1..75: mol_type = other DNA
caataaggaattctataaagcgtttcttaatccagcacgcaactgctactttattgataaagataaaaacagtca

SEQ ID NO: 615499 - DNA, 75 bp, synthetic construct
  source 1..75: mol_type = other DNA
atttatattccagctattgccgatatggcgcgtgaactgaatgtccgtgagggtgcagttcaaagtgtgatgggt

SEQ ID NO: 615500 - DNA, 75 bp, synthetic construct
  source 1..75: mol_type = other DNA
gtacatcaggacagagtgagccagcagcccgtgcgtcttcgggttagtggtggtattcccaggtcatcaaatgcc

SEQ ID NO: 615501 - DNA, 75 bp, synthetic construct
  source 1..75: mol_type = other DNA
aatttcatcctgcgccgtaaaaggggggaaactatttcctgaaaattcaatattaatatcaacgtcggcggtaat

SEQ ID NO: 615502 - DNA, 75 bp, synthetic construct
  source 1..75: mol_type = other DNA
cagttgtcgcctcacaggttgcaatttctggctcaccaatcagtgccgcaatggcagctatgctcactattatgg

SEQ ID NO: 615503 - DNA, 75 bp, synthetic construct
  source 1..75: mol_type = other DNA
cttggctgtaaatatctgcgaatttgccacctgaacaactgcgccacgggtgtagcaactcaggatgacaaactg

SEQ ID NO: 615504 - DNA, 75 bp, synthetic construct
  source 1..75: mol_type = other DNA
tggcggtctggcaggaattgccgctttcgaagcctgttctggtgtgttgatgggcgcagtattagggctgagcag

SEQ ID NO: 615505 - DNA, 75 bp, synthetic construct
  source 1..75: mol_type = other DNA
acaccaaactcacttgtgaagaacaaaaggataatgaactggtttctcgagtaatcgaaaatccagaggtcttaa

SEQ ID NO: 615506 - DNA, 75 bp, synthetic construct
  source 1..75: mol_type = other DNA
gccacatccgcgcattacgcatttcgatgataaagtgatggggctgattcacaccattaaaggcttcgagattgc

SEQ ID NO: 615507 - DNA, 75 bp, synthetic construct
  source 1..75: mol_type = other DNA
tgcgtgggtgatcaacttcactaacccggcgggaatggtcactgaagcggtttatcgtcatagcggatttaaacg

SEQ ID NO: 615508 - DNA, 75 bp, synthetic construct
  source 1..75: mol_type = other DNA
gtccggcatcctgaaagacgccacttccgttcgcctcttcctgaaagccacagataccgaggaatatcacaatga

SEQ ID NO: 615509 - DNA, 75 bp, synthetic construct
  source 1..75: mol_type = other DNA
ggtcgccagcccgctgaaaaaacagcgttttcgcttaagcgacggcttgtgcatggaagacgaacagttttccgt

SEQ ID NO: 615510 - DNA, 75 bp, synthetic construct
  source 1..75: mol_type = other DNA
tgcttaaaaagtatgatcaactggtgcctgggcttgcaaatcgacttgttgagttgaccgaaaaagagcaggctc

SEQ ID NO: 615511 - DNA, 75 bp, synthetic construct
  source 1..75: mol_type = other DNA
tagacgtcatttctgctgccgcactgagtgaacaacagctcgcgaaaatttctgctgcgatggaaaaacgtctgt

SEQ ID NO: 615512 - DNA, 75 bp, synthetic construct
  source 1..75: mol_type = other DNA
tgacctgcgtattgattaattgggaacctttgggagcaaatgttgatgctgaggatgcagaggttctggctgaat

SEQ ID NO: 615513 - DNA, 75 bp, synthetic construct
  source 1..75: mol_type = other DNA
gcaattgtgccattcctggggttcctgacctgcgtattgattaattgggaacctttgggagcaaatgttgatgct

SEQ ID NO: 615514 - DNA, 75 bp, synthetic construct
  source 1..75: mol_type = other DNA
agatagtgcagaaagtcgagaaacaactctttgagctgtataaaaacccggagctgaaagttaaaccgaaagagc

SEQ ID NO: 615515 - DNA, 75 bp, synthetic construct
  source 1..75: mol_type = other DNA
gcgatgatttatctatcgatctgttcggcctcaaccatatggtgttcattaaggatgtgctggtaaatggcaaat

SEQ ID NO: 615516 - DNA, 75 bp, synthetic construct
  source 1..75: mol_type = other DNA
acttgaaaaagcgcaaatacctggggcgctggaaggcgcacaacgactggcgcagggcggcgcagtgacgcgcgg

SEQ ID NO: 615517 - DNA, 75 bp, synthetic construct
  source 1..75: mol_type = other DNA
agatactggtgaaaccaccgaaaccactgaaaccactgaaaccactgaaacccggcatcccgccgacaggaaaaa

SEQ ID NO: 615518 - DNA, 75 bp, synthetic construct
  source 1..75: mol_type = other DNA
gaaagaatataaatcaacgggacttgatgtactgaatattgcctccgattatgctgatttcgtgacagaggttat

SEQ ID NO: 615519 - DNA, 75 bp, synthetic construct
  source 1..75: mol_type = other DNA
cgatgccagcgatctgctgatgattgcagcgcgtaaacaggatccagatacactcttcttccagcgccggctggt

SEQ ID NO: 615520 - DNA, 75 bp, synthetic construct
  source 1..75: mol_type = other DNA
agtgatgccaacagcctcaacaacaaagaaatcacgaccattattcgtcgtaacgggttccgcttctggggcaac

SEQ ID NO: 615521 - DNA, 75 bp, synthetic construct
  source 1..75: mol_type = other DNA
cgcttctacgaccaatcgtggtcgtcttattttcggcgcgcttgcgggcttattagtctggttgatccgcagttt

SEQ ID NO: 615522 - DNA, 75 bp, synthetic construct
  source 1..75: mol_type = other DNA
tgctatggcagaaagcgattcgctggcatattcccctcagcttcttagtaacgctggcgttatgcgcaacgttgg

SEQ ID NO: 615523 - DNA, 75 bp, synthetic construct
  source 1..75: mol_type = other DNA
cagcagctgccgagctcactacgctgatgcacgcgctgattgatatttctgttattgctgacagggcgcataagc

SEQ ID NO: 615524 - DNA, 75 bp, synthetic construct
  source 1..75: mol_type = other DNA
gtccactgacgcctgcgaacgtgaaagatgttatcagtgccatcagggcaaaactggattcactggttactgccg

SEQ ID NO: 615525 - DNA, 75 bp, synthetic construct
  source 1..75: mol_type = other DNA
agacccaccatttacccacctgagacgctcgacagcttcataaaactatacaggcaaggaaaacccattaagtac

SEQ ID NO: 615526 - DNA, 75 bp, synthetic construct
  source 1..75: mol_type = other DNA
ttttaaaaaagaaccacgtgagcatgaaattacacagatggtttgctgtgctgacacgctattaccgttaaccat

SEQ ID NO: 615527 - DNA, 75 bp, synthetic construct
  source 1..75: mol_type = other DNA
ctgacccgcgtcagtgatgtgctgggtaaggccggcacaaaggggacgctttacaaatcgcttaaggctgtcgcc

SEQ ID NO: 615528 - DNA, 75 bp, synthetic construct
  source 1..75: mol_type = other DNA
acacgctgaacaatagcgaggtgaccactcttattcaccagggcgacggctccttccgtttctggggtaaccgta

SEQ ID NO: 615529 - DNA, 75 bp, synthetic construct
  source 1..75: mol_type = other DNA
gtccactgacacctgcgaacgtgaaggatgttatcagtgccatcagggcaaaactggattcactggttactgccg

SEQ ID NO: 615530 - DNA, 75 bp, synthetic construct
  source 1..75: mol_type = other DNA
agtctgtgatgtctggggtcagtgccgctacgactacttcaggtattaatcaacctggagggtcttccgcgctgg

SEQ ID NO: 615531 - DNA, 75 bp, synthetic construct
  source 1..75: mol_type = other DNA
tctgacgaagtacggcaagccatgttgaaagcagtggcgctggcgtttaagaaaatgcatagcattaatcgtcag

SEQ ID NO: 615532 - DNA, 75 bp, synthetic construct
  source 1..75: mol_type = other DNA
gacagcaaaatagccaatcttaccgccgaacgcgatgctcttcgtgaaggtgagatgggcgacgctaggcatagc

SEQ ID NO: 615533 - DNA, 75 bp, synthetic construct
  source 1..75: mol_type = other DNA
tgagtaatcattttgccagcccctatgaaacgctggaagccatgcgcaatgtggtcgagatgaagcaacgtcgct

SEQ ID NO: 615534 - DNA, 75 bp, synthetic construct
  source 1..75: mol_type = other DNA
agagcgcattagatgaaactgatgatgacggtgtcgaacaacagtcaatcgccagtactacgccacaatcagaac

SEQ ID NO: 615535 - DNA, 75 bp, synthetic construct
  source 1..75: mol_type = other DNA
tgaatgctgcgcccgggacggatagcgatctcgctcaatcaatcgcgagcgctatcgtttcacagtcacaagaac

SEQ ID NO: 615536 - DNA, 75 bp, synthetic construct
  source 1..75: mol_type = other DNA
cgtaaagctgcgtaacacactggatatttatcactacgtgaacgggcgtcgtgttcgcgagattgttgccgaagg

SEQ ID NO: 615537 - DNA, 75 bp, synthetic construct
  source 1..75: mol_type = other DNA
attaccgtgcagtcattgatgatcgcgaaacaacagcgattgtccgggtggaaaaaattgacggtgaaaaagcac

SEQ ID NO: 615538 - DNA, 75 bp, synthetic construct
  source 1..75: mol_type = other DNA
ctgaagtaggtattaacctgcacatcgggacaaccgatatccaccacctgacactaccctggacaccagccagta

SEQ ID NO: 615539 - DNA, 75 bp, synthetic construct
  source 1..75: mol_type = other DNA
tgaggccgaggaagacggcgctggcgggctggtcagtacgcgtaccagcaaggtagtgaagaccgcttttagtga

SEQ ID NO: 615540 - DNA, 75 bp, synthetic construct
  source 1..75: mol_type = other DNA
agagcagcagcaagagcgcttaacaacatggacaagcgcgctggcagaacggttaaaccaacgctttcaggctta

SEQ ID NO: 615541 - DNA, 75 bp, synthetic construct
  source 1..75: mol_type = other DNA
gaaagaagacagtatggcctatcagcgcgatcatattctgctggaatttggcggacgaaatcgtggcaagccaac

SEQ ID NO: 615542 - DNA, 75 bp, synthetic construct
  source 1..75: mol_type = other DNA
ggggctggaacccggtatcttctgcgccatccacacgtatggccgtcgtctcaactggcatccgcatcaagctta

SEQ ID NO: 615543 - DNA, 75 bp, synthetic construct
  source 1..75: mol_type = other DNA
gcgagattgttgccgctggtcgtgaaatcgttgtcgattcaccggaggtcgcagaccttattgcagccgatcacg

SEQ ID NO: 615544 - DNA, 75 bp, synthetic construct
  source 1..75: mol_type = other DNA
tgtctacaacctcaggggctaatagcactacgtttatttcagatatcaatcaatctgagcggacttcaacgctgg

SEQ ID NO: 615545 - DNA, 75 bp, synthetic construct
  source 1..75: mol_type = other DNA
tgactggattaagaaaggctccataagtaaagataaacttccagaattatggcgtttctttgctgatgttgttgg

SEQ ID NO: 615546 - DNA, 75 bp, synthetic construct
  source 1..75: mol_type = other DNA
aaatgaaggtaagtaactatctgaaaaatcaagaatcagaacggaaaagccagaacatcaccaaaacgggaactt

SEQ ID NO: 615547 - DNA, 75 bp, synthetic construct
  source 1..75: mol_type = other DNA
aattgaacattgcaggctaagaaacaacgctggtgcaggtccagcaacagtcagccacgatgttagttatcttgg

SEQ ID NO: 615548 - DNA, 75 bp, synthetic construct
  source 1..75: mol_type = other DNA
tgtctgtaacgtctggggttaataccgcctcgggtacttctggtattactcaatctgaaacgggtttatcgctgg

SEQ ID NO: 615549 - DNA, 75 bp, synthetic construct
  source 1..75: mol_type = other DNA
ctacacggatgggcaaaataaggcgctggataataaaacgctggagtttaaaaagcagctcgaagaacaacagaa

SEQ ID NO: 615550 - DNA, 75 bp, synthetic construct
  source 1..75: mol_type = other DNA
accgtctggaaagattttcagcgcgtgcggatacagggcgctcatggtggcggcgtcttttacagagaggtaccc

SEQ ID NO: 615551 - DNA, 75 bp, synthetic construct
  source 1..75: mol_type = other DNA
acatgaacaactggctgcatgggatgctgcagagtttgcggcaatgtcggattttattacggaacactactggac

SEQ ID NO: 615552 - DNA, 75 bp, synthetic construct
  source 1..75: mol_type = other DNA
cagtcacaaaagcatttggaccatcacataaagctttccttgtcgttcctatggttatcttaattaaaatattta

SEQ ID NO: 615553 - DNA, 75 bp, synthetic construct
  source 1..75: mol_type = other DNA
atggctgatcaaaataatccgtgggataccacgccagcggcggacagtgccgcacaatccgcagacgcctggggt

SEQ ID NO: 615554 - DNA, 75 bp, synthetic construct
  source 1..75: mol_type = other DNA
tttcagaacagaggcgcagttgacagtggatgatgtgcatgccggcggacatgacgggccactggtgtataaggc

SEQ ID NO: 615555 - DNA, 75 bp, synthetic construct
  source 1..75: mol_type = other DNA
tttcagcacagaggcgcagctgacagtggatgatgtgcgtgcaggcggacatgacaggacaccagtgtataaggc

SEQ ID NO: 615556 - DNA, 75 bp, synthetic construct
  source 1..75: mol_type = other DNA
taacaaaagtgcgctgctgggctggaccagcttcctcggcacaccggaagaacgaccttcagtcaccatcagggt

SEQ ID NO: 615557 - DNA, 75 bp, synthetic construct
  source 1..75: mol_type = other DNA
ggcgaaaagcgggcggggagatcggtgttgggcagttttgtcctggggactcgagtgctcgatctcagcggaaaa

SEQ ID NO: 615558 - DNA, 75 bp, synthetic construct
  source 1..75: mol_type = other DNA
ttatctgtggcctggtgtcccactgctttgatttgtcagaagtgacgctgcaaaactggcaacgtcgcaaggtgg

SEQ ID NO: 615559 - DNA, 75 bp, synthetic construct
  source 1..75: mol_type = other DNA
aatattttctttaccgctattgtcctgtttacccttggttcactgttttgcgcgctttccggcacccttaatgaa

SEQ ID NO: 615560 - DNA, 75 bp, synthetic construct
  source 1..75: mol_type = other DNA
ggctggtactacattttgccgttcgtcctgtttttacaagggatggtcaactcgacccgtttctcctccatgaac

SEQ ID NO: 615561 - DNA, 75 bp, synthetic construct
  source 1..75: mol_type = other DNA
tccggcactcgtctttgccagagttccgaatgatacgcatcaaaatgtggctatttcacggcgaaaaaggagcgc

SEQ ID NO: 615562 - DNA, 75 bp, synthetic construct
  source 1..75: mol_type = other DNA
acgtaaaactatgggcgagtcccttataccctgcttgagccggacgcaattagcggatatgggtgtgcgcgtaga

SEQ ID NO: 615563 - DNA, 75 bp, synthetic construct
  source 1..75: mol_type = other DNA
gtatttagatgaatgcatcgaaaattatttaaacggattggatcgtttatgtttttgcattattaaagaatactt

SEQ ID NO: 615564 - DNA, 75 bp, synthetic construct
  source 1..75: mol_type = other DNA
tgccttagtcttaggtgaacagtcatcccgtctggcatggttagcaacggttatccctcagttttccaaatcggg

SEQ ID NO: 615565 - DNA, 75 bp, synthetic construct
  source 1..75: mol_type = other DNA
ttccagctcagtattaccagcctgacccgaaagcagttcctctcttttctgccatctggcgaaaacttcctgccg

SEQ ID NO: 615566 - DNA, 75 bp, synthetic construct
  source 1..75: mol_type = other DNA
gacccagtttgtctggcatatctggcgtaagtaccgctatcacatcagttttcgtaacggcggtgtggatgcgtt

SEQ ID NO: 615567 - DNA, 75 bp, synthetic construct
  source 1..75: mol_type = other DNA
ccgtgctggtaattacgatagcgccaacccacgctttggtcagtttaatgcgatgtatggtttaccgtttggtat

SEQ ID NO: 615568 - DNA, 75 bp, synthetic construct
  source 1..75: mol_type = other DNA
tattaacgctggcgctggatggcagtaaaggtacgggcttatcgccgctggcgattgctggcctggttgctgttg

SEQ ID NO: 615569 - DNA, 75 bp, synthetic construct
  source 1..75: mol_type = other DNA
ctccgatgaagagatgctgcccgacagccagcgaggctttgcacccatcgttcgtgggatcgccaaaagtaacgc

SEQ ID NO: 615570 - DNA, 75 bp, synthetic construct
  source 1..75: mol_type = other DNA
acgctgctccgttccgcgggcagcccggtgcctttcggggcaacggcaaccttaatcaccgataaacaaaatgac

SEQ ID NO: 615571 - DNA, 75 bp, synthetic construct
  source 1..75: mol_type = other DNA
aagagcttcgaaagcggcaccgatttccgccttgcgggctatcggtactctaccagcggtttctataccttccag

SEQ ID NO: 615572 - DNA, 75 bp, synthetic construct
  source 1..75: mol_type = other DNA
aaacgatctttaccccactgcaaacagcggtgatctcacggtcattattaaagaagcggatggcagtgaacaacg

SEQ ID NO: 615573 - DNA, 75 bp, synthetic construct
  source 1..75: mol_type = other DNA
tggggtaatgacgcgtcgcagcaatgcgtggcgccttataaattatccctggaattaaaacagggcggaattatt

SEQ ID NO: 615574 - DNA, 75 bp, synthetic construct
  source 1..75: mol_type = other DNA
caaatcaacaggttggggtcagcggcacgctgcttgaggatcgcaacctgagctacagtgttcaggaaggttacg

SEQ ID NO: 615575 - DNA, 75 bp, synthetic construct
  source 1..75: mol_type = other DNA
tattaaccctggcgctggacggcagtaaaggtacaggtttatcgccgctgacgattgctggcctggtcgcagttg

SEQ ID NO: 615576 - DNA, 75 bp, synthetic construct
  source 1..75: mol_type = other DNA
ggtgcaggtggttaaccgctttggttatcgccgggtactggtggcaaccacgctgggtctgtcgttggtcacgct

SEQ ID NO: 615577 - DNA, 75 bp, synthetic construct
  source 1..75: mol_type = other DNA
atgacagatcttcctgacagcacccgctggcaattgtggattgtggctttcggcttctttatgcagtcgctggac

SEQ ID NO: 615578 - DNA, 75 bp, synthetic construct
  source 1..75: mol_type = other DNA
atctcaaatatagctttgccgcaggtgaatatcaggccgggaattatgacagcgcctcgccgcgtttcgggcagc

SEQ ID NO: 615579 - DNA, 75 bp, synthetic construct
  source 1..75: mol_type = other DNA
actgtttatgactaccgctctgctgggctggtactacgttttgccgttcgtcctgtttttacaagggatggtcaa

SEQ ID NO: 615580 - DNA, 75 bp, synthetic construct
  source 1..75: mol_type = other DNA
ggcggggagctttgccggacgtattggcagtggtatgttgccctttatgacgccggttttcctgcaaattggcct

SEQ ID NO: 615581 - DNA, 75 bp, synthetic construct
  source 1..75: mol_type = other DNA
aattcttccgtgaaagcgcctttcctgcggaggcgcaaattcatgaaatactcaacgtacttagcgtgaatgacg

SEQ ID NO: 615582 - DNA, 75 bp, synthetic construct
  source 1..75: mol_type = other DNA
ttttatgggattatcaggcagttcatcgccactaccgggttactacctggatgagatggcctggcagcaggcaca

SEQ ID NO: 615583 - DNA, 75 bp, synthetic construct
  source 1..75: mol_type = other DNA
ccgatttatggggttatccggcagttcatcaccattgccgggttactatctggatgagatggcctgggtgcaggc

SEQ ID NO: 615584 - DNA, 75 bp, synthetic construct
  source 1..75: mol_type = other DNA
catcgcctggacagacctacttccggcgtattgctgatgggactgtccagcgaagctggacggctgctggcacaa

SEQ ID NO: 615585 - DNA, 75 bp, synthetic construct
  source 1..75: mol_type = other DNA
tatctgtgccaacaaaagatgcctcgcgagatagttttcctggcgatcatggcatgatgttgcttattttttctg

SEQ ID NO: 615586 - DNA, 75 bp, synthetic construct
  source 1..75: mol_type = other DNA
ttatttttactggtgatcatgagctgtgttgtaggacatcagaaggggactcttttccatttcctctgccagctt

SEQ ID NO: 615587 - DNA, 75 bp, synthetic construct
  source 1..75: mol_type = other DNA
gcgccgatgcttgaagatttacgcagcgtgatgcaggaagaaacgcaaagctttcttgataagttaattcaggat

SEQ ID NO: 615588 - DNA, 75 bp, synthetic construct
  source 1..75: mol_type = other DNA
aattagaagaaacctggatgtcagtagagcgattccccgatttaacgatttcacatatgcaaaaatcaaaatttt

SEQ ID NO: 615589 - DNA, 75 bp, synthetic construct
  source 1..75: mol_type = other DNA
cgagaactggaaagagcttgcggtcgggcatcttcagaatgtgcggcgcgggactggtgaccagtctgatttgat

SEQ ID NO: 615590 - DNA, 75 bp, synthetic construct
  source 1..75: mol_type = other DNA
aaaacgggtgatgctgacaccatgaacgaactgctggactctgcgccagcggcggtaacgggtgacgaaggggat

SEQ ID NO: 615591 - DNA, 75 bp, synthetic construct
  source 1..75: mol_type = other DNA
cggtggaaatgcctgtggcgactggacgttacccgaccacgcgctatggcctggtggaactggagccgaaaactg

SEQ ID NO: 615592 - DNA, 75 bp, synthetic construct
  source 1..75: mol_type = other DNA
catcgtctggatcgcccgacttctggcgtattgctgatggggttatccagtgaggcagggcgactgttggcgcaa

SEQ ID NO: 615593 - DNA, 75 bp, synthetic construct
  source 1..75: mol_type = other DNA
ttggctggcgcggtctgcttcctgaaaatgaaagggttgagttcagcgagtcatcgggtcaggatggtgacataa

SEQ ID NO: 615594 - DNA, 75 bp, synthetic construct
  source 1..75: mol_type = other DNA
ggacagtaactctattccgctggattattcgttactttacagcaatattttcgagttccaggtaaagtacttttt

SEQ ID NO: 615595 - DNA, 75 bp, synthetic construct
  source 1..75: mol_type = other DNA
gtgaatacttactacatcacaatgccctggcccccgagcaataaccgctagtaccgccataatcgcgggcgcaca

SEQ ID NO: 615596 - DNA, 75 bp, synthetic construct
  source 1..75: mol_type = other DNA
gtgaatacttacaacatcacaattccctggcccccgagcaataaccgctagtaccgccataatcgcgggcgcacc

SEQ ID NO: 615597 - DNA, 75 bp, synthetic construct
  source 1..75: mol_type = other DNA
gtgaatacttaccacatcacactaccctggccgccgagcaataaccgctattaccgccataatcgcgggcgcacg

SEQ ID NO: 615598 - DNA, 75 bp, synthetic construct
  source 1..75: mol_type = other DNA
taaaaacgcaatgctggatatcggcctggctattcctgtgaaaatcagcattgagtgccacatgccggatcgccg

SEQ ID NO: 615599 - DNA, 75 bp, synthetic construct
  source 1..75: mol_type = other DNA
aaggctatatgacccgcgtctttgagcgtgactctttccttgcttctttaactgaagcagaacgtgaaatgcgtc

SEQ ID NO: 615600 - DNA, 75 bp, synthetic construct
  source 1..75: mol_type = other DNA
gtgaatacttaccacatcacaatcccctggcccccgagcaataaccgctagtaccgccataatcgcgggcgcact

SEQ ID NO: 615601 - DNA, 75 bp, synthetic construct
  source 1..75: mol_type = other DNA
atgcagggcgaaaagcagcagccatatttttttaaccctggtatgactgttgaacagcttgaagactggctggag

SEQ ID NO: 615602 - DNA, 75 bp, synthetic construct
  source 1..75: mol_type = other DNA
cgattcattgaggataatgcagcacaattagaagaaacgtggatgtcagtagcacgttttcctgatttaaccgtg

SEQ ID NO: 615603 - DNA, 75 bp, synthetic construct
  source 1..75: mol_type = other DNA
cgattcattgaggataatgcagcacaattagaagaaacgtggatgtcagtggcacgttttcctgatttaaccgta

SEQ ID NO: 615604 - DNA, 75 bp, synthetic construct
  source 1..75: mol_type = other DNA
ctcgtggatgaacccgttctgcgtggttgtcgcccaggggattgctggcgttccggtgctttccggctccggcct

SEQ ID NO: 615605 - DNA, 75 bp, synthetic construct
  source 1..75: mol_type = other DNA
tgaacccgttttgtgtggttgttgctcaggggatcgctggtgttccggtgctttctggctccggtttgcgcatcg

SEQ ID NO: 615606 - DNA, 75 bp, synthetic construct
  source 1..75: mol_type = other DNA
aaaacctatctgccacgtgtaacgctggaaattgaacaacgttataaccacattccagataccagttcgctgagc

SEQ ID NO: 615607 - DNA, 75 bp, synthetic construct
  source 1..75: mol_type = other DNA
gtttcagtattcataatgataattgcagtgagctggaatgggagtgtaaccggccatcctttgttgtatccggtg

SEQ ID NO: 615608 - DNA, 75 bp, synthetic construct
  source 1..75: mol_type = other DNA
ggactttggttacgatcacaaaaaaatcattgcagatgccgagaaagccttcgtaagtttgttgcagccaaacta

SEQ ID NO: 615609 - DNA, 75 bp, synthetic construct
  source 1..75: mol_type = other DNA
cgtcgcgaaaactgtttgtgagcaatgccgcttgtgtaccgatctctgcccacgtcatttaatcggtcacgaact

SEQ ID NO: 615610 - DNA, 75 bp, synthetic construct
  source 1..75: mol_type = other DNA
gaaaacaccagagttatgaaacgcattggccgttgcatggggtatttgcaggtggcggcagagattgaagcactt

SEQ ID NO: 615611 - DNA, 75 bp, synthetic construct
  source 1..75: mol_type = other DNA
gcgttggtgagttctgaagatgaaaacaaacgccgcgatgagcattatgcggcgatttacgattactgccacaaa

SEQ ID NO: 615612 - DNA, 75 bp, synthetic construct
  source 1..75: mol_type = other DNA
aaatggaaaagtaacaccgccatcgcaccagcactgtgagatgctcattgaatttgccattgattacctgaagaa

SEQ ID NO: 615613 - DNA, 75 bp, synthetic construct
  source 1..75: mol_type = other DNA
agtgccgtgtacttcatcgccagtaaaatcttccgcgatcgcggcgctggcccgacaattatcatctctcctttg

SEQ ID NO: 615614 - DNA, 75 bp, synthetic construct
  source 1..75: mol_type = other DNA
gtgagatggtggcgattgttggcgcttcgggttccggtaaatcgaccctgatgaatattctcggctgtctggata

SEQ ID NO: 615615 - DNA, 75 bp, synthetic construct
  source 1..75: mol_type = other DNA
tggagataataccgatcctgctgatacgtccaccacagctaaggagcacgcggtttttagcgttgaaacagataa

SEQ ID NO: 615616 - DNA, 75 bp, synthetic construct
  source 1..75: mol_type = other DNA
aacggctggtaaccagactgggcttaaccccgtggtatcaggatgcgccattgtctgaacaggtgcctcagcccg

SEQ ID NO: 615617 - DNA, 75 bp, synthetic construct
  source 1..75: mol_type = other DNA
tgcatggacgctgacagttctgacagcactgttacgcaggcaggttgcccgacggtttatcctcttgcccttgct

SEQ ID NO: 615618 - DNA, 75 bp, synthetic construct
  source 1..75: mol_type = other DNA
aggagaaaaaaacggggcgcttcagtgatgagctggtggaggcatgtgcggaaatggttcgccaacgctggaatc

SEQ ID NO: 615619 - DNA, 75 bp, synthetic construct
  source 1..75: mol_type = other DNA
ttcttcgtgagtttgacaacccgccctttaaaaaagtgccggcttactggtttcatccaggactgacttatctta

SEQ ID NO: 615620 - DNA, 75 bp, synthetic construct
  source 1..75: mol_type = other DNA
aagcagttgtcaatgaatccacatgggagtggctgcgtccggggagtattgatatccagccatttccccgggaga

SEQ ID NO: 615621 - DNA, 75 bp, synthetic construct
  source 1..75: mol_type = other DNA
gaatgcatccacgacgcagacggcaacgctggtcagcccgccggaaggcatcaacagcacggtgacgattaaatc

SEQ ID NO: 615622 - DNA, 75 bp, synthetic construct
  source 1..75: mol_type = other DNA
ttttttacgttgctcaagcgccacaacctgacgcgccaacaggcgttcaatctggtggcagacgatttggcctgc

SEQ ID NO: 615623 - DNA, 75 bp, synthetic construct
  source 1..75: mol_type = other DNA
aatgcaatcaaaaatggctttattcgcttaatgccgttaacccttgcgggggccatgtatgtattaattaacaac

SEQ ID NO: 615624 - DNA, 75 bp, synthetic construct
  source 1..75: mol_type = other DNA
aagccattattaacgcgtcaacgtgggaatggctgcgccccggaaatattgatattcagccttttccgcgtgagg

SEQ ID NO: 615625 - DNA, 75 bp, synthetic construct
  source 1..75: mol_type = other DNA
tatcacggattttatgaaccggctggagccggggcaggaattaattatttcacaactggaaacccagatttcatt

SEQ ID NO: 615626 - DNA, 75 bp, synthetic construct
  source 1..75: mol_type = other DNA
tatccggtgatgacgggaaaatcaccatatcagaaaatggaaaagtaacaccgccatcgcaccagcacagtgaga

SEQ ID NO: 615627 - DNA, 75 bp, synthetic construct
  source 1..75: mol_type = other DNA
gccggcttactggtttcatcccggactgacttatctgaaagggcggtttggggagaggttatctgaacttaagcg

SEQ ID NO: 615628 - DNA, 75 bp, synthetic construct
  source 1..75: mol_type = other DNA
gccgcgatgagcagtttgctgcgtttgacgattattgtcggaaagtgatgagcagaaatctcgcagagtgtttca

SEQ ID NO: 615629 - DNA, 75 bp, synthetic construct
  source 1..75: mol_type = other DNA
cacaacctgacgcgccaacaggcgttcaatctggtggcagacgatttggcctgcaaagtatccaacagtgcgttg

SEQ ID NO: 615630 - DNA, 75 bp, synthetic construct
  source 1..75: mol_type = other DNA
acactcacaggaaataacgcagcaaaaggcgttggagtactgattgaaggtttaaaaaacactaaaagtgcacaa

SEQ ID NO: 615631 - DNA, 75 bp, synthetic construct
  source 1..75: mol_type = other DNA
tgctgaactgaataaaaaactgtcggtgctgatgccttctgaagatgaaaaaaaacgccgcgatgagcagtttgc

SEQ ID NO: 615632 - DNA, 75 bp, synthetic construct
  source 1..75: mol_type = other DNA
cttttcatctccaacaatacccacgaagtgaagatttcaaaatccgcctgccagtctgtttgcttcgataaagcg

SEQ ID NO: 615633 - DNA, 75 bp, synthetic construct
  source 1..75: mol_type = other DNA
gggtgcaacactgcttggactgctgtttattatgtccagcgtcgtggtgataggcgctcagttaatgggttacca

SEQ ID NO: 615634 - DNA, 75 bp, synthetic construct
  source 1..75: mol_type = other DNA
cgatgctgagttccccaaaccagtccgactaggagcagcatctgtcggctggcgatctactgctattgacgagtg

SEQ ID NO: 615635 - DNA, 75 bp, synthetic construct
  source 1..75: mol_type = other DNA
ggctgaacttacccgactgctgggtatatcaagatctactatttacgtgaaaataaatccggcctcgaaatccca

SEQ ID NO: 615636 - DNA, 75 bp, synthetic construct
  source 1..75: mol_type = other DNA
tgagctgggggcacgagcaggcgcaacgttgccgcgtgccattccgcttgccagagaaaaaggataattcgggta

SEQ ID NO: 615637 - DNA, 75 bp, synthetic construct
  source 1..75: mol_type = other DNA
atcggcaaaagcgttaatatccgcagtcgggtgctttctcatttacgcaccccggatgaagccgccatgctacgg

SEQ ID NO: 615638 - DNA, 75 bp, synthetic construct
  source 1..75: mol_type = other DNA
cgctggttggcaatgggtaaatctcgcctggctggctggcggcgtatggttgctatggcagaaagcgattcgctg

SEQ ID NO: 615639 - DNA, 75 bp, synthetic construct
  source 1..75: mol_type = other DNA
aaggccagtgcaacctgcgtttcgacgacactaacccggtaaaagaagatatcgagtatgttgagtcgatcaaaa

SEQ ID NO: 615640 - DNA, 75 bp, synthetic construct
  source 1..75: mol_type = other DNA
aacggtattgtgcgatgatggcgagatcgaacttaacacgccgcgtgaccgtgaaaataccttcgaaccgcaact

SEQ ID NO: 615641 - DNA, 75 bp, synthetic construct
  source 1..75: mol_type = other DNA
ggaatctttatgggacgaaggtatcccggcattattgctggattacagttttagcgggagcaacagtgaatatga

SEQ ID NO: 615642 - DNA, 75 bp, synthetic construct
  source 1..75: mol_type = other DNA
cttaagcaaagatccggcagatggtcgtaaagtcaaaggcgttattcactgggtgagcgcggcacatgcgctgcc

SEQ ID NO: 615643 - DNA, 75 bp, synthetic construct
  source 1..75: mol_type = other DNA
gtggcaccctgacgcagccgggtaaaaacagcccgtaccgcgaccgtagcgttgaagagaacctggcgctgttcg

SEQ ID NO: 615644 - DNA, 75 bp, synthetic construct
  source 1..75: mol_type = other DNA
tgcctcgacagccgccattccactgccgaaaaaccggtatttaaccgcaccgttgggctgcgtgatacctgggcg

SEQ ID NO: 615645 - DNA, 75 bp, synthetic construct
  source 1..75: mol_type = other DNA
ttgctgtattctgcggtttgctcgccggatgtgacgacaaaatccatgatgtatcttactataaggaacatcacg

SEQ ID NO: 615646 - DNA, 75 bp, synthetic construct
  source 1..75: mol_type = other DNA
gaagataatgaacccgttatggtttttaacggagagaggaatgtactggcagacagtctgaaaccacagcctctg

SEQ ID NO: 615647 - DNA, 75 bp, synthetic construct
  source 1..75: mol_type = other DNA
gtgacctttaaacgaccgctactggcagcagaagcgaccttggggtcctcggtaagtaataataatgagtcgtgg

SEQ ID NO: 615648 - DNA, 75 bp, synthetic construct
  source 1..75: mol_type = other DNA
ctggcgggcgaagcgataacgctcaggcgtgataatgcgatgagccgctcaggaaccattgtaaacacggcagca

SEQ ID NO: 615649 - DNA, 75 bp, synthetic construct
  source 1..75: mol_type = other DNA
tatgacttctgataagaagccgccgcgcgaagggtgcctgatggtttactcgccagagccggatgaggattactg

SEQ ID NO: 615650 - DNA, 75 bp, synthetic construct
  source 1..75: mol_type = other DNA
tcactatgaaggaccactcaaaccggtcgataagatggcgaaataccgtcttatcccggtgcagcgactgatagc

SEQ ID NO: 615651 - DNA, 75 bp, synthetic construct
  source 1..75: mol_type = other DNA
caataaaggctttcttaccgtcgatgaaattcgccgggttacgcgcgccttcgccagtctgggcaccgaaaaagt

SEQ ID NO: 615652 - DNA, 75 bp, synthetic construct
  source 1..75: mol_type = other DNA
caacatgcgcagtcggcgaaaaaggatctgacttctggttctgattcatcctctgatgatgtaaaactggattac

SEQ ID NO: 615653 - DNA, 75 bp, synthetic construct
  source 1..75: mol_type = other DNA
gcaccggcgttggcggcgtaatggcgcgtacgttgccgcgtgatttatatgaacgaacacagttgcgccatgcta

SEQ ID NO: 615654 - DNA, 75 bp, synthetic construct
  source 1..75: mol_type = other DNA
caaagacaaggtgatgccgtccggggtgctgaactcgaaacagatcagcgccgcgttcttctccggcaagctcgg

SEQ ID NO: 615655 - DNA, 75 bp, synthetic construct
  source 1..75: mol_type = other DNA
cattgacgtcatccgcactggatgacgccagaaccctcagcaatggcggccgacctagcgcgtcagtgaaaaaag

SEQ ID NO: 615656 - DNA, 75 bp, synthetic construct
  source 1..75: mol_type = other DNA
actccggctttagcacattgggatggccgtcatcgataagcttcccgtatttatctactgataaggctggatcgt

SEQ ID NO: 615657 - DNA, 75 bp, synthetic construct
  source 1..75: mol_type = other DNA
taatcttgtaccacctcaatatgcactgcctcattcagtttatccagggactggcgagatagatttaatgaaata

SEQ ID NO: 615658 - DNA, 75 bp, synthetic construct
  source 1..75: mol_type = other DNA
acggctggagtatggccagaagatggcgagttaagcgaattaacgtggtgcagccacaatcagcaccatgatgac

SEQ ID NO: 615659 - DNA, 75 bp, synthetic construct
  source 1..75: mol_type = other DNA
cattcaggggattatgaaacgtatcaaggcgaaaggcgttgaagtgatcatctacgaaccggtgatgaaagaaga

SEQ ID NO: 615660 - DNA, 75 bp, synthetic construct
  source 1..75: mol_type = other DNA
atgaaaatcaccatttccggaaccggttatgttggcctgtctaatgggctcttaatctcacaaaatcataacgtt

SEQ ID NO: 615661 - DNA, 75 bp, synthetic construct
  source 1..75: mol_type = other DNA
tcgatgaacaaaaccgaattattaaagaaaatatatatgtggattatcttactgttaatgctgctgtcttgtctg

SEQ ID NO: 615662 - DNA, 75 bp, synthetic construct
  source 1..75: mol_type = other DNA
gcggggaacaagccagccgggcgatggaacatgacgaaattcttgatgttattcatgacttcggcgaagccactc

SEQ ID NO: 615663 - DNA, 75 bp, synthetic construct
  source 1..75: mol_type = other DNA
ggtgttggattagtgataacgggatgcgctcatgttcagagaaacggagtgggtttcacaaatgaattcgcagcc

SEQ ID NO: 615664 - DNA, 75 bp, synthetic construct
  source 1..75: mol_type = other DNA
gtacttatccgtacgtaacttcttccaacaccactgctggtggcgtggcgaccggttccggcctgggcccgcgtt

SEQ ID NO: 615665 - DNA, 75 bp, synthetic construct
  source 1..75: mol_type = other DNA
ttagaagaaaaaaattttctgttaagttatttaaacgcagaacctttaaagtttgaagaaatatatgaaaaatat

SEQ ID NO: 615666 - DNA, 75 bp, synthetic construct
  source 1..75: mol_type = other DNA
tgaaaagaaccgcagctggacacgctattttctggcgcgggaattacgtaaatcactgaagccggagcgacgacg

SEQ ID NO: 615667 - DNA, 75 bp, synthetic construct
  source 1..75: mol_type = other DNA
aaatgaagcctaccgggatgctgattatgtcatcatcgccactccaaccgactatgatcctaaaactaattattt

SEQ ID NO: 615668 - DNA, 75 bp, synthetic construct
  source 1..75: mol_type = other DNA
taagggcgctgatcctaccgctatcagcgtcgccgcagaacatcaactgtctctggaaggtcactgtgcacggca

SEQ ID NO: 615669 - DNA, 75 bp, synthetic construct
  source 1..75: mol_type = other DNA
tatcaccctgagctgaaagtagaatccgctggtctcggcgcactggtcggtaaaggggctgatcctactgccatc

SEQ ID NO: 615670 - DNA, 75 bp, synthetic construct
  source 1..75: mol_type = other DNA
atgagtcggtacgtattccgcgcaccgcgcgcatcgtctggtcgacccgtgaaatggggcgggtttatcatgccg

SEQ ID NO: 615671 - DNA, 75 bp, synthetic construct
  source 1..75: mol_type = other DNA
atgttccccgtggtcatcctcgataaagacgttccggtactgtgcggcaacggcttccgcctgttcgcgggtaaa

SEQ ID NO: 615672 - DNA, 75 bp, synthetic construct
  source 1..75: mol_type = other DNA
tctagggagaagttggtttgatttcttggagaagaaaatagggggctttacatccagatacgaagggagtgaccg

SEQ ID NO: 615673 - DNA, 75 bp, synthetic construct
  source 1..75: mol_type = other DNA
gatgcggcacaagcctttgcgctgtatgagtcggtacgtattccgcgcaccgcgcgcatcgtctggtcgacccgt

SEQ ID NO: 615674 - DNA, 75 bp, synthetic construct
  source 1..75: mol_type = other DNA
acttccgctgtctgtcgtgcggtttaatgtctttaccggtcgaattgaaccgccccggaaatcctggagactaaa

SEQ ID NO: 615675 - DNA, 75 bp, synthetic construct
  source 1..75: mol_type = other DNA
tttgattcagtacaacagccagtttattggccaggacataaaccaggcactgcctggcgatatgattttttcgat

SEQ ID NO: 615676 - DNA, 75 bp, synthetic construct
  source 1..75: mol_type = other DNA
atgattgtctgccggacgcgtccccgtccggcacctctcttacttaagaatcccgaaatcacggatgacatgatt

SEQ ID NO: 615677 - DNA, 75 bp, synthetic construct
  source 1..75: mol_type = other DNA
gagcatttctacaacaatgttctgctccctgctggtgggggtgagcgcgttttattcgtccttaaccaggttgat

SEQ ID NO: 615678 - DNA, 75 bp, synthetic construct
  source 1..75: mol_type = other DNA
gatgcggcgcaagcctttgcactgtatgagtcggtacgtattccgcgcaccgcgcgcatcgtctggtcgacccgt

SEQ ID NO: 615679 - DNA, 75 bp, synthetic construct
  source 1..75: mol_type = other DNA
caggagtagaacgccaggttcgtaacctgttgtggaaagggaaatcgcaggcagagttttatcggagtatggagt

SEQ ID NO: 615680 - DNA, 75 bp, synthetic construct
  source 1..75: mol_type = other DNA
ggggatcaaagtggtgctgctggaaaaggcgcatgagatcggtgagattggcgcgggcatccagttggggccaaa

SEQ ID NO: 615681 - DNA, 75 bp, synthetic construct
  source 1..75: mol_type = other DNA
cgcgccagatgttggataaaccgacttcatggcgacgctggtcaaccgctgaccgtgaaccggtggcgaagtggg

SEQ ID NO: 615682 - DNA, 75 bp, synthetic construct
  source 1..75: mol_type = other DNA
aacgcccggtactgtgggcggggccgcattgtcacctggtgcattaccctttgcgcggcggcaagcaatataacc

SEQ ID NO: 615683 - DNA, 75 bp, synthetic construct
  source 1..75: mol_type = other DNA
gacgcctggcacgttcgattggttatatggtacccagagccagtaaacatcgccccggttttatggcacgtatag

SEQ ID NO: 615684 - DNA, 75 bp, synthetic construct
  source 1..75: mol_type = other DNA
aaaatattttcttttccccagaattcctgcgtgagggtaaagcactatatgacaacctttacccatctcgtattg

SEQ ID NO: 615685 - DNA, 75 bp, synthetic construct
  source 1..75: mol_type = other DNA
gaagagtatttggcgactaggtcgctaaacttccgtgcaacgactgataagtgtgatgcctacttagatgcggac

SEQ ID NO: 615686 - DNA, 75 bp, synthetic construct
  source 1..75: mol_type = other DNA
tgagttctttaactcccgcgtcgtgcgcgatctggatgccttcaaacaagaggcggatgtgattatctctaaccg

SEQ ID NO: 615687 - DNA, 75 bp, synthetic construct
  source 1..75: mol_type = other DNA
aagccgacgtcattatttccaaccgtatggcagaagagcttaaagatgtggcagataaggtctatacccgagatc

SEQ ID NO: 615688 - DNA, 75 bp, synthetic construct
  source 1..75: mol_type = other DNA
aagactttattgccgattctatccttgcacgtaaaccgaaagttgttggcgtctatcgtctgattatgaagagtg

SEQ ID NO: 615689 - DNA, 75 bp, synthetic construct
  source 1..75: mol_type = other DNA
ggttattgtctgccgaaagataccaagcagttactggcaaactatcaatctgtaccgaataatctgatttcggca

SEQ ID NO: 615690 - DNA, 75 bp, synthetic construct
  source 1..75: mol_type = other DNA
cgtatttcaatgaacttgatagttatgctgaaagcctagggcttaattcacgccagattattgagggcgtatgcc

SEQ ID NO: 615691 - DNA, 75 bp, synthetic construct
  source 1..75: mol_type = other DNA
tgaattctttaattcccgcgttgtacgcgatttggatgcatttaagcaagaagcggatgtcatcatttctaaccg

SEQ ID NO: 615692 - DNA, 75 bp, synthetic construct
  source 1..75: mol_type = other DNA
gtgtggatatgctcaatgagcgtgtctcgcctattgtggataaggagatccagcaatatctgagctcaggggagc

SEQ ID NO: 615693 - DNA, 75 bp, synthetic construct
  source 1..75: mol_type = other DNA
ctctccgattgtcgataaagagattcaggaatatctggcagaaaaaccgttaaatttccgtgccaccacggacaa

SEQ ID NO: 615694 - DNA, 75 bp, synthetic construct
  source 1..75: mol_type = other DNA
gctatgtgggtctgtccaatgccatgttactgtcacaacaccacgaagtggtggcagtcgatatcattgccgaaa

SEQ ID NO: 615695 - DNA, 75 bp, synthetic construct
  source 1..75: mol_type = other DNA
cttattttaatgaactagatacttacgctgaaagtctgggtcttaactcccgccaaattattgagggagtttgcc

SEQ ID NO: 615696 - DNA, 75 bp, synthetic construct
  source 1..75: mol_type = other DNA
gattcagggtattatgaagcgaatcaaagcgaaaggcgtgcctgtaatcgtttatgagccagctatgaaagagga

SEQ ID NO: 615697 - DNA, 75 bp, synthetic construct
  source 1..75: mol_type = other DNA
tgtgccgaataacctgatttcggcaattgtcgatgctaaccgcacgcgtaaagactttattgccgatgccatttt

SEQ ID NO: 615698 - DNA, 75 bp, synthetic construct
  source 1..75: mol_type = other DNA
cattctcgctacaaccggcggaagggcgggcagatctctacacagaaatgcctgtgaaggtcagtggctttaaac

SEQ ID NO: 615699 - DNA, 75 bp, synthetic construct
  source 1..75: mol_type = other DNA
cgagccatatgccatttttgatgattactattgtggtgcgatatggtcagccaccgtattacaggagcaaggtgt

SEQ ID NO: 615700 - DNA, 75 bp, synthetic construct
  source 1..75: mol_type = other DNA
tatccggcttttttgttctatggcgtgaggcgaggggcaaagcgtcgtcgcagccatcatcgtggtgcatccggt

SEQ ID NO: 615701 - DNA, 75 bp, synthetic construct
  source 1..75: mol_type = other DNA
cgaccctgtttaccgactccactgaagcagaagcgattaaactttttgcaaacacctacctcgcgatgcgcgtgg

SEQ ID NO: 615702 - DNA, 75 bp, synthetic construct
  source 1..75: mol_type = other DNA
ggtcagataacttccgtgcgtcttccattcaggggattatgaaacgtatcaaggcgaaaggcgttgaagtgatca

SEQ ID NO: 615703 - DNA, 75 bp, synthetic construct
  source 1..75: mol_type = other DNA
gttatgtcggtctttcaaatgcagtactgctagcacaacatcatgaagtcgttgctgttgatataatagcgagca

SEQ ID NO: 615704 - DNA, 75 bp, synthetic construct
  source 1..75: mol_type = other DNA
gcgttgacatattaaataagcggatctctcctattgtggatagcgaaattcagcattttttacaatcaggtgata

SEQ ID NO: 615705 - DNA, 75 bp, synthetic construct
  source 1..75: mol_type = other DNA
aaactgacgtcattatttccaaccgtatggcagaagaacttaaggatgtggcagataaggtctacacacgagatc

SEQ ID NO: 615706 - DNA, 75 bp, synthetic construct
  source 1..75: mol_type = other DNA
gtatttcttccactctcgtgtcatccgcgatttagacgagttcaagtctgtgagtgatgtgattttgtgtaatcg

SEQ ID NO: 615707 - DNA, 75 bp, synthetic construct
  source 1..75: mol_type = other DNA
ttagcgacgtgatactttgcaacaggatggcgagcgagttaagtgacgtagcggataaggtctatacaagagatc

SEQ ID NO: 615708 - DNA, 75 bp, synthetic construct
  source 1..75: mol_type = other DNA
tgattggtgagcgttcagagcgcgcagaacgttttgccaggatgctccagcagggggcgattaagcaggacatcc

SEQ ID NO: 615709 - DNA, 75 bp, synthetic construct
  source 1..75: mol_type = other DNA
acgggtaatcgccgcagcaaaatacacacaccgtctcaggctcaagaagcaattacccgctggactgccacttgt

SEQ ID NO: 615710 - DNA, 75 bp, synthetic construct
  source 1..75: mol_type = other DNA
acgggtaatcgccgcagtaaaatacacacaccgcctcaggctcaagaagcaattacccgctggactgccacttgt

SEQ ID NO: 615711 - DNA, 75 bp, synthetic construct
  source 1..75: mol_type = other DNA
acgggtaatcgccgcagtaaaatacacacaccgactcaggctcaagaagcaattccccgctggactgccacttgt

SEQ ID NO: 615712 - DNA, 75 bp, synthetic construct
  source 1..75: mol_type = other DNA
cagaatttcttctcccctctatttaaccagcgtaatgaccgatggggaggagatcttgaaggacgtatgcgcttc

SEQ ID NO: 615713 - DNA, 75 bp, synthetic construct
  source 1..75: mol_type = other DNA
tttcgccttttatgctgacagataaaatcaagttacgtaatcgtatcgttatggcgccgatgacgacctggtcag

SEQ ID NO: 615714 - DNA, 75 bp, synthetic construct
  source 1..75: mol_type = other DNA
agcgcatcaagcgtaaaatctggtgactttatgaagagagtggtacaaagcagggaaatgactgaaaacgaaatt

SEQ ID NO: 615715 - DNA, 75 bp, synthetic construct
  source 1..75: mol_type = other DNA
cgcagcaaaatacacacaccgtctcaggctcaagaagcaattacccgctggcctgccacttgttgcgatccgaca

SEQ ID NO: 615716 - DNA, 75 bp, synthetic construct
  source 1..75: mol_type = other DNA
cgcagcaaaatacacacaccgtctcaggctcaagaagcaattacccgctggactgccacttgttgcgatccgcca

SEQ ID NO: 615717 - DNA, 75 bp, synthetic construct
  source 1..75: mol_type = other DNA
cgcagtaaaatacacacaccgtctcaggctcaagaagcaattacccgctggactgccacttgttgcgatccgtca

SEQ ID NO: 615718 - DNA, 75 bp, synthetic construct
  source 1..75: mol_type = other DNA
acgggtaatcgccgcagaaaaatacacacaccgtctcaggctcaagaagcaattccccgctggactgccacttgt

SEQ ID NO: 615719 - DNA, 75 bp, synthetic construct
  source 1..75: mol_type = other DNA
cgcaggaaaatacacacaccgtctcaggctcaagaagcaattacccgctgggctgccacttgttgcgatccgaca

SEQ ID NO: 615720 - DNA, 75 bp, synthetic construct
  source 1..75: mol_type = other DNA
cgcaggaaaatacacacaccgtctcaggctcaagaagcaattacccgctggactgccacttgttgcgatccggca

SEQ ID NO: 615721 - DNA, 75 bp, synthetic construct
  source 1..75: mol_type = other DNA
gtgccattgatcctggcctttgcggcctatgaattcaaaacggtgatcaccctgacatttgttatttttgcagtt

SEQ ID NO: 615722 - DNA, 75 bp, synthetic construct
  source 1..75: mol_type = other DNA
ggtgtcgtcactggataatcagacagccaaaattccgctgtggtggatgctggtgcataagttgtcgaaaggggt

SEQ ID NO: 615723 - DNA, 75 bp, synthetic construct
  source 1..75: mol_type = other DNA
agttgatttatttcagagaagttttatgagcggtatgtctacaccaacaccgccgccgccacaacaagctcaatc

SEQ ID NO: 615724 - DNA, 75 bp, synthetic construct
  source 1..75: mol_type = other DNA
ccctgttcgcctgatatgcgacagatgcgttttgaggttcagcatacccggatcaacaataaggcgctgattgaa

SEQ ID NO: 615725 - DNA, 75 bp, synthetic construct
  source 1..75: mol_type = other DNA
tgcggcacctggaccccggtgaagccggcggaatccggttacagcggcgtggtgtcgtcactggataatcagaca

SEQ ID NO: 615726 - DNA, 75 bp, synthetic construct
  source 1..75: mol_type = other DNA
tccagaacacgtctgatgatgtcattatgaatctggtgatggggacgatgtttttggtgttgccagccttatgga

SEQ ID NO: 615727 - DNA, 75 bp, synthetic construct
  source 1..75: mol_type = other DNA
gaaagcgaaagatcagggaaaaacacaggatgagaacacgttgcaggatatcacctggataggctcgggcacctt

SEQ ID NO: 615728 - DNA, 75 bp, synthetic construct
  source 1..75: mol_type = other DNA
gattaatgcggcaatcggaaaaggagtgtcaacaagccaacaagctggtcagcatgccggaggtattacgaataa

SEQ ID NO: 615729 - DNA, 75 bp, synthetic construct
  source 1..75: mol_type = other DNA
gggggcgtttccggcgtttgatgccatgcggcaggcgctgccgatggtgcagagtattctgctgatggcggtgta

SEQ ID NO: 615730 - DNA, 75 bp, synthetic construct
  source 1..75: mol_type = other DNA
ttcaggtcagtcttgacagcattaagtttgataaaacgcgggcaagaacatgcggaacctggacaccgaaagatc

SEQ ID NO: 615731 - DNA, 75 bp, synthetic construct
  source 1..75: mol_type = other DNA
cattgcgaacagggcgctggccgatgagttgcaggatttcaccaatgactgctactcgctggcgatgtaccagtg

SEQ ID NO: 615732 - DNA, 75 bp, synthetic construct
  source 1..75: mol_type = other DNA
ttcaggtgacgctggataccctgaagtttgatcgcagccgggcccagacctgtggtgtgtggacgccgaaagccc

SEQ ID NO: 615733 - DNA, 75 bp, synthetic construct
  source 1..75: mol_type = other DNA
gtgacgaccaataactatctggaatattttctgaccctgctgggctggctggtcaataacggtctgtgggatttg

SEQ ID NO: 615734 - DNA, 75 bp, synthetic construct
  source 1..75: mol_type = other DNA
cgcagaaaaatacacacaccgtctcaggctcaagaagcaattacccgctggactgccacttgttgcgatccgaca

SEQ ID NO: 615735 - DNA, 75 bp, synthetic construct
  source 1..75: mol_type = other DNA
aaattatcttatggtaaataacagaacagaatatcagaatcataatgaacagttccggccttggggaagtcatga

SEQ ID NO: 615736 - DNA, 75 bp, synthetic construct
  source 1..75: mol_type = other DNA
actccgataatcataacaaataatgagtatcgttttttggttaaggaacaaataaaaaaaaccaagcaccctgat

SEQ ID NO: 615737 - DNA, 75 bp, synthetic construct
  source 1..75: mol_type = other DNA
tagaaaatccaggtaaaattcaactcgaggtaatagaaatccaatcaggaaattatttagatgatgatgatattc

SEQ ID NO: 615738 - DNA, 75 bp, synthetic construct
  source 1..75: mol_type = other DNA
gcacgcaaaagcggaatattgatggagatattgcacagctggcagctccggcactggcttctataagagagatca

SEQ ID NO: 615739 - DNA, 75 bp, synthetic construct
  source 1..75: mol_type = other DNA
gtgggggaagttgctggcacacacggcgtcacccgacctggcggcgcggcattgaatgccgggcaggtttttgct

SEQ ID NO: 615740 - DNA, 75 bp, synthetic construct
  source 1..75: mol_type = other DNA
cctttcagccttttttgtaaatagatgtgagataaacttagagaaggatcctgtcttattagtgttagctgcgga

SEQ ID NO: 615741 - DNA, 75 bp, synthetic construct
  source 1..75: mol_type = other DNA
ctggtcacattaccgctaagcagattcattaccatcgtactgaacattggattgttgtctcggggacagctaaag

SEQ ID NO: 615742 - DNA, 75 bp, synthetic construct
  source 1..75: mol_type = other DNA
ttgccaaagctccctgtcctcttcgacacaagatttagattttatccgtctggataactcttcattttcttgctg

SEQ ID NO: 615743 - DNA, 75 bp, synthetic construct
  source 1..75: mol_type = other DNA
ctgcgttttaacgcttttaccggtcgaatatccgatcgccgtacactctctgctgcctcccgtatggccgcgcag

SEQ ID NO: 615744 - DNA, 75 bp, synthetic construct
  source 1..75: mol_type = other DNA
taatagacttaaatctctaaatcgtaaggaatatattgaacattcacaatgctatagaccttgggggcagcatga

SEQ ID NO: 615745 - DNA, 75 bp, synthetic construct
  source 1..75: mol_type = other DNA
tccggctattgcattggctgcgtttaatttgttagcagaagggaatgacgctcttttactgatccttgcagcaga

SEQ ID NO: 615746 - DNA, 75 bp, synthetic construct
  source 1..75: mol_type = other DNA
accccattagttatttgtaatgaagagcatagattcatcgttgcggaacagttaaagaaaattaataaattagat

SEQ ID NO: 615747 - DNA, 75 bp, synthetic construct
  source 1..75: mol_type = other DNA
gttaattcgcgtgatggtggaaggcgaagacgaagcgcaggtgactgaatttgcacaccgcatcgccgatgcagt

SEQ ID NO: 615748 - DNA, 75 bp, synthetic construct
  source 1..75: mol_type = other DNA
acagctacagaatgagatagcccagctcaggcaggctctggagcaggaaaagaaacggggattctggtccaggct

SEQ ID NO: 615749 - DNA, 75 bp, synthetic construct
  source 1..75: mol_type = other DNA
atgggacactgtaactttatggcatggcacacactccgggacgcactgaaaatgactggaagatcgcgttcacag

SEQ ID NO: 615750 - DNA, 75 bp, synthetic construct
  source 1..75: mol_type = other DNA
tggcttatctgacgcgtactttccgcgcagaggccgggattgtgatttctgcatcgcataacccgttttacgata

SEQ ID NO: 615751 - DNA, 75 bp, synthetic construct
  source 1..75: mol_type = other DNA
gtatttcgtatatacatacctcgctggtcagtattaacatagctaccctgttgagactgccaaatggcccccgaa

SEQ ID NO: 615752 - DNA, 75 bp, synthetic construct
  source 1..75: mol_type = other DNA
cgaatcctgatggaaccatctctgagcaagaactcgaattttataaacgtcgctcacaaaatgttggtttagtaa

SEQ ID NO: 615753 - DNA, 75 bp, synthetic construct
  source 1..75: mol_type = other DNA
gattagtgttggaagtattggagcagctattggcaaaggtgtatctgacgcacaacaagcaggaaaacaggcagg

SEQ ID NO: 615754 - DNA, 75 bp, synthetic construct
  source 1..75: mol_type = other DNA
cggcaccaaactaccggatgcggtagaagaggccatcgaagcggaaatggaaaaagagatcagctgcgttgattc

SEQ ID NO: 615755 - DNA, 75 bp, synthetic construct
  source 1..75: mol_type = other DNA
actggtccgatgccaacaccggccgtggcttatctgacgcgtaccttccgcgcagaggccggaattgtgatatct

SEQ ID NO: 615756 - DNA, 75 bp, synthetic construct
  source 1..75: mol_type = other DNA
gcgatcagatcatgtatatcatcgcgcgtgaaggtcttcgtcaggggcagttgcgtggtggcgtagtgggcacat

SEQ ID NO: 615757 - DNA, 75 bp, synthetic construct
  source 1..75: mol_type = other DNA
caggcgcgcgtactggctgaaaaagcagatcttggtatcgcctttgacggtgacggcgaccgtgtgattatggtt

SEQ ID NO: 615758 - DNA, 75 bp, synthetic construct
  source 1..75: mol_type = other DNA
gctacgtactggaaaaaatgcaggagaaaggctggcgtatcggtgcagagaactccggtcatgtgatcctgctgg

SEQ ID NO: 615759 - DNA, 75 bp, synthetic construct
  source 1..75: mol_type = other DNA
cgcagaggccggaattgtgatatctgcatcgcataacccgttctacgataatggcattaaatttttctctatcga

SEQ ID NO: 615760 - DNA, 75 bp, synthetic construct
  source 1..75: mol_type = other DNA
agacctgggcgcaactggtttacaaattactgactgcagaacaggagtatgaagcgacaggaagcgaagaaacac

SEQ ID NO: 615761 - DNA, 75 bp, synthetic construct
  source 1..75: mol_type = other DNA
tggctgggcgcgagcgttgaccgccgcaccttaagcgagttgttaaatacttggtggctgctatatggacagact

SEQ ID NO: 615762 - DNA, 75 bp, synthetic construct
  source 1..75: mol_type = other DNA
atgcccacgctggcgtgctgccggacgataaactttaccaggcattgcgtcaggatttgaacaatcttgcccaac

SEQ ID NO: 615763 - DNA, 75 bp, synthetic construct
  source 1..75: mol_type = other DNA
actctccggtaactccggatagttggataagctgtagtgagcgaatgccggatgacgggcagtggtgcgtagtga

SEQ ID NO: 615764 - DNA, 75 bp, synthetic construct
  source 1..75: mol_type = other DNA
cctgactggctggggagctggttttacgacgaactgacgtatgaagagcggagtagtgacgggaaatggagtaag

SEQ ID NO: 615765 - DNA, 75 bp, synthetic construct
  source 1..75: mol_type = other DNA
acaccggacgaacgggccgacgggcgcaggccgcaggtgatgtgccgctctggcttcttcagacggatgcactga

SEQ ID NO: 615766 - DNA, 75 bp, synthetic construct
  source 1..75: mol_type = other DNA
tagtgaagcaatgaccaacgcggcgctggagatggaacgtagctaccgtcagtattgtgtgttggacgaccccac

SEQ ID NO: 615767 - DNA, 75 bp, synthetic construct
  source 1..75: mol_type = other DNA
tctctgggcaatagcgtctcgttcagtggaccgagcgagttacgctcggttgggcaacgtattctttggttaagt

SEQ ID NO: 615768 - DNA, 75 bp, synthetic construct
  source 1..75: mol_type = other DNA
cccgcacgggctaaaatgatgcataccgacgtcgatctcaaagcaacagcttgcctggcggagccaatgctgctg

SEQ ID NO: 615769 - DNA, 75 bp, synthetic construct
  source 1..75: mol_type = other DNA
gtcgatctcaaagcaacagcttgcctggcggagccaatgctgctgatgagcgtactggataatctttactccaat

SEQ ID NO: 615770 - DNA, 75 bp, synthetic construct
  source 1..75: mol_type = other DNA
atgctggcatttttgctgattctgctgcccctgttggtgctggcatggcaagcctggcaaagcctgaatgcgctt

SEQ ID NO: 615771 - DNA, 75 bp, synthetic construct
  source 1..75: mol_type = other DNA
attttggttggcaatcgctggtgctatttctggtgagtctggtgatggtactgcttttcacgcggatgattatcg

SEQ ID NO: 615772 - DNA, 75 bp, synthetic construct
  source 1..75: mol_type = other DNA
acttacaacttgccagaattaatcgaaggcatggaggtttccattgatgtaagcacttgtgatgcggatttaggt

SEQ ID NO: 615773 - DNA, 75 bp, synthetic construct
  source 1..75: mol_type = other DNA
acaaattttatgccgaggtgcggtttaaacaggttaagcctgaactcgagcagctctctgaaaagaatattcaaa

SEQ ID NO: 615774 - DNA, 75 bp, synthetic construct
  source 1..75: mol_type = other DNA
aagtctctagcttcaaagctttcaagcatatctatttggatcttgacaagtcgtctttgctaactctggacggcc

SEQ ID NO: 615775 - DNA, 75 bp, synthetic construct
  source 1..75: mol_type = other DNA
aaattgaactcatattccatatatatagcggacgacttattcaaaactatcaacgtggtctcggcttattcattg

SEQ ID NO: 615776 - DNA, 75 bp, synthetic construct
  source 1..75: mol_type = other DNA
cggtacagacaactacgccagaaatcccacaaccaaaaccgcaggctgatcagccgaagtatgctgctatcgata

SEQ ID NO: 615777 - DNA, 75 bp, synthetic construct
  source 1..75: mol_type = other DNA
acgcccggcggatgcgctggcaccagaatcggtacgccagcaactggcagacctggaagcgcgcggcacactgcc

SEQ ID NO: 615778 - DNA, 75 bp, synthetic construct
  source 1..75: mol_type = other DNA
taaaactagagaacggctcttaccgttggctgaatccttagctcaagaactgcatagttatatccttcaagatcg

SEQ ID NO: 615779 - DNA, 75 bp, synthetic construct
  source 1..75: mol_type = other DNA
agtttcacttgagacttccgcatgaactccacgcgaaaattaaacagcgcgcgaagatgaataacaggtcgctga

SEQ ID NO: 615780 - DNA, 75 bp, synthetic construct
  source 1..75: mol_type = other DNA
acttccgtatgcctttggaagtaagagaaaaattgaaattaagagccgaggctaacggaaggtcaatgaactctg

SEQ ID NO: 615781 - DNA, 75 bp, synthetic construct
  source 1..75: mol_type = other DNA
gctaacggaaggtcaatgaactcagagttattacaaatcgttcaggatgcgctatcaaaaccatcaccgattgca

SEQ ID NO: 615782 - DNA, 75 bp, synthetic construct
  source 1..75: mol_type = other DNA
gcctatatgcgctaccggttcgacagagcaggtttgacaacaagttcgctcaatatgcagctcttggcgaaagaa

SEQ ID NO: 615783 - DNA, 75 bp, synthetic construct
  source 1..75: mol_type = other DNA
atcattggatgaagtaaacgttgcttccttgaccgatctactccgttgtgaactcaagcattgtcagttggtcgt

SEQ ID NO: 615784 - DNA, 75 bp, synthetic construct
  source 1..75: mol_type = other DNA
cacttgttgcccatggctttgttagtaaacgagacttggacaacacaagcttttatattcgcgagtcaggatctg

SEQ ID NO: 615785 - DNA, 75 bp, synthetic construct
  source 1..75: mol_type = other DNA
ccgctgctgcgcgtctggaagccttcgccaacgcgaatactgaaatggtacaggccacgcgcaccgtggtgttct

SEQ ID NO: 615786 - DNA, 75 bp, synthetic construct
  source 1..75: mol_type = other DNA
agtgggtggtggaagataacttcgtcgcgggacgcccggaatgggaagttgcaggcgtacagatggttaacaatg

SEQ ID NO: 615787 - DNA, 75 bp, synthetic construct
  source 1..75: mol_type = other DNA
gccgccagaacattaatgctggatgagcaagcgccgacactgcgaattaaagatgtcgatttaacacaatatgcg

SEQ ID NO: 615788 - DNA, 75 bp, synthetic construct
  source 1..75: mol_type = other DNA
acccgcattttgttcaggctatcgaacaagcctggcaacaaatcgcgcagtttggggcgcatcaggcgctattaa

SEQ ID NO: 615789 - DNA, 75 bp, synthetic construct
  source 1..75: mol_type = other DNA
gagtggagtaactggttcggtttttcagatgcagtagatgccgtagttgacagaattgctgatttagaagctaaa

SEQ ID NO: 615790 - DNA, 75 bp, synthetic construct
  source 1..75: mol_type = other DNA
gggggtcgatttaacacaatatgcagataagttaattgctcgttttgccaacccggcgctaaaacataaaacctg

SEQ ID NO: 615791 - DNA, 75 bp, synthetic construct
  source 1..75: mol_type = other DNA
aaaaaagcgcatagcagaactgaaagccgaacctgtaagccaaacttacaagttgaaccagctatcgggcaactc

SEQ ID NO: 615792 - DNA, 75 bp, synthetic construct
  source 1..75: mol_type = other DNA
cccggaatgttttggcgatgatgattgcgatacctgtgacggtagcgggcggattgaaattaaagtaccagtcac

SEQ ID NO: 615793 - DNA, 75 bp, synthetic construct
  source 1..75: mol_type = other DNA
atggagcttaaaaaattgatggaacatatttctcttatccctgattacagacaagcctggaaagtggaatataaa

SEQ ID NO: 615794 - DNA, 75 bp, synthetic construct
  source 1..75: mol_type = other DNA
cggaaagtagcagtgaacaacgcgttagcgccctgctttctctgcgtgaagttttcggtgatgacctgcccaata

SEQ ID NO: 615795 - DNA, 75 bp, synthetic construct
  source 1..75: mol_type = other DNA
gataagttaattgaacgttttgccaatcccgcactgaaacataaaacctggcaaatcgcgatggatggcagtcag

SEQ ID NO: 615796 - DNA, 75 bp, synthetic construct
  source 1..75: mol_type = other DNA
tcccccatcacgtacacactccatgctacgatcgccagcaattgaaatcccgtatcgttcattttggctttggag

SEQ ID NO: 615797 - DNA, 75 bp, synthetic construct
  source 1..75: mol_type = other DNA
gtgagcgaaattaactatcaggcactgcgtgaagcggcagaaaaagcaacgtgtggtgagtggtcgctcgaatat

SEQ ID NO: 615798 - DNA, 75 bp, synthetic construct
  source 1..75: mol_type = other DNA
tggcttgaaaagccaacagagcaacgtcatctctcagatctgcttccattatggtgggaattgggtggacgcaat

SEQ ID NO: 615799 - DNA, 75 bp, synthetic construct
  source 1..75: mol_type = other DNA
ttgcgattctttgcctgagtacaggagcacgttggggagaagcagctcgtttgaaagcagaaaatatcatccata

SEQ ID NO: 615800 - DNA, 75 bp, synthetic construct
  source 1..75: mol_type = other DNA
ttacactcttggcaaatgccggggaatttcacggagaaaatccgctccgcgccctcccctctttgaaacgaaaat

SEQ ID NO: 615801 - DNA, 75 bp, synthetic construct
  source 1..75: mol_type = other DNA
cataaaaccggccagtataaaccgcgaccttacctgcctgagtggcatgtttactgcactaattgatgcggagtt

SEQ ID NO: 615802 - DNA, 75 bp, synthetic construct
  source 1..75: mol_type = other DNA
tcattaaccagatggttacgtttatgaaaactaaaaacggaaagcgcaggacaattcccgtttcgcaggacctga

SEQ ID NO: 615803 - DNA, 75 bp, synthetic construct
  source 1..75: mol_type = other DNA
aaccaacaagccgcgaaccgttcctatatccgaggaactggcaacaatgatcacaacgggtaagcgtggctatct

SEQ ID NO: 615804 - DNA, 75 bp, synthetic construct
  source 1..75: mol_type = other DNA
tcgaatggctgccaatgacctgcgcttatcgcttgctggcggaaggtaaagatttacctgcgtggcatccgctgc

SEQ ID NO: 615805 - DNA, 75 bp, synthetic construct
  source 1..75: mol_type = other DNA
gtaaaaccctggacgaaatgagcgatgcggaatgggagtcgttgtgtgatggttgcggtcagtgttgcctgcata

SEQ ID NO: 615806 - DNA, 75 bp, synthetic construct
  source 1..75: mol_type = other DNA
gtaagcgtattgctgaactggagaaaagcgaagagcaactcattaacgagcgtgaccatgctgagtctgctttag

SEQ ID NO: 615807 - DNA, 75 bp, synthetic construct
  source 1..75: mol_type = other DNA
tggatttagcgccattaggcatcgagccaatctgttatctgacagaagaaatcagtaatcaacttttggcgaaat

SEQ ID NO: 615808 - DNA, 75 bp, synthetic construct
  source 1..75: mol_type = other DNA
tgcgtgaagcggcagagaaagcaacgtgtggtgtgtggtcgctcgaatatggagagggccgatttgatggtgatg

SEQ ID NO: 615809 - DNA, 75 bp, synthetic construct
  source 1..75: mol_type = other DNA
tgcgtgaaaaggcagaaaaagcaacgtgtggtgagtggtctctcgaatatggagagagccgatttgatggtgatg

SEQ ID NO: 615810 - DNA, 75 bp, synthetic construct
  source 1..75: mol_type = other DNA
ataccgtcggtgcggttctcacgccgttgccggttccggcctttacgctgattgcgggcgatcgcagtgtctctg

SEQ ID NO: 615811 - DNA, 75 bp, synthetic construct
  source 1..75: mol_type = other DNA
atgtcgatgataaaaagctatgccgcaaaagaagcgggtggagaactggaagtttatgagtacgatcccggtgaa

SEQ ID NO: 615812 - DNA, 75 bp, synthetic construct
  source 1..75: mol_type = other DNA
tgctaccagccgcgttggggtaattggtattggcgggctggggcatatcgctataaaacttctgcacgcaatggg

SEQ ID NO: 615813 - DNA, 75 bp, synthetic construct
  source 1..75: mol_type = other DNA
ggcatctttaccgacggtgatttacgccgtgtcttcgatatgggcgtggatgttcgtcagttaagtattgccgat

SEQ ID NO: 615814 - DNA, 75 bp, synthetic construct
  source 1..75: mol_type = other DNA
tgttcgtcagttaagtattgccgatgtgatgacgccgggggaatacgcgtgcgcccaggcattctggccgttgag

SEQ ID NO: 615815 - DNA, 75 bp, synthetic construct
  source 1..75: mol_type = other DNA
gcactggtaatatttgtcgctcgccatttggcgagcatgtacttcatcgtttgctaccaacgctaaagattgatt

SEQ ID NO: 615816 - DNA, 75 bp, synthetic construct
  source 1..75: mol_type = other DNA
ttgttcgcactttaccgccacgtcttaaccggtttgttgctggtggcgctggcagtgattgcctgcggcgcagtg

SEQ ID NO: 615817 - DNA, 75 bp, synthetic construct
  source 1..75: mol_type = other DNA
caagtctcaaatgaaaaaggcataaatcttgaaggacattcaggaacgcagttcacaagtgctatgagtattgaa

SEQ ID NO: 615818 - DNA, 75 bp, synthetic construct
  source 1..75: mol_type = other DNA
tggaaaacggcgaaagcggcgtactggtgccggttgaaggggttaaaagtagcgcgttgctgcaggaaatcgcca

SEQ ID NO: 615819 - DNA, 75 bp, synthetic construct
  source 1..75: mol_type = other DNA
aaccactgttgatgcaccatatcacagccaccagccgcgttggggtaattggtattggcgggctggggcatatcg

SEQ ID NO: 615820 - DNA, 75 bp, synthetic construct
  source 1..75: mol_type = other DNA
ctgtgtggtggtatcacggtctttaaaccactgttgatgcaccatatcacagccaccagccgcgttggggtaatt

SEQ ID NO: 615821 - DNA, 75 bp, synthetic construct
  source 1..75: mol_type = other DNA
tcacggtctttaaaccactgttgatgcaccatatcactgctaccagccgcgttggggtaattggtattggcgggc

SEQ ID NO: 615822 - DNA, 75 bp, synthetic construct
  source 1..75: mol_type = other DNA
gagcaaacgatgggggtataccgcccagcaggtactggatgcagcccaagctctatacgagacacacaaagcgac

SEQ ID NO: 615823 - DNA, 75 bp, synthetic construct
  source 1..75: mol_type = other DNA
ggctgctcagggagacagggctgctgtatcgcagctgagaggctgggattatcgcgatcgccgtaaagataagtc

SEQ ID NO: 615824 - DNA, 75 bp, synthetic construct
  source 1..75: mol_type = other DNA
attgcagaagttcagcgaatgcaggcattgatcaggctgaaagaagacatcagggatgagcggcagaaacttatt

SEQ ID NO: 615825 - DNA, 75 bp, synthetic construct
  source 1..75: mol_type = other DNA
aacagaagagtaacccggagttccagagagagtaccggaaccgtatccgggaaacacacgaccagttaaaccttt

SEQ ID NO: 615826 - DNA, 75 bp, synthetic construct
  source 1..75: mol_type = other DNA
gattgctaacattcagaaagtacttgatgtaggctttgactctgtacattttgattgtggtgcaccggtcgttga

SEQ ID NO: 615827 - DNA, 75 bp, synthetic construct
  source 1..75: mol_type = other DNA
cttcctggattacggatctgttcgcactcgtaacgaactcaaaaacctactggcgcatggattcattcgacaccg

SEQ ID NO: 615828 - DNA, 75 bp, synthetic construct
  source 1..75: mol_type = other DNA
atgggacggtaactaactatgaggtgagggggaagcaagtaacagagggggccttacttaaggttacgaaacacc

SEQ ID NO: 615829 - DNA, 75 bp, synthetic construct
  source 1..75: mol_type = other DNA
atgcaggcggcctatctgatcgtcgcctgccgtgcgctggggctggataccggcccgatgtcgggctttgaccgt

SEQ ID NO: 615830 - DNA, 75 bp, synthetic construct
  source 1..75: mol_type = other DNA
cgtatcgctgctgaggattgcccagactgcccggattgcggcagcccgatgcgccttagaaaagggaaagctcca

SEQ ID NO: 615831 - DNA, 75 bp, synthetic construct
  source 1..75: mol_type = other DNA
caaagaaggtggcgcgatggctaaagccttcgagggcgcgaagcctccttcacacgaatgcttcaactgcggtgg

SEQ ID NO: 615832 - DNA, 75 bp, synthetic construct
  source 1..75: mol_type = other DNA
tgcataagagtaacctggataagcagaaggattacaggaatcgcatcagagatactcatgaccagctaaatcttt

SEQ ID NO: 615833 - DNA, 75 bp, synthetic construct
  source 1..75: mol_type = other DNA
tagaattggtaatgatgttttcttctcaacccatgcattggcgaatcgaggcgtggattcaggagcaattgtaaa

SEQ ID NO: 615834 - DNA, 75 bp, synthetic construct
  source 1..75: mol_type = other DNA
aattgggtgtcaggccgcgctttagaagcagatgggaaggttaaactacaaccaacaggtttctacgaccctaat

SEQ ID NO: 615835 - DNA, 75 bp, synthetic construct
  source 1..75: mol_type = other DNA
ggagaaagccattaccgccctgaccgggcagagcgtcgatcaaaaatggttcgtggtttacggcgactccccaca

SEQ ID NO: 615836 - DNA, 75 bp, synthetic construct
  source 1..75: mol_type = other DNA
gacgaaccttttaccgcgattgacgttaacggcgtcgatcgtctgacccagcgtatggcgcagcatacggagcag

SEQ ID NO: 615837 - DNA, 75 bp, synthetic construct
  source 1..75: mol_type = other DNA
gagcagggggggattgtgattctgaccactcaccagccgctcaacgtcgctgaaagtaaaattcgccgtatttcg

SEQ ID NO: 615838 - DNA, 75 bp, synthetic construct
  source 1..75: mol_type = other DNA
ttctttcaggtagagacatattacaaagctttgatgggcctagctgatggtactgaacatataatacagttctat

SEQ ID NO: 615839 - DNA, 75 bp, synthetic construct
  source 1..75: mol_type = other DNA
tgactcttaattcattatctcgtatagaggaaatgagatatccagtaggaacaagtgatgtaaaatttaatcagg

SEQ ID NO: 615840 - DNA, 75 bp, synthetic construct
  source 1..75: mol_type = other DNA
agccaataccggaaagagtaacaacgccagcaaagcggcgatgaacctgctgactggtgccggcatcccggtacg

SEQ ID NO: 615841 - DNA, 75 bp, synthetic construct
  source 1..75: mol_type = other DNA
gtgaaaaaaatgaaccgtacgctccgcagatgttgtctgtccgggcttatcagcctgtctttgtttgcaccagtt

SEQ ID NO: 615842 - DNA, 75 bp, synthetic construct
  source 1..75: mol_type = other DNA
atattgaaaatgccaaacctggcgatacggtagaaactcacgccgctgccctgcattatattgatgccagaatcg

SEQ ID NO: 615843 - DNA, 75 bp, synthetic construct
  source 1..75: mol_type = other DNA
aatgatttaattgccagggaagccaatatcctgtttgtggtgcttgattccctgcgttttgatattgcgtttcag

SEQ ID NO: 615844 - DNA, 75 bp, synthetic construct
  source 1..75: mol_type = other DNA
aggtacgggatgtggagcgttcgctgtctgcatcacgcccggcggatgcgctggcaccggaatcggtacgccagc

SEQ ID NO: 615845 - DNA, 75 bp, synthetic construct
  source 1..75: mol_type = other DNA
tatttacagcatggctgatctgctttgcgcagcacgctccgtttccgggaggcgaacaagctttgactttaactt

SEQ ID NO: 615846 - DNA, 75 bp, synthetic construct
  source 1..75: mol_type = other DNA
ggacaatggaaacggcatatccaaatttagcgccgccagtgaaaatgaagtaatagaaataaacagcaatatcag

SEQ ID NO: 615847 - DNA, 75 bp, synthetic construct
  source 1..75: mol_type = other DNA
aaccgggcgggagacgttagttattctctgttccgatcatggcacctgctacggggaagacggtaaatatttcca

SEQ ID NO: 615848 - DNA, 75 bp, synthetic construct
  source 1..75: mol_type = other DNA
taccttttataggtctcgcatgctgggcattagatatgccttttatgaaacgttattcacgtgcatatttactcc

SEQ ID NO: 615849 - DNA, 75 bp, synthetic construct
  source 1..75: mol_type = other DNA
ggtcacggcattcaccaggatgtaccgccagaacatgccggtgtctttgtggaggcagtacatcggttgtccgaa

SEQ ID NO: 615850 - DNA, 75 bp, synthetic construct
  source 1..75: mol_type = other DNA
gcgcaagcggtgatgattttcgacacctggggcggcgtgctcaccggacgtgactatcaacagttctcgctctac

SEQ ID NO: 615851 - DNA, 75 bp, synthetic construct
  source 1..75: mol_type = other DNA
cctggggcggcgtgcttaccgggcgcgattatcaacagttctcgctctattacatgcataaaattgttgatggtt

SEQ ID NO: 615852 - DNA, 75 bp, synthetic construct
  source 1..75: mol_type = other DNA
gaccgtcctgttctggcatccgtggctgtgccgtggtctgccggtgcgcccggttccggcgatggcgctgatgct

SEQ ID NO: 615853 - DNA, 75 bp, synthetic construct
  source 1..75: mol_type = other DNA
cgtctatacttgcaggtttcggtcacggcgaaggtcatgtctttaaccttggtcacggcattcatcaggatgtgc

SEQ ID NO: 615854 - DNA, 75 bp, synthetic construct
  source 1..75: mol_type = other DNA
ccttcaccgtgatcaaaaaaatgatgtatgccgatccgcaggcgctgcacgctctgctcgataaactggcgaaaa

SEQ ID NO: 615855 - DNA, 75 bp, synthetic construct
  source 1..75: mol_type = other DNA
acaaggatatttgttagacttcttcccactagttttcgtggctatatatataaaaaagttatcaggagattttta

SEQ ID NO: 615856 - DNA, 75 bp, synthetic construct
  source 1..75: mol_type = other DNA
acgaggtggaataaaatatgccatttcagaaattaaagctcagtatcatttttatcgtgcaaattatatatcata

SEQ ID NO: 615857 - DNA, 75 bp, synthetic construct
  source 1..75: mol_type = other DNA
aatacgtgctgattctgatgatataaatagaacaaatcgattcgaatgtatacttgattttatgactaagaatgg

SEQ ID NO: 615858 - DNA, 75 bp, synthetic construct
  source 1..75: mol_type = other DNA
ggtggcggacagtggctggaagccatggcagaaaccggttgcgatgcgctgggactggactggacaaccgacatc

SEQ ID NO: 615859 - DNA, 75 bp, synthetic construct
  source 1..75: mol_type = other DNA
gggtaagcggcaaggagctgcaaaacgatccgctgatgttaatgcgcggctcgcagctggcgatggcgaaaaacg

SEQ ID NO: 615860 - DNA, 75 bp, synthetic construct
  source 1..75: mol_type = other DNA
cgaagccgaaaagctgttaattagcgaagcgcgatcgctcactgaagtggcggcgttgtgcgggtttaatgacgt

SEQ ID NO: 615861 - DNA, 75 bp, synthetic construct
  source 1..75: mol_type = other DNA
atgacatctaacgcgacttcacctgcgcatagtgcgggggggaaaggaggacagttagcagaacaagctatttct

SEQ ID NO: 615862 - DNA, 75 bp, synthetic construct
  source 1..75: mol_type = other DNA
gattggcgctgccgaacatggttttgtcgatacggtgcgtaatctggcgctgatttgcgaaagcgatctgctcgg

SEQ ID NO: 615863 - DNA, 75 bp, synthetic construct
  source 1..75: mol_type = other DNA
gcatctgattagccgttacgcaggtggcgcggaagaaaatgccccgctgcataaacttggcggcgatgcgtggtc

SEQ ID NO: 615864 - DNA, 75 bp, synthetic construct
  source 1..75: mol_type = other DNA
ttgccgaacgtcacgccggtccggtggtactcattgcaccagatatgcaaaatgctctgcgtttgcatgatgaaa

SEQ ID NO: 615865 - DNA, 75 bp, synthetic construct
  source 1..75: mol_type = other DNA
gcccgcacagttttctccacggccatgcgctggtaatgaaaaaaggtcagcggttatcgcgcgatgcattgcgta

SEQ ID NO: 615866 - DNA, 75 bp, synthetic construct
  source 1..75: mol_type = other DNA
ggtcgcgtcggacgttcgcatcatcaggcatatgcatggctgctgacgccgcatccaaaagcgatgactaccgat

SEQ ID NO: 615867 - DNA, 75 bp, synthetic construct
  source 1..75: mol_type = other DNA
gcgctggtgatgaaaaaaggtcagcgcctgtcacgagatgcattacgaacccaactggacagcgccggttatcgc

SEQ ID NO: 615868 - DNA, 75 bp, synthetic construct
  source 1..75: mol_type = other DNA
agggaaaatcgatattctgatcggtacgcacaaactgctgcaaagtgacgtcaagtttaaagatttaggcctgct

SEQ ID NO: 615869 - DNA, 75 bp, synthetic construct
  source 1..75: mol_type = other DNA
acggaaaatgaactggaagagatcaaagtagagcttatcgatcgcttcggcctgctgccggatccggcacgtact

SEQ ID NO: 615870 - DNA, 75 bp, synthetic construct
  source 1..75: mol_type = other DNA
caacgcattatgcgtcttgatgaagccagcgaccgtgggcgttatctgatgattggcgctgccgaacatggtttt

SEQ ID NO: 615871 - DNA, 75 bp, synthetic construct
  source 1..75: mol_type = other DNA
ttatcgatcgcttcggcctgctgccggatccggcgcgtaccctgctggatattgcccgtctgcgccagcaagcgc

SEQ ID NO: 615872 - DNA, 75 bp, synthetic construct
  source 1..75: mol_type = other DNA
gacctggccgttcaggcacaacaaaaagcaccgctggatgcgctgcgtaagttcctcgagtctttcgacggtccg

SEQ ID NO: 615873 - DNA, 75 bp, synthetic construct
  source 1..75: mol_type = other DNA
ggggtgcgtcataaagagcgcattaaagcgatgcgcgcgaacgtggatattctgacgcttaccgctacgccgatc

SEQ ID NO: 615874 - DNA, 75 bp, synthetic construct
  source 1..75: mol_type = other DNA
tgacgcaggtgtaacggcggaagatgtgtatcgtgaatttggcaaaaaattacagacgggcagaaaaaacgattc

SEQ ID NO: 615875 - DNA, 75 bp, synthetic construct
  source 1..75: mol_type = other DNA
gcctacggcgatcacggtatccgtatttatggcatctggtccccgattgcagagggcaagatttgcacgcacgcg

SEQ ID NO: 615876 - DNA, 75 bp, synthetic construct
  source 1..75: mol_type = other DNA
aagtttggtggtcaggtcaacgccgagcgcatcgctttgctggcgatgtaccacgatgcctctgaagtgctcact

SEQ ID NO: 615877 - DNA, 75 bp, synthetic construct
  source 1..75: mol_type = other DNA
ggcgcggcctggctaatgaagtcagcaaggaaaccggcaaatcattgcgtgataacgcggagaacgtgaacgcct

SEQ ID NO: 615878 - DNA, 75 bp, synthetic construct
  source 1..75: mol_type = other DNA
gaacaaatcagggggggatttacccgatattaaaactatggatgagagggagctgcaggaatatctccacaacat

SEQ ID NO: 615879 - DNA, 75 bp, synthetic construct
  source 1..75: mol_type = other DNA
atttgcacgcacgcggtgaagtggaaaaaggttcgtaaggccgttgatgttcaggaggcggcagccgaccagggc

SEQ ID NO: 615880 - DNA, 75 bp, synthetic construct
  source 1..75: mol_type = other DNA
ttgaaaatttgaaccaggcagaaggggatttacccgatattaaatccatggatgagaaggagttgcaggattact

SEQ ID NO: 615881 - DNA, 75 bp, synthetic construct
  source 1..75: mol_type = other DNA
accgcgcgtcattgtgcgtttctggattatttcgctgatgctggttctgattggtctggcaacgctgaaggtacg

SEQ ID NO: 615882 - DNA, 75 bp, synthetic construct
  source 1..75: mol_type = other DNA
tcaggaagagggctaaaaaatttgactgggtacgcaatagcggtacgcaggtacgcaaaaatggtacgcaaagtg

SEQ ID NO: 615883 - DNA, 75 bp, synthetic construct
  source 1..75: mol_type = other DNA
ggctgaccaagctggaagatgccgaaggggaccaggaaagaaaggtgttgatggaaaatatcagcgccgccgaga

SEQ ID NO: 615884 - DNA, 75 bp, synthetic construct
  source 1..75: mol_type = other DNA
cgaaggtacagtagcggaaattggctggcgaattaccaaaattacgacctttgataatcgtccattgtacgtacc

SEQ ID NO: 615885 - DNA, 75 bp, synthetic construct
  source 1..75: mol_type = other DNA
atgggtttcccttctcctgtggcggattatgttgaaaaccgaatttctcttgatcagcagataattaggcatcca

SEQ ID NO: 615886 - DNA, 75 bp, synthetic construct
  source 1..75: mol_type = other DNA
ccgtgcggtggagttaggttcctggggcgtggatctcaattgcggctgcccgtcgaaaacggttaacggtagcgg

SEQ ID NO: 615887 - DNA, 75 bp, synthetic construct
  source 1..75: mol_type = other DNA
ccgctacaaaagccggggtttatcaagtgacggcaaccctcgaaaatggcgattcgatgcaacaaacagtgacct

SEQ ID NO: 615888 - DNA, 75 bp, synthetic construct
  source 1..75: mol_type = other DNA
tccggcagcgtcatcaccgccacagtcgttgataataatggctttccggtgaaaggtgtgactgtgaacttcacc

SEQ ID NO: 615889 - DNA, 75 bp, synthetic construct
  source 1..75: mol_type = other DNA
gtgacgaacgaacagggtaaagctaccgtcacttatatcaatacccgctcctcgagagaaacaggagcgagaccg

SEQ ID NO: 615890 - DNA, 75 bp, synthetic construct
  source 1..75: mol_type = other DNA
acgaaatccgtgtgaagagttggtgggtgaacgccggcgaggctttcatgatatacagccttgctgaaaattttt

SEQ ID NO: 615891 - DNA, 75 bp, synthetic construct
  source 1..75: mol_type = other DNA
aaacggttcgtatatggtgaaagcatccctggcgaatggatcctcttatgagaaggatctggtggtaatcgatta

SEQ ID NO: 615892 - DNA, 75 bp, synthetic construct
  source 1..75: mol_type = other DNA
ggcaatccgattcttaatgaatctgtaacattcagtgcagagccaccagagcacatgaccatcagccaaaatatt

SEQ ID NO: 615893 - DNA, 75 bp, synthetic construct
  source 1..75: mol_type = other DNA
tgcataccgcattatttccatcacccgtcatacaccacaggagtggaatttccgtgtggaagtcgattttccggc

SEQ ID NO: 615894 - DNA, 75 bp, synthetic construct
  source 1..75: mol_type = other DNA
aaaagcaacataacctgctgcctgttgcataccgcattctcaatattacgcgccacacgccactggaatggaatt

SEQ ID NO: 615895 - DNA, 75 bp, synthetic construct
  source 1..75: mol_type = other DNA
ctggccgctgtggggggaattacttacatcgggagccagtcgaaaattgtcccgatggtttatgaacaggacaag

SEQ ID NO: 615896 - DNA, 75 bp, synthetic construct
  source 1..75: mol_type = other DNA
agtgctgagctacatcttgttctgcacgatatatcaggcaatccgatcaaagtttctgaagggctggaatttgtg

SEQ ID NO: 615897 - DNA, 75 bp, synthetic construct
  source 1..75: mol_type = other DNA
gtgaaagatccgtcgaatcatccggtggcgggaataacggtgaatttcaccatgccacaggacgtggcggcaaac

SEQ ID NO: 615898 - DNA, 75 bp, synthetic construct
  source 1..75: mol_type = other DNA
aggtccggctgtgggagtttctgaattgtggttctgttgttccctgaatgtctttctgtacgtatctgtgcatgt

SEQ ID NO: 615899 - DNA, 75 bp, synthetic construct
  source 1..75: mol_type = other DNA
cgctgatttatcttgtggcgtcgatatttttccggttgatgcatacggcctgccgccagcgtcttgaggggcgga

SEQ ID NO: 615900 - DNA, 75 bp, synthetic construct
  source 1..75: mol_type = other DNA
cgttgtggggattgataccgcgcatcacgctcaggcggtgatggcagcaggcttcccgcagcggatgcagaaaga

SEQ ID NO: 615901 - DNA, 75 bp, synthetic construct
  source 1..75: mol_type = other DNA
gcttcccgcagcggatgcagaaagattatcgcgatgccatcgacgcgctctccgctaacgtaaccgatttcactt

SEQ ID NO: 615902 - DNA, 75 bp, synthetic construct
  source 1..75: mol_type = other DNA
gaaaagctccgacgaaaccatcgcgaaagtcgtcgcctgggcgagcaagatgggcaaaacgccgattgtggttaa

SEQ ID NO: 615903 - DNA, 75 bp, synthetic construct
  source 1..75: mol_type = other DNA
gcaggcgattggcgagattcgccagcggctgaatattccggtgattgccaacggtgaaatctgggactggcagag

SEQ ID NO: 615904 - DNA, 75 bp, synthetic construct
  source 1..75: mol_type = other DNA
attgcggttgcccatcgaaaacggttaacggtagcggcggcggggcgacgttactcaaagatcccgagctcatct

SEQ ID NO: 615905 - DNA, 75 bp, synthetic construct
  source 1..75: mol_type = other DNA
acaaaatgccagtcgaacgccatccggtacgctggtgcgggtacaactgctggggcagttcccgcaatggctggc

SEQ ID NO: 615906 - DNA, 75 bp, synthetic construct
  source 1..75: mol_type = other DNA
ctgccggtgccgaccattgctgccgtcaacggctatgcgctgggcggtggctgcgaatgcgtgctggcgaccgat

SEQ ID NO: 615907 - DNA, 75 bp, synthetic construct
  source 1..75: mol_type = other DNA
gcgtcgctgtttttccggctgatacgtacggcctgccgtcagcgttttgaggggcgggaaccatgtcaaagctga

SEQ ID NO: 615908 - DNA, 75 bp, synthetic construct
  source 1..75: mol_type = other DNA
gcgtcgctgtttttccggctgatacgcacggcctgccgtcagcgtcttgaggggtgggaactatgtcaaagctga

SEQ ID NO: 615909 - DNA, 75 bp, synthetic construct
  source 1..75: mol_type = other DNA
tatcgtctggcgacgccggatctgcgcatcggtctgccggaaaccaaactgggcatcatgcctggctttggcggt

SEQ ID NO: 615910 - DNA, 75 bp, synthetic construct
  source 1..75: mol_type = other DNA
aaagtcgtcgcctgggcgagcaagatgggtaaaacgccgattgtggttaacgattgccccggcttcttcgtcaac

SEQ ID NO: 615911 - DNA, 75 bp, synthetic construct
  source 1..75: mol_type = other DNA
agaacggcctcggtttctggcgttataaagaagacagtaaaggcaagccgaagaaagaagaagacgccgccgttg

SEQ ID NO: 615912 - DNA, 75 bp, synthetic construct
  source 1..75: mol_type = other DNA
gcaaatatcacctcatcagaaccgcttatgaaatcaacgaagagccaaccgcctatggcgatcacggtattcgta

SEQ ID NO: 615913 - DNA, 75 bp, synthetic construct
  source 1..75: mol_type = other DNA
aagcagggcggcgtactggtttcccgcaaatatcacctcatcagaaccgcttatgaaatcaacgaagagccaacc

SEQ ID NO: 615914 - DNA, 75 bp, synthetic construct
  source 1..75: mol_type = other DNA
ttgcgccaggctgaggaatttgcccggcaagaattatcgctggcctgtagctggtcctggcatcatcaactggat

SEQ ID NO: 615915 - DNA, 75 bp, synthetic construct
  source 1..75: mol_type = other DNA
ccgggcaaagctggcgcatgaacagcagcgttttaatccggacatgatcattctggcggacgtaaacgcccagcc

SEQ ID NO: 615916 - DNA, 75 bp, synthetic construct
  source 1..75: mol_type = other DNA
cattcgtgaagaccgcgaggaactgggtaataacacaggaccacgctttaagtctgagttgattaacccgcgcaa

SEQ ID NO: 615917 - DNA, 75 bp, synthetic construct
  source 1..75: mol_type = other DNA
ggtaataacacggggccacgctttaagtctgagttgataaacccgcgcaaaggaacgccgactagctacatcgcg

SEQ ID NO: 615918 - DNA, 75 bp, synthetic construct
  source 1..75: mol_type = other DNA
caattgtcgggcaacgtcgctatacggtgacgctgaacggcgaatcaaaccatgcaggcaccacgccgatgggtt

SEQ ID NO: 615919 - DNA, 75 bp, synthetic construct
  source 1..75: mol_type = other DNA
ggtgacgctgaacggcgaatcaaaccatgcaggcaccacgccgatgggttatcgtcgtgatacggtttacgcttt

SEQ ID NO: 615920 - DNA, 75 bp, synthetic construct
  source 1..75: mol_type = other DNA
ggtgacgctgaacggcgaatcaaaccatgcaggcaccacgccgatgggctatcgtcgtgacacggtttatgcgtt

SEQ ID NO: 615921 - DNA, 75 bp, synthetic construct
  source 1..75: mol_type = other DNA
ttaaaggtcagagagatcttttcaactattagtctcgctttaattggcctttccagtattatattatcattaatg

SEQ ID NO: 615922 - DNA, 75 bp, synthetic construct
  source 1..75: mol_type = other DNA
ggtgttgctgggcgtgtgtacggggagtaacagcgttgagcgttatctgccggaggtgaagacattaacccgtct

SEQ ID NO: 615923 - DNA, 75 bp, synthetic construct
  source 1..75: mol_type = other DNA
aaccctgagtttatgaatgaagttaaagacgcctgccttaaaaagcaggcgttttgctttgaagcccctgatggt

SEQ ID NO: 615924 - DNA, 75 bp, synthetic construct
  source 1..75: mol_type = other DNA
acagcgaattacagaccatcagcgacagcagctcgtctatgaactgaagtccaggggatttgatggcagcgagaa

SEQ ID NO: 615925 - DNA, 75 bp, synthetic construct
  source 1..75: mol_type = other DNA
ggtggcagtgttccgtcaggagcaggcctgcgtatcttctatcggaaccagcgtctgcaggaggatgataaatgg

SEQ ID NO: 615926 - DNA, 75 bp, synthetic construct
  source 1..75: mol_type = other DNA
cctgtccaccctggtagctgcgcatatgagcatgtgccttgatgccgcttgtggcgatttgtatgccaccgatga

SEQ ID NO: 615927 - DNA, 75 bp, synthetic construct
  source 1..75: mol_type = other DNA
cgtcaggcttaccgtgaactgcggttgttggctggtcaggcggcaaggcagcagggtgacaaaaaagcaggtgcg

SEQ ID NO: 615928 - DNA, 75 bp, synthetic construct
  source 1..75: mol_type = other DNA
cgaaatatatcagtaagaatattgacggacgtggtctggctggcgagatcagtaaggaaacggggaaatccctgc

SEQ ID NO: 615929 - DNA, 75 bp, synthetic construct
  source 1..75: mol_type = other DNA
acaaggagttgcacgattatctgcacagtatgagcaaaaaagagcgccgggaactggctgcaaggttacgcctgg

SEQ ID NO: 615930 - DNA, 75 bp, synthetic construct
  source 1..75: mol_type = other DNA
ggggcttattcgtggaatttacctaagaaagccattaacccttatctggacccggcggaagttgcgccggtttct

SEQ ID NO: 615931 - DNA, 75 bp, synthetic construct
  source 1..75: mol_type = other DNA
atgccattctggctgctgctgatgctggctgttttgccacctacattatgaagcagggcggcgtgttggttcccc

SEQ ID NO: 615932 - DNA, 75 bp, synthetic construct
  source 1..75: mol_type = other DNA
ccagaacggacattacccgcatggatgacaaggagttgcacgattacctgcacagtatgagcaaaaaagagcgcc

SEQ ID NO: 615933 - DNA, 75 bp, synthetic construct
  source 1..75: mol_type = other DNA
tgtgcactggcatctcatgtgtttcatgcgtaaaaaagaccgccgagccatcactgcattactgcgtaagtttgc

SEQ ID NO: 615934 - DNA, 75 bp, synthetic construct
  source 1..75: mol_type = other DNA
cggcggaagttgcgccggtttctgcactttcaaacctgatcactctgtacgctgtcgataacgagcaggaacagc

SEQ ID NO: 615935 - DNA, 75 bp, synthetic construct
  source 1..75: mol_type = other DNA
ctgaaaatttgtaccaacaagggaaagacaaatcagctgatggggataccagaacggatatcacccgcatggatg

SEQ ID NO: 615936 - DNA, 75 bp, synthetic construct
  source 1..75: mol_type = other DNA
aaatgagtcaggatcaggtaaaacgcctgtccaccctggtagcagcgcatatgagcatgtgtcttgaggccgctt

SEQ ID NO: 615937 - DNA, 75 bp, synthetic construct
  source 1..75: mol_type = other DNA
aggcagccgcttcccgtatgtcttctggggcagtaaaaatatttttgggctggcgaatcctgacgacgtgcggaa

SEQ ID NO: 615938 - DNA, 75 bp, synthetic construct
  source 1..75: mol_type = other DNA
atttcgtaaggcgatgcacaaagccgggttgcgctggtatggcgtgcgggtgtcagtgtggtgttcatggcacaa

SEQ ID NO: 615939 - DNA, 75 bp, synthetic construct
  source 1..75: mol_type = other DNA
tgcgtgaaaaggcagaaaaagcaacgtgtggtgtgtggtcgctcgaatatggagaggagagatttgatgctggtg

SEQ ID NO: 615940 - DNA, 75 bp, synthetic construct
  source 1..75: mol_type = other DNA
tgcgtggtcagagcgtcgaaggttcgtattacctggcagaatgtggtcattgtggcgagatgtacccaagtaaca

SEQ ID NO: 615941 - DNA, 75 bp, synthetic construct
  source 1..75: mol_type = other DNA
ggattgcgctggtatggcgtgcgagtggctgagccgcatcatgacggcacagttcactggcacctgttgtgtttt

SEQ ID NO: 615942 - DNA, 75 bp, synthetic construct
  source 1..75: mol_type = other DNA
aacacacgggccgcagctgatatctacttccaactggtcgaggagtgcgaaattcctgctggcggatctctggtc

SEQ ID NO: 615943 - DNA, 75 bp, synthetic construct
  source 1..75: mol_type = other DNA
aaatggagcaggataagctcattagccgggcaaagctagcgcatgaacagcagcgttttaacccggacatggtca

SEQ ID NO: 615944 - DNA, 75 bp, synthetic construct
  source 1..75: mol_type = other DNA
cgttcactggcacctgttgtgtttcatgcgcaaaaaagaccgccgtgccatcactgcattactgcgtaagtttgc

SEQ ID NO: 615945 - DNA, 75 bp, synthetic construct
  source 1..75: mol_type = other DNA
tgctggtactgcctgaaatgaatcaggatcaggtcaagcgtctttccacgctggttgcggctcatatgagcatgt

SEQ ID NO: 615946 - DNA, 75 bp, synthetic construct
  source 1..75: mol_type = other DNA
ataatgcaccaaccaccggcggctcgaatgaggccgccgtggccttttcatggaataaccccaaaaaagcggtta

SEQ ID NO: 615947 - DNA, 75 bp, synthetic construct
  source 1..75: mol_type = other DNA
tacgcatactcatacacgctgggataaaaagttcagttcacgagaagaacagtgtaaacatcttcggcaggactt

SEQ ID NO: 615948 - DNA, 75 bp, synthetic construct
  source 1..75: mol_type = other DNA
ttgaaaatttgaaccaaacagggggtgatgttcccgatataactaccatggatgaaaccgaattgaaggaatatt

SEQ ID NO: 615949 - DNA, 75 bp, synthetic construct
  source 1..75: mol_type = other DNA
acaaggaattgcacgattacctgcacaatatgagcaaaaaagagcgccgggaactggcagcaagattacgcctgg

SEQ ID NO: 615950 - DNA, 75 bp, synthetic construct
  source 1..75: mol_type = other DNA
tgcgtttgagcaactccgtcggaaaagaaaccgccgtaaacccgtgccttatgaactcattccgggttcgctggc

SEQ ID NO: 615951 - DNA, 75 bp, synthetic construct
  source 1..75: mol_type = other DNA
actcgtggcaataactgtccccttactgaaaatttgaaccaacaagggaaaaacaaatcagctgatggggatacc

SEQ ID NO: 615952 - DNA, 75 bp, synthetic construct
  source 1..75: mol_type = other DNA
cattcaaacagagtatttcggagcagcagcgcctgcagcttgaggcagaactgactgccagagggtttgaaggta

SEQ ID NO: 615953 - DNA, 75 bp, synthetic construct
  source 1..75: mol_type = other DNA
agtccagaggatttgatggtagcgagaaagaggtcgatttactccttcgcggcggcagtattccgtcaggagcag

SEQ ID NO: 615954 - DNA, 75 bp, synthetic construct
  source 1..75: mol_type = other DNA
tagaagaaacgctgccctggctttcctcttttggcgctgacccaacgggtggtatgacccgtttactttattcgc

SEQ ID NO: 615955 - DNA, 75 bp, synthetic construct
  source 1..75: mol_type = other DNA
tgaacacctcagcattgaggcttaccataagctcaaccgcgccagcgccgtatcccggtttgttgggggtgattt

SEQ ID NO: 615956 - DNA, 75 bp, synthetic construct
  source 1..75: mol_type = other DNA
cacggcctgctgcacagcggtgcgcgctatgcggtaaccgatgcggaatcggcccgcgaatgtattagtgaaaac

SEQ ID NO: 615957 - DNA, 75 bp, synthetic construct
  source 1..75: mol_type = other DNA
aaatatatcagtaagaacattgacgggcgtggtctggctggcgagatcagcaaggaaacgggtaaatccctgcgt

SEQ ID NO: 615958 - DNA, 75 bp, synthetic construct
  source 1..75: mol_type = other DNA
gcgaatggcgggaagagcagttgcgcgctgtctgcctggtcagcaaaaaagcatctccttatgccagctatgaag

SEQ ID NO: 615959 - DNA, 75 bp, synthetic construct
  source 1..75: mol_type = other DNA
cggcggaagttgcgccggtttctgtgctttcaaacctgatcactctgtacgctaccgataacgagcaggaacaac

SEQ ID NO: 615960 - DNA, 75 bp, synthetic construct
  source 1..75: mol_type = other DNA
cgactgcagctcgtctatgagctgaagtccagaggatttgatggtagcgagaaagaggtcgatttactccttcgc

SEQ ID NO: 615961 - DNA, 75 bp, synthetic construct
  source 1..75: mol_type = other DNA
ctagcggctttaacgaggctgccgcagcattttcatggaacggcccgaaaaaggccattaacccttatctggatc

SEQ ID NO: 615962 - DNA, 75 bp, synthetic construct
  source 1..75: mol_type = other DNA
atgcgcaaaaaagaccgccgcgccatcactgcattactgcgtaagtttgccatccgtgaagaccgagaggagctg

SEQ ID NO: 615963 - DNA, 75 bp, synthetic construct
  source 1..75: mol_type = other DNA
gtgcgaagaaattcgcccactccaatggtcaactgaacgacaccctgaccgaagttgcggatggtacgctgcgca

SEQ ID NO: 615964 - DNA, 75 bp, synthetic construct
  source 1..75: mol_type = other DNA
agaagtaacggactcttcaactacttttgaagagagaaatgtattgatgcaggagaaaatgaaccgcatttataa

SEQ ID NO: 615965 - DNA, 75 bp, synthetic construct
  source 1..75: mol_type = other DNA
ggtgcgtatattcgttttcgtctgaccatcagggatgttgctaccggacaaactcgccaggagttctggaatgtt

SEQ ID NO: 615966 - DNA, 75 bp, synthetic construct
  source 1..75: mol_type = other DNA
tctgtatgccagcgatggtcgcacccgcaaagatccatcaaaaaaatacggttccggcggcctggtacagggcaa

SEQ ID NO: 615967 - DNA, 75 bp, synthetic construct
  source 1..75: mol_type = other DNA
atctgcgaaaacggttaactatctggccactgctttaaaagcttttattcacatccattacggggctgatgtggc

SEQ ID NO: 615968 - DNA, 75 bp, synthetic construct
  source 1..75: mol_type = other DNA
gatggtcgtacccgcaaagatccgtcgaaaaaatacggttccggcggcctggtacagggcaaaaaatatatgctt

SEQ ID NO: 615969 - DNA, 75 bp, synthetic construct
  source 1..75: mol_type = other DNA
acaccatccgaactggcaaaaaaactaaaaattcctgcattcgatgccgagttttcatttgtgatcatcaaaaca

SEQ ID NO: 615970 - DNA, 75 bp, synthetic construct
  source 1..75: mol_type = other DNA
ggttgtttatataggaaacacgattacaccatccgaactggcaaaaaaaactaaatattcctgcattcgatgccg

SEQ ID NO: 615971 - DNA, 75 bp, synthetic construct
  source 1..75: mol_type = other DNA
tgtctgacgaaggaggtactattctggataagcgtttcgaacgcaaatcggcactgtacaacacattatggagtg

SEQ ID NO: 615972 - DNA, 75 bp, synthetic construct
  source 1..75: mol_type = other DNA
tggagggcgttatcctttataattctagggggaaatatgtcgtcacgtataagcaaagtttagggggggaaatga

SEQ ID NO: 615973 - DNA, 75 bp, synthetic construct
  source 1..75: mol_type = other DNA
ataacccgcgctgttcaaagagccgtgaaacgctgaacttgctgaaagaaaacggcgtagagcctgaagtagtgc

SEQ ID NO: 615974 - DNA, 75 bp, synthetic construct
  source 1..75: mol_type = other DNA
ttataaagaactgaacctggctgacagttcgcttagcgaagaggcgctgattcaggcaatggtggataatccgaa

SEQ ID NO: 615975 - DNA, 75 bp, synthetic construct
  source 1..75: mol_type = other DNA
agccaaggtcaaggagcttgaaaagcgacttgagcgctttggtgagctatccgaaaccttatccgaaatggggtt

SEQ ID NO: 615976 - DNA, 75 bp, synthetic construct
  source 1..75: mol_type = other DNA
ttatttaatacctgtgcggcaaacggtggcagccagttggatcactctgcgttagtgcaggcgctggaattaatg

SEQ ID NO: 615977 - DNA, 75 bp, synthetic construct
  source 1..75: mol_type = other DNA
taaaaatatcaccctcgtgggcggtaacggcgacggtcaaacctgcaaagtggcaaatcagattatcgtggcgct

SEQ ID NO: 615978 - DNA, 75 bp, synthetic construct
  source 1..75: mol_type = other DNA
ggcaaacggcggcagccagttggatcactctgcattagtgcaggcgctggagttaatggcgaatcataaactcgc

SEQ ID NO: 615979 - DNA, 75 bp, synthetic construct
  source 1..75: mol_type = other DNA
gatggcatgcatgaagccggaatgaaaaccaccggtaaacacttcccagggcatggtgcggtaacggcagactca

SEQ ID NO: 615980 - DNA, 75 bp, synthetic construct
  source 1..75: mol_type = other DNA
gcagcttcgcgcaatcatctggtggtggcggtggatcaggaaggtgggcgtgtgcagcgttttcgtgaaggtttt

SEQ ID NO: 615981 - DNA, 75 bp, synthetic construct
  source 1..75: mol_type = other DNA
acgacctagcaatgcgcgtcgaagagacggctgcgttcgttcgatatgccaaagcaacgattgagagaatcttgc

SEQ ID NO: 615982 - DNA, 75 bp, synthetic construct
  source 1..75: mol_type = other DNA
gagggcatccctctggcagagatcaccttcactctgtgtgagtacctgggaaaaagaacgctgtttattggtgga

SEQ ID NO: 615983 - DNA, 75 bp, synthetic construct
  source 1..75: mol_type = other DNA
atcgtgataaagaaggcaaaatccacgctgattacaacgccttctgggaatcagttggcggtgagtgcgatgctg

SEQ ID NO: 615984 - DNA, 75 bp, synthetic construct
  source 1..75: mol_type = other DNA
aacctgttggcaaggatgggttttcaacgacggatcgctggtacatatattaaagctcccgaagcggtagttgag

SEQ ID NO: 615985 - DNA, 75 bp, synthetic construct
  source 1..75: mol_type = other DNA
gtattatgggcacaccgatggcagttaacctggcacgcgcaggccatcaactgcatgtgacgaccattggtccgg

SEQ ID NO: 615986 - DNA, 75 bp, synthetic construct
  source 1..75: mol_type = other DNA
aaacgtttcgctcgtcaggtgaatgaactgggcggcgattatctcgatgcgccagtctccggcggtgaaatcggc

SEQ ID NO: 615987 - DNA, 75 bp, synthetic construct
  source 1..75: mol_type = other DNA
atgaaactgggatttattggcttaggcattatgggtacaccgatggccattaatctggcgcgtgccggtcatcaa

SEQ ID NO: 615988 - DNA, 75 bp, synthetic construct
  source 1..75: mol_type = other DNA
aaaaatttcatttcgtatcagatatgtcagttatggtaacttgcattataaacgcctcgagattttcatttatga

SEQ ID NO: 615989 - DNA, 75 bp, synthetic construct
  source 1..75: mol_type = other DNA
taaaagcaacggcaaactgcgaccactgggtatccccgcgttgcgggatcgtataagcatccgtgccaaggtgga

SEQ ID NO: 615990 - DNA, 75 bp, synthetic construct
  source 1..75: mol_type = other DNA
taatggtgaagagcgcacatatcccgttactcccgctgtaagtggtcaatctggcacggccacatttgctataga

SEQ ID NO: 615991 - DNA, 75 bp, synthetic construct
  source 1..75: mol_type = other DNA
agaacgttttgctgcgttattacaggaaggagcgattaagcaaaatatcccaaccctgtttaccgactccactga

SEQ ID NO: 615992 - DNA, 75 bp, synthetic construct
  source 1..75: mol_type = other DNA
ggtatctgcttatttgtaaccaccgtagttgggcagatattgtcgtactgtgcgtgctgtttcgtaagcacattc

SEQ ID NO: 615993 - DNA, 75 bp, synthetic construct
  source 1..75: mol_type = other DNA
ccccgcgcaacgcttgcacgctgaatgcgaccaacgactacgaggccgtgcaggcctggctggcgctgcacgaga

SEQ ID NO: 615994 - DNA, 75 bp, synthetic construct
  source 1..75: mol_type = other DNA
cggcagtcaggccatgcagcagatgccaagtaatattgctcaggaaacggttaacaacttgatgaacagagcaga

SEQ ID NO: 615995 - DNA, 75 bp, synthetic construct
  source 1..75: mol_type = other DNA
aacggttcccgttggttttaccgcagcgatgcataagaaatatcgtactgaaaatattatattctccccggaatt

SEQ ID NO: 615996 - DNA, 75 bp, synthetic construct
  source 1..75: mol_type = other DNA
cgtcagattatcgaaggtgtttgccttgacccgcgtattggcaaccattacaacaatccgtcatttggctatggt

SEQ ID NO: 615997 - DNA, 75 bp, synthetic construct
  source 1..75: mol_type = other DNA
gaaggggccattaagcaaaatatcccgactttgttcaccgactcaactgaagcagaagcgattaaactgtttgcc

SEQ ID NO: 615998 - DNA, 75 bp, synthetic construct
  source 1..75: mol_type = other DNA
gttcggataacttccgcgcttcgtccattcaggggattatgaagcggatcaaagctaagggtgttgaagttatca

SEQ ID NO: 615999 - DNA, 75 bp, synthetic construct
  source 1..75: mol_type = other DNA
aagccgacgtcattatttccaaccgtatggcagaagagcttaaggatgtggcagacaaagtctacacccgcgatc

SEQ ID NO: 616000 - DNA, 75 bp, synthetic construct
  source 1..75: mol_type = other DNA
atctatcgcctgattatgaagagtggttcagataacttccgtgcgtcttctattcagggaattatgaagcgtatc

SEQ ID NO: 616001 - DNA, 75 bp, synthetic construct
  source 1..75: mol_type = other DNA
ttgctgcaccttaacccacacctgcaatgggaagttcacgggctggaggggttaagtaaaaagaactggtatcta

SEQ ID NO: 616002 - DNA, 75 bp, synthetic construct
  source 1..75: mol_type = other DNA
caaagcttactccactcgcgtgggcgcgggtccgttcccgaccgagctgtttgatgacaccggcgagttcctctg

SEQ ID NO: 616003 - DNA, 75 bp, synthetic construct
  source 1..75: mol_type = other DNA
ggcacgtcgcggtctgcgtgttggcgaccttttcgacaaagaaaccttctctgaaaaactgaaagaagtgatgga

SEQ ID NO: 616004 - DNA, 75 bp, synthetic construct
  source 1..75: mol_type = other DNA
aagcgtattgaagagctgaccggtgtgccgatcgatatcatctctaccggtccggatcgtactgaaaccatgatt

SEQ ID NO: 616005 - DNA, 75 bp, synthetic construct
  source 1..75: mol_type = other DNA
atgccgggctggtctgaatccactttcggcgtgaaagatcgtagcgggctgccgcaggcggcgctgaactacatc

SEQ ID NO: 616006 - DNA, 75 bp, synthetic construct
  source 1..75: mol_type = other DNA
ccccgttcgtgagcgtctgctgctgtctgaagcatgtccgctgatccttgattatcatgttgcgctggataacgc

SEQ ID NO: 616007 - DNA, 75 bp, synthetic construct
  source 1..75: mol_type = other DNA
aactggacgttctggatggcctgaaagaggtgaaactctgtgtggcttaccgtatgccggatggtcgtgaagtga

SEQ ID NO: 616008 - DNA, 75 bp, synthetic construct
  source 1..75: mol_type = other DNA
ttgcagacgcatctttttcgatggttgtattagaccctccgcatcttgagcgtgttggtgataacgcctggatgg

SEQ ID NO: 616009 - DNA, 75 bp, synthetic construct
  source 1..75: mol_type = other DNA
tgtattagaccctccgcatcttgagagtgttggtgataacgcctggatgggaaagaaatatggacggctgaataa

SEQ ID NO: 616010 - DNA, 75 bp, synthetic construct
  source 1..75: mol_type = other DNA
tttgtgattttatgatgtattgctggtgcgaagggctggcgctattactgcaccttaatccacatttgcgatggg

SEQ ID NO: 616011 - DNA, 75 bp, synthetic construct
  source 1..75: mol_type = other DNA
ctcagccggagcgaagcggaatctacaacactgtatgaaaccctaacgcgctatgaaaaagagattgttcccggc

SEQ ID NO: 616012 - DNA, 75 bp, synthetic construct
  source 1..75: mol_type = other DNA
accgttgtgacgacaaagaatgaaataaccactgagatagaccatatcattgcagcaacacattcatcagtattg

SEQ ID NO: 616013 - DNA, 75 bp, synthetic construct
  source 1..75: mol_type = other DNA
gtcagaaatggcgagaggtgtttggctcagccggagcgaagcggaatctacaacactgtatgaaaccctaacgcg

SEQ ID NO: 616014 - DNA, 75 bp, synthetic construct
  source 1..75: mol_type = other DNA
aattgccgaaagtcgtgcaaacaaagacgaagggccgaagaacatcgccgatgtgctcgacgcaaccgtggcgcg

SEQ ID NO: 616015 - DNA, 75 bp, synthetic construct
  source 1..75: mol_type = other DNA
tgccgaagccggttttgatccacaagggcgtaccagtgaagatctgctcgaccttgctgaatcccgcgtctttaa

SEQ ID NO: 616016 - DNA, 75 bp, synthetic construct
  source 1..75: mol_type = other DNA
aaccgctggcttgcagccgtcggatttgatcatcgttgccgcgcgtccgtcgatgggtaaaacaacatttgcgat

SEQ ID NO: 616017 - DNA, 75 bp, synthetic construct
  source 1..75: mol_type = other DNA
tggttatggaaatactaaatgggacatgaatccgtccgaagttgttgcggcccagggtaatggcgcacatctgat

SEQ ID NO: 616018 - DNA, 75 bp, synthetic construct
  source 1..75: mol_type = other DNA
tggtcatttctggaatcatggcacagactgttgttcggtacatcccaaacagccgggtcgcaagcgatacttcga

SEQ ID NO: 616019 - DNA, 75 bp, synthetic construct
  source 1..75: mol_type = other DNA
agatgatctcagttgcgaatgagattgccgaagccggttttgatccgcaagggcgcaccagtgaagacttgctcg

SEQ ID NO: 616020 - DNA, 75 bp, synthetic construct
  source 1..75: mol_type = other DNA
gcgatcttgttgttttgcctgcatatcgtagtgatcctgggcttgttgtgcttaacaaagcacatatagaaattg

SEQ ID NO: 616021 - DNA, 75 bp, synthetic construct
  source 1..75: mol_type = other DNA
cgcagcacctggtagtctttcaggaagttattagaagtggttctatcggctcggctgcaaaagagttagggttaa

SEQ ID NO: 616022 - DNA, 75 bp, synthetic construct
  source 1..75: mol_type = other DNA
ccatgttcaaaatgaacagccaatagaaaataagagtcactctatagcaaaaagaagagaaagatcatgcgcggt

SEQ ID NO: 616023 - DNA, 75 bp, synthetic construct
  source 1..75: mol_type = other DNA
cgaatacctgtcatggcagttcaccattggtctttgtgccacgctggcccgaagtcgaaatgagcgacctgacac

SEQ ID NO: 616024 - DNA, 75 bp, synthetic construct
  source 1..75: mol_type = other DNA
cgcctacgtaaacatttatcactgacggaagagtctctctggcaaaaatgtgcacaaaaacttattgccgcaatt

SEQ ID NO: 616025 - DNA, 75 bp, synthetic construct
  source 1..75: mol_type = other DNA
ccgataccgaatacgccatgttacattttggactcaaagggttacctgggttagtaaactcacttgcacgctatc

SEQ ID NO: 616026 - DNA, 75 bp, synthetic construct
  source 1..75: mol_type = other DNA
aaagtgctgtgcgaatccgatgccactgcccgccgcagcgcctggaaggcactgttcagcccgggcgaggacatg

SEQ ID NO: 616027 - DNA, 75 bp, synthetic construct
  source 1..75: mol_type = other DNA
cactgattgtctggtggctgatgtatggcgggtttcttggtcttgagcgggttgaaacccggcaatggggcgggc

SEQ ID NO: 616028 - DNA, 75 bp, synthetic construct
  source 1..75: mol_type = other DNA
tgaaccgcctttccagcacggtttacgtgatgatgatcctgagcgtaacgaagcagccgctaacggtgaagcaga

SEQ ID NO: 616029 - DNA, 75 bp, synthetic construct
  source 1..75: mol_type = other DNA
ttctgacgaagatctgcatcggctttctcaccagccgctgcgttatctcgaccacgatcatctggtgccggaagc

SEQ ID NO: 616030 - DNA, 75 bp, synthetic construct
  source 1..75: mol_type = other DNA
acgccaacatcagtgaaaacaacgatgtgatgaacccgcatcgtatattcatcaaagattttaactggtcaaaac

SEQ ID NO: 616031 - DNA, 75 bp, synthetic construct
  source 1..75: mol_type = other DNA
ccacagttaaagcgaatgagtttcttaacggctcgaaagagcgtaatccgttcacccgcgcacaaactgaaatgg

SEQ ID NO: 616032 - DNA, 75 bp, synthetic construct
  source 1..75: mol_type = other DNA
cctcgcgcccggcgagccataactcaagccgcgcgatggtgtgggtgcgaaaaaatctgttctccagctggagca

SEQ ID NO: 616033 - DNA, 75 bp, synthetic construct
  source 1..75: mol_type = other DNA
atgaatgctgtattaagtgttcagggctctgctgtccctgaaaaaaccaaaccgtcttttatgtcccgcgttttc

SEQ ID NO: 616034 - DNA, 75 bp, synthetic construct
  source 1..75: mol_type = other DNA
gtccgggagctatctgaggaatttaacgtttgcgaaaaaactattcgtcgtgatcttactcagcgcctgtgctat

SEQ ID NO: 616035 - DNA, 75 bp, synthetic construct
  source 1..75: mol_type = other DNA
cttttccgggattatgctctatttcgaccgtcctttcagtattggcgactggatccgttcaccggacagaaatat

SEQ ID NO: 616036 - DNA, 75 bp, synthetic construct
  source 1..75: mol_type = other DNA
ttcgcgtcttggcaatattatgcgcgccgatgcgctgggggaaccgctgggctgccaggcgattgtcgggctttc

SEQ ID NO: 616037 - DNA, 75 bp, synthetic construct
  source 1..75: mol_type = other DNA
cccggatttcgaaatgggggaatacaagcgccaggatctggtttatgagaaagaggatctgctgatctccggtcc

SEQ ID NO: 616038 - DNA, 75 bp, synthetic construct
  source 1..75: mol_type = other DNA
aaatggcgatttgagaaggacagaccgtgtaaaggcgtgaagaaaacgtttatctttagtccttctgcaccctga

SEQ ID NO: 616039 - DNA, 75 bp, synthetic construct
  source 1..75: mol_type = other DNA
gaataagcctaaacaatccagcgccctggatttctcaatggattattctggctcccaggggtgtgcaaccattgg

SEQ ID NO: 616040 - DNA, 75 bp, synthetic construct
  source 1..75: mol_type = other DNA
agcgacatttgggcaccgttacgcgccctcacccgcagcagttccaacgcacgcacctcaactcgccgcagtcac

SEQ ID NO: 616041 - DNA, 75 bp, synthetic construct
  source 1..75: mol_type = other DNA
cgaaacgctacgcggcgtcgaaacggtaattattgatgaagtccacgcggtagcgggcagtaaacgtggtgcgca

SEQ ID NO: 616042 - DNA, 75 bp, synthetic construct
  source 1..75: mol_type = other DNA
ccctgaaactgtccggaaaaatccacaaacagcttgaaagtattgcccgaagtcgtggcgaccccccacccaaaa

SEQ ID NO: 616043 - DNA, 75 bp, synthetic construct
  source 1..75: mol_type = other DNA
attttcttcatttactggcggatggcgcgttcttttccgggactattccccgtggctggcagaagaaaatacgaa

SEQ ID NO: 616044 - DNA, 75 bp, synthetic construct
  source 1..75: mol_type = other DNA
tattattttgcactctccctatggaagacgggtgcatgaaccctgggcgctggcgattgccgggcgaatacatgc

SEQ ID NO: 616045 - DNA, 75 bp, synthetic construct
  source 1..75: mol_type = other DNA
ctgctccgggtcgttctgcccggctccctttctggcgtggtgaaggtaacggacgtccggcagaattaggcgaga

SEQ ID NO: 616046 - DNA, 75 bp, synthetic construct
  source 1..75: mol_type = other DNA
ttttgcgtcaggaattgggttttgacggcgtgattttctctgacgatttatcgatggaaggtgccgcgattatgg

SEQ ID NO: 616047 - DNA, 75 bp, synthetic construct
  source 1..75: mol_type = other DNA
tattgatatcagctttgcgccagtgctggacgtcgggcatatcagcgcggcgattggcgagcgttcttatcatgc

SEQ ID NO: 616048 - DNA, 75 bp, synthetic construct
  source 1..75: mol_type = other DNA
ggttggctgatggccagcgaaatgatcgctatggatattgatatcagctttgcgccagtgctggatgtcgggcat

SEQ ID NO: 616049 - DNA, 75 bp, synthetic construct
  source 1..75: mol_type = other DNA
ctctgaaactgtccggaaaaatccacaaacagcctgaaagtattgcccgaagtcgtggcgaccccccacccaaaa

SEQ ID NO: 616050 - DNA, 75 bp, synthetic construct
  source 1..75: mol_type = other DNA
cactgaaactgtccggaaaaatccacaaacagcatgaaagtattgcccgaagtcgtggcgacccccctcccaaaa

SEQ ID NO: 616051 - DNA, 75 bp, synthetic construct
  source 1..75: mol_type = other DNA
atcctggtctgcaataatcgtaaaggggccgtcagcgtgttagataatctgtcaccgatcaaggcagagcgtgtt

SEQ ID NO: 616052 - DNA, 75 bp, synthetic construct
  source 1..75: mol_type = other DNA
tcgatgcaaacgctttgtcgaagtatggaagactccgggcgaattatgcgaggtcgttttgtagaaggtctgggt

SEQ ID NO: 616053 - DNA, 75 bp, synthetic construct
  source 1..75: mol_type = other DNA
gatctctttctacgctatctgcggactcatgccctggtcacggctgaacaacttgcccgtgattttggcctcggt

SEQ ID NO: 616054 - DNA, 75 bp, synthetic construct
  source 1..75: mol_type = other DNA
tcctgacaccgatggcaaattgcctgatgctgccattttcttgtttgagccggaaaagttgctgcaaattgtccg

SEQ ID NO: 616055 - DNA, 75 bp, synthetic construct
  source 1..75: mol_type = other DNA
ttgcaccgactggctccgggaaaacgctggcagcatttctctacgccctcgatcagctcttccgcgaagagcggc

SEQ ID NO: 616056 - DNA, 75 bp, synthetic construct
  source 1..75: mol_type = other DNA
ggtgccatagaggaatatacacagtggttaaaaaaagaaccacgggcatcttatttttttctgttccggctgtat

SEQ ID NO: 616057 - DNA, 75 bp, synthetic construct
  source 1..75: mol_type = other DNA
ccacggggtttccatcgcaaccgaagattgccggtcccagagaaaagccgatgcgcaccgtgcatccggataaaa

SEQ ID NO: 616058 - DNA, 75 bp, synthetic construct
  source 1..75: mol_type = other DNA
cagaaaagttgctgcaaattgtccgcgaggcggtaggcagctcggcacttttcgccgcccgttttcgcgaatgcg

SEQ ID NO: 616059 - DNA, 75 bp, synthetic construct
  source 1..75: mol_type = other DNA
cgcactcactacccgaaatctacctgcaccgcgtaaattacccgcttcgcgatctctttctgcgctatctccgga

SEQ ID NO: 616060 - DNA, 75 bp, synthetic construct
  source 1..75: mol_type = other DNA
atcgcggcgggtgggtgaactggatgaggagatggtgtatgagtcgcgggtgaacgatattatcacccttggcgc

SEQ ID NO: 616061 - DNA, 75 bp, synthetic construct
  source 1..75: mol_type = other DNA
ggcatacaggcagcagtgaagaggttgcgtcgtatctggaaaaatcttcttgcagtaaaacgaatcttcccagcg

SEQ ID NO: 616062 - DNA, 75 bp, synthetic construct
  source 1..75: mol_type = other DNA
gatgaatctgcaacaagacgtctgggtaagcgatgacgtttttcgtcgtctgcgtttacgttcgctgcaggccgc

SEQ ID NO: 616063 - DNA, 75 bp, synthetic construct
  source 1..75: mol_type = other DNA
ttgcgcaatttactcgggcaagtcgatcctggtgaattgcttgatcctctggtgattcgtcaagttgaagaagag

SEQ ID NO: 616064 - DNA, 75 bp, synthetic construct
  source 1..75: mol_type = other DNA
atatcccgatttcccgatcattctggaaaccctgcgcgagtgcctgcaggatgtttatgatcttcccgcgctgga

SEQ ID NO: 616065 - DNA, 75 bp, synthetic construct
  source 1..75: mol_type = other DNA
cgcagtaatttgcgtacgggtgatttagttctgttccgtgccggttcaacgggacgccatgtcggtatttatatc

SEQ ID NO: 616066 - DNA, 75 bp, synthetic construct
  source 1..75: mol_type = other DNA
tggccccgaaggcaaaaacaccggattaccgcgcaacggataacggcagacagaacacgtacttttcctcgctgg

SEQ ID NO: 616067 - DNA, 75 bp, synthetic construct
  source 1..75: mol_type = other DNA
catttgcaagacgtcatggaattaaacctaatccgttataccagcagggatgcagtcgtgtcggttgtatgccct

SEQ ID NO: 616068 - DNA, 75 bp, synthetic construct
  source 1..75: mol_type = other DNA
taagcacaggatatatgtcattagctgataaaaatgaacctgaaagattgtatatggagtcaaaagggattgttc

SEQ ID NO: 616069 - DNA, 75 bp, synthetic construct
  source 1..75: mol_type = other DNA
cttctttctttgcccttgatgggtttacccggaaagtgattgacagaatacaacgtcaattagatgtatgtgaag

SEQ ID NO: 616070 - DNA, 75 bp, synthetic construct
  source 1..75: mol_type = other DNA
aaaacaagcacgtataatagaagctgtaaattatataaataacaaacaatggcaggggaaagcattgcttgggag

SEQ ID NO: 616071 - DNA, 75 bp, synthetic construct
  source 1..75: mol_type = other DNA
gcattatgcatctgttcagtacgcgtacttcttccggcattttgtacgaagtggatgcgcggctgcgtccgtccg

SEQ ID NO: 616072 - DNA, 75 bp, synthetic construct
  source 1..75: mol_type = other DNA
aacgaacgcgaaggtcgtggttttgcggtggtcggctacggtaagctgggtggctgggagttaggttacagttcc

SEQ ID NO: 616073 - DNA, 75 bp, synthetic construct
  source 1..75: mol_type = other DNA
ccggaggactggctgcaggcagagatgcagggtgagattgtggcgctggtgagaacgccggagggggaaagatat

SEQ ID NO: 616074 - DNA, 75 bp, synthetic construct
  source 1..75: mol_type = other DNA
gaacaagggagcaggcaagcctggagtaatgttccagttcggcatataaaaaatccggatgaacctttcagtgtt

SEQ ID NO: 616075 - DNA, 75 bp, synthetic construct
  source 1..75: mol_type = other DNA
aatcagccttgggaggtgccatgagcggtgcggcatcaggggcgatgattggctctgtggtgaaccgccccgggt

SEQ ID NO: 616076 - DNA, 75 bp, synthetic construct
  source 1..75: mol_type = other DNA
atgtcaccagctcacagctatccatgaaggatgtgcagacacatctcgattactgtgttgaacagctacgaagac

SEQ ID NO: 616077 - DNA, 75 bp, synthetic construct
  source 1..75: mol_type = other DNA
cagaacctgtacctggacaatatggagggaacgggcttttaccgggtgcccctgtcctctgcacaggcgggcgat

SEQ ID NO: 616078 - DNA, 75 bp, synthetic construct
  source 1..75: mol_type = other DNA
ccgggcagacatacgccaacaacatgagcagcattgcacagcaaagcgcagctcttgccgctgctaatgccaata

SEQ ID NO: 616079 - DNA, 75 bp, synthetic construct
  source 1..75: mol_type = other DNA
gagcagcattgcgcagcaaagcgcagcacttgccgctgctaacgccaataaaccatcaggccttcagacagcaat

SEQ ID NO: 616080 - DNA, 75 bp, synthetic construct
  source 1..75: mol_type = other DNA
cgaactcgaaccacaatctgccagttgcgccaaatctgctgaaccagacgttcgctcctacagcaccaaatcagg

SEQ ID NO: 616081 - DNA, 75 bp, synthetic construct
  source 1..75: mol_type = other DNA
taagccaaatccactttaccagcagggctgtagtcgggttggatgcatgccatgtatccatgccagaaaatcaga

SEQ ID NO: 616082 - DNA, 75 bp, synthetic construct
  source 1..75: mol_type = other DNA
gattgccggtgttaacggtcagacgtttggccagaccaccgggatgagactgacgcaggtcagaaatctttgtga

SEQ ID NO: 616083 - DNA, 75 bp, synthetic construct
  source 1..75: mol_type = other DNA
ttgctgagaaatggcctgtttctctggttgaagagtgcggaatgtctccgggggaagcggcagagcgcatcaatt

SEQ ID NO: 616084 - DNA, 75 bp, synthetic construct
  source 1..75: mol_type = other DNA
tgcgcatacgattaccgggtcatacaggagcagtttggtctgaaaacatcaatgtcgcgtaaaggtaactgttac

SEQ ID NO: 616085 - DNA, 75 bp, synthetic construct
  source 1..75: mol_type = other DNA
ggttaacgattgtggaatgtcggaagaagaagcgcaccagcgcatcagttgtgcgctggaaattctcaaaccaac

SEQ ID NO: 616086 - DNA, 75 bp, synthetic construct
  source 1..75: mol_type = other DNA
aaccgtgcgcggctggcgtgggcaatggatttcgctgactggccgcaactgaccggggcactgaccggacatatg

SEQ ID NO: 616087 - DNA, 75 bp, synthetic construct
  source 1..75: mol_type = other DNA
gggttcagccctgagtgccggtggtttttctgccaccacgatgctgttttcactgggggccagcatgatactggg

SEQ ID NO: 616088 - DNA, 75 bp, synthetic construct
  source 1..75: mol_type = other DNA
gtgattcatattgtaccgaggctggcaggggccgggggaaatggtgtttttcaggtggtgctgggggctgcagcc

SEQ ID NO: 616089 - DNA, 75 bp, synthetic construct
  source 1..75: mol_type = other DNA
cagtacttactttcagtgattttgtgcaggacagcgtgattgcgcatccagagtggctgacggaactggaaagcc

SEQ ID NO: 616090 - DNA, 75 bp, synthetic construct
  source 1..75: mol_type = other DNA
atgaagccgctctcttcaccgttacagcagtactggcagaccgttgttgagcggctgccagagcctttagccgag

SEQ ID NO: 616091 - DNA, 75 bp, synthetic construct
  source 1..75: mol_type = other DNA
gggggtaaacatgcgtgatgatcgttttaattccctgaaacgggaatttgatggcgcaccggaagatgcagcggg

SEQ ID NO: 616092 - DNA, 75 bp, synthetic construct
  source 1..75: mol_type = other DNA
acgactgtaaaagattttgatgataatcctgtaggcgctctgccctcctttgctgcatgttcgcgggttgttgaa

SEQ ID NO: 616093 - DNA, 75 bp, synthetic construct
  source 1..75: mol_type = other DNA
gagtcagatgagtcagatgagtcgtatgagtcagatggcgacttcatttactcctactcgcccggcaccaccgcc

SEQ ID NO: 616094 - DNA, 75 bp, synthetic construct
  source 1..75: mol_type = other DNA
aagatcatttagctgcctatgaactatcgaaagcgtctgagactgtaagctttaagccaacccgtcaggcacccc

SEQ ID NO: 616095 - DNA, 75 bp, synthetic construct
  source 1..75: mol_type = other DNA
tcagccactgcgtggtttactggctccgttggctgaggaaatgcgttgtcacggggcggataaaaacgatatttt

SEQ ID NO: 616096 - DNA, 75 bp, synthetic construct
  source 1..75: mol_type = other DNA
atgattaacctgtcaatttctgaccttaacagcattcagtttgatgagaaattcaccgggcagctactggttaac

SEQ ID NO: 616097 - DNA, 75 bp, synthetic construct
  source 1..75: mol_type = other DNA
aaagggaaagaagcgattgccctgattaaagccccgtgggtaacgctggcaacggaagactgtggactgaaattc

SEQ ID NO: 616098 - DNA, 75 bp, synthetic construct
  source 1..75: mol_type = other DNA
tcatgaaaaaccgaagttaacgcgctggtcagacaacgtgcgcattctggaactgctggcgcaaaacgacattat

SEQ ID NO: 616099 - DNA, 75 bp, synthetic construct
  source 1..75: mol_type = other DNA
gagtggctgacggaactggaaagccaaccgccgcaggccgacgaatggcagcattacgcggcatggttgcaggag

SEQ ID NO: 616100 - DNA, 75 bp, synthetic construct
  source 1..75: mol_type = other DNA
ccgctacggtaaaccgaatcacctgaacgaacgcgaagggcgtggttttgcggtggtcggctacggcaagctggg

SEQ ID NO: 616101 - DNA, 75 bp, synthetic construct
  source 1..75: mol_type = other DNA
ccaacactcagcgccattgccgcgctgcatctgctttctgaaaacgatgccgaacaattgcgagtggcatatctg

SEQ ID NO: 616102 - DNA, 75 bp, synthetic construct
  source 1..75: mol_type = other DNA
actggataacgctcagttctttacccgcatgggccagcggctgattaaagtgttggatcaaccaacgcaggatgg

SEQ ID NO: 616103 - DNA, 75 bp, synthetic construct
  source 1..75: mol_type = other DNA
atggggcagcggctgattaaagtgctggatcaaccaacgcaggatggcttcgtctatcgcgtggatatgcggctg

SEQ ID NO: 616104 - DNA, 75 bp, synthetic construct
  source 1..75: mol_type = other DNA
aaattatgacactgccgcgtgaaggtaaaaacctacaaacggaagtgcgggaaatgcgcgagaaaatgcgcgctc

SEQ ID NO: 616105 - DNA, 75 bp, synthetic construct
  source 1..75: mol_type = other DNA
atgaacttcatcatctggcattacaggaattgccgggccatgtgccggaggattgcttcaccgcagagcgtgaac

SEQ ID NO: 616106 - DNA, 75 bp, synthetic construct
  source 1..75: mol_type = other DNA
cacatctgctaagagatgtctgtacacgtgaagacgctactgtaacgctgtcgcgcattacggccttgctggtgg

SEQ ID NO: 616107 - DNA, 75 bp, synthetic construct
  source 1..75: mol_type = other DNA
aactcaggaagagtcgctgtcggaacagtggcgtgagctgtggcaggatgcgttgcaggaagatgacactacgcc

SEQ ID NO: 616108 - DNA, 75 bp, synthetic construct
  source 1..75: mol_type = other DNA
gagcgatcacttaacctggctggcagaagccatgatagatgctgtcgtacaacaggcatgggttcaaatggttgc

SEQ ID NO: 616109 - DNA, 75 bp, synthetic construct
  source 1..75: mol_type = other DNA
tcgcgcattaccgccttgctggtggggattgttacccgcaccacctatttagaattgctcagtgaattccccgcg

SEQ ID NO: 616110 - DNA, 75 bp, synthetic construct
  source 1..75: mol_type = other DNA
atcgcctgggcgcaaacgctggcactggttactgaagagagcatattgcagcagctcagccatctggcggagacg

SEQ ID NO: 616111 - DNA, 75 bp, synthetic construct
  source 1..75: mol_type = other DNA
gtacttttcgtcactggacaacatgattgcccagggtaacccgatgccggtgccttacggggaaatgctggttgg

SEQ ID NO: 616112 - DNA, 75 bp, synthetic construct
  source 1..75: mol_type = other DNA
cactggcgtggtttatggacatgttgccagaaagcaacgagccgatgacgcaagagctgattatggtgccaacgc

SEQ ID NO: 616113 - DNA, 75 bp, synthetic construct
  source 1..75: mol_type = other DNA
cgcctctggcgtgcgtatcgtctcccgggaaccgttaaaccgtcgggcaatactgattattgcgctgtcgctggc

SEQ ID NO: 616114 - DNA, 75 bp, synthetic construct
  source 1..75: mol_type = other DNA
acgatttataaataccgctgtgtgccgcatcttaccggacggcgctttgagcacggggtgacggactgttatacg

SEQ ID NO: 616115 - DNA, 75 bp, synthetic construct
  source 1..75: mol_type = other DNA
gtgaacacggcagcggaagccatccgcgccctgtcgatgcaggtgccgggctttcgccgtcagatgaacgaaggc

SEQ ID NO: 616116 - DNA, 75 bp, synthetic construct
  source 1..75: mol_type = other DNA
gggcagcaatggcgctggggggtgtcgcacaactgctggccccgaaggcaaagacgccggagtacagaagcacgg

SEQ ID NO: 616117 - DNA, 75 bp, synthetic construct
  source 1..75: mol_type = other DNA
gattatcggcctgtcgctaatacaggttgggttaacgtccattggcggcggttatgcggccatgaacgataacac

SEQ ID NO: 616118 - DNA, 75 bp, synthetic construct
  source 1..75: mol_type = other DNA
gatgccggtgccttacggggaaatgctggttggttcacgacgtatctctcaggacatcagcacccgtgatgaagg

SEQ ID NO: 616119 - DNA, 75 bp, synthetic construct
  source 1..75: mol_type = other DNA
gaaatcgtcgtccgcgtattaccagtgctgccactgcccggagcatttttactatcgcgatctcgaaaaaatgga

SEQ ID NO: 616120 - DNA, 75 bp, synthetic construct
  source 1..75: mol_type = other DNA
ataacacgacgctcggcgaactctggagcgacgtggccagcgagcagctggagcacgatattctggttaatcgcc

SEQ ID NO: 616121 - DNA, 75 bp, synthetic construct
  source 1..75: mol_type = other DNA
agaacgccggagggggagcggtatatcccttgtgtgaatatctctgcagagccggaggcgtattttcgtattgca

SEQ ID NO: 616122 - DNA, 75 bp, synthetic construct
  source 1..75: mol_type = other DNA
ccgaagacgttgcttgccgaagataaagaccataaccaacgtgaagagaacaagaacagtcagaatctattgatc

SEQ ID NO: 616123 - DNA, 75 bp, synthetic construct
  source 1..75: mol_type = other DNA
atacaggtaaggatgggttcgtttataatgatgatcgcaaatttacacctgagcagctttcggaactggcaggta

SEQ ID NO: 616124 - DNA, 75 bp, synthetic construct
  source 1..75: mol_type = other DNA
ttcaatcaattccctgcttctaacccaataacaaatagcaaacattataattggatggatgaaagaggcatttac

SEQ ID NO: 616125 - DNA, 75 bp, synthetic construct
  source 1..75: mol_type = other DNA
ggttcagccctggcagccggtggtttttctgccaccacgatgctgttttctctgggggccagcatgattctgggt

SEQ ID NO: 616126 - DNA, 75 bp, synthetic construct
  source 1..75: mol_type = other DNA
ctgccaccacgatgctgttttcactgggtgccagcatgatactgggtggtgtggcacagatgctggccccgaagc

SEQ ID NO: 616127 - DNA, 75 bp, synthetic construct
  source 1..75: mol_type = other DNA
attttatctgttttatgcgatgagttaaaaaaaatactgtttatgatgatatcattgaagctgcgggtgaattag

SEQ ID NO: 616128 - DNA, 75 bp, synthetic construct
  source 1..75: mol_type = other DNA
aaattactgcttttgataaatcgactaatgtcagacgtgctacagcatttgctatttctgttatcaatgataaag

SEQ ID NO: 616129 - DNA, 75 bp, synthetic construct
  source 1..75: mol_type = other DNA
ggtgacggactgttatacgctgttccgggatgcttaccatcttgcggggattgagatgcctgattttactcgcga

SEQ ID NO: 616130 - DNA, 75 bp, synthetic construct
  source 1..75: mol_type = other DNA
accgatcttgtaaaaataggaacaaaaaaggattcattagttcttgacttttttgctggctctggtacgacagca

SEQ ID NO: 616131 - DNA, 75 bp, synthetic construct
  source 1..75: mol_type = other DNA
taccaactaaaaagccaaaatcaatttggtataaacctgaatatagtacaagcacggcgacaactgagcttaaaa

SEQ ID NO: 616132 - DNA, 75 bp, synthetic construct
  source 1..75: mol_type = other DNA
acggggctgtcaccctgtatcgcgcgcctttccagacgcttccactaacacacacactgattcaggctctgggct

SEQ ID NO: 616133 - DNA, 75 bp, synthetic construct
  source 1..75: mol_type = other DNA
ttgagatgccggattttcaccgcgaggatgagtggtggcgcaatggccagaacctgtatctggacaatatggagg

SEQ ID NO: 616134 - DNA, 75 bp, synthetic construct
  source 1..75: mol_type = other DNA
gagtcagatttcacagcaaagcgcggcgctggctgcggcaaacgccaaccgaccgtcagcattgcaatctgctat

SEQ ID NO: 616135 - DNA, 75 bp, synthetic construct
  source 1..75: mol_type = other DNA
ccgggcagacgtacgccaacaacatgagcagcattgcacagcaaagcgcagctcttgccgctgctaatgccagta

SEQ ID NO: 616136 - DNA, 75 bp, synthetic construct
  source 1..75: mol_type = other DNA
atcgcaccaacgcttggtcagcagtggctgtctggtcagatgaacaactaccagaatctggcaaacgttgggctt

SEQ ID NO: 616137 - DNA, 75 bp, synthetic construct
  source 1..75: mol_type = other DNA
cgcagacctgcaaaatcagcagttcaacaccatcatgaacaacctgaagccgtttactcctctggctgggaagta

SEQ ID NO: 616138 - DNA, 75 bp, synthetic construct
  source 1..75: mol_type = other DNA
ttaaccagtattacaactctcagcagtacaaagatcttgctggtcaggctcgctatcagagtctggctgcagcgg

SEQ ID NO: 616139 - DNA, 75 bp, synthetic construct
  source 1..75: mol_type = other DNA
tgtcggcagcctcgagaacttatcgtctctggaagggcaaggtcaggcacttaaccagtattacaactctcagca

SEQ ID NO: 616140 - DNA, 75 bp, synthetic construct
  source 1..75: mol_type = other DNA
gagcagcattgcacagcaaagcgcagctcttgccgctgctaatgccaataaaccatcaagtcttcagactgcaat

SEQ ID NO: 616141 - DNA, 75 bp, synthetic construct
  source 1..75: mol_type = other DNA
tggtgctgcatccggtgcgcttttgggtggtggcatagccagtgctctcgagctatcaactccgtggggtgctgg

SEQ ID NO: 616142 - DNA, 75 bp, synthetic construct
  source 1..75: mol_type = other DNA
agcagacaagcaagatcagcagttcaacaccatcatgaacaacctgaagccgtttactcctctggctgataagta

SEQ ID NO: 616143 - DNA, 75 bp, synthetic construct
  source 1..75: mol_type = other DNA
ggcagcagcatctgcggctaatgctaaccgaccatcaggactgcaatcagccttgggaggtgccatgagcggtgc

SEQ ID NO: 616144 - DNA, 75 bp, synthetic construct
  source 1..75: mol_type = other DNA
ctactggccaacggaaggatatgaatttaccagcccgaaaccggtgattgctgacgggcaactgttcgtgggtct

SEQ ID NO: 616145 - DNA, 75 bp, synthetic construct
  source 1..75: mol_type = other DNA
cagagcgtaaaactgatcccggccccgcatttgattgggtgcggtttcgcgccctggtcagcaaggagacaacat

SEQ ID NO: 616146 - DNA, 75 bp, synthetic construct
  source 1..75: mol_type = other DNA
gctggggccggacttgcgaaattaattggttcatcaactccgtggggggctgcgatcggaggcggtcttggtctg

SEQ ID NO: 616147 - DNA, 75 bp, synthetic construct
  source 1..75: mol_type = other DNA
cgcgcccaagtcaggataaagacgacgaacaagaagtgttctacaccaccgcactagcccaggatcaggccgatg

SEQ ID NO: 616148 - DNA, 75 bp, synthetic construct
  source 1..75: mol_type = other DNA
gcagagctactcctgctcgctggagcaaatctctgacttccgccacgaaatgcgctaccagttctggcatgattt

SEQ ID NO: 616149 - DNA, 75 bp, synthetic construct
  source 1..75: mol_type = other DNA
atggatcaggccggcattattcgcgaccttttaatctggctggaaggtcatctggatcatcccctgtcgctcgac

SEQ ID NO: 616150 - DNA, 75 bp, synthetic construct
  source 1..75: mol_type = other DNA
ccaaccatgatggcggcgctcttcggcacactgatgctggcaagctgcaccgaaatggtaatctcccgcgttttg

SEQ ID NO: 616151 - DNA, 75 bp, synthetic construct
  source 1..75: mol_type = other DNA
ccgtaattttagaggcgcaggatgtgttgataacctacaaaggaaagctaccgggaagaattactggttctctga

SEQ ID NO: 616152 - DNA, 75 bp, synthetic construct
  source 1..75: mol_type = other DNA
atgtttacctacgaaggtctgggaaccggcgtgcaagaatttatcctgacggtgtacggtacgtgcatgccaatg

SEQ ID NO: 616153 - DNA, 75 bp, synthetic construct
  source 1..75: mol_type = other DNA
ttgggtggggtatatatagatagcggcctgattggtagcatgatggttagttttatgactggttttattattgtc

SEQ ID NO: 616154 - DNA, 75 bp, synthetic construct
  source 1..75: mol_type = other DNA
tccatcacctaaaagaacgtctgatgatgaaccaaaccaattaagcattgaccgccaagtcattgatatgcactg

SEQ ID NO: 616155 - DNA, 75 bp, synthetic construct
  source 1..75: mol_type = other DNA
gccggtgcaggtcttgccagccttttgggaacttcaacgccttggggcgctggcattggtgctggtatcggattg

SEQ ID NO: 616156 - DNA, 75 bp, synthetic construct
  source 1..75: mol_type = other DNA
ttatcttatatagtatcgagtattcttctcaagaaaggaatcaagaaaattataattgtagggatggttgcctta

SEQ ID NO: 616157 - DNA, 75 bp, synthetic construct
  source 1..75: mol_type = other DNA
gtatgtcacggacacaccggaaaagacattattcccggtaaaacgtataccgaagcagaatgcaaagccctcctg

SEQ ID NO: 616158 - DNA, 75 bp, synthetic construct
  source 1..75: mol_type = other DNA
aggcgctggcatgggtggagcgtaatataaaagttccactgaccgagccgcaaaaagcaggtatcgcgtcattct

SEQ ID NO: 616159 - DNA, 75 bp, synthetic construct
  source 1..75: mol_type = other DNA
gtgtttcccgtcgacgttttataaacgaattaatgcaggcgaccgcaggggagcgtgtgaagcgattcgctggtg

SEQ ID NO: 616160 - DNA, 75 bp, synthetic construct
  source 1..75: mol_type = other DNA
cgcaccctgatagggcagcgtgaaattcatgcttcaactcgcacaacccgacttgcaaatgccagaacgatcgcc

SEQ ID NO: 616161 - DNA, 75 bp, synthetic construct
  source 1..75: mol_type = other DNA
ctgatgccgtatttgcagtaccagcgtacggcccacagaatgatgtcacgctgaaaatgccggcctttgaatggg

SEQ ID NO: 616162 - DNA, 75 bp, synthetic construct
  source 1..75: mol_type = other DNA
agaaaaacgagctcaggccgagcgaataatgaatgacatggaatcctgtggtgtggacatcggcttgctaaatga

SEQ ID NO: 616163 - DNA, 75 bp, synthetic construct
  source 1..75: mol_type = other DNA
cgtgatgccttcgtgctggcttctgtcggttgtcgtgtacggatgctggagcgtaatccggtagttgccgcgctg

SEQ ID NO: 616164 - DNA, 75 bp, synthetic construct
  source 1..75: mol_type = other DNA
agtcgatgccactgcaggtttggggcgcgatgcctttgtgctggcttcggtgggctgccgcgtgcggatgctgga

SEQ ID NO: 616165 - DNA, 75 bp, synthetic construct
  source 1..75: mol_type = other DNA
gcgaatgtcgccacgccaaacgcggttgtgactaaagggcatcgctttgatatctatgcaggtacgccagtgtaa

SEQ ID NO: 616166 - DNA, 75 bp, synthetic construct
  source 1..75: mol_type = other DNA
cggaatcgctcaaataactgttacgggcaggtatcgcggcgtgaccaggagagcgcgctggcgtgctggggaata

SEQ ID NO: 616167 - DNA, 75 bp, synthetic construct
  source 1..75: mol_type = other DNA
gttgcaggaacggttgcagttgattcacgcttccagtttgacggcgctgaccgatattactccgcgcccgcaagt

SEQ ID NO: 616168 - DNA, 75 bp, synthetic construct
  source 1..75: mol_type = other DNA
caggcaccggagacggtgccttatctgttctggcggcccgctgggggctggaacacgatgaagacaacctgatgg

SEQ ID NO: 616169 - DNA, 75 bp, synthetic construct
  source 1..75: mol_type = other DNA
cttcctctgtaaatgatgttctccgccgtttgcctggtgtggcaatagcgcaaaatggaggagaaggtcagctct

SEQ ID NO: 616170 - DNA, 75 bp, synthetic construct
  source 1..75: mol_type = other DNA
catgcctttgtgaaaggtcagccattactaatgcttttaataaagttatagctcagacaacatgtattgttcccc

SEQ ID NO: 616171 - DNA, 75 bp, synthetic construct
  source 1..75: mol_type = other DNA
cattgatactgagaatggcctagcaaaagccgcaatggcgtcttccttgagtacggtagcttcaaataatcttat

SEQ ID NO: 616172 - DNA, 75 bp, synthetic construct
  source 1..75: mol_type = other DNA
gtgtttcccgtcgacgttttataagcggctgaatgccggtgatcgtaaaggtgcatgcgaggcgattcgctggtg

SEQ ID NO: 616173 - DNA, 75 bp, synthetic construct
  source 1..75: mol_type = other DNA
cccaaaggttgcactggagctgcttggtgaaattaagcgcctggaggacacaaatattgatgctatgtgtcgaat

SEQ ID NO: 616174 - DNA, 75 bp, synthetic construct
  source 1..75: mol_type = other DNA
gcttggctggggtgtggttggtgtctggatgggaatgtttgccgactgggctgtgcgggccgtgctgttttactg

SEQ ID NO: 616175 - DNA, 75 bp, synthetic construct
  source 1..75: mol_type = other DNA
tttcttattaattagctgtccaattctacatccgttcatttttcctgttggtgggattaattgttcagtcaaagc

SEQ ID NO: 616176 - DNA, 75 bp, synthetic construct
  source 1..75: mol_type = other DNA
gtgagtaaaaaactccgctacggtttatctgcgatcgttctggcgctgattgccacaggtgcttctgcgcctgaa

SEQ ID NO: 616177 - DNA, 75 bp, synthetic construct
  source 1..75: mol_type = other DNA
cgacacttcaacatggcgggggacaactcgatacattggccgcacaacaacaagacgtacacagcacagaacgta

SEQ ID NO: 616178 - DNA, 75 bp, synthetic construct
  source 1..75: mol_type = other DNA
ccgcccttatttccgctctcgatgccgggaaaaaggtgaaatacctgtggttctggggccatcaacctgccgcga

SEQ ID NO: 616179 - DNA, 75 bp, synthetic construct
  source 1..75: mol_type = other DNA
tggcatgaagctgtcgaaggaaaaatgcgaccgggttaacgctatcgaacgggataaggcgctggcatgggtgga

SEQ ID NO: 616180 - DNA, 75 bp, synthetic construct
  source 1..75: mol_type = other DNA
gaatattttgctgaaaatgacgttggtcaacgcgggtgggtaacacgaaatcctgcgaactggcaaaagctaagt

SEQ ID NO: 616181 - DNA, 75 bp, synthetic construct
  source 1..75: mol_type = other DNA
gattaaggacggtggccgtgattgccgcattcgttcaaataactgttacggtcaggttattcgtcgtgaccagga

SEQ ID NO: 616182 - DNA, 75 bp, synthetic construct
  source 1..75: mol_type = other DNA
atgcgatgctggagcattacggcattatgggctgaacattcagtgaaaatctgcttaattgatgaaacaggcgcc

SEQ ID NO: 616183 - DNA, 75 bp, synthetic construct
  source 1..75: mol_type = other DNA
aaagacatcatgctcggtaaaacgtataccaaagcagaatgcaaagcactcttgaataaagaccttgccactgtc

SEQ ID NO: 616184 - DNA, 75 bp, synthetic construct
  source 1..75: mol_type = other DNA
gcagaatgcaaagcactcttgaataaagaccttgccactgtcgccagacaaattaacccgtacatcgaagtcgat

SEQ ID NO: 616185 - DNA, 75 bp, synthetic construct
  source 1..75: mol_type = other DNA
caaaaaggtcgtatcgccccaggaaaagatgccgactttgtcttcattcaaccgaatagcagctatgttcttacc

SEQ ID NO: 616186 - DNA, 75 bp, synthetic construct
  source 1..75: mol_type = other DNA
ccagtcgatgccggacgcatgggggatcgaccagttgttcccggttctgccgctggaagggctggatcaagtgcc

SEQ ID NO: 616187 - DNA, 75 bp, synthetic construct
  source 1..75: mol_type = other DNA
ggtctgccgcatccgacggtaatcaccgaatcgggtcgtgcggtgactgcgcatcacaccgtgctggtgtctaat

SEQ ID NO: 616188 - DNA, 75 bp, synthetic construct
  source 1..75: mol_type = other DNA
atgtgggaaacctggcaggagatgcacgaaccgggaactcgccgttctctgcgtgaatggttacacgacagccag

SEQ ID NO: 616189 - DNA, 75 bp, synthetic construct
  source 1..75: mol_type = other DNA
gaccgcgcttcaattgaactgaagttcgatgccgctaaaggcaagctgactatcgatgcggcacaactcggtggc

SEQ ID NO: 616190 - DNA, 75 bp, synthetic construct
  source 1..75: mol_type = other DNA
acggcctgtcggctgccgttctggcgttgattgccgcaggggcttctgcgcctgaaatcctcgaccagtttcttg

SEQ ID NO: 616191 - DNA, 75 bp, synthetic construct
  source 1..75: mol_type = other DNA
gcgcatgcgaggcgattcgctggtggataaaagatggtgggcgcgattgccgcatacgttcaaataactgctatg

SEQ ID NO: 616192 - DNA, 75 bp, synthetic construct
  source 1..75: mol_type = other DNA
ttcagccgaatagcagctatgttcttaccaatgacgatctggaatatcgccacaaagtcagcccgtatgttggcc

SEQ ID NO: 616193 - DNA, 75 bp, synthetic construct
  source 1..75: mol_type = other DNA
ttcttcaaaggtgcgcagaagctgggcgaactggggcagccggtgctggtgcactgcgaaaacgcgctgatctgt

SEQ ID NO: 616194 - DNA, 75 bp, synthetic construct
  source 1..75: mol_type = other DNA
tggaatatcgccacaaagtcagcccgtatgttggccgtaccattggcgcgcgtatcacgaaaaccatcttacgtg

SEQ ID NO: 616195 - DNA, 75 bp, synthetic construct
  source 1..75: mol_type = other DNA
cggttgacgtgttcgtcttccctgacggtagcgtagaagtagaactgtctgacgaaggcgataccgtggcggaca

SEQ ID NO: 616196 - DNA, 75 bp, synthetic construct
  source 1..75: mol_type = other DNA
aacgccattgagcgtgataaggcgctggcatgggtggagaaaaacatcaaagtgccattgagcgaaccccagaaa

SEQ ID NO: 616197 - DNA, 75 bp, synthetic construct
  source 1..75: mol_type = other DNA
acggcctgtcagccgctgttctggcgctgattgctgccggtgcgtctgctcctcagatactcgaccagtttctga

SEQ ID NO: 616198 - DNA, 75 bp, synthetic construct
  source 1..75: mol_type = other DNA
aatacgccaacaacatcatctgggcgattggcgatgcgtgtgaagaaaatggtctgccgcatccgacggtaatca

SEQ ID NO: 616199 - DNA, 75 bp, synthetic construct
  source 1..75: mol_type = other DNA
ctggcgaatgtcgccacgccaaacgcggtagtcactaaagggcataggtttgatatttatgcaggtacgccagtg

SEQ ID NO: 616200 - DNA, 75 bp, synthetic construct
  source 1..75: mol_type = other DNA
caggtcaacgccattgagcgtgataaggcgctggcatgggtggagcgcaatataaaagttccactgaccgagcca

SEQ ID NO: 616201 - DNA, 75 bp, synthetic construct
  source 1..75: mol_type = other DNA
atcctcgaccagtttctggatgaaaaagaaggcaaccacaccacggcataccgtgatggcgcgggtatctggacc

SEQ ID NO: 616202 - DNA, 75 bp, synthetic construct
  source 1..75: mol_type = other DNA
gtgcgcgggaatcctacggttataacggtgactacttcctcgtttatccgattaaagttaaccagcatcgtcgcg

SEQ ID NO: 616203 - DNA, 75 bp, synthetic construct
  source 1..75: mol_type = other DNA
atggatctgcacgacattcatatcggctactcttccggcacctttagcctgcaagaacgcgcatgggctgagcag

SEQ ID NO: 616204 - DNA, 75 bp, synthetic construct
  source 1..75: mol_type = other DNA
cggtgactacttcctcgtttatccgattaaagttaaccagcatcgccgcgtgattgaatctctgattcattctgg

SEQ ID NO: 616205 - DNA, 75 bp, synthetic construct
  source 1..75: mol_type = other DNA
aaatgtacgtcaacttctcactgttccagtcgatgccggatgcgtgggggatcgaccagttgttcccggttctgc

SEQ ID NO: 616206 - DNA, 75 bp, synthetic construct
  source 1..75: mol_type = other DNA
ccgaatcgggccgtgcggtgactgcgcaccataccgtgctggtgtcgaatatcatcggcgtggaacgtaacgaat

SEQ ID NO: 616207 - DNA, 75 bp, synthetic construct
  source 1..75: mol_type = other DNA
tgttcggtgaactacggcctcaatgaatatgccaacaacatcatctgggcgattggtgatgcgtgtgaagaaaat

SEQ ID NO: 616208 - DNA, 75 bp, synthetic construct
  source 1..75: mol_type = other DNA
gtggtgacagcatgtcaggaacgatcgaaccaggtgatctgctgttcgttgatatcacggttaaatctttcgacg

SEQ ID NO: 616209 - DNA, 75 bp, synthetic construct
  source 1..75: mol_type = other DNA
ttgagccaggagatctcatcttcgttgatatcagtatcaatcagtttgatggggatggtatctatgtgtttggtt

SEQ ID NO: 616210 - DNA, 75 bp, synthetic construct
  source 1..75: mol_type = other DNA
ccagtgataaagaggccgaaaaaataaaacatcaggaaccgctgtatcaaagtattgcggtggaatgcctgacgg

SEQ ID NO: 616211 - DNA, 75 bp, synthetic construct
  source 1..75: mol_type = other DNA
gcaaatgaaggtaaagtaaaagaagcgcaggctgccgcagagcaactgaaaacgacccgcaattcatatcacaag

SEQ ID NO: 616212 - DNA, 75 bp, synthetic construct
  source 1..75: mol_type = other DNA
ccatatgatacaatggatttagcatctcactatatgaaattctcagaattacataatatgagcgtttctgacata

SEQ ID NO: 616213 - DNA, 75 bp, synthetic construct
  source 1..75: mol_type = other DNA
ccttatgacagagaatcaaaaaagttatgtctttaggcaattagcaccatatcgtcgccgtgagcctcttgatga

SEQ ID NO: 616214 - DNA, 75 bp, synthetic construct
  source 1..75: mol_type = other DNA
gacggtcaagcgggatctacgtcctgcggattaccgttccggttcgataccgcaccctgatagggcagcgtgaaa

SEQ ID NO: 616215 - DNA, 75 bp, synthetic construct
  source 1..75: mol_type = other DNA
tagaaagtggcaaccgttttttacctgtaatgttaagcatggaagattcagagaagtcaaaagcctcaaaactga

SEQ ID NO: 616216 - DNA, 75 bp, synthetic construct
  source 1..75: mol_type = other DNA
aatgaagttgcagccgatgacaagatagcaggccgcaaggtggaagtgaccggagttgtccaggacataacaaaa

SEQ ID NO: 616217 - DNA, 75 bp, synthetic construct
  source 1..75: mol_type = other DNA
tggtcagcgccgttctggcgttgggggtgggggccggagctggatgggggggctggcatcattatgccggaaaag

SEQ ID NO: 616218 - DNA, 75 bp, synthetic construct
  source 1..75: mol_type = other DNA
taccgaaccatgccgccatttactgcggcaacggtgagctgcttcaccatctgcctgaacaactgagtaaacggg

SEQ ID NO: 616219 - DNA, 75 bp, synthetic construct
  source 1..75: mol_type = other DNA
tccgtatgagtgaaaatggtgttgcatatctggacttcaatttagattcaccggataaagttatggacactgaag

SEQ ID NO: 616220 - DNA, 75 bp, synthetic construct
  source 1..75: mol_type = other DNA
tggaggcgactggtttttacaggatttccctgccttccgcacagcctggcgatatcctgctgtgctgctttggcg

SEQ ID NO: 616221 - DNA, 75 bp, synthetic construct
  source 1..75: mol_type = other DNA
ctggagactgacaagcggcaacgcgcgcggctcaacaaaaattgttgaaatagctaatgcattgggtgttcgaac

SEQ ID NO: 616222 - DNA, 75 bp, synthetic construct
  source 1..75: mol_type = other DNA
tcaggaacgatcgaaccaggtgacctgctgttcgtcgatatcagcgtcaaatcgttcgacggcgatgggatttat

SEQ ID NO: 616223 - DNA, 75 bp, synthetic construct
  source 1..75: mol_type = other DNA
atgatttttctattgggattgagctggaaggcaccgatacgctggcgtataccgatgcgcagtatcaacagcttg

SEQ ID NO: 616224 - DNA, 75 bp, synthetic construct
  source 1..75: mol_type = other DNA
agtcgaaaagccttgaggcttcaggtcttaagccaagccgcccggccccaccgccgccgacaagtggacaggctt

SEQ ID NO: 616225 - DNA, 75 bp, synthetic construct
  source 1..75: mol_type = other DNA
tcccggccattaccgcctattgctcaggcattaaaagatcatttagctgcctatgaactgtcgaaaaaggcataa

SEQ ID NO: 616226 - DNA, 75 bp, synthetic construct
  source 1..75: mol_type = other DNA
gccttgaggcttcaggccttaagccggcccgcccggctccaccgccgccgacaagtgggcaggtatctggatcat

SEQ ID NO: 616227 - DNA, 75 bp, synthetic construct
  source 1..75: mol_type = other DNA
gttgttccgcatcttttggcagacaatattccgctgtatgcttttgtagatagccagcggggcttcctgattgat

SEQ ID NO: 616228 - DNA, 75 bp, synthetic construct
  source 1..75: mol_type = other DNA
gtcagtgacttgatcgattatgatgatcacaccctgaaatattacaacgaagggaaagcgcggattaagggcgtc

SEQ ID NO: 616229 - DNA, 75 bp, synthetic construct
  source 1..75: mol_type = other DNA
aaagattatgagacagtctatggctaccaaactgcaggacgggaatacaccttatctggcagctacaccttctga

SEQ ID NO: 616230 - DNA, 75 bp, synthetic construct
  source 1..75: mol_type = other DNA
gacaggcttccggggcatcccgccctttaccgcccattgcgcaggcattaaaagatcacctggctgcctatgaaa

SEQ ID NO: 616231 - DNA, 75 bp, synthetic construct
  source 1..75: mol_type = other DNA
gtggctggtctgccggggggaaattcacaaattccgctgtgtgccgcacctgaccgggcgtcgttttgagcacgg

SEQ ID NO: 616232 - DNA, 75 bp, synthetic construct
  source 1..75: mol_type = other DNA
ttaccgggcggcgctttgagcacggggtgacggactgttacacgctgttccgggatgcttaccatctggcgggaa

SEQ ID NO: 616233 - DNA, 75 bp, synthetic construct
  source 1..75: mol_type = other DNA
cgagttgacgggcgtaacgcctgcggaagccatccatatggcgtcgctgcatccggcgcgaatgctgggtgttga

SEQ ID NO: 616234 - DNA, 75 bp, synthetic construct
  source 1..75: mol_type = other DNA
ccgcgcccgttttcaataagtttatgggacaaatggggtatacctgttccggtccggccacggcgatgatgccgt

SEQ ID NO: 616235 - DNA, 75 bp, synthetic construct
  source 1..75: mol_type = other DNA
tatcagctggcgtatcagcgggatttgctactggctgaagtgcggctggggcggctgccgtatccggacatctgt

SEQ ID NO: 616236 - DNA, 75 bp, synthetic construct
  source 1..75: mol_type = other DNA
tatgtgatggcaggtatccttttgttatctattggatacttaattaaacaaaaatcacgtcgccagattgaaacg

SEQ ID NO: 616237 - DNA, 75 bp, synthetic construct
  source 1..75: mol_type = other DNA
cagctggcgggtcagtggtatctgttactggctgcactgctcctggtcggggtgtcgggtcagaacgtccgtgaa

SEQ ID NO: 616238 - DNA, 75 bp, synthetic construct
  source 1..75: mol_type = other DNA
aaacgtgacggctactggcccccggaggcggtggaggaaaacaccggcacccgaaatcacaaatggcagcgactg

SEQ ID NO: 616239 - DNA, 75 bp, synthetic construct
  source 1..75: mol_type = other DNA
gtgaatacaaaaccttcccgcatcagaaccacggtgtgctcgctggcggttgccacggtactgggtacggcaact

SEQ ID NO: 616240 - DNA, 75 bp, synthetic construct
  source 1..75: mol_type = other DNA
ctataccgccagccgtcttgctgctgcgttcaatcacggatttatcaataagtctttgcgtgaagttttcgacgt

SEQ ID NO: 616241 - DNA, 75 bp, synthetic construct
  source 1..75: mol_type = other DNA
atcaggcactacgtgagatagcaaaacatgcaacacagggcgaatgggtcgcgtttatttcgacgggtacaggta

SEQ ID NO: 616242 - DNA, 75 bp, synthetic construct
  source 1..75: mol_type = other DNA
tgaaacacgcaatggccgtaactcttgagcatgtgtcggtcacggatgcagggcagaccggagttgctgcaatga

SEQ ID NO: 616243 - DNA, 75 bp, synthetic construct
  source 1..75: mol_type = other DNA
gtggagaacaccatcagtagcggggttgcggggttatctgccggcgggggaaacccggctgatatgaagtcgccg

SEQ ID NO: 616244 - DNA, 75 bp, synthetic construct
  source 1..75: mol_type = other DNA
atgacgggtctgcgaacacgacgttatgctggcgcatttttgttgtggacagcgactgtttctgtggccggtgct

SEQ ID NO: 616245 - DNA, 75 bp, synthetic construct
  source 1..75: mol_type = other DNA
gtgccgttttcccggatggtgaacaccaggcagcggagaacggtaatgccgcctttgcactgtggcagccctaca

SEQ ID NO: 616246 - DNA, 75 bp, synthetic construct
  source 1..75: mol_type = other DNA
gtacagggctggctgctattgcactggctgccggaggcggtagtggaagcagtcgtcataagcgtacagctgaag

SEQ ID NO: 616247 - DNA, 75 bp, synthetic construct
  source 1..75: mol_type = other DNA
ggtgatggacagaaagtcacactggagaaaggggacaacggctggacatccgacaattctgcactgatcccggac

SEQ ID NO: 616248 - DNA, 75 bp, synthetic construct
  source 1..75: mol_type = other DNA
gcgaacgacgatggtgtggctgatgacaaggctgccgaggtcgaagcaaaagtggctgcagcagagtctgcagag

SEQ ID NO: 616249 - DNA, 75 bp, synthetic construct
  source 1..75: mol_type = other DNA
gcacaggccggggaacagtatggactggttgatgaggtgacaggtctggttccggatggggtggaagctgaccgt

SEQ ID NO: 616250 - DNA, 75 bp, synthetic construct
  source 1..75: mol_type = other DNA
cgcgtgaagtgttgcaaaaatccggcggtaaaaccgtcagcgaagaagaggtgctgcaactggtgcaattaagca

SEQ ID NO: 616251 - DNA, 75 bp, synthetic construct
  source 1..75: mol_type = other DNA
ttggcgataaaggagcggaacggccaatccagtggctgactgataacggttcggcttatacagctcatgaaacac

SEQ ID NO: 616252 - DNA, 75 bp, synthetic construct
  source 1..75: mol_type = other DNA
ctggactgttgcgctcgtgaagccatagactgggccgcaagcacgggggttatgaccaagcaacggtgcaagatg

SEQ ID NO: 616253 - DNA, 75 bp, synthetic construct
  source 1..75: mol_type = other DNA
gccaataactcctttcaggtttttcacgtaaagttttttattgactatgtattaactagcgcaatcaaattcttt

SEQ ID NO: 616254 - DNA, 75 bp, synthetic construct
  source 1..75: mol_type = other DNA
gaaaatagcgtttttcaggtctttcacgtaaaatttttcattgactatgtactaactgacgcaatcaaattcttt

SEQ ID NO: 616255 - DNA, 75 bp, synthetic construct
  source 1..75: mol_type = other DNA
gtcgagaaatattcgtctcctgtattaaccgagaagttactggatggtgcgtcttggagagaactaatctgtgat

SEQ ID NO: 616256 - DNA, 75 bp, synthetic construct
  source 1..75: mol_type = other DNA
attttactgcagggcaaagtggcacactggctgaaggtatcaataacgggattatctggggggggattgcttttg

SEQ ID NO: 616257 - DNA, 75 bp, synthetic construct
  source 1..75: mol_type = other DNA
agccggagcccgtcatacagtaaaggcacaggccggggaacagtatggactggttgatgaggtgacaggtctggt

SEQ ID NO: 616258 - DNA, 75 bp, synthetic construct
  source 1..75: mol_type = other DNA
ttttcaggtaagatcacttccttaggtgaactcctgatgaccgcgagtattttgctggcattggcgaaagaaggt

SEQ ID NO: 616259 - DNA, 75 bp, synthetic construct
  source 1..75: mol_type = other DNA
tcctgttagataccgaatttgcccgccgtctgtatcacgactacgcaaaagaccagccgattttcgattaccatt

SEQ ID NO: 616260 - DNA, 75 bp, synthetic construct
  source 1..75: mol_type = other DNA
attacaccggacgccagccgattttcgatctctttgatgtcgaaaacgaaatccagcgagcgctggaacgcaaag

SEQ ID NO: 616261 - DNA, 75 bp, synthetic construct
  source 1..75: mol_type = other DNA
caagatctgatggtgcaggtggtgaaagatccgcttggcactaaaggtgcgcgcctgaccacagatatcacgctg

SEQ ID NO: 616262 - DNA, 75 bp, synthetic construct
  source 1..75: mol_type = other DNA
gactggttagagcagtacgtttctatgaactggtaaagcgtgagaatccgccagtcgaaaccggagcatggaaag

SEQ ID NO: 616263 - DNA, 75 bp, synthetic construct
  source 1..75: mol_type = other DNA
attgtccatagtgaaaaccaaagtaagggtgtgcattataaaaaatcaaaacgcctcgctgaaattaaccatgca

SEQ ID NO: 616264 - DNA, 75 bp, synthetic construct
  source 1..75: mol_type = other DNA
aacccgcgaaagtattgagcacgtactgtgtaatgaatgcccaacctgccacggtcgcggaacggtgaaaacggt

SEQ ID NO: 616265 - DNA, 75 bp, synthetic construct
  source 1..75: mol_type = other DNA
atggtcgcggaacggtgaaaaccgtggaaacggtatgctatgaaatcatgcgcgagattgttcgtgtccaccatg

SEQ ID NO: 616266 - DNA, 75 bp, synthetic construct
  source 1..75: mol_type = other DNA
tactgcgtgtggggcggtacggataaaatcgtcccggtagatgtctacatccctggttgcccgccaacgcctgcc

SEQ ID NO: 616267 - DNA, 75 bp, synthetic construct
  source 1..75: mol_type = other DNA
gccacgctgtacggctttgcaatggcgctcggcctgctggagcagaaaatccatgcccgtgagccaggcgaactg

SEQ ID NO: 616268 - DNA, 75 bp, synthetic construct
  source 1..75: mol_type = other DNA
atgagcaatttattaggcccccgtgacgccaacggcattccggtccccatgacggtggatgaatccatcgccagc

SEQ ID NO: 616269 - DNA, 75 bp, synthetic construct
  source 1..75: mol_type = other DNA
ccggcactcagatcaacggtaacgacgccaccgcgaataacagtggaaaaaccactgttgatggaaaagattcca

SEQ ID NO: 616270 - DNA, 75 bp, synthetic construct
  source 1..75: mol_type = other DNA
agatacgacaatcagcggagaattccctctggggtttgccggggttattcgggtacaggataaagctttgggtga

SEQ ID NO: 616271 - DNA, 75 bp, synthetic construct
  source 1..75: mol_type = other DNA
aggctgatatttatatacgtaaagatggggatatggaactcttgcgtcagattgagtctaatacggcgcattcta

SEQ ID NO: 616272 - DNA, 75 bp, synthetic construct
  source 1..75: mol_type = other DNA
aaaaagccattgagaaaattatcgatttcacctgggattattacattgctaacccctggtttttaaaaattgtgc

SEQ ID NO: 616273 - DNA, 75 bp, synthetic construct
  source 1..75: mol_type = other DNA
atgaagtataatttcatttactttattataaaattattaaacttttcattattattccacacatcattagatgag

SEQ ID NO: 616274 - DNA, 75 bp, synthetic construct
  source 1..75: mol_type = other DNA
gctcattcacgtcgctgataccacgtttgccagtggcctgttgggtaaaggtattgccattctgccctcggttgg

SEQ ID NO: 616275 - DNA, 75 bp, synthetic construct
  source 1..75: mol_type = other DNA
caaacacggttaaacaagcgaataaagatatcgatgccgccaaattgaaattaaccaccgaaatagtcgccatcg

SEQ ID NO: 616276 - DNA, 75 bp, synthetic construct
  source 1..75: mol_type = other DNA
gggaaggacttttattttttgaaaagaaacgtggtattttctttagcagcgacctcatgttcggcatgggtgaga

SEQ ID NO: 616277 - DNA, 75 bp, synthetic construct
  source 1..75: mol_type = other DNA
aggtcacgctgctggcccaggagagcgacaaaccgttgccagaagaggccgcacaagcgcgcgatgcatggttaa

SEQ ID NO: 616278 - DNA, 75 bp, synthetic construct
  source 1..75: mol_type = other DNA
gacgggggaagcggcgctacgtgctggtgctggtttagtccgagtactgacccgcagtgaaaacattgcgccgct

SEQ ID NO: 616279 - DNA, 75 bp, synthetic construct
  source 1..75: mol_type = other DNA
gcggagcatcgtgaagctggtcgcttcacttctatcgagcaagaatatccccagatactcaataaggcacaggca

SEQ ID NO: 616280 - DNA, 75 bp, synthetic construct
  source 1..75: mol_type = other DNA
gcggagcatggtgaagctggtcacttcacttccatcgagcaagaatatccccagatactcaacagagcgcgagca

SEQ ID NO: 616281 - DNA, 75 bp, synthetic construct
  source 1..75: mol_type = other DNA
actggatacaacttaagattaatagaataacgatgagagttagtagcttttttggcgaaaaaacagcagtactct

SEQ ID NO: 616282 - DNA, 75 bp, synthetic construct
  source 1..75: mol_type = other DNA
ctggatatgcctgacggaacatcttccacattacgtcctggagcaatagttattctgccgcaaaactccgcgcat

SEQ ID NO: 616283 - DNA, 75 bp, synthetic construct
  source 1..75: mol_type = other DNA
ggtgaggcgaagcatataacagcgcttgatgatgttaccctctgtaacgagtgggcgaagcttaaaagagaaaac

SEQ ID NO: 616284 - DNA, 75 bp, synthetic construct
  source 1..75: mol_type = other DNA
gtcaccgacgctagggccaactctgggggctggatcactgataacctcgactggcgatggctattttatatcaat

SEQ ID NO: 616285 - DNA, 75 bp, synthetic construct
  source 1..75: mol_type = other DNA
catcagatctggagagattcagacgtaatgtaacaaggattgttacatccaaaggtggtgatattgaactcacag

SEQ ID NO: 616286 - DNA, 75 bp, synthetic construct
  source 1..75: mol_type = other DNA
tccgtttcgtcgaatggccgtggttacggcgacaaatcccgccggttgccgcactaatctttatgctctgtttcg

SEQ ID NO: 616287 - DNA, 75 bp, synthetic construct
  source 1..75: mol_type = other DNA
ggcgctgatccagatggtgtgctgcctcgggctggtgctgttgagtcagcgattgagtaaggccattgcgcctgg

SEQ ID NO: 616288 - DNA, 75 bp, synthetic construct
  source 1..75: mol_type = other DNA
attgtcacctccgcaaccttgcgttcgctgaacagtttttcgcgtttgcaggagatgagtggtctgaaagagaaa

SEQ ID NO: 616289 - DNA, 75 bp, synthetic construct
  source 1..75: mol_type = other DNA
atggtttatgctcaccttgcacctgattacctgcaacacgcagtaacgttaaaccctctcggcggcgggttggcg

SEQ ID NO: 616290 - DNA, 75 bp, synthetic construct
  source 1..75: mol_type = other DNA
ggcttatattgctgtgtctgtttggcccggccttactggctggcaggcgtatttctgacgattgccggaatgatc

SEQ ID NO: 616291 - DNA, 75 bp, synthetic construct
  source 1..75: mol_type = other DNA
aacccgatgcgcgatatcaccgcccgctacagcatgttgtgtcagtcgctgggcattgaaggctggtcacgctta

SEQ ID NO: 616292 - DNA, 75 bp, synthetic construct
  source 1..75: mol_type = other DNA
agagcttcgccagcacctgctaaatgctgacatatggagcaaaccctatgaagggtatgcggaagatcaagaggg

SEQ ID NO: 616293 - DNA, 75 bp, synthetic construct
  source 1..75: mol_type = other DNA
atggctaacgcagatctggataaacagcctgattctgtctcttctgtactgaaggtttttggcattttacaggcg

SEQ ID NO: 616294 - DNA, 75 bp, synthetic construct
  source 1..75: mol_type = other DNA
ggagtataaacgcagtaccgagcggaccatcaccagtacagaagcgttattacccgttctggaccaggtgcgcga

SEQ ID NO: 616295 - DNA, 75 bp, synthetic construct
  source 1..75: mol_type = other DNA
cagcggcagatgattgcggacgtcgccaaaacgctggccggagaagaagggcggcatctggcgattgaagccccc

SEQ ID NO: 616296 - DNA, 75 bp, synthetic construct
  source 1..75: mol_type = other DNA
atctcggtatgttggtgctgtttgccagtggacgagcgatgcagcggtttctcgactatgtgacggatttacgcc

SEQ ID NO: 616297 - DNA, 75 bp, synthetic construct
  source 1..75: mol_type = other DNA
agtacggcacgtttaccgcgatgacgtataccaaaagtaaaacgtttaaaaccgaagctggcgcgcatcgctggt

SEQ ID NO: 616298 - DNA, 75 bp, synthetic construct
  source 1..75: mol_type = other DNA
ggggcacgccagcatacaacagacgatggtttatgctcaccttgcacctgattacctgcaacacgcagtaacttt

SEQ ID NO: 616299 - DNA, 75 bp, synthetic construct
  source 1..75: mol_type = other DNA
agggggatttctattctttatgtatccccgcgagaaatggctttcctgtcccagaaggaagtagcgctattgctc

SEQ ID NO: 616300 - DNA, 75 bp, synthetic construct
  source 1..75: mol_type = other DNA
aggtatatgaaccggttatccggaatgtttaccgctctgaaaaaaataggactatgggatgcagagcacccggtc

SEQ ID NO: 616301 - DNA, 75 bp, synthetic construct
  source 1..75: mol_type = other DNA
catggcgaatgctgagaagcgggaatatatacagggctaccgtgatcgccggacgttgaacgatttgctggagtt

SEQ ID NO: 616302 - DNA, 75 bp, synthetic construct
  source 1..75: mol_type = other DNA
aggctcttaatcctgttaaatatggtttccatcctgtacaggctgaagcattcaaacgtttaaggcagttaccaa

SEQ ID NO: 616303 - DNA, 75 bp, synthetic construct
  source 1..75: mol_type = other DNA
ccgcacacgtattctggcccgggaccaggaggccgcccgcctctggcgtgacgccaccggtgacacgtctgactg

SEQ ID NO: 616304 - DNA, 75 bp, synthetic construct
  source 1..75: mol_type = other DNA
ctgccgaaacgcatgccgaccggaaaagactggacatgcgacttgaactgcatatctgcacggcctgcggccgcg

SEQ ID NO: 616305 - DNA, 75 bp, synthetic construct
  source 1..75: mol_type = other DNA
cataggtgatataccagtgagccggatgagcaaaagggctttgatggattatcgttccatgcgactacgtgatgg

SEQ ID NO: 616306 - DNA, 75 bp, synthetic construct
  source 1..75: mol_type = other DNA
ggctacgccatgggagagcacatgacaaaagagctgacaggtaaagccctgtttatggcgctcaggagccagcgc

SEQ ID NO: 616307 - DNA, 75 bp, synthetic construct
  source 1..75: mol_type = other DNA
cggcttgagggtgatgcacgacgcattgccattctgtgcctttcgaccggggccagatggaaagaggcgtcaacg

SEQ ID NO: 616308 - DNA, 75 bp, synthetic construct
  source 1..75: mol_type = other DNA
ctacttcggatctttatcaaaaaatcgccaaaaatgcccccggcagaaatagatcaggcacttcgcagactggag

SEQ ID NO: 616309 - DNA, 75 bp, synthetic construct
  source 1..75: mol_type = other DNA
atgtttacagtcatttttcacgatgaggctgaaaaagaattcgttgctctgcctgctgcaattcgagccaagatg

SEQ ID NO: 616310 - DNA, 75 bp, synthetic construct
  source 1..75: mol_type = other DNA
aaacggcaaaaagcgaactgtgccgatttccgaggaactggagaagaaagttaaagaggaggccagcgctaaatt

SEQ ID NO: 616311 - DNA, 75 bp, synthetic construct
  source 1..75: mol_type = other DNA
aaaagcataattcaccaccggcattagctatatctcttctgaaacttgatgtgtctgaaagaaattacgactctt

SEQ ID NO: 616312 - DNA, 75 bp, synthetic construct
  source 1..75: mol_type = other DNA
gtcgaccggcgaaggtgtttaaccgtcgcggtgaaaaatccacggcctccggtcgctatcagcagctttacctgt

SEQ ID NO: 616313 - DNA, 75 bp, synthetic construct
  source 1..75: mol_type = other DNA
agtctgccaacggcacaggaacttgcagagttcagaatttactggatggctgagggtaaggcataccatcaggca

SEQ ID NO: 616314 - DNA, 75 bp, synthetic construct
  source 1..75: mol_type = other DNA
ggagcaaatattggcaataatgttattatccgaccttcggttaaaattacttacccatggaagttgacaataggt

SEQ ID NO: 616315 - DNA, 75 bp, synthetic construct
  source 1..75: mol_type = other DNA
aacccttggggcaaattcggtggtttcgcagaaatgctatttgtgcaccggcagccacgattatcagagcgcgca

SEQ ID NO: 616316 - DNA, 75 bp, synthetic construct
  source 1..75: mol_type = other DNA
ctgaggttgctgaggttgctgaggttgctgaggttgctgaggttgctgaggttgctgaggttgctgaggttgctg

SEQ ID NO: 616317 - DNA, 75 bp, synthetic construct
  source 1..75: mol_type = other DNA
ggagaaatataatacccgatatagtattaactatgaattaaaagacaaagttgataatccagtcaatgatgacac

SEQ ID NO: 616318 - DNA, 75 bp, synthetic construct
  source 1..75: mol_type = other DNA
cgaaagggggttcaggtaaaacaactgccgtaatcaacatagccactgcgttgagcaggagcggatacaacattg

SEQ ID NO: 616319 - DNA, 75 bp, synthetic construct
  source 1..75: mol_type = other DNA
tgccgtaatcaacatagccactgcgttgagcaggagcggatacaacattgctgtggtagacacagatccacaaat

SEQ ID NO: 616320 - DNA, 75 bp, synthetic construct
  source 1..75: mol_type = other DNA
tacagtgaccacccgttcgcacatggccgaccggcgaaggtgtttaaccgtcgcggtgaaaaatcaacggcctcc

SEQ ID NO: 616321 - DNA, 75 bp, synthetic construct
  source 1..75: mol_type = other DNA
tcagcatgatgagttgtacaataatgtcataccaatcattgaacagacaaaaaaacaatttaataaaaatgaaat

SEQ ID NO: 616322 - DNA, 75 bp, synthetic construct
  source 1..75: mol_type = other DNA
acgggatgcagaacctatcagttaaccagtcatataaccaagagaaggagaggggcgataaaactgggggtttag

SEQ ID NO: 616323 - DNA, 75 bp, synthetic construct
  source 1..75: mol_type = other DNA
attggtgcaagaagctcagttttcaaggatattgagtcagattctatttgtttaggtagtcccgcaattaaaatt

SEQ ID NO: 616324 - DNA, 75 bp, synthetic construct
  source 1..75: mol_type = other DNA
caatcgctcggtctggagtggaccttttcgccctacggcctgcaaggtattttgctggcgcacgtattttttaat

SEQ ID NO: 616325 - DNA, 75 bp, synthetic construct
  source 1..75: mol_type = other DNA
ctggcaggcggatgaaccgaaaaacgacggcggcgaaatttcgctggtactgacggcaaaaaaaagcaaacgcat

SEQ ID NO: 616326 - DNA, 75 bp, synthetic construct
  source 1..75: mol_type = other DNA
tgacacgtgaagcgggaatcattcatattctcgctctcggtgaagactacgaaatggaaattaacgagtcgcgca

SEQ ID NO: 616327 - DNA, 75 bp, synthetic construct
  source 1..75: mol_type = other DNA
gttacgtctgtgcgcaatgaccttgatcctgccggtgctggtcgccgttttcggcattcttagcgtctatggtcg

SEQ ID NO: 616328 - DNA, 75 bp, synthetic construct
  source 1..75: mol_type = other DNA
tgctgagtcagcgattgagtaaggccattgcgcccggcactacgctgctgcaaggctggcgcgacccggacgatc

SEQ ID NO: 616329 - DNA, 75 bp, synthetic construct
  source 1..75: mol_type = other DNA
atgttgatcctcgctatgccggggattgtgctggcaacgggcttctttttactgctcaacaacactatcggcctg

SEQ ID NO: 616330 - DNA, 75 bp, synthetic construct
  source 1..75: mol_type = other DNA
agaagcgcctgccctttctggtgatgcgccgcttgaagtgttgctggtgacactggcgaaagagatgacgccagt

SEQ ID NO: 616331 - DNA, 75 bp, synthetic construct
  source 1..75: mol_type = other DNA
ggagcaaaaataggaaaaaacgtagttattcgtccgtcagtaaaaattacctatccgtggaaattaaccttaggt

SEQ ID NO: 616332 - DNA, 75 bp, synthetic construct
  source 1..75: mol_type = other DNA
atgctgaacgtccagaaggtcagggagaagcgcctgccctgtctggtgatgcgccgcttgaagtgttgctggtga

SEQ ID NO: 616333 - DNA, 75 bp, synthetic construct
  source 1..75: mol_type = other DNA
ctcgtttgacgtttttattgatgcccgtgggcagcgtccgcttaaagtgaaagatattcctttccctggactacg

SEQ ID NO: 616334 - DNA, 75 bp, synthetic construct
  source 1..75: mol_type = other DNA
ttggagtcattaccccgccagaccattaataaatgggtacgcaaggaaggctggacaacgtcaccaaaacctggc

SEQ ID NO: 616335 - DNA, 75 bp, synthetic construct
  source 1..75: mol_type = other DNA
tttcaccattaacgccacgcctattgtgattggcgagaaatgctggctggcaaccgatgtctttgttgccccagg

SEQ ID NO: 616336 - DNA, 75 bp, synthetic construct
  source 1..75: mol_type = other DNA
agttactccttcgccgcttgattttgctgcatgtggcgcgatattggcagtgatagaagctcggcaggatttacg

SEQ ID NO: 616337 - DNA, 75 bp, synthetic construct
  source 1..75: mol_type = other DNA
ctcccgcaggagaagagttagtgagccgtctgcgcgcactgggacaggtggcctggcattttccgctgattgagt

SEQ ID NO: 616338 - DNA, 75 bp, synthetic construct
  source 1..75: mol_type = other DNA
ctcccgctggagaagagttagtgagccgtctgcacgcactggggcaggtggcctggcattttccgctgatcgagt

SEQ ID NO: 616339 - DNA, 75 bp, synthetic construct
  source 1..75: mol_type = other DNA
atgagtatcctggtcacccgcccgtctcccgctggagaagagttagtgagccgtctgcgcacactggggcaggtg

SEQ ID NO: 616340 - DNA, 75 bp, synthetic construct
  source 1..75: mol_type = other DNA
gccaaaagattcgctgggtgaaacagcgttcaacatgctgttggatcgtatcgtcaacaaacgtgaagaaccgca

SEQ ID NO: 616341 - DNA, 75 bp, synthetic construct
  source 1..75: mol_type = other DNA
acatcctgatcaggatgtattaaatatgttgctggcagataaacttattttcgctgatattaaatataacaccca

SEQ ID NO: 616342 - DNA, 75 bp, synthetic construct
  source 1..75: mol_type = other DNA
atgcagcaggtgtttttccaggaaactgagtttcttaattcagttattgattatgatcataaagtagaaacagaa

SEQ ID NO: 616343 - DNA, 75 bp, synthetic construct
  source 1..75: mol_type = other DNA
cgctgaataacggcactctgcaacaccctgttaaaggtgttcacacgggttctcgcgtattcatgcagccggctt

SEQ ID NO: 616344 - DNA, 75 bp, synthetic construct
  source 1..75: mol_type = other DNA
aaaggtggtcgtattttctccttcacagctctgactgtagttggcgatggtaacggtcgcgttggttttggttac

SEQ ID NO: 616345 - DNA, 75 bp, synthetic construct
  source 1..75: mol_type = other DNA
atgacgacgattacagaaatcatcggacgtgtgaatacacaactggttgacccgatgatggtgcgctggcctctg

SEQ ID NO: 616346 - DNA, 75 bp, synthetic construct
  source 1..75: mol_type = other DNA
attacctgaattacaaaatattgctggcaaacgtgcgctgatattacgtggcaatggcggtcgtgagctaattgg

SEQ ID NO: 616347 - DNA, 75 bp, synthetic construct
  source 1..75: mol_type = other DNA
gtgcaatgcgtgccgttctggaagtcgctggggttcataacgttctggctaaagcctatggttccaccaacccga

SEQ ID NO: 616348 - DNA, 75 bp, synthetic construct
  source 1..75: mol_type = other DNA
ggtaaaccgcgtatctaaaaccgttaaaggtggtcgtattttctccttcacagctctgactgtagttggcgatgg

SEQ ID NO: 616349 - DNA, 75 bp, synthetic construct
  source 1..75: mol_type = other DNA
acaaggtgactttgagccggaatccggttatcgcgccatgcagcaaatcctgtcgcaatcacaccgccctactgc

SEQ ID NO: 616350 - DNA, 75 bp, synthetic construct
  source 1..75: mol_type = other DNA
ggcgtggatgccagtgcgaaaggcgacaagaaggccgacagcattgacagcaccattgatgaactgtggcgggat

SEQ ID NO: 616351 - DNA, 75 bp, synthetic construct
  source 1..75: mol_type = other DNA
gacggtgaaagcatcaaagttttttactacgagcgcgccgtgtgtgcgatggcgaccgcgtcgctttatgagcgt

SEQ ID NO: 616352 - DNA, 75 bp, synthetic construct
  source 1..75: mol_type = other DNA
ggcggacgtcccggcggacgacatcgacggtgaaagcatcaaagttttttactacgagcgcgccgtgtgtgcgat

SEQ ID NO: 616353 - DNA, 75 bp, synthetic construct
  source 1..75: mol_type = other DNA
aggtgcgtgaaggggcggaatataaatacgtcaccaccggagataaacaggccactattgcactggcgacctatg

SEQ ID NO: 616354 - DNA, 75 bp, synthetic construct
  source 1..75: mol_type = other DNA
gcggagattatcgtgtacccggatgccggtcatgcatttaacgccgattatcgcccgagctatcatgccgagtct

SEQ ID NO: 616355 - DNA, 75 bp, synthetic construct
  source 1..75: mol_type = other DNA
gcggtctggtagcaaaagtgcctgactcgcaggtgctggccgatctcgatcatgtcgccagttgggcttcccgca

SEQ ID NO: 616356 - DNA, 75 bp, synthetic construct
  source 1..75: mol_type = other DNA
gccgctgataacaatggatcttgccaataacgttgctgctgttgttactgaacgcgatgctaactggtggtcgtt

SEQ ID NO: 616357 - DNA, 75 bp, synthetic construct
  source 1..75: mol_type = other DNA
tggcctgctggtcatgtgttctgagtatccggaaccattactggcgatgctggaagagtatcgccatatcccgat

SEQ ID NO: 616358 - DNA, 75 bp, synthetic construct
  source 1..75: mol_type = other DNA
cggcgcaggccgccttgccggttttatgaaggcgatggaagaagcgatgatcaaggtgccagaaagctggatttg

SEQ ID NO: 616359 - DNA, 75 bp, synthetic construct
  source 1..75: mol_type = other DNA
aaagcagctttttcagcccttcaattaacaactgaatcattgttcgaaatgcgaaagagtgcatttaaacaatgg

SEQ ID NO: 616360 - DNA, 75 bp, synthetic construct
  source 1..75: mol_type = other DNA
aaaaagagccgcaggatgtgccgggcgtggtgataccaccaccgggcgtgagcgagccggtaataaaaaacacct

SEQ ID NO: 616361 - DNA, 75 bp, synthetic construct
  source 1..75: mol_type = other DNA
ctatcccttcacaaggggataacatgcctgcttaccatgccagaccaaagcaaagcgatggcccactgccagtgg

SEQ ID NO: 616362 - DNA, 75 bp, synthetic construct
  source 1..75: mol_type = other DNA
gcggtttcctttccattaataaactttcgcagtaaatcccggtttatgacacagactgaatcagcgattctggcg

SEQ ID NO: 616363 - DNA, 75 bp, synthetic construct
  source 1..75: mol_type = other DNA
tggcaacggtgaactgcttcaccatatacctgaacaactgagtaaacgggagaggtattctgaaaaatggcaacg

SEQ ID NO: 616364 - DNA, 75 bp, synthetic construct
  source 1..75: mol_type = other DNA
cgcacacactccctctggcgtcacctggcatggcccgcatctgcctttacggggatttgcaacgatttggccgcc

SEQ ID NO: 616365 - DNA, 75 bp, synthetic construct
  source 1..75: mol_type = other DNA
cgcacacactccctctggcgtcaccaggcatggcacgcatctgcctttacggggattttcaacgatttggccgcc

SEQ ID NO: 616366 - DNA, 75 bp, synthetic construct
  source 1..75: mol_type = other DNA
cgggagctaaaagtggcggtgtgtttcaggtggtgctgggggcggcgctgattgcggtggcatggtggaaccctg

SEQ ID NO: 616367 - DNA, 75 bp, synthetic construct
  source 1..75: mol_type = other DNA
gtcttcacgaacctctgggtgagggggcggtcatccatattgtgccgcgactggccggagccggaaagggcggac

SEQ ID NO: 616368 - DNA, 75 bp, synthetic construct
  source 1..75: mol_type = other DNA
tgaacacggcagcggaagccattcgcgccctgtcgatgcagatgccgggctttcgccgtcagatgaacgaaggct

SEQ ID NO: 616369 - DNA, 75 bp, synthetic construct
  source 1..75: mol_type = other DNA
aaaacggcttttgccgggtgtctccgtcctctgcacaggcaggcgatgtgctgctgtgctgctttggatcatcgg

SEQ ID NO: 616370 - DNA, 75 bp, synthetic construct
  source 1..75: mol_type = other DNA
ctgagtgccggagggctgactgccaccacgatgctgttctcactgggtgccagcatgatactgggtggtgtggcc

SEQ ID NO: 616371 - DNA, 75 bp, synthetic construct
  source 1..75: mol_type = other DNA
tgccctgtcgctgcaggtgccgggattccgctgtcagatgaacgaaggctggtaccagatacgtattgccggtga

SEQ ID NO: 616372 - DNA, 75 bp, synthetic construct
  source 1..75: mol_type = other DNA
cgccactggcacgcatctgccttcacggggattttacaacgatttggccgccgcctcagcctgtatgtgaacacg

SEQ ID NO: 616373 - DNA, 75 bp, synthetic construct
  source 1..75: mol_type = other DNA
atccacattgtgccgcgactggccggggccggaaagggtggactgcagattgtgctgggggcggcagccatcgtg

SEQ ID NO: 616374 - DNA, 75 bp, synthetic construct
  source 1..75: mol_type = other DNA
acaccggattaccgcgcaacggataacggcagacagaacacgtacttttcgtcactggacaacatgattgcccag

SEQ ID NO: 616375 - DNA, 75 bp, synthetic construct
  source 1..75: mol_type = other DNA
acgatgctgttttcactgggggccagcatgattctgggtggtgtggctcagatgctggccccgaaggcaaagacg

SEQ ID NO: 616376 - DNA, 75 bp, synthetic construct
  source 1..75: mol_type = other DNA
actggtggcgtaacggtcagaacctgtacctggacaatatggaggccaccggcttttgccgggtgtccctgtccc

SEQ ID NO: 616377 - DNA, 75 bp, synthetic construct
  source 1..75: mol_type = other DNA
cgggatgcataccatctggcggggataaagatgccggattttaaacgagaggatgactggtggcgcaacggacag

SEQ ID NO: 616378 - DNA, 75 bp, synthetic construct
  source 1..75: mol_type = other DNA
gacacagactgaatcagcgattctggcgcatgcccggcggtgtgcgcctgcggagtcgtgcggcttcgtgataag

SEQ ID NO: 616379 - DNA, 75 bp, synthetic construct
  source 1..75: mol_type = other DNA
ggatgagtggtggcgcaatggtcagaacctgtatctggacaatatggaggccactggtttttaccgggtgcccct

SEQ ID NO: 616380 - DNA, 75 bp, synthetic construct
  source 1..75: mol_type = other DNA
aacctgtacctggacaatatggaggcgactggtttttacaggatttccctgccttccgcacagcctggcgatatt

SEQ ID NO: 616381 - DNA, 75 bp, synthetic construct
  source 1..75: mol_type = other DNA
gacgtgctgctgtgctgttttggttcatcggtgccgaatcatgccgccatttactgcggcgacggcgagctgctg

SEQ ID NO: 616382 - DNA, 75 bp, synthetic construct
  source 1..75: mol_type = other DNA
ctgaacccgcgcgataacgaagtgctgggcactatgatcggtaacttccagggcgaaggtatgccgggcaaaatg

SEQ ID NO: 616383 - DNA, 75 bp, synthetic construct
  source 1..75: mol_type = other DNA
gccatttgccgccgcagcagattgcggaagactatcgttttaaaaacctgtatgacatctggttgaagggcgatc

SEQ ID NO: 616384 - DNA, 75 bp, synthetic construct
  source 1..75: mol_type = other DNA
aaaactgcggtactggtgttccttggtgccgaatatgcacgtcgcggctgggtacagcagtaccacattggcgcg

SEQ ID NO: 616385 - DNA, 75 bp, synthetic construct
  source 1..75: mol_type = other DNA
ctgttccgggacgcttaccatctggcgggaattgagatgccggattttcatcgcggggatgactggtggcgtcac

SEQ ID NO: 616386 - DNA, 75 bp, synthetic construct
  source 1..75: mol_type = other DNA
atggcgaagttgggcgaagtttctgataccgatattcgccgctttgcggatctgcaaactgccctgaccaaacgt

SEQ ID NO: 616387 - DNA, 75 bp, synthetic construct
  source 1..75: mol_type = other DNA
actatcgttttaataaccgggatgaagccatcacagtaatacgggaatacattgagattttctacaatcgtcagc

SEQ ID NO: 616388 - DNA, 75 bp, synthetic construct
  source 1..75: mol_type = other DNA
agatgccgggattccgccgtcagatgaacgaaggctggtaccagatacgtattgccggtgatgacacggcaccgg

SEQ ID NO: 616389 - DNA, 75 bp, synthetic construct
  source 1..75: mol_type = other DNA
cattatcccgcccgatctgccgtatcgcgccagtgaagatgaagtctccgcggtgtttgaaatgccgctcgccca

SEQ ID NO: 616390 - DNA, 75 bp, synthetic construct
  source 1..75: mol_type = other DNA
cgattctggcgcatgcccggcggtgtgcgcctgcggagtcgtgcggcttcgtgataagcacgccggagggggagc

SEQ ID NO: 616391 - DNA, 75 bp, synthetic construct
  source 1..75: mol_type = other DNA
tatcccgcgtcggtaactgtgctggtcagcgttaacggctggctacgaataaacgcccatacgcgccgctgtttt

SEQ ID NO: 616392 - DNA, 75 bp, synthetic construct
  source 1..75: mol_type = other DNA
gtcagcggcgcagccgggcgatgtgctgctgtgctgatttggttcatcggtgccgaatcatgccgctatttactg

SEQ ID NO: 616393 - DNA, 75 bp, synthetic construct
  source 1..75: mol_type = other DNA
aatctctatcttgacaatatggaggcgactggtttttaccgtgtcgcactgacagaggcgcagccgggcgatgtg

SEQ ID NO: 616394 - DNA, 75 bp, synthetic construct
  source 1..75: mol_type = other DNA
cggtcagaatctctatctggataatatggaggcgactggtttttaccgtgtcgcactgacagaggcgcagcctgg

SEQ ID NO: 616395 - DNA, 75 bp, synthetic construct
  source 1..75: mol_type = other DNA
tggccaatcatgccgccatatactgcggcaacggtgagctgcttcaccatctgcctgaacaactgagtaaacggg

SEQ ID NO: 616396 - DNA, 75 bp, synthetic construct
  source 1..75: mol_type = other DNA
taacgctgccggattttcaccgcgaggatgagtggtggcgcaatggtcagaacctgtatctggacaatatggagg

SEQ ID NO: 616397 - DNA, 75 bp, synthetic construct
  source 1..75: mol_type = other DNA
ttcccggcgtgaatatttccggtgagccggaggattatttccggatggctccggaggactggctgcaggcagaaa

SEQ ID NO: 616398 - DNA, 75 bp, synthetic construct
  source 1..75: mol_type = other DNA
gggtgcagcgctgagtgccggcggtttttctgccaccacgatgctgttttcactgggggccagcatgatactggg

SEQ ID NO: 616399 - DNA, 75 bp, synthetic construct
  source 1..75: mol_type = other DNA
ttcaccgccggtgcaacgatggcgttgtggggcgcagccctgagtgccggagggctgactgccaccacgatgctg

SEQ ID NO: 616400 - DNA, 75 bp, synthetic construct
  source 1..75: mol_type = other DNA
gagtggcgcagatgctggcaccgaaagccaggacgcccacggcagcaagtacagataacggcaaaacagaacacc

SEQ ID NO: 616401 - DNA, 75 bp, synthetic construct
  source 1..75: mol_type = other DNA
agggaacggtcatccacattgtgccgcgactggccggggccggaaagggcggactgcagattgtgctgggggccg

SEQ ID NO: 616402 - DNA, 75 bp, synthetic construct
  source 1..75: mol_type = other DNA
agggaacggtcatccacattgtgccgcgactggccggcgccggaaaggggggactgcagattgtgctgggggccg

SEQ ID NO: 616403 - DNA, 75 bp, synthetic construct
  source 1..75: mol_type = other DNA
agggaacggtcatccacattgtgccgcgactggccggcgccggaaagggcggactgcagattgtgctgggggcgg

SEQ ID NO: 616404 - DNA, 75 bp, synthetic construct
  source 1..75: mol_type = other DNA
cgcgactggccggagccgggggaaatggtgtttttcaggtggtgctgggggttgcagcgattgtcgggtcatttt

SEQ ID NO: 616405 - DNA, 75 bp, synthetic construct
  source 1..75: mol_type = other DNA
ggttcacgacggatatcccaggacatcagcacccgtgatgagggcggtgacgggaaagtggtgcttatcgggcgg

SEQ ID NO: 616406 - DNA, 75 bp, synthetic construct
  source 1..75: mol_type = other DNA
gtgaacacggcagcggaagccatccgggcgctgtcgttacaggtgccgggattccgccgtcagatgaacgaaggg

SEQ ID NO: 616407 - DNA, 75 bp, synthetic construct
  source 1..75: mol_type = other DNA
gattgagcgtctcggcgggagtagaacgatcccggtaaatgtcagagtcattgccgccaccaaccgtgatttgtg

SEQ ID NO: 616408 - DNA, 75 bp, synthetic construct
  source 1..75: mol_type = other DNA
tgaatgctaaggatacaaaacattcaaactcaaagtgtaacttactaccaaaggaattacgaattcattgtgtta

SEQ ID NO: 616409 - DNA, 75 bp, synthetic construct
  source 1..75: mol_type = other DNA
gccggatgtgcaggaactgcctgttaagcctgccagacaaaaagcccctaaacgcgacatgggtcttaccgtggc

SEQ ID NO: 616410 - DNA, 75 bp, synthetic construct
  source 1..75: mol_type = other DNA
ggtgcgtggcctatgagttctggcgacgtgccgtgaaaaatattgccagccagggcaacaccattaccggtgcaa

SEQ ID NO: 616411 - DNA, 75 bp, synthetic construct
  source 1..75: mol_type = other DNA
atcaattttgaagcctggaaaacccttggtgagatttcgcagaagctaaacaagcttgtggctcatcttgatagc

SEQ ID NO: 616412 - DNA, 75 bp, synthetic construct
  source 1..75: mol_type = other DNA
caagcttgtcgctcatctggataacaaaagccagggaagccctctgacgcaaacagaactattcgcagtgaagcg

SEQ ID NO: 616413 - DNA, 75 bp, synthetic construct
  source 1..75: mol_type = other DNA
aaagcctggatagctttaactgacatatcgcaaaagctaaatcgaattgcgatccatatcgatggtaagagcaaa

SEQ ID NO: 616414 - DNA, 75 bp, synthetic construct
  source 1..75: mol_type = other DNA
gggcgcaccgccggatacggtatccattcgcggcgtggcgacgtcggtcaatagcgccctgcgcaccgcgtccag

SEQ ID NO: 616415 - DNA, 75 bp, synthetic construct
  source 1..75: mol_type = other DNA
tgaactggtgggttttgggcagttatccgggccatggctcataaccactgcccgccatgcgtttgaccgtaacag

SEQ ID NO: 616416 - DNA, 75 bp, synthetic construct
  source 1..75: mol_type = other DNA
tattgataaaattgatatttcagcgccaccttctacggtaaatattgatggcatcgccacttccgtcaatcaggc

SEQ ID NO: 616417 - DNA, 75 bp, synthetic construct
  source 1..75: mol_type = other DNA
atggctgagataaacagcactgcgcaagccacatcagcgttaaccggcgtcagcgaggtgctgacgccggtgttc

SEQ ID NO: 616418 - DNA, 75 bp, synthetic construct
  source 1..75: mol_type = other DNA
ccatcagaatcgaccgggtgacccagtatgctgaaaccgacgtgggttttctgcgccggctggccagcgagtatg

SEQ ID NO: 616419 - DNA, 75 bp, synthetic construct
  source 1..75: mol_type = other DNA
tgttcctgatggggcagcagcttcagtggtaattgctgccgaagtgaacgttgctgaagtagaaaaacaaaaaaa

SEQ ID NO: 616420 - DNA, 75 bp, synthetic construct
  source 1..75: mol_type = other DNA
gtggaagctgttatctctggctcaaccgtgggcaaccacggggatttacaacgatttggccgccgcctcagcctg

SEQ ID NO: 616421 - DNA, 75 bp, synthetic construct
  source 1..75: mol_type = other DNA
cggtcgttcctgcacaaccgctagatttcaatgtcgcgctggcgctggttgtggggtcatttatcagcgcgggta

SEQ ID NO: 616422 - DNA, 75 bp, synthetic construct
  source 1..75: mol_type = other DNA
tttccggtttactgatgaccgtcaccgtcttctttggcatttcggcgctgacggttctttcggtgattgcggttc

SEQ ID NO: 616423 - DNA, 75 bp, synthetic construct
  source 1..75: mol_type = other DNA
aatgtcgcgctggcgctggttgtggggtcatttatcagtgcgggcacgctcaccgctgactttgtccggtttggt

SEQ ID NO: 616424 - DNA, 75 bp, synthetic construct
  source 1..75: mol_type = other DNA
gccggaggagtattttcgtatcgcaccggaagactggctgcgggcagagatgcagggggagattgtggcgctggt

SEQ ID NO: 616425 - DNA, 75 bp, synthetic construct
  source 1..75: mol_type = other DNA
cggtcaacgcggtattaggtggcgcgctgagctatctgatccttaacccgattttgaatcgcaaaacgacagcag

SEQ ID NO: 616426 - DNA, 75 bp, synthetic construct
  source 1..75: mol_type = other DNA
ctatctgatgaaccgtcgccgctatgagcactttgcgaccacgcgtatgatgagtgtcaattgggtggcgattct

SEQ ID NO: 616427 - DNA, 75 bp, synthetic construct
  source 1..75: mol_type = other DNA
gtggctggtctgccggggggacattcataaattccgctgtgtgccacatctgacaggacggcgctttgagcacgg

SEQ ID NO: 616428 - DNA, 75 bp, synthetic construct
  source 1..75: mol_type = other DNA
ttttcctcgctggataacatgattgcccaggggaacccgatgccggtgccttacggggaaatgctggttggctcc

SEQ ID NO: 616429 - DNA, 75 bp, synthetic construct
  source 1..75: mol_type = other DNA
ctgccaccacgatgctgttttcactgggggccagcatgatactgggtggtgtggcacagatgcttgccccgaagc

SEQ ID NO: 616430 - DNA, 75 bp, synthetic construct
  source 1..75: mol_type = other DNA
ttaccgggtgcccctgtcctctgcacaggcgggcgatatcctgctgtgctgctttggcgcatcggtggccaatca

SEQ ID NO: 616431 - DNA, 75 bp, synthetic construct
  source 1..75: mol_type = other DNA
gccggaggggtattttcgtatcgcgccggaagactggctgcgggcagagatgcagggggagattgtggccctggt

SEQ ID NO: 616432 - DNA, 75 bp, synthetic construct
  source 1..75: mol_type = other DNA
ttacggtgaaatgctggttggctcacggcgaatctcccaggacatcagtacccgtgatgaaggcggtgacgggaa

SEQ ID NO: 616433 - DNA, 75 bp, synthetic construct
  source 1..75: mol_type = other DNA
tggtaccagatacgtattgccggtgaggataccgcgccggaggcggtgtatgcctgtcttcacgaacaactgggt

SEQ ID NO: 616434 - DNA, 75 bp, synthetic construct
  source 1..75: mol_type = other DNA
aacgacgaacgcattctgtctggcgtcaccgccactggcacgcatctgccttcacggggatttacaacgatttgg

SEQ ID NO: 616435 - DNA, 75 bp, synthetic construct
  source 1..75: mol_type = other DNA
tccacattgtgccgcgactggccggggccggaaagggtggactgcagattgtgctgggggcggcagccatcgtgg

SEQ ID NO: 616436 - DNA, 75 bp, synthetic construct
  source 1..75: mol_type = other DNA
tttcgtcagaaactgagcgacggctggtatcaggtgcgcattgtcgggcgtgatgcaggagaaaatgaattatct

SEQ ID NO: 616437 - DNA, 75 bp, synthetic construct
  source 1..75: mol_type = other DNA
cactgggtgccagcatgatactgggtggtgtggctcagatgcttgccccgaagccaaaaacaccggaatacaggg

SEQ ID NO: 616438 - DNA, 75 bp, synthetic construct
  source 1..75: mol_type = other DNA
cctgtcctctgcacaggcgggcgatatcctgctgtgctgctttggcgcatcggtggccaatcatgccgccatata

SEQ ID NO: 616439 - DNA, 75 bp, synthetic construct
  source 1..75: mol_type = other DNA
ggatgactggtggcgcaacggtcagaacctttacctggacaatatggcggcgactggcttttaccgggtgcccct

SEQ ID NO: 616440 - DNA, 75 bp, synthetic construct
  source 1..75: mol_type = other DNA
cgggatgcctaccatctggcgggaattgatatgccggattttgagcgtgaggatgactggtggcgcaacggtcag

SEQ ID NO: 616441 - DNA, 75 bp, synthetic construct
  source 1..75: mol_type = other DNA
tggcgcatgcccggcggtgtgcgcctgcggagtcgtggggcttcgtgataagcacgccggagggggaacggtata

SEQ ID NO: 616442 - DNA, 75 bp, synthetic construct
  source 1..75: mol_type = other DNA
tcatcccggtggtctgccctggctgagtgaggcagaccggcgactgcagataaaaagtgccctgccctggtggct

SEQ ID NO: 616443 - DNA, 75 bp, synthetic construct
  source 1..75: mol_type = other DNA
cgttaataggcctgggtttaccggcagttggctctgcaacagatctcaaagtcgattttacggccactgtactcg

SEQ ID NO: 616444 - DNA, 75 bp, synthetic construct
  source 1..75: mol_type = other DNA
atgaaaaggatactactaacatccgcgttaataggtctgggtataccggcggttggttctgcagcagatcttaat

SEQ ID NO: 616445 - DNA, 75 bp, synthetic construct
  source 1..75: mol_type = other DNA
cgttaataggcctgggtttaccggcggttggctctgcaacagatcttaatgtcgattttacggccaccgtattag

SEQ ID NO: 616446 - DNA, 75 bp, synthetic construct
  source 1..75: mol_type = other DNA
gtcataaagacggtatggcagaaattggcacttttcacggcggcgatttacgcggcctgaccaacaaactggatt

SEQ ID NO: 616447 - DNA, 75 bp, synthetic construct
  source 1..75: mol_type = other DNA
ccttatttttgtattgaagggaaacaacctggtggttcttccataagagcctgctcgatgaagaattcatctgtc

SEQ ID NO: 616448 - DNA, 75 bp, synthetic construct
  source 1..75: mol_type = other DNA
aaccagttctgcgacggatattaatgtcgactttaccgccagattattggcaaccacttgtacgataaccattaa

SEQ ID NO: 616449 - DNA, 75 bp, synthetic construct
  source 1..75: mol_type = other DNA
ctataccgcggacacctgccgtcaatgcaaagagccgcaatgcatgaacgtctgcccgattggtgcgattacctg

SEQ ID NO: 616450 - DNA, 75 bp, synthetic construct
  source 1..75: mol_type = other DNA
gcaatatccctttgcgaccgaagtgatggatgttgccgacgccgggcaggtggcgcaggtatgtcagcgactgtt

SEQ ID NO: 616451 - DNA, 75 bp, synthetic construct
  source 1..75: mol_type = other DNA
atttctaaaacgcaggggtatgatcctgactcccgtctgagcagagccacgcttgaatttcaggtaatagcctga

SEQ ID NO: 616452 - DNA, 75 bp, synthetic construct
  source 1..75: mol_type = other DNA
atgaaacggatacttatagcaatccctttgcttagtctcagcctgccccaggccgtgcaagcggaaaatattgat

SEQ ID NO: 616453 - DNA, 75 bp, synthetic construct
  source 1..75: mol_type = other DNA
cggaaatcatgatcaaccttgccgggaacctgaccgccaaagcccggcagtacggcgcaaacatgtcgcagttcg

SEQ ID NO: 616454 - DNA, 75 bp, synthetic construct
  source 1..75: mol_type = other DNA
atgtcctgctggtcctttccgccgcatggatggcaaaacagatccctgatgtgcaacataacggcgtcttgcctg

SEQ ID NO: 616455 - DNA, 75 bp, synthetic construct
  source 1..75: mol_type = other DNA
gctgggtgaacgctggagcgactggaaacctgccgccgggcaaacctggcatagctttaacgattacattaattt

SEQ ID NO: 616456 - DNA, 75 bp, synthetic construct
  source 1..75: mol_type = other DNA
agactgagcaatcttaaagtcggggagtcagtcacacttaccccttccggttcagttaggacaacgaaaggaaga

SEQ ID NO: 616457 - DNA, 75 bp, synthetic construct
  source 1..75: mol_type = other DNA
tcatgaattctcgtatgttatcggaatggcgagagacgttttaattaatcacacacgagatgttgatattaatga

SEQ ID NO: 616458 - DNA, 75 bp, synthetic construct
  source 1..75: mol_type = other DNA
ctccgtaccgtctttgtcagtgttgatgatgccggtggcataaatgagacttacggaaagcagtctccagtcgat

SEQ ID NO: 616459 - DNA, 75 bp, synthetic construct
  source 1..75: mol_type = other DNA
caatggctgcaaccattgaggcttctaaattaccagttaactacgagaaaactgatatgaatagtatagcaattt

SEQ ID NO: 616460 - DNA, 75 bp, synthetic construct
  source 1..75: mol_type = other DNA
cgggtaaaatcaccactgaacagcaggaagccattaaacaactcgtcatgagtcgcggtcagtctctgccaaaag

SEQ ID NO: 616461 - DNA, 75 bp, synthetic construct
  source 1..75: mol_type = other DNA
ggttgccgctgatgggaagcttcgtaagctactctgccttcctttgaagaagttaaatggatggctgttcagcat

SEQ ID NO: 616462 - DNA, 75 bp, synthetic construct
  source 1..75: mol_type = other DNA
aaattgcagggtttcaacgtgttgagctacctctcgtcgcatgatacccgtctgttccgtgaaggggcgacaaag

SEQ ID NO: 616463 - DNA, 75 bp, synthetic construct
  source 1..75: mol_type = other DNA
ttgatgtggtgatgaaccataccggctatgccacgctggcggatatgcaggagtatcagtttggcgcattgtatc

SEQ ID NO: 616464 - DNA, 75 bp, synthetic construct
  source 1..75: mol_type = other DNA
atagctttaacgattacattaatttcagcgacaaaacaggctgggataaatggtggggaaaaaactggatcagaa

SEQ ID NO: 616465 - DNA, 75 bp, synthetic construct
  source 1..75: mol_type = other DNA
ccagtaaagacgaaggtgtggccctcgcggttcaactggctcgttatattggacttagaactgaagaaactgttc

SEQ ID NO: 616466 - DNA, 75 bp, synthetic construct
  source 1..75: mol_type = other DNA
acagcaccctactggtcgaaacggttaaacagttccaccgttccgggcgtatcgttgcggcgatttgtgctgtgc

SEQ ID NO: 616467 - DNA, 75 bp, synthetic construct
  source 1..75: mol_type = other DNA
aacaacacaccgccacaatggcgattgttcagagatggcgaatatacgctgcaaatcgacacccgctccggcacg

SEQ ID NO: 616468 - DNA, 75 bp, synthetic construct
  source 1..75: mol_type = other DNA
ggaaactggcaccctccgttatttctaaaacgcagggttatgatcctgattcccgtctgagcagagccacgcttg

SEQ ID NO: 616469 - DNA, 75 bp, synthetic construct
  source 1..75: mol_type = other DNA
agttctggagtcggaactgatacatcttgaagtggaaaatatgcagcttcgcgacaaactacgcgaccaggccgc

SEQ ID NO: 616470 - DNA, 75 bp, synthetic construct
  source 1..75: mol_type = other DNA
gagacacattcaactcgccagaaacaaaagagcgtatcgcgctgggtgagatgtatggttattacggtcatggtc

SEQ ID NO: 616471 - DNA, 75 bp, synthetic construct
  source 1..75: mol_type = other DNA
tggcagacaccgttacacgggattatttcaccctcagagagcggctgatgacgatgcagaagcaactggaagggg

SEQ ID NO: 616472 - DNA, 75 bp, synthetic construct
  source 1..75: mol_type = other DNA
gcggaatgacagcgaaaaaacagcggatgaagttattgagcattatgcgtcaatggatttgctgatcatcgacga

SEQ ID NO: 616473 - DNA, 75 bp, synthetic construct
  source 1..75: mol_type = other DNA
aacaaacaagactacaggcgcgaatggatgagttacgggcagagattgcatttgctcagaatggcgaaaagccat

SEQ ID NO: 616474 - DNA, 75 bp, synthetic construct
  source 1..75: mol_type = other DNA
aagacgacaaagatatgccggaacagaacgaaccgatgcaggacgagaacgaagcggcaatggcaatgctactgg

SEQ ID NO: 616475 - DNA, 75 bp, synthetic construct
  source 1..75: mol_type = other DNA
tggcttcattactccggcagatggcagcaaagatgtgttcgtacacttctcggctatccagggtaatggcttcaa

SEQ ID NO: 616476 - DNA, 75 bp, synthetic construct
  source 1..75: mol_type = other DNA
atgccgcgaacggcggcgaaatgggcgctggtagtgatactggtgccttttttattggtgggatgcgttagcctg

SEQ ID NO: 616477 - DNA, 75 bp, synthetic construct
  source 1..75: mol_type = other DNA
cgctggtagcgatactggtgccttttttattggtgggctgtgtcagcttaaataaggcgagccggctttttgacg

SEQ ID NO: 616478 - DNA, 75 bp, synthetic construct
  source 1..75: mol_type = other DNA
aagcctttggcggctacaagatgatcgatgtcccacaacccatttgtggcccggaagatgtcgtgattgaaatta

SEQ ID NO: 616479 - DNA, 75 bp, synthetic construct
  source 1..75: mol_type = other DNA
tacctggggcggtggtttttccaaatattgtcttgttcctggtgaaattctcaaaattcatcgtcatgcgttgtg

SEQ ID NO: 616480 - DNA, 75 bp, synthetic construct
  source 1..75: mol_type = other DNA
gcagcaggaagaaggctgtattgtcgtcgatcataaacgttgtattgggtgtagcgcctgtaccacagcatgtcc

SEQ ID NO: 616481 - DNA, 75 bp, synthetic construct
  source 1..75: mol_type = other DNA
ttatcaatgcccggtatgagggtattttgccaactatcttgatcagcaacctttcaccggaagaattgtgggcgt

SEQ ID NO: 616482 - DNA, 75 bp, synthetic construct
  source 1..75: mol_type = other DNA
cggctacgccacggcgctggcgtttgttgaggcgggagcgaaagttacaggttttgatcaagcgttcgctcagga

SEQ ID NO: 616483 - DNA, 75 bp, synthetic construct
  source 1..75: mol_type = other DNA
cggtacaactggcgctattcagccgcatattaatgttggtgatgtactggttaccacggcgtctgttcgtctgga

SEQ ID NO: 616484 - DNA, 75 bp, synthetic construct
  source 1..75: mol_type = other DNA
ttaccacggcgtctgtccgtctggatggcgcgagcctgcacttcgcaccgctggaattcccggctgtcgctgatt

SEQ ID NO: 616485 - DNA, 75 bp, synthetic construct
  source 1..75: mol_type = other DNA
aagtaaaccttggtctggataacaatacctggggcggtggtttttccaaatattgtctggttcctggtgaaattc

SEQ ID NO: 616486 - DNA, 75 bp, synthetic construct
  source 1..75: mol_type = other DNA
gagcagtttaaactcggcattccgctggggaaaattgcccgcccacaggagattgccaatacgattttgttcctc

SEQ ID NO: 616487 - DNA, 75 bp, synthetic construct
  source 1..75: mol_type = other DNA
tggctacgccacggcgctggcatttgttgaggccggagcgaaagttacaggttttgatcaagcgttcactctgga

SEQ ID NO: 616488 - DNA, 75 bp, synthetic construct
  source 1..75: mol_type = other DNA
tcggcaggcggcaatatcggcgagcggctgatggcgaccggggcgcgtcattacggcgatattcgcgccaccgcg

SEQ ID NO: 616489 - DNA, 75 bp, synthetic construct
  source 1..75: mol_type = other DNA
agggggagattcgctatgaaaaccgttccctctatggcatgagcgaggccgaccgccgtcgcctgctgcgcaccg

SEQ ID NO: 616490 - DNA, 75 bp, synthetic construct
  source 1..75: mol_type = other DNA
ttacccgtgctgtgaaaaactgctggcggaatgacagcgaaaaaacagcggatgaagttattgagcattatgcgt

SEQ ID NO: 616491 - DNA, 75 bp, synthetic construct
  source 1..75: mol_type = other DNA
ggtgttactgcatccgctcctgtagagctcagggcgctcattgagtacgttacggataagcttaatctgtcagga

SEQ ID NO: 616492 - DNA, 75 bp, synthetic construct
  source 1..75: mol_type = other DNA
ctcgcctttccaaccgcttatcaggttgccaatccaggtggcaatggaccccagagtagtgctgctgctattcaa

SEQ ID NO: 616493 - DNA, 75 bp, synthetic construct
  source 1..75: mol_type = other DNA
gccgaccaccttttccggcggtatgcagcaacgtttgcagatcgcccgcaacctggtgacgcatccgaagctggt

SEQ ID NO: 616494 - DNA, 75 bp, synthetic construct
  source 1..75: mol_type = other DNA
tgattaccggagccgcacgtggtattggaaagggctgtgcgctggagcttgcgcgtggcggatttaatctgctga

SEQ ID NO: 616495 - DNA, 75 bp, synthetic construct
  source 1..75: mol_type = other DNA
gctgccgcccgcctgtttgccgctcgcctttgtgaagaacagattggcgtttatgaaatccgtcctggtttaatc

SEQ ID NO: 616496 - DNA, 75 bp, synthetic construct
  source 1..75: mol_type = other DNA
tgttggcacaacccaaaccagaatcggaactgccgcaccgttcgattatttttgtcagctccattaacgccatca

SEQ ID NO: 616497 - DNA, 75 bp, synthetic construct
  source 1..75: mol_type = other DNA
actatgcgcctacgctgctggctggcgcgttacaggacgatgccatcgtgcaaaaagaggtatttggtccggtgg

SEQ ID NO: 616498 - DNA, 75 bp, synthetic construct
  source 1..75: mol_type = other DNA
tccgtcgcgatccgttgggggtcgtggcttctatcgcaccgtggaattatccgctgatgatggcagcgtggaaac

SEQ ID NO: 616499 - DNA, 75 bp, synthetic construct
  source 1..75: mol_type = other DNA
ccgaggcatccgcagagcaggtagatgctgctgtgcgcgcggcagatgcagcatttgccgaatgggggcaaacca

SEQ ID NO: 616500 - DNA, 75 bp, synthetic construct
  source 1..75: mol_type = other DNA
gtgaatgtgctcccattatcatcggtgcggttgttattgccagtgcggctgaagttgcatcaatgatggttaact

SEQ ID NO: 616501 - DNA, 75 bp, synthetic construct
  source 1..75: mol_type = other DNA
aagataaaaagcgtagcgaggctattcgcgccttagattcatggatgcgagatgggtatagtgctgcgcaaattt

SEQ ID NO: 616502 - DNA, 75 bp, synthetic construct
  source 1..75: mol_type = other DNA
taacgttacagaaataccagccagaccctgaagatttatgctcactgtgtggcggaaatcatggtaaagctgcca

SEQ ID NO: 616503 - DNA, 75 bp, synthetic construct
  source 1..75: mol_type = other DNA
tactggcacagccgaaaccggaagcggagctgccgcaccgctcgattattttcgtcagttccatcaacgccatca

SEQ ID NO: 616504 - DNA, 75 bp, synthetic construct
  source 1..75: mol_type = other DNA
gcagttcttcaaaggtgcgcagaagctgggcgaactgggacagccggtgctggtgcactgcgaaaacgcgctgat

SEQ ID NO: 616505 - DNA, 75 bp, synthetic construct
  source 1..75: mol_type = other DNA
taaaactggattatctaaatcagcaatatatgagaaaattcgaaaggcattaaattcgatttattatacggaatg

SEQ ID NO: 616506 - DNA, 75 bp, synthetic construct
  source 1..75: mol_type = other DNA
ttacaatgccggacaggattgtacagcggcttgtcggatctacgcgcaaaaaggcatttacgatacgctggtgga

SEQ ID NO: 616507 - DNA, 75 bp, synthetic construct
  source 1..75: mol_type = other DNA
gacggtctgacctctattttcgttggcgacaacagcatggtggcgcagatggacgacctgattaacacctacacg

SEQ ID NO: 616508 - DNA, 75 bp, synthetic construct
  source 1..75: mol_type = other DNA
cagctacaacggcgagtcgattgtcgattacggcattacgctcgactccaacggccatttgcagatcgactctga

SEQ ID NO: 616509 - DNA, 75 bp, synthetic construct
  source 1..75: mol_type = other DNA
gatagcaccggggcgcagagcgcgttttcggtgagcgtaacggggcatgacgccagcaacgatagcgccagcgcg

SEQ ID NO: 616510 - DNA, 75 bp, synthetic construct
  source 1..75: mol_type = other DNA
catatggtttgaatcaaaattagatgaacaaatacaggtattaaaacaatatgatgttgtggcatcaggttattt

SEQ ID NO: 616511 - DNA, 75 bp, synthetic construct
  source 1..75: mol_type = other DNA
tgcctgcatttaacgcggctaaaaccataaatgctagtatacaatcagtattaagtcaaacatataccgattata

SEQ ID NO: 616512 - DNA, 75 bp, synthetic construct
  source 1..75: mol_type = other DNA
tatttgatgtggctggaaataattaataaaacaaatggtgctatttgtattcaagataatctggcgtattacatg

SEQ ID NO: 616513 - DNA, 75 bp, synthetic construct
  source 1..75: mol_type = other DNA
agtatttaagttagtgataattactctcattttttactttatggggcattcatatgcaaatgagtttgcaaattt

SEQ ID NO: 616514 - DNA, 75 bp, synthetic construct
  source 1..75: mol_type = other DNA
ttgcactggcttttggttcacgagtggttggcctcgaactggcaaaaatgattgtggatgcgtggctgggcgcac

SEQ ID NO: 616515 - DNA, 75 bp, synthetic construct
  source 1..75: mol_type = other DNA
gtcgtatctacgcgcaaaaaggcatttacgacgtgctggtagaaaaacttggtgccgcagtggcaacgttaaaat

SEQ ID NO: 616516 - DNA, 75 bp, synthetic construct
  source 1..75: mol_type = other DNA
gtgacggcgacggttttatcgacgccagcgaactggtgagtgcgattaacgactccgacgataatccgggcgttt

SEQ ID NO: 616517 - DNA, 75 bp, synthetic construct
  source 1..75: mol_type = other DNA
gatctcaccacctttaacattagcgaagattccagcgccagccaggagaaagtgcagacctttgtcgatgcctat

SEQ ID NO: 616518 - DNA, 75 bp, synthetic construct
  source 1..75: mol_type = other DNA
aagaaattgcgtatgccgatgttgccactcaggcggcaaatttgcaggagaagcagaccgagctggatgccgaaa

SEQ ID NO: 616519 - DNA, 75 bp, synthetic construct
  source 1..75: mol_type = other DNA
cgatcctaaaacaaaaaacagcgattatgatatttatgtcactgcaaaaatagagtatcagggcaaagaacggac

SEQ ID NO: 616520 - DNA, 75 bp, synthetic construct
  source 1..75: mol_type = other DNA
gaaggtgagttcattggcaaacaagagaagagcaccaacgagctttctgcaaaagaagcaaacagccttgtatgg

SEQ ID NO: 616521 - DNA, 75 bp, synthetic construct
  source 1..75: mol_type = other DNA
agaagagcaccaacgagctttccgcaaaagaagcaaacagccttgtatggctatgggattatgccaaccgctcac

SEQ ID NO: 616522 - DNA, 75 bp, synthetic construct
  source 1..75: mol_type = other DNA
gacaaggtaatccagtatcaggaagagtgtgacgatgtgctctacgagtactggactaaaggccatgtgattaac

SEQ ID NO: 616523 - DNA, 75 bp, synthetic construct
  source 1..75: mol_type = other DNA
caaccgctcacaggcattattccgcgaattgtatccggcgctgaaacaaattcaatcgaactattccggcagatg

SEQ ID NO: 616524 - DNA, 75 bp, synthetic construct
  source 1..75: mol_type = other DNA
atcggcaaacaagagaagagcaccaacgagctttccgcaaaagaagcaaacagccttgtatggctatgggattat

SEQ ID NO: 616525 - DNA, 75 bp, synthetic construct
  source 1..75: mol_type = other DNA
cgagatgttgatattaatgagccaggcggaccgacgaacctttcagcatggataagacttaagaataaagaatta

SEQ ID NO: 616526 - DNA, 75 bp, synthetic construct
  source 1..75: mol_type = other DNA
aaagaagcaaacagccttgtatggctatgggattatgccaaccgctcacaggcattattccgcgaactgtatccg

SEQ ID NO: 616527 - DNA, 75 bp, synthetic construct
  source 1..75: mol_type = other DNA
gcatctcagataccgcaagccgtagagtacatccacagggtagtgcttgaaggtgagttcattggcaaacaagag

SEQ ID NO: 616528 - DNA, 75 bp, synthetic construct
  source 1..75: mol_type = other DNA
gttttaatcaatcacacacgagatgttgatattaatgagccagacggaccaacgaatctttccgcatgggtaagg

SEQ ID NO: 616529 - DNA, 75 bp, synthetic construct
  source 1..75: mol_type = other DNA
gtcatgagtcgcggtcagtctctaccaaaagaaaagcaggctaaggcgatgatcaccatgtggtcgtcactgaaa

SEQ ID NO: 616530 - DNA, 75 bp, synthetic construct
  source 1..75: mol_type = other DNA
caaccgctcacaggcattattccgcgaactgtatccggcattaaaacaaattcaatcgaactattccggcagatg

SEQ ID NO: 616531 - DNA, 75 bp, synthetic construct
  source 1..75: mol_type = other DNA
gaacatacgtgtgcaaggagcttgtttactcctacgccatgtggattagcgcagcatttgcgctgaaggttatcc

SEQ ID NO: 616532 - DNA, 75 bp, synthetic construct
  source 1..75: mol_type = other DNA
cattattggtcgtgcggtgatgaccgggctgaaagaagccgtagcagaaatgaagcgtctgatgctggaagcgcg

SEQ ID NO: 616533 - DNA, 75 bp, synthetic construct
  source 1..75: mol_type = other DNA
gtcgacattccgtaccgggcttcgccggactcgctctatttcaatggatttttggacgttgctgacactattgtc

SEQ ID NO: 616534 - DNA, 75 bp, synthetic construct
  source 1..75: mol_type = other DNA
gttgaacgttttgtggagaagccgaatttctcaagtgcatgtgattacattagttctggtgaatatctatggaat

SEQ ID NO: 616535 - DNA, 75 bp, synthetic construct
  source 1..75: mol_type = other DNA
tactggcacagccgaaaccggaagcagaactgccgcaccgctcgattattttcgtcagttccatcaacgccatca

SEQ ID NO: 616536 - DNA, 75 bp, synthetic construct
  source 1..75: mol_type = other DNA
tggattcgactgatacgcagcttcccggcgaatatgacctttttgatttaatggcgcaggttactgaagagaacc

SEQ ID NO: 616537 - DNA, 75 bp, synthetic construct
  source 1..75: mol_type = other DNA
atgctatctgaacatgatgaacaacggtatgctactgatacgcagcttcccggcgaatatgacctttttgattta

SEQ ID NO: 616538 - DNA, 75 bp, synthetic construct
  source 1..75: mol_type = other DNA
aaacgggaagaatacctggcgatgagttcatggaaaggttctcgtggcatgtggcggataaggggttccgtatgg

SEQ ID NO: 616539 - DNA, 75 bp, synthetic construct
  source 1..75: mol_type = other DNA
aaagccattgccgccattcctgagatgcacgaactgaatatcggtcatgccattattggtcgtgcagtgatgacc

SEQ ID NO: 616540 - DNA, 75 bp, synthetic construct
  source 1..75: mol_type = other DNA
cgccacattactgaccgcgatgtgcgcatcctgcgtcagacgctggatacccgcatgaatctggagatggcggtg

SEQ ID NO: 616541 - DNA, 75 bp, synthetic construct
  source 1..75: mol_type = other DNA
atgctgatgccaaaactgacgccgaacaggcgcaagagctggcgcgtatcgccaaagccgcgacctttgccgcta

SEQ ID NO: 616542 - DNA, 75 bp, synthetic construct
  source 1..75: mol_type = other DNA
ttaatgatcgtccggatgcggatagcgtagaaaaattacatgccacacaacaagaatgtctggcggaaggcgtgg

SEQ ID NO: 616543 - DNA, 75 bp, synthetic construct
  source 1..75: mol_type = other DNA
accagcctgattcacaggtcgtcgggcattgcgctaacgacacgcataaaattctctacacccgcaccaccagcg

SEQ ID NO: 616544 - DNA, 75 bp, synthetic construct
  source 1..75: mol_type = other DNA
gccaaagctgcgacctttgccgcaagcctcggtctgaaagttaatgccggtcacggcctgacctatcacaacgtg

SEQ ID NO: 616545 - DNA, 75 bp, synthetic construct
  source 1..75: mol_type = other DNA
taaacctgccgccggatctctatctgatgcgtagtaccggtatcgatatggatatcaactatcgctacaccacgc

SEQ ID NO: 616546 - DNA, 75 bp, synthetic construct
  source 1..75: mol_type = other DNA
gctaacgcgggcttcccgttcagccggatggcggatctgtcgcaaaccatcaccgtgatgccgaaaacgcctaac

SEQ ID NO: 616547 - DNA, 75 bp, synthetic construct
  source 1..75: mol_type = other DNA
aagccccggtgattgagatgatcaaccatccgcagaatccttacgtcaaactgctggtggtgtttggtcgtgacg

SEQ ID NO: 616548 - DNA, 75 bp, synthetic construct
  source 1..75: mol_type = other DNA
ccactgcaattattcattatgcaggaaaaaaaatcctgattgacccgatgttatcagcaaaaggttcattccctg

SEQ ID NO: 616549 - DNA, 75 bp, synthetic construct
  source 1..75: mol_type = other DNA
gcgtattccggtgttacaaggtttgctggatggtaaaatggatgtctctattccggcgttgaagttgggagcgac

SEQ ID NO: 616550 - DNA, 75 bp, synthetic construct
  source 1..75: mol_type = other DNA
gcaaccactgatcaatgctgagccagccgtgcctgcccaggcggagcaaagcccgcaggtgggccaggtgatgcc

SEQ ID NO: 616551 - DNA, 75 bp, synthetic construct
  source 1..75: mol_type = other DNA
aagctttcctcgatatgttggcgtggtcagaaggaacggataacggacggcagccaacccgcaatcacggctacg

SEQ ID NO: 616552 - DNA, 75 bp, synthetic construct
  source 1..75: mol_type = other DNA
gctaacgcgggcttcccattcagccggatggcggatctgtcgcaaaccatcaccgtgatgccgaaagcgcctaac

SEQ ID NO: 616553 - DNA, 75 bp, synthetic construct
  source 1..75: mol_type = other DNA
cttccagccggtgcagaatcatgtggtgattggtgacgactccaccatcgacttctcgaagtattaccacttcat

SEQ ID NO: 616554 - DNA, 75 bp, synthetic construct
  source 1..75: mol_type = other DNA
cggtggataactgtattaccttccagccagtgcagaatcacgtagttattggcgacgattccaccatcgacttct

SEQ ID NO: 616555 - DNA, 75 bp, synthetic construct
  source 1..75: mol_type = other DNA
gggtacacgcacttgcagatcatggagatgggtaactggagcaatgcagaaatggtttcccgctatatccgtaac

SEQ ID NO: 616556 - DNA, 75 bp, synthetic construct
  source 1..75: mol_type = other DNA
tggatgacgttatcgctcaggtgaaacagattgtaggtgatatgccggtttacctgacttttgatatcgactgtc

SEQ ID NO: 616557 - DNA, 75 bp, synthetic construct
  source 1..75: mol_type = other DNA
tcaaacggcacatatgatataggccgtatgcagtttaatacggtttatttaaaggatctggaaaaatacggtatt

SEQ ID NO: 616558 - DNA, 75 bp, synthetic construct
  source 1..75: mol_type = other DNA
ttatcgggtaatgcagggggatgatccgcaaggaatcgtctggttcccggactgttatccgcaaatttactacta

SEQ ID NO: 616559 - DNA, 75 bp, synthetic construct
  source 1..75: mol_type = other DNA
ccggactgagcgtaaaaacaatcaagcggacaatgccagaactcatagagaacaaacttatcgaggttaaagcgg

SEQ ID NO: 616560 - DNA, 75 bp, synthetic construct
  source 1..75: mol_type = other DNA
tatcattagaaaaactaatagtggtattacagtcgaatgtgaaaatgcaaatgaaatagctcgagcaataatgaa

SEQ ID NO: 616561 - DNA, 75 bp, synthetic construct
  source 1..75: mol_type = other DNA
atcaaatgcctggagtattcagtagacctccatatccacattttataacattcgatattaatgggctttataaga

SEQ ID NO: 616562 - DNA, 75 bp, synthetic construct
  source 1..75: mol_type = other DNA
atgcaaaatcttaatcctcagcgtaaagctttcctcgatatggtggcctggtcagaaggaacggataatgggcta

SEQ ID NO: 616563 - DNA, 75 bp, synthetic construct
  source 1..75: mol_type = other DNA
ggcgtgcaaatatgcaaggtgcgctttcagagttgactgggaaagctttatctggatattactatgcaactttac

SEQ ID NO: 616564 - DNA, 75 bp, synthetic construct
  source 1..75: mol_type = other DNA
agtgccaattgatttctttaaattcttagatagaactatgcttaaaattagcaatggagtcactgagaatttctc

SEQ ID NO: 616565 - DNA, 75 bp, synthetic construct
  source 1..75: mol_type = other DNA
cttgggccgcacatggtgatctccagttttataagaatgcagtgcaaaaacatttgataccgcaagggaatattt

SEQ ID NO: 616566 - DNA, 75 bp, synthetic construct
  source 1..75: mol_type = other DNA
atcaaaaacaatttcgacgcgtttcttgctctgacaccagaaacaaaagcggagcgcaattttagacgcgatata

SEQ ID NO: 616567 - DNA, 75 bp, synthetic construct
  source 1..75: mol_type = other DNA
tgttgctagatatcttcacgcctgaagtctgtctctcgctgcttgagcaacagcgttgtacctgtatgcttggcg

SEQ ID NO: 616568 - DNA, 75 bp, synthetic construct
  source 1..75: mol_type = other DNA
aaggtgcgatagaaggcattcaaacccgcgaccaggcactattgaccgaatgccgtactttgctatacggccaat

SEQ ID NO: 616569 - DNA, 75 bp, synthetic construct
  source 1..75: mol_type = other DNA
gaagtgggtcaacgtgccccgcagcatcgtaatgttattaatgccgcaaaggcggccggcgtgaaatttatcgct

SEQ ID NO: 616570 - DNA, 75 bp, synthetic construct
  source 1..75: mol_type = other DNA
gcactggaacacggcgtatttatcggtgcggcgggcgatggcaaaatcgcctcagcaacgcgggcagattatgcg

SEQ ID NO: 616571 - DNA, 75 bp, synthetic construct
  source 1..75: mol_type = other DNA
gatctttctgcgctgcgtttctttctttgcggtggcaccacgatccccaaaaaagtggcgcgagaatgccaacaa

SEQ ID NO: 616572 - DNA, 75 bp, synthetic construct
  source 1..75: mol_type = other DNA
cgagccggtatggcggtaggtctggcggggctgtttattgaagcgcatccggatccggaacatgcgaaatgtgat

SEQ ID NO: 616573 - DNA, 75 bp, synthetic construct
  source 1..75: mol_type = other DNA
tttggcacctcaacgaatgctttccagcggtagagcatgactctgaagatattgtgttggagcgtgggtattttt

SEQ ID NO: 616574 - DNA, 75 bp, synthetic construct
  source 1..75: mol_type = other DNA
atggcgctgacatggggcgggctggcgatctatacgcgggaaactgacagggttcgccaacttgctgattcacga

SEQ ID NO: 616575 - DNA, 75 bp, synthetic construct
  source 1..75: mol_type = other DNA
cttttggtttatatcaggcgctattaccactggccacccaaacctttgatggatcgattcaaagtgaaattgcca

SEQ ID NO: 616576 - DNA, 75 bp, synthetic construct
  source 1..75: mol_type = other DNA
ttccgtatcggaggtgctggataaattcagaaaaaactacgacctgataatgtcgctaccgcaggaaacgaaaga

SEQ ID NO: 616577 - DNA, 75 bp, synthetic construct
  source 1..75: mol_type = other DNA
ggcatgccaaagggcgtgatgctaacgcataataatattctcgccagcgaacgggcttattgtgcacggcttaac

SEQ ID NO: 616578 - DNA, 75 bp, synthetic construct
  source 1..75: mol_type = other DNA
aggctttcctcgatatggtggcatggtcagaaggaacggataacggacggcagaaaaccagaaatcatggttatg

SEQ ID NO: 616579 - DNA, 75 bp, synthetic construct
  source 1..75: mol_type = other DNA
acatgcccaacatggatggcctggaattgctgaaaacgattcgtgcagatggcgggatgtcagcattgccagtgt

SEQ ID NO: 616580 - DNA, 75 bp, synthetic construct
  source 1..75: mol_type = other DNA
tcaaatcaacagccgccggacgttaccagtttctttcacgctggtgggatgcttaccgtaaacagcttggcctga

SEQ ID NO: 616581 - DNA, 75 bp, synthetic construct
  source 1..75: mol_type = other DNA
gccctgtttatggcgctcaggagccagcgcccacctgccgggctaatccaccactctgatcgaggttcacagtac

SEQ ID NO: 616582 - DNA, 75 bp, synthetic construct
  source 1..75: mol_type = other DNA
agaacaaatggtagtgtccgctattgtcagtacacctcaaccatctggcttgaacctgcgagcgaacgcaccgtt

SEQ ID NO: 616583 - DNA, 75 bp, synthetic construct
  source 1..75: mol_type = other DNA
cgcggcattaaattattaagtgtttatggttccacagaaagttcgccgcacgcagtggtgaatctcgacgatcct

SEQ ID NO: 616584 - DNA, 75 bp, synthetic construct
  source 1..75: mol_type = other DNA
ttgtgtgataatgataaatcccaaaaagggattaatacgctgcgtctccatttcgatattttaaagaattttgat

SEQ ID NO: 616585 - DNA, 75 bp, synthetic construct
  source 1..75: mol_type = other DNA
aaacttgtcacgctaaacccgcaacttaaatcaaccgcagctggacgttaccagcttctttcccgttggtgggat

SEQ ID NO: 616586 - DNA, 75 bp, synthetic construct
  source 1..75: mol_type = other DNA
cgacaccgagcacatcagccagagcatgcgcgatattctgctgacgccggtcggctcgcgggtgatgcgtcgtga

SEQ ID NO: 616587 - DNA, 75 bp, synthetic construct
  source 1..75: mol_type = other DNA
tcctcgcggcaatcttattcgttcttggcttaaccggtctggttatccgtcgcaatctgctgtttatgctgattg

SEQ ID NO: 616588 - DNA, 75 bp, synthetic construct
  source 1..75: mol_type = other DNA
cccgcgcaattggtccatctactggcctgtctggctgggattttgtgtctgatgcagagcgactgatgttctccc

SEQ ID NO: 616589 - DNA, 75 bp, synthetic construct
  source 1..75: mol_type = other DNA
ttgttgcgttctggttgttcgtatcatgtatgcccatcatcttcacagcaaggtatatggaaaaagttgatgttt

SEQ ID NO: 616590 - DNA, 75 bp, synthetic construct
  source 1..75: mol_type = other DNA
ttacaaaacggcatcactgcaagcttccgtaatctgatatcaaatttagaaaaaaatgatttgcttgattattta

SEQ ID NO: 616591 - DNA, 75 bp, synthetic construct
  source 1..75: mol_type = other DNA
attactcaaagtcttttactatagctggaatattgaaaaaaaagggatggcatggattttcataagtaataaaaa

SEQ ID NO: 616592 - DNA, 75 bp, synthetic construct
  source 1..75: mol_type = other DNA
gatgcgcagcgtaggcctggcgatattcagcatctcagcccggcaacggaaaaccaaccgtcgccttttacccga

SEQ ID NO: 616593 - DNA, 75 bp, synthetic construct
  source 1..75: mol_type = other DNA
ttccggctggttaatggtcgctcgctggatgaggtgcaggccagttttaatcaccagacccagagtgagacggaa

SEQ ID NO: 616594 - DNA, 75 bp, synthetic construct
  source 1..75: mol_type = other DNA
ccgcgagatagaacgtgaggtgacgggttacggcatcatcgatgaagatgctttataccgctcttcagaatatgt

SEQ ID NO: 616595 - DNA, 75 bp, synthetic construct
  source 1..75: mol_type = other DNA
ccacggcgcgcagttttgacgggcgaatgacggtcacgttaaccggtcagcacaacgacaccggccagctacttt

SEQ ID NO: 616596 - DNA, 75 bp, synthetic construct
  source 1..75: mol_type = other DNA
atcctttgtcattatctggtttatctcacatgagaaaacacatattcgtttacttagtgcattcctggtcggaat

SEQ ID NO: 616597 - DNA, 75 bp, synthetic construct
  source 1..75: mol_type = other DNA
aaagaagtatggactggaagtagataatcatatgcctacccgttccgcttctgagaatcgggccaaggatatgga

SEQ ID NO: 616598 - DNA, 75 bp, synthetic construct
  source 1..75: mol_type = other DNA
ggcaacccgttactacggcgtagcgtatggttactccaaaggtatcgatatcgttaaagatatgggtggtggctt

SEQ ID NO: 616599 - DNA, 75 bp, synthetic construct
  source 1..75: mol_type = other DNA
ggctggcgcgcaggtcgtgatttgcaacgtcatgatatcggcgggaaaacagggacgaccaacagttcgaaggat

SEQ ID NO: 616600 - DNA, 75 bp, synthetic construct
  source 1..75: mol_type = other DNA
cgggacaaccaacagttcaaaagatgcgtggttctcaggttacggtccaggtgttgtgacctcagtatggattgg

SEQ ID NO: 616601 - DNA, 75 bp, synthetic construct
  source 1..75: mol_type = other DNA
atcttccgtgcggcaagcgtggcgctgttctccggtcacgcgtcacaaggggcgagtaccattacccagcagctg

SEQ ID NO: 616602 - DNA, 75 bp, synthetic construct
  source 1..75: mol_type = other DNA
aaactaaagatcgtgaactaagagcaggaaagcttaagtacggtgacattgttcttactacccgtggcacagtag

SEQ ID NO: 616603 - DNA, 75 bp, synthetic construct
  source 1..75: mol_type = other DNA
tcttctttctactcttggcttggaaaatatgaatactgacgctgcggttccaggtctaaacagagataatgcaca

SEQ ID NO: 616604 - DNA, 75 bp, synthetic construct
  source 1..75: mol_type = other DNA
aaggggcgagtaccattacccagcagctggcgagaaacttcttcctcagtccagaacgcacgctgatgcgtaaga

SEQ ID NO: 616605 - DNA, 75 bp, synthetic construct
  source 1..75: mol_type = other DNA
tgtatgtggctgctgcgcaaaaaagttaacccgctgtggatcatcgttggtttcttcgtcatcggtatcgctggt

SEQ ID NO: 616606 - DNA, 75 bp, synthetic construct
  source 1..75: mol_type = other DNA
atgtcaacatcccgctggttgtctctcgcattactgaccagacgggcaaagaacacgttaccactgtccagacta

SEQ ID NO: 616607 - DNA, 75 bp, synthetic construct
  source 1..75: mol_type = other DNA
tcggtttgatggggccgctggctggtgtaggcgacccgatcttctggggaaccgtacgtccggtatttgcagcac

SEQ ID NO: 616608 - DNA, 75 bp, synthetic construct
  source 1..75: mol_type = other DNA
ggctggcgtgcaggtcgtgatttgcagcgtcgcgatatcggcgggaaaaccggtaccactaacagttcgaaagat

SEQ ID NO: 616609 - DNA, 75 bp, synthetic construct
  source 1..75: mol_type = other DNA
atggataaaggtctgacgctggcaagtatgttgaacgatgtgccaatttctcgctgggatgcaggtgccggttct

SEQ ID NO: 616610 - DNA, 75 bp, synthetic construct
  source 1..75: mol_type = other DNA
taccgctacatcgagccacaactgccggatgtggcgacattaaaagatgttcgcctgcaaattccgatgcagatt

SEQ ID NO: 616611 - DNA, 75 bp, synthetic construct
  source 1..75: mol_type = other DNA
ttcccaatcaggatgcgtttgatcaagaggggcatggcaccgccgtagcgagtattgctctgtatggcgacgttg

SEQ ID NO: 616612 - DNA, 75 bp, synthetic construct
  source 1..75: mol_type = other DNA
ctgcgcctgccgctgttctataacctgtcgcccgtcaatcagcgcacggtaattgcgaccttattgaactacttc

SEQ ID NO: 616613 - DNA, 75 bp, synthetic construct
  source 1..75: mol_type = other DNA
gtacattacgcgggcgtggcctgtgaaatggacactattatggcgctggcgaaaaagcataacctgtttgtggtg

SEQ ID NO: 616614 - DNA, 75 bp, synthetic construct
  source 1..75: mol_type = other DNA
cgaccagcactatcctcgcgatgagctcctcgcatgcagcgttcacagctagtggtaacaccggtacaacaaaac

SEQ ID NO: 616615 - DNA, 75 bp, synthetic construct
  source 1..75: mol_type = other DNA
cggtaaatgaattgagtaagtcttcatttaatcaggcagccataattggtcaaactggcgctaataatagtgcac

SEQ ID NO: 616616 - DNA, 75 bp, synthetic construct
  source 1..75: mol_type = other DNA
agccagcaatagtattaattttgccggatagaagagattttgaaactgagagcaaaaaaaatttgatgagttttt

SEQ ID NO: 616617 - DNA, 75 bp, synthetic construct
  source 1..75: mol_type = other DNA
acaactgaatcagtgaacacgctatcggaaaaatacaaaaaggtgcttaatttatttcctgcgggcgtcatatga

SEQ ID NO: 616618 - DNA, 75 bp, synthetic construct
  source 1..75: mol_type = other DNA
accggactggataaacgtattgcgctgtttaccatgtcgaaaataggtgccagcagtcgcagcattattatcggc

SEQ ID NO: 616619 - DNA, 75 bp, synthetic construct
  source 1..75: mol_type = other DNA
tcggtgatcctctatttcctcgcacgtaaattgttgccgccagaaacggaagctgttgaaggggggagcgaggcc

SEQ ID NO: 616620 - DNA, 75 bp, synthetic construct
  source 1..75: mol_type = other DNA
tggacaaaatatgatcgccattctggtgtttgccattattgtctggatcagcgaagcgatggattacaccgccag

SEQ ID NO: 616621 - DNA, 75 bp, synthetic construct
  source 1..75: mol_type = other DNA
ttgggccgttggtggagatataagtggatcacttttcatccgtcgttgacagttacacagcaactggagcaggta

SEQ ID NO: 616622 - DNA, 75 bp, synthetic construct
  source 1..75: mol_type = other DNA
tctggaaaccggtgagggggtaccacaaaatatcaaacagggcgaccgggttattgtagatccctatgtttattg

SEQ ID NO: 616623 - DNA, 75 bp, synthetic construct
  source 1..75: mol_type = other DNA
atgtttgacaaagaaacgtacatcgaaaacaaagcctttacggtgcaaccgtttgatcccgcaaacctgcgattg

SEQ ID NO: 616624 - DNA, 75 bp, synthetic construct
  source 1..75: mol_type = other DNA
gtggacaggaaagaataattaatctgaataatctcactattgaactactttcagataatgacttagcaaaagtca

SEQ ID NO: 616625 - DNA, 75 bp, synthetic construct
  source 1..75: mol_type = other DNA
tgtttttgctttgttctggcgtgcttatcgtcgcgttaatgttatgcgtatacgcgattgtaatgactggtgcgc

SEQ ID NO: 616626 - DNA, 75 bp, synthetic construct
  source 1..75: mol_type = other DNA
atcaccgggcaagtaaaacgcgatctgaaaataatgcggcagatatggaaaggcattccggcagagaaagtttgc

SEQ ID NO: 616627 - DNA, 75 bp, synthetic construct
  source 1..75: mol_type = other DNA
gcctgccaggtgaacgatcgcagcgtggatgacgttatcgcccaagtgaaacagattgtgggtgatatgccggtt

SEQ ID NO: 616628 - DNA, 75 bp, synthetic construct
  source 1..75: mol_type = other DNA
caatacacttccagagcatctgatttcgcctgcggtaaatgcggccagagtctgtattctggatagcggcatcaa

SEQ ID NO: 616629 - DNA, 75 bp, synthetic construct
  source 1..75: mol_type = other DNA
tatgtattctggatagtggtattaataccaaccatcctttgttaagcgctgccattgctgaaagcgccagcttta

SEQ ID NO: 616630 - DNA, 75 bp, synthetic construct
  source 1..75: mol_type = other DNA
acgtatgtgtacagcgttaggttatggtgaacatcaacgtgtaagtgcagttcattacgatacagacaatgtaca

SEQ ID NO: 616631 - DNA, 75 bp, synthetic construct
  source 1..75: mol_type = other DNA
catcagaaattaccccgctgaccgcgttgaagttggcagagctggcgaaagatatcttcccggctggcgtgatta

SEQ ID NO: 616632 - DNA, 75 bp, synthetic construct
  source 1..75: mol_type = other DNA
gccgcacggtgggcagaaactttctggttacggcaaggatatgtcactttatgggctggaggattacaccgtcgt

SEQ ID NO: 616633 - DNA, 75 bp, synthetic construct
  source 1..75: mol_type = other DNA
taccggctctgcatggggaaaaccgatgtggggcacctggtgggtatgggatgcacgcctgacttctgaactggt

SEQ ID NO: 616634 - DNA, 75 bp, synthetic construct
  source 1..75: mol_type = other DNA
atatgctttcggcgatgcccgtgagatgagcgagaagctgcaggcgcacgccgagaagctgctggctgccggtaa

SEQ ID NO: 616635 - DNA, 75 bp, synthetic construct
  source 1..75: mol_type = other DNA
agatgcgtcttttttatctgaaccactctccgtactcctggcactggaatgtcagattcagaccccaggaagctg

SEQ ID NO: 616636 - DNA, 75 bp, synthetic construct
  source 1..75: mol_type = other DNA
ggcgggtaaactgggggagctaatgcaaatcacgctgctgattaaaaccgaggggctgacgcaactggttcagcc

SEQ ID NO: 616637 - DNA, 75 bp, synthetic construct
  source 1..75: mol_type = other DNA
atcctcaatttatatttgtttttgccgccgttcgtcgtgcagaacgtaaaccacgtatcagtatgctgcgtattg

SEQ ID NO: 616638 - DNA, 75 bp, synthetic construct
  source 1..75: mol_type = other DNA
atcaggggcagacccgcgatgagatcgccgcaaactttaaattaccctcctcgcttgctaacacctgggcgaatc

SEQ ID NO: 616639 - DNA, 75 bp, synthetic construct
  source 1..75: mol_type = other DNA
gagaaatctggaagccgatgcgcttgaacagttaggctaccaggcagaatccgggccgtggcgtaatttctatct

SEQ ID NO: 616640 - DNA, 75 bp, synthetic construct
  source 1..75: mol_type = other DNA
tagaaaacagcctgtggcaaggcgtaccgaattatctgcgcgaactgaacgaacaactggaagagaatctcggct

SEQ ID NO: 616641 - DNA, 75 bp, synthetic construct
  source 1..75: mol_type = other DNA
aaggcgctggcatgggtggcgaaaaacatcaaagtgccactgactgaaccccagaaagcgggtattgcgtcattc

SEQ ID NO: 616642 - DNA, 75 bp, synthetic construct
  source 1..75: mol_type = other DNA
aacggtgaagtggtcggaacggtgatgggggggtatgacgggcatcgcggatctgcttattatcttggcgtgcat

SEQ ID NO: 616643 - DNA, 75 bp, synthetic construct
  source 1..75: mol_type = other DNA
ggtgaaaaacaattatgtccgcgctgtgcaaatccagaatggacgaaggcaagtcgggtaaaacgggtgacctga

SEQ ID NO: 616644 - DNA, 75 bp, synthetic construct
  source 1..75: mol_type = other DNA
gttatccgaacacccgtatttatacccaccaagcgacagggtgcctggcttgcgtgagattgtggcccaccctaa

SEQ ID NO: 616645 - DNA, 75 bp, synthetic construct
  source 1..75: mol_type = other DNA
gcgcagatgccgacctagataatataaccagctatattgcacgttttgacatagatgcggcagaacgtttgtgga

SEQ ID NO: 616646 - DNA, 75 bp, synthetic construct
  source 1..75: mol_type = other DNA
tggtatcgcggcctgattcagggcaaacagatggtgatgattggctattccgactcagcaaaagatgcgggagtg

SEQ ID NO: 616647 - DNA, 75 bp, synthetic construct
  source 1..75: mol_type = other DNA
catcaaagtgccactgactgaaccccagaaagcggggatcgcgtcattctgtccgtataacattggccccggtaa

SEQ ID NO: 616648 - DNA, 75 bp, synthetic construct
  source 1..75: mol_type = other DNA
cagaaagcgggtattgcgtcattctgtccttacaacattggcccgggtaagtgtttcacgtcgacgttttataaa

SEQ ID NO: 616649 - DNA, 75 bp, synthetic construct
  source 1..75: mol_type = other DNA
cgaattaatgcaggcgatcgcaggggagcgtgtgaagcgattcgctggtggattaaggacggaggcagagactgc

SEQ ID NO: 616650 - DNA, 75 bp, synthetic construct
  source 1..75: mol_type = other DNA
atgaacgcaaaaatcaaatacggcctgtcagccgccgttctggcgctgattgccgcaggggcttctgcgcctgaa

SEQ ID NO: 616651 - DNA, 75 bp, synthetic construct
  source 1..75: mol_type = other DNA
acttcccgatcgtttacgcttctgcgctgaacggtatcgcgggtctggaccacgaagatatggcggaagacatga

SEQ ID NO: 616652 - DNA, 75 bp, synthetic construct
  source 1..75: mol_type = other DNA
aggcgctggcatgggtggagcgcaatattaaagttccactgaccgagccacagaaagccggtatcgcatcattct

SEQ ID NO: 616653 - DNA, 75 bp, synthetic construct
  source 1..75: mol_type = other DNA
atggtaaacctgttgttccaggcatgaagttgtcgacggcaaaatgcgctcaggttaacgccattgagcgtaata

SEQ ID NO: 616654 - DNA, 75 bp, synthetic construct
  source 1..75: mol_type = other DNA
atgatgataaagatgcggcaagtgaatttgccgcaattgctaccttttttagcaaatccgaagcacccaatggaa

SEQ ID NO: 616655 - DNA, 75 bp, synthetic construct
  source 1..75: mol_type = other DNA
ggtgtttatagtacttggtgtcatgttattgctctgtgcgctggttctctccatttggcatcgaaacgcggaagg

SEQ ID NO: 616656 - DNA, 75 bp, synthetic construct
  source 1..75: mol_type = other DNA
accaaaggccagaagaatggctgctatggccaggttgagcgacgggaccaggaaagcgcgctggcgtgctggggg

SEQ ID NO: 616657 - DNA, 75 bp, synthetic construct
  source 1..75: mol_type = other DNA
tattccctgcgcggcatgatgaaaacagactggcctgacgtggtgcaagcatttttcaatagcattaatggcccg

SEQ ID NO: 616658 - DNA, 75 bp, synthetic construct
  source 1..75: mol_type = other DNA
acgcctgcgcggttcgggtttcgttaatgccgtcggacggatcgtcgcagtcttcacgccctatggcgttgcggc

SEQ ID NO: 616659 - DNA, 75 bp, synthetic construct
  source 1..75: mol_type = other DNA
cgtatccgctcaaataactgctacggtcaggtatcccgtcgtgatcaggagagtgcactggcgtgctgggggata

SEQ ID NO: 616660 - DNA, 75 bp, synthetic construct
  source 1..75: mol_type = other DNA
tgcgtgagattgtagcccaccctaactatataattctataccgcgtaacaacatcaagcgttgaagtagtaaacg

SEQ ID NO: 616661 - DNA, 75 bp, synthetic construct
  source 1..75: mol_type = other DNA
gcgcatttctcgtctgtatgacgtcagcccggtgacatatccggcctatcaggacgcagactctggtgtccgctc

SEQ ID NO: 616662 - DNA, 75 bp, synthetic construct
  source 1..75: mol_type = other DNA
tcgtgaaatcatcaagccgggggcttttgacgacgtgctgaatgatgatgtacgtggattgtttaatcatgatcc

SEQ ID NO: 616663 - DNA, 75 bp, synthetic construct
  source 1..75: mol_type = other DNA
cctgctgctcagccgctggaaagccaccgatctgttcctgaaagatattcaggtgctggtttctgaactgtcgat

SEQ ID NO: 616664 - DNA, 75 bp, synthetic construct
  source 1..75: mol_type = other DNA
caacgtggttctcggtactatgatgctggaacagaatgaagttgacggtctggtttctggtgcagttcacaccac

SEQ ID NO: 616665 - DNA, 75 bp, synthetic construct
  source 1..75: mol_type = other DNA
gcaagccggttaacgacctgtctcgtggcgcactggttgacgatatcgtctacaccatcgctctgactgcgattc

SEQ ID NO: 616666 - DNA, 75 bp, synthetic construct
  source 1..75: mol_type = other DNA
cgaactcttccaccacgacggccgctgaaccgctgaaaatgagctacgttgaaggtctgctttccagcaatcaga

SEQ ID NO: 616667 - DNA, 75 bp, synthetic construct
  source 1..75: mol_type = other DNA
ccgaaaatgtggcagtacgccgaacgcttgccgaatggttcaagtcgccgcgtcaatatccaccccgatcgcgtt

SEQ ID NO: 616668 - DNA, 75 bp, synthetic construct
  source 1..75: mol_type = other DNA
ttgaaggtacggaagacgagaaaacagaaacggaaacgccgtgggaaagagaaattaaaaagcaatttgataatc

SEQ ID NO: 616669 - DNA, 75 bp, synthetic construct
  source 1..75: mol_type = other DNA
ggcggcctttgcccgctatgcagccgctaacccattctcaatgggtattgatgcaaaacgtgacgctgcgtggag

SEQ ID NO: 616670 - DNA, 75 bp, synthetic construct
  source 1..75: mol_type = other DNA
cgtcataccgaagcgctgggcgagctgacccgctacctcggtatcggcgactacgaaagctggtcagaggccgac

SEQ ID NO: 616671 - DNA, 75 bp, synthetic construct
  source 1..75: mol_type = other DNA
gccagagtgccggaaagcggacttaagctgtcacgggaaaaaacagcgtatttttctgcggttgaaaaagcaatg

SEQ ID NO: 616672 - DNA, 75 bp, synthetic construct
  source 1..75: mol_type = other DNA
ttataacgcctttgtaagcctggagaaggtagagggtggatccggcgagtcattcctgaagaacgccgcgcgcca

SEQ ID NO: 616673 - DNA, 75 bp, synthetic construct
  source 1..75: mol_type = other DNA
tgcaagagtccagcccgctgccggttctcggcgctgtgccgtggagctttgatctgatcgcaacccgtgcgatcg

SEQ ID NO: 616674 - DNA, 75 bp, synthetic construct
  source 1..75: mol_type = other DNA
accgcagattctgggcttactgcatcgcctgcactctccctgggccgggcaagcccagcagttggttgatactaa

SEQ ID NO: 616675 - DNA, 75 bp, synthetic construct
  source 1..75: mol_type = other DNA
tggtacataaagattacgacgaacagccgcgcggaccgtttattgtctgtgtggatacttccggctcaatgggcg

SEQ ID NO: 616676 - DNA, 75 bp, synthetic construct
  source 1..75: mol_type = other DNA
gtgcggaagcggttagcattatgaccgacgcggtgcgccaggatcggttatccattatgtgggataacccgtggc

SEQ ID NO: 616677 - DNA, 75 bp, synthetic construct
  source 1..75: mol_type = other DNA
ccgccaagcgaacgggtttctggattgagagagatagtggctcaccctaactacataatactgtacaaagtagct

SEQ ID NO: 616678 - DNA, 75 bp, synthetic construct
  source 1..75: mol_type = other DNA
tgttgccacatgtggcgattagtcttgaccgtactgaaggtgccacgctggagttttacgaagctgaggcgaaaa

SEQ ID NO: 616679 - DNA, 75 bp, synthetic construct
  source 1..75: mol_type = other DNA
ttaaagggataaataattacccggataagattactgttactgtggcactggaaacgggtgggtatacgtcactgt

SEQ ID NO: 616680 - DNA, 75 bp, synthetic construct
  source 1..75: mol_type = other DNA
gtttgcccagtctctgaactacgaaatcgctaaaacgctgaacgcggaaatcgtcttcgttatgtctcagggcac

SEQ ID NO: 616681 - DNA, 75 bp, synthetic construct
  source 1..75: mol_type = other DNA
actgtgcgaacgtgctttcgctactggcctgccggtatttatggtgaacaccaacacctggcagacctctctgag

SEQ ID NO: 616682 - DNA, 75 bp, synthetic construct
  source 1..75: mol_type = other DNA
gatctgatcgcgacccgtgcgatcgatatggctcgccacctgaacgccaccatcatcaacgaaggcgatatcaac

SEQ ID NO: 616683 - DNA, 75 bp, synthetic construct
  source 1..75: mol_type = other DNA
gaaaggcaaacgtgaaacaccggctccggtgccgacgctttctccgctgcgtcctgaagcggtgagtattatgac

SEQ ID NO: 616684 - DNA, 75 bp, synthetic construct
  source 1..75: mol_type = other DNA
tgcctgtgcgttcgccacttttatcgaaatgggcaaactgccgttcgacctggcggaagccgagcaggagttgca

SEQ ID NO: 616685 - DNA, 75 bp, synthetic construct
  source 1..75: mol_type = other DNA
tgtactggttatcgcgctattcgaaaacagcatggcccgtctgcgtcttgatattactccgcgcatgacctgggc

SEQ ID NO: 616686 - DNA, 75 bp, synthetic construct
  source 1..75: mol_type = other DNA
agcacctgaaaggcctggcacatccgctcaagccagttgttctgcttggcagtaatggtttgaccgaaggggtgc

SEQ ID NO: 616687 - DNA, 75 bp, synthetic construct
  source 1..75: mol_type = other DNA
caggttaacgccattgagcgtgataaggcgctggcatgggtggagaaaaacatcaaagtgccactgactgaaccc

SEQ ID NO: 616688 - DNA, 75 bp, synthetic construct
  source 1..75: mol_type = other DNA
aagaaggtaaccacaccacggcataccgtgatggtgcgggtatctggaccatttgtcgtggtgccaccagggtgg

SEQ ID NO: 616689 - DNA, 75 bp, synthetic construct
  source 1..75: mol_type = other DNA
tatcagcggtagttctggcgctgattgccgcaggtgcttctgcgcctgaaatcctcgaccagtttctggatgaaa

SEQ ID NO: 616690 - DNA, 75 bp, synthetic construct
  source 1..75: mol_type = other DNA
atgaagctgtcgaaggaaaaatgcgaccgggttaacgccattgagcgtgataaggcgctggcatgggtggagaaa

SEQ ID NO: 616691 - DNA, 75 bp, synthetic construct
  source 1..75: mol_type = other DNA
gtatccgctcaaataattgctacggtcaggtatcccggcgagatcaggaaagtgcgctggcgtgctggggtatcg

SEQ ID NO: 616692 - DNA, 75 bp, synthetic construct
  source 1..75: mol_type = other DNA
gaccttgccacggtcgccagacaaattaacccgtacatcaaagtcgatataccggaaacaacgcgcggcgctctt

SEQ ID NO: 616693 - DNA, 75 bp, synthetic construct
  source 1..75: mol_type = other DNA
gcagctttgctacaacttgcctgatattgcgcaattcgactcgcaagcgggtatcaaggcggtcagtgacgcacg

SEQ ID NO: 616694 - DNA, 75 bp, synthetic construct
  source 1..75: mol_type = other DNA
acgttgtgaaagattacgtcaccaaaatgcagaatattcccggtaatctgtatttgatgcggcgaaaatacaaga

SEQ ID NO: 616695 - DNA, 75 bp, synthetic construct
  source 1..75: mol_type = other DNA
tcattctgtccgtacaacattggtcccggtaagtgtttcccgtcgacgttttacagacgaattaatgctggtgat

SEQ ID NO: 616696 - DNA, 75 bp, synthetic construct
  source 1..75: mol_type = other DNA
gacaaattaacccgtacatcaacgtcgatataccggaaacaacgcgcggcgctctttactcgttcgtttacaacg

SEQ ID NO: 616697 - DNA, 75 bp, synthetic construct
  source 1..75: mol_type = other DNA
gctctttactcgttcgtctacaacgtgggtgctggggaaggtgcgaataagcggggaaattcttctcggctgact

SEQ ID NO: 616698 - DNA, 75 bp, synthetic construct
  source 1..75: mol_type = other DNA
catcagagtgccactgaccgaacctcagaaagcggggatcgcgtcattctgtccttacaacattggccccggtaa

SEQ ID NO: 616699 - DNA, 75 bp, synthetic construct
  source 1..75: mol_type = other DNA
tgccgcaggggcgcctgcgcctgatattctcgaccagtttcttgacgaaaaagaaggcaaccacaccacagcata

SEQ ID NO: 616700 - DNA, 75 bp, synthetic construct
  source 1..75: mol_type = other DNA
cagagactgccgtatccgctcaaataattgctacggtcaggtatcccggcgagatcaggaaagtgcgctggcgtg

SEQ ID NO: 616701 - DNA, 75 bp, synthetic construct
  source 1..75: mol_type = other DNA
tatcggctgtcgttctggcactgattgcagccggagcttctgcccctgacattctcgatcagtttctggatgaaa

SEQ ID NO: 616702 - DNA, 75 bp, synthetic construct
  source 1..75: mol_type = other DNA
tgtcggctgccgttctggcgctgattggtgcaggggcgtctgcgcctgaaatcctcgaccagtttcttgatgaaa

SEQ ID NO: 616703 - DNA, 75 bp, synthetic construct
  source 1..75: mol_type = other DNA
atggtaagcctgttattcctggcatgaagctgtcaaaggaaaaatgcgaccgggttaacgccattgaacgtgaca

SEQ ID NO: 616704 - DNA, 75 bp, synthetic construct
  source 1..75: mol_type = other DNA
atggtaagcctgtgattcctggcatgaagctgtcgaaggaaaaatgcgactgggttaacgctatcgaacgggata

SEQ ID NO: 616705 - DNA, 75 bp, synthetic construct
  source 1..75: mol_type = other DNA
ctcctgaataaagaccttgccacggtcgccagacaaattaacccgtacatcaaagtcgatataccggaaacaacg

SEQ ID NO: 616706 - DNA, 75 bp, synthetic construct
  source 1..75: mol_type = other DNA
ggtgcgcctgcgcctgacattctcgaccagtttctggatgaaaaggaaggtaaccacaccacggcataccgtgat

SEQ ID NO: 616707 - DNA, 75 bp, synthetic construct
  source 1..75: mol_type = other DNA
tcaaaggaaaaatgcgaccgggttaatgccatcgaacgtgacaaggcgctggcatgggtggagaaaaacatccgg

SEQ ID NO: 616708 - DNA, 75 bp, synthetic construct
  source 1..75: mol_type = other DNA
tggtggattaaggacggtggcagagactgccgtattcgttcaaacaactgttacggtcaggtatcccgtcgtgac

SEQ ID NO: 616709 - DNA, 75 bp, synthetic construct
  source 1..75: mol_type = other DNA
aacatccgggtgccgctgaccgaaccccagaaagcggggatcgcgtcattctgtccgtacaacattggccccggt

SEQ ID NO: 616710 - DNA, 75 bp, synthetic construct
  source 1..75: mol_type = other DNA
cgatataccggaaacaacggtaagcgccccatcagcgacgtcttgtgaaaattgtcctgtctggcaacaatcgcg

SEQ ID NO: 616711 - DNA, 75 bp, synthetic construct
  source 1..75: mol_type = other DNA
tggactgtctgctatggccatactggcaaagacatcatgctcggcaagaagtacaccgaggctgaatgccgtgcg

SEQ ID NO: 616712 - DNA, 75 bp, synthetic construct
  source 1..75: mol_type = other DNA
gcgtcattctgtccgtacaacattggtcccggtaagtgtttcccgtcgacgttttacagacgaattaatgcaggt

SEQ ID NO: 616713 - DNA, 75 bp, synthetic construct
  source 1..75: mol_type = other DNA
ggataacaccgatatcgcccgcgtcagcaaacgtaagcgtgagctgacttttaacaccgattttggcgatctcac

SEQ ID NO: 616714 - DNA, 75 bp, synthetic construct
  source 1..75: mol_type = other DNA
ctcgaccagtttctggatgaaaaggaaggtaaccacaccacggcataccgtgatggtgcgggtatctggaccatc

SEQ ID NO: 616715 - DNA, 75 bp, synthetic construct
  source 1..75: mol_type = other DNA
aagtgcagtacaccttcgacggtcagcaacagactggtgttccggcgaccaccttaaccttcgacccgaacaccg

SEQ ID NO: 616716 - DNA, 75 bp, synthetic construct
  source 1..75: mol_type = other DNA
gtatgccggaagccaggcgatgggcgtcagcgtggcgggcaccgcgcaaagtatttcgcgcggcggttcgctggt

SEQ ID NO: 616717 - DNA, 75 bp, synthetic construct
  source 1..75: mol_type = other DNA
cagagactgccgtattcgctcaaacaactgctacggtcaggtctcacggcgtgaccaggagagcgcgctggcgtg

SEQ ID NO: 616718 - DNA, 75 bp, synthetic construct
  source 1..75: mol_type = other DNA
atgaccaccttacgccaacaactggccgagatgcaaaaagaactcgatcttagctttcaggctggtaaggcctca

SEQ ID NO: 616719 - DNA, 75 bp, synthetic construct
  source 1..75: mol_type = other DNA
ctcgacgcgactgacgagcagctggatttcccgatcgtttacgcttctgcgctgaacggtattgcgggtctggac

SEQ ID NO: 616720 - DNA, 75 bp, synthetic construct
  source 1..75: mol_type = other DNA
gaagacgccgatgcgttccgcgtttctggtcgtggcgaactgcacctgtctgttcttatcgaaaacatgcgtcgt

SEQ ID NO: 616721 - DNA, 75 bp, synthetic construct
  source 1..75: mol_type = other DNA
gtgtttcccgtctacgttttacagacggattaatgcaggtgatcgaaaaggtgcctgcgaagcgattcgctggtg

SEQ ID NO: 616722 - DNA, 75 bp, synthetic construct
  source 1..75: mol_type = other DNA
gtgtttcccgtcgacgttttacagacgaattaatgctggtgatcgaaaaggtgcctgcgaagcgattcgctggtg

SEQ ID NO: 616723 - DNA, 75 bp, synthetic construct
  source 1..75: mol_type = other DNA
tcgctggtggattaaggacggtggcagagactgccgtatccgctcaaataattgctatggtcaggtatcccgtcg

SEQ ID NO: 616724 - DNA, 75 bp, synthetic construct
  source 1..75: mol_type = other DNA
gccgccgcacccatcgacttaaccgtcgattactcgacctgtacgcaatacggctcggacttctcggtcaccacc

SEQ ID NO: 616725 - DNA, 75 bp, synthetic construct
  source 1..75: mol_type = other DNA
ccgctggagttaacacaaacccattgggttacgttacacaatattcatcagttacctccagaccagtcgcaaatt

SEQ ID NO: 616726 - DNA, 75 bp, synthetic construct
  source 1..75: mol_type = other DNA
atctgccgcggtgccatcctggtggatggtaaacctgtcgttccgggcatgaagttgtcgaaggaaaaatgcgac

SEQ ID NO: 616727 - DNA, 75 bp, synthetic construct
  source 1..75: mol_type = other DNA
acatcatgctcggtaaaacgtataccaaagcagaatgcaaagcactcttgaataaagaccttgccactgtcgcca

SEQ ID NO: 616728 - DNA, 75 bp, synthetic construct
  source 1..75: mol_type = other DNA
cgccaagggcaaacagtggaaaggcctggtaactcgccgcgagattgagcgcgaagtttgtctctggagtcaaaa

SEQ ID NO: 616729 - DNA, 75 bp, synthetic construct
  source 1..75: mol_type = other DNA
cgcgtcattctgtccgtacaacattggtcccggtaagtgtttcccgtcgacgttttataaacgaattaatgcagg

SEQ ID NO: 616730 - DNA, 75 bp, synthetic construct
  source 1..75: mol_type = other DNA
gctctttactcgttcgtttacaacgtgggtgcaggcaatttcagaacatcgacacttcttcgcaaaatcaaccag

SEQ ID NO: 616731 - DNA, 75 bp, synthetic construct
  source 1..75: mol_type = other DNA
agctacgtcgctggatatctgctggcggtaagcaatggaaaggcctgatgactcgtcgtgagattgagcgtgaag

SEQ ID NO: 616732 - DNA, 75 bp, synthetic construct
  source 1..75: mol_type = other DNA
accggcaccgcctgctccggcgcgtatcagtacgctgcttgactgggtgccgggtattcgcgcgatcgccgtcaa

SEQ ID NO: 616733 - DNA, 75 bp, synthetic construct
  source 1..75: mol_type = other DNA
tgacgatggcaaagtttacgccacctacagcaacggcgagcgcatgttgcaggggcaggtggtgctggcgacttt

SEQ ID NO: 616734 - DNA, 75 bp, synthetic construct
  source 1..75: mol_type = other DNA
ttgcagctgctattggtggtggggctgttgccatagcgtctgtgctcatcactggtccgagtggtgacgatggtc

SEQ ID NO: 616735 - DNA, 75 bp, synthetic construct
  source 1..75: mol_type = other DNA
atgaacgtaaaaatcagatacagcctgtcggccgctgttctggcactgattgccgccagtgctcctgcccctgac

SEQ ID NO: 616736 - DNA, 75 bp, synthetic construct
  source 1..75: mol_type = other DNA
aagatattgaaccatataaactggctagtcataaagtatgggacgatgtttgcaaccgagatatattaaaattag

SEQ ID NO: 616737 - DNA, 75 bp, synthetic construct
  source 1..75: mol_type = other DNA
ctgattaaccagaaacgcatcgcgccgctgaatcttctgagtgttgacccgaacaatcagagccagattattgcg

SEQ ID NO: 616738 - DNA, 75 bp, synthetic construct
  source 1..75: mol_type = other DNA
tggcccaccgccacaccgccagaaggctggttaaagtgcgacgggcgcgcctttacaaaagaacaatatcctgtt

SEQ ID NO: 616739 - DNA, 75 bp, synthetic construct
  source 1..75: mol_type = other DNA
tggagcaggcgcaggggctggttttagggttcgaccaaggaatattgcatttaactatattgtgagggctgcata

SEQ ID NO: 616740 - DNA, 75 bp, synthetic construct
  source 1..75: mol_type = other DNA
attcgacgcctctcgtgtcgtgccaacagctaatgaaaaccgtccacgtaacatcgcctttaattatattgtgag

SEQ ID NO: 616741 - DNA, 75 bp, synthetic construct
  source 1..75: mol_type = other DNA
ccgccacaccgccagcaggctggttacagtgcaacggagctacgttcaccaaagaacaatatcctgttctggcca

SEQ ID NO: 616742 - DNA, 75 bp, synthetic construct
  source 1..75: mol_type = other DNA
ttatcgctaagggcagtataaaagatgtcctcaattaccttggtttgggggaaggctctgcactgcctgttggtg

SEQ ID NO: 616743 - DNA, 75 bp, synthetic construct
  source 1..75: mol_type = other DNA
tgtgtggaatcgggtcggttcagacgtcacgttgctggagatggcgccaacgttcttgcctgcactggaagctcg

SEQ ID NO: 616744 - DNA, 75 bp, synthetic construct
  source 1..75: mol_type = other DNA
ggatattgtctgtgcgatccatgcgcatccgacattaagcgaagtcatccacgaagcagcaatggccttgaataa

SEQ ID NO: 616745 - DNA, 75 bp, synthetic construct
  source 1..75: mol_type = other DNA
tccgtggcccaccgccacaccgccagcaggctggttaaagtgcgacgggcgcgcctttacaaaagaacaatatcc

SEQ ID NO: 616746 - DNA, 75 bp, synthetic construct
  source 1..75: mol_type = other DNA
tggttgaaagttttggtctggtcaggtcaacaaccactggctcttatcgtctggttaccagaccgacagaaactg

SEQ ID NO: 616747 - DNA, 75 bp, synthetic construct
  source 1..75: mol_type = other DNA
gactatcgcgcttgcgggtaagcaaccgaaggatgccaccctgacggcgctggcaggacttgctacagcagaaga

SEQ ID NO: 616748 - DNA, 75 bp, synthetic construct
  source 1..75: mol_type = other DNA
gtgctacgtgatggttgccagccacgtggggcatacaccttcgggtgccggaatactatctgcctccgcaatcac

SEQ ID NO: 616749 - DNA, 75 bp, synthetic construct
  source 1..75: mol_type = other DNA
acgagcagtcacgacgtcacccggacgcctcgctgaccgcaaaaggctttgttcaacttagcagcgccacggaca

SEQ ID NO: 616750 - DNA, 75 bp, synthetic construct
  source 1..75: mol_type = other DNA
tttgccctgaaccgggtggagttctacgaagccctgggcggcatgatacgtgacggaacgccgtccctgcgtgca

SEQ ID NO: 616751 - DNA, 75 bp, synthetic construct
  source 1..75: mol_type = other DNA
gggaagacagcgtatctgcaatgaatacctatgccggacagtggctggaagatgcaaaaaagagcgtcagaaaaa

SEQ ID NO: 616752 - DNA, 75 bp, synthetic construct
  source 1..75: mol_type = other DNA
gagatgattagcagtctggtgagtgtctgcctctatccgctcatcctgctgacactctgtgtggtgaatatgtat

SEQ ID NO: 616753 - DNA, 75 bp, synthetic construct
  source 1..75: mol_type = other DNA
acagtgttgccagtatggcgctttatgcagaccgctggctggaagaagcaaaaaagagtgtcagaaaaagcggca

SEQ ID NO: 616754 - DNA, 75 bp, synthetic construct
  source 1..75: mol_type = other DNA
agcggcatgttatccggtgctctgcccacctgggtgccgccggaagaagccacgctcatccggaacggggaagag

SEQ ID NO: 616755 - DNA, 75 bp, synthetic construct
  source 1..75: mol_type = other DNA
gaagcaaaaaaacgggtaaaacgaattggattaattattaccggtatatcaggaggttttgtcttcttttttatt

SEQ ID NO: 616756 - DNA, 75 bp, synthetic construct
  source 1..75: mol_type = other DNA
caacccttacagctattggtcgcgctattatcgctaagggcagtataaaagatgtcctcaattaccttggtttag

SEQ ID NO: 616757 - DNA, 75 bp, synthetic construct
  source 1..75: mol_type = other DNA
ccgtggagtcagataacgggagtgcctgctgcctcgctgacggcaaaaggcaccgtacaattgagcagtgacatc

SEQ ID NO: 616758 - DNA, 75 bp, synthetic construct
  source 1..75: mol_type = other DNA
cgcgaggcgatggggttaattatgtgaccattcgtccccgtaacattgcgtttaattacatcgtaagggcggcat

SEQ ID NO: 616759 - DNA, 75 bp, synthetic construct
  source 1..75: mol_type = other DNA
ttatccggtcagtcactggcactggccatgaaaaactgtggttatgactttccgtcaaaatcctgtgtgaataat

SEQ ID NO: 616760 - DNA, 75 bp, synthetic construct
  source 1..75: mol_type = other DNA
ctgacttcggaacccggaaagggacatcaggcatgtattttctggcgaaggaatgcatcgcgtccattaaatcca

SEQ ID NO: 616761 - DNA, 75 bp, synthetic construct
  source 1..75: mol_type = other DNA
ggtacactggtcggcggtcatgacgataacgattcttcgctggatatctcgtacatgagtaacggaaataatatt

SEQ ID NO: 616762 - DNA, 75 bp, synthetic construct
  source 1..75: mol_type = other DNA
taccgtctgacgccgcttggcatcggtattaccgattactacatccgtcagcgcgagttttcgacgctgcgcctt

SEQ ID NO: 616763 - DNA, 75 bp, synthetic construct
  source 1..75: mol_type = other DNA
tcaacgcaattacagcattgatcatgctcacgacttcgaactgcgtaatcgctgaagaataccaattgccagcaa

SEQ ID NO: 616764 - DNA, 75 bp, synthetic construct
  source 1..75: mol_type = other DNA
ttgctcaggatgaccgcaaacaaaggataatagatattctttatcccgttgctaacggtgaggtacctaccggtt

SEQ ID NO: 616765 - DNA, 75 bp, synthetic construct
  source 1..75: mol_type = other DNA
actaatgcagttaaacaagttccggggacagtggctgttaatcaaccaccaattgacagcaatcagccgcctgtt

SEQ ID NO: 616766 - DNA, 75 bp, synthetic construct
  source 1..75: mol_type = other DNA
tgactggcaccatgctggttgctgcgatgaaagaagatggcgttaacatctggggtgatggcagcacctataaag

SEQ ID NO: 616767 - DNA, 75 bp, synthetic construct
  source 1..75: mol_type = other DNA
gtctctgacaacctgacttataagcctgaacgtctgacgatggaaaaaggtgactcggtgttctcgccagatgat

SEQ ID NO: 616768 - DNA, 75 bp, synthetic construct
  source 1..75: mol_type = other DNA
cttttttagtaattatcacagcaatgatctggtttctgtttttcagcagcaaacgagaaaaagaagagttaactc

SEQ ID NO: 616769 - DNA, 75 bp, synthetic construct
  source 1..75: mol_type = other DNA
gcacgccgcacgcctttctctcgttcgcgattacgttctctcgtttgctggccgtctgccggttgcggaggttcg

SEQ ID NO: 616770 - DNA, 75 bp, synthetic construct
  source 1..75: mol_type = other DNA
gccggtatttctgggcgatgatttaaccgatgaatctggcttcgcagtcgttaaccggctgggcggaatgtcagt

SEQ ID NO: 616771 - DNA, 75 bp, synthetic construct
  source 1..75: mol_type = other DNA
tgacgcactggcaaaaccttatcgcttcccgttagcgggcgtgcatggggcggagcgccgtgacatcaatggtaa

SEQ ID NO: 616772 - DNA, 75 bp, synthetic construct
  source 1..75: mol_type = other DNA
agcaccagattatggtgtggcgtgtggtttgccgtgcaggtatgatcctgttcgcaatcgcatgttatgccactg

SEQ ID NO: 616773 - DNA, 75 bp, synthetic construct
  source 1..75: mol_type = other DNA
agggttcgatataccgaaacatagaaggtataattcaacggataaaggtcagtacgaatatgcaggacagcgtaa

SEQ ID NO: 616774 - DNA, 75 bp, synthetic construct
  source 1..75: mol_type = other DNA
catttttcgggctgtggtgcttattccatagcccctgtcagataatggtggtccgggcggggcagctttcgggct

SEQ ID NO: 616775 - DNA, 75 bp, synthetic construct
  source 1..75: mol_type = other DNA
ttacggtctgctgaccaatgctgaactgcagatttacaaaccgtggcttgatactgactttattgatgaactggg

SEQ ID NO: 616776 - DNA, 75 bp, synthetic construct
  source 1..75: mol_type = other DNA
gcggatgcgcgcattgaatacgtaggcaatggctacattaacgaagcgcaaaatatgggctggttgcagcgtttc

SEQ ID NO: 616777 - DNA, 75 bp, synthetic construct
  source 1..75: mol_type = other DNA
acagatcgccattaatcagggcaccgaatttattcgcttctccggcgtggtcaatccacgcactatcagtggtag

SEQ ID NO: 616778 - DNA, 75 bp, synthetic construct
  source 1..75: mol_type = other DNA
ccgcaacacgaccgggtcgtcgtcatctgtcctggacgtattgagagttacgtaaagtatgcggaactggcctac

SEQ ID NO: 616779 - DNA, 75 bp, synthetic construct
  source 1..75: mol_type = other DNA
atattccagtctgctcagccgattaactatggctatcaaccgctgtttgaagatcgccgcccacgtaatattggc

SEQ ID NO: 616780 - DNA, 75 bp, synthetic construct
  source 1..75: mol_type = other DNA
aaacgctgtgcatacttacgccatttccagcttgttggtgctttcactatccggctgtgcctggataccctccac

SEQ ID NO: 616781 - DNA, 75 bp, synthetic construct
  source 1..75: mol_type = other DNA
ctccgctaatgccagccgcgatggcaaaaccagcttcggttttgataccgtgccacgctatttgcaggggctgtt

SEQ ID NO: 616782 - DNA, 75 bp, synthetic construct
  source 1..75: mol_type = other DNA
ctggtttattacgcctataaagatctggtgaagatccgcattccgcgcaccgccaatgaaatgtatcacctgcgc

SEQ ID NO: 616783 - DNA, 75 bp, synthetic construct
  source 1..75: mol_type = other DNA
gatcgtgccgcgttaaccgcgttgacaagtgttggacgtaccattcttggtaaaccagcacccagggagttcttg

SEQ ID NO: 616784 - DNA, 75 bp, synthetic construct
  source 1..75: mol_type = other DNA
cgctcgtctgatcgactgccgcaaacaactggtggctgaaggtattgccgctattcagtgtggtgctttccataa

SEQ ID NO: 616785 - DNA, 75 bp, synthetic construct
  source 1..75: mol_type = other DNA
ttgaaaaggacgcaatgcgctcagtcgcgctccacgccatcgttgattttttcaacaggcataactcacccagcg

SEQ ID NO: 616786 - DNA, 75 bp, synthetic construct
  source 1..75: mol_type = other DNA
atatcgacgtaacttacgcttctatgctgatgacccaacgattcgcgtcggtgggccgacctaccattgggtacg

SEQ ID NO: 616787 - DNA, 75 bp, synthetic construct
  source 1..75: mol_type = other DNA
ttttaccatgggaccgctgactgatttctggcgtcagcgtgatgaagcagagtttactggtgtggatgacattcc

SEQ ID NO: 616788 - DNA, 75 bp, synthetic construct
  source 1..75: mol_type = other DNA
ttgggttttgaggttgccagtgttaatggcgtccagtggtttaagtccggcggcatgttgacggtaaacagtaga

SEQ ID NO: 616789 - DNA, 75 bp, synthetic construct
  source 1..75: mol_type = other DNA
taaagagtatgattatcttactcccaaagacagcggctatagtggaatccaccttgcatacagttgcttcgatca

SEQ ID NO: 616790 - DNA, 75 bp, synthetic construct
  source 1..75: mol_type = other DNA
gttgcaagaagacttaagcgactttctaccataatagataaactagagcgtcctagtcttgatggaggcagaact

SEQ ID NO: 616791 - DNA, 75 bp, synthetic construct
  source 1..75: mol_type = other DNA
cggtatgttgactgtaaacagcagcgaaacctatctcgccgccggactggccgggcttggcataatccagatacc

SEQ ID NO: 616792 - DNA, 75 bp, synthetic construct
  source 1..75: mol_type = other DNA
ttcttcgcgatggctttgattgtgtcgtacgcattggcacattgcccgacgacggaatgatcacccgtccgctcg

SEQ ID NO: 616793 - DNA, 75 bp, synthetic construct
  source 1..75: mol_type = other DNA
gataaaattcacgcaatgcagttgttcatcaaagttgcggagctggaaagtttttcccgcgcggcggatttcttt

SEQ ID NO: 616794 - DNA, 75 bp, synthetic construct
  source 1..75: mol_type = other DNA
tatctgaatggaaaaaataccgggtgctgctgatgcgcgttgatacctcaaaagcccccgatattctgtggcctc

SEQ ID NO: 616795 - DNA, 75 bp, synthetic construct
  source 1..75: mol_type = other DNA
agctggttagtaatttgcaaaattttagccgcaatgaacacaacctaaatggcctaagttctcctgcctgctttg

SEQ ID NO: 616796 - DNA, 75 bp, synthetic construct
  source 1..75: mol_type = other DNA
agtgcaaagacggcaaccagcagggcggctgaagccggacaaaaagcgactgatgccactgaggctgcgacccgt

SEQ ID NO: 616797 - DNA, 75 bp, synthetic construct
  source 1..75: mol_type = other DNA
cttaaatttaacttctgacgcgaatttgattaagaagttgccaaaaaatcataaggggcattacttagtaacaat

SEQ ID NO: 616798 - DNA, 75 bp, synthetic construct
  source 1..75: mol_type = other DNA
atgggattatttgaccataaaaccaatatcacgctaagtgctcatagcaatgttttcacatccaccccctctcaa

SEQ ID NO: 616799 - DNA, 75 bp, synthetic construct
  source 1..75: mol_type = other DNA
gcctgtcagcgattacaccgcccggagactgagcaatcttaaagtcggggaggcggtcacactgaccccttccgg

SEQ ID NO: 616800 - DNA, 75 bp, synthetic construct
  source 1..75: mol_type = other DNA
tcgcgggagaagtgcgtaatctggcccagcgcagcgcccaggcggctcgtgaaattaaaagcctgattgaagact

SEQ ID NO: 616801 - DNA, 75 bp, synthetic construct
  source 1..75: mol_type = other DNA
attgacttccgttccctggctgcaacatacgattgcgacgttacagagttacgcgaaagattcaatgaggctacg

SEQ ID NO: 616802 - DNA, 75 bp, synthetic construct
  source 1..75: mol_type = other DNA
gggcagactggcggcggatgctgtcggaaatgtcggccactgagcttggtgagtggggcgattatttccggatgc

SEQ ID NO: 616803 - DNA, 75 bp, synthetic construct
  source 1..75: mol_type = other DNA
tcatcatgactaaactgagcaatccctggtggcggctcaatcatctctacaagatacagaacgaaaaaggtgagc

SEQ ID NO: 616804 - DNA, 75 bp, synthetic construct
  source 1..75: mol_type = other DNA
atgccatcgctttccttgagccgtcctataacgcttttgtatcgctggagaaagtggaaggcggtagcggtgaat

SEQ ID NO: 616805 - DNA, 75 bp, synthetic construct
  source 1..75: mol_type = other DNA
aagacgaggacgataaagatgaagatgaaagtaaagagaataatcaaaaagattccgccgtccgcgataatgcca

SEQ ID NO: 616806 - DNA, 75 bp, synthetic construct
  source 1..75: mol_type = other DNA
atgccatccaatttagaattggcggttaatgctgccttgtcacaacgccaggcggcctttgcccgctatgcagcc

SEQ ID NO: 616807 - DNA, 75 bp, synthetic construct
  source 1..75: mol_type = other DNA
cgtttctgacgtccggacgacgtgtgttcagtgccgaaagtacgttgcaggcagaatcattctgttcgccaccga

SEQ ID NO: 616808 - DNA, 75 bp, synthetic construct
  source 1..75: mol_type = other DNA
atttccggatgcagagcttcagtgatgtgtggatggatgcgcagtttgcctcgctgaaggcattgatcgtgagaa

SEQ ID NO: 616809 - DNA, 75 bp, synthetic construct
  source 1..75: mol_type = other DNA
ctggtcgaaagcgccggggaaacaatggcggagattgtcagtgctgtgacccgcgtgacggacattatgggcgaa

SEQ ID NO: 616810 - DNA, 75 bp, synthetic construct
  source 1..75: mol_type = other DNA
gcatcaggcttattgctgacggcacaggattataaattccatttttacgcctggtggcaggatcctaaatacagc

SEQ ID NO: 616811 - DNA, 75 bp, synthetic construct
  source 1..75: mol_type = other DNA
cctgcatatctcagagcacggcaaaatttgcgcgaaatatccggctaaggcgaaagaactgcgaaccggtacgct

SEQ ID NO: 616812 - DNA, 75 bp, synthetic construct
  source 1..75: mol_type = other DNA
tttcaagattcccgggacctagatacgaaaggttaggtgaaaacagtggcgaaaaattccgcgatttatttttga

SEQ ID NO: 616813 - DNA, 75 bp, synthetic construct
  source 1..75: mol_type = other DNA
gaaacgaaggcagccacaccgaaagctgtgaaggcggctatggatgaggccagggcagcgaaacagaaggcagaa

SEQ ID NO: 616814 - DNA, 75 bp, synthetic construct
  source 1..75: mol_type = other DNA
atgaccgctgatttcatggctgtaccacaaaacctcgaagcagagcagagcgttatcggtggcctgctgctggat

SEQ ID NO: 616815 - DNA, 75 bp, synthetic construct
  source 1..75: mol_type = other DNA
tgttcacttcttcatcagtgaggaccggcatccggttcaacgaccgcagtcatttctgtacctaaacagtcctgc

SEQ ID NO: 616816 - DNA, 75 bp, synthetic construct
  source 1..75: mol_type = other DNA
tggaatcgctataaaggaaatatccccgcgtcaactcagagaaaagtagtcaagcgcctgctttcgctggtgtgg

SEQ ID NO: 616817 - DNA, 75 bp, synthetic construct
  source 1..75: mol_type = other DNA
atgaccgctgaattcatggctgtacctcataacctcgaagcagagcagagcgttatcggtggcctgctgctggac

SEQ ID NO: 616818 - DNA, 75 bp, synthetic construct
  source 1..75: mol_type = other DNA
gcggatctggagaaacggtttgacccttcaggcgaacagcgcggcatgagtaccggtatcccgtcactagaccgg

SEQ ID NO: 616819 - DNA, 75 bp, synthetic construct
  source 1..75: mol_type = other DNA
cagtccgggaagccgcaatggagcgctacggtatcaaccgcctgaccgaagctactgaactgctgtattcccgca

SEQ ID NO: 616820 - DNA, 75 bp, synthetic construct
  source 1..75: mol_type = other DNA
gcggagatcattcgatacagcaacagttgcaggaagtgcgggaagacgacgacgatgcagaaatgactcactcgg

SEQ ID NO: 616821 - DNA, 75 bp, synthetic construct
  source 1..75: mol_type = other DNA
gagctggtttatctatgtgctctcagccaatctgctgttagtgatcccgctgctgtgggtcgccgcctggtggag

SEQ ID NO: 616822 - DNA, 75 bp, synthetic construct
  source 1..75: mol_type = other DNA
tttgccctgaaccgggtggagttctacgaagccctgggcggcatgatacgtgacggaacgccgtcactgcgtgcc

SEQ ID NO: 616823 - DNA, 75 bp, synthetic construct
  source 1..75: mol_type = other DNA
gtcgtggtttgaccgataacatcaaacttggcgcgggtggcattcgcgaaattgaatttatcgttcaggtgttcc

SEQ ID NO: 616824 - DNA, 75 bp, synthetic construct
  source 1..75: mol_type = other DNA
aacgatcgcgaaggccgtggttttgcggtggtcggctacggcaagctgggcggctgggagttaggttacagttcc

SEQ ID NO: 616825 - DNA, 75 bp, synthetic construct
  source 1..75: mol_type = other DNA
cacgacacgagaactgaccagtctggtgcgtaacctgaaccggctattaaagagtgagcgtgaacgttacgacaa

SEQ ID NO: 616826 - DNA, 75 bp, synthetic construct
  source 1..75: mol_type = other DNA
cacatatacttttgatcaaattcgagaaataaattatacgctttcagaggggggtaattttatggcaatggaaca

SEQ ID NO: 616827 - DNA, 75 bp, synthetic construct
  source 1..75: mol_type = other DNA
cgatcgcctgctcaagtgcaggcgcggtcggtaacgctgacgacggtacgtcattaatcctggtcacgccggtga

SEQ ID NO: 616828 - DNA, 75 bp, synthetic construct
  source 1..75: mol_type = other DNA
gcatggatgaagacgtgcgggcaaaggtgtatgcggcggcgctgcatacggtttacgggtacatcgattatctgg

SEQ ID NO: 616829 - DNA, 75 bp, synthetic construct
  source 1..75: mol_type = other DNA
tagcgggttcagacctctatgtatttaagggaacgccaaaaacggtcaattacacaattgatctgaatccagata

SEQ ID NO: 616830 - DNA, 75 bp, synthetic construct
  source 1..75: mol_type = other DNA
ctatacagccagatggcaatcaactgcgcagtgcatgagaaaaagcccgctctgatgttcagccttgaaatgcca

SEQ ID NO: 616831 - DNA, 75 bp, synthetic construct
  source 1..75: mol_type = other DNA
ctctatccgttttcctgtcgcttttccggttgctgctctgaatgctcaggtgtctgcagtgggagaccccaacgt

SEQ ID NO: 616832 - DNA, 75 bp, synthetic construct
  source 1..75: mol_type = other DNA
ggggcatttgaccagccttactggatgatgaaggcatcactgcttgcgtcaatgaataaagtcatcacagatgtc

SEQ ID NO: 616833 - DNA, 75 bp, synthetic construct
  source 1..75: mol_type = other DNA
cacaaaacctcgaagcggagcagagcgttatcggtggcctgctgctggatgatgacaacagcgagcgagtccaga

SEQ ID NO: 616834 - DNA, 75 bp, synthetic construct
  source 1..75: mol_type = other DNA
actgggttggtatccatcgggaaggtgctttcgatgacagtgtgccgccaggcgaaaccgagttaatcctgcgac

SEQ ID NO: 616835 - DNA, 75 bp, synthetic construct
  source 1..75: mol_type = other DNA
ctcacaacctcgaagcagagcagagcgttatcggtggcctgctgctggacgatgacaacagcgagcgagtccaaa

SEQ ID NO: 616836 - DNA, 75 bp, synthetic construct
  source 1..75: mol_type = other DNA
agaatcaacggaaacggcggcaagacaacatatcgggccactggccccggtggcaggctctgatttgtatgtatt

SEQ ID NO: 616837 - DNA, 75 bp, synthetic construct
  source 1..75: mol_type = other DNA
tttccgggttagctgactacatcactaacccacaaagcaaacaagagcgtgtgggtgtcattaaggtaactaatt

SEQ ID NO: 616838 - DNA, 75 bp, synthetic construct
  source 1..75: mol_type = other DNA
cccatagcatcgaggcagagcaggcggtgattggtggattgcttctggatgatgacagcagtgagcgcgtccaga

SEQ ID NO: 616839 - DNA, 75 bp, synthetic construct
  source 1..75: mol_type = other DNA
gggcattgaaggctggtcacgcttaaaagtggtggagctgcgcgccctgaaacgtccactggcgcaggcgctggc

SEQ ID NO: 616840 - DNA, 75 bp, synthetic construct
  source 1..75: mol_type = other DNA
tgtattctaaagaaaaaccagaatacttacatgattgtttagaaagtataaggttgaatacattacaacctgatc

SEQ ID NO: 616841 - DNA, 75 bp, synthetic construct
  source 1..75: mol_type = other DNA
cagactgcgctgctctacctgatgacccgcgagcagcgggcggtcagccaccagggcgagagcgatatggcagga

SEQ ID NO: 616842 - DNA, 75 bp, synthetic construct
  source 1..75: mol_type = other DNA
cagaccgctctactctacctgatgacccgcgaacaacgggcggtcaggcaccagggcgagagcgatatggcagga

SEQ ID NO: 616843 - DNA, 75 bp, synthetic construct
  source 1..75: mol_type = other DNA
atgttaaatgcatggcacctgccggtgcccccatttgttaagcaaagcaaagatcaactgctcattacactgtgg

SEQ ID NO: 616844 - DNA, 75 bp, synthetic construct
  source 1..75: mol_type = other DNA
tccctatgtgattagtgaagtaaaattggctaaattaaaatataacttaaaaattgacagtaatgcaggtgttat

SEQ ID NO: 616845 - DNA, 75 bp, synthetic construct
  source 1..75: mol_type = other DNA
cagaccgcgctgctctaccttatgacccgtgaacaacgggcggtcaggcaccagggcgagagcgatatggctgga

SEQ ID NO: 616846 - DNA, 75 bp, synthetic construct
  source 1..75: mol_type = other DNA
cagaccgcgctgctctatctgatgacccgcgagcagcgggcggtcagccaccagggcgagagcgatatggcagga

SEQ ID NO: 616847 - DNA, 75 bp, synthetic construct
  source 1..75: mol_type = other DNA
atcagcacgttcttgaggaaaaaacggtagcgggctgggtggctgaaaaccagactgcgctgctctacctgatga

SEQ ID NO: 616848 - DNA, 75 bp, synthetic construct
  source 1..75: mol_type = other DNA
caccgtcgtacccaacggcgtgcgcgtccccggaactcagttccagctcgaccccgtccaggcggcatttaacat

SEQ ID NO: 616849 - DNA, 75 bp, synthetic construct
  source 1..75: mol_type = other DNA
cagaccgcattgctctacctgatgactcgcgaacaacgggcggtcagactctacggcgagagcgaaatggcagga

SEQ ID NO: 616850 - DNA, 75 bp, synthetic construct
  source 1..75: mol_type = other DNA
cagactgcgctgctctacctgatgacccgcgagcagcgggcggtcaggcagcagggcgagagcgatatggcagga

SEQ ID NO: 616851 - DNA, 75 bp, synthetic construct
  source 1..75: mol_type = other DNA
atgaagcgcggatttaccttgctggaagtgatgctcgcgctggcggccacggcggtgttacagattgccagcggt

SEQ ID NO: 616852 - DNA, 75 bp, synthetic construct
  source 1..75: mol_type = other DNA
tgaacaggatcatgtttattaccatcacgcagccggacaagagatcatattgcgtgactgggatgaaccggtcac

SEQ ID NO: 616853 - DNA, 75 bp, synthetic construct
  source 1..75: mol_type = other DNA
cactattgatacctatattaatcaatcagtagtatgtattcggccaattaaaccatcttatagcacatggctgta

SEQ ID NO: 616854 - DNA, 75 bp, synthetic construct
  source 1..75: mol_type = other DNA
gctgcccgcgtcaccgttgctcaatgttacagcgtggcaacgcaaagaagggcacgggcaactggcggacgggat

SEQ ID NO: 616855 - DNA, 75 bp, synthetic construct
  source 1..75: mol_type = other DNA
tacacaaatacgataccgaggattatcgccatgtcgatccgcagtttggcggcgatggggcgttgctgcgtttac

SEQ ID NO: 616856 - DNA, 75 bp, synthetic construct
  source 1..75: mol_type = other DNA
agccatttcctcaacagcgaaaacatcggcctctgcactgcctggatttggctcgatcactggtcatacggaagg

SEQ ID NO: 616857 - DNA, 75 bp, synthetic construct
  source 1..75: mol_type = other DNA
agcaatttcctcaaccgcgaaaacatcggctgcggcactacctggatttggctctgtcactggtcatacggaggg

SEQ ID NO: 616858 - DNA, 75 bp, synthetic construct
  source 1..75: mol_type = other DNA
ttgataatattggtggcctttccgacaaaattttcagtggtggaacgccgaataccagtacggaagaatattgga

SEQ ID NO: 616859 - DNA, 75 bp, synthetic construct
  source 1..75: mol_type = other DNA
ggcggagatctggacggtatcagcgaaaaactgccgtatctgaaaaaactcggcgtgacggcgctgtatctcaat

SEQ ID NO: 616860 - DNA, 75 bp, synthetic construct
  source 1..75: mol_type = other DNA
gacacaatacgcagcagctgggaatgcgactggtgctggacggcgtgtttaaccacagtggcgattcccatgcct

SEQ ID NO: 616861 - DNA, 75 bp, synthetic construct
  source 1..75: mol_type = other DNA
gtcacggcgcaggcgggcggatcaacgttctatggcggcgatctggacgggataagcgaaaaactgccgtatctg

SEQ ID NO: 616862 - DNA, 75 bp, synthetic construct
  source 1..75: mol_type = other DNA
tatggcggtgatctggacgggataagcgaaaaactgccgtacctgaaaaaactcggcgtgacagcgctgtatctc

SEQ ID NO: 616863 - DNA, 75 bp, synthetic construct
  source 1..75: mol_type = other DNA
aaagaaggccatgggcaactgacagacgggattctggctttgcctgccatttcggctacggtatggatgaactaa

SEQ ID NO: 616864 - DNA, 75 bp, synthetic construct
  source 1..75: mol_type = other DNA
ggcggctggatgtggtgcatatgctgggggaagcgggaggcgcacgcaataatttgcagcatgttgccgggatca

SEQ ID NO: 616865 - DNA, 75 bp, synthetic construct
  source 1..75: mol_type = other DNA
ggaaattctcaacgccgtttcgctggcatgggtagacggacagtcgctgcgcacctatcgtcatgcaccgaacac

SEQ ID NO: 616866 - DNA, 75 bp, synthetic construct
  source 1..75: mol_type = other DNA
ggatacttatcaaggttcatccggactgccgggtagtcgcatctgtaccacccggaacgccggagcaggatgtga

SEQ ID NO: 616867 - DNA, 75 bp, synthetic construct
  source 1..75: mol_type = other DNA
atgcgaaatataattagatctattaatgctctacttgcaacattaaatattaccattttggcgatcattgtggca

SEQ ID NO: 616868 - DNA, 75 bp, synthetic construct
  source 1..75: mol_type = other DNA
gcaatattccggcccataccggaagcgatcctgccgttcgtcacgcagctggtggagcagaacaggcacacgggc

SEQ ID NO: 616869 - DNA, 75 bp, synthetic construct
  source 1..75: mol_type = other DNA
attagcgcacaggaggcttaatcatcctcactggtcactgcatgacatccggcgcacctttacaaccatgctgaa

SEQ ID NO: 616870 - DNA, 75 bp, synthetic construct
  source 1..75: mol_type = other DNA
gcgacactcttttacgaaaattaagcggatcaccaaccacaaaaagcaccttttttaatgatggtggcaacctta

SEQ ID NO: 616871 - DNA, 75 bp, synthetic construct
  source 1..75: mol_type = other DNA
gtttgcgccagtggattttaggtttaccgggtgatgcaaccgactacaaactggacgaccagtaccgcctgagcg

SEQ ID NO: 616872 - DNA, 75 bp, synthetic construct
  source 1..75: mol_type = other DNA
tcagcaagacgttcgtaatcttaatcagtatcagactcgcggtgcgtttgcttatatttccgatcaacagaaagt

SEQ ID NO: 616873 - DNA, 75 bp, synthetic construct
  source 1..75: mol_type = other DNA
tcagcaagacgtgcgcaatcttaatcagtatcagactcgcggcgcgttcgcttatatttctgaccaacaaaaagt

SEQ ID NO: 616874 - DNA, 75 bp, synthetic construct
  source 1..75: mol_type = other DNA
attgaaacctataaaagacattgctgatgaactgcgcggggccgactatctggtatggcgcaatgggaggggagc

SEQ ID NO: 616875 - DNA, 75 bp, synthetic construct
  source 1..75: mol_type = other DNA
acgatacattgttaagaaaactttatggtaagccagcggagaaaaatacgttctatagcgatggcggtaatctga

SEQ ID NO: 616876 - DNA, 75 bp, synthetic construct
  source 1..75: mol_type = other DNA
atgcccctgcccgattttcgtcttatccgcctgctaccgctggctgccctcgtgctcactgcctgttccgttacc

SEQ ID NO: 616877 - DNA, 75 bp, synthetic construct
  source 1..75: mol_type = other DNA
gcgacacgcagctaagaaaaatcaacggcacaccagcccaaaaaaccacctttcttaatgacggtggaaatctga

SEQ ID NO: 616878 - DNA, 75 bp, synthetic construct
  source 1..75: mol_type = other DNA
aactgacggagcgtgtgctggtcagcactgatggcagagtgtcgagtgttgaagctgtagcggaacccgatgaac

SEQ ID NO: 616879 - DNA, 75 bp, synthetic construct
  source 1..75: mol_type = other DNA
tggtcacgctggcaggtattggtggattaatcggtctggctaaagtgctggaatcaacagaaccgctgacaacca

SEQ ID NO: 616880 - DNA, 75 bp, synthetic construct
  source 1..75: mol_type = other DNA
cggcagcccgtggaatgcggcagcgatgcttgcgatgcgcaatcctcgtctgcgggtaatcagcggcctttctct

SEQ ID NO: 616881 - DNA, 75 bp, synthetic construct
  source 1..75: mol_type = other DNA
gtctgtgatattagcctgaacctgcaactgacggagcgtgtgctggtcagcactgacggtagtgtgtcgagtgtt

SEQ ID NO: 616882 - DNA, 75 bp, synthetic construct
  source 1..75: mol_type = other DNA
aactcacggagcgggtgctggtcagtactgacggcagtgtgtcgagcgttgaagcggtagcggaacccgatgaac

SEQ ID NO: 616883 - DNA, 75 bp, synthetic construct
  source 1..75: mol_type = other DNA
tggttgccacggggggcagctccatgtcatgggagtaccgctacaccctgaacgtggtgattgaggatttcagcg

SEQ ID NO: 616884 - DNA, 75 bp, synthetic construct
  source 1..75: mol_type = other DNA
aaagtggtgccggagtcggcggactatgcctgcattcgttgtagtgaaatcattcatatgaacgcgggggaaaaa

SEQ ID NO: 616885 - DNA, 75 bp, synthetic construct
  source 1..75: mol_type = other DNA
gcagtacggcagattagcgcacaggaggctaaaacaccctcactggtcactgcatgacatccggcgcacctttac

SEQ ID NO: 616886 - DNA, 75 bp, synthetic construct
  source 1..75: mol_type = other DNA
acgggaggccgtgaggtcgccgcagagcggttaaagctgggggcttaccctgaactgtcgctgaaagccgcaagg

SEQ ID NO: 616887 - DNA, 75 bp, synthetic construct
  source 1..75: mol_type = other DNA
gcggcgaaagaaggttctgttgtggttccggtttgtgctgctgttgaagcagacattgccgaactggacgacgaa

SEQ ID NO: 616888 - DNA, 75 bp, synthetic construct
  source 1..75: mol_type = other DNA
atgccttccacagctggaaaacgcgggcatgctgcgcgcgctggatttaagcgcagaagaaaaagcggctattcg

SEQ ID NO: 616889 - DNA, 75 bp, synthetic construct
  source 1..75: mol_type = other DNA
atgacaatatcattcacgtttccggtaaagttaacccggcggacgatattgaagttatcaataccgaactggcac

SEQ ID NO: 616890 - DNA, 75 bp, synthetic construct
  source 1..75: mol_type = other DNA
caaaaggctgtctgaccctgaatccatggctggttaaggcatcctcagaatgcatcgattatgtcttgctacatg

SEQ ID NO: 616891 - DNA, 75 bp, synthetic construct
  source 1..75: mol_type = other DNA
atcccctttatccgtcaggggcttttttatcccgccagccctgtggaaattgtcgtttcgctgtgtcttaccttt

SEQ ID NO: 616892 - DNA, 75 bp, synthetic construct
  source 1..75: mol_type = other DNA
gttgcgcagcatcgccgcacaaaatgtggctgtgctgcttatctcctccgacctggaagagatcgaactgatggc

SEQ ID NO: 616893 - DNA, 75 bp, synthetic construct
  source 1..75: mol_type = other DNA
aatgagtttgattctatggtcgcagttaaaaaatataaaggacatttaatagatgcgtcagggaatccattaaat

SEQ ID NO: 616894 - DNA, 75 bp, synthetic construct
  source 1..75: mol_type = other DNA
aatgagattaaacaaccagaattaattggaggtattcttaacgatataaataaaaatagcaatgataatgatgat

SEQ ID NO: 616895 - DNA, 75 bp, synthetic construct
  source 1..75: mol_type = other DNA
atgaaagttattatcccactccaaacgtgctcgacacgcgtaccaaagaaaaacataattccattttataatgga

SEQ ID NO: 616896 - DNA, 75 bp, synthetic construct
  source 1..75: mol_type = other DNA
acatcaagggtatgaatgaacctgaagatggcacaattaatcttgttaaaacaagcaatggctggaaagcgctct

SEQ ID NO: 616897 - DNA, 75 bp, synthetic construct
  source 1..75: mol_type = other DNA
atggaagttggcggatgttcctgcatgggtggacaaaaaagcgttctccagcgtcaagggtatgaatgaacctga

SEQ ID NO: 616898 - DNA, 75 bp, synthetic construct
  source 1..75: mol_type = other DNA
gcgatcaacgcaaaaatatcacaatcaaagctgtgctactccctgcaggacaacgatattgtattcaataaaggt

SEQ ID NO: 616899 - DNA, 75 bp, synthetic construct
  source 1..75: mol_type = other DNA
acagatggttgatcgtgtttatgtcatgcaccagggtgaaatggggaatgatgttttggaaggtgacatgattaa

SEQ ID NO: 616900 - DNA, 75 bp, synthetic construct
  source 1..75: mol_type = other DNA
ccccactactcagcgcgcagtctgtctgcaagcagtattccggtgtcaacgtcctgaaaggaattgatttttttt

SEQ ID NO: 616901 - DNA, 75 bp, synthetic construct
  source 1..75: mol_type = other DNA
cagcattgggcaaagcctcaatttaaccgtcgtggctgaaggcatcgaaaccaaagagcaatttgagatgctacg

SEQ ID NO: 616902 - DNA, 75 bp, synthetic construct
  source 1..75: mol_type = other DNA
tgaggtgttatggtcttgttttatacttaaaagagaaacaattgaaacatataagtaccatataggcgtaaaccc

SEQ ID NO: 616903 - DNA, 75 bp, synthetic construct
  source 1..75: mol_type = other DNA
ctcccacggtgggcccggctcgcagaagtatccgttgcatctgcaatctgtgcatccggatttccgacttcactc

SEQ ID NO: 616904 - DNA, 75 bp, synthetic construct
  source 1..75: mol_type = other DNA
gatttgattatattttctgaaaatgtttttttggtcataaaaatgattacattaaagaaaaaacaaattattttt

SEQ ID NO: 616905 - DNA, 75 bp, synthetic construct
  source 1..75: mol_type = other DNA
tgttattttcgttgttcatgtcagaaattatatttaatgataatataactttatatataaaaggctcagggaact

SEQ ID NO: 616906 - DNA, 75 bp, synthetic construct
  source 1..75: mol_type = other DNA
gtctgaaatatatcacagccgcatgaccggtctgaatgaatcatcaggaatatcagaggaaattaatgatgacag

SEQ ID NO: 616907 - DNA, 75 bp, synthetic construct
  source 1..75: mol_type = other DNA
accggtctgaatgaatcatcagtgatatcagaggaaacttataatgacagaaaacaaaaagaatcaggaattcaa

SEQ ID NO: 616908 - DNA, 75 bp, synthetic construct
  source 1..75: mol_type = other DNA
tgtcgtttcgctgtgtcttaccttttctgtttctgttgtgttttttgtggggggcaattgtgggatggattttgg

SEQ ID NO: 616909 - DNA, 75 bp, synthetic construct
  source 1..75: mol_type = other DNA
gaacattgtgattgtacaagttggcctctattttaaaaaagtaggtgtcagaggtaatttttatactgaccttaa

SEQ ID NO: 616910 - DNA, 75 bp, synthetic construct
  source 1..75: mol_type = other DNA
caccgataacgccgggcataccggcattggtgaagcgccgggcggagatgtgatttatcagacgcttgtcgatgc

SEQ ID NO: 616911 - DNA, 75 bp, synthetic construct
  source 1..75: mol_type = other DNA
atggttttgttcgacttttttttgcaatggcaatcattatctgtggttacgggtatatagttatgagcatttttg

SEQ ID NO: 616912 - DNA, 75 bp, synthetic construct
  source 1..75: mol_type = other DNA
tctttacttgactggtttatggagatcaaggatcttcctgagcgtgaaaagcacttaaaggttattattagggcg

SEQ ID NO: 616913 - DNA, 75 bp, synthetic construct
  source 1..75: mol_type = other DNA
atttttttgcctattatctcgccgcaagaaaaagatgggcgaggcttttttttactatttttttatactctatca

SEQ ID NO: 616914 - DNA, 75 bp, synthetic construct
  source 1..75: mol_type = other DNA
tttttttcggttataagaatgattatataaaggaaaggactaaacatctcttagagcaattgaaagataatcggt

SEQ ID NO: 616915 - DNA, 75 bp, synthetic construct
  source 1..75: mol_type = other DNA
aatacgaatccaacgccagttcgctatcgttggggcgcttcgaccagtatatgttgccgttctatcaggcatcat

SEQ ID NO: 616916 - DNA, 75 bp, synthetic construct
  source 1..75: mol_type = other DNA
aaagtatctgatgctgaacatctcatcttcatagtcctctttaccctgaacagactggatgtggtcatccagatg

SEQ ID NO: 616917 - DNA, 75 bp, synthetic construct
  source 1..75: mol_type = other DNA
aagacaccaccgtgctctatctcattacccgcaatcagcgccctgagcaggcgattctgccggagcctgcgccgg

SEQ ID NO: 616918 - DNA, 75 bp, synthetic construct
  source 1..75: mol_type = other DNA
tgctggtgcgctacgccgcgcaaaatctgtatgcgccgctgcgcaccgtcgaagccctgcccggcgtcacacctg

SEQ ID NO: 616919 - DNA, 75 bp, synthetic construct
  source 1..75: mol_type = other DNA
aacgacaccgatttaacagtcgcatgacccgtatcgtactgctcatcagctttatcttcttctttggccgcttta

SEQ ID NO: 616920 - DNA, 75 bp, synthetic construct
  source 1..75: mol_type = other DNA
gcacatttgttttcagaatgcaggctgcgggggtgttgcgccatgtgaaggacggacagccggcgtatgccggtg

SEQ ID NO: 616921 - DNA, 75 bp, synthetic construct
  source 1..75: mol_type = other DNA
cctgcctggtgaaagcacagccatgaagggggctgatattccgggggttctgcagaagatgttcagtggcgaagg

SEQ ID NO: 616922 - DNA, 75 bp, synthetic construct
  source 1..75: mol_type = other DNA
aagagtctgaagcagacgcaacgacatctgtagcagccgcatctgcggcggaagatgaaggtattgatgacctgc

SEQ ID NO: 616923 - DNA, 75 bp, synthetic construct
  source 1..75: mol_type = other DNA
agcgacatctgtagcagccgcatctgcgacggaagatgaaggtctggatgatctactgagagagcttgactctct

SEQ ID NO: 616924 - DNA, 75 bp, synthetic construct
  source 1..75: mol_type = other DNA
agcaatttcctcaaccgcgaaaacatcggctgcggcactacctggatttggctctgtcactggtcatacagaagg

SEQ ID NO: 616925 - DNA, 75 bp, synthetic construct
  source 1..75: mol_type = other DNA
aacagcagaagaaaaaggatatttaaagtcttatattaccgaaggtgttaattcacttatgtgtgggcctgagga

SEQ ID NO: 616926 - DNA, 75 bp, synthetic construct
  source 1..75: mol_type = other DNA
atttttattggacctgcatttttactgtctgtatcttatttagttgcaagagtctatctctctttctatgactta

SEQ ID NO: 616927 - DNA, 75 bp, synthetic construct
  source 1..75: mol_type = other DNA
agttacggctttatcagtcaggacgacctggcgaaacagttcctctatgtctccagcgactttaaaccgaatttc

SEQ ID NO: 616928 - DNA, 75 bp, synthetic construct
  source 1..75: mol_type = other DNA
atgcgaaaacgacaccgatttaacagtcgtatgacccgtatcgtactactcattagctttatcttcttctttggc

SEQ ID NO: 616929 - DNA, 75 bp, synthetic construct
  source 1..75: mol_type = other DNA
gctatcgaatacatacggtgataagtgggtagacgaatggctgcgtactaaaggcctggatttgaatgattacga

SEQ ID NO: 616930 - DNA, 75 bp, synthetic construct
  source 1..75: mol_type = other DNA
tcaactggcgcttggcccgctggcgttatctttcgtgggcgctaccgatcctgactccatcaaaacgattaaaga

SEQ ID NO: 616931 - DNA, 75 bp, synthetic construct
  source 1..75: mol_type = other DNA
gcttatgcatggcgttacagccgggaacacgccatttcgtataaacctacatgttcgcgatctcggtcatggctt

SEQ ID NO: 616932 - DNA, 75 bp, synthetic construct
  source 1..75: mol_type = other DNA
aaactgcactgtttgccaatacccgtgaaatctcgctggagcgggcgttgctttataccgccagccatcggcaaa

SEQ ID NO: 616933 - DNA, 75 bp, synthetic construct
  source 1..75: mol_type = other DNA
attcccgacgcgtccgcaggaccgctttgctatcagcgaagaagataaacgtatctaccgtgaagagttgttccc

SEQ ID NO: 616934 - DNA, 75 bp, synthetic construct
  source 1..75: mol_type = other DNA
aagaacgccgccgtctgtttgaaaagctggggcaactgtatgaagggtgctttatcgttaccttcacctggttcc

SEQ ID NO: 616935 - DNA, 75 bp, synthetic construct
  source 1..75: mol_type = other DNA
ttgtaaatacccttaaccttgccgatctgatgccgaccagcactatctggccgggcgaaaacaaagccccaagtc

SEQ ID NO: 616936 - DNA, 75 bp, synthetic construct
  source 1..75: mol_type = other DNA
ctactttggttccttaccgggccatggtgttgaaaacgtgcggcgaccgttggtaaatacccttaaccttgccga

SEQ ID NO: 616937 - DNA, 75 bp, synthetic construct
  source 1..75: mol_type = other DNA
tggaaggggcagtgaccagtacccgtaatccgtgggtgtggaaagtcggacagggaaatgaaagcctggaggtta

SEQ ID NO: 616938 - DNA, 75 bp, synthetic construct
  source 1..75: mol_type = other DNA
gctgggtcatccagaattcaggggcaaaatccgcgactggcttaaatccatggcgaagaaaaactgctctgttct

SEQ ID NO: 616939 - DNA, 75 bp, synthetic construct
  source 1..75: mol_type = other DNA
ctactttggttccttacccggccacggtgttgaaaacgtacggcgaccgctggtaaacactcttaaccttgccga

SEQ ID NO: 616940 - DNA, 75 bp, synthetic construct
  source 1..75: mol_type = other DNA
catgacaaaaccctgtctgaattcacggtcacggtacagaacaataccgttcgtgaggcgctccaacaatacact

SEQ ID NO: 616941 - DNA, 75 bp, synthetic construct
  source 1..75: mol_type = other DNA
tgatttagaaacggtacgacaaatccaggcttttcacatgcgcgaattgctagcactgaaagagcttgagagaaa

SEQ ID NO: 616942 - DNA, 75 bp, synthetic construct
  source 1..75: mol_type = other DNA
caggcttttcatatgcgcgaattgcttgcattgaaagagcttgagaaaaagttagtccagtctatttctgatcgt

SEQ ID NO: 616943 - DNA, 75 bp, synthetic construct
  source 1..75: mol_type = other DNA
ttgcgctgaaagagcttgaaagaaagttggcgcaggcaatatctgatcgcaaaagacttgttgcgcgttacgggg

SEQ ID NO: 616944 - DNA, 75 bp, synthetic construct
  source 1..75: mol_type = other DNA
atgacattatctttttttataacggtaattccagaccatgacaagccgcagccgccaggctgcctactcgacgcc

SEQ ID NO: 616945 - DNA, 75 bp, synthetic construct
  source 1..75: mol_type = other DNA
gtgacgctgatcttcctcgcgctaatctttttaccgcgctatctgaagcgcggcattgccaccatccccgatttt

SEQ ID NO: 616946 - DNA, 75 bp, synthetic construct
  source 1..75: mol_type = other DNA
tcgatcatacccggatggaagcgcctgcagttcgggtggcgaaaacaatgaacaccccgcatggcgacgcaatca

SEQ ID NO: 616947 - DNA, 75 bp, synthetic construct
  source 1..75: mol_type = other DNA
aaccgtacgacggggattaaagcttctggtgctaaaacaaccgtcaatatgactgcggggacgatatccctggag

SEQ ID NO: 616948 - DNA, 75 bp, synthetic construct
  source 1..75: mol_type = other DNA
ctgaacactgccaccggcgcagccgggaagggtgtaacgaaaaagcagccttcattactccagggattcagaagg

SEQ ID NO: 616949 - DNA, 75 bp, synthetic construct
  source 1..75: mol_type = other DNA
tgttgctgctgatatgtcccctcatgcacctgtttcatggccacggagggcacgggcaacatcagcatcacgacg

SEQ ID NO: 616950 - DNA, 75 bp, synthetic construct
  source 1..75: mol_type = other DNA
cctcgggcgtaaaagttattttgctcaacgagcagggcgaggtggttgctgcgcaaacggaaaagctgaccgttt

SEQ ID NO: 616951 - DNA, 75 bp, synthetic construct
  source 1..75: mol_type = other DNA
tattgctgaagtcaaaacgggtgttcagggtaaattgtcagataacctgagtgtctggggcaatgttggtgttca

SEQ ID NO: 616952 - DNA, 75 bp, synthetic construct
  source 1..75: mol_type = other DNA
gctttgctctggaagggctgaatacgagcgggttaacccatgcaatgctgatgtctgaaagcgggaatatcacaa

SEQ ID NO: 616953 - DNA, 75 bp, synthetic construct
  source 1..75: mol_type = other DNA
tcaaatacgcctgcatccaatacgccggctaatggcggttcggctacaccagcacaggcactgttccgtctaatt

SEQ ID NO: 616954 - DNA, 75 bp, synthetic construct
  source 1..75: mol_type = other DNA
tagtcaggccttacgcaatcagcggatgaatctgtatgcccagggggcagaaacctatgcccttgcaagaacaat

SEQ ID NO: 616955 - DNA, 75 bp, synthetic construct
  source 1..75: mol_type = other DNA
cggggaagggcgcatcgactcgcaaacggcaggcggtaaagcaccgctgggcgtggcgtcggtggcgaagcagtt

SEQ ID NO: 616956 - DNA, 75 bp, synthetic construct
  source 1..75: mol_type = other DNA
aattccgtctgcggttgcgtaactgtgagctggcgggaacgggtaaacgagtttatacggcgagccgtgtccggg

SEQ ID NO: 616957 - DNA, 75 bp, synthetic construct
  source 1..75: mol_type = other DNA
tgccttgaagattagcgatggaaaggagatgcaggaagcctttgcaatggcagcggtcggagcaaagaccggctc

SEQ ID NO: 616958 - DNA, 75 bp, synthetic construct
  source 1..75: mol_type = other DNA
ggttctccggtatctgggcacagattaagaccgcgttttctggcggtatcgcgggcgtcggcagattaattatga

SEQ ID NO: 616959 - DNA, 75 bp, synthetic construct
  source 1..75: mol_type = other DNA
acgcgcggtgacaccgttaagaaatatgaaaaagcgggcgtagactatgaggcgtcaatgcaggattacgtcgcc

SEQ ID NO: 616960 - DNA, 75 bp, synthetic construct
  source 1..75: mol_type = other DNA
ggtgcaggaaagcaggtctatacggcaacccgggtgcgtgtgacttttgatggcattcccggagaaacatcggac

SEQ ID NO: 616961 - DNA, 75 bp, synthetic construct
  source 1..75: mol_type = other DNA
taccgtttttctggtgtgcgatggctcaggccctgccatcagcttcttttccaccaccggggatgactttgcccg

SEQ ID NO: 616962 - DNA, 75 bp, synthetic construct
  source 1..75: mol_type = other DNA
cgcactgtttgcctctgatttctcatccgtcagcagcgataaagcgccgtttatctgggctgcactgtcgctcta

SEQ ID NO: 616963 - DNA, 75 bp, synthetic construct
  source 1..75: mol_type = other DNA
cgaaacacccgataaatttttgcttgctggccaggcggagggcatttatctgcagataacagataaccaagggta

SEQ ID NO: 616964 - DNA, 75 bp, synthetic construct
  source 1..75: mol_type = other DNA
gaggttacgtaattgcgagctggcgggtactgggaaacgagtttatacggcaagtcgtgtgcgtgtaacttttga

SEQ ID NO: 616965 - DNA, 75 bp, synthetic construct
  source 1..75: mol_type = other DNA
tggaacatgacggcgtttgtcttcaccgtgctaatcatcgctatcctggttgtaggctccatctggattatgtgg

SEQ ID NO: 616966 - DNA, 75 bp, synthetic construct
  source 1..75: mol_type = other DNA
catggagatcatcaacatcacggaagtgaaaacgataaaaaaattaatccggcagacggggccgcgtcgcggtcc

SEQ ID NO: 616967 - DNA, 75 bp, synthetic construct
  source 1..75: mol_type = other DNA
tcaggggctgcgctgcgatgtttgttatcgcgaatgcccgaaaattgatgaggccatcaccctggagctggagcg

SEQ ID NO: 616968 - DNA, 75 bp, synthetic construct
  source 1..75: mol_type = other DNA
gcacgcaggctgcactggtctcattctttttaatgatcttacaggccattgctgcaccgctgcctgcatttttga

SEQ ID NO: 616969 - DNA, 75 bp, synthetic construct
  source 1..75: mol_type = other DNA
cgtcttggcgaaggaaaaccggaatacagcacgctctcctggctgtttatgtttatttgtgccggtttaggttct

SEQ ID NO: 616970 - DNA, 75 bp, synthetic construct
  source 1..75: mol_type = other DNA
gtttatttgcgccggattaggttcccccacgctttattggggcgtagcggagtgggcctattattatcaaacgcc

SEQ ID NO: 616971 - DNA, 75 bp, synthetic construct
  source 1..75: mol_type = other DNA
gcacccgtttcgcatcatcaagcggctgttcggcttcgtgaaagccagatacagggggatgctgaaaaacgataa

SEQ ID NO: 616972 - DNA, 75 bp, synthetic construct
  source 1..75: mol_type = other DNA
ccgcgcaggaagatatttgtctgcgcagcaacccgcgtaccgccagcctggaacagattgtcggactgtacgcgg

SEQ ID NO: 616973 - DNA, 75 bp, synthetic construct
  source 1..75: mol_type = other DNA
cttcgccagtttgcgttcactcatggtgtggcgatggatggactacaggccattgatccgcatggcaacctcgca

SEQ ID NO: 616974 - DNA, 75 bp, synthetic construct
  source 1..75: mol_type = other DNA
gccgccggatgcgctggaaaaacttaccgacccgctgatgttcgccgccgcaatggtcagcgccggtaaagcgga

SEQ ID NO: 616975 - DNA, 75 bp, synthetic construct
  source 1..75: mol_type = other DNA
accagttcgatggcgggtgcggcgctgtgcttttttatcgccagagtgatgggccgcgaagtagtggaaaagtta

SEQ ID NO: 616976 - DNA, 75 bp, synthetic construct
  source 1..75: mol_type = other DNA
caatcagctatgctgccggtttgacttcaatacgttttcgctcgttttttatcgccaccgggcttggtcagttac

SEQ ID NO: 616977 - DNA, 75 bp, synthetic construct
  source 1..75: mol_type = other DNA
tctgatgttcgccgcagcaatggtcagcgccggtaaagcggatgtctgtatcgcgggcaacctctcttccacggc

SEQ ID NO: 616978 - DNA, 75 bp, synthetic construct
  source 1..75: mol_type = other DNA
tcttccactggggcatcagcgcctgggcaacttatacgctggcctcattaatcatggcttatcactttcatgtgc

SEQ ID NO: 616979 - DNA, 75 bp, synthetic construct
  source 1..75: mol_type = other DNA
cagcgccaactgctacgtcagttcataaagacaagtgatgaacaaacccaaagagatctgtgcttcgccgcaacc

SEQ ID NO: 616980 - DNA, 75 bp, synthetic construct
  source 1..75: mol_type = other DNA
gacacctcaagcagtatctaaagcattagccgcagttcgcaaagattttttgcttcctgctaacaagctaggaaa

SEQ ID NO: 616981 - DNA, 75 bp, synthetic construct
  source 1..75: mol_type = other DNA
atttgttgctaacgataatgagttccccgttcatgaaaaacaggtccttagtcatcgatattgttctgaccatag

SEQ ID NO: 616982 - DNA, 75 bp, synthetic construct
  source 1..75: mol_type = other DNA
cggcttaattctcgccgggttaagccatgcagtcagcggtaagggcagcacgtcgcatactggtacggtagatat

SEQ ID NO: 616983 - DNA, 75 bp, synthetic construct
  source 1..75: mol_type = other DNA
ttccggtgaccgttgaacgccagttgtatcggcttatcccgggtgaagaggatatgaactttaccttacagcctg

SEQ ID NO: 616984 - DNA, 75 bp, synthetic construct
  source 1..75: mol_type = other DNA
atggttgcgtctcgaagaccgcacgagccacagcggagagctaccgtcaggcggcaaatcctttaccgtcaattt

SEQ ID NO: 616985 - DNA, 75 bp, synthetic construct
  source 1..75: mol_type = other DNA
ctattaccggcgttcgcccgcaaggcccatggggaaaactggttgatttgatgttcctgatcgccactgtcggcg

SEQ ID NO: 616986 - DNA, 75 bp, synthetic construct
  source 1..75: mol_type = other DNA
atcagtttatcaatggcgtaatcaacgtcccacaggtgctggaaacactggcggcgaaacagctgtacagcaagt

SEQ ID NO: 616987 - DNA, 75 bp, synthetic construct
  source 1..75: mol_type = other DNA
acgggcgttagtccgcaagggccgtggggaagactggttgatttgatgttcctgatcgccactgtcggcgcgttg

SEQ ID NO: 616988 - DNA, 75 bp, synthetic construct
  source 1..75: mol_type = other DNA
atgccaagcattaccacttgctaaaacctattcattggctaaaatggttgacatgaaaattactatctgggaagg

SEQ ID NO: 616989 - DNA, 75 bp, synthetic construct
  source 1..75: mol_type = other DNA
gtgcctttgtttgcatctgccttcctcctgtttccaatcaggcctatacaatgccaagcattaccacttgctaaa

SEQ ID NO: 616990 - DNA, 75 bp, synthetic construct
  source 1..75: mol_type = other DNA
tggattaaatatcgcaccgcgttcacaacaggcactcgaatttagcgttccctactccttcttccactggggcat

SEQ ID NO: 616991 - DNA, 75 bp, synthetic construct
  source 1..75: mol_type = other DNA
aaagctgccactccggcaagttgcgatatcgatattgccgatcattacgcacttggcgtccagcttggcgttagc

SEQ ID NO: 616992 - DNA, 75 bp, synthetic construct
  source 1..75: mol_type = other DNA
gttccgggttaccagccgccgaaagagatgaaagaattcctcgacgaacaccaaaaaatgaccagcggtaaataa

SEQ ID NO: 616993 - DNA, 75 bp, synthetic construct
  source 1..75: mol_type = other DNA
tgctcaggctgatgacgcggcaattcaacaaacgttagccaaaatgggcatcaaaagcagcgatattcagcccgc

SEQ ID NO: 616994 - DNA, 75 bp, synthetic construct
  source 1..75: mol_type = other DNA
aaatattgagcgtaagaaagcaaacttccggaaaaaaattatattaaatggtggggatacattcacaataaaaga

SEQ ID NO: 616995 - DNA, 75 bp, synthetic construct
  source 1..75: mol_type = other DNA
tacaaagcgccgcaagaaaagcacgtcatcaccgtgtttaccgacattacctgcggttactgccacaaaatgcat

SEQ ID NO: 616996 - DNA, 75 bp, synthetic construct
  source 1..75: mol_type = other DNA
acggtactctggtgccgggctaccagccgccgaaagagatgaaagcattcctcgacgaacatcaaaaaatgacca

SEQ ID NO: 616997 - DNA, 75 bp, synthetic construct
  source 1..75: mol_type = other DNA
attaattggtagcaaggttgccgcgttattatctgctaaatttattgatggtgacgatcttcatccagccaaaaa

SEQ ID NO: 616998 - DNA, 75 bp, synthetic construct
  source 1..75: mol_type = other DNA
aagtagctatcttgctgacgatataattattcacagaaaagacaacaactatctgaagcaacgaattaatgatga

SEQ ID NO: 616999 - DNA, 75 bp, synthetic construct
  source 1..75: mol_type = other DNA
tgctggtggcttgtgcgtttattgccggaagcgtctggagcgactggggctggcaaaagaaatgggcggaacgtg

SEQ ID NO: 617000 - DNA, 75 bp, synthetic construct
  source 1..75: mol_type = other DNA
tgcgatcctgacacgtgatatgcgcaatgcccagcgttttgttaacgaagtggattcttccgctgtttacgtcaa

SEQ ID NO: 617001 - DNA, 75 bp, synthetic construct
  source 1..75: mol_type = other DNA
attgataatcctgaccgtgcgctggtcagtgaaatgttgcgtatggataaatacatcgacatgctgatcccgcgt

SEQ ID NO: 617002 - DNA, 75 bp, synthetic construct
  source 1..75: mol_type = other DNA
ggcgatacgacaaaacagaatatgtgcgaaagagggcagcgccctgagagatcccctcataatttccccaaagcg

SEQ ID NO: 617003 - DNA, 75 bp, synthetic construct
  source 1..75: mol_type = other DNA
atgtctgttgccgctctggcccgccagcgggtccaccgcatgaagcggggtatccccttttccatcagcggattt

SEQ ID NO: 617004 - DNA, 75 bp, synthetic construct
  source 1..75: mol_type = other DNA
tgagtcccctgtattccggtgagccggtcaatgaggcggaagtcctgggggcggccgtctggctgtggatgcact

SEQ ID NO: 617005 - DNA, 75 bp, synthetic construct
  source 1..75: mol_type = other DNA
cactccgttgcgattggttcacatggacacaccatcaccgttaacgctgctggtaacgcggaaaacaccgtcaaa

SEQ ID NO: 617006 - DNA, 75 bp, synthetic construct
  source 1..75: mol_type = other DNA
ccctcgctacaacgttgcatggaggcaaccagcgagggcattccttatgtctgaacaacaagaggatagccgcaa

SEQ ID NO: 617007 - DNA, 75 bp, synthetic construct
  source 1..75: mol_type = other DNA
gaacgcgaagagtttatgcaagagctgggattggaagagccggggctgaaccgcgtgattcgtgccggttataaa

SEQ ID NO: 617008 - DNA, 75 bp, synthetic construct
  source 1..75: mol_type = other DNA
gccaaaggcggcgataaagacgcgaaagccgaactggcggtactggaaaaatgcctgccgcaactggaaaacgca

SEQ ID NO: 617009 - DNA, 75 bp, synthetic construct
  source 1..75: mol_type = other DNA
ttaattcaggaaaagataataatggacttattataggagatcattgtcttatcgcatctgaaattataatccgcc

SEQ ID NO: 617010 - DNA, 75 bp, synthetic construct
  source 1..75: mol_type = other DNA
ccgggcgatcgctaaagaaaatgctgaggtggtattaacaataaacaacgctccattactggtctttagtaacta

SEQ ID NO: 617011 - DNA, 75 bp, synthetic construct
  source 1..75: mol_type = other DNA
ggggtggttgtatagcgtgattgcgccagggttggtatctgctgatgcgccgctggagttggtttcccgtgtcag

SEQ ID NO: 617012 - DNA, 75 bp, synthetic construct
  source 1..75: mol_type = other DNA
tgggattggaagagccggggctgaaccgcgtgattcgtgccggttataaactactgaacctgcagacctacttca

SEQ ID NO: 617013 - DNA, 75 bp, synthetic construct
  source 1..75: mol_type = other DNA
gatttatgaagcgcgcccgaacgtgacggttgatgtcgcttcgctgtgcctgaaaaccggtaacgcagtgattct

SEQ ID NO: 617014 - DNA, 75 bp, synthetic construct
  source 1..75: mol_type = other DNA
gtgaaaacggcaaaaacacgctggcagtacgcttaggtgaaattaacgcccgacgttaccatgcctgcctgttga

SEQ ID NO: 617015 - DNA, 75 bp, synthetic construct
  source 1..75: mol_type = other DNA
aatgggtagctggtacttacaagcccatactctgattccggcgcttttccttccggcaacggcttgtggtctgct

SEQ ID NO: 617016 - DNA, 75 bp, synthetic construct
  source 1..75: mol_type = other DNA
gcatgcaaaaaggcgtcattactcaacagcaaatgaaacgtgcgctcattatcaccgtggcgctgatctgcctct

SEQ ID NO: 617017 - DNA, 75 bp, synthetic construct
  source 1..75: mol_type = other DNA
agcaaggccagcagcagaaagcgccaccgccgcagcagaataacaacgggaataatccgcctccgatggacttcg

SEQ ID NO: 617018 - DNA, 75 bp, synthetic construct
  source 1..75: mol_type = other DNA
ctgtggggttggctgttcctgctggcggcaccgttgttagtgaaacaaacccgttatgtgatgcgtgaaatggac

SEQ ID NO: 617019 - DNA, 75 bp, synthetic construct
  source 1..75: mol_type = other DNA
gcgagaatggcaagaacacgctggctgtacgcttaggtgaagtgaacgcacgccgttaccatgcctgtctgctga

SEQ ID NO: 617020 - DNA, 75 bp, synthetic construct
  source 1..75: mol_type = other DNA
agacctggatgcaaaacaggaacgtgcaattggcctggctatcagacaggcctcgctgaaggttaaccaactgca

SEQ ID NO: 617021 - DNA, 75 bp, synthetic construct
  source 1..75: mol_type = other DNA
cgagggcgaaatcacctctgcgctgaaactgagcctgcacgaacttgaaaagatgatggagcggattatggcgcg

SEQ ID NO: 617022 - DNA, 75 bp, synthetic construct
  source 1..75: mol_type = other DNA
ccactgctgccgaaagtcgcaccgcccaccattgtgccagcccccactgcggcgggtatggcgctggctggggcg

SEQ ID NO: 617023 - DNA, 75 bp, synthetic construct
  source 1..75: mol_type = other DNA
cgcgctaaaaatcggcgatggcaaggagatggaagaggcctttgcgctggccgctgcgggtgccaaaaccggctc

SEQ ID NO: 617024 - DNA, 75 bp, synthetic construct
  source 1..75: mol_type = other DNA
ggtggtgtgctgtcaggtgggctggttcgcggcattatgatcgccgggcgggccgttctctggattggccgggcg

SEQ ID NO: 617025 - DNA, 75 bp, synthetic construct
  source 1..75: mol_type = other DNA
ggaatctctgttgagcggcgttggtcaactggttgccgatggcatgaatccgcagcaggcagcgacctttgccgg

SEQ ID NO: 617026 - DNA, 75 bp, synthetic construct
  source 1..75: mol_type = other DNA
agcaaggccagcagcagaaagcgccgccgcagcagcagaataataacgggaataatccgccgatggacttcgacg

SEQ ID NO: 617027 - DNA, 75 bp, synthetic construct
  source 1..75: mol_type = other DNA
atgagctgggttcgagcgagaaacgtacggcggatatgattccgccgttattattccctcggctcaagaatttat

SEQ ID NO: 617028 - DNA, 75 bp, synthetic construct
  source 1..75: mol_type = other DNA
gcttttaatataccagtgagaatttctattcatcaggctatacctggtcctagatcgtcagatgcagtctattct

SEQ ID NO: 617029 - DNA, 75 bp, synthetic construct
  source 1..75: mol_type = other DNA
ggacaagaaaatgattggaatgttcatatagttaatatgaaaaatttggcacaagatcatgctccaatgttactt

SEQ ID NO: 617030 - DNA, 75 bp, synthetic construct
  source 1..75: mol_type = other DNA
gcgtggtggcaaagaaacctgtcgcactaacgcggcaacggtggcggtgattcaggacgccctgaaatcctgtgg

SEQ ID NO: 617031 - DNA, 75 bp, synthetic construct
  source 1..75: mol_type = other DNA
aatttatgaagcgcgcccgaacgtgacggttgatgttgcttcactgtgcctgaaaaccggtaacgcagtgatcct

SEQ ID NO: 617032 - DNA, 75 bp, synthetic construct
  source 1..75: mol_type = other DNA
gcgaagcgatgcttgaccgtctggcactgacgcccgcacggttgaaaggcattgccgatgatgtgcgccaggtgt

SEQ ID NO: 617033 - DNA, 75 bp, synthetic construct
  source 1..75: mol_type = other DNA
gaaacaaacgatgccattcgtgcagcacatgagggggtgattgggcagatactgaccatgaatttgctgcgtatc

SEQ ID NO: 617034 - DNA, 75 bp, synthetic construct
  source 1..75: mol_type = other DNA
aataatccgccgccgatggacttcgacgacgatattccattcagtcctattggtttacagtatggcaaaagcaga

SEQ ID NO: 617035 - DNA, 75 bp, synthetic construct
  source 1..75: mol_type = other DNA
gcggtaatatcgggaatgatatggaagttcgctacacgcaaaacgggaaagcgattggtagttttccgttggctg

SEQ ID NO: 617036 - DNA, 75 bp, synthetic construct
  source 1..75: mol_type = other DNA
ttgcagaggatataagatttaaatctattgttaatttaaatggagggggtgagctagcagatggtggaacgcatt

SEQ ID NO: 617037 - DNA, 75 bp, synthetic construct
  source 1..75: mol_type = other DNA
gccgccgccccacccgccgaaagttggctgcggttaatgccggcggctagttttgtcacgctgctcaccctcggc

SEQ ID NO: 617038 - DNA, 75 bp, synthetic construct
  source 1..75: mol_type = other DNA
ggcctgatcctcgggctgcgtaccttctcccaacaggggatgtttatcctcggcgggacgctggccgaccgctat

SEQ ID NO: 617039 - DNA, 75 bp, synthetic construct
  source 1..75: mol_type = other DNA
ttacaacgtcgacccgggttacctggtctggttcggcgatatcggcgttaatgaattcgcctgtctggttaataa

SEQ ID NO: 617040 - DNA, 75 bp, synthetic construct
  source 1..75: mol_type = other DNA
attcctcattcccggcacacgaaggctctctgctggatttacgggacattgagcaggggctggagaatatgcaac

SEQ ID NO: 617041 - DNA, 75 bp, synthetic construct
  source 1..75: mol_type = other DNA
ccatgctgtctgcggcgataggcgtggtggttatcgctttttttagttggcggataatgtttctgctgggcggta

SEQ ID NO: 617042 - DNA, 75 bp, synthetic construct
  source 1..75: mol_type = other DNA
cagcagcagcgtcaggaagcccttgagcaacaactgacgccttcagcccctgatgttcgcctttctgcacctggc

SEQ ID NO: 617043 - DNA, 75 bp, synthetic construct
  source 1..75: mol_type = other DNA
agattaattttcctgttgaaacgccctgttttcagattaaacagacggaactggagggggctgatgcgttaccac

SEQ ID NO: 617044 - DNA, 75 bp, synthetic construct
  source 1..75: mol_type = other DNA
aaaaattgaggacgaacttgagcttgaggtaacctggaaaaaattccggttaaacaataaccagacaagaacggc

SEQ ID NO: 617045 - DNA, 75 bp, synthetic construct
  source 1..75: mol_type = other DNA
gtcagctggcaacggggaacccgctggtttggcgcacagccggcgccggaagaaacgttcggtgaggcaacggcg

SEQ ID NO: 617046 - DNA, 75 bp, synthetic construct
  source 1..75: mol_type = other DNA
cgtgtgctgcgcttcccccctgtcagtccactgctggatgaagacgcccgcttatgctccctttcggtttttgac

SEQ ID NO: 617047 - DNA, 75 bp, synthetic construct
  source 1..75: mol_type = other DNA
ttgaccatcagaagaaaagcacccgcattcaggccagcctgtttagtcaaaatgaagaagaaaaacagcgtctcg

SEQ ID NO: 617048 - DNA, 75 bp, synthetic construct
  source 1..75: mol_type = other DNA
gagctttgagctgaaaacggtttatgccgatgaatggatacccgatccaaccacacaaaaagttatcaatggctg

SEQ ID NO: 617049 - DNA, 75 bp, synthetic construct
  source 1..75: mol_type = other DNA
ggcgcggtaggttatttcaccgcgcatggcgatctcgacacctgcattgtgatccgctcggcactggtggaaaac

SEQ ID NO: 617050 - DNA, 75 bp, synthetic construct
  source 1..75: mol_type = other DNA
tggataacgccctgcctgcgggtgtggaaaatgaacaatcaccaaactgccgcgtgctgcgcttcccccctgtca

SEQ ID NO: 617051 - DNA, 75 bp, synthetic construct
  source 1..75: mol_type = other DNA
tcgccgatctcaccaaagttgaccgttattcttatgtgatgcacctcgtctcccgcgtggtcggtgagctgcgcc

SEQ ID NO: 617052 - DNA, 75 bp, synthetic construct
  source 1..75: mol_type = other DNA
cgatcatggttatgtcaccacccgggttctggcaccttcgcaggatttaaaaagcggtatcctccggctggttat

SEQ ID NO: 617053 - DNA, 75 bp, synthetic construct
  source 1..75: mol_type = other DNA
tatctgccagcgctgatggccattttgctgaaccgatttcttgatggtctggatggtgcgctggcccggcgcaga

SEQ ID NO: 617054 - DNA, 75 bp, synthetic construct
  source 1..75: mol_type = other DNA
gaataaaaccgttgttgcaccaatgtgtacgactactggataaacctgcaattacccctgatggtttaacgttga

SEQ ID NO: 617055 - DNA, 75 bp, synthetic construct
  source 1..75: mol_type = other DNA
gcgctgtgctggatgacaacatttacgcgagtgtggagtgggtatctgacgctgaagtcgcttcagcgtcagtaa

SEQ ID NO: 617056 - DNA, 75 bp, synthetic construct
  source 1..75: mol_type = other DNA
aataactttccctggataaggaactggattgttagccaggacgagtatcttaataaactggcagaagtatcggga

SEQ ID NO: 617057 - DNA, 75 bp, synthetic construct
  source 1..75: mol_type = other DNA
gattcgatgagttttgtcgaaatgaatatatggcattattgcgcacaatgtcattagaacgtcaagatgctcaac

SEQ ID NO: 617058 - DNA, 75 bp, synthetic construct
  source 1..75: mol_type = other DNA
acgatattcttgatactttaagacgaggacatggcctgttattttgcccatgttgtggggaaccaggaaagccga

SEQ ID NO: 617059 - DNA, 75 bp, synthetic construct
  source 1..75: mol_type = other DNA
atgaaatatccatgagtagtctggattttctgaataacattattaaccctatccgggttgaggcagggaaaccac

SEQ ID NO: 617060 - DNA, 75 bp, synthetic construct
  source 1..75: mol_type = other DNA
ttgctgccgggcggtttgaagtgaaaactggcactacgagcgaaacaaactacgcctttagccaggcacgtttta

SEQ ID NO: 617061 - DNA, 75 bp, synthetic construct
  source 1..75: mol_type = other DNA
caaacattgccggaggcattacgtctcgccgcggatctggccgagcagaaagaacaactcagccagcagttagcc

SEQ ID NO: 617062 - DNA, 75 bp, synthetic construct
  source 1..75: mol_type = other DNA
ttacgcgctggtgccgttcgggtttattctcgccgcaccagaacaaaacgcgctggccggaggctggctgttgtt

SEQ ID NO: 617063 - DNA, 75 bp, synthetic construct
  source 1..75: mol_type = other DNA
taacgaagattttgttaaagcggtcaaggcgacaggtaaaaagcagttgattatcgccggagtggtcaccgaagt

SEQ ID NO: 617064 - DNA, 75 bp, synthetic construct
  source 1..75: mol_type = other DNA
cccggctgttgaccggcattaaccgtgaccgtctgcaacaggactttgtgcagtggacacaggagtcggcggaat

SEQ ID NO: 617065 - DNA, 75 bp, synthetic construct
  source 1..75: mol_type = other DNA
atctacaccggtagctggacagagcagggcaaccagatggctaaccgcgataactccgacccgtccggtctgggg

SEQ ID NO: 617066 - DNA, 75 bp, synthetic construct
  source 1..75: mol_type = other DNA
agcgccgttttatctcgaccggtggggcgctaaaaaacgtcctccagttggatcgagaaaccaatgaggatcttg

SEQ ID NO: 617067 - DNA, 75 bp, synthetic construct
  source 1..75: mol_type = other DNA
gtctgaccgagcacttccacacctggaccaagcacgcattgctcaacgcaattgctcagccggaacagtttgtgg

SEQ ID NO: 617068 - DNA, 75 bp, synthetic construct
  source 1..75: mol_type = other DNA
agcctgccgggttatctgacgctgccgtcagaaaaacaggttgatttgcagtcgtatctggaagcgaatacgccg

SEQ ID NO: 617069 - DNA, 75 bp, synthetic construct
  source 1..75: mol_type = other DNA
cggttaatgatgtttgtctgtcagaagggtttcgttctctgctgatgcagacccacactttgtggaaaattgaag

SEQ ID NO: 617070 - DNA, 75 bp, synthetic construct
  source 1..75: mol_type = other DNA
cggttaatgatgtttgtctgtcagaagggtttcgttctctgctgatgcagacccacacgttgtggaaaattgaat

SEQ ID NO: 617071 - DNA, 75 bp, synthetic construct
  source 1..75: mol_type = other DNA
cacaaatggagcgggggccgggtttggatatggggttggcaattatgtggtcaagcatgctgcaaatacaatcgg

SEQ ID NO: 617072 - DNA, 75 bp, synthetic construct
  source 1..75: mol_type = other DNA
cggtctggactcggtattgtgggaaatgctcaaccacgaaatgggctaccaggcagaggagccatcgctggaaaa

SEQ ID NO: 617073 - DNA, 75 bp, synthetic construct
  source 1..75: mol_type = other DNA
aaaacctcgttgaaaaccaaacctgctggcgcgatagaagccaagaagcgttatatcgttggtaataacttacct

SEQ ID NO: 617074 - DNA, 75 bp, synthetic construct
  source 1..75: mol_type = other DNA
gagctggagtaaccaggaggggcgtgacaaggttcgagacgtagaagtcgtttatatctatcacgataccattga

SEQ ID NO: 617075 - DNA, 75 bp, synthetic construct
  source 1..75: mol_type = other DNA
acatccgcaccatggcgatgatccaattgctgctcggtaacatgggtatggctggtggcggcgtgaacgcattgc

SEQ ID NO: 617076 - DNA, 75 bp, synthetic construct
  source 1..75: mol_type = other DNA
aaaacgctaacgtcgtaatggtgatgggcggtaacgctgctgaagcgcatcccgtcggttttcgctgggcgatgg

SEQ ID NO: 617077 - DNA, 75 bp, synthetic construct
  source 1..75: mol_type = other DNA
gccctgctggttcacagcaaaggggcgatgatcctcaagagcctggatgattatatcgaggcgctctacagcaac

SEQ ID NO: 617078 - DNA, 75 bp, synthetic construct
  source 1..75: mol_type = other DNA
atgagtattgtaaaagaggagcacaaagccacgctgcgtaaatggcacgaagagttgcaagagaaacgcggaaat

SEQ ID NO: 617079 - DNA, 75 bp, synthetic construct
  source 1..75: mol_type = other DNA
ggtggcggcttatgcgtttgatgttctgtgccgtcagctaagggaagcaacggatgcgtatctccgtacacagag

SEQ ID NO: 617080 - DNA, 75 bp, synthetic construct
  source 1..75: mol_type = other DNA
tgatgctgaaaaagttccggcgtggatgtttcgtctggtcatggtggtgacacagacatttggctgccgggcgta

SEQ ID NO: 617081 - DNA, 75 bp, synthetic construct
  source 1..75: mol_type = other DNA
ttcctgggtcaaaacgagatcccggcaattgtaaaaccgtttattaatcgtctgaatcgtaatgaattgtttact

SEQ ID NO: 617082 - DNA, 75 bp, synthetic construct
  source 1..75: mol_type = other DNA
cgtgtggcttgtatcacccctactggcatttgggagagcgcaaccctcatagcgatgaactatcaaggcagatga

SEQ ID NO: 617083 - DNA, 75 bp, synthetic construct
  source 1..75: mol_type = other DNA
atgcaaacacaaaaaccgactctcgaactgctaacctgcaaaggcgcttatcgcgacaacccgactgcgcttttt

SEQ ID NO: 617084 - DNA, 75 bp, synthetic construct
  source 1..75: mol_type = other DNA
gtttattgattcgccacaacggttagcggccgtgcgaaatgccagcaccgacgatgcactgtttgcgctggtatc

SEQ ID NO: 617085 - DNA, 75 bp, synthetic construct
  source 1..75: mol_type = other DNA
gagctctcaatccagggactcgataacgataacaacaatcgctttgataaatcagcggccagtctcaagaatcag

SEQ ID NO: 617086 - DNA, 75 bp, synthetic construct
  source 1..75: mol_type = other DNA
aaggtgccccgaaaaggccctatgcggaaatcgtgagggttcgtcacaatttatgtcacgggaacatcctggagc

SEQ ID NO: 617087 - DNA, 75 bp, synthetic construct
  source 1..75: mol_type = other DNA
ggaaaccactcgatggcaggccagtttacaggtgggtaatcttcagcgccaatttgatatatgtggcccttgcca

SEQ ID NO: 617088 - DNA, 75 bp, synthetic construct
  source 1..75: mol_type = other DNA
ttgtcgccatcattgcgttgattaacggtattatcggcggcgttggcggctggtttggttttgaatatgcctcgc

SEQ ID NO: 617089 - DNA, 75 bp, synthetic construct
  source 1..75: mol_type = other DNA
ggtttacgcgcgctggcggcggcgacactttctaacctgatgagtgctactattgcaggattctttattggttta

SEQ ID NO: 617090 - DNA, 75 bp, synthetic construct
  source 1..75: mol_type = other DNA
agcttggtttacgcgcgctggcggcggcgacactttctaatctgatgagtgccaccattgccgggttctttattg

SEQ ID NO: 617091 - DNA, 75 bp, synthetic construct
  source 1..75: mol_type = other DNA
caactgaacaggttgagcgcatcgcctcaatcgttgctcgggaagtcgtaggcaaattaggtaaagaaatacgcg

SEQ ID NO: 617092 - DNA, 75 bp, synthetic construct
  source 1..75: mol_type = other DNA
attcttttttttcagttaccgccctgttttttatggacagcgtaaaattctgcattaaatgggataaacactcag

SEQ ID NO: 617093 - DNA, 75 bp, synthetic construct
  source 1..75: mol_type = other DNA
atccaggctggggaatcctgttgttgaacacctttttagtgatgataattattcttttttttcagttaccgccct

SEQ ID NO: 617094 - DNA, 75 bp, synthetic construct
  source 1..75: mol_type = other DNA
gtcattcgtcgcggtcaccaccattttcctcgggcaaaacgaaattccggcaatcgtcaaaccctttatcgatcg

SEQ ID NO: 617095 - DNA, 75 bp, synthetic construct
  source 1..75: mol_type = other DNA
gctgaatcgcaatgaattatttacagcgatttgtagtggcatggcctcaattgctggttcgacaatgattggtta

SEQ ID NO: 617096 - DNA, 75 bp, synthetic construct
  source 1..75: mol_type = other DNA
ttgttatctgattgtaatgaatggtgacatcagcaatcaaaaagttgcaaatgcacaagcttattttgctgggct

SEQ ID NO: 617097 - DNA, 75 bp, synthetic construct
  source 1..75: mol_type = other DNA
gccaatacgttgacgccattcgtcggtgatgcgaacacgcagacgccggagtttaagtccttccttgtgaatgtg

SEQ ID NO: 617098 - DNA, 75 bp, synthetic construct
  source 1..75: mol_type = other DNA
ggtggttatcgatccgctggtgactgaaacctctaccttctggcagaaccacggcgagtcgaacgatgtcgatcc

SEQ ID NO: 617099 - DNA, 75 bp, synthetic construct
  source 1..75: mol_type = other DNA
cttttttagcgggaataaaacaggctgtcagccaggcgcaaccaacgcccaccagcatccagagagtttgcggcc

SEQ ID NO: 617100 - DNA, 75 bp, synthetic construct
  source 1..75: mol_type = other DNA
atgcattcgttcctccagtttttacgcgatgataatccgggctcatcggaagataatatggactttactccttca

SEQ ID NO: 617101 - DNA, 75 bp, synthetic construct
  source 1..75: mol_type = other DNA
aaatcagcgaaacgctggcggcggcgaaaggcattgccaatggcgatcgtgtcactgtctccagcaagcgtggct

SEQ ID NO: 617102 - DNA, 75 bp, synthetic construct
  source 1..75: mol_type = other DNA
actactggagcaattatccgaagttcttcgtcagtctgatgaagtctttctatggtgatgccgcacagaaagaga

SEQ ID NO: 617103 - DNA, 75 bp, synthetic construct
  source 1..75: mol_type = other DNA
ctcgctggagtccattttaggttacctgctggccccgctggcgtgggtgatggggttgactggagtgatgcgaat

SEQ ID NO: 617104 - DNA, 75 bp, synthetic construct
  source 1..75: mol_type = other DNA
gggtaacgtttatgttggccgcaacgaagacgaagtgcgtaaagaaaataacctcggtgctgatgttgcgctgcg

SEQ ID NO: 617105 - DNA, 75 bp, synthetic construct
  source 1..75: mol_type = other DNA
ggcgaaatcagccgtattgagaacaagctggcgaacgaaggctttgtagcccgcgcaccggaagcggtcatcgcg

SEQ ID NO: 617106 - DNA, 75 bp, synthetic construct
  source 1..75: mol_type = other DNA
atcattccgttcatcaccgaaaccatctggcagcgtgtgaaagtactttgcggtatcactgccgacaccatcatg

SEQ ID NO: 617107 - DNA, 75 bp, synthetic construct
  source 1..75: mol_type = other DNA
cgttcccgcagtacgatgcgtctcaggttgatgaagcggcactggccgacaccgagtggctgaaacaggcgatcg

SEQ ID NO: 617108 - DNA, 75 bp, synthetic construct
  source 1..75: mol_type = other DNA
cctggcggcgctggcgtctaccggtcgtgacatcaactgggatatgaagcgcctggaaggttaccgtaacttctg

SEQ ID NO: 617109 - DNA, 75 bp, synthetic construct
  source 1..75: mol_type = other DNA
ggcgaaagaagtggcgaagatcgaaggtgaaatcagccgcatcgagaacaagctggcaaatgaaggctttgtcgc

SEQ ID NO: 617110 - DNA, 75 bp, synthetic construct
  source 1..75: mol_type = other DNA
ggggcctactactacgacaccaatgcgaacaagcaagccgactctatgttaggtgtgcaatacagctcctgctgc

SEQ ID NO: 617111 - DNA, 75 bp, synthetic construct
  source 1..75: mol_type = other DNA
gcgatttgtagtggcatggcctcgattgctggttcgacaatgattggttacgccgcactgggcgtgcctgtggaa

SEQ ID NO: 617112 - DNA, 75 bp, synthetic construct
  source 1..75: mol_type = other DNA
gccgaaaatggacacgctgtttgatggcgcaggatttatctttggtttcagggtattaccggcaattatcttcgt

SEQ ID NO: 617113 - DNA, 75 bp, synthetic construct
  source 1..75: mol_type = other DNA
gccgagcagtataaaaacggaatttcgcaggtaggtacggttgccagttggccaattgccgatcgttggtcaatt

SEQ ID NO: 617114 - DNA, 75 bp, synthetic construct
  source 1..75: mol_type = other DNA
gaacatccagaagatagcaattcacgccgttggttgttctactggcaacactctggagtgatggaccaggtttgg

SEQ ID NO: 617115 - DNA, 75 bp, synthetic construct
  source 1..75: mol_type = other DNA
agcagaccaatctcgactggtataacagcaatccacaaaacaataagttggcagattctgttaaccgtgtaatgc

SEQ ID NO: 617116 - DNA, 75 bp, synthetic construct
  source 1..75: mol_type = other DNA
gtcattggggccaagagagacgacttgaattcatcgattttcgcctactgtgggaaggtcgacttaaccgtgcag

SEQ ID NO: 617117 - DNA, 75 bp, synthetic construct
  source 1..75: mol_type = other DNA
actaaagccgcggagcgagaattaaaacgtcagttccgcgagcgcgagccgaaaaagcagtatgtggctcgcgtc

SEQ ID NO: 617118 - DNA, 75 bp, synthetic construct
  source 1..75: mol_type = other DNA
gaacagacgggcttcaccattaatttaatgcaacgctcggttcttctctttaaccataatataaagaaaaacgta

SEQ ID NO: 617119 - DNA, 75 bp, synthetic construct
  source 1..75: mol_type = other DNA
atggaaatcttcgaaaaagatcaaaaaatcgcttttgttggcttgttaagcgatgctgctttgtcttacgaatac

SEQ ID NO: 617120 - DNA, 75 bp, synthetic construct
  source 1..75: mol_type = other DNA
gcaagcgtgaccagacctatttatatgtcgaaaaaaaagacgatttttcgcgtgttcctgaggaactgatgaaag

SEQ ID NO: 617121 - DNA, 75 bp, synthetic construct
  source 1..75: mol_type = other DNA
gtgctgatgctgatcgccgctattgtcggtgacgcggtgaactacaccattggacggttatttggtgacaaactg

SEQ ID NO: 617122 - DNA, 75 bp, synthetic construct
  source 1..75: mol_type = other DNA
attttatcctgcacattgacgtgcatttggcggaactggtcgcgcagtatggcgtctgggtttatgccattttgt

SEQ ID NO: 617123 - DNA, 75 bp, synthetic construct
  source 1..75: mol_type = other DNA
cctttggtaagtcgctggagcgactgccgtcacttgaccgtcccgaccttaaaaaactggctggacagatttctg

SEQ ID NO: 617124 - DNA, 75 bp, synthetic construct
  source 1..75: mol_type = other DNA
gattcctgattcagaagtttgcacccgtctggttaagtggcaaaaggttgcgaagttggccgaagcgccagcgga

SEQ ID NO: 617125 - DNA, 75 bp, synthetic construct
  source 1..75: mol_type = other DNA
tcggcgggaatgtattgccacgtctgcgcaaagtggctgcacgttacaagctggccgctgatgcacttgatcttc

SEQ ID NO: 617126 - DNA, 75 bp, synthetic construct
  source 1..75: mol_type = other DNA
tttaatgcaacgctcggttcttctctttaaccataatataaagaaaaacgtaactgccaagcagttgcgtaaaaa

SEQ ID NO: 617127 - DNA, 75 bp, synthetic construct
  source 1..75: mol_type = other DNA
ggcacgttttcatgttgaggctatcgatcccgccaaaggttcggcaacgggttacatcgccaagtacatttccaa

SEQ ID NO: 617128 - DNA, 75 bp, synthetic construct
  source 1..75: mol_type = other DNA
ttatgacttcaccgaacagtttgattccggcactgacgacgccagagagctgcatcgccgcaccctggaatctta

SEQ ID NO: 617129 - DNA, 75 bp, synthetic construct
  source 1..75: mol_type = other DNA
acaacatacaataccggcaggcgggtagaaaatgcagtaatatcattgcttaatcaaacatatcgttcatttgag

SEQ ID NO: 617130 - DNA, 75 bp, synthetic construct
  source 1..75: mol_type = other DNA
ataatattgctggttttgctgtgccgacattagttgcagtccctgctttggggattcttgccaggctgcttggac

SEQ ID NO: 617131 - DNA, 75 bp, synthetic construct
  source 1..75: mol_type = other DNA
tggatgccgatgaagtggcggacgcctttaaacatctgcatcagagcggcaaagtgcgtcattttggtgtatcga

SEQ ID NO: 617132 - DNA, 75 bp, synthetic construct
  source 1..75: mol_type = other DNA
atcagctgggtatttatctcgttccccaggaaccgctgcttttcccaagcctgtcgataaaagaaaacatcctgt

SEQ ID NO: 617133 - DNA, 75 bp, synthetic construct
  source 1..75: mol_type = other DNA
tgtcgattttacatatagatacgacgacagaagacactggaatattcaggatctaatcagagcggaacttggtaa

SEQ ID NO: 617134 - DNA, 75 bp, synthetic construct
  source 1..75: mol_type = other DNA
gggataccaacaagagatgcagaagaaccctcaactggaacctcgaccaattggcctattctgcgagcgagtatc

SEQ ID NO: 617135 - DNA, 75 bp, synthetic construct
  source 1..75: mol_type = other DNA
ttgctttatgctatgtatgggttggtggttgggcgtgtgatttcatttttgattagcgcaataatttgtcgagat

SEQ ID NO: 617136 - DNA, 75 bp, synthetic construct
  source 1..75: mol_type = other DNA
gtgccgccactccgcctgtcccacggctacatcgccttaagcggcaaaaccagcgaactgtctaccgacgacatt

SEQ ID NO: 617137 - DNA, 75 bp, synthetic construct
  source 1..75: mol_type = other DNA
gggcctggctgggctggtggggccggacgcacagaactggccgagacgctctatggtctgcgtactttgcgtggc

SEQ ID NO: 617138 - DNA, 75 bp, synthetic construct
  source 1..75: mol_type = other DNA
acgccaatttcctgcgcgagctggccgaaagcctgcctcgtatttttccagaaggcagtacagataagtctgcac

SEQ ID NO: 617139 - DNA, 75 bp, synthetic construct
  source 1..75: mol_type = other DNA
gcacggacattatccggtggcaaccagcaaaaaatcctcattgccaaatgcctgagcttcgccgcaagcattgat

SEQ ID NO: 617140 - DNA, 75 bp, synthetic construct
  source 1..75: mol_type = other DNA
ccatcgccttaagcggcaaaaccagcgaactgtctaccgacgacattattcaggccattacgccagcggtacggg

SEQ ID NO: 617141 - DNA, 75 bp, synthetic construct
  source 1..75: mol_type = other DNA
gtgcaatgtccacctaaggtttatgaacaaattgaaagcagaaatacatttgttcaaaactcacctgcaaaactg

SEQ ID NO: 617142 - DNA, 75 bp, synthetic construct
  source 1..75: mol_type = other DNA
tcgggaacgtgccagagatgtttttcagcgcaggcttgatttactgattccgcagacactttgggtcagtgagcg

SEQ ID NO: 617143 - DNA, 75 bp, synthetic construct
  source 1..75: mol_type = other DNA
cacggctttaacgatgcggatgccgatcatatgtttctcgatccggttaaagtcactattctgacaccggggatg

SEQ ID NO: 617144 - DNA, 75 bp, synthetic construct
  source 1..75: mol_type = other DNA
agagagccgcacggtactcgattttctactgatgctttgttccgtagggcaacattaccccggttttgaaacgga

SEQ ID NO: 617145 - DNA, 75 bp, synthetic construct
  source 1..75: mol_type = other DNA
tacggcgaaagaagctgcgaagcacaaccgacaggacgttttgtgctgtgtgtcctgtggatgcccgttaacact

SEQ ID NO: 617146 - DNA, 75 bp, synthetic construct
  source 1..75: mol_type = other DNA
ctggcggttctgttcacgggctttaactttaacgcagaagcggctaccgtaaaacaagcacttagttgtaacccg

SEQ ID NO: 617147 - DNA, 75 bp, synthetic construct
  source 1..75: mol_type = other DNA
gggcgacggttgcaaagccaatacctgcggctgggactttatcgtaacactctataacccaaaaacccatgaagt

SEQ ID NO: 617148 - DNA, 75 bp, synthetic construct
  source 1..75: mol_type = other DNA
ccctacggctctaaggcgaaacaagtattgtccgatctggtgtttggtcgaatgctcaaggttgagaggatcgac

SEQ ID NO: 617149 - DNA, 75 bp, synthetic construct
  source 1..75: mol_type = other DNA
gtggctgaattgcagaaagtggacgactggctgagtgccttgctggcaaatctggaaccagccgccagaagccgc

SEQ ID NO: 617150 - DNA, 75 bp, synthetic construct
  source 1..75: mol_type = other DNA
accggagatccgttacgcagagcgcaaattgttgggtttcagttcagtttcaataaacgtagtccatgatattat

SEQ ID NO: 617151 - DNA, 75 bp, synthetic construct
  source 1..75: mol_type = other DNA
gtcaaagagcggaagtacaccttttgtacgccggggcatatgggcggcaccgcatatcaaaaaagcccggttggc

SEQ ID NO: 617152 - DNA, 75 bp, synthetic construct
  source 1..75: mol_type = other DNA
cccagttatcccattgttgcttcggttgagacggcggcggcgatgctgcgtggtaatccgggcaaacggctgatt

SEQ ID NO: 617153 - DNA, 75 bp, synthetic construct
  source 1..75: mol_type = other DNA
gatccataagctgattcgtaaacacgatcttcccggtttgatgttgcgggcatttgataccttgccggagatgat

SEQ ID NO: 617154 - DNA, 75 bp, synthetic construct
  source 1..75: mol_type = other DNA
tgggttaaataaaaataatagacttgattgtatttcacagcttgacatgtcattccttgaaaggaattcaataaa

SEQ ID NO: 617155 - DNA, 75 bp, synthetic construct
  source 1..75: mol_type = other DNA
gcattccaggtgtgtcgttcggcgtatcctgacgcccgccactggctggtgctgtgcggtcatggtaataacggc

SEQ ID NO: 617156 - DNA, 75 bp, synthetic construct
  source 1..75: mol_type = other DNA
cctggtgctggtaggcattgcgttaggaacgttgtgcggagcggggatatcgctaataaaaacgctggccgatcc

SEQ ID NO: 617157 - DNA, 75 bp, synthetic construct
  source 1..75: mol_type = other DNA
gctggcaggggccggaaccacctatcagggaatgttccgtaatcccttagtgtcaccggatattttaggcgtctc

SEQ ID NO: 617158 - DNA, 75 bp, synthetic construct
  source 1..75: mol_type = other DNA
taacgataaaacaagcgatagactcaattaatttacgccactatcttctgcctgcaattcagaggaagttcgtct

SEQ ID NO: 617159 - DNA, 75 bp, synthetic construct
  source 1..75: mol_type = other DNA
acatgattcgcctgatgatattttatttaacgttgtcgtaccagaacttgaaaaaagagatctcatttccagtga

SEQ ID NO: 617160 - DNA, 75 bp, synthetic construct
  source 1..75: mol_type = other DNA
ccaggccgatgcgctactcacgagcatcagagatgtaatgaaaaatagtctttcagatattcatttccctcttga

SEQ ID NO: 617161 - DNA, 75 bp, synthetic construct
  source 1..75: mol_type = other DNA
agtgctgcccgagttgtggtaccggggtatacagcagggagggggggcaggagggcaactggaaggataggaact

SEQ ID NO: 617162 - DNA, 75 bp, synthetic construct
  source 1..75: mol_type = other DNA
atgcgaattctgaactgctatatggcgaatgacagcaaaggccattttgttacggcgaaagaagccgcgaagaac

SEQ ID NO: 617163 - DNA, 75 bp, synthetic construct
  source 1..75: mol_type = other DNA
gttgaccggagttgccagccgctatgtcggttttgtcgtcgcactgatgttgatcgtgctgggcctgttcccggc

SEQ ID NO: 617164 - DNA, 75 bp, synthetic construct
  source 1..75: mol_type = other DNA
aatggggcggacgagccgccgcaggtgcggtgagggctacggggcggggtatcaaatgggggacacttggcgcgg

SEQ ID NO: 617165 - DNA, 75 bp, synthetic construct
  source 1..75: mol_type = other DNA
aaccacagggcattttcagtaaatcaccggcaacgccgctgcaggataaaatgaacactgcacacaacgtgaagg

SEQ ID NO: 617166 - DNA, 75 bp, synthetic construct
  source 1..75: mol_type = other DNA
gcctcggctatcacggctatccgaaatccgtgtgtatctctattaatgaagtggtatgccacggtatccctgacg

SEQ ID NO: 617167 - DNA, 75 bp, synthetic construct
  source 1..75: mol_type = other DNA
cgcacaacaaaatacctgaaaactgcagccagtgctgactctgccagcgtgcagtttgagggcaaggtgcagcgt

SEQ ID NO: 617168 - DNA, 75 bp, synthetic construct
  source 1..75: mol_type = other DNA
aaaccaccaccggtcctcttggacaaggtttggcgaacgccgtcgggctggcgatagcggaacgtacgctggctg

SEQ ID NO: 617169 - DNA, 75 bp, synthetic construct
  source 1..75: mol_type = other DNA
gtgcgatcaggtggaagcagcggtgggctggaagctggcggttgagcgccacaacgggccgacggcgctgatcct

SEQ ID NO: 617170 - DNA, 75 bp, synthetic construct
  source 1..75: mol_type = other DNA
gtgaatttggtatgaccgccatcgccaacggcatcgcgcaccacggtggatttgtaccgtataccgcgacgttcc

SEQ ID NO: 617171 - DNA, 75 bp, synthetic construct
  source 1..75: mol_type = other DNA
gttttgagcgtggctttattgattacatcaagcatggtaatgaacagcgattacaactgttaagtgatgcgcttg

SEQ ID NO: 617172 - DNA, 75 bp, synthetic construct
  source 1..75: mol_type = other DNA
cattaacggaacgagctggatagaaggtggcggttgtaaagctaacgcctgcggctgggactatatcgttacact

SEQ ID NO: 617173 - DNA, 75 bp, synthetic construct
  source 1..75: mol_type = other DNA
tattgcacgtgccgggaaatataaaaattacatccgggatgaaataaaatactggcgatatacatcatacaaggg

SEQ ID NO: 617174 - DNA, 75 bp, synthetic construct
  source 1..75: mol_type = other DNA
cgcacggcgcaccgctgggtgaagaagaagtggcattggcacggcaaaaactgggctggcaccatccgccatttg

SEQ ID NO: 617175 - DNA, 75 bp, synthetic construct
  source 1..75: mol_type = other DNA
ccaacctggtatgatcgcgaccgctttattctttccaacggtcacgcgtcgatgctgctctacagtttgctgcat

SEQ ID NO: 617176 - DNA, 75 bp, synthetic construct
  source 1..75: mol_type = other DNA
agaagcaggcgtttttctgatttcgccgtttgtcgggcgtatttatgactggtatcaggcgcgtaagccgatgga

SEQ ID NO: 617177 - DNA, 75 bp, synthetic construct
  source 1..75: mol_type = other DNA
cgtcgcaaaatacgcttaacgcttacggccccatgctgccggaactgctcggcggttcggcggatctggctccca

SEQ ID NO: 617178 - DNA, 75 bp, synthetic construct
  source 1..75: mol_type = other DNA
cgccgcgcggatggcggcactaatgaaagcgcggcagattatggtttatacccacgactcaattggtctgggcga

SEQ ID NO: 617179 - DNA, 75 bp, synthetic construct
  source 1..75: mol_type = other DNA
ccttctaacgttgcggctcgcgtggcagtggaagcaggcatcgccgattactggtacaaatacgttggcctgaaa

SEQ ID NO: 617180 - DNA, 75 bp, synthetic construct
  source 1..75: mol_type = other DNA
taagcccggccccggtatgccaccgcacggctggcgcacccagttctgggtggtcgatcaaaataacaaagtgct

SEQ ID NO: 617181 - DNA, 75 bp, synthetic construct
  source 1..75: mol_type = other DNA
atgatgcgccagctggcgcaggaactgcgccggacacagcagcagaacatcaggatgcagcgcaatcctgatggc

SEQ ID NO: 617182 - DNA, 75 bp, synthetic construct
  source 1..75: mol_type = other DNA
aatgatgatgttgaggcaatgacccgcgacatgattctgcaatggctggcggggggatctttgtatcagcactga

SEQ ID NO: 617183 - DNA, 75 bp, synthetic construct
  source 1..75: mol_type = other DNA
gaaccggactcacaaaaacgggcgaccggatggcatcagctgtattccgctgacagtggtatggcccccaccggc

SEQ ID NO: 617184 - DNA, 75 bp, synthetic construct
  source 1..75: mol_type = other DNA
cgccgcctgctgggtgtaaatgatgatgttgaggcaatgacccgcgacatgattctgcaatggctggcggagtga

SEQ ID NO: 617185 - DNA, 75 bp, synthetic construct
  source 1..75: mol_type = other DNA
caggatgcagcgcaaccctgacggcagcagctatgaaccgcgacgggtaacagcacgcagtaaaaaaggccgcat

SEQ ID NO: 617186 - DNA, 75 bp, synthetic construct
  source 1..75: mol_type = other DNA
agcagttatgagccgcgcagggtaacagcacgcagcaaaaaggggcgcatcaaacgtcagatgtttacaaagctg

SEQ ID NO: 617187 - DNA, 75 bp, synthetic construct
  source 1..75: mol_type = other DNA
gcagtttgctggcaaggtgcagcgtattgcccgtgttcatcactacggcctgcgagaacgtattcaacgaattaa

SEQ ID NO: 617188 - DNA, 75 bp, synthetic construct
  source 1..75: mol_type = other DNA
actggctgagtgccttactggcgaatctggagccagctgcaagaagtcgcatgatgcgccaactggcacaggagc

SEQ ID NO: 617189 - DNA, 75 bp, synthetic construct
  source 1..75: mol_type = other DNA
ttactggcagcgctggcgacgttcccactggcacgcggcttgctggcaccagtaaaacggttagttgacggcacg

SEQ ID NO: 617190 - DNA, 75 bp, synthetic construct
  source 1..75: mol_type = other DNA
caggatgcagcgcaatccagatggcagtagttatgagccgcgcagagtaacagcacgcagcaaaaaggggcgcat

SEQ ID NO: 617191 - DNA, 75 bp, synthetic construct
  source 1..75: mol_type = other DNA
tttaatcgcgaaatatccgcaacgtactttattgggcttatcttataaaacagaagaaaatattattatgagcat

SEQ ID NO: 617192 - DNA, 75 bp, synthetic construct
  source 1..75: mol_type = other DNA
tgagagagcggataggtaaaagaagcaaaagtattaaatacccagctcgcagattgctgggacaaacccaagaga

SEQ ID NO: 617193 - DNA, 75 bp, synthetic construct
  source 1..75: mol_type = other DNA
atcgtttaaaggatctggctaccgcaggttttactttaacgcagacgtatacccgcgcggttaaaaatgctgatg

SEQ ID NO: 617194 - DNA, 75 bp, synthetic construct
  source 1..75: mol_type = other DNA
cactggcaacaggcttaagacgctcgaacatcatcaaccttgaatggcaacaaatagatatgcagcgccgggtgg

SEQ ID NO: 617195 - DNA, 75 bp, synthetic construct
  source 1..75: mol_type = other DNA
gtatgacgcaaacacagcctggaaagcggcgctgagacgggctggtattgatgatttcagatttcacgacttgag

SEQ ID NO: 617196 - DNA, 75 bp, synthetic construct
  source 1..75: mol_type = other DNA
aattgcagaacacgccggggatagcgaaaagcaaaagcgagcagttatggcatcagtttaatctggcacgtaagc

SEQ ID NO: 617197 - DNA, 75 bp, synthetic construct
  source 1..75: mol_type = other DNA
gaacaacattggcagcatctgccgggaaccggatctcgtcgcgccagccagattattgaatggaagaataatgtg

SEQ ID NO: 617198 - DNA, 75 bp, synthetic construct
  source 1..75: mol_type = other DNA
gtgtttacgatcagttaagcgcccgtcttacgcagtggcaacgctgctttgggagcgagccccgcgacgtgatga

SEQ ID NO: 617199 - DNA, 75 bp, synthetic construct
  source 1..75: mol_type = other DNA
gacgacgactacgcaccaatctgcttctcttctcagaatggcttctacggttacgatgaaggcttagatatgctg

SEQ ID NO: 617200 - DNA, 75 bp, synthetic construct
  source 1..75: mol_type = other DNA
tacttctgggtctggactctgaaaactatggcaacttccatatgctagaagttttcgctaatcgtggttataaca

SEQ ID NO: 617201 - DNA, 75 bp, synthetic construct
  source 1..75: mol_type = other DNA
gaggaagacgaagactacgctccaatctgtttctcttctcagaatggcttctacggttacgatgaaggcttagat

SEQ ID NO: 617202 - DNA, 75 bp, synthetic construct
  source 1..75: mol_type = other DNA
acttccgcttccatgacctgaggcatacctgggcaagctggctggttcagtccggtgtctctcttcttgcactta

SEQ ID NO: 617203 - DNA, 75 bp, synthetic construct
  source 1..75: mol_type = other DNA
gtcgcgtcttatccagcctacgggaacgaacatgtagggcggataaggcgttcacgcagcatccgccggtggcgc

SEQ ID NO: 617204 - DNA, 75 bp, synthetic construct
  source 1..75: mol_type = other DNA
aggatatttatgatttctaccaggatggtggcacattagcgtcattaacaaatctgacacaacaagatctcaatg

SEQ ID NO: 617205 - DNA, 75 bp, synthetic construct
  source 1..75: mol_type = other DNA
gtgcttaacgccagcgattccagcacctgggagcaagttttgcagagaagcgaacagcattggcggcaactgcca

SEQ ID NO: 617206 - DNA, 75 bp, synthetic construct
  source 1..75: mol_type = other DNA
ggcttcgtcaaaagtttaccgacaaccgtatcgtcttctggcacgacccggaacaacgcttcactgattcactta

SEQ ID NO: 617207 - DNA, 75 bp, synthetic construct
  source 1..75: mol_type = other DNA
gcctatactgaccgggagcctcaaagcctaccttcagcagtaagagctatcggcactcgtggggttgcttctgac

SEQ ID NO: 617208 - DNA, 75 bp, synthetic construct
  source 1..75: mol_type = other DNA
agcgccgagcaatagcgatggtgttcaatatatgggctacgcaaggccgcgtaatattgcatttaactatattgt

SEQ ID NO: 617209 - DNA, 75 bp, synthetic construct
  source 1..75: mol_type = other DNA
ttgcgaatgagcttggcgctatcattaacaacgaaaagcgatttaaagctgaagtatctacgcagttgggcgttt

SEQ ID NO: 617210 - DNA, 75 bp, synthetic construct
  source 1..75: mol_type = other DNA
gcacgcacattcgtaagcgccagagcttttttgccaataaacagcgcatagccggtttaaaaaagtgggtgactg

SEQ ID NO: 617211 - DNA, 75 bp, synthetic construct
  source 1..75: mol_type = other DNA
gtgctcgcaacaaaaaaacgactcgaaatcgacgagcctgagcagaaatttttactctatttcacctgtgaggtt

SEQ ID NO: 617212 - DNA, 75 bp, synthetic construct
  source 1..75: mol_type = other DNA
atttgcgtggtgagtttctgcgcgggtgggacgacgggcgcggtgtggattcagggcgtagcctgttgtctgctc

SEQ ID NO: 617213 - DNA, 75 bp, synthetic construct
  source 1..75: mol_type = other DNA
tcaaccagggtgaaggcgcaattccggcacgtaccgaccgcgttcgtgttcattacaccggtaaactgatcgacg

SEQ ID NO: 617214 - DNA, 75 bp, synthetic construct
  source 1..75: mol_type = other DNA
gtggctcgaagagaaagcacataagaaatcactggacgatgacaaaagccggatcggattctggcttcaacattt

SEQ ID NO: 617215 - DNA, 75 bp, synthetic construct
  source 1..75: mol_type = other DNA
ctgtcaggtaagcaaccactggatgagacgctgactcatttgagtgggaaggatgttgccggtcttctcgcatac

SEQ ID NO: 617216 - DNA, 75 bp, synthetic construct
  source 1..75: mol_type = other DNA
gcgtggtgtggatgcgggacgtgccttgctaagtcttcaggatgactcttttgaagcgcacaggcatgagtcctt

SEQ ID NO: 617217 - DNA, 75 bp, synthetic construct
  source 1..75: mol_type = other DNA
tcgaggaagcttgtgtcaggtggcttgaagagaaagcacataaaaaatcactggacgatgacaaaagccggatcg

SEQ ID NO: 617218 - DNA, 75 bp, synthetic construct
  source 1..75: mol_type = other DNA
ttcttctgggtctgaaccatgatgataatctggctatgatgcatgttttcgctaatcgtggttataacatcattc

SEQ ID NO: 617219 - DNA, 75 bp, synthetic construct
  source 1..75: mol_type = other DNA
gctgaaaggctggcagcggtcagcaggcgctaaggcagaactggcactggcggagaagctggggcatgcagttat

SEQ ID NO: 617220 - DNA, 75 bp, synthetic construct
  source 1..75: mol_type = other DNA
ttttcagagggggcgatatgccgattctctggtttcaggaggtgtgggaaaaagaaatgtgggaaggtcttgtga

SEQ ID NO: 617221 - DNA, 75 bp, synthetic construct
  source 1..75: mol_type = other DNA
tggctggcagcggtcggcaggtgctaaggcagaactggcactggcggagaaactggggcatgcggttattttaca

SEQ ID NO: 617222 - DNA, 75 bp, synthetic construct
  source 1..75: mol_type = other DNA
ttatacagaatatccaagcgtaagattgcaaaggcgcgtggaaaggatgagaaactaatacgcattgagatacag

SEQ ID NO: 617223 - DNA, 75 bp, synthetic construct
  source 1..75: mol_type = other DNA
agcaaccaaatctttctgagatatctaaatgtcgtgcagaaaatgataaagaagccagactaaactgctacgata

SEQ ID NO: 617224 - DNA, 75 bp, synthetic construct
  source 1..75: mol_type = other DNA
tgattctttccggtcgcagtttggggaatcgatcacaccaagtctttacatcacttgccgcgagaaaaaaacaga

SEQ ID NO: 617225 - DNA, 75 bp, synthetic construct
  source 1..75: mol_type = other DNA
gctgaaaggctggcagcggtcagcaggcgctaaggcagaactggcgctggcggagaaactggggcatgcagttat

SEQ ID NO: 617226 - DNA, 75 bp, synthetic construct
  source 1..75: mol_type = other DNA
gtgagggcgagggtttatatcgccggtccaatgacgggctatgaaaatttcaaccgtgaagcatttcacagggcg

SEQ ID NO: 617227 - DNA, 75 bp, synthetic construct
  source 1..75: mol_type = other DNA
gtcctatgacgggctatgaaaatttcaaccgtgaagcatttcacagggcggaagaggaactgaaacgggaagggc

SEQ ID NO: 617228 - DNA, 75 bp, synthetic construct
  source 1..75: mol_type = other DNA
tgaggcgtttcacaaggcggaagaggaactgaaacgtgaagggcataccgtcttaaacccggcagtacttccgga

SEQ ID NO: 617229 - DNA, 75 bp, synthetic construct
  source 1..75: mol_type = other DNA
gtccaatgacgggatatgaaaatttcaaccgtgaggcatttcacaaggtggaagaggaactgaaacgggaagggc

SEQ ID NO: 617230 - DNA, 75 bp, synthetic construct
  source 1..75: mol_type = other DNA
ttggggccgaagtggtcacaggttcttcgcgaatgaaagcaggtacggcgcagaaactggtgctcaacatgcttt

SEQ ID NO: 617231 - DNA, 75 bp, synthetic construct
  source 1..75: mol_type = other DNA
ctatacggtatctctaaaagaaagctcgctaaagctcgcaaaaaggatgagaaaataatacgcattgagatacag

SEQ ID NO: 617232 - DNA, 75 bp, synthetic construct
  source 1..75: mol_type = other DNA
cgagcaggcgagcaatatccggctacaaagtagcgaaacgccgcaggagattttccgtaacaatcttgatgcgtt

SEQ ID NO: 617233 - DNA, 75 bp, synthetic construct
  source 1..75: mol_type = other DNA
aaagcctggctggcgaaaaaaatgccgcagtggcggcgtatattacaaggcgagacggggtacaacgaaccagac

SEQ ID NO: 617234 - DNA, 75 bp, synthetic construct
  source 1..75: mol_type = other DNA
gcggcatatcgtgttactactaccaaagagatcctcattgaacgcggtctggcgcattactctctaagcacctcc

SEQ ID NO: 617235 - DNA, 75 bp, synthetic construct
  source 1..75: mol_type = other DNA
gacgactacgctccaatctgtttctcttctcagaatggcttctatggttacgatgaaggcttagatatgctgtaa

SEQ ID NO: 617236 - DNA, 75 bp, synthetic construct
  source 1..75: mol_type = other DNA
gaatctggcctgcaattccgcgtgatcaaccagggcgaaggcgcaattccggcacgtaccgaccgcgttcgtgtt

SEQ ID NO: 617237 - DNA, 75 bp, synthetic construct
  source 1..75: mol_type = other DNA
atcgccttaactgtttgtggttgcgcagagcagatttttgaatggtggatcgaaagccgttttgcgttccgtctt

SEQ ID NO: 617238 - DNA, 75 bp, synthetic construct
  source 1..75: mol_type = other DNA
ccacatttcgagattggtttagctctcgacaaaaaagagttcaaaactggcgaagcggtcagcggcaaactgcaa

SEQ ID NO: 617239 - DNA, 75 bp, synthetic construct
  source 1..75: mol_type = other DNA
gttatcggtatctcattacgtactattgcgaagaagagaaaatgctctgatggcacaattaggaaggaactgcaa

SEQ ID NO: 617240 - DNA, 75 bp, synthetic construct
  source 1..75: mol_type = other DNA
acaaccgaaatcccacttggcattctgacggcttttgtgggcgccccctttttcctgcttctgttgctacgcgga

SEQ ID NO: 617241 - DNA, 75 bp, synthetic construct
  source 1..75: mol_type = other DNA
tggcgttaaatctccccgccgccgataaaccgagccgttatttgttaaccgtctccgccagtgacggcgcggcgt

SEQ ID NO: 617242 - DNA, 75 bp, synthetic construct
  source 1..75: mol_type = other DNA
gggaacggtcactttccgccatttgctgcgcttctcgcaaaaagggcaattcgttctgcctcctgctcgttatgt

SEQ ID NO: 617243 - DNA, 75 bp, synthetic construct
  source 1..75: mol_type = other DNA
ttcctctcggcaaacaagagccgggactgtacctcgtcgaggcgatggttggtgggtatcgggcgacgacggtgg

SEQ ID NO: 617244 - DNA, 75 bp, synthetic construct
  source 1..75: mol_type = other DNA
aatattcaggtctggatagaacctgtggtgtttaatgatctgctgaactggttaaaagcactggatgaaaaatat

SEQ ID NO: 617245 - DNA, 75 bp, synthetic construct
  source 1..75: mol_type = other DNA
tgataaaccgctaccttcataccctttacccacagaggacaacccgttcctgggacttcgcggtatccggttgtg

SEQ ID NO: 617246 - DNA, 75 bp, synthetic construct
  source 1..75: mol_type = other DNA
gcgctgtgtgctaaacagcagcaactcacgccatcctcaactgcaggcgaggttattccagcaatatcaccaatc

SEQ ID NO: 617247 - DNA, 75 bp, synthetic construct
  source 1..75: mol_type = other DNA
tattatggattgaacataatttagatcagtctttactgcttgatggtaatgactccaacttactgatagtgtttt

SEQ ID NO: 617248 - DNA, 75 bp, synthetic construct
  source 1..75: mol_type = other DNA
ggtgaatgtgcagcgactggagtttaggcggggtaggtgttgccatccttgtcatagtcatccccttaactccac

SEQ ID NO: 617249 - DNA, 75 bp, synthetic construct
  source 1..75: mol_type = other DNA
ggtgaatgtgcagcggctagaatttggacggggggagcgcggagttcagaatgtgtcggtggtctatagatattg

SEQ ID NO: 617250 - DNA, 75 bp, synthetic construct
  source 1..75: mol_type = other DNA
agcaagtcatgttggtgcgtttgccttagggaaaacaggaagcaccgttgcgaatgataaagcagttggatggaa

SEQ ID NO: 617251 - DNA, 75 bp, synthetic construct
  source 1..75: mol_type = other DNA
ttacgcgtagcaatcgtttctgaaactctgaaaattccggcccgcggagtaaaaatcagtattgggctcggtttc

SEQ ID NO: 617252 - DNA, 75 bp, synthetic construct
  source 1..75: mol_type = other DNA
ggcgatagtggtagcggtggcgaaaatccggaaccgacgtatctgattaaatatcacgacacagcaactgggcag

SEQ ID NO: 617253 - DNA, 75 bp, synthetic construct
  source 1..75: mol_type = other DNA
tgaaggtaattttattgactggaagatttaccaatccgtcgcaaccgaattatacgctcatgatctggaacgtct

SEQ ID NO: 617254 - DNA, 75 bp, synthetic construct
  source 1..75: mol_type = other DNA
cattcctgatcgtgtagtcgagcaactgttggctatgcgtcagcaacgaaaaaaacatcttcatgccatcataga

SEQ ID NO: 617255 - DNA, 75 bp, synthetic construct
  source 1..75: mol_type = other DNA
ctcacatcactatgcctagtggccatgtttactggctaagagctatggagaaatatggtgataaatgggaagtgt

SEQ ID NO: 617256 - DNA, 75 bp, synthetic construct
  source 1..75: mol_type = other DNA
tcgacagcacagaaggaaagctcacctgaacaatccggcggtacattcaaatactccacagacagtaagattgct

SEQ ID NO: 617257 - DNA, 75 bp, synthetic construct
  source 1..75: mol_type = other DNA
ataccatgctgggcgtattgaaactggcacagtgtgaagagaaaacctttaccaccaccaacctgagtttactgc

SEQ ID NO: 617258 - DNA, 75 bp, synthetic construct
  source 1..75: mol_type = other DNA
ttccgctgctggcgaaagcctttaccttcaaaattgcccgtcgtctggggcgcaatatcgacagcattcctgccg

SEQ ID NO: 617259 - DNA, 75 bp, synthetic construct
  source 1..75: mol_type = other DNA
ggctggttgatgaaaacctcgccctgaccgagcagctcaacaatgttgatagtgaatttggcgagattattggcc

SEQ ID NO: 617260 - DNA, 75 bp, synthetic construct
  source 1..75: mol_type = other DNA
agcgtatcggtcgttttgaactggcggataaaagctccctgttcctcgacgaagtgggcgatatgccactggagt

SEQ ID NO: 617261 - DNA, 75 bp, synthetic construct
  source 1..75: mol_type = other DNA
tacgctgcattgcagctacgaagaattttgtgaaacctggccacaactggccacaagcgggctataccctaaatt

SEQ ID NO: 617262 - DNA, 75 bp, synthetic construct
  source 1..75: mol_type = other DNA
taacgtgctgcagctgtcattgccagatattgttttaccggaacctgaaacgccgcctgccgcaacggttgtcgc

SEQ ID NO: 617263 - DNA, 75 bp, synthetic construct
  source 1..75: mol_type = other DNA
ttattggcgcgattgtggcttttatggataacgcccacgttcaggtcacctttctggtggagaaactctcccccg

SEQ ID NO: 617264 - DNA, 75 bp, synthetic construct
  source 1..75: mol_type = other DNA
tgtttctaaaattgaaaaggttgttgaacttgatgtgtcaaaacctgacgagtttagcctgtggcaaaaactatt

SEQ ID NO: 617265 - DNA, 75 bp, synthetic construct
  source 1..75: mol_type = other DNA
ccacaaaggctgtggaagctgcgggcggcagtattcggcggtggcgcattgcagatggtggtttgcggcggcctg

SEQ ID NO: 617266 - DNA, 75 bp, synthetic construct
  source 1..75: mol_type = other DNA
atatgccactggagttacagccgaagttgctgcgtgtattacaggaacaggagtttgaacgtctcggcagcaaca

SEQ ID NO: 617267 - DNA, 75 bp, synthetic construct
  source 1..75: mol_type = other DNA
aatactggcgattaatctcgccgtactttcctgtattgtgtttataaacattattttaagatatggttttcagac

SEQ ID NO: 617268 - DNA, 75 bp, synthetic construct
  source 1..75: mol_type = other DNA
ataacgcccacgttcaggtcacctttctggtggagaaactctcccccgcgtggcagcgacgagtcgctctggtta

SEQ ID NO: 617269 - DNA, 75 bp, synthetic construct
  source 1..75: mol_type = other DNA
aatgtggaagaaaacagctactggttccgccgtatagcggcgggtgatgtggtacgtgttaaacaggataaggct

SEQ ID NO: 617270 - DNA, 75 bp, synthetic construct
  source 1..75: mol_type = other DNA
gatgccgaatctatcctgcactttgctgaaatcggcgtggtgctgatgctgtttatcattggcctcgaactcgac

SEQ ID NO: 617271 - DNA, 75 bp, synthetic construct
  source 1..75: mol_type = other DNA
ccggggcgactggggcggtagccggcgcttatatgccgatatcactgatggcgatgagcgcgcgcggcacttcgg

SEQ ID NO: 617272 - DNA, 75 bp, synthetic construct
  source 1..75: mol_type = other DNA
gaacttccgtaccagaccgttcgcgaaataattaacgaagctgaaaaagctcgtcaggttaatggcgatgaaccc

SEQ ID NO: 617273 - DNA, 75 bp, synthetic construct
  source 1..75: mol_type = other DNA
atcagagggtgcttgaggaaggcctgaaaaaggcgaagccgttggccgcgcaaatggggcttgaatcagtgcctg

SEQ ID NO: 617274 - DNA, 75 bp, synthetic construct
  source 1..75: mol_type = other DNA
gtgtgggcgggaaaacgctaaacctcggagagctagagcttcaagattacgggctcaatatgcacatcggttgcg

SEQ ID NO: 617275 - DNA, 75 bp, synthetic construct
  source 1..75: mol_type = other DNA
acaacagagcacgcaccacaaaaccggagaatgcagacaccctttatttcacagtagacgactgctaccgcgtgg

SEQ ID NO: 617276 - DNA, 75 bp, synthetic construct
  source 1..75: mol_type = other DNA
aattcaacgacatggctggcagggaaccgaagaagggaaacataccggcaacatggcggatgaaccggaaacgaa

SEQ ID NO: 617277 - DNA, 75 bp, synthetic construct
  source 1..75: mol_type = other DNA
atttcaaagcggcgcagagtgattgctgtatgcaccctggttcagacctggtagggaaggttgaaatgactgagt

SEQ ID NO: 617278 - DNA, 75 bp, synthetic construct
  source 1..75: mol_type = other DNA
tgcagccagcgctaaacgtgccgaagactcactggccctgcttcgtaaaactctcggttctctcccggtggtacc

SEQ ID NO: 617279 - DNA, 75 bp, synthetic construct
  source 1..75: mol_type = other DNA
atattgctctatcctgcgctgcaggtgcatggttgggagttgatgaggtaatgattttcttgctaatctcatcag

SEQ ID NO: 617280 - DNA, 75 bp, synthetic construct
  source 1..75: mol_type = other DNA
ccattccactattctggtcagggcttgtcttttcttattttgctgaaccagaatcaaagattcttggtgcctgta

SEQ ID NO: 617281 - DNA, 75 bp, synthetic construct
  source 1..75: mol_type = other DNA
tttgacacggggcgggacttcgatattggatttcctgacacgctgtcatccaagattgagtttttgaccgcgaat

SEQ ID NO: 617282 - DNA, 75 bp, synthetic construct
  source 1..75: mol_type = other DNA
tcggaatacctagtcattgatgttgctgatggtacagtaacttctggcaataaggccggcattcgtcgtaaagaa

SEQ ID NO: 617283 - DNA, 75 bp, synthetic construct
  source 1..75: mol_type = other DNA
tcggaatatctaatcattgatgctgctgatgggactgtggcttctggtaatcaagcccgtattcgtcgtaaagaa

SEQ ID NO: 617284 - DNA, 75 bp, synthetic construct
  source 1..75: mol_type = other DNA
tcatgatttacgccataacgacgctgaaagccgccaggcctatctggacgcactgcgccagcgcctgagtgatta

SEQ ID NO: 617285 - DNA, 75 bp, synthetic construct
  source 1..75: mol_type = other DNA
aatgttgacgagaacaactactggctgcgccgtgaagccgcgggtgatatccggcgcgtgaataaaaaggtgaac

SEQ ID NO: 617286 - DNA, 75 bp, synthetic construct
  source 1..75: mol_type = other DNA
cgaccttttgcccgccgaagggcgaaatgttgatgagaacaactactggctgcgccgtgaagcagcgggtgatat

SEQ ID NO: 617287 - DNA, 75 bp, synthetic construct
  source 1..75: mol_type = other DNA
gattataatcatgccgcagctcataaactcagcctccagatggtcagcaatggtaagccgataattttaagggct

SEQ ID NO: 617288 - DNA, 75 bp, synthetic construct
  source 1..75: mol_type = other DNA
ttattcctgtcttgcccaggcagggcttgacccggtgaccgctttcccgcccattcgcgtttttggtacggtggg

SEQ ID NO: 617289 - DNA, 75 bp, synthetic construct
  source 1..75: mol_type = other DNA
atcgaaccatttaaaggtttgctgttggggctgtttttcatcggtgttggcatgtcgatagactttggcacgctg

SEQ ID NO: 617290 - DNA, 75 bp, synthetic construct
  source 1..75: mol_type = other DNA
cacctgataattttgatattaatctggcgttacctcttgctccgggaaagatagtttatcgcgccagttctaacc

SEQ ID NO: 617291 - DNA, 75 bp, synthetic construct
  source 1..75: mol_type = other DNA
ccagggagaactgtctattgcctgcctgccggtcttttcgcaatcttttttaccgcagctcctgcaaccctttct

SEQ ID NO: 617292 - DNA, 75 bp, synthetic construct
  source 1..75: mol_type = other DNA
ggcggttcagcattgcggttccgttcactgtcagcctgatccgccccctgcaccgcccgtcatcagcgctggtgc

SEQ ID NO: 617293 - DNA, 75 bp, synthetic construct
  source 1..75: mol_type = other DNA
acgacgcatgatcgtagaaacccacagcgccgcgtcagtctgcgcaatggtacgggcgggggtaggcgtttcggt

SEQ ID NO: 617294 - DNA, 75 bp, synthetic construct
  source 1..75: mol_type = other DNA
gtttatccgcagcaatctgcaggatgccaaatggttgatcaagagtctggaaagccgtaacgatacgctactgcg

SEQ ID NO: 617295 - DNA, 75 bp, synthetic construct
  source 1..75: mol_type = other DNA
tcagctacaacaggcaattcgtctgttgcagctgtccacgctggaacttcaacaggagctgcagcaggcgctgga

SEQ ID NO: 617296 - DNA, 75 bp, synthetic construct
  source 1..75: mol_type = other DNA
tctttcaatctgtctaaaattgatgaccaatctgtaattgatttttttgataattcaattaattcgagtggtgat

SEQ ID NO: 617297 - DNA, 75 bp, synthetic construct
  source 1..75: mol_type = other DNA
ccctattcatatcggcgataattgtatgctggcgcctggtgtccatatctacacggcaacacatcccatcgaccc

SEQ ID NO: 617298 - DNA, 75 bp, synthetic construct
  source 1..75: mol_type = other DNA
gcagttgtcacaaaagatgtcccggacaacgttgtcgtgggcggtaatccagccagaataattaaaaaattgtaa

SEQ ID NO: 617299 - DNA, 75 bp, synthetic construct
  source 1..75: mol_type = other DNA
agaagatgtgctgaaagaagccgtcaatctgatccagtcgctcgatccacgccccggtcagtcgatccagaccgg

SEQ ID NO: 617300 - DNA, 75 bp, synthetic construct
  source 1..75: mol_type = other DNA
gcccgatgacggcgacgtgaccgcgacgatggatatcgaccgcctgaagctggtggatatcccggtcgctaacct

SEQ ID NO: 617301 - DNA, 75 bp, synthetic construct
  source 1..75: mol_type = other DNA
atgcctgccacgctgccatgcttcagggaaaaagagagtgatatggctattgccgcaagttacaccatgcatctc

SEQ ID NO: 617302 - DNA, 75 bp, synthetic construct
  source 1..75: mol_type = other DNA
atggctatcgctgcaagttacaccatgcatctctattgtgactgccgcaagtgtacggaaggtgtatatccagtg

SEQ ID NO: 617303 - DNA, 75 bp, synthetic construct
  source 1..75: mol_type = other DNA
ggtcaactaaagacaaacaaactttaaaccttattctttatctatttccatttttccatgttgaacctagacata

SEQ ID NO: 617304 - DNA, 75 bp, synthetic construct
  source 1..75: mol_type = other DNA
ttgttttcagaagaaagttgatgctagaactacgattagcatattaaattccacttatgacaacgagagctttat

SEQ ID NO: 617305 - DNA, 75 bp, synthetic construct
  source 1..75: mol_type = other DNA
gacgtgaccgcgacgatggatatcgatcgcctgaagctggtggatatcccggtcgctaacctggaaaaaatcctg

SEQ ID NO: 617306 - DNA, 75 bp, synthetic construct
  source 1..75: mol_type = other DNA
ggacaacgttgtcgtgggcggtaatccagccagaataattaaaaaattgcaatcggtttttcgcaactgttatgc

SEQ ID NO: 617307 - DNA, 75 bp, synthetic construct
  source 1..75: mol_type = other DNA
cggctggccaaagcggtcggcattgaggtcacgctgctggccctggaaagtagcaaaccgttaccggaagaggcc

SEQ ID NO: 617308 - DNA, 75 bp, synthetic construct
  source 1..75: mol_type = other DNA
acaccatcacttttattgcgctgaaaccaggcttgctcacaggaaaagcgcgggatgttaccggacaactgcatt

SEQ ID NO: 617309 - DNA, 75 bp, synthetic construct
  source 1..75: mol_type = other DNA
gcttcgcgctggcgaagccgcattccaggtgtgtcgttcggcttatcctgacgcccgccactggctggtgctgtg

SEQ ID NO: 617310 - DNA, 75 bp, synthetic construct
  source 1..75: mol_type = other DNA
gcggctgcgtcgtctgccagtgcagcgtcaacaagtgccgggcaggcctcagccagtgccaccgccgccggaaaa

SEQ ID NO: 617311 - DNA, 75 bp, synthetic construct
  source 1..75: mol_type = other DNA
gacgggggaagcggcgctgcgtgctggtgctggtttagtccgagtactgacccgcagtgagaacattgcgccgct

SEQ ID NO: 617312 - DNA, 75 bp, synthetic construct
  source 1..75: mol_type = other DNA
gtctcaggaacaggacggcattaaatcgcatacccacagcgccagcgcatccagtacagatttggggacgaaaac

SEQ ID NO: 617313 - DNA, 75 bp, synthetic construct
  source 1..75: mol_type = other DNA
ttgtttcaggtggttccagtggtgctccgggaagtggatcacctgattattctaaatacagtgttaacacttctt

SEQ ID NO: 617314 - DNA, 75 bp, synthetic construct
  source 1..75: mol_type = other DNA
tgaaagatggagcaggcaaaccggtacaaaactgtaccattcagctaaaggccagacgcaacagcaccacggtgg

SEQ ID NO: 617315 - DNA, 75 bp, synthetic construct
  source 1..75: mol_type = other DNA
tggaaaggatgtagctggtcttctcgcataccttggtttgggcgaaacgataaataaagcctccggagctatgca

SEQ ID NO: 617316 - DNA, 75 bp, synthetic construct
  source 1..75: mol_type = other DNA
gcatcaacaaaggccactgaagcctcaaaaagtgctgccgctgcagagtcctcaaaaagcgtggcagctaccagt

SEQ ID NO: 617317 - DNA, 75 bp, synthetic construct
  source 1..75: mol_type = other DNA
cgaacacgagcattttccctaatggttataccgcgatttcaaatctaagcgcggggattatgagcacaacaagcg

SEQ ID NO: 617318 - DNA, 75 bp, synthetic construct
  source 1..75: mol_type = other DNA
atggctattgccgcaagttacaccatgcatctctactgtgattgtcgccagtgtacaaatggtaaatatcaaacg

SEQ ID NO: 617319 - DNA, 75 bp, synthetic construct
  source 1..75: mol_type = other DNA
tggataccgacggtgcggcccctgaatccggggacttaccgcaggtacagtctgatgtggcggtgttcgggcgca

SEQ ID NO: 617320 - DNA, 75 bp, synthetic construct
  source 1..75: mol_type = other DNA
tccgcccgttacacgctgccgctggaggttattccggccgttcttgttcagcactgttgcgcgattgccttttat

SEQ ID NO: 617321 - DNA, 75 bp, synthetic construct
  source 1..75: mol_type = other DNA
cagcaggtgattatgccgccacagccaattgatccgtggttttatggtggtcgtggctggccctatggctacggt

SEQ ID NO: 617322 - DNA, 75 bp, synthetic construct
  source 1..75: mol_type = other DNA
atgaaacgcaagattattgtcgcttgcggaggcgcggttgcgacctctacgatggcggcggaagaaattaaagag

SEQ ID NO: 617323 - DNA, 75 bp, synthetic construct
  source 1..75: mol_type = other DNA
aaagattctgaaacggttttgcatctgttcctgatggctcttatccgggcggttaggagtggagcaaccatcagc

SEQ ID NO: 617324 - DNA, 75 bp, synthetic construct
  source 1..75: mol_type = other DNA
tgtaaggagtggggcgaccatcagccagcaccacttcatcttgcacactgacacactgatcgaaagcccagaggt

SEQ ID NO: 617325 - DNA, 75 bp, synthetic construct
  source 1..75: mol_type = other DNA
gtactcctgtctcagtcattacgttttttgccagcgttattattcttatctgcataattaaaaagacctatgcag

SEQ ID NO: 617326 - DNA, 75 bp, synthetic construct
  source 1..75: mol_type = other DNA
cgaagatgaatatcagctaattgtgcgtgtattaaaagagactaacggcgtggttgccgggccgaaaggcgcggc

SEQ ID NO: 617327 - DNA, 75 bp, synthetic construct
  source 1..75: mol_type = other DNA
ttccgctgctggcgaaagcctttacttttaaaattgcccgccgtctggggcgtaatatcgacagcattcctgccg

SEQ ID NO: 617328 - DNA, 75 bp, synthetic construct
  source 1..75: mol_type = other DNA
gtcccacgccgcaacaagatttagttcgggtaatgagtgcgccgcagctgtacgttggtcaggaggcacgctttg

SEQ ID NO: 617329 - DNA, 75 bp, synthetic construct
  source 1..75: mol_type = other DNA
tatatctactgcctgatcgagcaccagtcaaaaccggatcggttaatgggttttcgtctgatgcattatgcgatg

SEQ ID NO: 617330 - DNA, 75 bp, synthetic construct
  source 1..75: mol_type = other DNA
gcactcctgtctctgttattacgttttttgtcagcatcattattcttatctgtataattaaaaagacatatgcag

SEQ ID NO: 617331 - DNA, 75 bp, synthetic construct
  source 1..75: mol_type = other DNA
caccgtccgtcatcagcactggtgcaggcatttagtgagcacttacaggcaggtttaccgaatctggttgcctca

SEQ ID NO: 617332 - DNA, 75 bp, synthetic construct
  source 1..75: mol_type = other DNA
gagtggcgcccgaccggaagtccggcagccgtgaatggtggcagttatttcgcctggtgtcacagtggcactgcg

SEQ ID NO: 617333 - DNA, 75 bp, synthetic construct
  source 1..75: mol_type = other DNA
ccatcatttgtcagtgccggccggttaatgaccgaacgggagcagcgttttctgcgcaggctggacagagtggct

SEQ ID NO: 617334 - DNA, 75 bp, synthetic construct
  source 1..75: mol_type = other DNA
tcattcttctgggcggatttgtgctgttagtcaggcaggttcgttcagccagtcatccactcctgttgtcgttgc

SEQ ID NO: 617335 - DNA, 75 bp, synthetic construct
  source 1..75: mol_type = other DNA
aggatatacactctcaaatttcaagcatcttgccgatgatgaatcattaggtggtatgtggttttatcaaaagtg

SEQ ID NO: 617336 - DNA, 75 bp, synthetic construct
  source 1..75: mol_type = other DNA
atgctgcgttttatgacggcgttgatgggtgcgttattacttatgcaatctgcgttcgccgatacggttaaaccg

SEQ ID NO: 617337 - DNA, 75 bp, synthetic construct
  source 1..75: mol_type = other DNA
gggctgaccgtgctgcgcgggcgtgggattattgaaacggcgcagggtcgcgattctcgtgtcgcacggcttaat

SEQ ID NO: 617338 - DNA, 75 bp, synthetic construct
  source 1..75: mol_type = other DNA
cttatctgacacgaaaatcgctgtgcgagattcgttacagagacggatacagggaagttacggcaacaatggctt

SEQ ID NO: 617339 - DNA, 75 bp, synthetic construct
  source 1..75: mol_type = other DNA
ctggacggtgcctatcttaatcatcatcttccttgcggtactaacctggaaaaccactcacgctcttgagcctag

SEQ ID NO: 617340 - DNA, 75 bp, synthetic construct
  source 1..75: mol_type = other DNA
ataaagtggaagctgtggtctggacggtacctatcttaatcatcatcttccttgcggtactgacctggaaaacca

SEQ ID NO: 617341 - DNA, 75 bp, synthetic construct
  source 1..75: mol_type = other DNA
ccattctgctcgccggatttgtggtattgctcaggcaggccggttcagcccggcatccgcttttgcagatgctgc

SEQ ID NO: 617342 - DNA, 75 bp, synthetic construct
  source 1..75: mol_type = other DNA
aactacgcgatcaaaacgaagacattgatcgtgaggatttcgcccagcggtttgatgccgatttcatcctgatga

SEQ ID NO: 617343 - DNA, 75 bp, synthetic construct
  source 1..75: mol_type = other DNA
acaattgctctgcaaagcttacagatattgaatctatttctgcaactcacatggcatttttagatgatgataaaa

SEQ ID NO: 617344 - DNA, 75 bp, synthetic construct
  source 1..75: mol_type = other DNA
ttattgttcacgagctattaaaagagaaagataaagattttgaccactcgaaacgatacaacctgcgtgattctg

SEQ ID NO: 617345 - DNA, 75 bp, synthetic construct
  source 1..75: mol_type = other DNA
cttgtaaaaaaagccaaagaagaaccttggtcatctggtggttttattgtgttttgtgactatattgtaaataac

SEQ ID NO: 617346 - DNA, 75 bp, synthetic construct
  source 1..75: mol_type = other DNA
atgtttttaatttaggtactggtaaaggatattctgttttagagctggtttctacctttgaaaaaatatctgggg

SEQ ID NO: 617347 - DNA, 75 bp, synthetic construct
  source 1..75: mol_type = other DNA
aggtattttaatccaataggtgctcatgaatcaggaatgataggagaaagcccatctgatataccgagtaattta

SEQ ID NO: 617348 - DNA, 75 bp, synthetic construct
  source 1..75: mol_type = other DNA
caggctatattggctctcatacgactttatgtctattaaataaagggcataatgttgtaataattgatgatttta

SEQ ID NO: 617349 - DNA, 75 bp, synthetic construct
  source 1..75: mol_type = other DNA
agctggtcaggctgtcgtttatgcctacgcgtagtgaaagtgaacgctatgccattgccgatcgtgccctcgccc

SEQ ID NO: 617350 - DNA, 75 bp, synthetic construct
  source 1..75: mol_type = other DNA
ccagattgctgactggctacagattgccttatgggaggggcaagataagcaagttattgccgtttacaaccgcta

SEQ ID NO: 617351 - DNA, 75 bp, synthetic construct
  source 1..75: mol_type = other DNA
gcagcgagtcctgcagcgaatagtgcggttaataatgcctatgatgcattgattgtcgaagctcgcaagggtaat

SEQ ID NO: 617352 - DNA, 75 bp, synthetic construct
  source 1..75: mol_type = other DNA
aaaatcagagcatataaggtagatttactggacaaaaaagaattaaagactatattcacaaatcacacattctct

SEQ ID NO: 617353 - DNA, 75 bp, synthetic construct
  source 1..75: mol_type = other DNA
aaaattgaaagaaatgatcgaagatgtatggcgttggcaaacaaaaaatccaaatggatataaaaataatttttg

SEQ ID NO: 617354 - DNA, 75 bp, synthetic construct
  source 1..75: mol_type = other DNA
aaaattatttcttatcaaggtgatatccgtgataaaaatctacttgatgagattttttcaagacaccatatcgat

SEQ ID NO: 617355 - DNA, 75 bp, synthetic construct
  source 1..75: mol_type = other DNA
tcccgctgatataccaagcaatttagttccttatatattacaagttgctatgggtaaactagaaaaacttatggt

SEQ ID NO: 617356 - DNA, 75 bp, synthetic construct
  source 1..75: mol_type = other DNA
tctaacccaaaggcagcggaaagagatcttgggtggaaagcaaaatatgacattcaaaaaatggtttttgataca

SEQ ID NO: 617357 - DNA, 75 bp, synthetic construct
  source 1..75: mol_type = other DNA
tccattggaatattatgataataatatatctggaacgcttaatttgcttgcggtgatgaaagagtttaatgtttg

SEQ ID NO: 617358 - DNA, 75 bp, synthetic construct
  source 1..75: mol_type = other DNA
ctatggtaatgattatgaaactaaagatggtactggcgttagagattttattcatgttatggatctcgcaaacgg

SEQ ID NO: 617359 - DNA, 75 bp, synthetic construct
  source 1..75: mol_type = other DNA
gccgtggtgaatgccgcactggcggtggcacagggaaataatgctcttgccggtgctgcaggtgcagccaccggc

SEQ ID NO: 617360 - DNA, 75 bp, synthetic construct
  source 1..75: mol_type = other DNA
attggtgagattggtaaccaggttgcagatattgccagaacggaaggacagatagccggtgagaaagcgaagcgg

SEQ ID NO: 617361 - DNA, 75 bp, synthetic construct
  source 1..75: mol_type = other DNA
agagggggatattgctgaaagttggtcatcacccgaaaaagcaaataagtatctcaattggaaagctaaaaggga

SEQ ID NO: 617362 - DNA, 75 bp, synthetic construct
  source 1..75: mol_type = other DNA
gggctggtgccgctgttgcgtgacgatgaaagtgatttaattctttgggaatcaaatgccattgtccgctacctg

SEQ ID NO: 617363 - DNA, 75 bp, synthetic construct
  source 1..75: mol_type = other DNA
cgaatctgcaacgctggtatcagcaactcaccgaacgccccgcggtgcgtaaagttgtgatgatccctgttagct

SEQ ID NO: 617364 - DNA, 75 bp, synthetic construct
  source 1..75: mol_type = other DNA
atttggagatgattatccaaccgaggatggcactggagtaagagattatatacatgttatggatttagcatctgg

SEQ ID NO: 617365 - DNA, 75 bp, synthetic construct
  source 1..75: mol_type = other DNA
attagatgagatggttcgcgatgcctggaattggcaacaaagcaatcctgatggttataaattttctgagaaaaa

SEQ ID NO: 617366 - DNA, 75 bp, synthetic construct
  source 1..75: mol_type = other DNA
tcggtgaatttacccgtgatatgggcaacgttgagaaaatcgaactcctcccctaccacgagctgggcaaacaca

SEQ ID NO: 617367 - DNA, 75 bp, synthetic construct
  source 1..75: mol_type = other DNA
gttggcctgacctggacaccgcgtccgaatctgcaacgctggtatcagcaactcaccgaacgccccgcagtgcgt

SEQ ID NO: 617368 - DNA, 75 bp, synthetic construct
  source 1..75: mol_type = other DNA
gcaagcttcctgaaaaagggtggcatgccgatcatgttgagcctgttcgacgcgactttgaactggtgagagccc

SEQ ID NO: 617369 - DNA, 75 bp, synthetic construct
  source 1..75: mol_type = other DNA
gggaattatagttaagggtacctcatcccggaccgatgatggattgcttatttatctgtacaatcgtcatcaaaa

SEQ ID NO: 617370 - DNA, 75 bp, synthetic construct
  source 1..75: mol_type = other DNA
ggtgcaaaaataggaaaaaacgtagtcattcggccttcagtaaaaattacttacccgtggaaattaaccctggga

SEQ ID NO: 617371 - DNA, 75 bp, synthetic construct
  source 1..75: mol_type = other DNA
aggcgcaggaaaatatcgcgcagtccccgtgggcagagcggattaacgtccatacggtggatattcagcagtgga

SEQ ID NO: 617372 - DNA, 75 bp, synthetic construct
  source 1..75: mol_type = other DNA
atgacttctgataaaaaagtaacttccggtacgacaagccagaaacaaaacaacattgtcactcaaaaaatatca

SEQ ID NO: 617373 - DNA, 75 bp, synthetic construct
  source 1..75: mol_type = other DNA
taacctgccggcggtacgcgtcccgtacttcccggcggatgcgatgctcatcacgaagctggaaaacctgtccat

SEQ ID NO: 617374 - DNA, 75 bp, synthetic construct
  source 1..75: mol_type = other DNA
acgcatgggattgtttgttgaacaggttaaagaatggcgggctatctcaattcaggcgcatgaaaagaaattgac

SEQ ID NO: 617375 - DNA, 75 bp, synthetic construct
  source 1..75: mol_type = other DNA
tagcgatcgcttaatcattcgtgggtcagaccagaactattccgaagcgtacacggcgctgacccaggcttttta

SEQ ID NO: 617376 - DNA, 75 bp, synthetic construct
  source 1..75: mol_type = other DNA
aagcgccgctacgcttgtggtggcggttgcactggctgcgtttctcgccctgtggtggaacgcgccgcagggtga

SEQ ID NO: 617377 - DNA, 75 bp, synthetic construct
  source 1..75: mol_type = other DNA
cccttacgcgctgaaggtgctggaaaatccgatgcgcgatatcaccacccgctacagcatgttgtgtcagtcgct

SEQ ID NO: 617378 - DNA, 75 bp, synthetic construct
  source 1..75: mol_type = other DNA
gtcgtaatggatttacttttaaacagttttttgtcgcgcacgatcgctgtgcgatgaaagtgggaacggatggaa

SEQ ID NO: 617379 - DNA, 75 bp, synthetic construct
  source 1..75: mol_type = other DNA
tagcgatcgcttagtgattcgtgggccagaccagagctattccgaagcgtacactgcgctgacccaggcttttta

SEQ ID NO: 617380 - DNA, 75 bp, synthetic construct
  source 1..75: mol_type = other DNA
gttttttgttgctcacgatcgctgtgcgatgaaagtgggaacggatggcatattgctgggcgcatgggcaccggt

SEQ ID NO: 617381 - DNA, 75 bp, synthetic construct
  source 1..75: mol_type = other DNA
aatgggtggcgatgggtgaagaatacaaacttgatggtgttaaaccaccgaagaaagaaaccatggaacgcgtga

SEQ ID NO: 617382 - DNA, 75 bp, synthetic construct
  source 1..75: mol_type = other DNA
ggggacgatgctggaagaagcgcagccaatggtgacggcggaaagcattagtcatcagagttaccgccgattgct

SEQ ID NO: 617383 - DNA, 75 bp, synthetic construct
  source 1..75: mol_type = other DNA
gcccgaacgcgtggctgaaacgcattcgcctgaacgccgtacgccgcgaactgataagtccgtggtcgcaaagca

SEQ ID NO: 617384 - DNA, 75 bp, synthetic construct
  source 1..75: mol_type = other DNA
gaaaatatgtccgaaccggtgacggtgctggatttatgcaatcaattacatgtcagccgccgcacgttacaaaac

SEQ ID NO: 617385 - DNA, 75 bp, synthetic construct
  source 1..75: mol_type = other DNA
ggtcggtgtgcctactgcggctgtcctttgccggaaaaaggctggcatgccgatcatgttgaaccggtgaggcgg

SEQ ID NO: 617386 - DNA, 75 bp, synthetic construct
  source 1..75: mol_type = other DNA
tattcttaccggaagcgctttaggcattatcgggtatggtttactgatggctgtcaccggtgcgctgattgatga

SEQ ID NO: 617387 - DNA, 75 bp, synthetic construct
  source 1..75: mol_type = other DNA
atctgaacagattcagtcggggactgggatatgcaggaaaatttacaagtcttgctgactggatcactgagtttg

SEQ ID NO: 617388 - DNA, 75 bp, synthetic construct
  source 1..75: mol_type = other DNA
taggatgggtgctaaagtttatgagggcggaggaaaaacagtcctacctaaaactcaaataacatatccacatct

SEQ ID NO: 617389 - DNA, 75 bp, synthetic construct
  source 1..75: mol_type = other DNA
tatcgaccgaatgattatgctgtttactaacagccatactattcgcgacgttattctcttcccggcgatgcgccc

SEQ ID NO: 617390 - DNA, 75 bp, synthetic construct
  source 1..75: mol_type = other DNA
ggattggcatcgaccgtatggtaatgctgttcaccaacagccataccatccgcgacgttattctgttcccggcga

SEQ ID NO: 617391 - DNA, 75 bp, synthetic construct
  source 1..75: mol_type = other DNA
gtggataatgttcatcaacgacagacaacggatgtctatgaacatgctttaacgattaccgcctggcagcagatt

SEQ ID NO: 617392 - DNA, 75 bp, synthetic construct
  source 1..75: mol_type = other DNA
taaatgatgatgtcattacacaggttattcaccttgagtatttcaaccttaataatgcattttatatacaacatt

SEQ ID NO: 617393 - DNA, 75 bp, synthetic construct
  source 1..75: mol_type = other DNA
ttctttaaactcactagatgatgatgggttaaaatctgtaatttctaggatagaaaacaaaaaaataattcagcg

SEQ ID NO: 617394 - DNA, 75 bp, synthetic construct
  source 1..75: mol_type = other DNA
ttatcgagttaaaaatagagacacaggaactatagttgcagacagacgtccttttattgactccagaggatatct

SEQ ID NO: 617395 - DNA, 75 bp, synthetic construct
  source 1..75: mol_type = other DNA
ttatttacagcaataaaccgctgccggagttggcaaaaatggcggcggacacctttggtcgcgtgccgaacaaag

SEQ ID NO: 617396 - DNA, 75 bp, synthetic construct
  source 1..75: mol_type = other DNA
gctgtggtgaccgagcagcaaaaactgcagttcgatatagctgacggcaagttgcaggggcttaacgaaacccag

SEQ ID NO: 617397 - DNA, 75 bp, synthetic construct
  source 1..75: mol_type = other DNA
aagtgtgacgccgtggagctgcacgccggattagtcagccacctgcaggcacgtttcccggaggtccggacctgg

SEQ ID NO: 617398 - DNA, 75 bp, synthetic construct
  source 1..75: mol_type = other DNA
aaattttaacggtgtcagggttcagtgtggcgacttcatggaatggcagccagtgcagtattacagccgggttat

SEQ ID NO: 617399 - DNA, 75 bp, synthetic construct
  source 1..75: mol_type = other DNA
ttaattattgatggagatggccctcttgttattcaatcaaacggcaattcatttcaagttacacctgggcaacgt

SEQ ID NO: 617400 - DNA, 75 bp, synthetic construct
  source 1..75: mol_type = other DNA
tgccctttctctgtgtttcttccgctctctgggcggctcccgcgccggtaaatgtcgaagtactgcaagacaaac

SEQ ID NO: 617401 - DNA, 75 bp, synthetic construct
  source 1..75: mol_type = other DNA
caatcagcgcccgacggcgcaggatctggataaattacagggcaaactggtgcgtcttactgaccagggcgagat

SEQ ID NO: 617402 - DNA, 75 bp, synthetic construct
  source 1..75: mol_type = other DNA
tgattttgcccagtcgcgccgcatctggttaagttattccgaagttggcgatgatggcaaagccggaactgctgt

SEQ ID NO: 617403 - DNA, 75 bp, synthetic construct
  source 1..75: mol_type = other DNA
cttgttggcggcgttgttgacctcgctacctggcttgtgaaagttggtgctgaagcaggtaagctaattgacctg

SEQ ID NO: 617404 - DNA, 75 bp, synthetic construct
  source 1..75: mol_type = other DNA
gagtcacctgataaacaactgctcgctatcagtgatgctcttggcaagataaaaacaaacgccgaaaaaacaacc

SEQ ID NO: 617405 - DNA, 75 bp, synthetic construct
  source 1..75: mol_type = other DNA
tggtggatttgtatctggtctaagccaggctgaacgagcatcacaaaaatggcgaaaacaggttcaggctgatgc

SEQ ID NO: 617406 - DNA, 75 bp, synthetic construct
  source 1..75: mol_type = other DNA
tggccgcgccattctcaccgggttaatgacccagtatcagaccacgctggaactgctgacaaccgagtctcagct

SEQ ID NO: 617407 - DNA, 75 bp, synthetic construct
  source 1..75: mol_type = other DNA
cagccttacaatacgatgtgccttctgtatcaaagctgtgccagtcattgatggcatataacagagctatcattt

SEQ ID NO: 617408 - DNA, 75 bp, synthetic construct
  source 1..75: mol_type = other DNA
gaagctgctctaaccctctcacgtaaacagcgacagctagcaaatcaactgatatcaacgatagctgacctctga

SEQ ID NO: 617409 - DNA, 75 bp, synthetic construct
  source 1..75: mol_type = other DNA
acgaaactctgatcactgctggaatcgaaatccaagcgttgaacatagcgattgagtgtatgttatgccaaatca

SEQ ID NO: 617410 - DNA, 75 bp, synthetic construct
  source 1..75: mol_type = other DNA
tttccgccgggcatgagatggcttcggaactgaaagctgaatgtggtgccgttgatatgcgtagtgtggcaaagc

SEQ ID NO: 617411 - DNA, 75 bp, synthetic construct
  source 1..75: mol_type = other DNA
taaggataatatgcgttttggcttggagctggaaaaatcggcgttcgggaaatataacgtggacaatgcgataaa

SEQ ID NO: 617412 - DNA, 75 bp, synthetic construct
  source 1..75: mol_type = other DNA
tgataaagtcagctggaaaaaatcgccgtggcatactgataatcgatgaaggcgactcacttgcttcatcgcgaa

SEQ ID NO: 617413 - DNA, 75 bp, synthetic construct
  source 1..75: mol_type = other DNA
ctccctgaagccggtgatctccatgtggctgtccattgctattcggggtctgacgctcagtggaacgaaaactca

SEQ ID NO: 617414 - DNA, 75 bp, synthetic construct
  source 1..75: mol_type = other DNA
gcttataaaataagatatttgacttggggggaagatataccattaaaactaaaactaatttctgttatgtcgcta

SEQ ID NO: 617415 - DNA, 75 bp, synthetic construct
  source 1..75: mol_type = other DNA
attatttgtaataattacgggtgtaattacacctatactcttaatcaaggcccttctcacgcaagatatgtaggc

SEQ ID NO: 617416 - DNA, 75 bp, synthetic construct
  source 1..75: mol_type = other DNA
aagcgtatgaggcctgggctcagacttcacatcagacccgcgatatgacccgcagggaagaggtcaacatcaacc

SEQ ID NO: 617417 - DNA, 75 bp, synthetic construct
  source 1..75: mol_type = other DNA
gccctcagtgagtcaccaaaagaagtcgccaggatgatgaaaaaacgcggagaagcatctgatatccgtatcgat

SEQ ID NO: 617418 - DNA, 75 bp, synthetic construct
  source 1..75: mol_type = other DNA
atggcgtcgggcagatttacggcatgtatgtcctgaccggaacgaatacgatccgttccgagtttgatcgctacg

SEQ ID NO: 617419 - DNA, 75 bp, synthetic construct
  source 1..75: mol_type = other DNA
atgcagagacaatcctttttccttgtgccccttatctgtctttcttctgctctctgggcagctcctgcaacggta

SEQ ID NO: 617420 - DNA, 75 bp, synthetic construct
  source 1..75: mol_type = other DNA
cgtgatgaaccgagtctggccatagggatgcactttgtccttactatgggcaagccactgacagctatgccgggg

SEQ ID NO: 617421 - DNA, 75 bp, synthetic construct
  source 1..75: mol_type = other DNA
accggataaccggatccgcgatctggacaactataacaaggcgctgtttgacgccctgacccacgcggggtgtgg

SEQ ID NO: 617422 - DNA, 75 bp, synthetic construct
  source 1..75: mol_type = other DNA
agccacatgtggtacacggaaatcagcgattacctgattaactccggacgcaccgacgcgactcctgagtgggtt

SEQ ID NO: 617423 - DNA, 75 bp, synthetic construct
  source 1..75: mol_type = other DNA
agatgctttaccgctggaggaaattgctcaggaacttgccagtcagtatctgcgtttcattgagctatttgggcg

SEQ ID NO: 617424 - DNA, 75 bp, synthetic construct
  source 1..75: mol_type = other DNA
ccgatgattttggcttaagcaaaggtcagaactacggcattatcgaggcctgtcgcaatgggattgtcacatcga

SEQ ID NO: 617425 - DNA, 75 bp, synthetic construct
  source 1..75: mol_type = other DNA
ttctatggtgaagagatcagcgagtccctgttcctgcaagcggtggatgattccagtcatcgcggtgagcgctcg

SEQ ID NO: 617426 - DNA, 75 bp, synthetic construct
  source 1..75: mol_type = other DNA
gtgaacctcccacaagacggcatcaaattacatcgcggcaacttcaccgctatcggtcagcagatccagccttat

SEQ ID NO: 617427 - DNA, 75 bp, synthetic construct
  source 1..75: mol_type = other DNA
gaccttgaaagacgatcgactccgcaccatcgcaacatttgatggtaaaacacttaaagacgaccgactcagaac

SEQ ID NO: 617428 - DNA, 75 bp, synthetic construct
  source 1..75: mol_type = other DNA
aaagtatgctttcatgaaggggatataagagatgaaagatttttgaaatctgtttttaaggaacatgtcattacg

SEQ ID NO: 617429 - DNA, 75 bp, synthetic construct
  source 1..75: mol_type = other DNA
aactccatcgtggcaacttcgcggccatcggccagcagattcagccattgctggatgccgggcagtgcttccgcc

SEQ ID NO: 617430 - DNA, 75 bp, synthetic construct
  source 1..75: mol_type = other DNA
acgcagtctttcccagaatgcactcagccacatgtggtacagcgaaatcagtgaataccttatcagcagggggaa

SEQ ID NO: 617431 - DNA, 75 bp, synthetic construct
  source 1..75: mol_type = other DNA
tcggttatgaaaccaaagaactggttgatgtcgtatccggtgagatcaccactattcagtcattacgccatacct

SEQ ID NO: 617432 - DNA, 75 bp, synthetic construct
  source 1..75: mol_type = other DNA
ccgatgattttggcttaagtaaaggtcagaactacggcattatcgaggcttgtcgtaacggtgttgtcacttcca

SEQ ID NO: 617433 - DNA, 75 bp, synthetic construct
  source 1..75: mol_type = other DNA
ggtcttatggtattcgtaacccgcaaggaatggcgatgaatccgtggagtaatgcactgtggctgaatgaacatg

SEQ ID NO: 617434 - DNA, 75 bp, synthetic construct
  source 1..75: mol_type = other DNA
atcttacgaggtatcaatactggtgcaaaccacaatgtgattgatattcgtgacaaagtgcatgtatatgctggt

SEQ ID NO: 617435 - DNA, 75 bp, synthetic construct
  source 1..75: mol_type = other DNA
ctgccgaaaccaacgtcggcaccagcttcagtggagatcgtgttgtttcctccggataaccggatccgcgatctg

SEQ ID NO: 617436 - DNA, 75 bp, synthetic construct
  source 1..75: mol_type = other DNA
tcaactattcaggctttaagataccggaagcgaaaggggagatcgtcgccgggaccgagcaacctgtttttactg

SEQ ID NO: 617437 - DNA, 75 bp, synthetic construct
  source 1..75: mol_type = other DNA
agggatggcgatgaatccgtggagtaatacgctgtggttgaatgaacacggtccgcgcggcggcgatgaaattaa

SEQ ID NO: 617438 - DNA, 75 bp, synthetic construct
  source 1..75: mol_type = other DNA
ctggataaattgcagggtaaattagtgcgcctgaccgaccagggcgagatcccggatgataatccctttgtggag

SEQ ID NO: 617439 - DNA, 75 bp, synthetic construct
  source 1..75: mol_type = other DNA
tccggataaccggatccgcgatctggacaactataacaaagcgctgtttgacgccctgacccacgcgggtgtgtg

SEQ ID NO: 617440 - DNA, 75 bp, synthetic construct
  source 1..75: mol_type = other DNA
cgtgatgaaccgagcctggcagttggaatgcactttgttctcaccctgggcaagccgctgactgcaatgccgggt

SEQ ID NO: 617441 - DNA, 75 bp, synthetic construct
  source 1..75: mol_type = other DNA
ctggtgatttaccggctaatctgcgcagttcgcagggattcagtagcgcgttttatggtgaagagattagcgagg

SEQ ID NO: 617442 - DNA, 75 bp, synthetic construct
  source 1..75: mol_type = other DNA
atgaagctgatcgtgcctttcccccccagcgtgaacacgtactggcgacaccccaacaaaggggcgtttgctggt

SEQ ID NO: 617443 - DNA, 75 bp, synthetic construct
  source 1..75: mol_type = other DNA
atgaagctgatcctgcctttcccccccagcgtgaacacgtactggcgacaccccaacaaaggggggtttgctggt

SEQ ID NO: 617444 - DNA, 75 bp, synthetic construct
  source 1..75: mol_type = other DNA
atgctggtggagtgggggccggttatcccggaagggaaggtcgagatcactatcagtaagtacgagaaaacggcg

SEQ ID NO: 617445 - DNA, 75 bp, synthetic construct
  source 1..75: mol_type = other DNA
aagacgcaagccttacaactaaaggtgttgtgaaacttagcagtgctgttgatagcaccagtgaatcgctggccg

SEQ ID NO: 617446 - DNA, 75 bp, synthetic construct
  source 1..75: mol_type = other DNA
ggtggcgagagctgtcgatgtttctgaggccacgctggcccagattgtgaatcataacgcgtggccccgcaccag

SEQ ID NO: 617447 - DNA, 75 bp, synthetic construct
  source 1..75: mol_type = other DNA
atgagctgggttcgagcgagaaacgtacggcggatatggttccgccgttattgttccctcggctcaagaatttat

SEQ ID NO: 617448 - DNA, 75 bp, synthetic construct
  source 1..75: mol_type = other DNA
atccattgaactggcctgtaccggcagacgtcatctgctgcagctgagtcgcacggaggaatgcttcatgccgtc

SEQ ID NO: 617449 - DNA, 75 bp, synthetic construct
  source 1..75: mol_type = other DNA
cacaccctatttctcgggctgcccagcctgccagaagatatctggggtgcaacacaagagcagacgactatcaca

SEQ ID NO: 617450 - DNA, 75 bp, synthetic construct
  source 1..75: mol_type = other DNA
gcgttgtatctggaaagtaaggggattgatacagtgaaaagttttgatgctgcacagggcgctgtcacgccccgt

SEQ ID NO: 617451 - DNA, 75 bp, synthetic construct
  source 1..75: mol_type = other DNA
atgtggccattccgacggaaatatcactactggctgatcgcctttgttacgccgaccggcggtatcaggcatgtc

SEQ ID NO: 617452 - DNA, 75 bp, synthetic construct
  source 1..75: mol_type = other DNA
tggccaggttggcgttacctggacatccaccatcggcgcaaatttgctggtggtcgtggatgatgttgtcgctaa

SEQ ID NO: 617453 - DNA, 75 bp, synthetic construct
  source 1..75: mol_type = other DNA
aggaaatatttgtcaatacctgttgctggtcagggagggagtcagactggcgcgagtggcagcagcaggacatcg

SEQ ID NO: 617454 - DNA, 75 bp, synthetic construct
  source 1..75: mol_type = other DNA
tgaactacaccctaacgctggataactttatcaagttatttggtcaggggatgagcgacggcgcgtggccttcac

SEQ ID NO: 617455 - DNA, 75 bp, synthetic construct
  source 1..75: mol_type = other DNA
tgaaatcctctttcacaccctgtttgtcggccttcccggcctgcctgaagaggcctggggcgtcagaccggaaca

SEQ ID NO: 617456 - DNA, 75 bp, synthetic construct
  source 1..75: mol_type = other DNA
ggggaatgcccgctgttccgcttccgggcagcaatgggaacattgcggaaatccggctggcgcagcagcatatgc

SEQ ID NO: 617457 - DNA, 75 bp, synthetic construct
  source 1..75: mol_type = other DNA
ttggcattcgtttctttactatcgaaaaaaaccattaacgtcatcggcaaagctgcaccgcatcagaagatcttc

SEQ ID NO: 617458 - DNA, 75 bp, synthetic construct
  source 1..75: mol_type = other DNA
tttatcgggctgcccagcctgccagaagatgtctggggtgcaacacaggagcagacgactatcacattacactga

SEQ ID NO: 617459 - DNA, 75 bp, synthetic construct
  source 1..75: mol_type = other DNA
tatcaaccgcgagaatgcgccggtgattgttatcgagccatacatcatcgcaatggaagacaacgatgtgaaagg

SEQ ID NO: 617460 - DNA, 75 bp, synthetic construct
  source 1..75: mol_type = other DNA
tatcaaccgcgagaatgcgccggtaattgttatcgagccatacatcatcgcgatggaagacaacgatgtgaaagg

SEQ ID NO: 617461 - DNA, 75 bp, synthetic construct
  source 1..75: mol_type = other DNA
accacgccggacattcgctacgtgcgtgaggcgctgtaccagacagcccgtcatggagggtttatggccgtcatc

SEQ ID NO: 617462 - DNA, 75 bp, synthetic construct
  source 1..75: mol_type = other DNA
tttttctgatatcactgccacagcaaaacaccaatttcgagacaagtacgcgcgcgaggggtatcagttgcaaaa

SEQ ID NO: 617463 - DNA, 75 bp, synthetic construct
  source 1..75: mol_type = other DNA
caaactgcaacgggccggtaaacaactgacggacattatggacgccggcgcagtggatgccatacgtgcccgcct

SEQ ID NO: 617464 - DNA, 75 bp, synthetic construct
  source 1..75: mol_type = other DNA
cgatggaagacaacgatgtgaaagggaaaaccctgaaggcagcagcgattgccgaagccattatcagtaccatcg

SEQ ID NO: 617465 - DNA, 75 bp, synthetic construct
  source 1..75: mol_type = other DNA
ggcattgccaccatccccgatttcctggaggaacgttatgataaaacgacgcgtattatcatcgacttctgcttc

SEQ ID NO: 617466 - DNA, 75 bp, synthetic construct
  source 1..75: mol_type = other DNA
tagactacaccctaacgctggataactttatcaagttatttggtcaggggatgagcgacggcgcgtggccttcac

SEQ ID NO: 617467 - DNA, 75 bp, synthetic construct
  source 1..75: mol_type = other DNA
cacaccctatttatcgggctgcccagcttgccagaagatgtctggggtgccaaacaggagcagacggttatcacc

SEQ ID NO: 617468 - DNA, 75 bp, synthetic construct
  source 1..75: mol_type = other DNA
gaggccacgctggcccagattgtgaatcataacgcgtggccccgcaccggccccggagaagtgcgccggcgtctt

SEQ ID NO: 617469 - DNA, 75 bp, synthetic construct
  source 1..75: mol_type = other DNA
gtttttttgagctggagtccggttttaaaaagctgctgtcgattgtgctggtcgggcaaccagaactggctacca

SEQ ID NO: 617470 - DNA, 75 bp, synthetic construct
  source 1..75: mol_type = other DNA
ttgatacaacgaagagttttgatgctgtacagggcgcggccacgccccgtacagcgggtaccacagataaaacga

SEQ ID NO: 617471 - DNA, 75 bp, synthetic construct
  source 1..75: mol_type = other DNA
ccgcgaaaaagcgggatgcgattttcctttgggttttgctgggctggctggcatttatcctgttgccgagctgga

SEQ ID NO: 617472 - DNA, 75 bp, synthetic construct
  source 1..75: mol_type = other DNA
tacgtggtcgcggaatgcgcccgacgccgtttaattacaccttagccattgccctgttacaaacctgtgggatgg

SEQ ID NO: 617473 - DNA, 75 bp, synthetic construct
  source 1..75: mol_type = other DNA
gccctgttacaaacctgtgggatggttggcctggcgcagtgggcgctggtcagcggcggtgcgggaaaagtggct

SEQ ID NO: 617474 - DNA, 75 bp, synthetic construct
  source 1..75: mol_type = other DNA
attggttatgtagataaggagttagtctttggggttctgcttgatatccagaatcttcatgagagtgatatcaaa

SEQ ID NO: 617475 - DNA, 75 bp, synthetic construct
  source 1..75: mol_type = other DNA
cttgttgttacaagaataccgttagtatatcctgaagcaggtcatccgttaagtttcagaagggatatatcaaaa

SEQ ID NO: 617476 - DNA, 75 bp, synthetic construct
  source 1..75: mol_type = other DNA
ccagagcatgcagcgcagcgcggattatagctgggcgtcaaactctcgcatcgggaagcgtgacgcttttcagta

SEQ ID NO: 617477 - DNA, 75 bp, synthetic construct
  source 1..75: mol_type = other DNA
atcctgagctataccatgccgttctgggtggtaattttcgccgcgttgtttctcggtgaacgcctgcgacgtggg

SEQ ID NO: 617478 - DNA, 75 bp, synthetic construct
  source 1..75: mol_type = other DNA
cgaaacacctcagtcggtgaccaatatctacaacatcagccttggtatccagcgtgatgagccagcgcagaacaa

SEQ ID NO: 617479 - DNA, 75 bp, synthetic construct
  source 1..75: mol_type = other DNA
atgaaccagttttatgttcacgttcgtctatttgaagacacagccgaacagaccaaaaaatttgaagaattaatg

SEQ ID NO: 617480 - DNA, 75 bp, synthetic construct
  source 1..75: mol_type = other DNA
gcatcagccgcacaacctcgtcgatatcacccgagcaggcgacccgaacgttcggaggctcctcgctgtccattc

SEQ ID NO: 617481 - DNA, 75 bp, synthetic construct
  source 1..75: mol_type = other DNA
gaatcttcatgagagtgatatcaaagcctaccgagtacagggccaaacctatatcgatactgttataaacagaac

SEQ ID NO: 617482 - DNA, 75 bp, synthetic construct
  source 1..75: mol_type = other DNA
gagaaaaccggtccttataacctgctgtttctctttagtattggaatcgataaaaccaaagcaatgggattattg

SEQ ID NO: 617483 - DNA, 75 bp, synthetic construct
  source 1..75: mol_type = other DNA
tgccgtacacccattttcatccgatctaccagggtaaaagtggtatgagcggcgagcgtgttgcgggaaaagtga

SEQ ID NO: 617484 - DNA, 75 bp, synthetic construct
  source 1..75: mol_type = other DNA
ccagctgccgaaaggtatggcgacaattatgctctccgttcatgacagtccggcgctggttgagcaggcgcttaa

SEQ ID NO: 617485 - DNA, 75 bp, synthetic construct
  source 1..75: mol_type = other DNA
aaagctacaccgcaaaaatggtcgggcaggccggtaaagatgagctatcagtcgttatcaaacacctgttaaatc

SEQ ID NO: 617486 - DNA, 75 bp, synthetic construct
  source 1..75: mol_type = other DNA
aggttgcgcgcaacctacatccgcgacgcccggtgaaaatggtcacggttgcggacacaatttgctgggaaccgc

SEQ ID NO: 617487 - DNA, 75 bp, synthetic construct
  source 1..75: mol_type = other DNA
tggtttctggttttttattaagtgcttcagccagtgctgctgcggttaaattgccccggacagtgactgatgtga

SEQ ID NO: 617488 - DNA, 75 bp, synthetic construct
  source 1..75: mol_type = other DNA
ggattataccgaaaactcacgacaggcaatggctgaaatggctaaagtcgcacttgagaattcgataaatattcc

SEQ ID NO: 617489 - DNA, 75 bp, synthetic construct
  source 1..75: mol_type = other DNA
aacccccggacgtcacccctccggggccgttctgctgtgctgcgcatcgagccgctacgcgtctcgccccgctca

SEQ ID NO: 617490 - DNA, 75 bp, synthetic construct
  source 1..75: mol_type = other DNA
caggctcagtgggaacatgaacacgggctctttgtggcttccctgaacaatgttcatctgcgttacatacacgca

SEQ ID NO: 617491 - DNA, 75 bp, synthetic construct
  source 1..75: mol_type = other DNA
cggctgttatctgacgccggatattgccattaaactggcatccggtcgtcaggacccgctaaccaaacgcgaacg

SEQ ID NO: 617492 - DNA, 75 bp, synthetic construct
  source 1..75: mol_type = other DNA
atatttccggactggaattattaagccagcttccaaaaggtatggcgacgattatgctctccgttcatgacagcc

SEQ ID NO: 617493 - DNA, 75 bp, synthetic construct
  source 1..75: mol_type = other DNA
atgatcaccgttgcccttatagacgatcacctcatcgtccgctccggctttgcgcagctgctggaacctgatttg

SEQ ID NO: 617494 - DNA, 75 bp, synthetic construct
  source 1..75: mol_type = other DNA
aagatggaagtgagcagatgtgcggaagtgaggatgtaaaagacgggatatgcagcctcattggtgtctctgatg

SEQ ID NO: 617495 - DNA, 75 bp, synthetic construct
  source 1..75: mol_type = other DNA
aggcgcaaaatttattgagttttctggcgaatccgacgacggacgtaaaatacaatatcttagcgtttgtgttca

SEQ ID NO: 617496 - DNA, 75 bp, synthetic construct
  source 1..75: mol_type = other DNA
ttagatgaacaaggattgccgactgcgaaaagcaccgcggtgtttaatatgtttaaacacctggctcacgtgctc

SEQ ID NO: 617497 - DNA, 75 bp, synthetic construct
  source 1..75: mol_type = other DNA
gcgccactaacagcgtgtctgaaacgcaggctgcaacgccgaaagcagtaaaggcagcatatgacctggctaatg

SEQ ID NO: 617498 - DNA, 75 bp, synthetic construct
  source 1..75: mol_type = other DNA
gctaacggaaaatataccgctcaggacgccacgacggcacgaaaagggatagtccagctcagtagtgccaccaac

SEQ ID NO: 617499 - DNA, 75 bp, synthetic construct
  source 1..75: mol_type = other DNA
ctgttaaggcagcgtatgatcttgcggccggaaaggctccgtccaatcacacgcattcgtgggagcagataacaa

SEQ ID NO: 617500 - DNA, 75 bp, synthetic construct
  source 1..75: mol_type = other DNA
cccaggagctggaagatatggccagcgcgctgtttgcctctgatttctcctccgtcagcagcgataaagcaccgt

SEQ ID NO: 617501 - DNA, 75 bp, synthetic construct
  source 1..75: mol_type = other DNA
atcattctgattgctatttcctgccgataagagataaccagcaagtccttgtcggcgttgagttaattacccatt

SEQ ID NO: 617502 - DNA, 75 bp, synthetic construct
  source 1..75: mol_type = other DNA
agcggttaaggcggtaatggatgaaacgaacaagaaagcgcccttaaatagtcctgcactgaccggaacgccaac

SEQ ID NO: 617503 - DNA, 75 bp, synthetic construct
  source 1..75: mol_type = other DNA
aaatagcctggcatgcttcgatacatcaggaaccaaatggccggaagaccgtaaccacgcaacggtttgtccagg

SEQ ID NO: 617504 - DNA, 75 bp, synthetic construct
  source 1..75: mol_type = other DNA
ttgcgcgttattgagaagtacaactcgagcaataacgccacccaggaatcaggggcagtgacagtaaagaaaaat

SEQ ID NO: 617505 - DNA, 75 bp, synthetic construct
  source 1..75: mol_type = other DNA
aaggtacttaagcaatcttcagaaactaaaattcagttcgcatccatcggtgcggctaacaaagaagatgcagct

SEQ ID NO: 617506 - DNA, 75 bp, synthetic construct
  source 1..75: mol_type = other DNA
tcagtgggattataccagtaacgccagcgtaacgattcatacatcaccaacttatacagcgaataaaccaaaagg

SEQ ID NO: 617507 - DNA, 75 bp, synthetic construct
  source 1..75: mol_type = other DNA
tgcactgggcatcggtacatccagtgctcttggcggtaactcgattgttttgggtgataatgacacgggctttaa

SEQ ID NO: 617508 - DNA, 75 bp, synthetic construct
  source 1..75: mol_type = other DNA
cagctttctgaggaacagcattggcagctatttgccgagcagttagaattacttaaatcatgccaacattttttt

SEQ ID NO: 617509 - DNA, 75 bp, synthetic construct
  source 1..75: mol_type = other DNA
aactgcctgcaatcctcgagttgtggctggaaagtacaacctggggacatccctttataaaagcaaactactggc

SEQ ID NO: 617510 - DNA, 75 bp, synthetic construct
  source 1..75: mol_type = other DNA
ttctgcacttacggcgtctggtaagaactcttatgcacttattgccacggggaaatcggatggcggtgtggcctc

SEQ ID NO: 617511 - DNA, 75 bp, synthetic construct
  source 1..75: mol_type = other DNA
tgtcaggcaatggtgcagtgctatttggcagcagcgatcagataggcttttatgtctatggaaaggactctgcca

SEQ ID NO: 617512 - DNA, 75 bp, synthetic construct
  source 1..75: mol_type = other DNA
tggtttccgtaactatggtgcctgggtggaaggtgccggaagcaatgttaatgtatccggaaaaatcagtcttgc

SEQ ID NO: 617513 - DNA, 75 bp, synthetic construct
  source 1..75: mol_type = other DNA
atacttctggtaacacgatggtctatgttgctaacgtcaatggtaaaggtgcacagacgaaaaatggtatagaag

SEQ ID NO: 617514 - DNA, 75 bp, synthetic construct
  source 1..75: mol_type = other DNA
agccattaataatggtgtcattaatattcgcccatttaaaaatgctttcgcaccagaggggattaacaccgcaat

SEQ ID NO: 617515 - DNA, 75 bp, synthetic construct
  source 1..75: mol_type = other DNA
atcagggactgttgattaacagcggcaacattgatttcactaccggtacagataatatcggcgtctgggttgata

SEQ ID NO: 617516 - DNA, 75 bp, synthetic construct
  source 1..75: mol_type = other DNA
gtcgactgcgcatggcaggaggaaacccaactccctacctggattatggattggcaggcggatcaaacgccgtaa

SEQ ID NO: 617517 - DNA, 75 bp, synthetic construct
  source 1..75: mol_type = other DNA
tgcgtatcttgccaacgcgcaaaactgggtctgggaagaagacggcaagcttctcggttttgtcagcattatgga

SEQ ID NO: 617518 - DNA, 75 bp, synthetic construct
  source 1..75: mol_type = other DNA
tgtacaacagcgctatccccacttattactggaggtttaccagaaaaaccagccagcgatagatttttaccatgc

SEQ ID NO: 617519 - DNA, 75 bp, synthetic construct
  source 1..75: mol_type = other DNA
ggaactacggaatcctggcaaaggatgccgggactgttgatgtggtaaatacagggactatcactattgacggtc

SEQ ID NO: 617520 - DNA, 75 bp, synthetic construct
  source 1..75: mol_type = other DNA
acatatgacggtgacacaatagtgggcagttatgtgggtaaggtggtgaaagaagatgccaacaccattacggtt

SEQ ID NO: 617521 - DNA, 75 bp, synthetic construct
  source 1..75: mol_type = other DNA
acaatctcccgtccggaagtggtcaccgggcatacggacgttatctgctcaaccagtatccgccacattctggct

SEQ ID NO: 617522 - DNA, 75 bp, synthetic construct
  source 1..75: mol_type = other DNA
cgaaaaattaacctacaccgatacttacgctcaggaaaacgtcaatattgatatggaaaaagtagacctgaaagc

SEQ ID NO: 617523 - DNA, 75 bp, synthetic construct
  source 1..75: mol_type = other DNA
cttctcagggctcgatgaccgccctgccagtgactatcgactatcctactgcactggccttgcggcagatggcgc

SEQ ID NO: 617524 - DNA, 75 bp, synthetic construct
  source 1..75: mol_type = other DNA
atcagtggcgacaccagcaaagggattagcatgaaacaatcacagaaagttcttgaagccgctggttttaaagaa

SEQ ID NO: 617525 - DNA, 75 bp, synthetic construct
  source 1..75: mol_type = other DNA
agaaaagttaacctataaagacagttgggcagaagaaactgtctctgtagatatggaaaaagttgatctcaaaga

SEQ ID NO: 617526 - DNA, 75 bp, synthetic construct
  source 1..75: mol_type = other DNA
gcccgcgtcagccgggaagagcgtgaggcactggaagcccgtcaggccgccattcttgctgcagaaaaggagagc

SEQ ID NO: 617527 - DNA, 75 bp, synthetic construct
  source 1..75: mol_type = other DNA
ccgggaagagcgtgaggcgctggaagccaggcaacaggccatgatggaagggcagcaggagggcggacatgtctc

SEQ ID NO: 617528 - DNA, 75 bp, synthetic construct
  source 1..75: mol_type = other DNA
cagtcgggaggaaagggaagctctggaagcccgtcaggccgccattcttgctgcagagaaggagagcagacatgt

SEQ ID NO: 617529 - DNA, 75 bp, synthetic construct
  source 1..75: mol_type = other DNA
aagcgccagcaggtaaccgggattgttgttaatcacaagccacagcttgcccgtgaagcgcgccgggcgctgcgt

SEQ ID NO: 617530 - DNA, 75 bp, synthetic construct
  source 1..75: mol_type = other DNA
gccttcatgggcgatggctgcatgatggaaggcatctcccacgaagtttgctctctggcgggcaccctgaagctg

SEQ ID NO: 617531 - DNA, 75 bp, synthetic construct
  source 1..75: mol_type = other DNA
ccgaccgcactgatcctctcccgtcagaacctggcgcagcaggaacgaactgaagagcaactggcaaacatcgcg

SEQ ID NO: 617532 - DNA, 75 bp, synthetic construct
  source 1..75: mol_type = other DNA
ttatgataaaactcgagggccacgagatatagaaactcaaaatgttagcttaaagtatccacttcccaaaaagaa

SEQ ID NO: 617533 - DNA, 75 bp, synthetic construct
  source 1..75: mol_type = other DNA
ctgaaaacattcagctagccgattttttcttaggtgcggttatgtgcgcatatcaaggaaaagcttcatctgaag

SEQ ID NO: 617534 - DNA, 75 bp, synthetic construct
  source 1..75: mol_type = other DNA
caggaagtacatttgtgccaaaaatatggcgtcatttcgcatcttagtcgtcgtggtgagcttgattcttctggc

SEQ ID NO: 617535 - DNA, 75 bp, synthetic construct
  source 1..75: mol_type = other DNA
catatcgttgcccgtctggtttacagaaaaccctggatggctttttttctggcagaactgattgcggccattctc

SEQ ID NO: 617536 - DNA, 75 bp, synthetic construct
  source 1..75: mol_type = other DNA
gctgtactcacacgtatcagcgcaattattgacagtgatgaggtctacaatttccttcggaaaaatttgcacaga

SEQ ID NO: 617537 - DNA, 75 bp, synthetic construct
  source 1..75: mol_type = other DNA
gacctctgatggtgagtctttgtgatttcacggggaaaatggtcgccccctggctggagcatggtatagatgctg

SEQ ID NO: 617538 - DNA, 75 bp, synthetic construct
  source 1..75: mol_type = other DNA
agttcatttgtcatccggtcccgtcaaagaagaatggaagatcgagcatcaggttgaaaaaaccaaatccggcaa

SEQ ID NO: 617539 - DNA, 75 bp, synthetic construct
  source 1..75: mol_type = other DNA
gtttctgctgaagatgccaaaaaaggtatcactatggcgcaaatggaactggtgatgggtgatgctgccaactta

SEQ ID NO: 617540 - DNA, 75 bp, synthetic construct
  source 1..75: mol_type = other DNA
acattcacctgtcgacaacgaccggcggcgtgacatcagaccacacctggaaaaccttcatttttacgcccgtaa

SEQ ID NO: 617541 - DNA, 75 bp, synthetic construct
  source 1..75: mol_type = other DNA
gatagcgtcgatgatcattggaccgttattgacacccttaaacgcctggcaggcattattggcggggttactgat

SEQ ID NO: 617542 - DNA, 75 bp, synthetic construct
  source 1..75: mol_type = other DNA
ccgggaagagcgtgaggcactggaagccaggcaacaggccatgatggaagggcagcaggagggcagacatgtctc

SEQ ID NO: 617543 - DNA, 75 bp, synthetic construct
  source 1..75: mol_type = other DNA
gtgggtattttctctgggtgtctggtttcatatcgtcgcccgtcttgtttacagcaaaccctggatggctttttt

SEQ ID NO: 617544 - DNA, 75 bp, synthetic construct
  source 1..75: mol_type = other DNA
tattttccctgggtgtctggtttcatatcgtcgcccgtcttgtttacagcaaaccctggatggctttttttctgg

SEQ ID NO: 617545 - DNA, 75 bp, synthetic construct
  source 1..75: mol_type = other DNA
tggatgcatggattgcccgtgtcagccgggaagagcgtgaggcgctggaagcaagacaacaggccatgatggaag

SEQ ID NO: 617546 - DNA, 75 bp, synthetic construct
  source 1..75: mol_type = other DNA
aatgaagatgctgtcggtgaagcggttcgtgaggccatttcggaaggtctttgtacccgagaggaattatttatt

SEQ ID NO: 617547 - DNA, 75 bp, synthetic construct
  source 1..75: mol_type = other DNA
gtgataacagatgtctggaaatataggggcaaatccattggtgtttttcaggttaccgataaagacgtgtgcaaa

SEQ ID NO: 617548 - DNA, 75 bp, synthetic construct
  source 1..75: mol_type = other DNA
ccgcgaagagcaaaaaacgctggtggtaagtaccgccaacgtggcattgcaggatcagatctacagcaaagattt

SEQ ID NO: 617549 - DNA, 75 bp, synthetic construct
  source 1..75: mol_type = other DNA
ttgcggacgtcgccaaaacgctggccggagaagaagggcgacgcccccaccggcgttgggaaaacgctctcttat

SEQ ID NO: 617550 - DNA, 75 bp, synthetic construct
  source 1..75: mol_type = other DNA
gatattgctattgatgacgatctctggcgacggctgagtaccgacaaagccagctgcctcaaccgcaactgttac

SEQ ID NO: 617551 - DNA, 75 bp, synthetic construct
  source 1..75: mol_type = other DNA
tggtgttggtgaaagcgagcaacgtgacgaagaatacaccgcactgtatcgtcgcatcctaccggaactggattt

SEQ ID NO: 617552 - DNA, 75 bp, synthetic construct
  source 1..75: mol_type = other DNA
gacatctccagcgcatcgatcttccggcgggcaaacggatcgcgtaaggcttcaatcaataacaacgcaatcacc

SEQ ID NO: 617553 - DNA, 75 bp, synthetic construct
  source 1..75: mol_type = other DNA
tccatctgttcagtacgcagccgcgaacgctgtacgatctgctcgacgttcgcgcactgctggaaggtgaatcag

SEQ ID NO: 617554 - DNA, 75 bp, synthetic construct
  source 1..75: mol_type = other DNA
cattgccgaaatggcggcctttttccgtgagcaggtggagagcaaaaaacatctcggtatgttggtgctgtttgc

SEQ ID NO: 617555 - DNA, 75 bp, synthetic construct
  source 1..75: mol_type = other DNA
gggcaggtcctggatacggcagaattatcgtcgttcctgcctgcaacactgaaagtcgcgatacgtaccgtgcgt

SEQ ID NO: 617556 - DNA, 75 bp, synthetic construct
  source 1..75: mol_type = other DNA
gaatgcctgtacccgtgacgtgttgcgcttccggctgcgcagcggtcgtcacagcctggtgattgttgatttacc

SEQ ID NO: 617557 - DNA, 75 bp, synthetic construct
  source 1..75: mol_type = other DNA
gttattccccggatgcgcgttgagccttccatcgacaacgaagagcagcacattgctgaaatggcggcctttttc

SEQ ID NO: 617558 - DNA, 75 bp, synthetic construct
  source 1..75: mol_type = other DNA
gcttcaggaacagatccccgactttattccccgcgcgccgcagcggcagatgattgcggacgtcgccaaaacgct

SEQ ID NO: 617559 - DNA, 75 bp, synthetic construct
  source 1..75: mol_type = other DNA
accgttttgcgatgggcgaattgccggatgaagtactggagatctgccagcggctggcaaaactgaccgagatgc

SEQ ID NO: 617560 - DNA, 75 bp, synthetic construct
  source 1..75: mol_type = other DNA
aggcggacctttgcgaaaagctccatgaggatgcggaactactctgtcgcactctgactattcgtctggatggtc

SEQ ID NO: 617561 - DNA, 75 bp, synthetic construct
  source 1..75: mol_type = other DNA
atgtcgaaacaacagaaaacagcgctgaacatggctaaattcatccagaatcagtctctgctcctgctggagaag

SEQ ID NO: 617562 - DNA, 75 bp, synthetic construct
  source 1..75: mol_type = other DNA
gaaactccacgatgatgcggagcatcttttccgtacactgtcctcgagactggatgcattacaggatggtaactg

SEQ ID NO: 617563 - DNA, 75 bp, synthetic construct
  source 1..75: mol_type = other DNA
caattaactgaatttcataaaaaaataagaagaaatctttactatatcaatggcgcagagactctttggtatctc

SEQ ID NO: 617564 - DNA, 75 bp, synthetic construct
  source 1..75: mol_type = other DNA
ggtgttgctaggggtgaaaatgcagcccaaattgataacttatctgatataaaagtaaaaataaaaaatgagggt

SEQ ID NO: 617565 - DNA, 75 bp, synthetic construct
  source 1..75: mol_type = other DNA
gcaacaaggtcatgaagcctcataaagcatcattaaaccctgatcttaccgctaggaatgtacttacatacagcc

SEQ ID NO: 617566 - DNA, 75 bp, synthetic construct
  source 1..75: mol_type = other DNA
gatcaagaataccgtgccctgtaccgtcgaatcctgccggaactggatctggtgttgtgggtcattaaggccgat

SEQ ID NO: 617567 - DNA, 75 bp, synthetic construct
  source 1..75: mol_type = other DNA
atgaataaacctgacggccttcaggcccttgaacaaccgctcgcgtcgcttccgcacacgcttcgccagcttatt

SEQ ID NO: 617568 - DNA, 75 bp, synthetic construct
  source 1..75: mol_type = other DNA
tgcgctgaaaacggatgctgaaacagagaaattagtaaccgacattaatgccgaacgtaaagcgagttaccaaca

SEQ ID NO: 617569 - DNA, 75 bp, synthetic construct
  source 1..75: mol_type = other DNA
ttcttactgccgcatttttagcagcgagtcccgcggcgaagagtgctgttaataacgcctatgatgcattgatta

SEQ ID NO: 617570 - DNA, 75 bp, synthetic construct
  source 1..75: mol_type = other DNA
tattgaagctcgcaagggaaatactcagccagctttgttatggtttgcacaaaaatcaacactcagtaataacca

SEQ ID NO: 617571 - DNA, 75 bp, synthetic construct
  source 1..75: mol_type = other DNA
tccgcccatctcctccgacgaagccagcgaaaaatatctctttgcgatggcaaacttgctgcgctggcatcctaa

SEQ ID NO: 617572 - DNA, 75 bp, synthetic construct
  source 1..75: mol_type = other DNA
ccacttcacgctggcgtttgtggtgagtaaagatgcgaacacctgtctgccgacatggggtaccgcttacggtat

SEQ ID NO: 617573 - DNA, 75 bp, synthetic construct
  source 1..75: mol_type = other DNA
gtctctccctgccacaggtgaatgacagtgccatcgggtacggaaaatccattgacggtgccatctcggacaaac

SEQ ID NO: 617574 - DNA, 75 bp, synthetic construct
  source 1..75: mol_type = other DNA
gtctctccctgccacaggtgaatgacagtgccatcgggtacgggaaatccattgatggtgccatttcggacaaac

SEQ ID NO: 617575 - DNA, 75 bp, synthetic construct
  source 1..75: mol_type = other DNA
tttggcgaaactgaaaaccggcagcctgacggtctcccggggcgtgattgaagccctgcgccgggatccggataa

SEQ ID NO: 617576 - DNA, 75 bp, synthetic construct
  source 1..75: mol_type = other DNA
gtacgcaaaaggccgagggcccttttgtcctcctgacgttggtcggagagggttttatcttcgacgagcggcatg

SEQ ID NO: 617577 - DNA, 75 bp, synthetic construct
  source 1..75: mol_type = other DNA
agctggggctgaatgccagctggagcagtgacctgatgtgcggcaactttgatctgaaaactactgtcggcaatc

SEQ ID NO: 617578 - DNA, 75 bp, synthetic construct
  source 1..75: mol_type = other DNA
gcgtcgtattgaggcgctggaccgggatattacagcactgaaaaacgagatggaactgaagcgtgagctggcccg

SEQ ID NO: 617579 - DNA, 75 bp, synthetic construct
  source 1..75: mol_type = other DNA
caaatagtgctggcgcacatactcataccgttccattaaggagaccaaacagtggcggtatgaatttcgactggc

SEQ ID NO: 617580 - DNA, 75 bp, synthetic construct
  source 1..75: mol_type = other DNA
cagcagcgaggtctgcttctgcagcaaaaacctctgaaacaaatgcaaagacttcagcagacaatgctgcttcct

SEQ ID NO: 617581 - DNA, 75 bp, synthetic construct
  source 1..75: mol_type = other DNA
cttccaccagaaagctacccagttggcgcaccaatcccgtggccatcagataccgttccgtctggttatgccctg

SEQ ID NO: 617582 - DNA, 75 bp, synthetic construct
  source 1..75: mol_type = other DNA
gcagaatgctgctcaccgggatgtctgagccgtatgcggccgcagaagatgccgcgattcaggaaggcgaccggc

SEQ ID NO: 617583 - DNA, 75 bp, synthetic construct
  source 1..75: mol_type = other DNA
gtgcaccaatcccgtggccatcagataccgttccgtctggttatgccctgatgcaggggcagacttttgacaaat

SEQ ID NO: 617584 - DNA, 75 bp, synthetic construct
  source 1..75: mol_type = other DNA
cattaacgccgaaagatattggtactttaaattcagtaacgatgtctttctctggcggggctgggtggttcaaac

SEQ ID NO: 617585 - DNA, 75 bp, synthetic construct
  source 1..75: mol_type = other DNA
ggacaaaagcttgtagctcgggccaaaccgggggaatatgtgcagggaattaacgggaaatggttgcaaaaataa

SEQ ID NO: 617586 - DNA, 75 bp, synthetic construct
  source 1..75: mol_type = other DNA
atgtatgaggagtgtgtgacatttttcatgatagtaaaacaggtgataacctcctttcgtaaggggcattcacag

SEQ ID NO: 617587 - DNA, 75 bp, synthetic construct
  source 1..75: mol_type = other DNA
atgtatgaggagagtgtgacatttttcatgacagtaaaacaggtgataacctcctttcgtaagggggattcacag

SEQ ID NO: 617588 - DNA, 75 bp, synthetic construct
  source 1..75: mol_type = other DNA
ctgtatggcatagcctgtggcatggttgtccccgtgtcagtctccggaattgctgtacttatcgtcggaactctt

SEQ ID NO: 617589 - DNA, 75 bp, synthetic construct
  source 1..75: mol_type = other DNA
cttggccgcgcaagcaaagagcgcgacaaggatatggtttaccagacaggaacatctttcagcgacttcaaggcg

SEQ ID NO: 617590 - DNA, 75 bp, synthetic construct
  source 1..75: mol_type = other DNA
atgtatgaggagggtgtgacatttttcatgagagtaaaacaggtgataacctcctttcgtaaggggaattcacag

SEQ ID NO: 617591 - DNA, 75 bp, synthetic construct
  source 1..75: mol_type = other DNA
atgtatgaggagcgtgtgacatttttcatgaaagtaaaacaggtgataacctcctttcgtaagggggattcacag

SEQ ID NO: 617592 - DNA, 75 bp, synthetic construct
  source 1..75: mol_type = other DNA
cctatgtttaccacctcggccattgccagcgtaacgcttgatgaaagcggaaacggtacattcaactggcagatg

SEQ ID NO: 617593 - DNA, 75 bp, synthetic construct
  source 1..75: mol_type = other DNA
tgcgctgaaaacggatgctgaaacagagaaattagtaacagagattaacgccgcgcgtaaaacgagctaccaaca

SEQ ID NO: 617594 - DNA, 75 bp, synthetic construct
  source 1..75: mol_type = other DNA
cgtttcttgttggactggtaagcagcaatgtagtggcattaacactggacgaggccagaatccaggggcgggtag

SEQ ID NO: 617595 - DNA, 75 bp, synthetic construct
  source 1..75: mol_type = other DNA
atgggccattggcctgatgagcgacagtgcaatggctttaaccctgaacgaagccagaaaagtcaggggcgggta

SEQ ID NO: 617596 - DNA, 75 bp, synthetic construct
  source 1..75: mol_type = other DNA
cgagttatgtccgggcgaaacgccgcctatgtttaccacttcagcgattgccagcgtaacgcttgatgaaagcgg

SEQ ID NO: 617597 - DNA, 75 bp, synthetic construct
  source 1..75: mol_type = other DNA
ccagcgtaacgcttgatgaaagcggaaaaggcgaatttaactggcagatgagcccgtgtaatttgaaaatggcaa

SEQ ID NO: 617598 - DNA, 75 bp, synthetic construct
  source 1..75: mol_type = other DNA
cctccggtcggctgcagctgtctgcagctgaaagtaaaataccctgggaagagctggcgtttagccagcgcatgc

SEQ ID NO: 617599 - DNA, 75 bp, synthetic construct
  source 1..75: mol_type = other DNA
tgatccagaaattgtcttctttgcagataaactggacgcttacacagatcagccagagtttcgcatgatcgctcc

SEQ ID NO: 617600 - DNA, 75 bp, synthetic construct
  source 1..75: mol_type = other DNA
caacgtaatggcacgctgattcaggttgcaccgcagcaaacacgcacttttacagtcaccacaggaattgaataa

SEQ ID NO: 617601 - DNA, 75 bp, synthetic construct
  source 1..75: mol_type = other DNA
ctgccgttataccgatatctacaaagtcgccgtggtcggcggcgatgccggatatctcatcaccaacatcgtgaa

SEQ ID NO: 617602 - DNA, 75 bp, synthetic construct
  source 1..75: mol_type = other DNA
cgtcgttcggctataccttccgccgcaaggggatgcctgttatcgatcagtacgacgcagtgggcggtaaagtcc

SEQ ID NO: 617603 - DNA, 75 bp, synthetic construct
  source 1..75: mol_type = other DNA
ggcccgggtttatacacccacttgctggcggagcgtggatattgctgtcacgaacggtgcaatagtgatccacac

SEQ ID NO: 617604 - DNA, 75 bp, synthetic construct
  source 1..75: mol_type = other DNA
gcaagagtaccggtgaagcgatggcgttgatggagcaactggcgagcaaactgcctacgggggttggctacgact

SEQ ID NO: 617605 - DNA, 75 bp, synthetic construct
  source 1..75: mol_type = other DNA
ccatcgttgtagtagaaaacgtggaacgtgtgatggcggaagaaggtttgccgccgaaagaagctacacgtaaat

SEQ ID NO: 617606 - DNA, 75 bp, synthetic construct
  source 1..75: mol_type = other DNA
aactggcgaagatggagccgttcttcccatcgggtctgaaaatcgtttatccatacgacactacgccgttcgtga

SEQ ID NO: 617607 - DNA, 75 bp, synthetic construct
  source 1..75: mol_type = other DNA
tgaattatgcatatataccaaatgctatattcagccagaatataccggacgaaatattaagattgcgtgaatcag

SEQ ID NO: 617608 - DNA, 75 bp, synthetic construct
  source 1..75: mol_type = other DNA
gctctggctgctatgtatttgattggtatagccaaggctcatgcctttcatgatgggaataaacgcacagctttt

SEQ ID NO: 617609 - DNA, 75 bp, synthetic construct
  source 1..75: mol_type = other DNA
ttatcggcgcgttgctggcggcgactttccgtggcctgaccaacgacgtttacttccaggtaggcctactcacaa

SEQ ID NO: 617610 - DNA, 75 bp, synthetic construct
  source 1..75: mol_type = other DNA
tgctgaagttccacccggcgattcaggccgccatcggagccaacgaactcaagcgcatcaccacagaaatcctgc

SEQ ID NO: 617611 - DNA, 75 bp, synthetic construct
  source 1..75: mol_type = other DNA
tccatgcatatagcaggcaatgcaggggagagcgccaagagcattggcgatgcgccgttcctccgccgttggtgt

SEQ ID NO: 617612 - DNA, 75 bp, synthetic construct
  source 1..75: mol_type = other DNA
gccgaagacgaatgggagactgatatctgtgtgacagaggttatctctgctcaggaagaccctcctccagccagg

SEQ ID NO: 617613 - DNA, 75 bp, synthetic construct
  source 1..75: mol_type = other DNA
tgcagttgccgggggcggatcaggaggaacggtacaacgttgtgttgttccataaagcctcccgtgtcgccttta

SEQ ID NO: 617614 - DNA, 75 bp, synthetic construct
  source 1..75: mol_type = other DNA
accgtaaagttctcaccggcgacagtcctttcgcagcgaatgcgttgggtaaactggcggcgcaggaaatgctgg

SEQ ID NO: 617615 - DNA, 75 bp, synthetic construct
  source 1..75: mol_type = other DNA
ccgggacccgtgctgacgcgggacctggaacgggtgctggaacgaagcggggaggccccggtctacgggccaaac

SEQ ID NO: 617616 - DNA, 75 bp, synthetic construct
  source 1..75: mol_type = other DNA
gatcaagaacaaatgcttaaagatatgaaagacaaaaaagagtcgatggatcgcacagtcgcaaggtggcttgca

SEQ ID NO: 617617 - DNA, 75 bp, synthetic construct
  source 1..75: mol_type = other DNA
atttatggctgaaccgccacaaggaaaaatccgtattgccggaggtgatgggctgcctgcgtgggcagatattcc

SEQ ID NO: 617618 - DNA, 75 bp, synthetic construct
  source 1..75: mol_type = other DNA
gggatgcgcaatttgatggacacggcctcaccatgtgcaatatgtttcgccagcctaaaccggcgacagaggtga

SEQ ID NO: 617619 - DNA, 75 bp, synthetic construct
  source 1..75: mol_type = other DNA
accatgggtgccggcgtgatggcgctgctgaagttccatccggcacttcaggctgccatcggagccaacgaacgc

SEQ ID NO: 617620 - DNA, 75 bp, synthetic construct
  source 1..75: mol_type = other DNA
gtggatgatgttgtcgctaacgatgatattcaacagaaattaatgggtattaccgcagaaacctacggctttggc

SEQ ID NO: 617621 - DNA, 75 bp, synthetic construct
  source 1..75: mol_type = other DNA
gaaattccaccaccaacacatgaggaacagattgctgcagccgaactggaaaagcagcaactgattaatcaggcc

SEQ ID NO: 617622 - DNA, 75 bp, synthetic construct
  source 1..75: mol_type = other DNA
catgaacagtaagcaatggcccggtaaagcggctattggtcgtctgaaaggtgacgaactgacgcaatataattt

SEQ ID NO: 617623 - DNA, 75 bp, synthetic construct
  source 1..75: mol_type = other DNA
gatattgcgcaggttcaggtgcagaacaaactgcaactggcgatgccattactgccgcaggaagtacagcagcaa

SEQ ID NO: 617624 - DNA, 75 bp, synthetic construct
  source 1..75: mol_type = other DNA
cgcctggcggaacaggcaatgcaggcggttattgcccgtcgcgatgcgtttggcgaagcgcaactggcgcatcgc

SEQ ID NO: 617625 - DNA, 75 bp, synthetic construct
  source 1..75: mol_type = other DNA
ggcgagatggacgacaccgggcttagttggcaacagcgtcttggcgactggtggcaggacgataaaccgtggctg

SEQ ID NO: 617626 - DNA, 75 bp, synthetic construct
  source 1..75: mol_type = other DNA
ccgcgccgctggtattaattgtggtaaacaacaacggcgggcaaattttctcgctgctaccaacgccgacaagcg

SEQ ID NO: 617627 - DNA, 75 bp, synthetic construct
  source 1..75: mol_type = other DNA
ctggataacgctgtcgaaacgttaaatgctggcgaacgaccggtgatacacagtgacagaggtgggcattatcgc

SEQ ID NO: 617628 - DNA, 75 bp, synthetic construct
  source 1..75: mol_type = other DNA
cgatgacccgctcattattacaacagggggttgatctgaacattattatgcaatgtaccggattgacccgggaaa

SEQ ID NO: 617629 - DNA, 75 bp, synthetic construct
  source 1..75: mol_type = other DNA
cgcacgccgaccaccacggtgattgaaatggtggttaacgacaccgatggtgcgcaaacgctccagcaacttctg

SEQ ID NO: 617630 - DNA, 75 bp, synthetic construct
  source 1..75: mol_type = other DNA
tcaggcgattcgccagccgggaatgttcgcctctcaccccatgcatagcatttcactaccgcgtccgacccagga

SEQ ID NO: 617631 - DNA, 75 bp, synthetic construct
  source 1..75: mol_type = other DNA
gtggcaggacgataaaccgtggctgcgtgaagcccctcggctggagagcgaaaaacagcgcgactggttcttctg

SEQ ID NO: 617632 - DNA, 75 bp, synthetic construct
  source 1..75: mol_type = other DNA
cccggcgcaccatcgtggacgtcggctgattgctaatatcgccgactggctggaactgcatccggcagaaaaacg

SEQ ID NO: 617633 - DNA, 75 bp, synthetic construct
  source 1..75: mol_type = other DNA
acggttactgcaatggcaggcaagttgtgagccggaagagtactggattgttgataatatcgaagggcgactcga

SEQ ID NO: 617634 - DNA, 75 bp, synthetic construct
  source 1..75: mol_type = other DNA
ttcgcctctcaccccatgcatagcatttcactaccgcgtccgacccaggatattcccgctcgctggctggtatcc

SEQ ID NO: 617635 - DNA, 75 bp, synthetic construct
  source 1..75: mol_type = other DNA
ccggcctggcaagggctagggcagcaggcaaacggtttggccggccgccggcgcttaaccaggaacagcggcagg

SEQ ID NO: 617636 - DNA, 75 bp, synthetic construct
  source 1..75: mol_type = other DNA
gggtatcaactctggaaaagacaaccaaaaatcaacgtcgggaaatcgaaagtgcaggttttaacatcaaatctc

SEQ ID NO: 617637 - DNA, 75 bp, synthetic construct
  source 1..75: mol_type = other DNA
aggtactcgaacgcattaagtctggggcaagtataagtgctattgccagggaatttcgaaccacacggcaaacaa

SEQ ID NO: 617638 - DNA, 75 bp, synthetic construct
  source 1..75: mol_type = other DNA
gaccttttacttgaacgcactcattccgggatagtaagagcccgcggcgcagggaaacgttttggtcgaccacct

SEQ ID NO: 617639 - DNA, 75 bp, synthetic construct
  source 1..75: mol_type = other DNA
gcagcttcctgatggttgtcggcgttatcaacaccgatggcaccatgacgcaggaggatatctccgactacgtgg

SEQ ID NO: 617640 - DNA, 75 bp, synthetic construct
  source 1..75: mol_type = other DNA
gcgtgctgctgcgtgatgtggcgaaaattgagctgggtggtgagaactacgacatcatcgcagagtttaacggcc

SEQ ID NO: 617641 - DNA, 75 bp, synthetic construct
  source 1..75: mol_type = other DNA
tgcgtatctggatgaacccgaatgaactgaacaaattccagctaacgccggttgatgtcattaccgccatcaaag

SEQ ID NO: 617642 - DNA, 75 bp, synthetic construct
  source 1..75: mol_type = other DNA
cggttgaacaactggctgcttcagatattcgcgttcactgcctcgcgctgggcggagttgatttgacaagcccgg

SEQ ID NO: 617643 - DNA, 75 bp, synthetic construct
  source 1..75: mol_type = other DNA
gggcggctgttatctgacgccggatattgccattaaactggcatccggtcgccaggacccgctaaccaaacgtga

SEQ ID NO: 617644 - DNA, 75 bp, synthetic construct
  source 1..75: mol_type = other DNA
gggtctccactctggagcagaccacagaaaaccagcgtcgtgaaattgaagcggcgggttttgatgttcgtgctc

SEQ ID NO: 617645 - DNA, 75 bp, synthetic construct
  source 1..75: mol_type = other DNA
gtggaacaactgaccgaaacaggtatcagagtgcattgcttagcattggggggcattgacctgaccagtccaaca

SEQ ID NO: 617646 - DNA, 75 bp, synthetic construct
  source 1..75: mol_type = other DNA
tatccgggtgcattgcctggctctgggcggtgtggatctgaccagccctgccggaaagatgaccatgcaggtgat

SEQ ID NO: 617647 - DNA, 75 bp, synthetic construct
  source 1..75: mol_type = other DNA
gaacagtatcagcgctattgcccgggaatttaataccacccggcaaaccatacttcgggtaaaggcaggacagca

SEQ ID NO: 617648 - DNA, 75 bp, synthetic construct
  source 1..75: mol_type = other DNA
gtccggttcaggatgaaaaccgtatcgcaggctccgtgctcggcgcggttgctggtggggtgattggtcatcagt

SEQ ID NO: 617649 - DNA, 75 bp, synthetic construct
  source 1..75: mol_type = other DNA
tcgggattggtgtcgcagctgcgctgggcgtagcggcagtggccagtctgaacgtgtttgaacgtggcccgcaat

SEQ ID NO: 617650 - DNA, 75 bp, synthetic construct
  source 1..75: mol_type = other DNA
cagcgcgaagtgtttgagtttgtcgccagcagcgactacttctccggcccgacgtggatggcgatgtgtaaagcg

SEQ ID NO: 617651 - DNA, 75 bp, synthetic construct
  source 1..75: mol_type = other DNA
cagcagggcaaaatccgcatggaccgcgatccgggtacgcagatcccgttagatggcaacgggcaactgattttg

SEQ ID NO: 617652 - DNA, 75 bp, synthetic construct
  source 1..75: mol_type = other DNA
atccgcatggataaagatcctggcacgcagatccctctcgacagcaatggtcagctgatactgaataacaaagtg

SEQ ID NO: 617653 - DNA, 75 bp, synthetic construct
  source 1..75: mol_type = other DNA
ggcggttatgccggaaaccaggtgcagggcgcgatgcaggaaaatgatacctacactacaacgcagcagcgctgt

SEQ ID NO: 617654 - DNA, 75 bp, synthetic construct
  source 1..75: mol_type = other DNA
cgctgggggagaacgaaaaaacctcaattgcttgcaaagctgaaacgcctggagagacagggacagtttttatta

SEQ ID NO: 617655 - DNA, 75 bp, synthetic construct
  source 1..75: mol_type = other DNA
gcttgatgaaaacgaaaaacaggctttaaaaacgatgattctccgtgaacaagagagtgcatttgcccatgcatc

SEQ ID NO: 617656 - DNA, 75 bp, synthetic construct
  source 1..75: mol_type = other DNA
gcgttagtcatgacccgaattcctatggggagtcgggaacactctctttcatctgaacttatcgcaccaaaaccg

SEQ ID NO: 617657 - DNA, 75 bp, synthetic construct
  source 1..75: mol_type = other DNA
gacactttccagatcgcaaaggcatttggtaagcgtcatgcggacgtattgagggcgctgaaaaattgtcattgc

SEQ ID NO: 617658 - DNA, 75 bp, synthetic construct
  source 1..75: mol_type = other DNA
gcatcgatttccgagaactgatttttgtggcaaacaacgatccggttacagattcttttatggtggcaaaagcat

SEQ ID NO: 617659 - DNA, 75 bp, synthetic construct
  source 1..75: mol_type = other DNA
gcgctgtatcgtcgccgtattcccgcattaaccatgaccgtagcccgacggggaattccttctgcgtgagtgtgc

SEQ ID NO: 617660 - DNA, 75 bp, synthetic construct
  source 1..75: mol_type = other DNA
tgaaaatcgcattgcgggttcggttctgggcgctgtggctggtggggtgatagggcatcagtttggcggtggtcg

SEQ ID NO: 617661 - DNA, 75 bp, synthetic construct
  source 1..75: mol_type = other DNA
gtacccggaatgtgcgatttacgatcgcagcgatgtcgcggtacgtaaaaaagaagggatggagctgacccaggg

SEQ ID NO: 617662 - DNA, 75 bp, synthetic construct
  source 1..75: mol_type = other DNA
gcgccgtcaggagcgaccattcctgccttcgccaggccagttcatcaagtggtgcagggaagggcgcagcgtgct

SEQ ID NO: 617663 - DNA, 75 bp, synthetic construct
  source 1..75: mol_type = other DNA
aatctgctgcgtaacccttatttttgccgggtaatttgcgtaaacgacggctccacggacaataccgaagcggtc

SEQ ID NO: 617664 - DNA, 75 bp, synthetic construct
  source 1..75: mol_type = other DNA
aacttcctgtcatgggcggcagacctctaaatcgtgttcaggcgctggcgaagatcgcagaaattaaagctaagt

SEQ ID NO: 617665 - DNA, 75 bp, synthetic construct
  source 1..75: mol_type = other DNA
agcaagcacaaaaatggcgtgactggctggcgcaaaaagatggcctcgacagctatcgtttaatcgccggagaat

SEQ ID NO: 617666 - DNA, 75 bp, synthetic construct
  source 1..75: mol_type = other DNA
aagaggggatggagctgacccaggggccagtaaccggcgagctgccacctgccctgctgcctattgaagaacatg

SEQ ID NO: 617667 - DNA, 75 bp, synthetic construct
  source 1..75: mol_type = other DNA
gtctggcaatcaccactctcgaacctgtttgtggttcctgtcagtttactatttacgattattgcggtgcattat

SEQ ID NO: 617668 - DNA, 75 bp, synthetic construct
  source 1..75: mol_type = other DNA
cacccactgacggccaactccgggagccgtgattatggcattcaggctctgctaaaaatgccagataacattccg

SEQ ID NO: 617669 - DNA, 75 bp, synthetic construct
  source 1..75: mol_type = other DNA
cagcaaggcaaaatccgcatggatcatgatccaggcacgcagatcccgttggatggcaatgggcaattaattctg

SEQ ID NO: 617670 - DNA, 75 bp, synthetic construct
  source 1..75: mol_type = other DNA
cacgcgcctggtagatgcggagtatgcgaaggagtgcgcgctggagggaatggccagaacgcaggttatctggat

SEQ ID NO: 617671 - DNA, 75 bp, synthetic construct
  source 1..75: mol_type = other DNA
gtgataaaggtattttacttgcggctgtttaacgtaggtaaagccaaaaaaagtggcattgatagcctgcatgcg

SEQ ID NO: 617672 - DNA, 75 bp, synthetic construct
  source 1..75: mol_type = other DNA
tggtaggtgcggtactggcgacgttaacagcatgtactggtcatattgaaaaccgtgataagacctgctcttatg

SEQ ID NO: 617673 - DNA, 75 bp, synthetic construct
  source 1..75: mol_type = other DNA
atgcgcaaatatcgtctaagtgaagaacagcgagcctttagttatcaggatgatggcactaaaaaaagtgtgtta

SEQ ID NO: 617674 - DNA, 75 bp, synthetic construct
  source 1..75: mol_type = other DNA
aacagcgagcctttagttatcaggaagatggcactaaaaaaaatgtgttattacggcagattatcgccattagcg

SEQ ID NO: 617675 - DNA, 75 bp, synthetic construct
  source 1..75: mol_type = other DNA
tgcgcctgcataaaagacttttatttagccgcttcggtatcttcagtatatttcctatgctgttggtggtaatga

SEQ ID NO: 617676 - DNA, 75 bp, synthetic construct
  source 1..75: mol_type = other DNA
aaacgagtttgtaaaaataaacacgctcaagaaaggcataatgccagagtatttctatattatagaggatgattt

SEQ ID NO: 617677 - DNA, 75 bp, synthetic construct
  source 1..75: mol_type = other DNA
aatactttttggacaattaagatatagaataaaggatgacaccagcgatcttaaagagagcttagaagaggctat

SEQ ID NO: 617678 - DNA, 75 bp, synthetic construct
  source 1..75: mol_type = other DNA
gacacgattcatatccgtggtccaaaagtcattaacggcgaggagcgcattacgcgaacgctgctggcagggtta

SEQ ID NO: 617679 - DNA, 75 bp, synthetic construct
  source 1..75: mol_type = other DNA
cttttggagaagctgattatatcgtccgggttggggatgcggacgatttcctggactctcaggagataaaacatg

SEQ ID NO: 617680 - DNA, 75 bp, synthetic construct
  source 1..75: mol_type = other DNA
ggcagatcagttgcgcagcaatgggcataacgtggtgatttaccgcaaccatattccggcgcaaaccttaattga

SEQ ID NO: 617681 - DNA, 75 bp, synthetic construct
  source 1..75: mol_type = other DNA
ggctggctggattgtgcggcaccggtatcaaaccgccagacctgattgccaccattgcatgttctgcctgccacg

SEQ ID NO: 617682 - DNA, 75 bp, synthetic construct
  source 1..75: mol_type = other DNA
cgggaatgccaggtaagaatccctggcgtatgtaatggcaatcctgaaacgtctgtactggcacatatccggctg

SEQ ID NO: 617683 - DNA, 75 bp, synthetic construct
  source 1..75: mol_type = other DNA
ttgtttccacccttaatcggcttggcgctcattgtggacttacgtaaagcggctaaaggccagatgtgccagatc

SEQ ID NO: 617684 - DNA, 75 bp, synthetic construct
  source 1..75: mol_type = other DNA
gtagtcgggaatgccaggtaagaatccctggcgtatgtaatggcaaccctgaaacgtctgtactggcacatatcc

SEQ ID NO: 617685 - DNA, 75 bp, synthetic construct
  source 1..75: mol_type = other DNA
atcgtcggtactggcggtgacggcagcaacagtatcaacatttccaccgccagcgcatttgtcgctgcggcttgc

SEQ ID NO: 617686 - DNA, 75 bp, synthetic construct
  source 1..75: mol_type = other DNA
atgctggcagggcgcgatcttaaagcggtgtttgcactcggggccggtgttgattctattttgagcaagctacag

SEQ ID NO: 617687 - DNA, 75 bp, synthetic construct
  source 1..75: mol_type = other DNA
cggcaaagttaaaggcgcaatgttggatgttttaatcgtgaacccttaccgcctgaaagtccgctctggcaacat

SEQ ID NO: 617688 - DNA, 75 bp, synthetic construct
  source 1..75: mol_type = other DNA
ctgcgcacaggccgaggaaaggaacgactggcactttaatatcggcgcgatgtacgaaatagaaaacgtcgaggg

SEQ ID NO: 617689 - DNA, 75 bp, synthetic construct
  source 1..75: mol_type = other DNA
cgcagcgactgccgcagcatgaggacagcattatgacactggcagaacgtcttaagcaggaaggtatccagcaag

SEQ ID NO: 617690 - DNA, 75 bp, synthetic construct
  source 1..75: mol_type = other DNA
aaatcgtaatttgccacgctgactacccgcataacgaatatgcgttcgacaagccggtcccgaaagacatggtca

SEQ ID NO: 617691 - DNA, 75 bp, synthetic construct
  source 1..75: mol_type = other DNA
gctggcttattaccaggaagggccggtagattatagcgcgggtaaacgtggaacctggtttgatcgcccggaact

SEQ ID NO: 617692 - DNA, 75 bp, synthetic construct
  source 1..75: mol_type = other DNA
atgatttcagtttcggcctgaccggcggtttccgtaattatggttatcactacgttgatgaaccgggtaaagaca

SEQ ID NO: 617693 - DNA, 75 bp, synthetic construct
  source 1..75: mol_type = other DNA
atcaacgccactggcaacattggttcagcgttaagtccgtttatgatcggctggttgaaagatctgaccggcagc

SEQ ID NO: 617694 - DNA, 75 bp, synthetic construct
  source 1..75: mol_type = other DNA
ccgcgctgctggtgattggtgcggggattatctgggcgattccaatgcagtcctcccgtccgcgagcgaccccgt

SEQ ID NO: 617695 - DNA, 75 bp, synthetic construct
  source 1..75: mol_type = other DNA
acaacatgatccagatgctggggatcattatggcttcgaccggatcattcagcgcaatggcgattttctggacaa

SEQ ID NO: 617696 - DNA, 75 bp, synthetic construct
  source 1..75: mol_type = other DNA
ctacgacatcaaagggttggtgctcagtccgttcggcaatgcctcttttgccggggtgtccagggaaaagaaaga

SEQ ID NO: 617697 - DNA, 75 bp, synthetic construct
  source 1..75: mol_type = other DNA
atggatatgaaccatgatctgacgttatccggctgggcgacggacagtaacgatcctgacagttttttccggcca

SEQ ID NO: 617698 - DNA, 75 bp, synthetic construct
  source 1..75: mol_type = other DNA
accatccatggcacaatgtgaacggcagcaatttcccctatttcgacagcctgcagttcgccgataacgttcaaa

SEQ ID NO: 617699 - DNA, 75 bp, synthetic construct
  source 1..75: mol_type = other DNA
ggtctggcagtagaaagtgaaggcgcgaccgtcgtattccttgatgagtttaaaaacaaggaaggcgaaccgatg

SEQ ID NO: 617700 - DNA, 75 bp, synthetic construct
  source 1..75: mol_type = other DNA
ggtctggcagtagaaagcgaaggcgcaaccgtcgtattccttgatgagttcaaaaacaaggaaggcgaaccgatg

SEQ ID NO: 617701 - DNA, 75 bp, synthetic construct
  source 1..75: mol_type = other DNA
tccgtgttccgtaaagcagaaattaacgaagagcaactggctgcagctccggttatcatccgtgaagatcgtgaa

SEQ ID NO: 617702 - DNA, 75 bp, synthetic construct
  source 1..75: mol_type = other DNA
gcgtttaacaccgctaaaccgccgctaaataatcccgctgtccgccatgcgctggcactggcgattaataaccag

SEQ ID NO: 617703 - DNA, 75 bp, synthetic construct
  source 1..75: mol_type = other DNA
actcaaatttgccaaccagatgtatatcgataccggcgcagtattctgcggaaacctcacattgattcaggtaca

SEQ ID NO: 617704 - DNA, 75 bp, synthetic construct
  source 1..75: mol_type = other DNA
catgttcggcatgatgctgggtaaagacggcaaaccgttcaaaacccgcgcgggtggtaccgtgaaactggccga

SEQ ID NO: 617705 - DNA, 75 bp, synthetic construct
  source 1..75: mol_type = other DNA
tgactactctgcgccaaacgtggcgaaagagatgcatgtcggtcacctgcgctctaccattattggtgacgcagc

SEQ ID NO: 617706 - DNA, 75 bp, synthetic construct
  source 1..75: mol_type = other DNA
ttcagttcggcgactatcaggctaacggcatgatggcagttgctaaaaaactgggtatggcaccgcgacaattag

SEQ ID NO: 617707 - DNA, 75 bp, synthetic construct
  source 1..75: mol_type = other DNA
cacttagtgcgatcagcatctggacaccgcagatcctgcaaagttttaatcagggcagcagtaatatcaccatcg

SEQ ID NO: 617708 - DNA, 75 bp, synthetic construct
  source 1..75: mol_type = other DNA
acctgtaccagaacatgcgggccaatgcgttgactgacgcggaattacggcgcaaggctgccgatgaactggcct

SEQ ID NO: 617709 - DNA, 75 bp, synthetic construct
  source 1..75: mol_type = other DNA
ttgcaactggcctggccacaaaaacaggggcgatatcctctgacgtatcatctttttttgggagtgattgctcgt

SEQ ID NO: 617710 - DNA, 75 bp, synthetic construct
  source 1..75: mol_type = other DNA
gccggaagcgtggcctgtatccggatgcagagtcttatccgtggaaatcgaacgcgcattactggctggttacca

SEQ ID NO: 617711 - DNA, 75 bp, synthetic construct
  source 1..75: mol_type = other DNA
agtttgtgttattggtgcttttagcgcctggtttcatcgttgctggttgttggtgcctttagcaccgctttccgt

SEQ ID NO: 617712 - DNA, 75 bp, synthetic construct
  source 1..75: mol_type = other DNA
tgatgcgctcagtgccatgcgttcgctgaaaggcatcggtgccacgcatcttcatgaagggcgcgacccgcgaat

SEQ ID NO: 617713 - DNA, 75 bp, synthetic construct
  source 1..75: mol_type = other DNA
ttgctgcggcatttggacgggcagccgcacactatgagcaacacgccgatctacagcgccagagtgctgacgcct

SEQ ID NO: 617714 - DNA, 75 bp, synthetic construct
  source 1..75: mol_type = other DNA
tgcgctgactgacgcggaattacggcgcaaggctgccgatgaactgtcctgtatgaccgcgcgaattaaccgtgg

SEQ ID NO: 617715 - DNA, 75 bp, synthetic construct
  source 1..75: mol_type = other DNA
cctgggtcttcgccttgatgctcccaccggaaaacccggttggacagaactgatcaatgccgactgcgaacaact

SEQ ID NO: 617716 - DNA, 75 bp, synthetic construct
  source 1..75: mol_type = other DNA
tttattgtgacggcatatgacacgaaggcgatgcattccctgaccgaatttcttgctgttaacgaggactatttt

SEQ ID NO: 617717 - DNA, 75 bp, synthetic construct
  source 1..75: mol_type = other DNA
atgagtaaacccattgtgatggaacgcggagttaaataccgcgatgccgataagatggcccttatcccggttaaa

SEQ ID NO: 617718 - DNA, 75 bp, synthetic construct
  source 1..75: mol_type = other DNA
gcatcatggtgtggttctggcttgatgactcaccggacaaagctaagtggctgacgaaagaagacaaaaaatgcc

SEQ ID NO: 617719 - DNA, 75 bp, synthetic construct
  source 1..75: mol_type = other DNA
cctgccataccggagagtatcgatccggcgaatcagcataaagcgctgactgccggacaacaggcggttattaag

SEQ ID NO: 617720 - DNA, 75 bp, synthetic construct
  source 1..75: mol_type = other DNA
gcataaagcgctgactgccggacaacaggcggttattaagaagctatttcgccgcctgatcgtctttctgttcgt

SEQ ID NO: 617721 - DNA, 75 bp, synthetic construct
  source 1..75: mol_type = other DNA
gatattgcgcgtcagcttcagaaaacgggaatgccatctgcacaaatctgtcagatcaccggactttctgaagcc

SEQ ID NO: 617722 - DNA, 75 bp, synthetic construct
  source 1..75: mol_type = other DNA
cgtttccgctggttgatatcactgtcgttgatgacaatgaaatcatgaaccatcgccggatggccgcactgacgc

SEQ ID NO: 617723 - DNA, 75 bp, synthetic construct
  source 1..75: mol_type = other DNA
tgctgctggcgggtaactgggcaattttgccgggggtatggcaatgggcggtggggcgttttatcccaacactga

SEQ ID NO: 617724 - DNA, 75 bp, synthetic construct
  source 1..75: mol_type = other DNA
cgcctcacccgccgtcacgtgatgaaaggattactgctgttgctcggcgctggcggaggctggcagctctggcag

SEQ ID NO: 617725 - DNA, 75 bp, synthetic construct
  source 1..75: mol_type = other DNA
ctggattatttggatgtacatttgctcgcctggctacggacgctgggaaaaaatgtcttattattgaaaaacgca

SEQ ID NO: 617726 - DNA, 75 bp, synthetic construct
  source 1..75: mol_type = other DNA
tggaaaatctgctgcactatctggtggcgctgttagaccaccctaccagcaagcatcggatattcgaagccgctg

SEQ ID NO: 617727 - DNA, 75 bp, synthetic construct
  source 1..75: mol_type = other DNA
acgacgctcaggcctttgcccgctggcgaccggagtacggttattttgccaaacaggcggggtttaccgttaaaa

SEQ ID NO: 617728 - DNA, 75 bp, synthetic construct
  source 1..75: mol_type = other DNA
atataatttttggggggaggctcgctgaatataaatattatgatatgcatcaagtcattcgctctgcgcttaaca

SEQ ID NO: 617729 - DNA, 75 bp, synthetic construct
  source 1..75: mol_type = other DNA
cctgggcgggtcggcgctggtggggcgcgatctgtcgttcaaactgatgaaaattggctatcgcgtggcctgcga

SEQ ID NO: 617730 - DNA, 75 bp, synthetic construct
  source 1..75: mol_type = other DNA
cctgggcgggtcggcgctggtggggcgcgatctgtcgttcaaactgatgaaaattggttatcgcgtggcctgtga

SEQ ID NO: 617731 - DNA, 75 bp, synthetic construct
  source 1..75: mol_type = other DNA
atgtacaaatcgctatctcttacagcggcagtaaaaaagagattgtcttgtgcgcagaagcggcacgaaagcagg

SEQ ID NO: 617732 - DNA, 75 bp, synthetic construct
  source 1..75: mol_type = other DNA
gccggagctactcacccgtctgcgtggcaagctgccgattatcggtatttgcctcggtcatcaggcgattgtcga

SEQ ID NO: 617733 - DNA, 75 bp, synthetic construct
  source 1..75: mol_type = other DNA
gcgcaaaccgttcttgaggtactgcgtagtggttccgcttacgacagagtcaccgcactggcggcacgagggtaa

SEQ ID NO: 617734 - DNA, 75 bp, synthetic construct
  source 1..75: mol_type = other DNA
aggctatttctttagtcggctttgatatttatgaaaaattgatcaaaggatatactgaaaagcaatggggaagaa

SEQ ID NO: 617735 - DNA, 75 bp, synthetic construct
  source 1..75: mol_type = other DNA
aaggaacgttatttctttggcaatattttatggcaaacccgagcgctgatggaccgggcgatcggccataaactc

SEQ ID NO: 617736 - DNA, 75 bp, synthetic construct
  source 1..75: mol_type = other DNA
tttgatcggctgctgaaaaagctcagcgttgaagccgctctcaatgctgagatgacacaccatcttgggtatgag

SEQ ID NO: 617737 - DNA, 75 bp, synthetic construct
  source 1..75: mol_type = other DNA
gaatatgaggatggtgacgaatatttctatcctgtaaatgataaaaaaaataattctaggtatgctaaatataag

SEQ ID NO: 617738 - DNA, 75 bp, synthetic construct
  source 1..75: mol_type = other DNA
tgcggaatataaatattatgacatgcatcaagttatcaaatcagctttaaatgcattccgaaaagaggtacgttt

SEQ ID NO: 617739 - DNA, 75 bp, synthetic construct
  source 1..75: mol_type = other DNA
atgacagccgatgcggaagccgctgtcagcgaagccctgcgcgacctggccttctggctgtaccgtcaactggaa

SEQ ID NO: 617740 - DNA, 75 bp, synthetic construct
  source 1..75: mol_type = other DNA
gtccacgttacttcatgctcaacaagccccagggctatgtttgctcaactgatgacccggatcacccaacggtgc

SEQ ID NO: 617741 - DNA, 75 bp, synthetic construct
  source 1..75: mol_type = other DNA
ggcgtacagctgcataacgaaaaagatctcactaagcctgcggtgctggaagtgattaccccaacgcaggttcgt

SEQ ID NO: 617742 - DNA, 75 bp, synthetic construct
  source 1..75: mol_type = other DNA
tctggcatccgcacggtatgccggggctgttttactggttattgatgatccccgcgcatctgtttatttttcgcg

SEQ ID NO: 617743 - DNA, 75 bp, synthetic construct
  source 1..75: mol_type = other DNA
ggcgttactggaccatccagcctgggaacatcgcattttcgaagccgccggaccagaggtgctcagttatcaaca

SEQ ID NO: 617744 - DNA, 75 bp, synthetic construct
  source 1..75: mol_type = other DNA
atctgcaaacgggcgatgcggtggatagctggaaagtgattgtcgtcgagccggaaaaacaacttaccctgttat

SEQ ID NO: 617745 - DNA, 75 bp, synthetic construct
  source 1..75: mol_type = other DNA
cgacattattgcgctggcgtatcaggaagggcgtgaaatcgtcgccgttcatccgcaacgtttaagcgaagtaga

SEQ ID NO: 617746 - DNA, 75 bp, synthetic construct
  source 1..75: mol_type = other DNA
cataaatatggtgctcatatttttcacactaatgaaaaagaaatctgggaatatgtgaattcttttgttgaattt

SEQ ID NO: 617747 - DNA, 75 bp, synthetic construct
  source 1..75: mol_type = other DNA
ctgggttgttcggttctatatgcgcaagagaactaaaaaagaaaaataagaaagtcctggtgcttgagcggagag

SEQ ID NO: 617748 - DNA, 75 bp, synthetic construct
  source 1..75: mol_type = other DNA
atgtacaaatcgctatctcttacagcggcagtaaaaagagattgtcttgtgcgcagaagcggcacgaaagcaggg

SEQ ID NO: 617749 - DNA, 75 bp, synthetic construct
  source 1..75: mol_type = other DNA
gctgcctgcgtttttctgccgaaccagcccatttgatgtcagcattcgtctcgacagtgcccgcgaaattgctcg

SEQ ID NO: 617750 - DNA, 75 bp, synthetic construct
  source 1..75: mol_type = other DNA
tcgacagcgccagcgaaattgcccgtgcgatggcggtgaaatggcaaagcggtctgaacggtggcctggtggtgg

SEQ ID NO: 617751 - DNA, 75 bp, synthetic construct
  source 1..75: mol_type = other DNA
gattattgcggcgcttgccggaattaaagtatttgccattggcggtattggcggtgttcatcgcggggcggaaaa

SEQ ID NO: 617752 - DNA, 75 bp, synthetic construct
  source 1..75: mol_type = other DNA
cagcgctatgacatgctgcatggtgtttttcgtaaacagaaaactgtaagcaaatcgggaaaatggctcgcccgc

SEQ ID NO: 617753 - DNA, 75 bp, synthetic construct
  source 1..75: mol_type = other DNA
tattctcgatttaggattaacaacagaatatttagaaaccttcggtgtgccgttaattggctatcagacaaaagc

SEQ ID NO: 617754 - DNA, 75 bp, synthetic construct
  source 1..75: mol_type = other DNA
cgaacccgatcccggaacagtttgcgatgccagaagaaaccatcaatgcagcaattgatcaagccgttgctgaag

SEQ ID NO: 617755 - DNA, 75 bp, synthetic construct
  source 1..75: mol_type = other DNA
ctggcgtcgcggagtcctgggataataaagatgccaaagtctggacattccatctgcgtaaagatgcgaaatggt

SEQ ID NO: 617756 - DNA, 75 bp, synthetic construct
  source 1..75: mol_type = other DNA
cgttccgtacttctataaattacttgttcacccatcaacttcaccggtgccaaaagccgctatcgagaaattcgg

SEQ ID NO: 617757 - DNA, 75 bp, synthetic construct
  source 1..75: mol_type = other DNA
ttgccggtattgatgaaattctcgaagggaaaaaaccgattaccgatctcggcgtgaaagccatcgatgatcaca

SEQ ID NO: 617758 - DNA, 75 bp, synthetic construct
  source 1..75: mol_type = other DNA
atccgattgcggaaaagcacgtcgatgggacgatgtcactggctgagcttagcgcggccgcgctacagtacagcg

SEQ ID NO: 617759 - DNA, 75 bp, synthetic construct
  source 1..75: mol_type = other DNA
ttgtatatagctggcaacgttctgttgatccaaatacggcgtctccctacgcaagctacctgcaatatggtcaca

SEQ ID NO: 617760 - DNA, 75 bp, synthetic construct
  source 1..75: mol_type = other DNA
cactttatggttcgctttccggttatctgggcggtaaagtggattcggtaatgatgcgtctgctggaaatcctca

SEQ ID NO: 617761 - DNA, 75 bp, synthetic construct
  source 1..75: mol_type = other DNA
ccacttatccagcatcctgaaataccatcactgagtttgtattctgccgatattgcattccagcgctatgacatg

SEQ ID NO: 617762 - DNA, 75 bp, synthetic construct
  source 1..75: mol_type = other DNA
cagtaccggggactatcgcgctgtttggctgtttcttaatcatgatcatcatccttgccgtcctggcgctgattg

SEQ ID NO: 617763 - DNA, 75 bp, synthetic construct
  source 1..75: mol_type = other DNA
agactttcccgcaggtaatgcgcgtggtgtcgtttctgcgatgggattccgaccaaaaaatggtgagattatttt

SEQ ID NO: 617764 - DNA, 75 bp, synthetic construct
  source 1..75: mol_type = other DNA
tccaccagcgttacggcaatcgctatgacctgacgcgagatgttgacggcttctactgtcgtgaagttgtgaagc

SEQ ID NO: 617765 - DNA, 75 bp, synthetic construct
  source 1..75: mol_type = other DNA
gttaccgatttactgtttgttggccttgtgcaactcaatgatgtggagtcattgaaaatgattcagcgcagcagt

SEQ ID NO: 617766 - DNA, 75 bp, synthetic construct
  source 1..75: mol_type = other DNA
atgattaatccaaatccaaatccaaagcgttctgacgaaccggtattctggggcctcttcggggccggtggtatg

SEQ ID NO: 617767 - DNA, 75 bp, synthetic construct
  source 1..75: mol_type = other DNA
cgacaaacgtactgacaaagaaactccgtacgttccaatcccggaaggcggcgtgaagatctcttcgcaccacta

SEQ ID NO: 617768 - DNA, 75 bp, synthetic construct
  source 1..75: mol_type = other DNA
tcctggcttccgatggaaaaaacagaaaaagatccggtcagtggcgtatggacagtaaggaactcagggaaatga

SEQ ID NO: 617769 - DNA, 75 bp, synthetic construct
  source 1..75: mol_type = other DNA
cttcagcaacaacagcaggaaatctggcaacaatatttcccgcagatcaaacgaacgcacaactttcgtttttac

SEQ ID NO: 617770 - DNA, 75 bp, synthetic construct
  source 1..75: mol_type = other DNA
ggcaacgttatttcccgcagatcaaacgcacccacaattttcgtttttactttaagcagcaactcgctcagcaat

SEQ ID NO: 617771 - DNA, 75 bp, synthetic construct
  source 1..75: mol_type = other DNA
gctcacccgcctgtctcgttctcgccattctttcttttgttggcagccggggcatcgcgctctggcaaacgctta

SEQ ID NO: 617772 - DNA, 75 bp, synthetic construct
  source 1..75: mol_type = other DNA
actggcactggacggttgtcgataaacaaaacgaaagtgtcgaggtgataggcattcagtcggagaaactcagtc

SEQ ID NO: 617773 - DNA, 75 bp, synthetic construct
  source 1..75: mol_type = other DNA
tctccaggaaacccggggcggttcaggcttattcgcagtgccgcacatgccttcaacgaactggatgaacactgg

SEQ ID NO: 617774 - DNA, 75 bp, synthetic construct
  source 1..75: mol_type = other DNA
cgaagttctggctcaatgtgctgactgaactgaaaaaccgcggtctgaacgatatcctcatcgcctgtgtggatg

SEQ ID NO: 617775 - DNA, 75 bp, synthetic construct
  source 1..75: mol_type = other DNA
cgtgcggcagtgaaagccggtcttggtgtgacagcaaggccggtcgagatgatgagtcctgatctgcgtgtgctg

SEQ ID NO: 617776 - DNA, 75 bp, synthetic construct
  source 1..75: mol_type = other DNA
ggcacttatatcaaaggtcaccgatgctgtgatggagcaggttgtaggatggcaaaaccgaccactggatgctgt

SEQ ID NO: 617777 - DNA, 75 bp, synthetic construct
  source 1..75: mol_type = other DNA
ctggaactgcgtactccgcgcgatcgtgacggtaccttcgaaccacaactggtaaagaaaaatcagacccgtatt

SEQ ID NO: 617778 - DNA, 75 bp, synthetic construct
  source 1..75: mol_type = other DNA
gaagctggcaggctaactggccgaatcttgccacgttcttcgcttatccaacggacatccgcaaagtgaaccgcc

SEQ ID NO: 617779 - DNA, 75 bp, synthetic construct
  source 1..75: mol_type = other DNA
cagcgtgtacccgcagacacatatccagctgtgtatcatccatatggtgcgcaacagcctgaaatacgtgtcgtg

SEQ ID NO: 617780 - DNA, 75 bp, synthetic construct
  source 1..75: mol_type = other DNA
acgccaaaatccatcgtaagcctgctggttaacatgctggaaccttacaaaggccgagtttttgacccctgctgt

SEQ ID NO: 617781 - DNA, 75 bp, synthetic construct
  source 1..75: mol_type = other DNA
accggcaaagctgttcctgaatactcagatccctgctgcattatggtttatgcgccgtgaccgtcataacagcaa

SEQ ID NO: 617782 - DNA, 75 bp, synthetic construct
  source 1..75: mol_type = other DNA
tctcctaaagggcaagcgggtgttgttctggcaaaaggggcattaacttctaaaagctctggtgaaggtgatatt

SEQ ID NO: 617783 - DNA, 75 bp, synthetic construct
  source 1..75: mol_type = other DNA
cgctttacggctcttaaagccgagtttgaagcacaactggaagaagaaacacgcttgaataaggctatcgctgat

SEQ ID NO: 617784 - DNA, 75 bp, synthetic construct
  source 1..75: mol_type = other DNA
accctccgtttaacatctccgactggtctggtgagcagcttcgtggagatgcccgctggcaatatggcattccac

SEQ ID NO: 617785 - DNA, 75 bp, synthetic construct
  source 1..75: mol_type = other DNA
attctgtttattgatgcccggaatttaggccatttaattaatcgtcgaaccaaagtcctgtctgactacgatatt

SEQ ID NO: 617786 - DNA, 75 bp, synthetic construct
  source 1..75: mol_type = other DNA
taaggttcgtcacggcgggagtgtcattaacaaagcggtgttcctcgcgcggggcatcaataccgacggtcagaa

SEQ ID NO: 617787 - DNA, 75 bp, synthetic construct
  source 1..75: mol_type = other DNA
ggagctttgataaactatttatttttattatttttgtggttcctggatttattagtataaaagtgtacgaagcac

SEQ ID NO: 617788 - DNA, 75 bp, synthetic construct
  source 1..75: mol_type = other DNA
atgaaaaaacatctttttactctgacactctcttctgtattggcgataccagcagtatctcatgcagaatttaaa

SEQ ID NO: 617789 - DNA, 75 bp, synthetic construct
  source 1..75: mol_type = other DNA
atgaaaaaacatcttctgactctttcctctttattagccatacctgttatatctcatgcagaatttaaaagtgga

SEQ ID NO: 617790 - DNA, 75 bp, synthetic construct
  source 1..75: mol_type = other DNA
atttttctcttggatgcgaacttggcgttggttatgtaattatatgccacatcctaccggaagagcttgggatta

SEQ ID NO: 617791 - DNA, 75 bp, synthetic construct
  source 1..75: mol_type = other DNA
aattacgcagtatggtttgctcctatatattttatagaatctgagggtgtatatctcaaacatcctgttctttat

SEQ ID NO: 617792 - DNA, 75 bp, synthetic construct
  source 1..75: mol_type = other DNA
tgctgctcagacagataaagacgcagttttaaaaaaactcaatgatgcgacatcccgcagcgacgtgatgtcgaa

SEQ ID NO: 617793 - DNA, 75 bp, synthetic construct
  source 1..75: mol_type = other DNA
tacgacgccgatgtctcgcccacgctgatatccaaagtgaccgatgcgcttaaagaacaggtctctgaatggcaa

SEQ ID NO: 617794 - DNA, 75 bp, synthetic construct
  source 1..75: mol_type = other DNA
acacgacgaatgccatcgaatcgctgaacagcgtcattcggcaggcgataaagaagcgcaaggtgttcccaacgg

SEQ ID NO: 617795 - DNA, 75 bp, synthetic construct
  source 1..75: mol_type = other DNA
tcaaaatggacgcaacttcccctctgcggctttcagctgcacacccacattcgcgccagcggctcatgcatcaca

SEQ ID NO: 617796 - DNA, 75 bp, synthetic construct
  source 1..75: mol_type = other DNA
gctgagccttgttcatgcgctgtacgaaggtaatccgcagccggtttttgccaatacggaaaaattgaacgatgc

SEQ ID NO: 617797 - DNA, 75 bp, synthetic construct
  source 1..75: mol_type = other DNA
tgaaaggcttcccggaagcgataaatagcgtatacccgcagacgcatattcagctctgcatcatccatatggtgc

SEQ ID NO: 617798 - DNA, 75 bp, synthetic construct
  source 1..75: mol_type = other DNA
ggctgggtgtactgactgagctgaaaaatcgtggccttcaggacatcctgattgcctgcgtggacggcctgaaag

SEQ ID NO: 617799 - DNA, 75 bp, synthetic construct
  source 1..75: mol_type = other DNA
ggtaaacaaggcgggcagttctatacaccaaaatccattgtaagcctgctggttaacatgctggaaccctataaa

SEQ ID NO: 617800 - DNA, 75 bp, synthetic construct
  source 1..75: mol_type = other DNA
gaaaatgccctggcgatcagccgtgtgccgcagactcaaaaagaaggctggcgtcgtccggtaaagaaaaagtaa

SEQ ID NO: 617801 - DNA, 75 bp, synthetic construct
  source 1..75: mol_type = other DNA
attattgcgctggcgtatcaggaagggcgtgaaatcgtcgccgttcatccgcaacgtttaagcgaagtagaaggc

SEQ ID NO: 617802 - DNA, 75 bp, synthetic construct
  source 1..75: mol_type = other DNA
agacgacaacctgaactgggtgcttcaggcagagcagctgggtacgggtcatgcgatgcagcaggccgcaccttt

SEQ ID NO: 617803 - DNA, 75 bp, synthetic construct
  source 1..75: mol_type = other DNA
cgtagctgcgaaagcaaataccaatgacagactgaacgcagatttaaacagcatcttcgttgctatcgaaagttc

SEQ ID NO: 617804 - DNA, 75 bp, synthetic construct
  source 1..75: mol_type = other DNA
tgtcagtagctacgttgaatctgaagatacccgtgaagttatcgatatcacggtactcaatgcagagctgaaaac

SEQ ID NO: 617805 - DNA, 75 bp, synthetic construct
  source 1..75: mol_type = other DNA
aaaaaagcgcgtctgggtaaaggctcgaaagctggtcatctgacttacctgggcgatgcggaaattggcgataac

SEQ ID NO: 617806 - DNA, 75 bp, synthetic construct
  source 1..75: mol_type = other DNA
taacaccgttaaggataaaaatgcccgcctggccgcggttctgaaaggggttgaagggttaaagcttggcgactt

SEQ ID NO: 617807 - DNA, 75 bp, synthetic construct
  source 1..75: mol_type = other DNA
tgttagagaggaagagcaacgattagaacaaataaggctatgggtgatagcacagcgtgggccggcaatgacatg

SEQ ID NO: 617808 - DNA, 75 bp, synthetic construct
  source 1..75: mol_type = other DNA
gataccgatgttgagattgtcaaagggctggaagcgggcgatgaagtggtgattggtgaggccaaaccaggagct

SEQ ID NO: 617809 - DNA, 75 bp, synthetic construct
  source 1..75: mol_type = other DNA
tatcagcgaaaatttttccagttatatggaaaatggtgatgacagcatctgttatgcggcacttgatgacggcat

SEQ ID NO: 617810 - DNA, 75 bp, synthetic construct
  source 1..75: mol_type = other DNA
cgaactgttcaaaaaagagactaacaacaacattctgaccgatgcccatatcgaaaaaattatgcaggtatttgc

SEQ ID NO: 617811 - DNA, 75 bp, synthetic construct
  source 1..75: mol_type = other DNA
gaaaatccgtcagtatctggttgacaataactatgtcgaaaccgtgatttcactggctccgaacctgttctttgg

SEQ ID NO: 617812 - DNA, 75 bp, synthetic construct
  source 1..75: mol_type = other DNA
gccatcaaaactaaaggctacttcatctaccccagtcagcttttctgcaacgtagctgcgaaagcaaataccaat

SEQ ID NO: 617813 - DNA, 75 bp, synthetic construct
  source 1..75: mol_type = other DNA
ttttctaccgtggtggcgcagagcagaaaattcgtaaatacctggtcgacaacaactatgttgaaacggtgattt

SEQ ID NO: 617814 - DNA, 75 bp, synthetic construct
  source 1..75: mol_type = other DNA
gctgcgattgtctgctttccgggcattttctaccgtggtggcgcagagcagaaaattcgtaaatacctggtcgac

SEQ ID NO: 617815 - DNA, 75 bp, synthetic construct
  source 1..75: mol_type = other DNA
cacggtcagcaaaatcgaccagttacgccaagacattgatgcgatcgtggctagaattgaaggcagagaggtaca

SEQ ID NO: 617816 - DNA, 75 bp, synthetic construct
  source 1..75: mol_type = other DNA
tagcgggttaagttttgaaacggggaaatgcattgctgacttcaaaaaaccatttgaagttgtaccacagagcca

SEQ ID NO: 617817 - DNA, 75 bp, synthetic construct
  source 1..75: mol_type = other DNA
atgtttagggacgcctgatggaaggaacctgctaaaaatgacgtgtaattcaacagataagaaaactttgttttc

SEQ ID NO: 617818 - DNA, 75 bp, synthetic construct
  source 1..75: mol_type = other DNA
cacttgcaccgaatctgttcttcggcaccaccattgccgttaacattctggtgttgtctaaacacaaaacagata

SEQ ID NO: 617819 - DNA, 75 bp, synthetic construct
  source 1..75: mol_type = other DNA
gacatcaaaggtttgtttgctgatttcgataccaccagtaaccgcctgggtaacaccgttaaggataaaaatgcc

SEQ ID NO: 617820 - DNA, 75 bp, synthetic construct
  source 1..75: mol_type = other DNA
gtcaggcggtgagttctttacaccgcagcacgtctccaagctgattgcacaactggctatgcacgggcagaccag

SEQ ID NO: 617821 - DNA, 75 bp, synthetic construct
  source 1..75: mol_type = other DNA
ctaactatgcggcgaatgccggtaagtcaggcggtgagttctttacaccgcagcacgtctccaagctgattgcac

SEQ ID NO: 617822 - DNA, 75 bp, synthetic construct
  source 1..75: mol_type = other DNA
tcgaacagattatgcaggtatttgccagcaaggaagatgttgctcatctggcaaaatctgtcgcgttcgaagccg

SEQ ID NO: 617823 - DNA, 75 bp, synthetic construct
  source 1..75: mol_type = other DNA
aattactgatgacattaaagacgatgccatcaaaaccaaaggctacttcatctaccccagtcagcttttctgcaa

SEQ ID NO: 617824 - DNA, 75 bp, synthetic construct
  source 1..75: mol_type = other DNA
atgacaagtattcaacaacgagcagaactgcaccgccagatatggcaaattgctaacgatgtcagaggttcggtc

SEQ ID NO: 617825 - DNA, 75 bp, synthetic construct
  source 1..75: mol_type = other DNA
ttaggctctggcggtacaggacgattgtcgaaactcctgaccggggagtgcgacgtcctggcctggcctgccgcc

SEQ ID NO: 617826 - DNA, 75 bp, synthetic construct
  source 1..75: mol_type = other DNA
attttttccgcggtgctttagcaccatttcacaaataccgacaaaatgctttgttggatgccactatcgcactta

SEQ ID NO: 617827 - DNA, 75 bp, synthetic construct
  source 1..75: mol_type = other DNA
ttaatggcaacagaaaagctcaattagcccccgttaagggaggaggatcagggaattccgccacgatgggcgctc

SEQ ID NO: 617828 - DNA, 75 bp, synthetic construct
  source 1..75: mol_type = other DNA
tgcaccgccattaagcaatgacggaatgaaacagaatctttctaatctcgttcctgatcaatataaaggcgctgg

SEQ ID NO: 617829 - DNA, 75 bp, synthetic construct
  source 1..75: mol_type = other DNA
cggcctctattttaccgcgcgcctcgtgggcctatgacaacgaggctaaaattactgaatacaatccggcgaaat

SEQ ID NO: 617830 - DNA, 75 bp, synthetic construct
  source 1..75: mol_type = other DNA
atgcatctggacgattaattgtcgatattggtgattacaacatgcggtacatgggatcagtcaatcttaatgtat

SEQ ID NO: 617831 - DNA, 75 bp, synthetic construct
  source 1..75: mol_type = other DNA
atggcacaaggtctacaatgctggaatgcagcagggcagatagtagtagatttgggtgattataatatgcgttat

SEQ ID NO: 617832 - DNA, 75 bp, synthetic construct
  source 1..75: mol_type = other DNA
ttaagaacacagttacatttagtgtagataaagacagcttgaaaaaagcgaaagactctattacaagcctaaaag

SEQ ID NO: 617833 - DNA, 75 bp, synthetic construct
  source 1..75: mol_type = other DNA
tcgctaacgcagagacacaaggagagctaatccaacgtgcaaggcttggcggtgtagacgttaaccagatgtaca

SEQ ID NO: 617834 - DNA, 75 bp, synthetic construct
  source 1..75: mol_type = other DNA
ctttaaaaaatacagtaacctttgttaccgatcataaaagtctgaataaagctaaagcagaagttgaaaaactcc

SEQ ID NO: 617835 - DNA, 75 bp, synthetic construct
  source 1..75: mol_type = other DNA
cagacagctttcacagctttctgatgcaagacaagtagcattcgtagacggctttatgaaatctcttgatccaaa

SEQ ID NO: 617836 - DNA, 75 bp, synthetic construct
  source 1..75: mol_type = other DNA
cgcctacaacagcaacaacgtaagattaatggcaacagaaaagctcaattagcccccgttaagggaggaggatca

SEQ ID NO: 617837 - DNA, 75 bp, synthetic construct
  source 1..75: mol_type = other DNA
accgaaaacagaaactgttaaaacagattgagcaacaacgacagacactgggcctgttaaaggcagactggctca

SEQ ID NO: 617838 - DNA, 75 bp, synthetic construct
  source 1..75: mol_type = other DNA
cgtctgatgcaatccatctattatggtacggctgaaacggcagcctctattttaccgcgcgcctcgtgggcctat

SEQ ID NO: 617839 - DNA, 75 bp, synthetic construct
  source 1..75: mol_type = other DNA
gggcttcagattatcccgttatcagaagtcgcagcgaaggatgagtttctgaatatcaagaacgtgagccgggac

SEQ ID NO: 617840 - DNA, 75 bp, synthetic construct
  source 1..75: mol_type = other DNA
cctgcactggcaaaatacacccggcgcggacttgaccttgaaacatactggtttgtgcaatacagcctgacgaca

SEQ ID NO: 617841 - DNA, 75 bp, synthetic construct
  source 1..75: mol_type = other DNA
gctttccattacggaaaaacgtcagcaggaaatagccttcaccgacaaattgtacgccgccgattctcgcctggt

SEQ ID NO: 617842 - DNA, 75 bp, synthetic construct
  source 1..75: mol_type = other DNA
acggcagatggtatgagccaccggtcagctttaccggtctggcaaaaagcctgcgtgctgccgtgcatcacagct

SEQ ID NO: 617843 - DNA, 75 bp, synthetic construct
  source 1..75: mol_type = other DNA
gtctggtctgaaaacatcaatgtcgcgtaaaggtaactgttacgacaacgctccgatgggaaagcttctggggaa

SEQ ID NO: 617844 - DNA, 75 bp, synthetic construct
  source 1..75: mol_type = other DNA
gcgtgccaccacagatgatggggattatgccaagtaatgttggcgggtttggggatgtggagaaggccagttgcg

SEQ ID NO: 617845 - DNA, 75 bp, synthetic construct
  source 1..75: mol_type = other DNA
cttaattaagaccacaccgatattattcaatattgtacgttatcttggcgcgttttatttgctctatctggggag

SEQ ID NO: 617846 - DNA, 75 bp, synthetic construct
  source 1..75: mol_type = other DNA
gtacggctgaaacggcggcctctattttaccgcgcgcctcgtgggcttatgacaacgaggctaaaattaccgaat

SEQ ID NO: 617847 - DNA, 75 bp, synthetic construct
  source 1..75: mol_type = other DNA
aggtcgttttcaggaggcgcggttgatggatatgagccatgatctgacgttatccggttgggcgacggacagtaa

SEQ ID NO: 617848 - DNA, 75 bp, synthetic construct
  source 1..75: mol_type = other DNA
gcgcacacgccggttgaggcaaaggacaatcttaagtccacgcagatgatgagcgtgattgatgccattggtgaa

SEQ ID NO: 617849 - DNA, 75 bp, synthetic construct
  source 1..75: mol_type = other DNA
gattgaagtcttcttgctggcgtcaaaactgggtaactccgaagcgctggtggtaaagaaaactcttatgacctt

SEQ ID NO: 617850 - DNA, 75 bp, synthetic construct
  source 1..75: mol_type = other DNA
gcggcaggtttcgacgttgccgataacgaaattgtccggcagtgtgaagcgggcgatttggtgatcaccgcagat

SEQ ID NO: 617851 - DNA, 75 bp, synthetic construct
  source 1..75: mol_type = other DNA
taatgtgtctgaacaatacaaagctattgcacaagctaaagctattgctcacgaatatgagaagggcgctattag

SEQ ID NO: 617852 - DNA, 75 bp, synthetic construct
  source 1..75: mol_type = other DNA
ccgaccaccatcaaaatgattgaactgatgggtggttcacccactccaatttcatttggcgaagtttatactgcg

SEQ ID NO: 617853 - DNA, 75 bp, synthetic construct
  source 1..75: mol_type = other DNA
acttcaaaaaaagatccaaaacaagctgctttgttagagaagttcgacaacgctgctcaataatattccgggcca

SEQ ID NO: 617854 - DNA, 75 bp, synthetic construct
  source 1..75: mol_type = other DNA
acatgctgagcaacgcacgctgcgtcagcgcctggtcgcgctgcatggacagattgttccccaacaaaaacgcct

SEQ ID NO: 617855 - DNA, 75 bp, synthetic construct
  source 1..75: mol_type = other DNA
catttttattgtgttggtgccagggccaaataccctgtttgtactcaaaaatagcgtcagtagcggtatgaaagg

SEQ ID NO: 617856 - DNA, 75 bp, synthetic construct
  source 1..75: mol_type = other DNA
ccgcactctggccgcttctggcatcaaagacttccgtaaaatgctggcacactgcgaagcggttactccgattcg

SEQ ID NO: 617857 - DNA, 75 bp, synthetic construct
  source 1..75: mol_type = other DNA
ggtatgttttttattcagaggctcactcttgcacaaagcatgtatctgaaagaaatctggggttatctgacccat

SEQ ID NO: 617858 - DNA, 75 bp, synthetic construct
  source 1..75: mol_type = other DNA
agcgatgaaagagcgtattccggtgcagatcaaagtgaaaaagatcaacggcctgggctacagcaaactggaaag

SEQ ID NO: 617859 - DNA, 75 bp, synthetic construct
  source 1..75: mol_type = other DNA
cattggcgggttatgcactgacattgccacaggaagatgaagaagagagctggttggcgacacgtcagcaagaag

SEQ ID NO: 617860 - DNA, 75 bp, synthetic construct
  source 1..75: mol_type = other DNA
gcgccgtcaggcgcaaacgttgaccgctcagacagcagaaacgctggtacagcatcagcatcaccgacctgacgg

SEQ ID NO: 617861 - DNA, 75 bp, synthetic construct
  source 1..75: mol_type = other DNA
acaggaacacgaccgcttccgtcagtggaacaacgaactggcgggttggcgtgcgcagttctcccaacaaaccag

SEQ ID NO: 617862 - DNA, 75 bp, synthetic construct
  source 1..75: mol_type = other DNA
ctgccttcctgaatgccaaaccgaaagagcgcgcggaattgctggaggagttaaccggcaccgaaatttacgggc

SEQ ID NO: 617863 - DNA, 75 bp, synthetic construct
  source 1..75: mol_type = other DNA
tcaaggcgagattcgccagcagctgaagcaggatgcagataaccgtcagcaacaacaaaccttaatgcagcaaat

SEQ ID NO: 617864 - DNA, 75 bp, synthetic construct
  source 1..75: mol_type = other DNA
gagcgggtggtctttgtggacaaaaacgtccgcgttggttttccgccggcgcttaacggcaagctccgggtacag

SEQ ID NO: 617865 - DNA, 75 bp, synthetic construct
  source 1..75: mol_type = other DNA
gctgaatatgtagttgataagaaaactggtaaaggagaatggaagggcggcgatagcggcatcaatactttaatg

SEQ ID NO: 617866 - DNA, 75 bp, synthetic construct
  source 1..75: mol_type = other DNA
agaatggcccgtctggcactgtccggcagcaatcgtatccgcttctatgaagtgctgaaaatgcaaatcatgagc

SEQ ID NO: 617867 - DNA, 75 bp, synthetic construct
  source 1..75: mol_type = other DNA
ggtgataatgacacgggctttaaacaaaatggcgatggtaatctggatgtttatgctaataacgtccatgttatg

SEQ ID NO: 617868 - DNA, 75 bp, synthetic construct
  source 1..75: mol_type = other DNA
attgcacaagcgcgtgagatagccaaacaatacgaacaaggcgctatcagcctggcacgtatgaacagccaaatg

SEQ ID NO: 617869 - DNA, 75 bp, synthetic construct
  source 1..75: mol_type = other DNA
gaaaaacagtgccgcacagcaagctatgcaagctccagcttacacctttgcacctgttcttaacttcaatccaga

SEQ ID NO: 617870 - DNA, 75 bp, synthetic construct
  source 1..75: mol_type = other DNA
aggcgctggcgctgcattcttggctatgagtaaagcaaatgaattcgttgctaacagttttgccaatgctgagac

SEQ ID NO: 617871 - DNA, 75 bp, synthetic construct
  source 1..75: mol_type = other DNA
ttcaagattcacgaaatgggatttccgtaagtagtgatattgacatcaccaaagagttgggtgctggtgacctgc

SEQ ID NO: 617872 - DNA, 75 bp, synthetic construct
  source 1..75: mol_type = other DNA
gtgaataataaccagcttacgttgcagcaaatgtccaatacgctgaatttattaataaatgctcgttcagatatg

SEQ ID NO: 617873 - DNA, 75 bp, synthetic construct
  source 1..75: mol_type = other DNA
ggatgcgggcgtctatctcgacagcgccgcgaccgcgcttaaacctgaagccgtggttgaagccacccgacagtt

SEQ ID NO: 617874 - DNA, 75 bp, synthetic construct
  source 1..75: mol_type = other DNA
gtcgacgttgcaaccgagttgaagatcgccttctctgacgctatcaaagcttggtttgctgaaaatcagcagagc

SEQ ID NO: 617875 - DNA, 75 bp, synthetic construct
  source 1..75: mol_type = other DNA
aaacctattaatgagtgcacgttctgattttcagtcactgcaatacagaactatttcaggaatatcctttggtaa

SEQ ID NO: 617876 - DNA, 75 bp, synthetic construct
  source 1..75: mol_type = other DNA
ttaacaaagttggcgtatttcaggctgcacttatcatgtttgcttatatgtacgaggcacaaagccagctatcaa

SEQ ID NO: 617877 - DNA, 75 bp, synthetic construct
  source 1..75: mol_type = other DNA
ttctttcagcaacgcttgttacttcatctggtgcgttggctgctaccgcgctagcaccatttgaaggggtgtcct

SEQ ID NO: 617878 - DNA, 75 bp, synthetic construct
  source 1..75: mol_type = other DNA
cacgctatttcttaatagctgcccaactgccgatcctgattacgttaagaaaattcttaagaaatttggacggct

SEQ ID NO: 617879 - DNA, 75 bp, synthetic construct
  source 1..75: mol_type = other DNA
tgcttacaggtgcattgctttcctctgctggcgcttctgctgtcgagctgaacgcctttgaaggggtgtctactg

SEQ ID NO: 617880 - DNA, 75 bp, synthetic construct
  source 1..75: mol_type = other DNA
ttcagcttatccgggaatcgacgttcgaatccaggcggtcgatcgccaggaagataaactggcggatgatgttga

SEQ ID NO: 617881 - DNA, 75 bp, synthetic construct
  source 1..75: mol_type = other DNA
cgcacgccatttaagcttcacgcgcgcagcagaagagctttttgtgacccaggccgcagtaagtcatcaaatcaa

SEQ ID NO: 617882 - DNA, 75 bp, synthetic construct
  source 1..75: mol_type = other DNA
taaatcatatcaacgttcagcaaggaccaatttttagccatagcgccatggtgctgcaagcggctatccacgggc

SEQ ID NO: 617883 - DNA, 75 bp, synthetic construct
  source 1..75: mol_type = other DNA
agcgaggggatcgtggagatgtatcgcgttgaccctgggttaaccggtccactgatggagatggtgcagatgatg

SEQ ID NO: 617884 - DNA, 75 bp, synthetic construct
  source 1..75: mol_type = other DNA
atacaggagtaccgcaacaagcggtgataaatcgcgctcaaacctataaggggccgtgtcacgaagatattcgaa

SEQ ID NO: 617885 - DNA, 75 bp, synthetic construct
  source 1..75: mol_type = other DNA
atgcaaccacttacataccaacagactagcggatttagcccgactgcggtgataaatcgttctcaaacaaaacag

SEQ ID NO: 617886 - DNA, 75 bp, synthetic construct
  source 1..75: mol_type = other DNA
gcagcatcactcggaagccttcgctgcaagaaggtagatgaatgcagtggaagtatttgcctgccaaacgtagcc

SEQ ID NO: 617887 - DNA, 75 bp, synthetic construct
  source 1..75: mol_type = other DNA
ctctggttgcgtcagagcagataaagcagcatcactcggaagccttcgctgtaagaaagcagatgaagtcgagct

SEQ ID NO: 617888 - DNA, 75 bp, synthetic construct
  source 1..75: mol_type = other DNA
atgcaaccacttacataccaacagactagcggatttattccgactgcggtgataaatcgttctcaaacaaaacaa

SEQ ID NO: 617889 - DNA, 75 bp, synthetic construct
  source 1..75: mol_type = other DNA
ttactgctgacagccctcggcacgatcgaacatagggtcaaaggactggaactgggtgcggacgattatctggtt

SEQ ID NO: 617890 - DNA, 75 bp, synthetic construct
  source 1..75: mol_type = other DNA
ggatgctaaaaacggctgcgtttgttgttcctgctgctggtgtcgtaggcggagcagcgaaggcatacgaaagcc

SEQ ID NO: 617891 - DNA, 75 bp, synthetic construct
  source 1..75: mol_type = other DNA
gctgctgtcgattttgcgtcggaaagaaacctgccgttaatgaccagtgacacgctgaaagataaaacctttatg

SEQ ID NO: 617892 - DNA, 75 bp, synthetic construct
  source 1..75: mol_type = other DNA
ggccgcccgaaacacatctacagcatctggcgcaaaatgcagaaaaagaaccttgcctttgacgagctgtttgat

SEQ ID NO: 617893 - DNA, 75 bp, synthetic construct
  source 1..75: mol_type = other DNA
atccatcaacatggtggcgcaatgctatgcccgtccgcgtctgcaaccgggcgatgagattattgtcagcgtggc

SEQ ID NO: 617894 - DNA, 75 bp, synthetic construct
  source 1..75: mol_type = other DNA
gacttcgtttcttgctaatgcgttagcgttcacaccagcgggcagggctggaacggtgcttggtgccatagggaa

SEQ ID NO: 617895 - DNA, 75 bp, synthetic construct
  source 1..75: mol_type = other DNA
gatgagtattttgctggtcagtcagcaccaacacaacaaggtgttcagcaatcgccagcagacaactctcttgcg

SEQ ID NO: 617896 - DNA, 75 bp, synthetic construct
  source 1..75: mol_type = other DNA
caaagggttaaccgaagccggttttgtggtcgatttggccgacaacgggctgaatggctaccatctggcgatgac

SEQ ID NO: 617897 - DNA, 75 bp, synthetic construct
  source 1..75: mol_type = other DNA
catcagtttgatgggggatactcctgttgacatcactggaacagtgaaagcaattgatgcgcagatttccaagtt

SEQ ID NO: 617898 - DNA, 75 bp, synthetic construct
  source 1..75: mol_type = other DNA
caaggggctgactgaagccggattcgtggtcgatcatgctgataatggcctgaccggctatcatctcgccatgac

SEQ ID NO: 617899 - DNA, 75 bp, synthetic construct
  source 1..75: mol_type = other DNA
tgttgaagtcgaagcagaaaacggccagaccggattcgctgtttcgacagccggtgaaatgggctgttttatcgt

SEQ ID NO: 617900 - DNA, 75 bp, synthetic construct
  source 1..75: mol_type = other DNA
aaaatcgacaacgactttgagccgaagctaatccagactgtgcgtggcgtgggctatatgcttgaggtgccggat

SEQ ID NO: 617901 - DNA, 75 bp, synthetic construct
  source 1..75: mol_type = other DNA
caaggggttaactgaggccggttttgtggtcgatttagccgacaacgggctgaacggctaccatctggcgatgac

SEQ ID NO: 617902 - DNA, 75 bp, synthetic construct
  source 1..75: mol_type = other DNA
aagctgttccgcttcctcgataacaaattcgattctgaaaaataccgaaataacgtgcgtgaactgaccccggca

SEQ ID NO: 617903 - DNA, 75 bp, synthetic construct
  source 1..75: mol_type = other DNA
atggataagtggtatgagccgcccgtgagctttgacggcctggcccgcacttaccgtgccgccatacatcacagc

SEQ ID NO: 617904 - DNA, 75 bp, synthetic construct
  source 1..75: mol_type = other DNA
agatggtatgagccaccagtcagctttaccggtctggcaaaaagcctgcgtgctgccgtgcatcacagctccccg

SEQ ID NO: 617905 - DNA, 75 bp, synthetic construct
  source 1..75: mol_type = other DNA
cgctggtatgagccgcccgtcagctttgacggactggcacgaaccttccgcgccgccgtgcatcacagctcaccg

SEQ ID NO: 617906 - DNA, 75 bp, synthetic construct
  source 1..75: mol_type = other DNA
atatccgcactcgcgaaacatatggaacccggcggctccagacggagctggcagagaatggcatcatcgttggtc

SEQ ID NO: 617907 - DNA, 75 bp, synthetic construct
  source 1..75: mol_type = other DNA
atgaatccgccaccctgtttcgtcgcaagtattaccagaatggcgcgcacgcgggttacatcatgtacgtcaccg

SEQ ID NO: 617908 - DNA, 75 bp, synthetic construct
  source 1..75: mol_type = other DNA
tcattcgaccagccgcacccgttcgcgccgggatctgtattccacctgctggagcctgacatcaaccaggagctg

SEQ ID NO: 617909 - DNA, 75 bp, synthetic construct
  source 1..75: mol_type = other DNA
gagccgacagccttcgcgcccggctccgtgtttcacctgctggagccggatatcaatcaggagctgtacggcctg

SEQ ID NO: 617910 - DNA, 75 bp, synthetic construct
  source 1..75: mol_type = other DNA
gccatgggagagcgcatgacaaaagagctgacaggtaaagccctgtttatggcgctcaggagccagcgcccacct

SEQ ID NO: 617911 - DNA, 75 bp, synthetic construct
  source 1..75: mol_type = other DNA
ccagtacctatatccctcatccgctgctcagccaacaggctttttcgcgttttgtgcaggactatctggtatttg

SEQ ID NO: 617912 - DNA, 75 bp, synthetic construct
  source 1..75: mol_type = other DNA
tcatacaggagcagtttggtctgaaaacatcaatgtcgcgtaaaggtaactgttacgacaacgctccgatggaaa

SEQ ID NO: 617913 - DNA, 75 bp, synthetic construct
  source 1..75: mol_type = other DNA
gagcctgagccactatcgttttaataaccgggatgaagccatctcagtaatacgggaatacattgagattttcta

SEQ ID NO: 617914 - DNA, 75 bp, synthetic construct
  source 1..75: mol_type = other DNA
gttgtgttcctaaacattatattatctggctactgatttccgtattactggcagttaaagccttcgcgttttctc

SEQ ID NO: 617915 - DNA, 75 bp, synthetic construct
  source 1..75: mol_type = other DNA
aaggacgggcttcagatcattcctctgtcagaagtcgcggcgaaggatgagtttctgaatatcaagaacgtgagc

SEQ ID NO: 617916 - DNA, 75 bp, synthetic construct
  source 1..75: mol_type = other DNA
cataattgcacagcagaactgattccagcagatccagaagccaccgcacacgccggactatggattggtaagagt

SEQ ID NO: 617917 - DNA, 75 bp, synthetic construct
  source 1..75: mol_type = other DNA
catcactgtacagccgaactgattccagcagatccagaaaacaccgcgcacgcagggctttggataggtaaaagt

SEQ ID NO: 617918 - DNA, 75 bp, synthetic construct
  source 1..75: mol_type = other DNA
ttttgtcaggaatgagttagggcatctacaatcgcgaatgaaggaattgaactcatggataggtgaaacagttat

SEQ ID NO: 617919 - DNA, 75 bp, synthetic construct
  source 1..75: mol_type = other DNA
cggtatcggtctggcgctggtggtggcagatattgtggtgttaatctggcttttgaccaatcgacgattacgcgc

SEQ ID NO: 617920 - DNA, 75 bp, synthetic construct
  source 1..75: mol_type = other DNA
cggtattggtctggcgctggtggtggcggattttgtggcgttaatctggttgttgaccaatcgacgtttacgcgc

SEQ ID NO: 617921 - DNA, 75 bp, synthetic construct
  source 1..75: mol_type = other DNA
ctcgcagactggtccgaacggtgcaagccagtcttaccgctatgtcgattttaataagcgatggaaggcggccta

SEQ ID NO: 617922 - DNA, 75 bp, synthetic construct
  source 1..75: mol_type = other DNA
tatcagaatgtcctgacgcgggagccaactaacgctgatgccattcttggcctgacggaagtggatatcgctgcc

SEQ ID NO: 617923 - DNA, 75 bp, synthetic construct
  source 1..75: mol_type = other DNA
tcatcatgtacatgaccgatgccgcgcaaaaccaggaggatgtgaacaacctccgcaatgcgatgaaaagcgcca

SEQ ID NO: 617924 - DNA, 75 bp, synthetic construct
  source 1..75: mol_type = other DNA
ttcagcttcggcgatcccgttccggttctggaccgccgtgaactactggactatgtggaatgcgtacagacagat

SEQ ID NO: 617925 - DNA, 75 bp, synthetic construct
  source 1..75: mol_type = other DNA
ccgacggcattaaaattatcccgctcagtgaagtggcaacgaaggacgatttttttaatatcaaaaaagccagcg

SEQ ID NO: 617926 - DNA, 75 bp, synthetic construct
  source 1..75: mol_type = other DNA
gacgatttttttaatatcaaaaaagccagcgccgctgacctgctggacgcgcaccgcatcccctttcagttgatg

SEQ ID NO: 617927 - DNA, 75 bp, synthetic construct
  source 1..75: mol_type = other DNA
cagctaacgttgatgccattcttggcctgacggaagtggatatcgccgccggtgacaaagcggcggcacgcagcc

SEQ ID NO: 617928 - DNA, 75 bp, synthetic construct
  source 1..75: mol_type = other DNA
ccgctaacccagcgaattaccgttgagatgctgaacaccagtggtgcgcaggttgttgctgttggcaatgccgcg

SEQ ID NO: 617929 - DNA, 75 bp, synthetic construct
  source 1..75: mol_type = other DNA
acgttaaccaaatgaatgaactgcgtctcagcgccctgcgggtgcagcaaatggtgatgactctgaggctggagc

SEQ ID NO: 617930 - DNA, 75 bp, synthetic construct
  source 1..75: mol_type = other DNA
ttgctgggaatagtttcactttgcgcactgattctgatcctctggcgtgtggtttatcgttcagtcactcgccca

SEQ ID NO: 617931 - DNA, 75 bp, synthetic construct
  source 1..75: mol_type = other DNA
aatatggtgcggatgtcagcattgttcacgacgttgttcgtgaactgatggaagaaaagcgcgccagccgtcagg

SEQ ID NO: 617932 - DNA, 75 bp, synthetic construct
  source 1..75: mol_type = other DNA
gaaaaagtgatggtgatggctggtagtgaaatttatcgcctccatgctgtcgggagcgagaacgggggcgaggca

SEQ ID NO: 617933 - DNA, 75 bp, synthetic construct
  source 1..75: mol_type = other DNA
cagcaatcgtctgcaaactctcgcccaaaataacatcgcccagttcgcacagtttagtagcgaagtcagccaact

SEQ ID NO: 617934 - DNA, 75 bp, synthetic construct
  source 1..75: mol_type = other DNA
atgagatcgcacgcctggcgcaaggtcaggcgaataatgcggcaacctccgctggagcgacccaggccgggattt

SEQ ID NO: 617935 - DNA, 75 bp, synthetic construct
  source 1..75: mol_type = other DNA
accaacctgttgagcaacgccctgcgtttcaccgacgaagggcacattatcctgcgtagtcgcactgatggcgag

SEQ ID NO: 617936 - DNA, 75 bp, synthetic construct
  source 1..75: mol_type = other DNA
tcaggcaaataacgcggcaacctcagccggagcgacccaggccgggatatatgatttgatcgaacaacatcagcg

SEQ ID NO: 617937 - DNA, 75 bp, synthetic construct
  source 1..75: mol_type = other DNA
tgggcgatccacgacgtattcgtcaggttataaccaacctgttgagcaacgccctgcgttttactgacgaagggt

SEQ ID NO: 617938 - DNA, 75 bp, synthetic construct
  source 1..75: mol_type = other DNA
atgcattccgctttgcgactcaacctttttcaccttagtgcaccgaccgtgaatttaaccctgacccgaagactc

SEQ ID NO: 617939 - DNA, 75 bp, synthetic construct
  source 1..75: mol_type = other DNA
gatgcgcagttaatgggcgtagagaagatccacgaatggctggcattatttaaacaacatgccttgccgcttctc

SEQ ID NO: 617940 - DNA, 75 bp, synthetic construct
  source 1..75: mol_type = other DNA
tggcggcggatgttgtcgagccgcgctattaccaggcgattctggatggcgtggaacagtttggcccttatttcg

SEQ ID NO: 617941 - DNA, 75 bp, synthetic construct
  source 1..75: mol_type = other DNA
cagaaaccggttgctaaagtcgtgaatgacaacgcaccgcaaactgcgaaagagccggattatctggatatccca

SEQ ID NO: 617942 - DNA, 75 bp, synthetic construct
  source 1..75: mol_type = other DNA
actcgtccgggtttgatgaacgtggactttgcagacgtacgcaccgtaatgtctgaaatgggctacgcaatgatg

SEQ ID NO: 617943 - DNA, 75 bp, synthetic construct
  source 1..75: mol_type = other DNA
ggacaaacgtcctgaaatcactctggtgaccaataagcaggttcagcagccagtgatggatcgctaccagcagca

SEQ ID NO: 617944 - DNA, 75 bp, synthetic construct
  source 1..75: mol_type = other DNA
gttcacgacgttgttcgtgagctgatggaagaaaagcgtgccagccgtcaggtgacagttccggcggtgatgctg

SEQ ID NO: 617945 - DNA, 75 bp, synthetic construct
  source 1..75: mol_type = other DNA
tcacgacgttgttcgtgaactgatggaagaaaagcgcgccagccgtcaggtgacagttccggcggtgatgctgga

SEQ ID NO: 617946 - DNA, 75 bp, synthetic construct
  source 1..75: mol_type = other DNA
gttggccgtaatgcggctgatgaggatcgcgatgcactgcgtgcggcgctggaaggtgcagacatggtctttatt

SEQ ID NO: 617947 - DNA, 75 bp, synthetic construct
  source 1..75: mol_type = other DNA
atgaaattacgtgattcgctggcggaaaataaatccattcgtctgcaggccgaagctgaaacctggcaggacgcg

SEQ ID NO: 617948 - DNA, 75 bp, synthetic construct
  source 1..75: mol_type = other DNA
atcctcatcaccatggcggcggtcgatgccaacacgcaccaggaagtaggcatcatgcagatcgtcaacctgttt

SEQ ID NO: 617949 - DNA, 75 bp, synthetic construct
  source 1..75: mol_type = other DNA
gaagatgaagagaattttgaccgtttacgcgcctgccgcaccgagcaggaagtgcttgatttaattgaccgcacc

SEQ ID NO: 617950 - DNA, 75 bp, synthetic construct
  source 1..75: mol_type = other DNA
gatggctccgctgacccaggagcagaagccggttgctaaagtcgtgaatgacaatgcgccgcaaactgcgaaaga

SEQ ID NO: 617951 - DNA, 75 bp, synthetic construct
  source 1..75: mol_type = other DNA
gaagaaaagcgcgtcagccgtcaggtgacagtcccggcggtgatgctggaaaaagtgatggcgctggcaggcagt

SEQ ID NO: 617952 - DNA, 75 bp, synthetic construct
  source 1..75: mol_type = other DNA
tggtgcggatgtcagcgttgttcacgacgttgttcgtgaactgatggaggaaaagcacgccagccgtcaggtgac

SEQ ID NO: 617953 - DNA, 75 bp, synthetic construct
  source 1..75: mol_type = other DNA
atctcccgttcattacgtcagcaaggggaactggtggggcggcgtctgcaactacgccagcaacaacggcaactc

SEQ ID NO: 617954 - DNA, 75 bp, synthetic construct
  source 1..75: mol_type = other DNA
tgctggtgggctacggttttgtggcggcggtgctgccggtgtggttgctgctggctccgcgtgactacctctcta

SEQ ID NO: 617955 - DNA, 75 bp, synthetic construct
  source 1..75: mol_type = other DNA
tgcccgggaaggcattccgtgtctctgccagtgtggcagccggtatgacagaacgtggtctggtcagaatgcaat

SEQ ID NO: 617956 - DNA, 75 bp, synthetic construct
  source 1..75: mol_type = other DNA
atgaacaagtcagggaaatacctcgtctggacagtgctctctgtaatgggagcatttgctctgggatacattgct

SEQ ID NO: 617957 - DNA, 75 bp, synthetic construct
  source 1..75: mol_type = other DNA
atcagggcgtggtcgatccgctgggcggtattaacactttgtggccgctgtttggtattgccaaccagatgctgg

SEQ ID NO: 617958 - DNA, 75 bp, synthetic construct
  source 1..75: mol_type = other DNA
cctgtggtgcggtgtcaggcttccatgcgctgatctcttccggcaccacgccgaagatgctggcaaacgaagggc

SEQ ID NO: 617959 - DNA, 75 bp, synthetic construct
  source 1..75: mol_type = other DNA
ggtatcagcgcagccggataccgtgactgatacggctgatctggtcacggttgtggcactggtgacgctgcatac

SEQ ID NO: 617960 - DNA, 75 bp, synthetic construct
  source 1..75: mol_type = other DNA
ctgatgaacggcctgaactacgccacctgcgaccaggtttttttaagcgatgctgacacctatgttccgcccgat

SEQ ID NO: 617961 - DNA, 75 bp, synthetic construct
  source 1..75: mol_type = other DNA
gaaccgcgatgtcagtttgacgggaacgaaagaagaactggcgcttcgtgtggcagagctggaagaagagcttga

SEQ ID NO: 617962 - DNA, 75 bp, synthetic construct
  source 1..75: mol_type = other DNA
gaggcccttgtaggcatttgtgctgccgggaacggcgttccgtgtcccctgccggcgtgtctacctcaaatgact

SEQ ID NO: 617963 - DNA, 75 bp, synthetic construct
  source 1..75: mol_type = other DNA
tccgacctgggcaccgtactttgactttaccggcgtgcagctgacctggatgctggtgggctacggttttgtggc

SEQ ID NO: 617964 - DNA, 75 bp, synthetic construct
  source 1..75: mol_type = other DNA
tccgcgatgtgctggatacagacgtgccggacagtgaatgcgtttttgccgtggtgctgacccgtggggatgtgc

SEQ ID NO: 617965 - DNA, 75 bp, synthetic construct
  source 1..75: mol_type = other DNA
gccacatagcccaggactggaacctgtcagacgatgagctggaaaccgtcatgcagcggctggacgatgcctttg

SEQ ID NO: 617966 - DNA, 75 bp, synthetic construct
  source 1..75: mol_type = other DNA
tgacagtcccggcggtgatgctggaaaaagtgttggcgctggcaggcagtgaaatgaagcgcctgtatgccgtcg

SEQ ID NO: 617967 - DNA, 75 bp, synthetic construct
  source 1..75: mol_type = other DNA
ggtgcgagaacgggggcgacggtgacgcatttgtcagggaagaacgtgagattatgcgggtgatgcgtcaggcgc

SEQ ID NO: 617968 - DNA, 75 bp, synthetic construct
  source 1..75: mol_type = other DNA
ttgctgattaacggacggggcggcaataccgtccctgtaaaggcgacgagaacatgtactgttaaagaaattatc

SEQ ID NO: 617969 - DNA, 75 bp, synthetic construct
  source 1..75: mol_type = other DNA
tgaacgttgaagaaatcgactgtctgtcttttctgccttacctgtttggcaacgattttctgtatgccgaggcat

SEQ ID NO: 617970 - DNA, 75 bp, synthetic construct
  source 1..75: mol_type = other DNA
ccaacggcgaaagaaacgccatatgagccgatgccggaaaatgtcgaagagatcgtggcgcaggcgaaaggcgcg

SEQ ID NO: 617971 - DNA, 75 bp, synthetic construct
  source 1..75: mol_type = other DNA
tttttatgtgctgcttgcttacgcaatatgggtgacttatggactttcgagcttctttaccggacgcgagcccgt

SEQ ID NO: 617972 - DNA, 75 bp, synthetic construct
  source 1..75: mol_type = other DNA
gccgtaccgtcacctggcaggctccgtttatcaagccagatcgcgaagacgactacaaagtggcctgggcgttct

SEQ ID NO: 617973 - DNA, 75 bp, synthetic construct
  source 1..75: mol_type = other DNA
gtatcgttagagcggctttccttgtttgctaatttgtatgatgagctaggtatacctgcgattgaggccagatta

SEQ ID NO: 617974 - DNA, 75 bp, synthetic construct
  source 1..75: mol_type = other DNA
accgcgtggtattccgtaacgaaaccctgcaacagattatccaggcgatgtcgttaagccgcccgggcaaagggc

SEQ ID NO: 617975 - DNA, 75 bp, synthetic construct
  source 1..75: mol_type = other DNA
ctgctttgttccctctgataaacttgtcggggggattaagaacgatcaagatgaatggaatcttgaagggcatcc

SEQ ID NO: 617976 - DNA, 75 bp, synthetic construct
  source 1..75: mol_type = other DNA
actaaccttcatcaaagtatagaggaatatgcgttacctgattttgttgaaacagctcatcacttatctgctcgt

SEQ ID NO: 617977 - DNA, 75 bp, synthetic construct
  source 1..75: mol_type = other DNA
cccacgggtttcgtggaaagaacaggatgaagacgagccgaggaaggtgacggattattatcgcttggctctgag

SEQ ID NO: 617978 - DNA, 75 bp, synthetic construct
  source 1..75: mol_type = other DNA
aattacgtgcggcggtatatccgaggctgagggcgcattttcagtttcagaatgagttaaatttgtttgttgaag

SEQ ID NO: 617979 - DNA, 75 bp, synthetic construct
  source 1..75: mol_type = other DNA
agtcactgaagttgcggagcacaccaccggcgatctgtttgccgaagaaggcctgctgcgagaagagtcttcgct

SEQ ID NO: 617980 - DNA, 75 bp, synthetic construct
  source 1..75: mol_type = other DNA
tgacggaacgactaaacggcatacccaatttccggaagacacatcacaatggattctatctggaccacatttcta

SEQ ID NO: 617981 - DNA, 75 bp, synthetic construct
  source 1..75: mol_type = other DNA
ctgacctgaaaaacggctttgtctttaacgtcgacagcccggagtggaccggcggtgactgcaccgatcaagcta

SEQ ID NO: 617982 - DNA, 75 bp, synthetic construct
  source 1..75: mol_type = other DNA
cgcagctcccccaggatttcttcgccaatctgaccccagagtggcagcgtaactgcgctttacgctctgactaca

SEQ ID NO: 617983 - DNA, 75 bp, synthetic construct
  source 1..75: mol_type = other DNA
tccgtttatcaagccggatcgcgaagacgactacaaagtggcctgggcgttctttgcacaagataaggagagcgc

SEQ ID NO: 617984 - DNA, 75 bp, synthetic construct
  source 1..75: mol_type = other DNA
cgggcgttctgtttgtggtgactgatgcttatcgtccggcaccgcaatcagccgttcacgcattttgccatgtgc

SEQ ID NO: 617985 - DNA, 75 bp, synthetic construct
  source 1..75: mol_type = other DNA
tgtctggcgctgtatcacgaaactccgcgcctctctaacgtttcacaatcgcaaaatgatctcatgacccgcgat

SEQ ID NO: 617986 - DNA, 75 bp, synthetic construct
  source 1..75: mol_type = other DNA
cttttatcaaagccaaagaagcatcgccctggaaaaatgaaccgttaatgcggccagttaactcaaactatgctc

SEQ ID NO: 617987 - DNA, 75 bp, synthetic construct
  source 1..75: mol_type = other DNA
attgtcggtttacatggcgacgaagtaaaagtcgccattaccgcaccgccggtcgacggccaggccaacaaccat

SEQ ID NO: 617988 - DNA, 75 bp, synthetic construct
  source 1..75: mol_type = other DNA
gcgcatcaaaacgctggaagctcaacgtgcacagttacaggcgggtcagccttgcccactttgtggttccaccag

SEQ ID NO: 617989 - DNA, 75 bp, synthetic construct
  source 1..75: mol_type = other DNA
ttcacccgttcgatgctgctttcgcaggggcaatttgctgccttcctgaatgccaaacccaaagaacgcgcggaa

SEQ ID NO: 617990 - DNA, 75 bp, synthetic construct
  source 1..75: mol_type = other DNA
gaaaaccaccctgctggacgccatttgtctggcgctgtatcacgaaactccgcgcctttctaacgtttcacaatc

SEQ ID NO: 617991 - DNA, 75 bp, synthetic construct
  source 1..75: mol_type = other DNA
ccgatctctctgcaggtatctccggcgaagtggttcacgttgacggcggtttcagcatcgcggcaatgaacgaac

SEQ ID NO: 617992 - DNA, 75 bp, synthetic construct
  source 1..75: mol_type = other DNA
tgctgaatccggggtctgctctgctgaccctgtcctacctgggcgctgaacgcgctatcccgaactacaacgtga

SEQ ID NO: 617993 - DNA, 75 bp, synthetic construct
  source 1..75: mol_type = other DNA
ttgcaatggttttgccgtctggtgggcgttaccgaaacagaattactcgaagagatagcccagctttcaccagca

SEQ ID NO: 617994 - DNA, 75 bp, synthetic construct
  source 1..75: mol_type = other DNA
atgagtgccgtaacagttaacgatgacggtctggttttacggctctatattcagccgaaagccagccgtgattct

SEQ ID NO: 617995 - DNA, 75 bp, synthetic construct
  source 1..75: mol_type = other DNA
ttctacaatcgtcagcgtcgtcactctcgtctggggaatatctccccggcagccttcagggaaaaatatcatcag

SEQ ID NO: 617996 - DNA, 75 bp, synthetic construct
  source 1..75: mol_type = other DNA
ggtcatcttcacattggacagagtaaaacaggagccaaaattgccattccgctggctctaaccattgacgcactc

SEQ ID NO: 617997 - DNA, 75 bp, synthetic construct
  source 1..75: mol_type = other DNA
acagcgggtgaaaatgtacattgccgacaacaacgttttcggcgtggacttaaacccggtggcggtggaactggc

SEQ ID NO: 617998 - DNA, 75 bp, synthetic construct
  source 1..75: mol_type = other DNA
tggtgtaatgagatttgtggaaccaagatagcactcgaacgacgaagtaaagaacgcgaaaaagcggaaaaggca

SEQ ID NO: 617999 - DNA, 75 bp, synthetic construct
  source 1..75: mol_type = other DNA
caatagttgtcacatttaaacgtaaagaatttttgtgcaaaatacttgattcgttgattagacaaacatttccta

SEQ ID NO: 618000 - DNA, 75 bp, synthetic construct
  source 1..75: mol_type = other DNA
aaaagagcagtcgaagttataggattaccagagccgcgctttttcatattttgcgatgatattgactatgctatt

SEQ ID NO: 618001 - DNA, 75 bp, synthetic construct
  source 1..75: mol_type = other DNA
tagctcttttttgcctcttatctggagatgtggatctggcgaaacatctggctgaaatattgccaataacctgtt

SEQ ID NO: 618002 - DNA, 75 bp, synthetic construct
  source 1..75: mol_type = other DNA
atgcactgtagaggctgcggttttatccgtgaggactggcagcaagatttccagcctcttaacggtgggtctgtg

SEQ ID NO: 618003 - DNA, 75 bp, synthetic construct
  source 1..75: mol_type = other DNA
agctgaaagcgagatatccgtaccagaatggctcgctcattctgagggaacgacggtaattttgattgcagaaca

SEQ ID NO: 618004 - DNA, 75 bp, synthetic construct
  source 1..75: mol_type = other DNA
agtttaaaagcgcacttagcaaggtttgtggtttccatgcaaacgcaattacatctctttcatatcttgggcgtg

SEQ ID NO: 618005 - DNA, 75 bp, synthetic construct
  source 1..75: mol_type = other DNA
caggtgctggagtggggcagcaaaagcaccccttacggcatcaagtgggaaaaggacagcgaagataacgggctg

SEQ ID NO: 618006 - DNA, 75 bp, synthetic construct
  source 1..75: mol_type = other DNA
tgcgcatgacgtgatttttggtgacctggaaacagaagagccgtgggagcgccttgacgcgtatctgaaacaggt

SEQ ID NO: 618007 - DNA, 75 bp, synthetic construct
  source 1..75: mol_type = other DNA
acgcaaagcatcgagagaacaaccactggcaagcaaaggtcaggcaagttcttcaagatgccaggttctttattc

SEQ ID NO: 618008 - DNA, 75 bp, synthetic construct
  source 1..75: mol_type = other DNA
gagccgcatgaatttgcctgagttcgttgaagcccttgagctggccgttatgaatattcatgacgcctgtgagcg

SEQ ID NO: 618009 - DNA, 75 bp, synthetic construct
  source 1..75: mol_type = other DNA
ctgttgcgggatgacttcctttcgttcctcggagagcctgcacacctgatctggtggcaccctccttactgggac

SEQ ID NO: 618010 - DNA, 75 bp, synthetic construct
  source 1..75: mol_type = other DNA
agctggaacgcattgagttattggccaaaattgcccatgtttacgaaagtaaccagagagaaaaaacaatcgctt

SEQ ID NO: 618011 - DNA, 75 bp, synthetic construct
  source 1..75: mol_type = other DNA
agtatcaaaagacaattttcgtctactgaaatgtggaatgagacaactagacagaaagataaaacaataaaaaaa

SEQ ID NO: 618012 - DNA, 75 bp, synthetic construct
  source 1..75: mol_type = other DNA
atggaatttaaagatttaccaatgccattccaggaaatggcagcgaatgtggttcgctctcaactggcgactctt

SEQ ID NO: 618013 - DNA, 75 bp, synthetic construct
  source 1..75: mol_type = other DNA
actatcgtactatcgatgtccgcgctttctggcatccgcacggtatgccggggctgttttactggttattgatga

SEQ ID NO: 618014 - DNA, 75 bp, synthetic construct
  source 1..75: mol_type = other DNA
tcgttaagccgcccggccaaagggcgctttaaccgccgcggacgtatttcttatcgccagttgggtatcaaccag

SEQ ID NO: 618015 - DNA, 75 bp, synthetic construct
  source 1..75: mol_type = other DNA
gtgcggtggacccggatgaactgagccgcgaatgtctgcgttacatgtaccgcctgctgttcctgttctacattg

SEQ ID NO: 618016 - DNA, 75 bp, synthetic construct
  source 1..75: mol_type = other DNA
gatgcgaaataagtgaatataaatctcgcttacctttgtctggatggggaacgatctttacaaaagactatagag

SEQ ID NO: 618017 - DNA, 75 bp, synthetic construct
  source 1..75: mol_type = other DNA
ttcagagcgagaaatatcgctgcttttatggagcttgccgtagcagcagggaaaaccattgtatttgccggagca

SEQ ID NO: 618018 - DNA, 75 bp, synthetic construct
  source 1..75: mol_type = other DNA
gaattacacattcagtcccaccagtatcgctgaatgggcgaaacgcgatgatgttcggacagcatttttaggact

SEQ ID NO: 618019 - DNA, 75 bp, synthetic construct
  source 1..75: mol_type = other DNA
cagagcgacctgacttctgtgtcggtcactataaggttgatgagatcattaattttactgaacctggtgatgcga

SEQ ID NO: 618020 - DNA, 75 bp, synthetic construct
  source 1..75: mol_type = other DNA
gactggcgatgcggtggatagctggaaagtgattgtcgttgaaccggaaaaacaacttacgttgttatttggcat

SEQ ID NO: 618021 - DNA, 75 bp, synthetic construct
  source 1..75: mol_type = other DNA
ctttgtggactgctggcatcgctggctgggatcattgaagtagcgcgtctttcctctgcgcaaccgacggcgggg

SEQ ID NO: 618022 - DNA, 75 bp, synthetic construct
  source 1..75: mol_type = other DNA
tttatacgtgcgaaattgtcggctacgccatgggagagcgcatgacaaaagagctgacaggtaaagccctgttta

SEQ ID NO: 618023 - DNA, 75 bp, synthetic construct
  source 1..75: mol_type = other DNA
ccatactcacccatggggacagattacgggtgttccagacggcaccctgtcgcaaaaagggattgtgaagcttaa

SEQ ID NO: 618024 - DNA, 75 bp, synthetic construct
  source 1..75: mol_type = other DNA
taggatcaacttgggtaaaccacgttgcccgcaatggcggtcgtggcttgggtggttatataaaaattttatggt

SEQ ID NO: 618025 - DNA, 75 bp, synthetic construct
  source 1..75: mol_type = other DNA
aggcggtttactggctggaaacctatctggaacatgggcgtccgtggctgctgaatggtgtgtcaattgacgtgt

SEQ ID NO: 618026 - DNA, 75 bp, synthetic construct
  source 1..75: mol_type = other DNA
tcgcgctggactgctgtgatcgtgaggcactgcactgggcggtgactaccggcggcttcaacagtgaaacagtac

SEQ ID NO: 618027 - DNA, 75 bp, synthetic construct
  source 1..75: mol_type = other DNA
gcatagtgcactgggatatcgttcgccacgggaatatctgcgtcggcgaaccagtaatgggttaagtgataaaaa

SEQ ID NO: 618028 - DNA, 75 bp, synthetic construct
  source 1..75: mol_type = other DNA
gcgctaaacagcgcgctgctatttctacgccgtaacggggtgcaggtatttgattcacctgaactggcagacctt

SEQ ID NO: 618029 - DNA, 75 bp, synthetic construct
  source 1..75: mol_type = other DNA
agtaacagcacgacggaagcggcgacgccgagcgcagttaaggcggcgtatgacaaggcaagtgcggcagctcca

SEQ ID NO: 618030 - DNA, 75 bp, synthetic construct
  source 1..75: mol_type = other DNA
ccataatcactccctaaccattaataataccggcaacaccgaaaacaccgaaaacaccgtcaaaaatatcgcatt

SEQ ID NO: 618031 - DNA, 75 bp, synthetic construct
  source 1..75: mol_type = other DNA
cttataatagtgaaaaaacgcttcttgatacattactctctctggaaaaacaaacgcattcagatattgaatata

SEQ ID NO: 618032 - DNA, 75 bp, synthetic construct
  source 1..75: mol_type = other DNA
attcaatgatgccaataagcgtaccgcgctaaacagtgcgctgctatttctacgccgtaacggtatacaggtata

SEQ ID NO: 618033 - DNA, 75 bp, synthetic construct
  source 1..75: mol_type = other DNA
tatctgaatgtaccaggtggtgatggaggtgtagcagggtgtacaggaggaaatgtaataagatttctcccctct

SEQ ID NO: 618034 - DNA, 75 bp, synthetic construct
  source 1..75: mol_type = other DNA
cggctgtgacattgatggttgatccatcactggtgatggcaacggtagattatgtggactccagtattgaagagc

SEQ ID NO: 618035 - DNA, 75 bp, synthetic construct
  source 1..75: mol_type = other DNA
attcaatgatgccaataagcgtaccgcgctaaacagtgcgctgctatttctacgccgtaacggggtgcaggtatt

SEQ ID NO: 618036 - DNA, 75 bp, synthetic construct
  source 1..75: mol_type = other DNA
cgacgctgcaacgacgtcattcatcccgggcgctgttgacgaggccaccctgaaatacgcaatccagaaggcccg

SEQ ID NO: 618037 - DNA, 75 bp, synthetic construct
  source 1..75: mol_type = other DNA
atgatcttagtggacattaatattccgttgccgaacggtaaacaggtgattgaatatctgaagaaaaaaaacagc

SEQ ID NO: 618038 - DNA, 75 bp, synthetic construct
  source 1..75: mol_type = other DNA
agtcacgctgacaccagatacgttgcgtgcagcgttcgaaaaagtggaatcgttaaagcctgacgtgcaaattta

SEQ ID NO: 618039 - DNA, 75 bp, synthetic construct
  source 1..75: mol_type = other DNA
atgaagccccaggagatatttctatcaatcctggggctgcctacccaaacctcaacaactcggatggtagtccct

SEQ ID NO: 618040 - DNA, 75 bp, synthetic construct
  source 1..75: mol_type = other DNA
gtgataaggcgatgcttgaagtactgtatgctaccgggctgcgcgtctctgaactggttggactgacgatgagcg

SEQ ID NO: 618041 - DNA, 75 bp, synthetic construct
  source 1..75: mol_type = other DNA
gagcggctggtgccgttgggtgaagaggctgtttactggctggaaacctatctggaacacggacgaccctggtta

SEQ ID NO: 618042 - DNA, 75 bp, synthetic construct
  source 1..75: mol_type = other DNA
gcgtcagcccggttcagcttaaggagatcatccgtcgggacttgtcgtttctgctcaacaccgtcagtcatgaag

SEQ ID NO: 618043 - DNA, 75 bp, synthetic construct
  source 1..75: mol_type = other DNA
cccacttcaggatgagcgccaccagagcggccataacacattacagtttgaaattcgcggcgagatcctcacgca

SEQ ID NO: 618044 - DNA, 75 bp, synthetic construct
  source 1..75: mol_type = other DNA
atgagacatatatcaccggaagaacttgttgcgcttcatgatgcgaatataagccgctacggcggcctgcctggc

SEQ ID NO: 618045 - DNA, 75 bp, synthetic construct
  source 1..75: mol_type = other DNA
agcgcacaggccatccgcgacgtattgttaagcagtagcgaacaggctcttgccgatcagcaaaacaagcagtta

SEQ ID NO: 618046 - DNA, 75 bp, synthetic construct
  source 1..75: mol_type = other DNA
cattacctgccagtcacgctgacaccagatacgttgcgtgcagcgttcaaaaaagtggaatcgtttaaagcctga

SEQ ID NO: 618047 - DNA, 75 bp, synthetic construct
  source 1..75: mol_type = other DNA
acaaaacttccgccagcgtttgaacggccaggggcaaagcatattttgtttcgcggtcattgcagcgaaagcgat

SEQ ID NO: 618048 - DNA, 75 bp, synthetic construct
  source 1..75: mol_type = other DNA
acacccgatctgatgatatgtgatattgcaatgccaagaatgaacggcttaaaactgctggaacatatacgcaac

SEQ ID NO: 618049 - DNA, 75 bp, synthetic construct
  source 1..75: mol_type = other DNA
gcgcgtttatcggataatgagcgaaaataacctgttgttgttacatgacaaaccttcacggccgcagcgggaaca

SEQ ID NO: 618050 - DNA, 75 bp, synthetic construct
  source 1..75: mol_type = other DNA
gaaagtaaaccgctactggctggcgatccagcagggcgatgctgcgctgaaagccaataatcctgaccgggcaga

SEQ ID NO: 618051 - DNA, 75 bp, synthetic construct
  source 1..75: mol_type = other DNA
cgattactggggttcgagcggtaccggtggttactccgatctgaaagcgcacaccactatgttgcaggtggacgc

SEQ ID NO: 618052 - DNA, 75 bp, synthetic construct
  source 1..75: mol_type = other DNA
ttatcggagagctgccaacgtatggttatcgtcgggtatgggcgctgcttcgcagacaggcagaacttgatggta

SEQ ID NO: 618053 - DNA, 75 bp, synthetic construct
  source 1..75: mol_type = other DNA
aaaccagacgggttaacggcagcaaagaaccttgcagaggcgttcgagcattataacgaatggcatccgcatagt

SEQ ID NO: 618054 - DNA, 75 bp, synthetic construct
  source 1..75: mol_type = other DNA
cacggcagttcgccagagagttgaatctggagccctgcacgacggcagtcagtagccctcagatcaatggaatgg

SEQ ID NO: 618055 - DNA, 75 bp, synthetic construct
  source 1..75: mol_type = other DNA
tgattacaccgccgcccgcgctgcatatcagaatgtcctgacgcgggagccaactaacgccgatgccattcttgg

SEQ ID NO: 618056 - DNA, 75 bp, synthetic construct
  source 1..75: mol_type = other DNA
ctggaaaaagccctcgcactggatccgcacagcagcaacaacgacaaatggaacagtctgctgaaagtaaaccgc

SEQ ID NO: 618057 - DNA, 75 bp, synthetic construct
  source 1..75: mol_type = other DNA
aaaacaatctggcgctattgctgtttagtagcgatcgccgtgacgaaggttttgccgtcctggaacagatggcga

SEQ ID NO: 618058 - DNA, 75 bp, synthetic construct
  source 1..75: mol_type = other DNA
gcggacctctatcgccagcaggatcttaacgtcaccctcgagcacgattactggggttcgagcggcaccggtggt

SEQ ID NO: 618059 - DNA, 75 bp, synthetic construct
  source 1..75: mol_type = other DNA
catctccagttctttgctggcctttggtgggcaaaaagactccccgagcaataccgggaaaaaatggggtggcgt

SEQ ID NO: 618060 - DNA, 75 bp, synthetic construct
  source 1..75: mol_type = other DNA
caacactaacgccgtgcgcgggctggcgaatatttaccgccagcagtcgccagaaaaagctgaagcgtttatcgc

SEQ ID NO: 618061 - DNA, 75 bp, synthetic construct
  source 1..75: mol_type = other DNA
gtcgagttccgctgtgataacggagagagactgcgtgtcacattcgcgctggactgctgtgaccgtgaggcactg

SEQ ID NO: 618062 - DNA, 75 bp, synthetic construct
  source 1..75: mol_type = other DNA
accttgcagaggcattcgagcattataacgaatggcatccgcatagtgcactgggttatcgctcgccacgggaat

SEQ ID NO: 618063 - DNA, 75 bp, synthetic construct
  source 1..75: mol_type = other DNA
cagccgttgtctccgggtgtcgcgtgcgcagttgcacgtcattctcagacgaaccgatgactggatggatagccg

SEQ ID NO: 618064 - DNA, 75 bp, synthetic construct
  source 1..75: mol_type = other DNA
gcactgggttatcgctcgccacgggaatatctgcggcagcaagccagtaatgggttaagtgataacaggtgtctg

SEQ ID NO: 618065 - DNA, 75 bp, synthetic construct
  source 1..75: mol_type = other DNA
atgataaagcagtccaggaaatcgtccgcatccccattactgtcttatatcattggcgctgacaaccatgttatc

SEQ ID NO: 618066 - DNA, 75 bp, synthetic construct
  source 1..75: mol_type = other DNA
gataatggttcatgctaccgggcgaatgaaacacgtcagttcgccaggatgttgggacttgaaccgaagaacacg

SEQ ID NO: 618067 - DNA, 75 bp, synthetic construct
  source 1..75: mol_type = other DNA
taacgaatggcatccgcatagtgcgttgggttatcgctcgccacgggaatatctgcggcagcgggcctgtaatgg

SEQ ID NO: 618068 - DNA, 75 bp, synthetic construct
  source 1..75: mol_type = other DNA
ccgcttcggcaacgagcttccggcgtctccagtagagtggctgacggataatggttcatgctaccgggctaatga

SEQ ID NO: 618069 - DNA, 75 bp, synthetic construct
  source 1..75: mol_type = other DNA
tgaaccgaagaacacggcggtgcggagtccggagagtaacggaatagcagagaacttcgtgaaaacgataaagcg

SEQ ID NO: 618070 - DNA, 75 bp, synthetic construct
  source 1..75: mol_type = other DNA
ctgggagcggtggaacgccgcttcggcaacgagcttccggcgtctccagtagagtggctgacggataatggttca

SEQ ID NO: 618071 - DNA, 75 bp, synthetic construct
  source 1..75: mol_type = other DNA
gatgtgcttctccgtatacaccatgttatcggagagctgcccgcgtatggttatcgtcgggtatgggcgctgctt

SEQ ID NO: 618072 - DNA, 75 bp, synthetic construct
  source 1..75: mol_type = other DNA
ctcgacttggcgctggttcaccttctgcgggaaatatcgccgagctggacgcaattgcagcatgtgtgattggcg

SEQ ID NO: 618073 - DNA, 75 bp, synthetic construct
  source 1..75: mol_type = other DNA
ggcatactcattggcatcaccaacggcacgactgtttcccccaccagcgccgcgatgtcacaaattgggcaaagc

SEQ ID NO: 618074 - DNA, 75 bp, synthetic construct
  source 1..75: mol_type = other DNA
ttcgttttacctccagagggcgagaatacgaagtcgacgaacgcctgattaccacaatcgacaaacaccgttcag

SEQ ID NO: 618075 - DNA, 75 bp, synthetic construct
  source 1..75: mol_type = other DNA
tcgctggcggagtggtgatcctgcgttcgggcaaaaatgcacgcgaagtcattacggcggtgagggataaactgg

SEQ ID NO: 618076 - DNA, 75 bp, synthetic construct
  source 1..75: mol_type = other DNA
cgactggctgccctatcaggacaagttcgtgctggtggttacgtccacgaccgggcaaggcgaccttcctgacag

SEQ ID NO: 618077 - DNA, 75 bp, synthetic construct
  source 1..75: mol_type = other DNA
atcttcgttatggcgtaattgcgctcggcgacagtagctatgtgaatttctgcaacggcggcaaacagttcgatg

SEQ ID NO: 618078 - DNA, 75 bp, synthetic construct
  source 1..75: mol_type = other DNA
atacgaaattcagcgccggcgtgaaatggggctgagcgaaccgtcatggtctgtatctcacccctcaaataccaa

SEQ ID NO: 618079 - DNA, 75 bp, synthetic construct
  source 1..75: mol_type = other DNA
aactggcctcagcacgtatcagaacgaactggcgctgcagggacaggattacgaggaggttatggagcagcagga

SEQ ID NO: 618080 - DNA, 75 bp, synthetic construct
  source 1..75: mol_type = other DNA
ggcagacacgcattcattcacatattcgagccgctcgaggacggacaaacccgcggagataacattttttacagc

SEQ ID NO: 618081 - DNA, 75 bp, synthetic construct
  source 1..75: mol_type = other DNA
taacgaatggcatccgcatagtgcgctgggttatcgctcgccacgggaatatctgcggcagtgggcctgtaatgg

SEQ ID NO: 618082 - DNA, 75 bp, synthetic construct
  source 1..75: mol_type = other DNA
tatggttatcgtcgggtatgggcgctgcttcgcagacaaacagaacttgatggtatgcctgcgatcaatgccaaa

SEQ ID NO: 618083 - DNA, 75 bp, synthetic construct
  source 1..75: mol_type = other DNA
gcgtgcgggagctggacactatcgggcggctgatggatgcgtttcgcagcagcgttcatgcgctgaatcgccacc

SEQ ID NO: 618084 - DNA, 75 bp, synthetic construct
  source 1..75: mol_type = other DNA
gcgtgctggaatacctgaatcaggttcagggcaaactgcctgcgggtgtgagctctgaaatcggtccggacgcca

SEQ ID NO: 618085 - DNA, 75 bp, synthetic construct
  source 1..75: mol_type = other DNA
tcactacagccagtcaatatggttggtgtttcagccttgaagggactgctggatacccgttctgaggcattaccg

SEQ ID NO: 618086 - DNA, 75 bp, synthetic construct
  source 1..75: mol_type = other DNA
acccctacgggatctgctttaatggcagctgttgatctgttacttgacagccaattcgataggaaaataattttt

SEQ ID NO: 618087 - DNA, 75 bp, synthetic construct
  source 1..75: mol_type = other DNA
gccttcagaacttgctgaagataacgagggaaataatgaacccaccggtggcaatcccacgggtgataacattat

SEQ ID NO: 618088 - DNA, 75 bp, synthetic construct
  source 1..75: mol_type = other DNA
agctgaacatgacgccctggccgctgcgatatggcaacgtgagcaggaggcactggcaaatcttcctgccggttt

SEQ ID NO: 618089 - DNA, 75 bp, synthetic construct
  source 1..75: mol_type = other DNA
agttcctgggctttctgctctggagattgacccgcaggaagccgcccagcaataccgcgccagaattgttgatcc

SEQ ID NO: 618090 - DNA, 75 bp, synthetic construct
  source 1..75: mol_type = other DNA
gaacacggcctgattatgttgatgggcaaaggtggcgtagggaaaaccacgatggctgcggccatcgccgtcagg

SEQ ID NO: 618091 - DNA, 75 bp, synthetic construct
  source 1..75: mol_type = other DNA
ttcacgaaaacgtactccatggcgggagcggccgcactggccatcatcgtcattcctattctgatgggattctgg

SEQ ID NO: 618092 - DNA, 75 bp, synthetic construct
  source 1..75: mol_type = other DNA
atcgcctttatcgtcatgcacttccagggactgaacgccaatatcatgtcgctgggagggatagcgattgccgtc

SEQ ID NO: 618093 - DNA, 75 bp, synthetic construct
  source 1..75: mol_type = other DNA
atgattgaatggattatccggcgctctgtcgccaaccgtttcctggtcatgatgggggccctgtttctcagcatc

SEQ ID NO: 618094 - DNA, 75 bp, synthetic construct
  source 1..75: mol_type = other DNA
cccgtaaagagacgttcacaccggaaggccttgatgaagccctctatcatggtgccgtactgcgtgtccggccga

SEQ ID NO: 618095 - DNA, 75 bp, synthetic construct
  source 1..75: mol_type = other DNA
gaagcggtcgccaaaaccgtacccggcgtagtgtctgctctcgcagagcgactggaaggcgggcgctacattgat

SEQ ID NO: 618096 - DNA, 75 bp, synthetic construct
  source 1..75: mol_type = other DNA
ccgataggtatcaaagtgtccgggactgttctgtccgatatcgacgcgacggcgcagagtatcgaggcggtagcc

SEQ ID NO: 618097 - DNA, 75 bp, synthetic construct
  source 1..75: mol_type = other DNA
agcttaaaggaaacagaacagcggacgactcgctggccgggctggggattgagggaccggagaccatatccggcg

SEQ ID NO: 618098 - DNA, 75 bp, synthetic construct
  source 1..75: mol_type = other DNA
ctggaagagcgtcagtatctggtagataacctgaaaacaattcgctgtgtagagcaggtattcgattctgaaacc

SEQ ID NO: 618099 - DNA, 75 bp, synthetic construct
  source 1..75: mol_type = other DNA
aggttatcaatctgctgttaaaggtgattgccccttacccactctctacgccggtggcagatatcgccgcccagg

SEQ ID NO: 618100 - DNA, 75 bp, synthetic construct
  source 1..75: mol_type = other DNA
cgtggagtttcaacttactcagcaaacgctcaaccgctacccggaatgccagccgaaagcggtgattgaaaatta

SEQ ID NO: 618101 - DNA, 75 bp, synthetic construct
  source 1..75: mol_type = other DNA
gtgcagacatcgcaaggggtcagcaacaattgcaaattaccgggcggtgaaacgattgatgaatgggcattatgg

SEQ ID NO: 618102 - DNA, 75 bp, synthetic construct
  source 1..75: mol_type = other DNA
ggacgtttcttttttcacgtcatgggggctttagcggaaatggagcgtgaattaatagttgtcacgaacggtgca

SEQ ID NO: 618103 - DNA, 75 bp, synthetic construct
  source 1..75: mol_type = other DNA
tggtggggttgattacatcagcggccaggatcagaagtggtggcctgctgctgccggtattgctgcatatggaag

SEQ ID NO: 618104 - DNA, 75 bp, synthetic construct
  source 1..75: mol_type = other DNA
agtcccgtaaacaaattgcactgatatttgatattggcctttccaccctttatcgttattttcctgtctcatcgg

SEQ ID NO: 618105 - DNA, 75 bp, synthetic construct
  source 1..75: mol_type = other DNA
gcacctttgctgacgctggaaacttatcgccagattggcaaaaacgccgcgcgttatgcgaagcgcgagtctcca

SEQ ID NO: 618106 - DNA, 75 bp, synthetic construct
  source 1..75: mol_type = other DNA
ccgcgccggatagcgaaagttttctgaccgaaattggcgaagcccaacaaggcactcagcaagatgaagtcatta

SEQ ID NO: 618107 - DNA, 75 bp, synthetic construct
  source 1..75: mol_type = other DNA
gacgccgtatcagtcagcgcgtcgtctgggcggtaacggcgatgtctggctgaacgccaacgaataccccactgc

SEQ ID NO: 618108 - DNA, 75 bp, synthetic construct
  source 1..75: mol_type = other DNA
agtgatcgccccctacccgctctcgacgccggttgccgacattgcggcccaggcgttaagcccgcaggggatcgt

SEQ ID NO: 618109 - DNA, 75 bp, synthetic construct
  source 1..75: mol_type = other DNA
gcagtctggcccaggcgatgggcggcaaactgaccgccaccagcatgccgggtacagggagttgtttttgcttac

SEQ ID NO: 618110 - DNA, 75 bp, synthetic construct
  source 1..75: mol_type = other DNA
cgatgaacagccaaacagtgaatgccgcacttaagcgtgctggattgggaggcgttctcgtttctcatggcttac

SEQ ID NO: 618111 - DNA, 75 bp, synthetic construct
  source 1..75: mol_type = other DNA
gaagtgaccgaatggcaccgggtggttattttcggcaagctggcagaaattgcgggtgaatatctgcgtaaaggc

SEQ ID NO: 618112 - DNA, 75 bp, synthetic construct
  source 1..75: mol_type = other DNA
ttattcttgtcggaaacctcggccaggatcctgaagttcgttatattcctaacggcagcgcagttgccacccttt

SEQ ID NO: 618113 - DNA, 75 bp, synthetic construct
  source 1..75: mol_type = other DNA
atggcttcacgtggcgtaaacaaagtcatcctgcttgggcatctgggacaggatccggaggtcaggtactttcct

SEQ ID NO: 618114 - DNA, 75 bp, synthetic construct
  source 1..75: mol_type = other DNA
gcgcgggcaaatcacctcgatgacctttgtgtttcacgacggcaccatacgcaccgtcccgcagggcggcaaatc

SEQ ID NO: 618115 - DNA, 75 bp, synthetic construct
  source 1..75: mol_type = other DNA
tgatactggttggacatcttggacaggatccggagattcgttatcttcccaatggcggagccgtggcgaacctga

SEQ ID NO: 618116 - DNA, 75 bp, synthetic construct
  source 1..75: mol_type = other DNA
ggtgcgccaccgatggacttcgatgatgatataccgttcattggattcgggtatggagtaccaaaatcggcaatc

SEQ ID NO: 618117 - DNA, 75 bp, synthetic construct
  source 1..75: mol_type = other DNA
gcccaggaggccagtgaatttatggcatggcttcgagcacaaagcgccagcgaaactattcgcgattatcgtagc

SEQ ID NO: 618118 - DNA, 75 bp, synthetic construct
  source 1..75: mol_type = other DNA
ccgccagaaatgctgctacgccaacacatggatatttttgctgccctgcaaaaacacgatggcgatgcggtagag

SEQ ID NO: 618119 - DNA, 75 bp, synthetic construct
  source 1..75: mol_type = other DNA
tttatttttgcacgtgtgtgtgtctgctttatctcctcagcggaggttacaaaattatccgaaattattttcgaa

SEQ ID NO: 618120 - DNA, 75 bp, synthetic construct
  source 1..75: mol_type = other DNA
tggcggaaaacggcctgattcaaattcgtccgcagcgtggcagctacgtcaacaaaatttccatggcccaggtgc

SEQ ID NO: 618121 - DNA, 75 bp, synthetic construct
  source 1..75: mol_type = other DNA
gaacaaaccgaatggcaccgcgtggtgctgttcggcaaactggcggaagtagccagtgaatacctgcgcaaagga

SEQ ID NO: 618122 - DNA, 75 bp, synthetic construct
  source 1..75: mol_type = other DNA
tgcacaacaatcaacgggaaaaaacggtcaggcttcctcaggaagcgggggaatgccgccgatggactttgacga

SEQ ID NO: 618123 - DNA, 75 bp, synthetic construct
  source 1..75: mol_type = other DNA
atactgcgacggtgaaaaagaatggggtagctcaggctaatgtccctgtttcatttaatattgtttcaggaactg

SEQ ID NO: 618124 - DNA, 75 bp, synthetic construct
  source 1..75: mol_type = other DNA
cggtaaggcgactgtaaccctgaaatcggataaaccaggccaggtcgtcgtgtctgctaaaacagcagagatgac

SEQ ID NO: 618125 - DNA, 75 bp, synthetic construct
  source 1..75: mol_type = other DNA
aatcaaggaaaatcactcgttagtgccagcgttagcaatgccgcagttgatgttaaagctcctgaagttgaattt

SEQ ID NO: 618126 - DNA, 75 bp, synthetic construct
  source 1..75: mol_type = other DNA
agttaaggctgccgctgttgagttttttgcctccctgagtattgatagcaataaagttactgtaattggtactgg

SEQ ID NO: 618127 - DNA, 75 bp, synthetic construct
  source 1..75: mol_type = other DNA
gtattactgaaattaccaatgataagtcaacggcaatagcaaatgataaggacgccattacatatactgttaagg

SEQ ID NO: 618128 - DNA, 75 bp, synthetic construct
  source 1..75: mol_type = other DNA
gaacagtattatggtgataatgtcgctttgtttaatgctgataaactgcagtcgaatcctggcgcggcgaccgtt

SEQ ID NO: 618129 - DNA, 75 bp, synthetic construct
  source 1..75: mol_type = other DNA
tcggctacgccaggacaggtcgtcgtgtctgctaaaaccgcggagatgacttcgccacttaatgccagtgcggtt

SEQ ID NO: 618130 - DNA, 75 bp, synthetic construct
  source 1..75: mol_type = other DNA
tcaaaactgttaactcatgatagctatcagaatcgccttttttatacgttgaaaactggtgaaactgttgccgat

SEQ ID NO: 618131 - DNA, 75 bp, synthetic construct
  source 1..75: mol_type = other DNA
ggatatgagtttgagaaagccctcagcttcgatcgtcgtcactggataatctccgtcaggctcccttattccgaa

SEQ ID NO: 618132 - DNA, 75 bp, synthetic construct
  source 1..75: mol_type = other DNA
tgtgagtattattggaacctccgctaatggcgctttacctaatatttggttgcgatatggtcagtttaagctgac

SEQ ID NO: 618133 - DNA, 75 bp, synthetic construct
  source 1..75: mol_type = other DNA
ctgtcgttagtgcaaaagtcagtgaggttaatacagaagttaaggcatctgaggtaaaattcttctcagttctga

SEQ ID NO: 618134 - DNA, 75 bp, synthetic construct
  source 1..75: mol_type = other DNA
acaacaggccgcgagccttggtagccagcttcagtcgcgctcactgaacggcgattacgcgaaagataccgctct

SEQ ID NO: 618135 - DNA, 75 bp, synthetic construct
  source 1..75: mol_type = other DNA
gcatgagtcatacaataagaaagactatgatgagcgcccagcaaatggcttcgatatccgctttaatggctatct

SEQ ID NO: 618136 - DNA, 75 bp, synthetic construct
  source 1..75: mol_type = other DNA
gcagagacaaccgatggcgcacgataccaaattacacaattctgatgattctgccgtctttgccagcaggcacgg

SEQ ID NO: 618137 - DNA, 75 bp, synthetic construct
  source 1..75: mol_type = other DNA
gcgggttttgttttttcctagcattctggtttacaattcgcacgccagcctgaacaactggcacctgctgcgcca

SEQ ID NO: 618138 - DNA, 75 bp, synthetic construct
  source 1..75: mol_type = other DNA
gtattaccgagattaaggctgataaaacaactgcagtagcaaatggtaaggatgctattacatacactgttaaag

SEQ ID NO: 618139 - DNA, 75 bp, synthetic construct
  source 1..75: mol_type = other DNA
ggtgtcttcaggcgttgacgcttgtcaggtcacactcaacatgggggacggtaggaagacagtcgccatgttcga

SEQ ID NO: 618140 - DNA, 75 bp, synthetic construct
  source 1..75: mol_type = other DNA
agaaagcccttagcctcgactaccgtcactggataatctacgtcaggctcccttactccgaacgcccaccgcgtc

SEQ ID NO: 618141 - DNA, 75 bp, synthetic construct
  source 1..75: mol_type = other DNA
attctgataccggccctgccagcaggcacgggcggcgttctcacacattcaaatctgactggttcctgcatgacc

SEQ ID NO: 618142 - DNA, 75 bp, synthetic construct
  source 1..75: mol_type = other DNA
tctgtcggtaaagcagttgttagtgcaaaagttagtgaagctggctcagtggttaatgcagatgcagttaacttc

SEQ ID NO: 618143 - DNA, 75 bp, synthetic construct
  source 1..75: mol_type = other DNA
tgatgaaaaatgggctgccggaaaagggacacgtagttacattctcaactgatttaggtaaattgaatctacaga

SEQ ID NO: 618144 - DNA, 75 bp, synthetic construct
  source 1..75: mol_type = other DNA
caggtgtatcaagtacatatgatttagttacgaagaaccaattgactaatgtgggagtaaaaaataaaaatgctt

SEQ ID NO: 618145 - DNA, 75 bp, synthetic construct
  source 1..75: mol_type = other DNA
ggtgataagcaaactgcaacttatataattgcaagacctagcagtatgattgtctctataaacaagcgtatgact

SEQ ID NO: 618146 - DNA, 75 bp, synthetic construct
  source 1..75: mol_type = other DNA
ctacttatgacttaataagacaaaaccctcatgagggtgttacgccaaacgctccaaatgtctatgcagtttgtg

SEQ ID NO: 618147 - DNA, 75 bp, synthetic construct
  source 1..75: mol_type = other DNA
tgtcaaagcacctgaagttgaattcttcaccccacttgctattgatgacggtaatgttgaaattgtaggaactgg

SEQ ID NO: 618148 - DNA, 75 bp, synthetic construct
  source 1..75: mol_type = other DNA
attctgaagtcgatccgaccattaagcgggggcggcgttcacacgtatttaaaaccgactggttccagcatgacc

SEQ ID NO: 618149 - DNA, 75 bp, synthetic construct
  source 1..75: mol_type = other DNA
tcggataacggttccggtgaaacggcagatatgctggataaagagattgtcgggattctgccccgtctgggcatt

SEQ ID NO: 618150 - DNA, 75 bp, synthetic construct
  source 1..75: mol_type = other DNA
gctatgccggtgaattatgtctggattggtgacggtcacggtatgaagctgaaatgtgcgcatccgatccacggg

SEQ ID NO: 618151 - DNA, 75 bp, synthetic construct
  source 1..75: mol_type = other DNA
ctaggaagacacgtaatcccgatgctgttcaggcgatcgaagcatatcgcggttctccgcaactgatggaagaac

SEQ ID NO: 618152 - DNA, 75 bp, synthetic construct
  source 1..75: mol_type = other DNA
ctattcgtgaaggcgtggaatggtacaacaaccgcccgcattctgagctgcctatgaaaccgaacgggcggcatt

SEQ ID NO: 618153 - DNA, 75 bp, synthetic construct
  source 1..75: mol_type = other DNA
tcggataacggttctggtgaaacggctgacatgcttgacaaagaggtcgtgggtattctgccccgcctggggatt

SEQ ID NO: 618154 - DNA, 75 bp, synthetic construct
  source 1..75: mol_type = other DNA
ccagtcgcagaacgccgcagaacgactgttgttactggcaccaggaaaacgcgacgaaataaaaccggaagaaat

SEQ ID NO: 618155 - DNA, 75 bp, synthetic construct
  source 1..75: mol_type = other DNA
attgtctccgactggaccggtattcccgccggacgcatggtgaaagatgaagccagtcagatcctggaactgccc

SEQ ID NO: 618156 - DNA, 75 bp, synthetic construct
  source 1..75: mol_type = other DNA
tggcgagcgtatccagaccgcgcgggcgggtttaggtgacccgcgtaagcctgtgggcgtctttttgctggccgg

SEQ ID NO: 618157 - DNA, 75 bp, synthetic construct
  source 1..75: mol_type = other DNA
gatggcaaccgccccgcaggagataactacccagcctcctgtaaagcgtgaacgcaaacaaaatgttgtacagcc

SEQ ID NO: 618158 - DNA, 75 bp, synthetic construct
  source 1..75: mol_type = other DNA
tgcgcgacatgttccgtccgatggtggagcgtccggtaagacgctgtgaaatcaaatggcttgggaatatttatt

SEQ ID NO: 618159 - DNA, 75 bp, synthetic construct
  source 1..75: mol_type = other DNA
gagtctcacaccgtctccacgctgaaaggcgcgccgcccggctacgtcggctatggcgaaggcggtgtgttgacg

SEQ ID NO: 618160 - DNA, 75 bp, synthetic construct
  source 1..75: mol_type = other DNA
atatttgtgcgccattggcagggctaccggtagatgaactattagatattcttccgtctttaatcacttcatctc

SEQ ID NO: 618161 - DNA, 75 bp, synthetic construct
  source 1..75: mol_type = other DNA
ctgaacaatatttactacgcgccagagctgcgtgatgaacatggccgtaaggtacttatcagctatgacattcac

SEQ ID NO: 618162 - DNA, 75 bp, synthetic construct
  source 1..75: mol_type = other DNA
tgcggtggaggcatatcgcggatcaccccaactgatggtcgaacgcctcaatgccctgactgaaaaccaacgtaa

SEQ ID NO: 618163 - DNA, 75 bp, synthetic construct
  source 1..75: mol_type = other DNA
ggatgttggggcttgaaccgaagatcacggcggtgcggagtccggagagtaacggcatagcagagagcttcgtga

SEQ ID NO: 618164 - DNA, 75 bp, synthetic construct
  source 1..75: mol_type = other DNA
ggatgttgggccttgaaccgaagagcacggcggtgcggagtccggagagtaacggtatagcagagagcttcgtga

SEQ ID NO: 618165 - DNA, 75 bp, synthetic construct
  source 1..75: mol_type = other DNA
aaaccgaacggtaagcattacagcccggcggaatacaggaaaaaacgcctggcagaagaggacacggaaattgaa

SEQ ID NO: 618166 - DNA, 75 bp, synthetic construct
  source 1..75: mol_type = other DNA
agacgtgggtatgagtttaggaaagccctcagcctcgattatcgtcactggataatctccgtcaggcttccttac

SEQ ID NO: 618167 - DNA, 75 bp, synthetic construct
  source 1..75: mol_type = other DNA
agacgtggttacgagtttcagaaagacctcagccttgactcccgacactggataatctccgtcaggcttccttac

SEQ ID NO: 618168 - DNA, 75 bp, synthetic construct
  source 1..75: mol_type = other DNA
tgttgaggcatatcgcggttcgccacaactggtagaagagcgtctgaatgcgcttacggaaaatcaacgtaaagt

SEQ ID NO: 618169 - DNA, 75 bp, synthetic construct
  source 1..75: mol_type = other DNA
tgaatggctgattcagtattaccgcaggcgcggatacgaggttaagaaagccctcagtctcgattatcgtcactg

SEQ ID NO: 618170 - DNA, 75 bp, synthetic construct
  source 1..75: mol_type = other DNA
cagcaggcacgggcggcgttctcacgcattcaaatatgactggtatcagcacgatccctgcactgaagaacaggc

SEQ ID NO: 618171 - DNA, 75 bp, synthetic construct
  source 1..75: mol_type = other DNA
tatcgctcgccacgggaatatctgcggcagcaggccagtaatgggttaagtgataacaggtgtctggaaatatag

SEQ ID NO: 618172 - DNA, 75 bp, synthetic construct
  source 1..75: mol_type = other DNA
ccggacgttaccgatgcgtatagcaaggaggtatcgcacctatttcggcaagggggctgaccgggaatcgttgcg

SEQ ID NO: 618173 - DNA, 75 bp, synthetic construct
  source 1..75: mol_type = other DNA
gataatttcagtcaggctcccttattccggacgcccaccgcgtccgtcccgcacataccagcaacggatctggag

SEQ ID NO: 618174 - DNA, 75 bp, synthetic construct
  source 1..75: mol_type = other DNA
atagcagagagcttcgtgaaaacgataaagcgtgactacatcagtatcatgcccaaaccagacgggttaacggca

SEQ ID NO: 618175 - DNA, 75 bp, synthetic construct
  source 1..75: mol_type = other DNA
tcatgcccaaaccagacgggttaacggcagcaaagaaccttgcagaggcgttcgagcattataacgaatggcatc

SEQ ID NO: 618176 - DNA, 75 bp, synthetic construct
  source 1..75: mol_type = other DNA
gagggattatagagcgtctgaaccgtactctggctatgcgcatatcacgccagtttgccacgtattatggcaccg

SEQ ID NO: 618177 - DNA, 75 bp, synthetic construct
  source 1..75: mol_type = other DNA
catccgcatagtgcgctgggttatcgctcgccacgggaatatctgcggcagcgggccagtaatgggttaagtgat

SEQ ID NO: 618178 - DNA, 75 bp, synthetic construct
  source 1..75: mol_type = other DNA
ggttatcgctcgccacgggaatatctgcggcagcgggcttgtaatgggttaagtgataacagatgtctggaaata

SEQ ID NO: 618179 - DNA, 75 bp, synthetic construct
  source 1..75: mol_type = other DNA
agtccggagagtaacactcaaatcacatttaacataatatacattatgcgcaccaacataaaccaaggaagaatc

SEQ ID NO: 618180 - DNA, 75 bp, synthetic construct
  source 1..75: mol_type = other DNA
tccggctgaacgtttgatcatgctggcacctggtaaacgtcaacccataaaacccgaccagattcgctggttacc

SEQ ID NO: 618181 - DNA, 75 bp, synthetic construct
  source 1..75: mol_type = other DNA
aaagaataagccgttcaggctacagccgtcagaatgtcaactgtctggttaagattctgatggaaaaagagatcc

SEQ ID NO: 618182 - DNA, 75 bp, synthetic construct
  source 1..75: mol_type = other DNA
agcataccgtcgcctggttgagagtcagttccgtgatgatgacgatgaacaggcccagtctaacaaaggtcgtct

SEQ ID NO: 618183 - DNA, 75 bp, synthetic construct
  source 1..75: mol_type = other DNA
agtggagtggctgacggataatggttcatgctaccgggctaatgaaacacgccagtttgcccggatgttgggtct

SEQ ID NO: 618184 - DNA, 75 bp, synthetic construct
  source 1..75: mol_type = other DNA
agtggagtggctgacggataatggttcatgctaccgggctaatgaaacacgtcagtttgcccggatgctgggtct

SEQ ID NO: 618185 - DNA, 75 bp, synthetic construct
  source 1..75: mol_type = other DNA
agtggagtggctgacggataatggttcatgctaccgggctaatgaaacacgacagtttgcccggatgatgggact

SEQ ID NO: 618186 - DNA, 75 bp, synthetic construct
  source 1..75: mol_type = other DNA
ggcgttcgagcattataacgaatggcatccgcatagtgcactgggttatcgctcgccacgggaatatctgcggca

SEQ ID NO: 618187 - DNA, 75 bp, synthetic construct
  source 1..75: mol_type = other DNA
gatattgccgttccgcgcgatgttgagccggaagttggtaaactggcgaatgcttatctttatagcgttgacgat

SEQ ID NO: 618188 - DNA, 75 bp, synthetic construct
  source 1..75: mol_type = other DNA
atgcgcgtagccagtggtctggattctctggttcttggtgaaccgcaaattcttggtcaggtgaaaaaagccttt

SEQ ID NO: 618189 - DNA, 75 bp, synthetic construct
  source 1..75: mol_type = other DNA
atgcgtgttgccagcggcctggattcactggttctgggggagccgcagatcctcggtcaggttaaaaaagcgttt

SEQ ID NO: 618190 - DNA, 75 bp, synthetic construct
  source 1..75: mol_type = other DNA
cagcgaaaccattcgcgagtatcgcagccaggcagagcacgttcgcgatgagttaaccgccaaagcgttagcggc

SEQ ID NO: 618191 - DNA, 75 bp, synthetic construct
  source 1..75: mol_type = other DNA
tggcgcaacggaaagccgctgctgtggaggcggaaactatcgtcgcccaggaggccagtgaatttatggcatggc

SEQ ID NO: 618192 - DNA, 75 bp, synthetic construct
  source 1..75: mol_type = other DNA
tgcggcttgtacactggcgcgacagatctttgaatcactctctacggtgacggtattactggtgggggcgggcga

SEQ ID NO: 618193 - DNA, 75 bp, synthetic construct
  source 1..75: mol_type = other DNA
cacagacgcacgttatattgtgcaggatattcgcttgccgagagtcatcatggcattgctatgcggagccatgtt

SEQ ID NO: 618194 - DNA, 75 bp, synthetic construct
  source 1..75: mol_type = other DNA
gcgttcgagcattataacgaatggcatccgcatagtgcgctgggttatcgctcgccacgggaatatctgcggcag

SEQ ID NO: 618195 - DNA, 75 bp, synthetic construct
  source 1..75: mol_type = other DNA
tgcggtttaccgcaaatgtcctgcgctgtttgagcagaaactcggaacgttaaccgctacgcaaaaagaaacagc

SEQ ID NO: 618196 - DNA, 75 bp, synthetic construct
  source 1..75: mol_type = other DNA
ttagtggtgattttctgtgcacgcgatatttcccgcccgcgatttgttttgatcggcattggcgtttcctggttt

SEQ ID NO: 618197 - DNA, 75 bp, synthetic construct
  source 1..75: mol_type = other DNA
atgagtcggataatgaacgtcgggctacgcccactacgtgttggtaagttttcgacactggtgcgccctaaaaat

SEQ ID NO: 618198 - DNA, 75 bp, synthetic construct
  source 1..75: mol_type = other DNA
acaaactgcattgatgtggttatcgggaagcctgcatgcagctaactggatgttagtcggtatttcagcctgttg

SEQ ID NO: 618199 - DNA, 75 bp, synthetic construct
  source 1..75: mol_type = other DNA
tccgtcgcttcaaaaaagacgtgaaagatcagatgtctggcgagttccccgagcgcaatattgtcaaactgactc

SEQ ID NO: 618200 - DNA, 75 bp, synthetic construct
  source 1..75: mol_type = other DNA
ataatgtaggttcacttggtggagcatgtgcgcctattcttggtgcagttgttgcgtctcatacaagtcttggta

SEQ ID NO: 618201 - DNA, 75 bp, synthetic construct
  source 1..75: mol_type = other DNA
tgttattgggcttggtatggcaggggaatatggctcaagtgtaacatatgttatcgaaagctggcctgttcatct

SEQ ID NO: 618202 - DNA, 75 bp, synthetic construct
  source 1..75: mol_type = other DNA
atgataaaattgagtatcaatgccgatagtatcggcattgatacatttttgctggatgataatttgaaactctat

SEQ ID NO: 618203 - DNA, 75 bp, synthetic construct
  source 1..75: mol_type = other DNA
gtcagataccgtcgttcgtgagtaccatcactggcggtaatggtatcagtgggattactggcgctactaacgccg

SEQ ID NO: 618204 - DNA, 75 bp, synthetic construct
  source 1..75: mol_type = other DNA
tttttaatgggcgtttttatcatcggtcagataccgtcgttcgtgagtaccatcactggcggtaatggtatcagt

SEQ ID NO: 618205 - DNA, 75 bp, synthetic construct
  source 1..75: mol_type = other DNA
tataatgaagcctttagcgccatttaccccaaactcgccaaagagtttgatgttccgctgctgcccttttttatg

SEQ ID NO: 618206 - DNA, 75 bp, synthetic construct
  source 1..75: mol_type = other DNA
catttggcagcgaccaacggcgggatgtaaagctcgatttacgtcactgggcgtttgagcctgataaagaagatc

SEQ ID NO: 618207 - DNA, 75 bp, synthetic construct
  source 1..75: mol_type = other DNA
catttctgggttgcccggcgttgtggtgtccgcgttgagcgattctcgataggctttggtaaggcgctctggcgc

SEQ ID NO: 618208 - DNA, 75 bp, synthetic construct
  source 1..75: mol_type = other DNA
tggaacgccgctttggcagcgagcttccggcgtcttcagttgagtggctgacggataatggttcatactaccggg

SEQ ID NO: 618209 - DNA, 75 bp, synthetic construct
  source 1..75: mol_type = other DNA
cgcctaggtattgtgacgatgttcgaacaaccgactttggtgaatcaaaagccacaattacctgcatatgaacat

SEQ ID NO: 618210 - DNA, 75 bp, synthetic construct
  source 1..75: mol_type = other DNA
tgcattgaattgggcaaattttggttctagtggtgaactgtttgctgaagaggggttggttattgaacgttttac

SEQ ID NO: 618211 - DNA, 75 bp, synthetic construct
  source 1..75: mol_type = other DNA
aaactgggcatcgtaagcgtgctggattttcctgatgtcgaggggcaaaagccgcagttacccgcttacgaacgt

SEQ ID NO: 618212 - DNA, 75 bp, synthetic construct
  source 1..75: mol_type = other DNA
ggtaataaagatctcgatccggaaatcagtgtcaataaagaaattgggctggagttcacctgggaagattaccac

SEQ ID NO: 618213 - DNA, 75 bp, synthetic construct
  source 1..75: mol_type = other DNA
ccgcagccgtcactcagatgatatggatgtacttctccgtatacaccatgttatcggagagctgcccacgtatgg

SEQ ID NO: 618214 - DNA, 75 bp, synthetic construct
  source 1..75: mol_type = other DNA
ccgtggcgtggatatccccgtcgaaaacacagacacgggaaaaaccggccaatccggtaacgacgaaaaacgcac

SEQ ID NO: 618215 - DNA, 75 bp, synthetic construct
  source 1..75: mol_type = other DNA
ggttttaattccgcttacagaactgcatcaaccagctccacagtatcgatgaattacagttggtgggctgttggt

SEQ ID NO: 618216 - DNA, 75 bp, synthetic construct
  source 1..75: mol_type = other DNA
atctatggcaaggcattggctgaaaaaggctatgtcgttctcgcttatgacgccagtttccagggagaatctggt

SEQ ID NO: 618217 - DNA, 75 bp, synthetic construct
  source 1..75: mol_type = other DNA
cgacagtgaaacagtacaggacgtcatgctgggagcggttgaacgccgcttcggcaacgagcttccggcgtctcc

SEQ ID NO: 618218 - DNA, 75 bp, synthetic construct
  source 1..75: mol_type = other DNA
gtcagttcgctgtcacgaacggtgcaatagtgatccacacccaacgcctgaaatcagatccagggggtaatctgc

SEQ ID NO: 618219 - DNA, 75 bp, synthetic construct
  source 1..75: mol_type = other DNA
acattcgtccgtacgatccgaatacccaacgacgggttgtgcgcgaacgtttgcaggcgctggaaatcattaatg

SEQ ID NO: 618220 - DNA, 75 bp, synthetic construct
  source 1..75: mol_type = other DNA
ggaggttattcattatcttggtttgggagctacaaacggatacgtgggacgcttggtgaatacccgggttttcac

SEQ ID NO: 618221 - DNA, 75 bp, synthetic construct
  source 1..75: mol_type = other DNA
tgccagcgccgccgcgcttggtgtgccgctaaaaataacccatatggcggtgggcgatggcggcggagcattgcc

SEQ ID NO: 618222 - DNA, 75 bp, synthetic construct
  source 1..75: mol_type = other DNA
ctgattaaccagaaacgcattgcaccgctgaatcttctgagtgttgacccgaacaaccagaaccagattattgcg

SEQ ID NO: 618223 - DNA, 75 bp, synthetic construct
  source 1..75: mol_type = other DNA
aggccgcgagtttaccgataccgaacaacgcgtcatcaaccgtatgttgaagctggcgctcgaaggctacagcga

SEQ ID NO: 618224 - DNA, 75 bp, synthetic construct
  source 1..75: mol_type = other DNA
ctgcctgccattcagcatgatcgagccgctacgggaattgttggttaacccgccgctggaaaactcgcgtaatga

SEQ ID NO: 618225 - DNA, 75 bp, synthetic construct
  source 1..75: mol_type = other DNA
ctgaccgtatagcgcttgttccggtgctggcgtcagagcccgccggtattgaaaagctcagagagttgatgagtt

SEQ ID NO: 618226 - DNA, 75 bp, synthetic construct
  source 1..75: mol_type = other DNA
cctgaagcactacaacaatcaatgcgcgacattcagcaatataccgacaattacaaccagcaatataacgttaat

SEQ ID NO: 618227 - DNA, 75 bp, synthetic construct
  source 1..75: mol_type = other DNA
gcaacaacgaatctctggtatgcggcgtgtttcccaaccaggacggcacgtttaccgcgatgacgtataccagaa

SEQ ID NO: 618228 - DNA, 75 bp, synthetic construct
  source 1..75: mol_type = other DNA
ttcaccgcgatgacgtatacaaaaagcaaaacgtttaaaaccgaatctggcgcgcgtcgttggttggtaagacat

SEQ ID NO: 618229 - DNA, 75 bp, synthetic construct
  source 1..75: mol_type = other DNA
ttcgatatcaaagatcgaatggaaggtcgggatattgagcgtggcaagttggcagagacgatccgcagcaatcaa

SEQ ID NO: 618230 - DNA, 75 bp, synthetic construct
  source 1..75: mol_type = other DNA
agtggcgatcattaataatgctttgggtaatgggacgctggctaacttaacgctcagcccaacagagcagcaata

SEQ ID NO: 618231 - DNA, 75 bp, synthetic construct
  source 1..75: mol_type = other DNA
tggtgcgcaaaacgagaatgcgccaaaggcaaaagacattaatgcaacgcttggcctgatccgcgaaaacaatga

SEQ ID NO: 618232 - DNA, 75 bp, synthetic construct
  source 1..75: mol_type = other DNA
gtgatggcgtggtgattagtgaagtcagcgccgtaacaaaaaaccgcaaaccgcgcaaaaaagccgctaacacgt

SEQ ID NO: 618233 - DNA, 75 bp, synthetic construct
  source 1..75: mol_type = other DNA
gtgatggcgtggtggtcagcgaagtcagttcagttatgaaaacccgcaaaccacgtaaaaaagcggctaatccgt

SEQ ID NO: 618234 - DNA, 75 bp, synthetic construct
  source 1..75: mol_type = other DNA
cgacgaacgtgtagcgcgggcgatttttgccagtcacattccggttgtcagcgccgttggacatgaaactgatgt

SEQ ID NO: 618235 - DNA, 75 bp, synthetic construct
  source 1..75: mol_type = other DNA
atgaagctaattcccctagcgttaagggaaaatgaggtcaacatggatactatcgatcttggcaacaacgaatcc

SEQ ID NO: 618236 - DNA, 75 bp, synthetic construct
  source 1..75: mol_type = other DNA
acgaatctctggtatacggagtattccccaacctggacggcacgtttaccgcgatgacgtataccagaagcaaaa

SEQ ID NO: 618237 - DNA, 75 bp, synthetic construct
  source 1..75: mol_type = other DNA
ttcaccgcgatgacgtataccaaaagtaaaacgtttaaaaccgaatctggcgcgcgtcgctggctagaaagaaat

SEQ ID NO: 618238 - DNA, 75 bp, synthetic construct
  source 1..75: mol_type = other DNA
cagaggaacttcttcttcgtcgcagacattgccgcaatctgagcaggtatcacagccagcagtaatttttcttca

SEQ ID NO: 618239 - DNA, 75 bp, synthetic construct
  source 1..75: mol_type = other DNA
ggtttaccaaagagcagttaatagcccacgcagaggagactattgaatcacagagactgtgcataccaggcacaa

SEQ ID NO: 618240 - DNA, 75 bp, synthetic construct
  source 1..75: mol_type = other DNA
aaagtgaaggagttagtcttgagtggcttaaagagggcaagggagaattaccaaatgatattggtatttatggta

SEQ ID NO: 618241 - DNA, 75 bp, synthetic construct
  source 1..75: mol_type = other DNA
ttaaactcacttaacggggtatctaatagttgttcattattattcctacaggcttcagataaaaaaacattacaa

SEQ ID NO: 618242 - DNA, 75 bp, synthetic construct
  source 1..75: mol_type = other DNA
gtatgaaggatgctcgatttcctggagttatgatcaatattcgttttcctctaccagaaaacgccacccagcgaa

SEQ ID NO: 618243 - DNA, 75 bp, synthetic construct
  source 1..75: mol_type = other DNA
gcatgataatcttaaaaaaatgggaagagatattaaaggtgggataaaaatgactttaatatctggtagtactca

SEQ ID NO: 618244 - DNA, 75 bp, synthetic construct
  source 1..75: mol_type = other DNA
ccagatcgtacctatcttaagtgtatgcagaaagcccgttttccgggagttatgattaatatacgttttccttta

SEQ ID NO: 618245 - DNA, 75 bp, synthetic construct
  source 1..75: mol_type = other DNA
ctggtttaatgaattcatcaccaccgggccacatggtgtggtgttggcaatgttcccgcttatctgggtcggcgt

SEQ ID NO: 618246 - DNA, 75 bp, synthetic construct
  source 1..75: mol_type = other DNA
tgccaaagcctgatttctcaagtcctgaagcgctgcaacaatcaatgcgcgacattcagcaatataccgacaatt

SEQ ID NO: 618247 - DNA, 75 bp, synthetic construct
  source 1..75: mol_type = other DNA
ggcacttcaggcgagagggcaaaacctttcctatcagtcagcaatgactggacacggacttgcagcagaaagact

SEQ ID NO: 618248 - DNA, 75 bp, synthetic construct
  source 1..75: mol_type = other DNA
tggtatgctaacttttcagatatcgtctgacacacaattaaactcccttaacgagatatcaaatagctgcgcatt

SEQ ID NO: 618249 - DNA, 75 bp, synthetic construct
  source 1..75: mol_type = other DNA
gataaatatgtggcaatgccaggtcaggagacaacactacatatagatcggagtgaaggtgctaaatatgtaggt

SEQ ID NO: 618250 - DNA, 75 bp, synthetic construct
  source 1..75: mol_type = other DNA
aataattatctcggtttaacctttaatcatgatgccatcagcgaaggtcaggccgcgttagcggcccaaggtacc

SEQ ID NO: 618251 - DNA, 75 bp, synthetic construct
  source 1..75: mol_type = other DNA
ggcgacacgctaactacccgcctgggcgatggcgtggtggtcagcgaagtcagcgcggtaaaacgttcacgcaaa

SEQ ID NO: 618252 - DNA, 75 bp, synthetic construct
  source 1..75: mol_type = other DNA
tgtgttccctaaccaggacggcaccttcaccgcgatgacgtataccaaaagtaaaacgtttaaaaccgcagctgg

SEQ ID NO: 618253 - DNA, 75 bp, synthetic construct
  source 1..75: mol_type = other DNA
attccccaacctggacggcacgtttaccgcgatgacgtataccagaagcaaaacgtttaaaacggaagctggcgc

SEQ ID NO: 618254 - DNA, 75 bp, synthetic construct
  source 1..75: mol_type = other DNA
gatggctggctcaaaaatgaataccacggggaggaggaaatctttaccggactggcatcgttaaacgatctggtt

SEQ ID NO: 618255 - DNA, 75 bp, synthetic construct
  source 1..75: mol_type = other DNA
ttcaccgcgatgacgtataccaaaagtaaaacgtttaaaaccgaaactggcgctcgtcgctggctggaaagaaat

SEQ ID NO: 618256 - DNA, 75 bp, synthetic construct
  source 1..75: mol_type = other DNA
gccatggcgtataccaaaagcaagacatttaaaactgcgtcttgtttcagtgactgttcggagaatgatgcggga

SEQ ID NO: 618257 - DNA, 75 bp, synthetic construct
  source 1..75: mol_type = other DNA
atggatactatcgttcttggtaacaacgaatctctggtatacggcgtgtttcccaaccaggacggcacgttcact

SEQ ID NO: 618258 - DNA, 75 bp, synthetic construct
  source 1..75: mol_type = other DNA
actatgcagcaggtttttgttccgctcccccggcgttaaggggaaatgaggtcagcatggatactatcgatcttg

SEQ ID NO: 618259 - DNA, 75 bp, synthetic construct
  source 1..75: mol_type = other DNA
cgtaaaggtcttccctacccccacgtcaaccagcagggcgaaattgaagccgatgataactggtgggccaccatg

SEQ ID NO: 618260 - DNA, 75 bp, synthetic construct
  source 1..75: mol_type = other DNA
cctgccttatccccacgtcaatcagcaaggcgagatcgaagctgatgccgactggtgggctactatgcaggctgc

SEQ ID NO: 618261 - DNA, 75 bp, synthetic construct
  source 1..75: mol_type = other DNA
aaagaccgcaatggcgatggggcagatgccgtacgccagaaagttccggcaatgctgaacagcgatgtgctgccc

SEQ ID NO: 618262 - DNA, 75 bp, synthetic construct
  source 1..75: mol_type = other DNA
tgctggatattctgacggatgatggctggctcaaaaatgaataccacggggaggaggaaatctttaccggactgg

SEQ ID NO: 618263 - DNA, 75 bp, synthetic construct
  source 1..75: mol_type = other DNA
ttgagcaaagaagaaattgaattgttaggccgtgaagggcataacgtgacgaaagtcagtcgtcgtgatttacct

SEQ ID NO: 618264 - DNA, 75 bp, synthetic construct
  source 1..75: mol_type = other DNA
tcgactgcgccctgatcttctatatcgacaagttcggcagccaagggctgtcactggccatcgagaagtgcttta

SEQ ID NO: 618265 - DNA, 75 bp, synthetic construct
  source 1..75: mol_type = other DNA
tacacctgaagagtttaatgttaattcatacaaaaaagtttatattcttggtcatggtagtgcaggtgataacca

SEQ ID NO: 618266 - DNA, 75 bp, synthetic construct
  source 1..75: mol_type = other DNA
ataaaccgagtccaacgataactacactttgttatggttttggtaatggacgttttggtcatcccgagcagcatc

SEQ ID NO: 618267 - DNA, 75 bp, synthetic construct
  source 1..75: mol_type = other DNA
aaaccacaaacatcggtaaagctgacagttagggattgcattggtaatttaccttcgattgaagcgggacaagca

SEQ ID NO: 618268 - DNA, 75 bp, synthetic construct
  source 1..75: mol_type = other DNA
ccaacattacgctgtatgagccgcgcggtgattatcagattatcgtcgagagtatgcagccagccggtgaaggct

SEQ ID NO: 618269 - DNA, 75 bp, synthetic construct
  source 1..75: mol_type = other DNA
agtatgcagccggccggtgaagggttgctgcaacaaaaatacgaacagctcaaagcaaaattgcaggccgaaggt

SEQ ID NO: 618270 - DNA, 75 bp, synthetic construct
  source 1..75: mol_type = other DNA
tactgatttgaaaagtaaagatgtgaatgtggctattggagcggcagtaaaaacggcatataaaaacaacagact

SEQ ID NO: 618271 - DNA, 75 bp, synthetic construct
  source 1..75: mol_type = other DNA
gagaacagttgcgcgtttaataggtaatgctgttcctgttaggcttggtgaggtcgtaggtgaaactattttaaa

SEQ ID NO: 618272 - DNA, 75 bp, synthetic construct
  source 1..75: mol_type = other DNA
gtggcgcgggtggcttgactcacggtcttcagaagtcggggcttaatgtagttgcaggttatgatatagatgcag

SEQ ID NO: 618273 - DNA, 75 bp, synthetic construct
  source 1..75: mol_type = other DNA
atactcaaaagccgttaatgattcagggcatagtccttggtgaaatggcaactcagatactaagaacgttaaata

SEQ ID NO: 618274 - DNA, 75 bp, synthetic construct
  source 1..75: mol_type = other DNA
tttgcggtgctggcggtttaacgcacggcttacatttggccggattggacgttgtcgcaggcattgatttagaag

SEQ ID NO: 618275 - DNA, 75 bp, synthetic construct
  source 1..75: mol_type = other DNA
aaaaagaattatacactctgttcctggtggtacatggaaggactggccgaaggagctgattgctgcttgtcatat

SEQ ID NO: 618276 - DNA, 75 bp, synthetic construct
  source 1..75: mol_type = other DNA
aaaacgtattgcttgctctaaaccaggagggacatggcgagactggccagtagagttgattgcatcatgccacat

SEQ ID NO: 618277 - DNA, 75 bp, synthetic construct
  source 1..75: mol_type = other DNA
taaaagaatacggcatcaagtttcgtccaaataagccagcgtcgcctcatcttaacggaaaggttgaacgttccc

SEQ ID NO: 618278 - DNA, 75 bp, synthetic construct
  source 1..75: mol_type = other DNA
gaaagccatagccgtcgccctaaacattcaccatcaacgaaaaccggcgctagcgaagtcgctctgattctggag

SEQ ID NO: 618279 - DNA, 75 bp, synthetic construct
  source 1..75: mol_type = other DNA
gcaatagcaacaatccacaaagtcctttgccagaatcaggttaaacctgttgttaaatttcggcttaaagctgat

SEQ ID NO: 618280 - DNA, 75 bp, synthetic construct
  source 1..75: mol_type = other DNA
gagggtggaaaagccaaaatactgcctatcaggtggaacgattatgccgtccgggttatgaataatgggcgtatg

SEQ ID NO: 618281 - DNA, 75 bp, synthetic construct
  source 1..75: mol_type = other DNA
agcccatcagatggggcgattacgctatccgggttatgaataatggacgtatggtgcagctatataataaatcga

SEQ ID NO: 618282 - DNA, 75 bp, synthetic construct
  source 1..75: mol_type = other DNA
ggtattgatattgctccctataaagaggcaaagattttacaacgagaaatagatgatttatcaactacaaaaaat

SEQ ID NO: 618283 - DNA, 75 bp, synthetic construct
  source 1..75: mol_type = other DNA
ttttgtttattaaaagaatttaagtcgagtagagtttctaaaattcctcattctgatttttcgaaagacattttg

SEQ ID NO: 618284 - DNA, 75 bp, synthetic construct
  source 1..75: mol_type = other DNA
aaatggaattacttgaaggtgataaaacttttgattttgttcgagatgaaatagtactctacgaagatagcttag

SEQ ID NO: 618285 - DNA, 75 bp, synthetic construct
  source 1..75: mol_type = other DNA
tgaaaatacatccaccaaatctgttgatcagactaatgaagagcggatgcaggaaaactcgccgctttatacaat

SEQ ID NO: 618286 - DNA, 75 bp, synthetic construct
  source 1..75: mol_type = other DNA
aggcgttgaaatttatcgatcaggattcccgtccagaggaagtgatcgatgaattaaaaaatcagagtgtaatgc

SEQ ID NO: 618287 - DNA, 75 bp, synthetic construct
  source 1..75: mol_type = other DNA
atggaagtcatcaacaaggaaaccgacagctttcaagcaatgtctgacagtgctgttttatcatatgtctatgaa

SEQ ID NO: 618288 - DNA, 75 bp, synthetic construct
  source 1..75: mol_type = other DNA
ctatcaccgaaatttatacggtgcaaaaaagaataaaagcactaagagatgcccttctgtcagcaaatcgatctg

SEQ ID NO: 618289 - DNA, 75 bp, synthetic construct
  source 1..75: mol_type = other DNA
ttgcatctggtgaatataagctcgctcaggagatttgcctttgtctggcggcatttacccaggcgaatctgaatg

SEQ ID NO: 618290 - DNA, 75 bp, synthetic construct
  source 1..75: mol_type = other DNA
atgttcgcgatacgctgttagaacgggttgaggttgatgcagacaacagaaactgtattctgcaatgtctggcat

SEQ ID NO: 618291 - DNA, 75 bp, synthetic construct
  source 1..75: mol_type = other DNA
gtaaatgcgtttgcagggttaaacgatccggttgccatgctgaaattagtccatcaaccacgaaaattcgatgcg

SEQ ID NO: 618292 - DNA, 75 bp, synthetic construct
  source 1..75: mol_type = other DNA
gcagaaaaacaaacgctggtgcgcaataatggttctgaagttcaatcattagatccgcacaaaattgaaggggtt

SEQ ID NO: 618293 - DNA, 75 bp, synthetic construct
  source 1..75: mol_type = other DNA
caatgacttacagtctggaagcagctgtcgtttttgccgatggccctgcagcaactgaaacactggcagcgctgg

SEQ ID NO: 618294 - DNA, 75 bp, synthetic construct
  source 1..75: mol_type = other DNA
attctggcgtcctggcattacacccgtaaggatccaggcgatactttcagcaatttcgtcacaatggtgaaacca

SEQ ID NO: 618295 - DNA, 75 bp, synthetic construct
  source 1..75: mol_type = other DNA
ccagccgggtaagccgacgcagaacgctttcattgagcgttttaacaggacataccgtacagaaatactcgattt

SEQ ID NO: 618296 - DNA, 75 bp, synthetic construct
  source 1..75: mol_type = other DNA
gaatgggcagagaaacatacagtacaactggaatttatccaaccgggtaaaccgacacagaacgcattcattgaa

SEQ ID NO: 618297 - DNA, 75 bp, synthetic construct
  source 1..75: mol_type = other DNA
ggataacgttccggagctggtctcactgacgctggcacaatgggcagaagagcatggagtgatactggaatttat

SEQ ID NO: 618298 - DNA, 75 bp, synthetic construct
  source 1..75: mol_type = other DNA
ggatactgtatgccctgcgttcaggcacaacagcagcgtgagcacgatgaatatatcaggaaaaataaaaagacc

SEQ ID NO: 618299 - DNA, 75 bp, synthetic construct
  source 1..75: mol_type = other DNA
cggagcagatgctttggcaatttgggctactttggggcttgacgtgctttacgttgttacgggacagagagggga

SEQ ID NO: 618300 - DNA, 75 bp, synthetic construct
  source 1..75: mol_type = other DNA
gcctgttgttgcaccttatgtgtcacaagaaaagaaagagttaatggatgcattcgacgaaatgagccccgaaca

SEQ ID NO: 618301 - DNA, 75 bp, synthetic construct
  source 1..75: mol_type = other DNA
tcaagctgaacatagacgtgtcattaccgcctgtcagggaagacggtaaaagcatcacgcagccgggagtcgatc

SEQ ID NO: 618302 - DNA, 75 bp, synthetic construct
  source 1..75: mol_type = other DNA
aaatataaagaactggatgagctggtcaaaaaactatcaccaagagccaatgatccgcttcagaaccgtcctttt

SEQ ID NO: 618303 - DNA, 75 bp, synthetic construct
  source 1..75: mol_type = other DNA
gaaagggttaaacttttatctcctagggcgaatgatccgcttcagagtcgtcctttttttgaggccaccagacta

SEQ ID NO: 618304 - DNA, 75 bp, synthetic construct
  source 1..75: mol_type = other DNA
gatgcagaaacgaatacgctgtccggaaaacgaaatgagttggatcaggcatctgctaaatataaagaactggat

SEQ ID NO: 618305 - DNA, 75 bp, synthetic construct
  source 1..75: mol_type = other DNA
atataactggcacaatgtccgataagtttctgcctgaactaaaacgtgcacatgacaagttagtacaacaaaatt

SEQ ID NO: 618306 - DNA, 75 bp, synthetic construct
  source 1..75: mol_type = other DNA
gaaacaactgctgaggttgtggactatataactggcacaatgtccgataagtttctgcctgaactaaaacgtgca

SEQ ID NO: 618307 - DNA, 75 bp, synthetic construct
  source 1..75: mol_type = other DNA
atcatgccggaaggtgcatttggaattggtaaagattttgtttcattgcaacatatttttccacttgatgaaaac

SEQ ID NO: 618308 - DNA, 75 bp, synthetic construct
  source 1..75: mol_type = other DNA
tttaagctccagtattcatgcccgtgatgcagaaatgaatacgctgtccggaaaacgaaatgagctggctcaggc

SEQ ID NO: 618309 - DNA, 75 bp, synthetic construct
  source 1..75: mol_type = other DNA
atgaataagaaatacattgttgaagttatagagcgagaaacgaaagaagtaattaaacatttcgaatttgataat

SEQ ID NO: 618310 - DNA, 75 bp, synthetic construct
  source 1..75: mol_type = other DNA
ttcttctagttatagccataatgttttctcttctcggcacaaaaagtaggatcacatctccattacctttgcatt

SEQ ID NO: 618311 - DNA, 75 bp, synthetic construct
  source 1..75: mol_type = other DNA
gccgcagaagcacaggctaaagcaaaagcaaaccgggatgcgctgactcaacatctgaaggatattgtgaatgag

SEQ ID NO: 618312 - DNA, 75 bp, synthetic construct
  source 1..75: mol_type = other DNA
gcaatgtgaatgaagctctcgttgcttttgaaaaatacaaggatattttaaataagaaattcagcaaagccgatc

SEQ ID NO: 618313 - DNA, 75 bp, synthetic construct
  source 1..75: mol_type = other DNA
aaaaagcacagaataatctccttaattcacagattaaggatgctgttgatgcaacagttagcttttatcaaacgc

SEQ ID NO: 618314 - DNA, 75 bp, synthetic construct
  source 1..75: mol_type = other DNA
atcacggcgtttgtcaagcaagcgagaagaaatcattcaactccgtaagctgactgaagcaaattcacgcttcat

SEQ ID NO: 618315 - DNA, 75 bp, synthetic construct
  source 1..75: mol_type = other DNA
tacttgaagatggaatatctttatataatgacggtaattatcatgggagagatatggagcagcagaaaaatgtcg

SEQ ID NO: 618316 - DNA, 75 bp, synthetic construct
  source 1..75: mol_type = other DNA
atgaacggtgggaccttaatggtcgcattttattaggttttgacggtgcccgtaagcttgataatggttatttcg

SEQ ID NO: 618317 - DNA, 75 bp, synthetic construct
  source 1..75: mol_type = other DNA
ggcacttcagcccctgctcgatgacgggcgggcaaaatccattaccgttgacacaaaaccggggcagcgcggctg

SEQ ID NO: 618318 - DNA, 75 bp, synthetic construct
  source 1..75: mol_type = other DNA
cgagcaaatccgatacctgacacccggaaaggtggaaatttaccgcaaggctaaagatgctgacggtgccgcgac

SEQ ID NO: 618319 - DNA, 75 bp, synthetic construct
  source 1..75: mol_type = other DNA
agatccggaaaatggcatcgtagttaatcttaatacagcctatttggatgccagtaatgagaaagatttcactgc

SEQ ID NO: 618320 - DNA, 75 bp, synthetic construct
  source 1..75: mol_type = other DNA
cggtcgttttgaagcttacgatatgttcccgctaaatcaggatactttcattgagtattccggtaataccgctaa

SEQ ID NO: 618321 - DNA, 75 bp, synthetic construct
  source 1..75: mol_type = other DNA
tccttctgcatatcactggtatacggaacagtatggcgtgaagtggcctgtggggtatgaggtgaatatcagtag

SEQ ID NO: 618322 - DNA, 75 bp, synthetic construct
  source 1..75: mol_type = other DNA
agagcggtattggccagcgtcgctgggaaggattaccggatgatgtcagggaaaccatcaccgtgcatttcaccg

SEQ ID NO: 618323 - DNA, 75 bp, synthetic construct
  source 1..75: mol_type = other DNA
tggtggaaccgtctgtgtgacaacgtactgccggaaaaaaccatgccgtttgacctgctgacggttctgcccacc

SEQ ID NO: 618324 - DNA, 75 bp, synthetic construct
  source 1..75: mol_type = other DNA
ttaaccggagcgttaccgcaaatgcaggctgtgaaccagaaccatcggatgaggaggttaccgatgagtcggttg

SEQ ID NO: 618325 - DNA, 75 bp, synthetic construct
  source 1..75: mol_type = other DNA
aaccaccacgcgagaacaacactggccggacaaaacgggctggacgcaattaatcgaactggcaacgaaaaccat

SEQ ID NO: 618326 - DNA, 75 bp, synthetic construct
  source 1..75: mol_type = other DNA
aaaatctactgcgccatttgtcgcaagagattccggcgacacccggcattcgggttatcgatattcctttccctc

SEQ ID NO: 618327 - DNA, 75 bp, synthetic construct
  source 1..75: mol_type = other DNA
gcccggttcagttttccggcctggatgttacagcttctgcgtaaagcccgggaccgcattatccgactgctggaa

SEQ ID NO: 618328 - DNA, 75 bp, synthetic construct
  source 1..75: mol_type = other DNA
atgttattcagccattcttccctctccgcaccagtgaaatcatatctgacgttttttcctgaagaaattcgccag

SEQ ID NO: 618329 - DNA, 75 bp, synthetic construct
  source 1..75: mol_type = other DNA
gacggataatggttcatgctaccgggcgaatgaaacacgacagttggcctggatgttgggccttgaaccgaagaa

SEQ ID NO: 618330 - DNA, 75 bp, synthetic construct
  source 1..75: mol_type = other DNA
aagcctgggtcgatgattttgtcagggaagccttcggtcgcatgaaaaaagattacgtctgtaaagacagcgaac

SEQ ID NO: 618331 - DNA, 75 bp, synthetic construct
  source 1..75: mol_type = other DNA
gacggataatggttcatgctaccgggctaatgaaacacgacagttggcccggatgttgggccttgaaccgaagag

SEQ ID NO: 618332 - DNA, 75 bp, synthetic construct
  source 1..75: mol_type = other DNA
gacggataatggttcatgctaccgggctaatgaaacacgacagttggccgggatgttgggccttgaaccgaagac

SEQ ID NO: 618333 - DNA, 75 bp, synthetic construct
  source 1..75: mol_type = other DNA
gtggcgaaaaacggtcaacccgggataagaatcatgcacagcaggcttttggtgacgccatcggccagagttttg

SEQ ID NO: 618334 - DNA, 75 bp, synthetic construct
  source 1..75: mol_type = other DNA
atgtcattcagccattcttccctctcctcgcaagtgaaatcaaatctgacgtttcttcctgaagaaattcgccag

SEQ ID NO: 618335 - DNA, 75 bp, synthetic construct
  source 1..75: mol_type = other DNA
atgtcattcagccattcttccctctcctcccaagtcaaatcaaatctgacgtttcttcctgaagaaattcgccag

SEQ ID NO: 618336 - DNA, 75 bp, synthetic construct
  source 1..75: mol_type = other DNA
gttcccttcatcatttccggtactctccgttgccgcgcctgtcggctggaaccttccggcgtttgtgtcgctgat

SEQ ID NO: 618337 - DNA, 75 bp, synthetic construct
  source 1..75: mol_type = other DNA
tccagcctggatattacagcttctgcgcaaaacccgggaccgcattatccacctgctggtcacactgtgggatca

SEQ ID NO: 618338 - DNA, 75 bp, synthetic construct
  source 1..75: mol_type = other DNA
tgaagaatggaatgccacagaaaaatgcccgtcccgtcagcaggaactctcactggcgacagtaacagcccgggt

SEQ ID NO: 618339 - DNA, 75 bp, synthetic construct
  source 1..75: mol_type = other DNA
agtcagtcagttacagacccggctcgcggtaaaaacaaatctgagtgcgcttatggaggaaagaacggagaccgt

SEQ ID NO: 618340 - DNA, 75 bp, synthetic construct
  source 1..75: mol_type = other DNA
accggcaatgctgaacagcgatgtgctgccagcctcccgtgtttatcccggctcatcacgccaggcatacctggc

SEQ ID NO: 618341 - DNA, 75 bp, synthetic construct
  source 1..75: mol_type = other DNA
cccgtccgcaatttattaatcacactgcaacaaaaactcgccaccccggcaggacagcaagtcgcacagaccctg

SEQ ID NO: 618342 - DNA, 75 bp, synthetic construct
  source 1..75: mol_type = other DNA
ccgtcgccgtcggcagagtggtttctggggaaagatttgtggagcgtttggcaccagtgactggggctgggaaaa

SEQ ID NO: 618343 - DNA, 75 bp, synthetic construct
  source 1..75: mol_type = other DNA
aagaaggttgccacggctatgcgccgatggtggattgcgctgctggcgtgagtttccagtctatggtgccggact

SEQ ID NO: 618344 - DNA, 75 bp, synthetic construct
  source 1..75: mol_type = other DNA
caaaaagcctcagtttcaatgcaaatggggattcaggtgcgtaataagctggtggcggcatatcaggaagtgatg

SEQ ID NO: 618345 - DNA, 75 bp, synthetic construct
  source 1..75: mol_type = other DNA
gaagttatgtcactgacccgggcatatttcggggagctgcaggcatccattgagcaggatattaaccagcccgtc

SEQ ID NO: 618346 - DNA, 75 bp, synthetic construct
  source 1..75: mol_type = other DNA
aagtcatacagagctcccattccagagcggcggcactggcggttgactctgccgccgcaaaactgatgcagaatg

SEQ ID NO: 618347 - DNA, 75 bp, synthetic construct
  source 1..75: mol_type = other DNA
ggaagctttcggacctatggtggaagagggcgactggaaagacagcactaaggtaaataaaaaggcagaaaaact

SEQ ID NO: 618348 - DNA, 75 bp, synthetic construct
  source 1..75: mol_type = other DNA
gcgacttcaggcgttaaatgaaagggttcctgagctcattactgacagtaaggcgctgagggaagagctggagac

SEQ ID NO: 618349 - DNA, 75 bp, synthetic construct
  source 1..75: mol_type = other DNA
gcccgcctggaggatgagggctttaccgtaaaaatcagttttccggcagtcagccagttacagacccggctcgcg

SEQ ID NO: 618350 - DNA, 75 bp, synthetic construct
  source 1..75: mol_type = other DNA
taaccgtgcacttcatgcgttacggaataccggaacacttcctgctgataaagcctgggtcgatgattttatcag

SEQ ID NO: 618351 - DNA, 75 bp, synthetic construct
  source 1..75: mol_type = other DNA
cacccagctgaactcgaaagccgatgaggaggttcgtaaagagcttaatgccattgctgacgtgtcagtcggccg

SEQ ID NO: 618352 - DNA, 75 bp, synthetic construct
  source 1..75: mol_type = other DNA
atgtcattcagccattcttccctctcctcacaagtgaaatcagatctgacgtttcttcctgaagaaattcgccag

SEQ ID NO: 618353 - DNA, 75 bp, synthetic construct
  source 1..75: mol_type = other DNA
cgttgggatcagtaaacgcttttttgagcagcattacctgccgttgttgccttattgctttgttgcttcgcaggt

SEQ ID NO: 618354 - DNA, 75 bp, synthetic construct
  source 1..75: mol_type = other DNA
cgtgggttggtggctataccggcaaagatccgctggataatacctatacccggaatatgtacattgtgaagcact

SEQ ID NO: 618355 - DNA, 75 bp, synthetic construct
  source 1..75: mol_type = other DNA
cggtggctcatccgttgaaatggcggaagccgagtacatggtccgtgccagcggatatcttcagagcattgatga

SEQ ID NO: 618356 - DNA, 75 bp, synthetic construct
  source 1..75: mol_type = other DNA
accctttgttgtcgacgtcactccgctcgaagcagaagcattacgtcgggaactcggcaactacgatgttatttt

SEQ ID NO: 618357 - DNA, 75 bp, synthetic construct
  source 1..75: mol_type = other DNA
ttcattcgtggtggaggtcactcccctcgaaccggaagtacttcgtcaggaactcggcaattatgatgtcatttt

SEQ ID NO: 618358 - DNA, 75 bp, synthetic construct
  source 1..75: mol_type = other DNA
gtgattacattgccacttttaaattgttgggtctgtacgacattgaacagtgctgggtttgtgcggcttcactgc

SEQ ID NO: 618359 - DNA, 75 bp, synthetic construct
  source 1..75: mol_type = other DNA
gatggctgctgccattgccgtcagactggccgaaatgggatttgatgtccatctgacaacgtctgatcctgcggc

SEQ ID NO: 618360 - DNA, 75 bp, synthetic construct
  source 1..75: mol_type = other DNA
cactcatgaagaactggcagcgattggtcttaaaaatcagtatctggtgatcaacggcgtattgcctgagtccgg

SEQ ID NO: 618361 - DNA, 75 bp, synthetic construct
  source 1..75: mol_type = other DNA
tctctgaaaacatgtcattctctgagttagtgaatgatattgcccgcagtgaacacggtctgatcatgctgatgg

SEQ ID NO: 618362 - DNA, 75 bp, synthetic construct
  source 1..75: mol_type = other DNA
accagctatcccggccaggccccgcagattgtagaaaaccaggtcacctatccacttaccaccaccatgctgtcc

SEQ ID NO: 618363 - DNA, 75 bp, synthetic construct
  source 1..75: mol_type = other DNA
gcagggcttccatatgtcagtcgcaaccggaaccgggtttatcgccctggccggtgtggcagcagagtttggcgt

SEQ ID NO: 618364 - DNA, 75 bp, synthetic construct
  source 1..75: mol_type = other DNA
ttgcccgttatcccattaatctgcgttatccgcaaagctggcgcgatagcctgcaggcactgcgccagctaccga

SEQ ID NO: 618365 - DNA, 75 bp, synthetic construct
  source 1..75: mol_type = other DNA
caaaagcccgatgtagtgctggcgcgtgattacatcgctacctttaaactgctggggctttacgacattgaacag

SEQ ID NO: 618366 - DNA, 75 bp, synthetic construct
  source 1..75: mol_type = other DNA
gtgaatgcagaatgacgctggtcgatctgcccggcattggtgagacgccgcagcatgatcaggaataccggacac

SEQ ID NO: 618367 - DNA, 75 bp, synthetic construct
  source 1..75: mol_type = other DNA
tcaccctcggtgaacccggcgtggcgttaaacgatgtgatgaccgatatgcaaaaagcctcagtttctatgcaaa

SEQ ID NO: 618368 - DNA, 75 bp, synthetic construct
  source 1..75: mol_type = other DNA
ggggtttttcaggtataaaaaaagcggccccgaaatggagccgcctttctgaacagataacccgctgcgccgttt

SEQ ID NO: 618369 - DNA, 75 bp, synthetic construct
  source 1..75: mol_type = other DNA
atgtcattcagccattcttccctctcctcacaagtcaaatcacatctgacgtttcttcctgaagaaattcgccag

SEQ ID NO: 618370 - DNA, 75 bp, synthetic construct
  source 1..75: mol_type = other DNA
atgtcattcagccattcttccctctcctcacaagttaaatcatatctgacgtttcttcctgaagaaattcgccag

SEQ ID NO: 618371 - DNA, 75 bp, synthetic construct
  source 1..75: mol_type = other DNA
atgtcattcagccattcttccctctcctcacaagtaaaatcaaatctgacgtttcttcctgaagaaattcgccag

SEQ ID NO: 618372 - DNA, 75 bp, synthetic construct
  source 1..75: mol_type = other DNA
atgctgcaaatagcagtattatcgagtgggatcaagaaagcgatgtattagacatcagagatccttacttactat

SEQ ID NO: 618373 - DNA, 75 bp, synthetic construct
  source 1..75: mol_type = other DNA
aggtagtcttaaagggtctgcatccgctggttatagtacagcagatcaaacctcagaatcatttgcgatagatct

SEQ ID NO: 618374 - DNA, 75 bp, synthetic construct
  source 1..75: mol_type = other DNA
ctggctggactaccaagataacgaacccggttacaggtaaagaatgttcagggggagcagcaagaaatttaagga

SEQ ID NO: 618375 - DNA, 75 bp, synthetic construct
  source 1..75: mol_type = other DNA
tcaccagcaacgcattgccattgagcgcaagcaactggatgatttttttgaacttgatgacaacttccatcaact

SEQ ID NO: 618376 - DNA, 75 bp, synthetic construct
  source 1..75: mol_type = other DNA
atgaccgtcgaaacgcaacttaatcccacacagcctgtcaatcagcaaatttatcgtatccttcgtcgcgacatt

SEQ ID NO: 618377 - DNA, 75 bp, synthetic construct
  source 1..75: mol_type = other DNA
tagcaatgcgccgtaatacctcacaccacggcgctgatagtgattattctgattctttggccttgcggcgctggc

SEQ ID NO: 618378 - DNA, 75 bp, synthetic construct
  source 1..75: mol_type = other DNA
gtttgaggccggttatagtagcccgagtttgtttattaaaacgtttaagaaattaacgtcctttacgcctaagag

SEQ ID NO: 618379 - DNA, 75 bp, synthetic construct
  source 1..75: mol_type = other DNA
atttccgcgaaacagggctggaagagtttgttgagatggttactttttatgtcattaaccgtttacgtcattacc

SEQ ID NO: 618380 - DNA, 75 bp, synthetic construct
  source 1..75: mol_type = other DNA
gtattactggattgcatcagcatgactattatgaatttaccctggttttaactggtcgttatttccaggagatta

SEQ ID NO: 618381 - DNA, 75 bp, synthetic construct
  source 1..75: mol_type = other DNA
ggaatatcgtctcgctgaaacacttcgcgcacagcttagcgccacgcgcgaacgctttggtaatacagtgacgca

SEQ ID NO: 618382 - DNA, 75 bp, synthetic construct
  source 1..75: mol_type = other DNA
ccgccgggtgaccttccgcccacagcatgggcaacaggttttagttcgcgccaatattacgctctacgagccgcg

SEQ ID NO: 618383 - DNA, 75 bp, synthetic construct
  source 1..75: mol_type = other DNA
gacgattgccgactttgttgctgatctgcgtgcgccaacgccgtctgccgccgctgaagtagtgagccgcaatca

SEQ ID NO: 618384 - DNA, 75 bp, synthetic construct
  source 1..75: mol_type = other DNA
tttccgatgaccgatggctggcatccgtcgccggattttcgacgacgggctgcgctgtggggcgtggctctttct

SEQ ID NO: 618385 - DNA, 75 bp, synthetic construct
  source 1..75: mol_type = other DNA
ttcgaaccgctggacccagaagaacggggctgcgccgtcgaagctctggattgcacagattggcgcgatgactga

SEQ ID NO: 618386 - DNA, 75 bp, synthetic construct
  source 1..75: mol_type = other DNA
atggggaatgttcggttcttgcaaggagtgaaaaaatatttttgtactaaggcattagatgtcattctgctaatt

SEQ ID NO: 618387 - DNA, 75 bp, synthetic construct
  source 1..75: mol_type = other DNA
ctgacaattcacatatctgtcctgttgctggattatttatgtccgggggggcagatatgccagatatcagtattc

SEQ ID NO: 618388 - DNA, 75 bp, synthetic construct
  source 1..75: mol_type = other DNA
gtgaggctctggatacctgggtatgccgaccaggaatgacacaggagcaggcgacgatattaatcacggaagcat

SEQ ID NO: 618389 - DNA, 75 bp, synthetic construct
  source 1..75: mol_type = other DNA
gacacctgatggagattgggttaattgttgataccggtgagagaaaaggccgaacaaagcaaattgtggtgtacc

SEQ ID NO: 618390 - DNA, 75 bp, synthetic construct
  source 1..75: mol_type = other DNA
cgacgaacgcgtagcgcgggcgatttttgccagccgcattccggtagtgagtgccgtcgggcatgaaaccgatgt

SEQ ID NO: 618391 - DNA, 75 bp, synthetic construct
  source 1..75: mol_type = other DNA
tggacggcactttattgatgcctgaccacctcttaggtgagaaaaccctctctactctggcgcgcctgcgtgaac

SEQ ID NO: 618392 - DNA, 75 bp, synthetic construct
  source 1..75: mol_type = other DNA
cgccatacatcggcggcgcattctgtaccgacaggctaaaactcacccctttcacgaaatattgcgatgaccatt

SEQ ID NO: 618393 - DNA, 75 bp, synthetic construct
  source 1..75: mol_type = other DNA
cgcaaagggttaccaacctggggcgatgaagtacgtttgtgctgggaggtagacagttgtgtggtgctgacggtt

SEQ ID NO: 618394 - DNA, 75 bp, synthetic construct
  source 1..75: mol_type = other DNA
cgcaaaggcctgccttacccccacgttaatcagcaaggcgaaattgaagccgatgctgactggtgggctactatg

SEQ ID NO: 618395 - DNA, 75 bp, synthetic construct
  source 1..75: mol_type = other DNA
cggcatggtgcaatcgctgaatgtttccgttgcctcagccctcattctttacgaagcccagcgccagcggcaaaa

SEQ ID NO: 618396 - DNA, 75 bp, synthetic construct
  source 1..75: mol_type = other DNA
cgcgactgcgtgaacgcgacattaccctcacttttgccacggggcgtcatgcgctggagatgcagcatattctcg

SEQ ID NO: 618397 - DNA, 75 bp, synthetic construct
  source 1..75: mol_type = other DNA
gcgcacagacgcgaattcaacaactggaatatcgtctggcagaaacgttgcgcgcgcaactgagtgcaacgcgag

SEQ ID NO: 618398 - DNA, 75 bp, synthetic construct
  source 1..75: mol_type = other DNA
atgagctttgcgctggagaatcagcttaaacgcgcgggtcagcaacagcagcgattaacacggcaactcgtccag

SEQ ID NO: 618399 - DNA, 75 bp, synthetic construct
  source 1..75: mol_type = other DNA
catcgcctgcaacaacagcatccccagttgcgtctggcgcgtcagcagacggcgctggagagacttcagcaacga

SEQ ID NO: 618400 - DNA, 75 bp, synthetic construct
  source 1..75: mol_type = other DNA
aggcgatggtgctggccaagcggtttgatactggttcgtgttccgaatcatgtgaaatctggggtgaccaattgg

SEQ ID NO: 618401 - DNA, 75 bp, synthetic construct
  source 1..75: mol_type = other DNA
ttgatcgttgggcgcggtggcggttcgctggaagatttatggagttttaacgacgaacgtgtagcgcgggcgatt

SEQ ID NO: 618402 - DNA, 75 bp, synthetic construct
  source 1..75: mol_type = other DNA
aaaacaataataagctaatacttattaggtccatgattatagcttgcataccaattatatatttgtttgcaagta

SEQ ID NO: 618403 - DNA, 75 bp, synthetic construct
  source 1..75: mol_type = other DNA
cacccagatgaactccaaagccgatgacgaggtccgtaaagagcttaatgccattgctgacgtatcagccggccg

SEQ ID NO: 618404 - DNA, 75 bp, synthetic construct
  source 1..75: mol_type = other DNA
cacccagatgaactcaaaagccgatgaagacgtccgtaaagagcttaatgccattgctgacgtatcagccggccg

SEQ ID NO: 618405 - DNA, 75 bp, synthetic construct
  source 1..75: mol_type = other DNA
tttatcgatggtccggtatcaataacccgggctgggaggatgacaggatacgagtctttgatccggaaaaccccg

SEQ ID NO: 618406 - DNA, 75 bp, synthetic construct
  source 1..75: mol_type = other DNA
acttcctctggcaaatcatccgcagatcaccgttgttgacggtggtgaagagcgtgctaattccgtgctggcagg

SEQ ID NO: 618407 - DNA, 75 bp, synthetic construct
  source 1..75: mol_type = other DNA
gtccttgtttgcatcaggatgacctcgcgcgattgttggcgttgagcgaaaccagccgcacggggggatcctcgc

SEQ ID NO: 618408 - DNA, 75 bp, synthetic construct
  source 1..75: mol_type = other DNA
cactgatgcaggaagatgcaactggtgcgctagtggtatgggatggaacgagcgcaggcaaagcggtttatgttt

SEQ ID NO: 618409 - DNA, 75 bp, synthetic construct
  source 1..75: mol_type = other DNA
ggaaaataatcttcaatacgtcctctgcttcagagatgaaggatgtgctgaccttgatgcgtgtgatgctgatat

SEQ ID NO: 618410 - DNA, 75 bp, synthetic construct
  source 1..75: mol_type = other DNA
ctttccgcattaattgaccttgagtttactgaaagcgaagccaaagagttactcgccggagatttctgtgggcac

SEQ ID NO: 618411 - DNA, 75 bp, synthetic construct
  source 1..75: mol_type = other DNA
gacggataatggttcatgctaccgggcaaatgaaacacgacagttggcccggatgttgggccttgaaccgaagat

SEQ ID NO: 618412 - DNA, 75 bp, synthetic construct
  source 1..75: mol_type = other DNA
atgagcgcaattaaagaaatgccagtggaacgtaatgaatatggctgctggacgcatcctgaatatgaaaaattc

SEQ ID NO: 618413 - DNA, 75 bp, synthetic construct
  source 1..75: mol_type = other DNA
atctggacgcagatggtcccgatattgcctcctggaaaccggagcgcccggaaggtgaaggctggttcattggtt

SEQ ID NO: 618414 - DNA, 75 bp, synthetic construct
  source 1..75: mol_type = other DNA
attacccgcacggcctccggtgctgatagtctgacacgcctgaatgacggcgagctgatgctgacaccatcctgg

SEQ ID NO: 618415 - DNA, 75 bp, synthetic construct
  source 1..75: mol_type = other DNA
tgggtgttggtgcatgacgccgctcgcccttgtctgcatcaggatgaccttgcgcgtctgttggcgttgagcgaa

SEQ ID NO: 618416 - DNA, 75 bp, synthetic construct
  source 1..75: mol_type = other DNA
ttgccgccttccgggactactgggcagcggaggggaaagtgtttacgcagattcagtgggagcagaaattcgccc

SEQ ID NO: 618417 - DNA, 75 bp, synthetic construct
  source 1..75: mol_type = other DNA
cacgtgcagcacgtcagggcacaggtaaaaccagtcagcaaggggggaagtcatgcagcaccaggtggcaccgca

SEQ ID NO: 618418 - DNA, 75 bp, synthetic construct
  source 1..75: mol_type = other DNA
ttgatctcacctggacgttggtggcaaacggctaccgtattcggcaggcgaatcgctgcatcgtatacccacagg

SEQ ID NO: 618419 - DNA, 75 bp, synthetic construct
  source 1..75: mol_type = other DNA
ggttaaatgtggagagttgaatatttcacgtccggatgaaagatatttcgggtttaataccgataaatatactgt

SEQ ID NO: 618420 - DNA, 75 bp, synthetic construct
  source 1..75: mol_type = other DNA
tgctgccggaactgtctgctgaagcaaacccgttccgtaatcgtctggcagagtctgaagccagcaacgatcagg

SEQ ID NO: 618421 - DNA, 75 bp, synthetic construct
  source 1..75: mol_type = other DNA
gtccctgcagtcacgctgcattatttgcagaacctgcttgagcactcccgccaggacgcggcagctcgtcaaaag

SEQ ID NO: 618422 - DNA, 75 bp, synthetic construct
  source 1..75: mol_type = other DNA
ggcagagcgcaagagagcgcagcgggagcgggaaaagctgcggaaacataatgctgattgtcacgatgagtcacg

SEQ ID NO: 618423 - DNA, 75 bp, synthetic construct
  source 1..75: mol_type = other DNA
cgggcggcctgctgtgcagctcgctggcaacggcggcggatagccccgacctgattgcccaagcgaaaaaagagg

SEQ ID NO: 618424 - DNA, 75 bp, synthetic construct
  source 1..75: mol_type = other DNA
tgaactggcctgagtctgttaaagaactgtcagtaaaggttgcagcgtttgttggctcaggtatttctgttcagc

SEQ ID NO: 618425 - DNA, 75 bp, synthetic construct
  source 1..75: mol_type = other DNA
cggcctgagtgaacccatcgggaaatttccgatgaccgatggctggcatccgtcgccggattttcgacggcgggc

SEQ ID NO: 618426 - DNA, 75 bp, synthetic construct
  source 1..75: mol_type = other DNA
tttaatcaccggatgggaaaaacgccaggtagcgaaagaggataacggtaatgtttcgcaaaccgcgaaatcccc

SEQ ID NO: 618427 - DNA, 75 bp, synthetic construct
  source 1..75: mol_type = other DNA
aggcctgagcgaacccatcgggaaatttccgatgaccgatagctggtatccgtcacgggattttcgacgacgggc

SEQ ID NO: 618428 - DNA, 75 bp, synthetic construct
  source 1..75: mol_type = other DNA
ttcgcgcgcactttcccgcattacaggatgcgggcgtctatctcgacagcgccgctactgcgctcaaacccgaag

SEQ ID NO: 618429 - DNA, 75 bp, synthetic construct
  source 1..75: mol_type = other DNA
caataatggcgaccttatccatgccagtgccgccagccacggtgtgcatgtgttggccggacttcataatgacag

SEQ ID NO: 618430 - DNA, 75 bp, synthetic construct
  source 1..75: mol_type = other DNA
cgaagaacaagcagccaaggtcaatctcttgaagcaagaggccttgcctgatattaacgataccgtatcgataaa

SEQ ID NO: 618431 - DNA, 75 bp, synthetic construct
  source 1..75: mol_type = other DNA
ttcaaactaggttaggcagtgttgaatcgaaggcgggtctccgacatgagcttgaagctaaaaagaaagagcgag

SEQ ID NO: 618432 - DNA, 75 bp, synthetic construct
  source 1..75: mol_type = other DNA
gccgaaagtctgaaccgcttctggcgaccgatcatgatagcgctgctgtgtgcggtactgctgttacggggtgtc

SEQ ID NO: 618433 - DNA, 75 bp, synthetic construct
  source 1..75: mol_type = other DNA
tgatgatgtggctgagcgggtgcgccgggccgtctgtgaaatacgtgcctgtgcagccggttccgatccccgctg

SEQ ID NO: 618434 - DNA, 75 bp, synthetic construct
  source 1..75: mol_type = other DNA
agcaccagcgatctgaacgttcgtcaggcctttgtcgaattgggtaacctgccgacgttcgctgggccatttaag

SEQ ID NO: 618435 - DNA, 75 bp, synthetic construct
  source 1..75: mol_type = other DNA
tgcagatgatggtactggcaggcgcattaccgccggcattctccggaatcattattgccagccggtttaatgtct

SEQ ID NO: 618436 - DNA, 75 bp, synthetic construct
  source 1..75: mol_type = other DNA
ccaaagggttaaggggaagagagtgaagggggaacgggcttacccgaaaaggggcttcccttcgtctttcgagtt

SEQ ID NO: 618437 - DNA, 75 bp, synthetic construct
  source 1..75: mol_type = other DNA
gccattgtctacatcgctcacgatcgaggtgtgtaaccctgttcaggcttgttgtactgcgcacgcgtattgctc

SEQ ID NO: 618438 - DNA, 75 bp, synthetic construct
  source 1..75: mol_type = other DNA
gtttcggtagttttacggacctcagttggaaaaatagccttaaggatgcaggtaacaatgtccagaatttcaaga

SEQ ID NO: 618439 - DNA, 75 bp, synthetic construct
  source 1..75: mol_type = other DNA
ttggttgctacaaattttttaaacgtacccatgcagaagcagcagtatgtgcattaattgcaggttcacctacca

SEQ ID NO: 618440 - DNA, 75 bp, synthetic construct
  source 1..75: mol_type = other DNA
gttgggttattttagcggcagacgagaaactttttcagaagatcaagctcgggcatttaataaactggtattaaa

SEQ ID NO: 618441 - DNA, 75 bp, synthetic construct
  source 1..75: mol_type = other DNA
agcgaagtttgatggcttaaccccggagttccagcaggcgctgatctcatctgcgcaggaagcgggtaactacca

SEQ ID NO: 618442 - DNA, 75 bp, synthetic construct
  source 1..75: mol_type = other DNA
ccgctggcagcgccgtacacccgacgtggagcacggtatctggcctgacgttgctgacgaacgtctccagcaatg

SEQ ID NO: 618443 - DNA, 75 bp, synthetic construct
  source 1..75: mol_type = other DNA
cgggcggcatcatgccagcaatcggttttgccgtgctgctgaaaatcatgatgaaaaacgtctatatcccctact

SEQ ID NO: 618444 - DNA, 75 bp, synthetic construct
  source 1..75: mol_type = other DNA
caacgtggtacacttggggctgcgttttggtctggcgcattatgcttaccgcatgggcgtggcggcgattcccct

SEQ ID NO: 618445 - DNA, 75 bp, synthetic construct
  source 1..75: mol_type = other DNA
ggtcatgttccgcgcacagctcaatgagcagaatttaccgatttcactaaccgtggtcggcattgcaccggaaga

SEQ ID NO: 618446 - DNA, 75 bp, synthetic construct
  source 1..75: mol_type = other DNA
accagcagcatatgcgcaacattgcgcagtggttgcaggcaaacggcatcacccgcgctaccgtcgcgccggact

SEQ ID NO: 618447 - DNA, 75 bp, synthetic construct
  source 1..75: mol_type = other DNA
tttcgccccgttgaaaatcgaccagcaactggcaaccgtagcagtgattcaccagcagcatatgcgcaacattgc

SEQ ID NO: 618448 - DNA, 75 bp, synthetic construct
  source 1..75: mol_type = other DNA
acccgcactatcgacgctcaggaacacccgatcaacgtcgtctggtcagcaaaattttatgaagtgcagaagtac

SEQ ID NO: 618449 - DNA, 75 bp, synthetic construct
  source 1..75: mol_type = other DNA
ctgaaagggctgaaaattcgcaccaacaatagcccgatgaatatcgccgcattcaaagtctttggcgctaacccg

SEQ ID NO: 618450 - DNA, 75 bp, synthetic construct
  source 1..75: mol_type = other DNA
ttacaggaaaaaaccaaaggcgaactgaaattaaaattgtttccggatagcaccctcggtaatgcgcaggcgatg

SEQ ID NO: 618451 - DNA, 75 bp, synthetic construct
  source 1..75: mol_type = other DNA
agaattttgctctggcctttgagggtagctatcaatatatggatctgaagccaaaggggtatcaaaaccacaacg

SEQ ID NO: 618452 - DNA, 75 bp, synthetic construct
  source 1..75: mol_type = other DNA
tgttaattgctttgctgaccggtgctacaacggtacatgcgcaaacggatattagcagtatcgaatctcgactgg

SEQ ID NO: 618453 - DNA, 75 bp, synthetic construct
  source 1..75: mol_type = other DNA
gttaaaacccccgccgacctgaaagggctgaaaatccgcaccaacaatagcccgatgaatatcgccgcattcaaa

SEQ ID NO: 618454 - DNA, 75 bp, synthetic construct
  source 1..75: mol_type = other DNA
cgggagaatctcggtattgatttagacgattattacgataaaactgagattgatagcaaatttactgatattgat

SEQ ID NO: 618455 - DNA, 75 bp, synthetic construct
  source 1..75: mol_type = other DNA
tatatacgtgatgtaaaagaatttaaatttaagttattatccatccccaaacaacacgaaatcgtccaccacgtc

SEQ ID NO: 618456 - DNA, 75 bp, synthetic construct
  source 1..75: mol_type = other DNA
taatctatccatcggcagcagaggttaaggctgctcgtgagagtaccggcctttcaactgacgagatcgctaaaa

SEQ ID NO: 618457 - DNA, 75 bp, synthetic construct
  source 1..75: mol_type = other DNA
cgcccggcaccttccggctcgatattggtgtactggaaagcggcatcacagaggaaatgtatctggaaatggagc

SEQ ID NO: 618458 - DNA, 75 bp, synthetic construct
  source 1..75: mol_type = other DNA
tcgtaataaagaactaccaagtatccccaataattggtcatggatgcggtttgatcaagttgctgatattgcatc

SEQ ID NO: 618459 - DNA, 75 bp, synthetic construct
  source 1..75: mol_type = other DNA
ttaatcagcggagaaaacagcgccgccgcgttgctggagaaaatccaagccgatcgcgcagccaacgggggtaaa

SEQ ID NO: 618460 - DNA, 75 bp, synthetic construct
  source 1..75: mol_type = other DNA
acccaataactgttccccccttcccgaacaagctgaaatcgttcgccgcgtcgagcaactcttcgcctacgccga

SEQ ID NO: 618461 - DNA, 75 bp, synthetic construct
  source 1..75: mol_type = other DNA
actcagcaatcttcccgatgtgtcggaagaccaggcgtatgcttctatcgctgcatccattcctgaccatgatgt

SEQ ID NO: 618462 - DNA, 75 bp, synthetic construct
  source 1..75: mol_type = other DNA
accatatccgtttgctgggacgcaaagattatcaacagctgccggggctgcgaactctggattacgtgctgatgt

SEQ ID NO: 618463 - DNA, 75 bp, synthetic construct
  source 1..75: mol_type = other DNA
ggtttaggagtagaaattaaacgcgagattaatccggatttggctgaacaggcggtgagccaggatgaagagtat

SEQ ID NO: 618464 - DNA, 75 bp, synthetic construct
  source 1..75: mol_type = other DNA
ccagatggcacattgcctgggtgcatactgcccgaacattctgttcccgtatgctcgtgagtgcatcaccagcat

SEQ ID NO: 618465 - DNA, 75 bp, synthetic construct
  source 1..75: mol_type = other DNA
tgggctcgtcaccgcttgaggtggcggcggcgcgtgcctgcgcggatatagaaaacacccccgtcccgctgcgtc

SEQ ID NO: 618466 - DNA, 75 bp, synthetic construct
  source 1..75: mol_type = other DNA
atgagtgattcgcgcctgctgccgaccggctcatcaccgcttgaaattgctgccgcgaaagcctgtgcagaaatt

SEQ ID NO: 618467 - DNA, 75 bp, synthetic construct
  source 1..75: mol_type = other DNA
aatgtaagaataaattctggcatgttgattttaagaaaaaaacaagaagaaaacagcagcgagttttttaaaatt

SEQ ID NO: 618468 - DNA, 75 bp, synthetic construct
  source 1..75: mol_type = other DNA
cggagagtacgaacctactatcagtatgcttatcccgctggcaaatgttcttggttgcgacccgatgtggttatt

SEQ ID NO: 618469 - DNA, 75 bp, synthetic construct
  source 1..75: mol_type = other DNA
cggttaatcgacggcctcggcgtcgcgggcggcatcatgccagcaatcggttttgccgtactactgaaaatcatg

SEQ ID NO: 618470 - DNA, 75 bp, synthetic construct
  source 1..75: mol_type = other DNA
gtctgagtagcgctgaacctgttgaatgggaaaaagatgcgtttctcaaaaaagtcaaagcaggcatgagggcag

SEQ ID NO: 618471 - DNA, 75 bp, synthetic construct
  source 1..75: mol_type = other DNA
attaaccgacaaaggtgaactgtactctgtagcgcgttcgccggatattttaaaacctacggacagtaacggcgc

SEQ ID NO: 618472 - DNA, 75 bp, synthetic construct
  source 1..75: mol_type = other DNA
tgcgtttaaagctgaaacgaattttgttgatgttgtgccgcaaaaaagccgactgcgattgtcgcttaatatgca

SEQ ID NO: 618473 - DNA, 75 bp, synthetic construct
  source 1..75: mol_type = other DNA
caacatgataaacgtaataattcattaatcagggttattttgtttgatatatatcaattggaactttcatatgac

SEQ ID NO: 618474 - DNA, 75 bp, synthetic construct
  source 1..75: mol_type = other DNA
gtttatccgaacaatccgcaaagcgtcacccgtacgctgtctgcgcgttattacaaagatggcgcggaaatttta

SEQ ID NO: 618475 - DNA, 75 bp, synthetic construct
  source 1..75: mol_type = other DNA
acttctggtcaaaaaggtatttcaggaaaagatatcaaatcccaagttgttttattacctccagtaaaagaacaa

SEQ ID NO: 618476 - DNA, 75 bp, synthetic construct
  source 1..75: mol_type = other DNA
tatcggaagaggcttggctgcaattagtgcttatcatggattaatggagtccaagtaccttctttactttttcaa

SEQ ID NO: 618477 - DNA, 75 bp, synthetic construct
  source 1..75: mol_type = other DNA
tttgtaaaccagtggctggataaacggctccagaattataaatataatattccctgtgtgatttggggaaatgga

SEQ ID NO: 618478 - DNA, 75 bp, synthetic construct
  source 1..75: mol_type = other DNA
gcgtatcgaaaaagaactcacttggtcgcgcgcacggttttgcctgcgatacccaggggacgttgttttttgatg

SEQ ID NO: 618479 - DNA, 75 bp, synthetic construct
  source 1..75: mol_type = other DNA
gcgaatcattattgcgacccggctacgcatcactttaatgaagatatccgcgacattaccctgagccataaagag

SEQ ID NO: 618480 - DNA, 75 bp, synthetic construct
  source 1..75: mol_type = other DNA
atgaaaactctacctgcaacgactccgcaggcggcgaagccctgtctgtcgcccgtgtctgtctggcaaatgtta

SEQ ID NO: 618481 - DNA, 75 bp, synthetic construct
  source 1..75: mol_type = other DNA
ctgctgaccgtgacgcgcaaaggaaaagtctgccatctgctgacgtcgatgacggacgccatacgcttcaccggg

SEQ ID NO: 618482 - DNA, 75 bp, synthetic construct
  source 1..75: mol_type = other DNA
atgttgggtggagcggacaatccaaatggcgaattaccgtcttatatcactggcgctgacaaatcaggtactgta

SEQ ID NO: 618483 - DNA, 75 bp, synthetic construct
  source 1..75: mol_type = other DNA
aattaccgacaagaagggaaagggctttcccgagagtggtaaaggagaggccctggaaataccccacagccccga

SEQ ID NO: 618484 - DNA, 75 bp, synthetic construct
  source 1..75: mol_type = other DNA
attcagtgatgaaacggtaattcaggaacatatcgatgccggtatatctttggccgatgccgttaattttctggt

SEQ ID NO: 618485 - DNA, 75 bp, synthetic construct
  source 1..75: mol_type = other DNA
gacaggaaaggatttagctggcaggaacagacgccttatcttcgtgcggtcgatattttacgggcgcggcaggct

SEQ ID NO: 618486 - DNA, 75 bp, synthetic construct
  source 1..75: mol_type = other DNA
ttgtgggatttacagaataaatcagagcggcagaatgacattctggtgaaataccgtcacttatcagtaccaccg

SEQ ID NO: 618487 - DNA, 75 bp, synthetic construct
  source 1..75: mol_type = other DNA
cggttgccattaataaccgaatcccgctgcaatctttaacggcggcaaatatcatggttgaaggttcaattatcg

SEQ ID NO: 618488 - DNA, 75 bp, synthetic construct
  source 1..75: mol_type = other DNA
ttttctacaatcgtcagcgtcgtcactctcgtctggggaatatctccccggcagccttcagggaaaaatatcatc

SEQ ID NO: 618489 - DNA, 75 bp, synthetic construct
  source 1..75: mol_type = other DNA
accagagaacgatgcagccttccccgccagacacatgccgggaacccgcgctctacccgcaggtcaaaaatggtc

SEQ ID NO: 618490 - DNA, 75 bp, synthetic construct
  source 1..75: mol_type = other DNA
ggcccgccagcgcctgggaagtgaggctgtccgccgtgtgttcacgaaaacagcgcagctctggcataacgccac

SEQ ID NO: 618491 - DNA, 75 bp, synthetic construct
  source 1..75: mol_type = other DNA
tgacgcttgagcgtaaagaacctcttcaccagattgtgaatcgcctggacatcatgctgccgggcaatcgcccct

SEQ ID NO: 618492 - DNA, 75 bp, synthetic construct
  source 1..75: mol_type = other DNA
ttgtatgacacccaggtttctgtttcacacaccacacgccaaccgcgtcctggtgaagtccacggtgaacattat

SEQ ID NO: 618493 - DNA, 75 bp, synthetic construct
  source 1..75: mol_type = other DNA
agcgcctgggaagtgaggctgtccgccgcgtgttcacgaaaacagcgcagctctggcataacgccacgccgcatc

SEQ ID NO: 618494 - DNA, 75 bp, synthetic construct
  source 1..75: mol_type = other DNA
cagggagataaaacagacgatgcaactgagcaggctgacgctgagaagtaaaaaaccggagcttgtggagcaaga

SEQ ID NO: 618495 - DNA, 75 bp, synthetic construct
  source 1..75: mol_type = other DNA
ggcttataatctggtgagatatcagatgattaaaatggcggaacatctgaaaggttactggccgaatcaactgag

SEQ ID NO: 618496 - DNA, 75 bp, synthetic construct
  source 1..75: mol_type = other DNA
tggattcaacaccttcctgcgcgaaggcacacaagagcagatcgacaagattatggcgtttcgtggtactggtaa

SEQ ID NO: 618497 - DNA, 75 bp, synthetic construct
  source 1..75: mol_type = other DNA
tggcgtgacctgcgtgtagaccgcgtctccgggggatctgacgaaatgcagatcctgacgctgggtcgcgcggtg

SEQ ID NO: 618498 - DNA, 75 bp, synthetic construct
  source 1..75: mol_type = other DNA
gtcaaaatggtctgccagatggaactgaccagccatctgctgacggctgcagccttcggcacgatgaagaacagc

SEQ ID NO: 618499 - DNA, 75 bp, synthetic construct
  source 1..75: mol_type = other DNA
agcagttatcgaaaaagtttcgtgccagcgtcagttatatttgccatgaatttaccaaagagtatcgcatttccc

SEQ ID NO: 618500 - DNA, 75 bp, synthetic construct
  source 1..75: mol_type = other DNA
atggctcaaggcacgctttatattgtttctgcccccagtggtgcggggaaatccagcctgattcaggctttattg

SEQ ID NO: 618501 - DNA, 75 bp, synthetic construct
  source 1..75: mol_type = other DNA
ctgggtgatctgaagaccattattcgcgccgaacgcttgcgcatgagtcgccaaaagcaacgtcatgacgcttta

SEQ ID NO: 618502 - DNA, 75 bp, synthetic construct
  source 1..75: mol_type = other DNA
cttcccgtgcatcggcctgccgggcaccatcgacaacgacatcaaaggtactgactacactatcggtttcttcac

SEQ ID NO: 618503 - DNA, 75 bp, synthetic construct
  source 1..75: mol_type = other DNA
cgcttccccggaggagaaatggcggatctgtacagtcatcgctgggaaatcgaactgggatacagggagataaaa

SEQ ID NO: 618504 - DNA, 75 bp, synthetic construct
  source 1..75: mol_type = other DNA
gtgaaattaccgacaagaagggaaagggccttcccgagagtggtaaaggagaggccctggaaataccccacagcc

SEQ ID NO: 618505 - DNA, 75 bp, synthetic construct
  source 1..75: mol_type = other DNA
gcagaaggatgcaaagctatctcggatctgtcacatcactattttcgtgcagaaggctccagtccaccacaatca

SEQ ID NO: 618506 - DNA, 75 bp, synthetic construct
  source 1..75: mol_type = other DNA
tgctaactggttccctcgccgggagcgtggtcgggttggtgctttctggaatatctctcataacatcggtggtgg

SEQ ID NO: 618507 - DNA, 75 bp, synthetic construct
  source 1..75: mol_type = other DNA
atgaagtttattcgacagggattaggcatcgccttacaaccagagttaacgctgaaaagcattgcaggtgaattg

SEQ ID NO: 618508 - DNA, 75 bp, synthetic construct
  source 1..75: mol_type = other DNA
atgaaacgttatttatgctggattgtagcagcagaacttctcttcgctgcgggcaatgttcacgccgttgaggta

SEQ ID NO: 618509 - DNA, 75 bp, synthetic construct
  source 1..75: mol_type = other DNA
gtgagttccatccttgagatttttttcccactttgcgccgctaatcccatccgttggcagcgccgtactcccgac

SEQ ID NO: 618510 - DNA, 75 bp, synthetic construct
  source 1..75: mol_type = other DNA
agattttgtggtgcaacaggacgcgttacaaaaagagggtgatgcagtttcaggcggcgtaacgctgcggaggaa

SEQ ID NO: 618511 - DNA, 75 bp, synthetic construct
  source 1..75: mol_type = other DNA
tgcgtattcctgagcgatgaacaggaaagaagagcgcttatttctaacgaaaaaaaatgcggaggggtacaccat

SEQ ID NO: 618512 - DNA, 75 bp, synthetic construct
  source 1..75: mol_type = other DNA
cactggcgctgcaagccgcagttgaaggttgcgttaaccatatgtggaccatcagctgtctgcaactgcatccga

SEQ ID NO: 618513 - DNA, 75 bp, synthetic construct
  source 1..75: mol_type = other DNA
tgcgtggtttcacctttgatcaaaaacgccagacgcttcacctccaactgcgggctgcgaactttgccagcttcg

SEQ ID NO: 618514 - DNA, 75 bp, synthetic construct
  source 1..75: mol_type = other DNA
gtgagttccatccttgagatttttttcccgctttgcgcctccgataccgtccgctggcagcgccgtacacccgac

SEQ ID NO: 618515 - DNA, 75 bp, synthetic construct
  source 1..75: mol_type = other DNA
gaagaagcactaaatcgtcgccagataaatcaggcgttattgagtacgggcgatttggcgcatgatgaattttaa

SEQ ID NO: 618516 - DNA, 75 bp, synthetic construct
  source 1..75: mol_type = other DNA
tggcggcagaatttctgttcgccgcagggaatcttcacgccgttgaggtagaagtcccgggattgttaactgacc

SEQ ID NO: 618517 - DNA, 75 bp, synthetic construct
  source 1..75: mol_type = other DNA
cctggcagacgctggtaaatcaccattacgggctgcatgacccgaacgccccggagaaccgcaggacgctgacac

SEQ ID NO: 618518 - DNA, 75 bp, synthetic construct
  source 1..75: mol_type = other DNA
gaaaacagtgggcgcgctggcgggtgatggttctgccgatattgctgattctggttgcgctggcagtggaacgtg

SEQ ID NO: 618519 - DNA, 75 bp, synthetic construct
  source 1..75: mol_type = other DNA
gcaacggctgtatgaccagggacatcgtaatatcagttatctcggcgtgccgcacagtgacgtgacaaccggtaa

SEQ ID NO: 618520 - DNA, 75 bp, synthetic construct
  source 1..75: mol_type = other DNA
gcctgccagttgatcgcacaggtaaccgggcgcagcgaaccgcaacaaatcatcatccccgccaccctgtcctga

SEQ ID NO: 618521 - DNA, 75 bp, synthetic construct
  source 1..75: mol_type = other DNA
acgcggaagccgggcgacagggcgccagccagttgatcgagcagatcaacggacgttgcgccccccagcagatca

SEQ ID NO: 618522 - DNA, 75 bp, synthetic construct
  source 1..75: mol_type = other DNA
tgccttctcaatgatgctgtgcggttctgaaggtccatttacaaaagaacaagcactctctggtttcgagcttgc

SEQ ID NO: 618523 - DNA, 75 bp, synthetic construct
  source 1..75: mol_type = other DNA
agcacctgggcgtcctgaaacgccgtaatattgacggcgtagtgctatttggttttaccggtataacggaagaca

SEQ ID NO: 618524 - DNA, 75 bp, synthetic construct
  source 1..75: mol_type = other DNA
acatcgcacgcttaagcggcgtgggaaaatccactgtttcccgggtactgaataacgaaagcggcgtgagccagc

SEQ ID NO: 618525 - DNA, 75 bp, synthetic construct
  source 1..75: mol_type = other DNA
accagagaacgatgcagccttcccccgccagacacatgccaggaacccggcgctctacccgcaggtcaaaatggt

SEQ ID NO: 618526 - DNA, 75 bp, synthetic construct
  source 1..75: mol_type = other DNA
aatggcgtggaaccaaattaacttgggaacacaggactacagacaactgcccctctttggacttgggagtctgtc

SEQ ID NO: 618527 - DNA, 75 bp, synthetic construct
  source 1..75: mol_type = other DNA
gctggcggtaatgatgagcaggcaatgtataatgttacgcaagaagccgctcgtattctgcacgaagctgaaact

SEQ ID NO: 618528 - DNA, 75 bp, synthetic construct
  source 1..75: mol_type = other DNA
cgcatagtgacgtgacgaccggtaagcgacgtcacgaagcctacctggcgttctgcaaagcgcataaactgcatc

SEQ ID NO: 618529 - DNA, 75 bp, synthetic construct
  source 1..75: mol_type = other DNA
aacgctacacaagcgccgtcttcccctcgaaatgatggtctggtgtattgttggcatggcgcttgagcgtaaaga

SEQ ID NO: 618530 - DNA, 75 bp, synthetic construct
  source 1..75: mol_type = other DNA
tacccgcaggtcaaaatggcatgccagatggaactgaccagccatctgctgacgactgcagccttcggcacgatg

SEQ ID NO: 618531 - DNA, 75 bp, synthetic construct
  source 1..75: mol_type = other DNA
agtcactggttaaagcattaggcggagaaattaaggaaggaagaggttcgcgttgtaagttcatactaaatatga

SEQ ID NO: 618532 - DNA, 75 bp, synthetic construct
  source 1..75: mol_type = other DNA
ctggaaggtctggcgcatcgtggctataccgaaggtttcctgcgtcgtcatactcacgacgattatcagaactac

SEQ ID NO: 618533 - DNA, 75 bp, synthetic construct
  source 1..75: mol_type = other DNA
ccggttccgcaggatctcgagctcaattacgcactgctgatgcgtaatttctccggtgaaaccacgcgtaacccg

SEQ ID NO: 618534 - DNA, 75 bp, synthetic construct
  source 1..75: mol_type = other DNA
tctgcgcaggctttgttaagacaagaccatgcagaacgcaaattttttgtcggtggacttggtaactaccagttt

SEQ ID NO: 618535 - DNA, 75 bp, synthetic construct
  source 1..75: mol_type = other DNA
taataaagaagtaactgttattttaaatgaattaattgagaatattggtacaaatccgtccccacaggaatatga

SEQ ID NO: 618536 - DNA, 75 bp, synthetic construct
  source 1..75: mol_type = other DNA
taagactaagacagatgcaggcgttttgcatattgttcctggagacttttggcttaatacattttcagatatttt

SEQ ID NO: 618537 - DNA, 75 bp, synthetic construct
  source 1..75: mol_type = other DNA
ggggcgaagccctgcacctgatggccggtggtaaaagttgttttgatggtaaatggctacgcggaacggccaaag

SEQ ID NO: 618538 - DNA, 75 bp, synthetic construct
  source 1..75: mol_type = other DNA
gtgcgcacactgtatgaaccgcgcgctgattttaatcagtatggcgaggaaaccgtctgtatccgtggtgtttac

SEQ ID NO: 618539 - DNA, 75 bp, synthetic construct
  source 1..75: mol_type = other DNA
tgcgtgactgactggcgcgagcagaaacgccgcacgcgcgaatttcttaaaggactggagctcgaagacgaagac

SEQ ID NO: 618540 - DNA, 75 bp, synthetic construct
  source 1..75: mol_type = other DNA
aaaacctttatccgtgacctgaaaccggtggtggagatggggccggatgcgctgattatgtccgatccagggctg

SEQ ID NO: 618541 - DNA, 75 bp, synthetic construct
  source 1..75: mol_type = other DNA
cgccaaaggcgaagctatgccgatagcaccaggcgatggttatactgtgtggctcccggtcccgcaggatcttga

SEQ ID NO: 618542 - DNA, 75 bp, synthetic construct
  source 1..75: mol_type = other DNA
tatgaaccgcgcgccgagtttaatcagtatggtgaggaaaccgtctgcatccgaggcgtatacgactctgttgtc

SEQ ID NO: 618543 - DNA, 75 bp, synthetic construct
  source 1..75: mol_type = other DNA
tttgaaacaggcgacaacggcaatgaatatttcaaatggagaagcaaacaaagcaccacaacaaaagacctgatg

SEQ ID NO: 618544 - DNA, 75 bp, synthetic construct
  source 1..75: mol_type = other DNA
taagcttcctgttgatgattggctttagcctggtggcggaaggtttcggcttcgtcattccgaaaggctacctgt

SEQ ID NO: 618545 - DNA, 75 bp, synthetic construct
  source 1..75: mol_type = other DNA
gatcatgacaaccagcaaatttttaatccacaggaacggcggatgatcgagcgcgtgctcaatctgaaccagcgt

SEQ ID NO: 618546 - DNA, 75 bp, synthetic construct
  source 1..75: mol_type = other DNA
accgacgccgttttctctctgctaaccagaccctgcgccagcgaaccactgaagcggtgatgcgtttgttaagcg

SEQ ID NO: 618547 - DNA, 75 bp, synthetic construct
  source 1..75: mol_type = other DNA
gaattatttgcttaaaacgttgcaggtggaaagccatcgcgtgcagaaggtgcagattattccgctgcgtaagga

SEQ ID NO: 618548 - DNA, 75 bp, synthetic construct
  source 1..75: mol_type = other DNA
ttaatcacgctgattgtgatcgaactggtcctcggcattgataacctggtctttattgccatcctcgccgaaaaa

SEQ ID NO: 618549 - DNA, 75 bp, synthetic construct
  source 1..75: mol_type = other DNA
ccgccgtcgttatcgctatcagtctgatgctgatggccagcaagccgttaactcagttcgttaatagccacccaa

SEQ ID NO: 618550 - DNA, 75 bp, synthetic construct
  source 1..75: mol_type = other DNA
tttgcaattaacagtagtaccggcatgtggattcatatgcgtgaccagaatgttattttgggacgcaatgcggta

SEQ ID NO: 618551 - DNA, 75 bp, synthetic construct
  source 1..75: mol_type = other DNA
gtgcaaaagaatggcgataccttgtccggtgggcttacttttgaaaacgactcaatccttgcctggattagaaat

SEQ ID NO: 618552 - DNA, 75 bp, synthetic construct
  source 1..75: mol_type = other DNA
gtattgtctggtattaatgttcaggatacagggtccaactctgccgataatatagcgggcgtttattacagaccc

SEQ ID NO: 618553 - DNA, 75 bp, synthetic construct
  source 1..75: mol_type = other DNA
atgatcgtggtaacacataccgcagtcgtacaggttttaatacatatggaatggattgccgatccgtcaatctgg

SEQ ID NO: 618554 - DNA, 75 bp, synthetic construct
  source 1..75: mol_type = other DNA
gataacctggtctttattgccatcctcgccgaaaaactaccgccgaagcagcgcgaccgcgcacgggttaccggg

SEQ ID NO: 618555 - DNA, 75 bp, synthetic construct
  source 1..75: mol_type = other DNA
aagttattcccggcaactatggcaattttgattccagatatgtgaaagatgttcgacttggttcacagcaatatt

SEQ ID NO: 618556 - DNA, 75 bp, synthetic construct
  source 1..75: mol_type = other DNA
tgcgcatgtttaatgaggtttggtggcgtggtcgtttacgtcgcattgcgtctgcatggcgcgaacatctacaaa

SEQ ID NO: 618557 - DNA, 75 bp, synthetic construct
  source 1..75: mol_type = other DNA
tcttgactggagcaatatggatttaccgggtactgtagatggtaactatgtgaattatagtggctttgtctacta

SEQ ID NO: 618558 - DNA, 75 bp, synthetic construct
  source 1..75: mol_type = other DNA
gggctgattacaacctgtacgccaatactatcaccgtaactaacggtggtgtattggatgtgaacgttgatcagt

SEQ ID NO: 618559 - DNA, 75 bp, synthetic construct
  source 1..75: mol_type = other DNA
gaatcgcatcatcgacaataaagtattccagagtggtgtatttaacgtagcgttgaataacggttctgaatggga

SEQ ID NO: 618560 - DNA, 75 bp, synthetic construct
  source 1..75: mol_type = other DNA
aggttaaccaactgaacggtggacggatcaccaatggtgcggttattgaacgtgaattgcccagccagtttggcg

SEQ ID NO: 618561 - DNA, 75 bp, synthetic construct
  source 1..75: mol_type = other DNA
cagacaacccagacgccgtttacgacccaaacgcttaataacatgctttcacagttgggtattactgttccagct

SEQ ID NO: 618562 - DNA, 75 bp, synthetic construct
  source 1..75: mol_type = other DNA
ttggcggcgcaggagcctccgctggcggtagcagtgttcaggtgaaccaactgaacggtggacggatcaccaatg

SEQ ID NO: 618563 - DNA, 75 bp, synthetic construct
  source 1..75: mol_type = other DNA
aaaaagcgtaacgatattctgcaaatggccgtgctggagccagaattgtgcattcttgatgagtcggattccggg

SEQ ID NO: 618564 - DNA, 75 bp, synthetic construct
  source 1..75: mol_type = other DNA
gcttgagttgtcgccggaagatcgtgcaggcgaaggcatctttatggcctttcagtatccggtggaaattcctgg

SEQ ID NO: 618565 - DNA, 75 bp, synthetic construct
  source 1..75: mol_type = other DNA
tccgggctggatattgacgcattaaaagtggttgccgatggcgtgaactcgctgcgtgacggcaagcgttcattc

SEQ ID NO: 618566 - DNA, 75 bp, synthetic construct
  source 1..75: mol_type = other DNA
cctgtacgccaatactatcaccgtaactaacggtggtgtattggatgtgaacgttgatcagttcgatactgaagc

SEQ ID NO: 618567 - DNA, 75 bp, synthetic construct
  source 1..75: mol_type = other DNA
aacattgctgacaataatggtaatgtagtatccggtgtattcgatatccacagcagcgattatgttctgaacgct

SEQ ID NO: 618568 - DNA, 75 bp, synthetic construct
  source 1..75: mol_type = other DNA
ctcaaagctatggctacattcaggctggtgatacagttattgatacaacgtggtatgacggtgatgtattcactc

SEQ ID NO: 618569 - DNA, 75 bp, synthetic construct
  source 1..75: mol_type = other DNA
ccggatcggtggtaatgaatcgcgaagtgaccctcgacagttgcgcagtagcgcagggcaatctctcggttacgg

SEQ ID NO: 618570 - DNA, 75 bp, synthetic construct
  source 1..75: mol_type = other DNA
gatgcggtttacggcgcggtcgctggctatggggtgctgtggtgtgtttactggggcgtctggttagtttgtcac

SEQ ID NO: 618571 - DNA, 75 bp, synthetic construct
  source 1..75: mol_type = other DNA
tgcggcttctctgtcgccgttgtgcgaaataatatttgggggtgtccggatattcctgctgaaacgccgtatgcg

SEQ ID NO: 618572 - DNA, 75 bp, synthetic construct
  source 1..75: mol_type = other DNA
atgcctgacatccgcaacgctgccgccctgtacatcgatactgcggataagttcgcacaggtgagcatcaaccat

SEQ ID NO: 618573 - DNA, 75 bp, synthetic construct
  source 1..75: mol_type = other DNA
ttggctgttcaattcgcttatccgtggaacgtcccacggtcggcaatctccagcccataccttacttatgagcaa

SEQ ID NO: 618574 - DNA, 75 bp, synthetic construct
  source 1..75: mol_type = other DNA
ccagcacgccagcgcgggaacttggtatcacacttgcggatcgcatgatgcaaaaaatcacccatgaagagacgc

SEQ ID NO: 618575 - DNA, 75 bp, synthetic construct
  source 1..75: mol_type = other DNA
atatttactgagagctcagatcaactttccagggcaacagatcgcgtacccggtttgccggccagtcctggatat

SEQ ID NO: 618576 - DNA, 75 bp, synthetic construct
  source 1..75: mol_type = other DNA
ccgctgagcgcatgaaacacgttaagcaatacctggaggagggtttatcaaattatcgcgctggtggccctgtac

SEQ ID NO: 618577 - DNA, 75 bp, synthetic construct
  source 1..75: mol_type = other DNA
tcgtttgggtcgcaccacgtgtggtaaagcgtacagccctggtgcacaagcaaattaattacttattaaaattga

SEQ ID NO: 618578 - DNA, 75 bp, synthetic construct
  source 1..75: mol_type = other DNA
cgtgcgtggatatggcagcgccaccgcgttagatgcgcggactattcaggtgcgcgtaccaagtggcaacagttc

SEQ ID NO: 618579 - DNA, 75 bp, synthetic construct
  source 1..75: mol_type = other DNA
gcacgcccttactttgtctggcgctttatgcagtgcctgacagacagcattgcaatattcaccgttaccgctgcc

SEQ ID NO: 618580 - DNA, 75 bp, synthetic construct
  source 1..75: mol_type = other DNA
cgctgcaactgagcgcgaagcacgcgcccggctgccgcacgcacatctgatttttgtcgcccgtattcgtcaggg

SEQ ID NO: 618581 - DNA, 75 bp, synthetic construct
  source 1..75: mol_type = other DNA
cttcaagggcaaaacgtttttgtgagcgttttttcacttcaggaagtggctttaattcttcgggttctagcagtt

SEQ ID NO: 618582 - DNA, 75 bp, synthetic construct
  source 1..75: mol_type = other DNA
tataaccgcttcacactgacgccggaaggggatgaaccgcttcccgccgtcacatgccgggaccatcaccgtgta

SEQ ID NO: 618583 - DNA, 75 bp, synthetic construct
  source 1..75: mol_type = other DNA
cgcagtctgcaaagcattaacacctcgctggaggcggatctgcgtgaagtcaccacgcgaatggaggctgtacag

SEQ ID NO: 618584 - DNA, 75 bp, synthetic construct
  source 1..75: mol_type = other DNA
gtggatttctcaatcatggtttacgcagttattgcgttggtgggtgtggcaattggctggctgtttgccagttat

SEQ ID NO: 618585 - DNA, 75 bp, synthetic construct
  source 1..75: mol_type = other DNA
atcaacctgctcgatgtccctttcctgttccgcgataccgctcatgcgcataaaaccctcgacggtaaagtcggt

SEQ ID NO: 618586 - DNA, 75 bp, synthetic construct
  source 1..75: mol_type = other DNA
caatcattacgtttcggttatgaaacctcgcaaaccgattcacaacatattgcagcaaaaaaattcaacgaatta

SEQ ID NO: 618587 - DNA, 75 bp, synthetic construct
  source 1..75: mol_type = other DNA
aaaattttacgaagtacaaaagcacctttctctgacacatcacgcttattcaccgcttctggtggtgatcaacaa

SEQ ID NO: 618588 - DNA, 75 bp, synthetic construct
  source 1..75: mol_type = other DNA
tacccattcgatgacatttgtttcaggtggttccagtggtgctccgggaagtggatcacctgattattctaaata

SEQ ID NO: 618589 - DNA, 75 bp, synthetic construct
  source 1..75: mol_type = other DNA
acggggtttaccttaccgaaattggtacggatatgcgtggctggacgattaagggcaagcccgccagtggtcgtg

SEQ ID NO: 618590 - DNA, 75 bp, synthetic construct
  source 1..75: mol_type = other DNA
acttgaaagctccaggcaagaactatgatgatgtttttacctatctcaaaaagtttgactactgcaaacatttag

SEQ ID NO: 618591 - DNA, 75 bp, synthetic construct
  source 1..75: mol_type = other DNA
aatctccagcagctcaacgcgcaaatggctcaggaagcgatcaacctgacgcgcgcgctgaaaggcgacaataaa

SEQ ID NO: 618592 - DNA, 75 bp, synthetic construct
  source 1..75: mol_type = other DNA
atgattgaacaatttttcaggcccgactctgtcgaacaggcgctggaactgaagcgccgctaccaggatgaagcc

SEQ ID NO: 618593 - DNA, 75 bp, synthetic construct
  source 1..75: mol_type = other DNA
agctcgatcggctgtcgcagttagcgccgagttcaaatgcgtataaatcgtcgcggactacgatgctactttcca

SEQ ID NO: 618594 - DNA, 75 bp, synthetic construct
  source 1..75: mol_type = other DNA
atggctacgaccctcaccccgtcacacccgcagtttgtctttgtgtttgccgccgttcgtcgcgcagaccgtaaa

SEQ ID NO: 618595 - DNA, 75 bp, synthetic construct
  source 1..75: mol_type = other DNA
aactctcttcaggtcgcggaaatgtgctggcgcaggcagaagcgtttcgcggtttaggagtagaaattaaacgcg

SEQ ID NO: 618596 - DNA, 75 bp, synthetic construct
  source 1..75: mol_type = other DNA
accacgacggtatgcgaattgcgctggatggcgtcgccagtaaagcactgcgtctgcacgatgtcgaaaaacaaa

SEQ ID NO: 618597 - DNA, 75 bp, synthetic construct
  source 1..75: mol_type = other DNA
atgattgaacaatttttcagacccgactctgtcgaacaagcgctggaactgaagcgccgctaccaggatgaagcc

SEQ ID NO: 618598 - DNA, 75 bp, synthetic construct
  source 1..75: mol_type = other DNA
tggcccaggaagcgatcaacctgacgcgcgcgctgaaaggcgacaataaaacccagggcaactggggcgaggtag

SEQ ID NO: 618599 - DNA, 75 bp, synthetic construct
  source 1..75: mol_type = other DNA
ggttagcccgaccacgctgctggtggcgctgcgcactatcgccaacctctggcgctatgagcatcaaagtcgtaa

SEQ ID NO: 618600 - DNA, 75 bp, synthetic construct
  source 1..75: mol_type = other DNA
tggtgatcgacgccaaaatgacgctggtcgcctatgaacgctatttcaacgcagaagacgactacacccgcgaaa

SEQ ID NO: 618601 - DNA, 75 bp, synthetic construct
  source 1..75: mol_type = other DNA
gttcaactaacgtaaaactggcctggcttgaagatggcgaggtaagaaccagtctgtcaggaaacagttttaaag

SEQ ID NO: 618602 - DNA, 75 bp, synthetic construct
  source 1..75: mol_type = other DNA
ggcgttatgagcatcaaagccgtaacgcccagcaaatcgccgatcgtgccagcaagctgtacgacaagatgcgtt

SEQ ID NO: 618603 - DNA, 75 bp, synthetic construct
  source 1..75: mol_type = other DNA
tgtcatcgtgcggctgccgcagggaaaagatgtggtgatcgacgccaaaatgacgctggtcgcctatgaacgcta

SEQ ID NO: 618604 - DNA, 75 bp, synthetic construct
  source 1..75: mol_type = other DNA
tctcgaccgcaaagcctttagcgacgcgctgggtactcaggtccgcgacatgttcgttaaagatgttccgcaagg

SEQ ID NO: 618605 - DNA, 75 bp, synthetic construct
  source 1..75: mol_type = other DNA
aactgcatgggcaatgacgagattcgtacagttaacctgattaaatctgcccgtgttggttatacaaaaatggtg

SEQ ID NO: 618606 - DNA, 75 bp, synthetic construct
  source 1..75: mol_type = other DNA
tccctaatatggttgccaaccgacggtgacgctgaaaacttcatgaagtctcatgtcgaaccgaccattcgtgat

SEQ ID NO: 618607 - DNA, 75 bp, synthetic construct
  source 1..75: mol_type = other DNA
gccgcgaatgaatctgcgcatttcatgcgattttatgtcccttgccctcattgtggtgaagcccagtatctgaag

SEQ ID NO: 618608 - DNA, 75 bp, synthetic construct
  source 1..75: mol_type = other DNA
tatcccgtatctgctgggatattggcgggattgacccgactattgtgtatgaacgctcgaaaaagcatgggctgt

SEQ ID NO: 618609 - DNA, 75 bp, synthetic construct
  source 1..75: mol_type = other DNA
gaaaacccgcaatcagcggggtgtgtatctgtgtgaggtggggacggataccgcaaaagaaattctctatgcccg

SEQ ID NO: 618610 - DNA, 75 bp, synthetic construct
  source 1..75: mol_type = other DNA
gtcagttgtcccgtgtttatcaatataaaatcctcaacgacagtactggagtcggatgtacctacatcgtggcag

SEQ ID NO: 618611 - DNA, 75 bp, synthetic construct
  source 1..75: mol_type = other DNA
ttcaggatacagggtctaactctgccgataatatagcgggcgtttattacagacccgttcaaaagtatataaatg

SEQ ID NO: 618612 - DNA, 75 bp, synthetic construct
  source 1..75: mol_type = other DNA
ttaatgttcaggatacagggtccaactctgccgataatatagcgggcgtttattacagacccgttcaaaagtata

SEQ ID NO: 618613 - DNA, 75 bp, synthetic construct
  source 1..75: mol_type = other DNA
tttctggtgcctgggcggcgctgccgccaaaaactaccgtgaaaaatccgtggacgtggtctgctatgacgaact

SEQ ID NO: 618614 - DNA, 75 bp, synthetic construct
  source 1..75: mol_type = other DNA
tcgccctgttttcgggggcgctgtatctggtgtcactgcgtctggcctggcaggcagggcatgaacgggcgcgcc

SEQ ID NO: 618615 - DNA, 75 bp, synthetic construct
  source 1..75: mol_type = other DNA
ccgccgcggtggtgctgtcggtgtccgcactcgtctggtgctgagcagcatccgcccaatcgaagcaaagcagga

SEQ ID NO: 618616 - DNA, 75 bp, synthetic construct
  source 1..75: mol_type = other DNA
tcacagcagaccttttcccgcgttttccgtcggcaatttgatcgcactcccagcgattaccgccaccggatctag

SEQ ID NO: 618617 - DNA, 75 bp, synthetic construct
  source 1..75: mol_type = other DNA
gctttaaatggtctccgggagaaccttccagcgtttactacctctgtgaacacaatgcctgtgtgattaaacaac

SEQ ID NO: 618618 - DNA, 75 bp, synthetic construct
  source 1..75: mol_type = other DNA
attacacggcggcggtgcctgcccgggtggtttatctgacggcgggcattgactcgcagcgaaaccgttttgaga

SEQ ID NO: 618619 - DNA, 75 bp, synthetic construct
  source 1..75: mol_type = other DNA
cctggtagccctcaccaactacggtacggcgatgtgcgcctttgaagatgcggcgcgctacgccaaccagcgcgt

SEQ ID NO: 618620 - DNA, 75 bp, synthetic construct
  source 1..75: mol_type = other DNA
aatcagcaggtgaaactgtcgatgccggaactggaagaactggcggcagcaatggtgcaggcgcaggtcgatcgc

SEQ ID NO: 618621 - DNA, 75 bp, synthetic construct
  source 1..75: mol_type = other DNA
cacagtactgcgcatacgattaccgggtcatacaggagcagtttggtctgaaaacatcaatgtcgcgtaaaggta

SEQ ID NO: 618622 - DNA, 75 bp, synthetic construct
  source 1..75: mol_type = other DNA
ggccccgacaggccagcatgtctggcaggagctgcaaagcgggaaatggggcgaaatcgccccgttcaccgtcac

SEQ ID NO: 618623 - DNA, 75 bp, synthetic construct
  source 1..75: mol_type = other DNA
acctgcacgttgagggacgcataaaagagcagatcaaccgcgccggagaaaaaatagccgcggctgaagtggaat

SEQ ID NO: 618624 - DNA, 75 bp, synthetic construct
  source 1..75: mol_type = other DNA
tcacggggaaaaccacgcagagttggcccgacagatggcgcacaaacacacctgcttgcgtcatgttctggtcgc

SEQ ID NO: 618625 - DNA, 75 bp, synthetic construct
  source 1..75: mol_type = other DNA
ctcaccgccgtcggcaagatagacaaaaaacgcctgacggctctcgccgtcggcaagatagacaaaaaacgcctg

SEQ ID NO: 618626 - DNA, 75 bp, synthetic construct
  source 1..75: mol_type = other DNA
aacaaattaaattgtcacaacaaaagctggaagaactacttacggcaatggtgcaggctcaggctgcacgcaacg

SEQ ID NO: 618627 - DNA, 75 bp, synthetic construct
  source 1..75: mol_type = other DNA
tggtgcggttgactgcgaggtgttatttgagggtgaaacggaattcgtcccgtataccgccatgcaggacgatac

SEQ ID NO: 618628 - DNA, 75 bp, synthetic construct
  source 1..75: mol_type = other DNA
tcagcgacagatgaaggacgtgctggatagcctgaataatcttgccgacatccgcgcttttcaggctggagagtc

SEQ ID NO: 618629 - DNA, 75 bp, synthetic construct
  source 1..75: mol_type = other DNA
agcgagttgctggcggctaaccgccagttgcaatcggcgttggtggaaacggcgcaaaataatcaggacgcagtg

SEQ ID NO: 618630 - DNA, 75 bp, synthetic construct
  source 1..75: mol_type = other DNA
cctggctggattgcctgcatatggcggcgctggtgctggatgggattcaggtgaaacgcccgcgttgtcaggaag

SEQ ID NO: 618631 - DNA, 75 bp, synthetic construct
  source 1..75: mol_type = other DNA
cgttttgccgaagatctcattttctttaacaccggcgaagcgggttttgtcgaactgtctgatcgcgtgacttcc

SEQ ID NO: 618632 - DNA, 75 bp, synthetic construct
  source 1..75: mol_type = other DNA
aggatgtcactctgacgccggaagagctgatacaactggatactgcgatgaatgcggcgatggtgatgcaggggt

SEQ ID NO: 618633 - DNA, 75 bp, synthetic construct
  source 1..75: mol_type = other DNA
agcaaaaccgactggcgatcctgctggcggtgctgcaccgtcacggtggtctgcaaatggccgatcaggatgtgt

SEQ ID NO: 618634 - DNA, 75 bp, synthetic construct
  source 1..75: mol_type = other DNA
tgaagtgacctccggtagctcagtgatggtagtgtgggaaggaacgcgtccgctgctggtggagattcaggcgct

SEQ ID NO: 618635 - DNA, 75 bp, synthetic construct
  source 1..75: mol_type = other DNA
tttcgcaccttacgcagccataaaaaccgcttcggcgcggtgaatgagctgggcgtcttcgcaatgaccgaacag

SEQ ID NO: 618636 - DNA, 75 bp, synthetic construct
  source 1..75: mol_type = other DNA
aataatcaccgggggtaatgaaatcagcatctgcatccctcgtcatgccagccatcaatttcagttgcttatgtc

SEQ ID NO: 618637 - DNA, 75 bp, synthetic construct
  source 1..75: mol_type = other DNA
tcagcgggagatgaaagagaggttgagcaacctggatgatttacgctcaatccgagcgatggcgaccagcagtaa

SEQ ID NO: 618638 - DNA, 75 bp, synthetic construct
  source 1..75: mol_type = other DNA
gatgccaaaaagcaggaaatcgaggcatggcgcacagaacaggaagcactgccgttcacctttgaatggaacggt

SEQ ID NO: 618639 - DNA, 75 bp, synthetic construct
  source 1..75: mol_type = other DNA
atgtctctggcgcaatgcccgggctttttattcgcacatcgtgaggaatgcaccgtggaaattaaaaaaatcatt

SEQ ID NO: 618640 - DNA, 75 bp, synthetic construct
  source 1..75: mol_type = other DNA
cgaacagttgcgccactgggcggcccgttatgcctcgcgaattgccgtcgttgatgcaaaggggtcgttaaccta

SEQ ID NO: 618641 - DNA, 75 bp, synthetic construct
  source 1..75: mol_type = other DNA
atgacatccctgtcgacgcggcatttttagcccgacttgaggccgggatgactcaggcgatggtgctccaggggt

SEQ ID NO: 618642 - DNA, 75 bp, synthetic construct
  source 1..75: mol_type = other DNA
tgaagtgacctccggcagctccgtgatggtggtgtgggaaggaacgcgtccgttgctggtggagattcaggcgct

SEQ ID NO: 618643 - DNA, 75 bp, synthetic construct
  source 1..75: mol_type = other DNA
gtgacgtttttttttgacgacagggaccaggcagtcccctacacagccaccgctgatgatgtcgcaccgacgggt

SEQ ID NO: 618644 - DNA, 75 bp, synthetic construct
  source 1..75: mol_type = other DNA
aacgatgagatttatcgccgtcagcgggagatgaaagaggagctgaataacctggaggatttacattcaattcgg

SEQ ID NO: 618645 - DNA, 75 bp, synthetic construct
  source 1..75: mol_type = other DNA
gtgaaatcgccccgttcaccgtcacgcctgaacttatcgcagcagcaaaggacgctaaaaaacgagaaatcgagg

SEQ ID NO: 618646 - DNA, 75 bp, synthetic construct
  source 1..75: mol_type = other DNA
ccggaagatgctgagcatattccttttattcgcgggcgtattggttttgaactgcctgactggtttatcccgaag

SEQ ID NO: 618647 - DNA, 75 bp, synthetic construct
  source 1..75: mol_type = other DNA
ccggaagatgctgaccatattgcttttattcgcgggcgtattggttttgaactgcctgactggtttatcccgaag

SEQ ID NO: 618648 - DNA, 75 bp, synthetic construct
  source 1..75: mol_type = other DNA
ccggaagatgcagatcatattccttttattcgcgggcgtattggttttgaactgcctgactggtttatcccgaag

SEQ ID NO: 618649 - DNA, 75 bp, synthetic construct
  source 1..75: mol_type = other DNA
gagaaagttaatgcgtgatattcagatggttcttgaacgttggggagcgtgggcggctaataatcatgaagatgt

SEQ ID NO: 618650 - DNA, 75 bp, synthetic construct
  source 1..75: mol_type = other DNA
tgggcgctatgttttcctgatcaaagctgccaccagcgaagtgtggtggccggaagatgcagatcatattgcttt

SEQ ID NO: 618651 - DNA, 75 bp, synthetic construct
  source 1..75: mol_type = other DNA
ccggaagatgcggaacatatttcttttattcgcgggcgtattggttttgaactgcctgactggtttatcccgaag

SEQ ID NO: 618652 - DNA, 75 bp, synthetic construct
  source 1..75: mol_type = other DNA
tcagattagaagtgagcttggagggtatgtcacttccaatctatctggtgcatacaatatgttttctgagttctg

SEQ ID NO: 618653 - DNA, 75 bp, synthetic construct
  source 1..75: mol_type = other DNA
agcacagaaattttaggtattaatatcggattatatcctgaaatttccactgtaagtggaaacttatttcaatat

SEQ ID NO: 618654 - DNA, 75 bp, synthetic construct
  source 1..75: mol_type = other DNA
ttgtgctggattatatcgacgctgtgacggcaacagataccagcaccgcaccggatgtcatctggcctgaactgc

SEQ ID NO: 618655 - DNA, 75 bp, synthetic construct
  source 1..75: mol_type = other DNA
acaattttctggcacgtcgtgagcggtgcttactgaaaagcagcaagcgcgctgcatcgggtgaagagtggtatc

SEQ ID NO: 618656 - DNA, 75 bp, synthetic construct
  source 1..75: mol_type = other DNA
acccgccaggctgaagaactggagtccaggggcttataccgtcgtgctgcaacggtgtggatggcggcattccgt

SEQ ID NO: 618657 - DNA, 75 bp, synthetic construct
  source 1..75: mol_type = other DNA
agaactagttttcctttactggttacgtgtgagatcggcgttatacctgcttattacggctttgtgagagttaat

SEQ ID NO: 618658 - DNA, 75 bp, synthetic construct
  source 1..75: mol_type = other DNA
tgccggaagacaccaaaatgttactggcatttagtcaaggtgaaatcgtggccgcatattggaactgggttgtaa

SEQ ID NO: 618659 - DNA, 75 bp, synthetic construct
  source 1..75: mol_type = other DNA
acccatgcgctcgcggaactcctcccgcaatttcacctgaccgcgccccttgaacgacgcatcactcacgaaagt

SEQ ID NO: 618660 - DNA, 75 bp, synthetic construct
  source 1..75: mol_type = other DNA
atccctggtttgtggttagtgcctggactgatgttgactggtttgttagtgctggtcgcaagcgacttctcttta

SEQ ID NO: 618661 - DNA, 75 bp, synthetic construct
  source 1..75: mol_type = other DNA
agcagtcggagctggatgttcgccagttgcgggcaaagaaatttaacactaacgataacggacgaatgatccttt

SEQ ID NO: 618662 - DNA, 75 bp, synthetic construct
  source 1..75: mol_type = other DNA
cactggcccgtctctatccggtggtaatggctgcaaaatctgatacggcacgaaccgcccttgcgtggggcgacg

SEQ ID NO: 618663 - DNA, 75 bp, synthetic construct
  source 1..75: mol_type = other DNA
ttgctgttcagcggcggaatctgtgatgactttcccggcggcgcatttctttatactaatcaacaaacgctctcg

SEQ ID NO: 618664 - DNA, 75 bp, synthetic construct
  source 1..75: mol_type = other DNA
tgttccaccgctgcgccaattattctggcgtcatttacatcgtcacggcctgtggcatctggcgggcgatgttat

SEQ ID NO: 618665 - DNA, 75 bp, synthetic construct
  source 1..75: mol_type = other DNA
gctgcccaaacagtctgctgacgacattcagtccggcgcggtggtttatctgaaggacggggttgtgcagctggc

SEQ ID NO: 618666 - DNA, 75 bp, synthetic construct
  source 1..75: mol_type = other DNA
gtgaccgtcagattgccaatattgatatcagcaaagttttttggccgccatatgctgccacatcgccacgaacag

SEQ ID NO: 618667 - DNA, 75 bp, synthetic construct
  source 1..75: mol_type = other DNA
cgacggtcatgtgttgacggtacgggaagatctgatctggcccctgctggaagttctttatccgggcactcggga

SEQ ID NO: 618668 - DNA, 75 bp, synthetic construct
  source 1..75: mol_type = other DNA
taccgtaatctgcaattgcatctgaatccgctggatcaaagccctaacgtcaaacgcaaagcaaaatcggtcacg

SEQ ID NO: 618669 - DNA, 75 bp, synthetic construct
  source 1..75: mol_type = other DNA
taccgtaatctgcaattacatctgaatccgctggatcaaagccctaacgtcaaacgcaaagcgaaatcggtcacg

SEQ ID NO: 618670 - DNA, 75 bp, synthetic construct
  source 1..75: mol_type = other DNA
gaaaaacggtggcgattgttgccagtgcagccatcagcagcggagatctggggcaggtgggtgatgtttttgcgg

SEQ ID NO: 618671 - DNA, 75 bp, synthetic construct
  source 1..75: mol_type = other DNA
tcccgtcgtaacagcaaagctgcataccggtttctgggtaaaatcctcaacaacgtgaagaagtggcagatcccg

SEQ ID NO: 618672 - DNA, 75 bp, synthetic construct
  source 1..75: mol_type = other DNA
gtgaagaagtggcagatccccgattcatcaacacggataaagcgcccgcctatggtcgcgcgcttgctctgctca

SEQ ID NO: 618673 - DNA, 75 bp, synthetic construct
  source 1..75: mol_type = other DNA
gtaaaatcctcaacaacgtgaagaagtggcagatcccgcgattcatcaacacggataaagggcactgttgcaaag

SEQ ID NO: 618674 - DNA, 75 bp, synthetic construct
  source 1..75: mol_type = other DNA
gctgggttcagcgttatgcgcctgaaatggaaaaacggctgcgctggtactggcgtaacccttccgatctttgcc

SEQ ID NO: 618675 - DNA, 75 bp, synthetic construct
  source 1..75: mol_type = other DNA
taccggaacaacgtgattgaatgcgatcatggcaaactgaaacggataatcggcgccacgctgggatttaaatcc

SEQ ID NO: 618676 - DNA, 75 bp, synthetic construct
  source 1..75: mol_type = other DNA
ccgtggcacatggatgaaacctacgtgaaggtcaatggccgctgggcgggcactgttgcaaatagtcggtggtga

SEQ ID NO: 618677 - DNA, 75 bp, synthetic construct
  source 1..75: mol_type = other DNA
atggtcgtacccaatatcgtacagatatttacaattatgatctgcctgctcgatccagctcacaaattgtctcaa

SEQ ID NO: 618678 - DNA, 75 bp, synthetic construct
  source 1..75: mol_type = other DNA
ggggccgcaaaagcgttatttgccgatcctcagctgcctcgcacccgccagttcctcgagaagtttctgctgcaa

SEQ ID NO: 618679 - DNA, 75 bp, synthetic construct
  source 1..75: mol_type = other DNA
gttcctcgagaagtttttgctgcaaaaaaaaaaaaaaaaaaaccacccccgacgttcccccggggggggcgggac

SEQ ID NO: 618680 - DNA, 75 bp, synthetic construct
  source 1..75: mol_type = other DNA
aggcaaactacggctcgcagtaaacctgcgccagccgtacgcgctgcctacgataatgagctggtggaagccgtt

SEQ ID NO: 618681 - DNA, 75 bp, synthetic construct
  source 1..75: mol_type = other DNA
aatgggtagagttactgactgatcctggcgttaacggtctggcacgcgacgtagtgctgtcggatgcaatgctgg

SEQ ID NO: 618682 - DNA, 75 bp, synthetic construct
  source 1..75: mol_type = other DNA
taacgtggtggttaacccaccgtggaatgtgccgccgactctggcccgtaaagatattctgccaaaagtgcgtaa

SEQ ID NO: 618683 - DNA, 75 bp, synthetic construct
  source 1..75: mol_type = other DNA
tcggtgttgaatatttccgagcagacagtaaaagtacatattcgcaatctgctgcgtaaactcaatgtccgctca

SEQ ID NO: 618684 - DNA, 75 bp, synthetic construct
  source 1..75: mol_type = other DNA
ccgatcacaacgagataattcgctcgaccaatattgagcgtatcgtcacaggacgtgatagcgcactgaagctga

SEQ ID NO: 618685 - DNA, 75 bp, synthetic construct
  source 1..75: mol_type = other DNA
aagcgactggatctggtggagaagatgaatgatatcgtagcgaagcactttccgtcagcgttatcagcaaaatga

SEQ ID NO: 618686 - DNA, 75 bp, synthetic construct
  source 1..75: mol_type = other DNA
gaataaggatgaggtgtttgagcagggagtgattaacgtcttcaggggactgagttggaattataaaaccaactc

SEQ ID NO: 618687 - DNA, 75 bp, synthetic construct
  source 1..75: mol_type = other DNA
aatgcccggccgaaagtgtggtccgctgggtagcagggggctggcctgtatgtatatggtcactggcctggcgtg

SEQ ID NO: 618688 - DNA, 75 bp, synthetic construct
  source 1..75: mol_type = other DNA
gcttattttcactgttcgtgaaaaacgtaaagtctcaaaatcgttgacgatacaatatgataaaatgttgtacct

SEQ ID NO: 618689 - DNA, 75 bp, synthetic construct
  source 1..75: mol_type = other DNA
cgcctgcgcggttcgggtttcgttaatgccgtcggacggatcgtcgcagtcttcacgccctatggcgttgcggca

SEQ ID NO: 618690 - DNA, 75 bp, synthetic construct
  source 1..75: mol_type = other DNA
gaccccattaccaaaactattgcagcactcatcattctttgggcgctggcattaacgcagtttggtggcacgaaa

SEQ ID NO: 618691 - DNA, 75 bp, synthetic construct
  source 1..75: mol_type = other DNA
ggctgagcttttactgaccgggataatcaccgcaaccatgcagacggtcagactgagcatacgcacaggagacta

SEQ ID NO: 618692 - DNA, 75 bp, synthetic construct
  source 1..75: mol_type = other DNA
aaaaacggctgcgggccgtcgacagccggggccgcactgtcgatttttatctctcctcccgtcgtaacagcaaag

SEQ ID NO: 618693 - DNA, 75 bp, synthetic construct
  source 1..75: mol_type = other DNA
aagccaacctgcgcgtcgggctggaaaccctgctcggcgtgctcaatgccagcagtcgccagggtttgaacgctg

SEQ ID NO: 618694 - DNA, 75 bp, synthetic construct
  source 1..75: mol_type = other DNA
cacctcgcgcgcatctcacccgcttccacggcgtattcgccccgaatgcaaacctgcgtgcgcagctgacgccct

SEQ ID NO: 618695 - DNA, 75 bp, synthetic construct
  source 1..75: mol_type = other DNA
cttcttccctgacttctctaaagtgggcaccctggttgtatttgttgccttcattttgagttatatgggcgttga

SEQ ID NO: 618696 - DNA, 75 bp, synthetic construct
  source 1..75: mol_type = other DNA
aaccacgttgctacgcagcataaatttgctggagcaaccggaggcggggagcatcaccgttggggatatcactat

SEQ ID NO: 618697 - DNA, 75 bp, synthetic construct
  source 1..75: mol_type = other DNA
atgatatttatcaacgtcagcgggagatgaaagagaggttgagcagtctggatgatttggtttcaatccgagcgt

SEQ ID NO: 618698 - DNA, 75 bp, synthetic construct
  source 1..75: mol_type = other DNA
cccgctatctcgagagcggtgtgattgactgcgaagttttgtttgaagggatggatacccccatcccatacacag

SEQ ID NO: 618699 - DNA, 75 bp, synthetic construct
  source 1..75: mol_type = other DNA
acagccttgtcaccatgacaatggcgcagcttcaggagctggcagcaacaatggcgcaggcgcaaaccgagcgca

SEQ ID NO: 618700 - DNA, 75 bp, synthetic construct
  source 1..75: mol_type = other DNA
agtgacgacgccgaccaggtgcgggcactgatttccgggacgctgatgaaaggctgtattacgccacagcagata

SEQ ID NO: 618701 - DNA, 75 bp, synthetic construct
  source 1..75: mol_type = other DNA
gtccccgctacaccgagtccggtgcaattgactgcgaggtgctttttgaagggatggaagcccccaccccctaca

SEQ ID NO: 618702 - DNA, 75 bp, synthetic construct
  source 1..75: mol_type = other DNA
gttcaaatggaacggtcgtacctggaacgctggccccgactcactggctcgcctttatccggtaataatggcggc

SEQ ID NO: 618703 - DNA, 75 bp, synthetic construct
  source 1..75: mol_type = other DNA
acgagatttatcgtcgtcagcgggagatgaaagaggaactgaataatctgaataatttggtttcaattcgagcgt

SEQ ID NO: 618704 - DNA, 75 bp, synthetic construct
  source 1..75: mol_type = other DNA
atgagggatttacagaccagcggcatagtggggttgtcagccagtaagatgggatgcaagcacagtgatcgacat

SEQ ID NO: 618705 - DNA, 75 bp, synthetic construct
  source 1..75: mol_type = other DNA
atgagggatttacagaccagcggcatagtggggttgtcagccagtaaggtgggtaaggtgggatacaggcacagt

SEQ ID NO: 618706 - DNA, 75 bp, synthetic construct
  source 1..75: mol_type = other DNA
tcagcgggagatgaaagaggaactgagcagcctggaggatttacgctcaatcagagcgatggcgattagcagtaa

SEQ ID NO: 618707 - DNA, 75 bp, synthetic construct
  source 1..75: mol_type = other DNA
cgcacctggaatgctggccctgactcaatggctcgtctttatccggtagtaatggcggcgaaatccgatacggca

SEQ ID NO: 618708 - DNA, 75 bp, synthetic construct
  source 1..75: mol_type = other DNA
cagaacaggaagcgcagccgttcacattcgaatggaacggacacacctggaatggcggccccgactcgctggccc

SEQ ID NO: 618709 - DNA, 75 bp, synthetic construct
  source 1..75: mol_type = other DNA
atcgccgaacgtcacgcgatgctgaataatgagttgcgtaaaatttcccgactggaaatggtgctggcaattgtc

SEQ ID NO: 618710 - DNA, 75 bp, synthetic construct
  source 1..75: mol_type = other DNA
cagcgtgcggcagaagtcgtcgtactgccgctggtcccggcagcaggtctgcccgcagacggcacttctgccact

SEQ ID NO: 618711 - DNA, 75 bp, synthetic construct
  source 1..75: mol_type = other DNA
ttgcgcgcctcctgccggcgcatggaagcatcaggctggctgcgcaccctgcgcgccccgaatctgcagctggct

SEQ ID NO: 618712 - DNA, 75 bp, synthetic construct
  source 1..75: mol_type = other DNA
cactgcagcggagagtgctgattgtgctggctgcccttgatgaaaaacgaccgggccccgtgctgacgcgggaca

SEQ ID NO: 618713 - DNA, 75 bp, synthetic construct
  source 1..75: mol_type = other DNA
gttcagagttatgcacctgaaatagagaaacgactgcgttggtactggcgaaacccttccaggttctgtccctga

SEQ ID NO: 618714 - DNA, 75 bp, synthetic construct
  source 1..75: mol_type = other DNA
ccgcagacgacacttctgcctctgatctgccggtggatctgaacggcatgacgtatcaggcctgccgtggggatt

SEQ ID NO: 618715 - DNA, 75 bp, synthetic construct
  source 1..75: mol_type = other DNA
cagcctacgtgatccggctcgacggctccacctgtctgcaagtgacgaatgcaggtggaatacgtcagataatgg

SEQ ID NO: 618716 - DNA, 75 bp, synthetic construct
  source 1..75: mol_type = other DNA
gttattacaaccgggtacagcatgaaccctcagacagaaaacaaagtgatgagcggctaaaactggagattaagg

SEQ ID NO: 618717 - DNA, 75 bp, synthetic construct
  source 1..75: mol_type = other DNA
ggagtttgtccatctggcggggctggagagttatcccggtcatctggcgctgacgcagatcgcgcagcatctggc

SEQ ID NO: 618718 - DNA, 75 bp, synthetic construct
  source 1..75: mol_type = other DNA
atcgccgaacgtcacgcgatgctgaataatgagttgcgtaaaatttcccggctggaaatggtgctggcgattgtc

SEQ ID NO: 618719 - DNA, 75 bp, synthetic construct
  source 1..75: mol_type = other DNA
aggttcgcgtacagataaatgaaagtaggggtcgtctcagaaaacggaatctatggtcactcccgtttttgcaac

SEQ ID NO: 618720 - DNA, 75 bp, synthetic construct
  source 1..75: mol_type = other DNA
cgtggcgcagtggctgcatgcctttcacgatgccggaatagaagttcgtgtacaggttaatgaaagtgtcactcc

SEQ ID NO: 618721 - DNA, 75 bp, synthetic construct
  source 1..75: mol_type = other DNA
acccacgcactgcaatgccgcgatccgtttggcgcagcttccggtggtcgtcgtgctcaggggctgagctggcac

SEQ ID NO: 618722 - DNA, 75 bp, synthetic construct
  source 1..75: mol_type = other DNA
ttgaggttggcaatatcagccttacgattagtgaaccagatttcgagtttgacccgtatattttggaggaatttt

SEQ ID NO: 618723 - DNA, 75 bp, synthetic construct
  source 1..75: mol_type = other DNA
gtttgccgcggtggcaaaactgcttgagccaaaaatcaaacaggcggtagtgttgcgtcaacaagaggcacaaca

SEQ ID NO: 618724 - DNA, 75 bp, synthetic construct
  source 1..75: mol_type = other DNA
acccaggggacattgttctttgatgtggcgcgcatcattgatgctcgtcgtccggcgatttttgtgctcgaaaac

SEQ ID NO: 618725 - DNA, 75 bp, synthetic construct
  source 1..75: mol_type = other DNA
caacctttagcaaatccgaacgtaagaacattgaagcggtcattcgtagcattacgccacgagacagatatatgt

SEQ ID NO: 618726 - DNA, 75 bp, synthetic construct
  source 1..75: mol_type = other DNA
tttaaaaactttcttgatgggctttgattcttacgagcaactaccatcaaaaattgaagatttaattatcggtac

SEQ ID NO: 618727 - DNA, 75 bp, synthetic construct
  source 1..75: mol_type = other DNA
tatcaccggaaagttttctatttactacgaaatcttgacaaaattagctcaagcacagtaacaaattatcttcag

SEQ ID NO: 618728 - DNA, 75 bp, synthetic construct
  source 1..75: mol_type = other DNA
gacacacccaccagctacgaaataccaacctttaacaaatccgaacgtaaaaacattgaagcggtcattcgtagc

SEQ ID NO: 618729 - DNA, 75 bp, synthetic construct
  source 1..75: mol_type = other DNA
acagcatcaagaattatctggctaactttgacagctacgagcaattaccgagcaagcttgacgacattcttatcg

SEQ ID NO: 618730 - DNA, 75 bp, synthetic construct
  source 1..75: mol_type = other DNA
cgctatgtcaaggaggcctgctttaccgaggatgagctcaagaacctcgttcaagcagccgaaaacatcaaagcc

SEQ ID NO: 618731 - DNA, 75 bp, synthetic construct
  source 1..75: mol_type = other DNA
tcaccctcagccataaagaaggcgtgagtgatgaggcggcggcggaacatattcgtcaacacattcctgaacacg

SEQ ID NO: 618732 - DNA, 75 bp, synthetic construct
  source 1..75: mol_type = other DNA
cggaaatgggaaatatcagccttacgacaagtgagccagatttcgaatttgacccgtatttagttacagaggaat

SEQ ID NO: 618733 - DNA, 75 bp, synthetic construct
  source 1..75: mol_type = other DNA
gacacccccaccagctacgaactaccagccttttccaaatccgaacgtaaaagcattgaatcggtcattcgtagc

SEQ ID NO: 618734 - DNA, 75 bp, synthetic construct
  source 1..75: mol_type = other DNA
actcagctaccgtgacaaattatcttcagcgacaagcaaccagacttagttatgaattaccaagcgataaatatt

SEQ ID NO: 618735 - DNA, 75 bp, synthetic construct
  source 1..75: mol_type = other DNA
ggtggggtgagtttgttgaggcagcggcaacaggtgtgacgcttgccagcggtaaaaggggcattcgggcggtac

SEQ ID NO: 618736 - DNA, 75 bp, synthetic construct
  source 1..75: mol_type = other DNA
gccagccaatgaacagccagaccgctaacgctgcattacggcggatgggctatcagggcgttctggtgtctcatg

SEQ ID NO: 618737 - DNA, 75 bp, synthetic construct
  source 1..75: mol_type = other DNA
gaaggattcgagccggacgtaatcgaggccgcgctcgcacacgtggacacgaacgaggtaaggcgagcatataac

SEQ ID NO: 618738 - DNA, 75 bp, synthetic construct
  source 1..75: mol_type = other DNA
aggccgcactcgcacacgtggacacgaacgaggtaaggcgagcatataaccgaagtaactacctggaaaaacgtg

SEQ ID NO: 618739 - DNA, 75 bp, synthetic construct
  source 1..75: mol_type = other DNA
cctgtctgatgccagagagcgacggaatgaatacaggtcactcatagcaaagggaactgacccacaggactacga

SEQ ID NO: 618740 - DNA, 75 bp, synthetic construct
  source 1..75: mol_type = other DNA
caacctggaaaccctgaaacgcgttttacagcgcatcaatgaggtgatggattttgctgccaacagtggtctgat

SEQ ID NO: 618741 - DNA, 75 bp, synthetic construct
  source 1..75: mol_type = other DNA
atgaacgacaaagattttcaaaagtttcttgaagaatccaagagacgcaacagacacaacggttacagccacaca

SEQ ID NO: 618742 - DNA, 75 bp, synthetic construct
  source 1..75: mol_type = other DNA
acagcatcaaaaattatctggctaactttgacagctacgaacaattaccaagtaagcttgatgatattttcattg

SEQ ID NO: 618743 - DNA, 75 bp, synthetic construct
  source 1..75: mol_type = other DNA
aggcattgacgaagtaattcgggcaattacaccgagggaacgttatatgccaaccagaaagagcacccagaacac

SEQ ID NO: 618744 - DNA, 75 bp, synthetic construct
  source 1..75: mol_type = other DNA
cgcaaaatctgtttgcgctttatcatcacaacgtcgagcgcagcctgctatgggatgttctacaacgttatcagc

SEQ ID NO: 618745 - DNA, 75 bp, synthetic construct
  source 1..75: mol_type = other DNA
cgacaggcaaccagacttagttacgaattaccaagcgataaatattgcgctttgcttgctgtgatgtgcgcgaaa

SEQ ID NO: 618746 - DNA, 75 bp, synthetic construct
  source 1..75: mol_type = other DNA
agcttgatgatgtaattatcggattctgtagaagtgaaggtcacccaaaatacaacagaaagctattttatattc

SEQ ID NO: 618747 - DNA, 75 bp, synthetic construct
  source 1..75: mol_type = other DNA
ttactgatgaaagcggttatcaggacctggtgggtgaaggctggttttattccggggcatatgcactcgggattt

SEQ ID NO: 618748 - DNA, 75 bp, synthetic construct
  source 1..75: mol_type = other DNA
cttccgttatttcattgatgccgcacacgcagctggtctgaacgtgattctcgactgggtgccaggccacttccc

SEQ ID NO: 618749 - DNA, 75 bp, synthetic construct
  source 1..75: mol_type = other DNA
tttgaatggctggtggtggatgacaaagaacgctcggtgctgatctttgtgcgtcgcgataaagagggtaacgaa

SEQ ID NO: 618750 - DNA, 75 bp, synthetic construct
  source 1..75: mol_type = other DNA
aagcgattgaattcttgcgtaataccaaccgtattcttggtgagcaggtttccggtgcggtgacaatggctgagg

SEQ ID NO: 618751 - DNA, 75 bp, synthetic construct
  source 1..75: mol_type = other DNA
cctgcgtaaagagagcggcatctgggaactgtttatccctggcgcgcataacggtcagctctataaatacgaaat

SEQ ID NO: 618752 - DNA, 75 bp, synthetic construct
  source 1..75: mol_type = other DNA
tcgactgggtgccggggcacttcccgactgatgactttgcgcttgccgaatttgacggtacgaacctgtatgagc

SEQ ID NO: 618753 - DNA, 75 bp, synthetic construct
  source 1..75: mol_type = other DNA
agtccaccgacttccctaatgtttctcgtccgcaggatattggcgggctgggtttctggtacaagtggaacctgg

SEQ ID NO: 618754 - DNA, 75 bp, synthetic construct
  source 1..75: mol_type = other DNA
gcagatgtggaactcggcgattaccgagccgggcgctggctccgacgtgggtagcctgaaaacgacttatacccg

SEQ ID NO: 618755 - DNA, 75 bp, synthetic construct
  source 1..75: mol_type = other DNA
gaactggggcgtctgggggcgccaacctacgtgctgtaccagttgccgggcgggtttaacaccttcctgcgcgaa

SEQ ID NO: 618756 - DNA, 75 bp, synthetic construct
  source 1..75: mol_type = other DNA
ttgttgatatgagcaaaccgggcatcaaagtgaccaaacttgagaagctcggtctgcgtatggatagctgctgtg

SEQ ID NO: 618757 - DNA, 75 bp, synthetic construct
  source 1..75: mol_type = other DNA
aagggaaagggccttcccgagagtggtaaaggagaggccctggaaataccccacagccccgaaaaagagccagtc

SEQ ID NO: 618758 - DNA, 75 bp, synthetic construct
  source 1..75: mol_type = other DNA
atctctcgttgccttgccgaatcaggtactgtaacgctacgcaagcgccgtcttcccctcgaaatgacggtctga

SEQ ID NO: 618759 - DNA, 75 bp, synthetic construct
  source 1..75: mol_type = other DNA
actgtggggtgtcttactggcttataatctggtgagatatcagatgattaaaatggcggaacatctgaaaggtta

SEQ ID NO: 618760 - DNA, 75 bp, synthetic construct
  source 1..75: mol_type = other DNA
atggataaaggttattactcactgggactgttaaatgcctggagcctggcgggagaacaccgccactggatgata

SEQ ID NO: 618761 - DNA, 75 bp, synthetic construct
  source 1..75: mol_type = other DNA
caccatctgctccgcttccgccagctatacgacgcgaaactctcaacgaaatgatcggcctcccttctgacgaag

SEQ ID NO: 618762 - DNA, 75 bp, synthetic construct
  source 1..75: mol_type = other DNA
ataagctttacatataaccttgctttgcccaaaagactaaatcgtgctaaacttatttctgaagtaggattatcc

SEQ ID NO: 618763 - DNA, 75 bp, synthetic construct
  source 1..75: mol_type = other DNA
tctctgaaaatgaattaaaaaaattctatcaaacaaaaagatacccttacattattagttttacatataatctag

SEQ ID NO: 618764 - DNA, 75 bp, synthetic construct
  source 1..75: mol_type = other DNA
gcggagattttcagggagtcgtggaattcggggggaccatcacaccttatgatgattcacttccgccctggttgt

SEQ ID NO: 618765 - DNA, 75 bp, synthetic construct
  source 1..75: mol_type = other DNA
ggaaaaccggcggatataccgggttcagcaacaaaatcagtgagctgaccggtaacggaacccgtctgacggtca

SEQ ID NO: 618766 - DNA, 75 bp, synthetic construct
  source 1..75: mol_type = other DNA
cgaataatacaggtgaaggtgtctcagaggggagtggatgtgcgtcagaatgctgtgattgacattttacttatt

SEQ ID NO: 618767 - DNA, 75 bp, synthetic construct
  source 1..75: mol_type = other DNA
tcagtcaagtaaattttgacgatacattttttgattcgttaaagaatgactatgaacacggttttattgaatggt

SEQ ID NO: 618768 - DNA, 75 bp, synthetic construct
  source 1..75: mol_type = other DNA
gacggacgccatgcgcttccccggaggagaaatggcggatctgtacagtcatcgctgggaaatcgaactgggata

SEQ ID NO: 618769 - DNA, 75 bp, synthetic construct
  source 1..75: mol_type = other DNA
agataaaacagacgatgcaactgagcaggctgacgctgagaagtaaaaagccggagcttgtggagcaagagctgt

SEQ ID NO: 618770 - DNA, 75 bp, synthetic construct
  source 1..75: mol_type = other DNA
ttaatgaagttaattttaacgatgttttttttgactccttaaaaaaagactatcaacatggatttatcgattggt

SEQ ID NO: 618771 - DNA, 75 bp, synthetic construct
  source 1..75: mol_type = other DNA
ttaaattaaccgataagcaatttgacgatataattaaacttggtgctgtagatgaaagtattattgtcaataaaa

SEQ ID NO: 618772 - DNA, 75 bp, synthetic construct
  source 1..75: mol_type = other DNA
acctcacgggtgatatactttctgattacccatatataaataataaaaataatgagaataaatacctattgtcaa

SEQ ID NO: 618773 - DNA, 75 bp, synthetic construct
  source 1..75: mol_type = other DNA
ccatgctgacctccccggcaatgactgaaactcaggattttagctatcgcaccgtcattctgacactttcagagc

SEQ ID NO: 618774 - DNA, 75 bp, synthetic construct
  source 1..75: mol_type = other DNA
aggatggggcatcaaccagatagcttcattgcttaaggaaggtgcgaataagcggggaaattcttctcggctgac

SEQ ID NO: 618775 - DNA, 75 bp, synthetic construct
  source 1..75: mol_type = other DNA
cgtggcggtatcgttggttattgcgttgattgtggaaaatccgcagcagcaattgaaacttttacgctgtttatt

SEQ ID NO: 618776 - DNA, 75 bp, synthetic construct
  source 1..75: mol_type = other DNA
agagtcgccgcaggggagcgattcatgtcattagtgcgttctcaacaatgcacagtctggtcatcggacagatca

SEQ ID NO: 618777 - DNA, 75 bp, synthetic construct
  source 1..75: mol_type = other DNA
tttcagtacagttctggttgcgattatggccgttgctgcttcactggtaacactttatgccggtgtcgctggcgt

SEQ ID NO: 618778 - DNA, 75 bp, synthetic construct
  source 1..75: mol_type = other DNA
tgctgacctctccggcaatgactgaaactcatgattttagctatcgctccgtcattctcactctttcagagcgca

SEQ ID NO: 618779 - DNA, 75 bp, synthetic construct
  source 1..75: mol_type = other DNA
ctgggacaggtataagcaaggtgattccctgcatgatatcgccagaatgttcgacagatttcattcttccattat

SEQ ID NO: 618780 - DNA, 75 bp, synthetic construct
  source 1..75: mol_type = other DNA
caatactggctttcttcaaagttgacgcgtggtgacggagtatcatataccgcaggcattataagcgatacctct

SEQ ID NO: 618781 - DNA, 75 bp, synthetic construct
  source 1..75: mol_type = other DNA
tacagactcgcgacacaaacttactatgaggatccagacggaagttatgaggcatttagtgtcaaaatacctaaa

SEQ ID NO: 618782 - DNA, 75 bp, synthetic construct
  source 1..75: mol_type = other DNA
ttttgttgcttacaagctccagcgcggcgttggcggcacctcaggtgattaccgtcagtcgttttgaaattggca

SEQ ID NO: 618783 - DNA, 75 bp, synthetic construct
  source 1..75: mol_type = other DNA
aacacagcagtatttatcgctatcagcgcgaggggcgtcatgccgtccgtcaggagattcgtggctttttcaggg

SEQ ID NO: 618784 - DNA, 75 bp, synthetic construct
  source 1..75: mol_type = other DNA
gaagtgacgctcattttcccgagtatcctctggcgtcgcccagtaataatgaaattgatttacttaatctaattg

SEQ ID NO: 618785 - DNA, 75 bp, synthetic construct
  source 1..75: mol_type = other DNA
tacgcaattagtgaaaagagtcacggcagagaagaaatccgtcttcatattgtttgcgatgtccctgatgaactt

SEQ ID NO: 618786 - DNA, 75 bp, synthetic construct
  source 1..75: mol_type = other DNA
tggcaagttgcagcaaccagatatcgttgaaacgctaatcaccatttctgaattgcaattaaaggaatatttcac

SEQ ID NO: 618787 - DNA, 75 bp, synthetic construct
  source 1..75: mol_type = other DNA
atgaatagatctgatatgaattaccatgattactcatggacggctgtacaaggagataatccacgaatgactaag

SEQ ID NO: 618788 - DNA, 75 bp, synthetic construct
  source 1..75: mol_type = other DNA
aaaaacagaagctaaagatgaaaaccatgcaggaaccacggcagcctggcggctgcaaatcgtggtgtggcagaa

SEQ ID NO: 618789 - DNA, 75 bp, synthetic construct
  source 1..75: mol_type = other DNA
attaacttcctcgaaaaaccgagcgaaggatcgatcgtggtcaatggccagacgatcaatctggtgcgcgataaa

SEQ ID NO: 618790 - DNA, 75 bp, synthetic construct
  source 1..75: mol_type = other DNA
cgtggtgattgccgcgacgggctttaatggtcagggaattaatccgaatatcagcatcgcgctgggcgggattat

SEQ ID NO: 618791 - DNA, 75 bp, synthetic construct
  source 1..75: mol_type = other DNA
ttttatttctgcaatccgcaattatcatcccgcagatctatactttttgggtcaacacgtaacgctttacaggtg

SEQ ID NO: 618792 - DNA, 75 bp, synthetic construct
  source 1..75: mol_type = other DNA
aacatggtggattagatacctgcgacggtggcagtaatggcatcccctcgcctaccaccacccgctatgtttcag

SEQ ID NO: 618793 - DNA, 75 bp, synthetic construct
  source 1..75: mol_type = other DNA
aacatggtgggttgaacacctgtgacggcggcagcaatggcatcccctcgcccactacgacgcgttatgtctccg

SEQ ID NO: 618794 - DNA, 75 bp, synthetic construct
  source 1..75: mol_type = other DNA
gctatccagagccagggcgaagaaaagaaaaaacccgcttagcagtgatgggggtgagtatcagaatccgcgtcc

SEQ ID NO: 618795 - DNA, 75 bp, synthetic construct
  source 1..75: mol_type = other DNA
cacgttcagagacggtaaagatggaagatccagtatctgtaggaagcagttctcctgccgtcgatactcatcccc

SEQ ID NO: 618796 - DNA, 75 bp, synthetic construct
  source 1..75: mol_type = other DNA
ctgatcgaggttcacagtactgcgcatacgattaccgggtcatacaggagcagtttggtctgaaaacatcaatgt

SEQ ID NO: 618797 - DNA, 75 bp, synthetic construct
  source 1..75: mol_type = other DNA
gaacttgaggcatgtggtgaggcgtttctggcgcaggttcgccagcaggcagaacggctggtcagggagatagtg

SEQ ID NO: 618798 - DNA, 75 bp, synthetic construct
  source 1..75: mol_type = other DNA
gatagatccaaaagaaattgataagtcggttgattatatctgtttcacagatgacaaaaatataaaatcacataa

SEQ ID NO: 618799 - DNA, 75 bp, synthetic construct
  source 1..75: mol_type = other DNA
taaaataacattatatgccatgaaaaacctcactaacttttcagatgtttacgcattaggaaaaactttaataag

SEQ ID NO: 618800 - DNA, 75 bp, synthetic construct
  source 1..75: mol_type = other DNA
atgaagaggtcttggaccagacagcattgagcatgaaaggaagaaaagtaacttttggtgaactgaacatcccga

SEQ ID NO: 618801 - DNA, 75 bp, synthetic construct
  source 1..75: mol_type = other DNA
gatatggatgagcaaattcaaggcattctcaatctgattaaccaagacccgattgggtgggcaatcctcagcaga

SEQ ID NO: 618802 - DNA, 75 bp, synthetic construct
  source 1..75: mol_type = other DNA
gatcaggccatctactccttcagatcctcaggaggagtcaaaatatttcaacagtttgaaaaacacttcagacct

SEQ ID NO: 618803 - DNA, 75 bp, synthetic construct
  source 1..75: mol_type = other DNA
ggtggccggagcactgataggaaagaatgtttaccgttatgccaaagagttacgctcggcaaaaaagggaggggg

SEQ ID NO: 618804 - DNA, 75 bp, synthetic construct
  source 1..75: mol_type = other DNA
tttatttattaaatgcaaatgagcgtaaaacattcgaattcaagaaggcacttataaggatgaaaatatatagat

SEQ ID NO: 618805 - DNA, 75 bp, synthetic construct
  source 1..75: mol_type = other DNA
gctttatcagtatcggcaacagaacggcagaccagattactgattgaatggcagttactgaccgtaacccgtccc

SEQ ID NO: 618806 - DNA, 75 bp, synthetic construct
  source 1..75: mol_type = other DNA
aagatgcggcgtgatcacgttatcccgctttgtagtcaggctatggcggtactggaggccatgaagccaatcagc

SEQ ID NO: 618807 - DNA, 75 bp, synthetic construct
  source 1..75: mol_type = other DNA
gagcagccagacagcaaacgcagcattacggcgaatgggttacactggtgtgctggtatctcacggactacgcgc

SEQ ID NO: 618808 - DNA, 75 bp, synthetic construct
  source 1..75: mol_type = other DNA
ttttctggggcagtaaaaatatttttgggctggcgaatcctgacgacgtgcggaatatctgtgatgccaaaggaa

SEQ ID NO: 618809 - DNA, 75 bp, synthetic construct
  source 1..75: mol_type = other DNA
tcggacaaaaaaagaatattgctgagttttggatcgcttgatgatgtttccctggctgatgccagaaaacgccgt

SEQ ID NO: 618810 - DNA, 75 bp, synthetic construct
  source 1..75: mol_type = other DNA
atggcgagaaaaacacccccattaaccacggtgcagatcaaagcagccagaccagcggaaaaggaatacacccta

SEQ ID NO: 618811 - DNA, 75 bp, synthetic construct
  source 1..75: mol_type = other DNA
gcgttggggatcaaagaagtgctggcgctggaaacatccgctattgaagaacgttttcatctggagaataacgaa

SEQ ID NO: 618812 - DNA, 75 bp, synthetic construct
  source 1..75: mol_type = other DNA
tgaaggcagccggttgttatcaccatcctgccggtggaaagccggccgcccgttacaccgctgtggtcagacgtc

SEQ ID NO: 618813 - DNA, 75 bp, synthetic construct
  source 1..75: mol_type = other DNA
cggtgataatagcccggcgatttctgcaactaaagcgatgaccggtcactcactgggcgctgcgggtgtgcagga

SEQ ID NO: 618814 - DNA, 75 bp, synthetic construct
  source 1..75: mol_type = other DNA
gcggcggtatggtagtggttgaagagctggaacacgcgctggcgcgtggtgctcacatctacgctgaaatcgttg

SEQ ID NO: 618815 - DNA, 75 bp, synthetic construct
  source 1..75: mol_type = other DNA
gggagactgaccggtcactgatgcaactggtcaccgcattatgggcaacactggcactgatgtatgtctcgctgg

SEQ ID NO: 618816 - DNA, 75 bp, synthetic construct
  source 1..75: mol_type = other DNA
gagaccgccatggctcccggtgatatggccggcgtcatgcagtattcccgccgcgacgggcgtcttccggatgtc

SEQ ID NO: 618817 - DNA, 75 bp, synthetic construct
  source 1..75: mol_type = other DNA
ttgacccgtacatcagtcttgagacggcggcggtcattctgcaggagtgccgtcagcgccatcccgacagctggc

SEQ ID NO: 618818 - DNA, 75 bp, synthetic construct
  source 1..75: mol_type = other DNA
gcgggcttatccgttctgttactggaacgcgctgaaatccctggcagcaaaaatctttccggcggacggctatat

SEQ ID NO: 618819 - DNA, 75 bp, synthetic construct
  source 1..75: mol_type = other DNA
acccaggcgctcgcggaactcctcccgcaatttaacctgacggccccccttgaacgacgcatcactcacgaaagc

SEQ ID NO: 618820 - DNA, 75 bp, synthetic construct
  source 1..75: mol_type = other DNA
cgcgcacgattcgatccgtggctggttgccgaagctgaaaaagcaggagttgagtgtattcccggcgcaacagta

SEQ ID NO: 618821 - DNA, 75 bp, synthetic construct
  source 1..75: mol_type = other DNA
cacctttcatggaccgagatgactacagggcaacaagaggtttatgagtgtgcgattgagcggttaaggctgctt

SEQ ID NO: 618822 - DNA, 75 bp, synthetic construct
  source 1..75: mol_type = other DNA
ttttcatctgcttagctatttggcttttaagaatatggcaggattgctctgtcagccatgctgctgcggtgagaa

SEQ ID NO: 618823 - DNA, 75 bp, synthetic construct
  source 1..75: mol_type = other DNA
gactcgtcctgctggcgaagtgatggcgttggggatcaaagaagttctttcactggaaacatccgctattgaaga

SEQ ID NO: 618824 - DNA, 75 bp, synthetic construct
  source 1..75: mol_type = other DNA
aatggaccattaccaccctgacacataccgtcagcccggataacggttttacaaccagcattgaactcgaagtga

SEQ ID NO: 618825 - DNA, 75 bp, synthetic construct
  source 1..75: mol_type = other DNA
ccggggctttgaagcggaccagcttgatctggagctagacgacgctgacggaaaaatcgtgctgccgcgccgtgg

SEQ ID NO: 618826 - DNA, 75 bp, synthetic construct
  source 1..75: mol_type = other DNA
acaaaggcaacaaaacacccgcattcagcatcagtattgaggggaaggatatcaccactgtgctggacaaacgcc

SEQ ID NO: 618827 - DNA, 75 bp, synthetic construct
  source 1..75: mol_type = other DNA
ggttcaaactggcaactgtaaccatgccacaggccagttccgtggtttacataagcctgattggtggtgcagggt

SEQ ID NO: 618828 - DNA, 75 bp, synthetic construct
  source 1..75: mol_type = other DNA
cctgttgagcacggctaacacatggagtgcacgccagactttcaacggcgggatcaccggcgcactgacggggaa

SEQ ID NO: 618829 - DNA, 75 bp, synthetic construct
  source 1..75: mol_type = other DNA
acacttgatgccgaagatcttgttcctacaacctcctcccggtcacaacctgtagctgctgcgacatctgaatca

SEQ ID NO: 618830 - DNA, 75 bp, synthetic construct
  source 1..75: mol_type = other DNA
ctgccggtgatcactatcacacgtaaggacggcgacagtcaccgctttaccttggcagatcgcggagcctatacg

SEQ ID NO: 618831 - DNA, 75 bp, synthetic construct
  source 1..75: mol_type = other DNA
ccgtgaaaaatcgtggcataacaccactgttggggaagtggtgaaggaaatagccgcgcgtcacaagctgaagat

SEQ ID NO: 618832 - DNA, 75 bp, synthetic construct
  source 1..75: mol_type = other DNA
gtgggtacagatgaaaacgtgctggtacttaatcgcacctatgccaaccggagcaacgccgaacgggcggcgaaa

SEQ ID NO: 618833 - DNA, 75 bp, synthetic construct
  source 1..75: mol_type = other DNA
attttcgtgaaacgctgaatacccgccgcgaaaaatcgtggcacaagaccactgtcggggaagtggtgaaggaaa

SEQ ID NO: 618834 - DNA, 75 bp, synthetic construct
  source 1..75: mol_type = other DNA
cctggcagatcgcggagcctatacgggcgtaattgccagttggttgcatacccgcgaacctgcgaagaaagaaag

SEQ ID NO: 618835 - DNA, 75 bp, synthetic construct
  source 1..75: mol_type = other DNA
ggcactgggtaaagacctgtcggataaacccgtggatcatatagaccagactaatgagagtgacagcagttttct

SEQ ID NO: 618836 - DNA, 75 bp, synthetic construct
  source 1..75: mol_type = other DNA
tcccactctgccgataatatagctggcgtttattacagacctgttcaaaagtatataaatggcacctggtataat

SEQ ID NO: 618837 - DNA, 75 bp, synthetic construct
  source 1..75: mol_type = other DNA
ttggtaacaacacctggcgcgctctgagcggcggcgttggggccgaagagctgaaagattttccgggctacggta

SEQ ID NO: 618838 - DNA, 75 bp, synthetic construct
  source 1..75: mol_type = other DNA
cggcagctacgtgtttgtgcagcgttgggagcacaacctgaagcaactcaaccgtatgagcattcacgatcagga

SEQ ID NO: 618839 - DNA, 75 bp, synthetic construct
  source 1..75: mol_type = other DNA
cgatcagatagacgagaaaaaacgcctgatttccgaagctcaggccgagcatattgccgggcgggttacgggtaa

SEQ ID NO: 618840 - DNA, 75 bp, synthetic construct
  source 1..75: mol_type = other DNA
tgatgcactgcgtttaagatttgaagataaactgaccatccgggccatcgctcagcgtctgggtctcagtcattc

SEQ ID NO: 618841 - DNA, 75 bp, synthetic construct
  source 1..75: mol_type = other DNA
agttaatgctggttatttgagtgtatgtgtcggacgcttgcttagagtggaaaggagtgtatcaaaactagttcg

SEQ ID NO: 618842 - DNA, 75 bp, synthetic construct
  source 1..75: mol_type = other DNA
aatggccccggctggtctgacaggtcaggttatgtcgttacgggttcagttaacgggaaccgtgatgaattaatt

SEQ ID NO: 618843 - DNA, 75 bp, synthetic construct
  source 1..75: mol_type = other DNA
aacacgaaaaacctgcaacctgcatttgctttagggcagacaggaaacagggttgcaaatgataaagctgttggc

SEQ ID NO: 618844 - DNA, 75 bp, synthetic construct
  source 1..75: mol_type = other DNA
cagcatgtactatcaacggtgtctcgtttgatggttctaaaaatattgagctaacggcggaagatttaaatctac

SEQ ID NO: 618845 - DNA, 75 bp, synthetic construct
  source 1..75: mol_type = other DNA
cgcggcagtatcggaacggaagctacccgtgcgggtattcttgagaaactggctgctaataccggtcttatctct

SEQ ID NO: 618846 - DNA, 75 bp, synthetic construct
  source 1..75: mol_type = other DNA
attatccggcctaaaggctttttctgttccgggtgcgagtttaaaatctggtctgaagtgtcaggaaaaaaactg

SEQ ID NO: 618847 - DNA, 75 bp, synthetic construct
  source 1..75: mol_type = other DNA
catctttagctaaagccattttcgaaggattaggtggcaaccctgctactgaaaagaaaaatggttgttatgaac

SEQ ID NO: 618848 - DNA, 75 bp, synthetic construct
  source 1..75: mol_type = other DNA
atctgttattcatccggcagggacagggtaaaagtgccagcggtaaaccactgccggtgatcactatcacacgca

SEQ ID NO: 618849 - DNA, 75 bp, synthetic construct
  source 1..75: mol_type = other DNA
gcacctgcaatgaaactgatgtcagtgcccgcacctgtgtccacgtcgcccttgccgctcgccctatgcgtatgc

SEQ ID NO: 618850 - DNA, 75 bp, synthetic construct
  source 1..75: mol_type = other DNA
gaaggctggaaagaagcgccggttccggtatggaatatgctcaactatgctgccttacaggaagggcgtaacggt

SEQ ID NO: 618851 - DNA, 75 bp, synthetic construct
  source 1..75: mol_type = other DNA
tccgatgatggggatgaatatgattattcgccagcaaaagaagagtgggccattacctcagcgaatgcgaaaccg

SEQ ID NO: 618852 - DNA, 75 bp, synthetic construct
  source 1..75: mol_type = other DNA
aaaaaagccctaattatcccgttgagttcaaaatcaaaatggttgaactctcgcatcgaccagatatctccgtag

SEQ ID NO: 618853 - DNA, 75 bp, synthetic construct
  source 1..75: mol_type = other DNA
tccattatttggtcagagcggtgacgatcgatatatcgccgtcgataagatgatccttaagggcatcgacgtgct

SEQ ID NO: 618854 - DNA, 75 bp, synthetic construct
  source 1..75: mol_type = other DNA
acaaggtttgccgctgtacattgaaggtcctgtcgatgccggtaataaacctgatcaaattcgcttgttaaccgc

SEQ ID NO: 618855 - DNA, 75 bp, synthetic construct
  source 1..75: mol_type = other DNA
taacgcgcgaacccactttgccttcgtggtggatgagtttggttcggtcgaggggattgtgacgttaagcgacgt

SEQ ID NO: 618856 - DNA, 75 bp, synthetic construct
  source 1..75: mol_type = other DNA
cttggtgctgagttagttgctttaactagcgtgtttataattggaagaagagacaaaccgaatccaaagcaaact

SEQ ID NO: 618857 - DNA, 75 bp, synthetic construct
  source 1..75: mol_type = other DNA
tcatgatgcaggtgactcacactagatcagggccactcccagacgctgacgaattagctaagtacgaaagaatat

SEQ ID NO: 618858 - DNA, 75 bp, synthetic construct
  source 1..75: mol_type = other DNA
tgcagatattgaaaaacaattaattgaaaaagaagcaattaaacagcaactcacagagcaatatagacaaaaaaa

SEQ ID NO: 618859 - DNA, 75 bp, synthetic construct
  source 1..75: mol_type = other DNA
aacttttgaagcgaaattcccggacgcgcatcttggtgcggtggttgcctttggtaacaatacctggcgcgctct

SEQ ID NO: 618860 - DNA, 75 bp, synthetic construct
  source 1..75: mol_type = other DNA
caaccgttgatcccacctggttgggtatgtcgacggaagggtatgttttcgccgcgctgatctactggatcttct

SEQ ID NO: 618861 - DNA, 75 bp, synthetic construct
  source 1..75: mol_type = other DNA
tggttggccgtgcttctgttgcctccgatcgttcaattattccgccaggtactaccttgctggcagaagtgccgc

SEQ ID NO: 618862 - DNA, 75 bp, synthetic construct
  source 1..75: mol_type = other DNA
aaatggcgacaacaatggcgtgagggaaagctgctattaccttcttcagagagcccccagctacttcctgtgact

SEQ ID NO: 618863 - DNA, 75 bp, synthetic construct
  source 1..75: mol_type = other DNA
caacgtgcctgagctgctcccgataacacttgatgccgaagatgttgtccctacaacctccccccggtcgcaacc

SEQ ID NO: 618864 - DNA, 75 bp, synthetic construct
  source 1..75: mol_type = other DNA
tactggctggcaatccagcagggcgatgctgcgctgaaagccaataatcctgaccgggcagaacgcctgttccag

SEQ ID NO: 618865 - DNA, 75 bp, synthetic construct
  source 1..75: mol_type = other DNA
caccacggtgaagcgtaagcacaggaccgcaaagcagaagaaagagccggaagctaagcagggcgattacctgat

SEQ ID NO: 618866 - DNA, 75 bp, synthetic construct
  source 1..75: mol_type = other DNA
ctaccggttatcactatcacacgtaaggacggcgacagtcaccgctttaccatggcagatcgcggagcttacacg

SEQ ID NO: 618867 - DNA, 75 bp, synthetic construct
  source 1..75: mol_type = other DNA
cggaatggactattaccaccctgacgcatactgtcagcccggataacggttttacgaccagtctggagcttgaag

SEQ ID NO: 618868 - DNA, 75 bp, synthetic construct
  source 1..75: mol_type = other DNA
ttctcgctacaactggcggaagggcgggcagatctctacacggaaatgccagtgaaagtcagtggctttaaacag

SEQ ID NO: 618869 - DNA, 75 bp, synthetic construct
  source 1..75: mol_type = other DNA
taaagacctgtcagataaacccgtggaacatatagatcagaccaatgagagtgacggcagttttctgatgcggct

SEQ ID NO: 618870 - DNA, 75 bp, synthetic construct
  source 1..75: mol_type = other DNA
ggcgttattgccagttggctgcatacccgtgaaccaaagaagaaagaaacaacgcaggtaaagcgccgtcgaaag

SEQ ID NO: 618871 - DNA, 75 bp, synthetic construct
  source 1..75: mol_type = other DNA
tgtcagtggcgcaggtaaagcgcaggcactgaaaaatgttctgcaaggtccggttaccgaagatgttccagcttc

SEQ ID NO: 618872 - DNA, 75 bp, synthetic construct
  source 1..75: mol_type = other DNA
ggggtaattgccaactggttgcatacccgcgatcccgcgaagaaagaaagcactacggtgaagcgtaagcgcagg

SEQ ID NO: 618873 - DNA, 75 bp, synthetic construct
  source 1..75: mol_type = other DNA
gcaatgggaacgtctgcagcgtggggtcgcttcattttccctgcagctcgctgaggggcgggctgatctctatac

SEQ ID NO: 618874 - DNA, 75 bp, synthetic construct
  source 1..75: mol_type = other DNA
ggcagagattgcgtcggcggaagacgggaagtattacgaaggggaggcggcaaatgccatctctgcggcggtgca

SEQ ID NO: 618875 - DNA, 75 bp, synthetic construct
  source 1..75: mol_type = other DNA
ggtgtattctggaaacctagaaaaagaaaagagtatattgttagttctgacgaactccgcaaataccagatttta

SEQ ID NO: 618876 - DNA, 75 bp, synthetic construct
  source 1..75: mol_type = other DNA
agaatcgccatgggcgttttcgtgacagcgatctattccgctggttattcaatgaggtgctgcggcgctgcatgg

SEQ ID NO: 618877 - DNA, 75 bp, synthetic construct
  source 1..75: mol_type = other DNA
cgaccaggacagagcggcactggcgcatatcaacagcctgccgcgcgcgcagtggaacagcaatattcaggagct

SEQ ID NO: 618878 - DNA, 75 bp, synthetic construct
  source 1..75: mol_type = other DNA
atttttatctctcctcccgtcgtaacagcaaagctgcataccggtttctgggtaaaatcctcaacaacgtgaaga

SEQ ID NO: 618879 - DNA, 75 bp, synthetic construct
  source 1..75: mol_type = other DNA
ttggttatctcgccaccaatggcctaaataatttagttcctgaattccagattctggataatgttgatcactatg

SEQ ID NO: 618880 - DNA, 75 bp, synthetic construct
  source 1..75: mol_type = other DNA
tctggcgtaaaatgcagaaaaagaacctcgcctttgatgagctgtttgatgtgcgtgcggtacgtattgtcgccg

SEQ ID NO: 618881 - DNA, 75 bp, synthetic construct
  source 1..75: mol_type = other DNA
atgtctggaaatataggggcaaatccagatgccaacgtagtcagcgaagatgtgctgcgtgagagcgtcggtaag

SEQ ID NO: 618882 - DNA, 75 bp, synthetic construct
  source 1..75: mol_type = other DNA
gaaggattcgagggggtgatcatgagtctgttaaatgacgttcagaaattcattgaacgcccagtccgggctgta

SEQ ID NO: 618883 - DNA, 75 bp, synthetic construct
  source 1..75: mol_type = other DNA
tggtcaatgttgtcacacaatactgaatatcaacctcggcagctcgcctggcacaaggtcagtcaatctgacgag

SEQ ID NO: 618884 - DNA, 75 bp, synthetic construct
  source 1..75: mol_type = other DNA
aaccagtcaatgaaccaatagctgttggtgaatctgctgatgagtctgtgcgagttcgttcaaaccgaccggaat

SEQ ID NO: 618885 - DNA, 75 bp, synthetic construct
  source 1..75: mol_type = other DNA
tcttcggggtctggtatccgaatttgggattatcgccccacaaagcactgatgctctacgtcatattggggtcgt

SEQ ID NO: 618886 - DNA, 75 bp, synthetic construct
  source 1..75: mol_type = other DNA
gtccctggcgtgaccatgtcctgaatgtcgtcggggtcccggttccggatgcaaccggcgggcgtctggaaattc

SEQ ID NO: 618887 - DNA, 75 bp, synthetic construct
  source 1..75: mol_type = other DNA
gacccgggcgaatacattccggggcaagtggcagtattcacgggtaagggatggagccatgaagaagaccatcgc

SEQ ID NO: 618888 - DNA, 75 bp, synthetic construct
  source 1..75: mol_type = other DNA
aactgacgcaggcagaaacaacccgacttaacgccgtgctggattacattgacgcggtgacagcaacagatacca

SEQ ID NO: 618889 - DNA, 75 bp, synthetic construct
  source 1..75: mol_type = other DNA
tatcggtgccatcaaagacgattatgtcacgctttcaccgttaacaccatacgatgaatgggatggtgagaaatg

SEQ ID NO: 618890 - DNA, 75 bp, synthetic construct
  source 1..75: mol_type = other DNA
ggtgccgcagtagaagcggcagaagcacagcgccagtcactgattgatgctgcaatggcttccatcagcctgatt

SEQ ID NO: 618891 - DNA, 75 bp, synthetic construct
  source 1..75: mol_type = other DNA
ggtgacggatactgaggcacagcatagcgccgcactagacgcggcagaagtaaagcgccagtcgctgattgatgc

SEQ ID NO: 618892 - DNA, 75 bp, synthetic construct
  source 1..75: mol_type = other DNA
gactggcaacagaaccgggtgaaatccggtgctattactacgacgcggtgacgtttgaatacatgggatggtctg

SEQ ID NO: 618893 - DNA, 75 bp, synthetic construct
  source 1..75: mol_type = other DNA
ggtgacagacactgaggcacaacacagtgccgcagtagacgcggcagaagcacagcgccaatcactgattgatgc

SEQ ID NO: 618894 - DNA, 75 bp, synthetic construct
  source 1..75: mol_type = other DNA
gactggctacagtgcctggtgatatgcgttgtttttattataatgcagtaacgtatgaatatatgggctggtctg

SEQ ID NO: 618895 - DNA, 75 bp, synthetic construct
  source 1..75: mol_type = other DNA
acttaacgctgtgctggattacattgacgcggtgacggcaacagaaaccagcacagcgccggacgtcatctggcc

SEQ ID NO: 618896 - DNA, 75 bp, synthetic construct
  source 1..75: mol_type = other DNA
aaaatgggctggctacagtaccgggtaatatgcgttgtttttattatgaggcagttacgtatgaatatactggct

SEQ ID NO: 618897 - DNA, 75 bp, synthetic construct
  source 1..75: mol_type = other DNA
gcgtcacgacttcatgtgctgagtggtccctggcgtgaccatgtcctgaatgtcgtcggcgtcccggtgccggat

SEQ ID NO: 618898 - DNA, 75 bp, synthetic construct
  source 1..75: mol_type = other DNA
ggagaaatgacggaagaatgggtgtcatgcgggaaaattcatgcggatatccgtggcaggagcagccgggagcgg

SEQ ID NO: 618899 - DNA, 75 bp, synthetic construct
  source 1..75: mol_type = other DNA
cgatgaaaattcgagtgggtaatccattgcgaaaactggttctgattaagctggctgataatgccagcgatcagg

SEQ ID NO: 618900 - DNA, 75 bp, synthetic construct
  source 1..75: mol_type = other DNA
gtggctgctgttatgttatcggctccatgcgaaacagcaaaatcattaccgctcagcgtatgctgctggttcgcc

SEQ ID NO: 618901 - DNA, 75 bp, synthetic construct
  source 1..75: mol_type = other DNA
tgaaggtgtgtttgttatggaccccaaggatgatgaatgggctccacacctttatcggaaagcctgcgaggatgc

SEQ ID NO: 618902 - DNA, 75 bp, synthetic construct
  source 1..75: mol_type = other DNA
aaattgaggaactggcattactcaatgccattaactcaccagaaggcttttcgcttaagcacatatttgatgagg

SEQ ID NO: 618903 - DNA, 75 bp, synthetic construct
  source 1..75: mol_type = other DNA
tttaccgcaaagcctgcgaggatgcaggcaagccttttgctttgattgaccttcggaaacagcaataccagttaa

SEQ ID NO: 618904 - DNA, 75 bp, synthetic construct
  source 1..75: mol_type = other DNA
tccgccaggccgaacgttactttattgacagtaacatgatcctgaacctgcacgattttgtcagctttatcttta

SEQ ID NO: 618905 - DNA, 75 bp, synthetic construct
  source 1..75: mol_type = other DNA
ttatttttcatattatgcttcgccgggtattcacgcctgaactggacagaataaagaaacgccttgttaaaaaaa

SEQ ID NO: 618906 - DNA, 75 bp, synthetic construct
  source 1..75: mol_type = other DNA
ttgctggaactctacgacaacgagttgcaatacaccgatgagctgtacgccgaaaccccgtgggctgacgatgta

SEQ ID NO: 618907 - DNA, 75 bp, synthetic construct
  source 1..75: mol_type = other DNA
cgaaccgttatttccagcagaaatggcgaaagtgaatccggcaattctcgccgctctttcgccgaatgccgatga

SEQ ID NO: 618908 - DNA, 75 bp, synthetic construct
  source 1..75: mol_type = other DNA
catgcccgctcttacagttcgattttctcgacgctgtgccagaccaaagatgtcgatgccgcctacgcctggagt

SEQ ID NO: 618909 - DNA, 75 bp, synthetic construct
  source 1..75: mol_type = other DNA
tgcatcaatgaaaagcgatgaacggcagaaagcgccgctctggaaaaagctgattattgctttttccctgctgtg

SEQ ID NO: 618910 - DNA, 75 bp, synthetic construct
  source 1..75: mol_type = other DNA
tcctccgcaccgaaggattaagcaaatttttccccggcgttaaagcgttagacaacgttgatttcagcctgcgcc

SEQ ID NO: 618911 - DNA, 75 bp, synthetic construct
  source 1..75: mol_type = other DNA
ccgcgctttcgccgaatgccgatgaaaatcacgatttcttttccggttcaggctcctcttatgtgatgggggtaa

SEQ ID NO: 618912 - DNA, 75 bp, synthetic construct
  source 1..75: mol_type = other DNA
caacctaccacgagaggaaagaaaaaacgctcccttctggttaaaatctgttgcgtgcgtatccattttcttttt

SEQ ID NO: 618913 - DNA, 75 bp, synthetic construct
  source 1..75: mol_type = other DNA
aatactctccggagtttgagcaggcatggctggcatatcccaaacgtgcgggtggcaattcaaaatctgcagcct

SEQ ID NO: 618914 - DNA, 75 bp, synthetic construct
  source 1..75: mol_type = other DNA
gttgcgaaaactggttctgattaagctggctgataatgccagcgatcagggcgagtgctggcccagctatcagca

SEQ ID NO: 618915 - DNA, 75 bp, synthetic construct
  source 1..75: mol_type = other DNA
attggagccatcattgaaaacgccaaattcaaattgatttataaaattcaaaatccagaaacagcagaatgggcg

SEQ ID NO: 618916 - DNA, 75 bp, synthetic construct
  source 1..75: mol_type = other DNA
acccgaaaccatgctggaaggtgtgaaacgctacgcgggctgggtatctgcgatgggtaacagcggcacacaatt

SEQ ID NO: 618917 - DNA, 75 bp, synthetic construct
  source 1..75: mol_type = other DNA
agtttgagcaggcatggctggcatatcccaaacgtgctggtggcaattcaaaatctgcagccttcaaagcctgga

SEQ ID NO: 618918 - DNA, 75 bp, synthetic construct
  source 1..75: mol_type = other DNA
gggtacgtgctacaggaaatatcggcacacagttcgtgaagcaggctgcgacgttctttggacccgatcgtcact

SEQ ID NO: 618919 - DNA, 75 bp, synthetic construct
  source 1..75: mol_type = other DNA
tatcgccgatagtagagggggcgctgacgttttacgcatttatgcagaataaccagtttattctggcattattat

SEQ ID NO: 618920 - DNA, 75 bp, synthetic construct
  source 1..75: mol_type = other DNA
agagtaggatttgtgttcacatcaaaagatttaccaaaagcaactaaaatgtctcatataccagcaaacaaagaa

SEQ ID NO: 618921 - DNA, 75 bp, synthetic construct
  source 1..75: mol_type = other DNA
cgcatgatacttacgcgtttgattcagatagctgaaaccagagacagaataaacacaacaccacgtgttgttgca

SEQ ID NO: 618922 - DNA, 75 bp, synthetic construct
  source 1..75: mol_type = other DNA
ccaagctggagagaaataccagaacggatgtacgtaaagtaaaagagctgttgcccgagagcatagaatacaacc

SEQ ID NO: 618923 - DNA, 75 bp, synthetic construct
  source 1..75: mol_type = other DNA
ccaccttccccgtgaggaaagaaagaacgccccgttctggttaaagttggtggcgtgtgtgtccatattcttttt

SEQ ID NO: 618924 - DNA, 75 bp, synthetic construct
  source 1..75: mol_type = other DNA
aactagaacgcgaactgaggacggacgttcgtcatgtaaaaccgttgcttccagacactgcacattatgacccga

SEQ ID NO: 618925 - DNA, 75 bp, synthetic construct
  source 1..75: mol_type = other DNA
tatcaaccaccagtttgatgcgtggctgatggaaaacgcactgccgtcggggtttgaggcggggtttgatgggat

SEQ ID NO: 618926 - DNA, 75 bp, synthetic construct
  source 1..75: mol_type = other DNA
cagtttgatgcgtggctgatggagaatgcgctgccaccggggtttgaagccgggtttgatgggatggagattggg

SEQ ID NO: 618927 - DNA, 75 bp, synthetic construct
  source 1..75: mol_type = other DNA
cagtttgatgcgtggctgatggaaaacgcgctaccatcggggtttgaggcggggtttgaggcggggtttgatggg

SEQ ID NO: 618928 - DNA, 75 bp, synthetic construct
  source 1..75: mol_type = other DNA
cgtccagtactcactccagtagtccgtcagggcaagagacatctcagcaggcgtcatctgctcaaccgttgcggg

SEQ ID NO: 618929 - DNA, 75 bp, synthetic construct
  source 1..75: mol_type = other DNA
tcatgtaattcaaagccttctggttcgtccagtactcactccagtagtccgtcagggcaagagacatctcagcag

SEQ ID NO: 618930 - DNA, 75 bp, synthetic construct
  source 1..75: mol_type = other DNA
gattgatatccagaaagcgaaggattatgcaccaagccatttccagctttatgtacggtattccgctgctggatg

SEQ ID NO: 618931 - DNA, 75 bp, synthetic construct
  source 1..75: mol_type = other DNA
tcgattttctgtatcctcggcacttacttcggcttacatatcgatgattccattgccaatacacgcgccatcggt

SEQ ID NO: 618932 - DNA, 75 bp, synthetic construct
  source 1..75: mol_type = other DNA
tttgaaaaatacacttcggctttttctgccacggcgctgaaagtggcagcctcgacagaagggattttgcgccag

SEQ ID NO: 618933 - DNA, 75 bp, synthetic construct
  source 1..75: mol_type = other DNA
tgctgcttcagcagatgtgcgtttttctggttatcgcgtggttaatgagtaaaacgccattattcataccattaa

SEQ ID NO: 618934 - DNA, 75 bp, synthetic construct
  source 1..75: mol_type = other DNA
cgtagtgggttgttacgtgatatcacgaccattctcgccaacgagaaggtgaacgtacttggcgttgccagccgt

SEQ ID NO: 618935 - DNA, 75 bp, synthetic construct
  source 1..75: mol_type = other DNA
gctacacgccgcaaaaccgcagtaaagataacggtcgtgtggtggtagaaggtgtcggtaacctgatgcaccaca

SEQ ID NO: 618936 - DNA, 75 bp, synthetic construct
  source 1..75: mol_type = other DNA
ggagtaaaaacttatgtaatagaaaccttagtcagagaaatttcacctctaaaagacttttattcattaataaaa

SEQ ID NO: 618937 - DNA, 75 bp, synthetic construct
  source 1..75: mol_type = other DNA
gacgccatgaaactaaatcagtgtgccaccatcaagaagtacatctcgtactcatcgcacattcatcagcatgtg

SEQ ID NO: 618938 - DNA, 75 bp, synthetic construct
  source 1..75: mol_type = other DNA
taatatcacgaaggctacagtcaatactggcacgtttgcttctcagaacggcactctgattgttgatgcctcttc

SEQ ID NO: 618939 - DNA, 75 bp, synthetic construct
  source 1..75: mol_type = other DNA
tgaatcaggttatccgctcgccacgggtgattctgacccatatcagccaccagtttgatgcgtggctgatggaga

SEQ ID NO: 618940 - DNA, 75 bp, synthetic construct
  source 1..75: mol_type = other DNA
atctcgccgatcgctggtcgcccggatcgttccagcagtttttgctgacgcattatcatatggatcacgtccagg

SEQ ID NO: 618941 - DNA, 75 bp, synthetic construct
  source 1..75: mol_type = other DNA
cgtacatttatggacttaccagtcagttcaccacttattcattgcatgattgtggaagtctacgaaatccgcgca

SEQ ID NO: 618942 - DNA, 75 bp, synthetic construct
  source 1..75: mol_type = other DNA
gcagcgcattagcgacagctattgttatggctctttctgcaccagcattcgctgctgataacgcggtatcaacta

SEQ ID NO: 618943 - DNA, 75 bp, synthetic construct
  source 1..75: mol_type = other DNA
ccaccattacagctcaaggtgaaggcacctatgtccggattgcaatggtcattgattcaactggcgatgttgttg

SEQ ID NO: 618944 - DNA, 75 bp, synthetic construct
  source 1..75: mol_type = other DNA
gtggtcgatttggccgacaacgggttgaatggctaccatctggcgatgaccggtgattatgatctgataatcctc

SEQ ID NO: 618945 - DNA, 75 bp, synthetic construct
  source 1..75: mol_type = other DNA
gaatttacataactcagtactgtttaaagatgaaacaggtgaaaagaatcttgctaatactaaagttataggaac

SEQ ID NO: 618946 - DNA, 75 bp, synthetic construct
  source 1..75: mol_type = other DNA
tcgacgtggtgaaagggcttgacccgcaagcccgccagtatgttgtggtgaaaaatcagttcaagcgcggcgata

SEQ ID NO: 618947 - DNA, 75 bp, synthetic construct
  source 1..75: mol_type = other DNA
tatacgtctatcgccttgcccgcgaaataaaactggactcaaccaccgttagtgatgccttaagccaattcacat

SEQ ID NO: 618948 - DNA, 75 bp, synthetic construct
  source 1..75: mol_type = other DNA
agaaaaaaatcctgacacttgaagaagagcaagacagaaagctgaagaagaccgaaaaagattcgctgaaggatg

SEQ ID NO: 618949 - DNA, 75 bp, synthetic construct
  source 1..75: mol_type = other DNA
tcattcaacagttttttggggggcaccacgacttcgggcaatactttcaggctgtttgtggatttttccggacag

SEQ ID NO: 618950 - DNA, 75 bp, synthetic construct
  source 1..75: mol_type = other DNA
tggctattgcccgtccttatgaagatgccgttcgtctggtcagtaatattgctgcgccgatgatggttaccaaca

SEQ ID NO: 618951 - DNA, 75 bp, synthetic construct
  source 1..75: mol_type = other DNA
gtcgcacatgtaatggatattaaagattactggcagaaggctttagctcaggctcaaaacgcattaaccgtcttt

SEQ ID NO: 618952 - DNA, 75 bp, synthetic construct
  source 1..75: mol_type = other DNA
cggaattaatacgctgtttccttttattgagaacccaacaccgttacagcaaaaggtgctggatctggatatcag

SEQ ID NO: 618953 - DNA, 75 bp, synthetic construct
  source 1..75: mol_type = other DNA
ctctcattcaacgctgggctactggttgtggcatcattatttaagtgaatgtcaggagttacttccttcttcttc

SEQ ID NO: 618954 - DNA, 75 bp, synthetic construct
  source 1..75: mol_type = other DNA
ccaggtgagctgcgcactctgttacagccgtttatgggcggacaatggcaaaacgatacacccacgttgcgtatt

SEQ ID NO: 618955 - DNA, 75 bp, synthetic construct
  source 1..75: mol_type = other DNA
accttccggaaaaactgtcgacacgtctggctgaggagtctgtttccttgtggttggctacctgtattgacggtg

SEQ ID NO: 618956 - DNA, 75 bp, synthetic construct
  source 1..75: mol_type = other DNA
catagcgaacaagagtgtattgcgcgtatcgaatcggcggtaagtcaggggaaatgcatcgcctggatccggaat

SEQ ID NO: 618957 - DNA, 75 bp, synthetic construct
  source 1..75: mol_type = other DNA
ggtgatggttgatggtgctcagggggcggtgcatttccccgcggatgttcagcaactggatattgatttttacgc

SEQ ID NO: 618958 - DNA, 75 bp, synthetic construct
  source 1..75: mol_type = other DNA
atgaacgtttttaatcccgcgcagtttcgcgcccagtttcccgcactacaggatgcgggcgtctatctcgacagc

SEQ ID NO: 618959 - DNA, 75 bp, synthetic construct
  source 1..75: mol_type = other DNA
tccagcctgctggcctttgattttgctggcgttcatcacagcgatatggtgacgctgctggcggagtacggtatt

SEQ ID NO: 618960 - DNA, 75 bp, synthetic construct
  source 1..75: mol_type = other DNA
cctgaattgctgattctggctcccgtctgggacgactctccgggtgacgaatggtttggcagcgccatgcgtaac

SEQ ID NO: 618961 - DNA, 75 bp, synthetic construct
  source 1..75: mol_type = other DNA
gaaaaggatgattacccctggctgacgcacgttacgaaatccgatgtgcattcacaccgggtagcgacgcgcaaa

SEQ ID NO: 618962 - DNA, 75 bp, synthetic construct
  source 1..75: mol_type = other DNA
aagaaggcgttgctggctgaaattggcgtcggcacgctggatcaggcgatgatggcggtgatgccgtttaaacat

SEQ ID NO: 618963 - DNA, 75 bp, synthetic construct
  source 1..75: mol_type = other DNA
tgccgagcagcatctcgccgggcagatattttccggcctgacccgcttcgataataatactcagcgcccgattgg

SEQ ID NO: 618964 - DNA, 75 bp, synthetic construct
  source 1..75: mol_type = other DNA
cgcaagtcattgtttgtacacaagtaattgagcaaagcgtggatattgacctggacgaaatgatctccgacctgg

SEQ ID NO: 618965 - DNA, 75 bp, synthetic construct
  source 1..75: mol_type = other DNA
cggaaggatttgcccgcagcgagcaggagcaagtgggcaaatattactggatcgcgcaatggctaaaaagtttgt

SEQ ID NO: 618966 - DNA, 75 bp, synthetic construct
  source 1..75: mol_type = other DNA
aagtgtggatattgacctggacgaaatgatctccgacctggcccccattgatttgctgatccagcgagcggggcg

SEQ ID NO: 618967 - DNA, 75 bp, synthetic construct
  source 1..75: mol_type = other DNA
gcgatgactatggcatcagtgtggcatgcgaaccagattgttacacccgcattactttacgacttccatggcggg

SEQ ID NO: 618968 - DNA, 75 bp, synthetic construct
  source 1..75: mol_type = other DNA
cttgctgatgaaattgaacacgtgaatgcgtatctacaaatagaaaaagcacggtttcagtcacggttgcaggtc

SEQ ID NO: 618969 - DNA, 75 bp, synthetic construct
  source 1..75: mol_type = other DNA
aaaacgccattattcataccgttaatgcaggtcacggttcgtctgccgcataaatttctctgctacatcgtcttt

SEQ ID NO: 618970 - DNA, 75 bp, synthetic construct
  source 1..75: mol_type = other DNA
tcgcattagtgcccctcccggcgtgaacggtgtgcgactgacaccgcgcggctggtttgaatttaccgaagcctg

SEQ ID NO: 618971 - DNA, 75 bp, synthetic construct
  source 1..75: mol_type = other DNA
agctattgcagccatctggcgcatccgcaattcccactgatcggcacgggtccttttcgcttaacacaattcaca

SEQ ID NO: 618972 - DNA, 75 bp, synthetic construct
  source 1..75: mol_type = other DNA
ttgctatttaacgttgcgcaaaagctcccgactaaccctctggcaggcgcgaaaagtgatcaccattattcatca

SEQ ID NO: 618973 - DNA, 75 bp, synthetic construct
  source 1..75: mol_type = other DNA
acagcggcaagatccggaaatggcaaacgtgattttagtcactgatgacgaaagttgcgggtattcggccaggga

SEQ ID NO: 618974 - DNA, 75 bp, synthetic construct
  source 1..75: mol_type = other DNA
cattcgcaccgggtagcgacgcgcaaagacgttgagcgtagcgtgagcgtgggttggcttcatagcgaacaagaa

SEQ ID NO: 618975 - DNA, 75 bp, synthetic construct
  source 1..75: mol_type = other DNA
atgattattaccatttacgtcacccactgctaaaagcggttgagtactggataaccccaccactttttgaaaaag

SEQ ID NO: 618976 - DNA, 75 bp, synthetic construct
  source 1..75: mol_type = other DNA
ttcggtgctgacggttctctggccgctcaataaagttggcggggaatttttaccgcagatcaatgaaggcgactt

SEQ ID NO: 618977 - DNA, 75 bp, synthetic construct
  source 1..75: mol_type = other DNA
taaaagagtatcaggtagttatcgatcctcagcgcctggcgcaatatggcatcagtctcgcagaagtgaaaagtg

SEQ ID NO: 618978 - DNA, 75 bp, synthetic construct
  source 1..75: mol_type = other DNA
gaagctggatgaggcgttatatcacggcgcggtactgcgcgtgcgcccgaaagcgatgacggtggcggtgattat

SEQ ID NO: 618979 - DNA, 75 bp, synthetic construct
  source 1..75: mol_type = other DNA
ggctggcgggacgtgcattgctttcacacgtgctttctccgctaccggacatcatctacggtgaacagggcaaac

SEQ ID NO: 618980 - DNA, 75 bp, synthetic construct
  source 1..75: mol_type = other DNA
acgggcaccggttttattgccctcgccggagtcgccgccgaatttggcgtggtgatgctgatgtatttacgtcac

SEQ ID NO: 618981 - DNA, 75 bp, synthetic construct
  source 1..75: mol_type = other DNA
agcaccgtgcgactaccggggctggcgaatctgtgggtgccaccaatccgtaaccgtattgatatgctttccacc

SEQ ID NO: 618982 - DNA, 75 bp, synthetic construct
  source 1..75: mol_type = other DNA
attatgaaatatgaactgtggtatatccctcctgccctgctgggtctggcaggagtgttgtcatggttgctgctg

SEQ ID NO: 618983 - DNA, 75 bp, synthetic construct
  source 1..75: mol_type = other DNA
tgtgagatcgattttacccaaaagatatgggaagttcctccgacccggatgaaaatgaggaaggagcatatcgtc

SEQ ID NO: 618984 - DNA, 75 bp, synthetic construct
  source 1..75: mol_type = other DNA
tttccggaagcattaccggtgccaccggacgtgatgcagaccttcttcccgaatatcccggtggccacaccgacc

SEQ ID NO: 618985 - DNA, 75 bp, synthetic construct
  source 1..75: mol_type = other DNA
aggcgacttgttgtatatgccatcgacgctgccggggatttccgcagcagaggcggcgagtatgctgcaaaaaac

SEQ ID NO: 618986 - DNA, 75 bp, synthetic construct
  source 1..75: mol_type = other DNA
ccggaccgtcgatgctgaaaaccgagaatgcgcgcccgacgagctggatttatatcgatgcccgcgatcgtgaca

SEQ ID NO: 618987 - DNA, 75 bp, synthetic construct
  source 1..75: mol_type = other DNA
cgaagtgattcgcccgcgcgccaactggcgttggctggcgaacgcggtgttcagcctcggagaacatgccgaaat

SEQ ID NO: 618988 - DNA, 75 bp, synthetic construct
  source 1..75: mol_type = other DNA
cattgctgagttcgaccgcatggaggccgaactgcgccagaataacaccccacctgctgacaagatgattccggg

SEQ ID NO: 618989 - DNA, 75 bp, synthetic construct
  source 1..75: mol_type = other DNA
ataataccactcccacaaacaaaatcattccgggcgatgggcgcactctggttgttcgcttcgacaaattcggca

SEQ ID NO: 618990 - DNA, 75 bp, synthetic construct
  source 1..75: mol_type = other DNA
ttcgttttcctggtgatgggtttcactggcaaaaaagccgctgcattcaaagaggcctacatcgctgagttcgac

SEQ ID NO: 618991 - DNA, 75 bp, synthetic construct
  source 1..75: mol_type = other DNA
gtcaccaggagcgtagctctgtgcgagccgcttacatccataaggcggaacatcttggggagcgtaggttgatgt

SEQ ID NO: 618992 - DNA, 75 bp, synthetic construct
  source 1..75: mol_type = other DNA
atcggctgtaaagcctgtcaggtggcgtgttcagagtggaacgacattcgcgataccgtcggcaataacattggg

SEQ ID NO: 618993 - DNA, 75 bp, synthetic construct
  source 1..75: mol_type = other DNA
aaaaaaaaaaaaaaaaccccccccccccccccccgcgcggggggggggggggacttccaggaagaagtggcgaaa

SEQ ID NO: 618994 - DNA, 75 bp, synthetic construct
  source 1..75: mol_type = other DNA
cgtggaaacccgaacgttactcgagcgcatagccgcgctgaagcggtttttttatgcgtaatgcacagctccatt

SEQ ID NO: 618995 - DNA, 75 bp, synthetic construct
  source 1..75: mol_type = other DNA
actttccggttttatctggaaaaacagggatggactcttgttaaccggggcgcaattaaaaatatgactgtggaa

SEQ ID NO: 618996 - DNA, 75 bp, synthetic construct
  source 1..75: mol_type = other DNA
catcgctgtctgtcagccattgtcagcttgaaaatttaagtctggcaatctgcactcctaccccctttacgctca

SEQ ID NO: 618997 - DNA, 75 bp, synthetic construct
  source 1..75: mol_type = other DNA
aaggctggccggctccgttggtcaccggtatttccacccctgtacgtctcaccacctttatggtcgtggaaaacc

SEQ ID NO: 618998 - DNA, 75 bp, synthetic construct
  source 1..75: mol_type = other DNA
gctagaatgctctgaagattttaacgagcgcaattttacgcccgttacctacaccgacgccaaaggcgaaaaacg

SEQ ID NO: 618999 - DNA, 75 bp, synthetic construct
  source 1..75: mol_type = other DNA
aacgagtgttggataaaattcgcaatctggactgttcagcaaaattcactgagcacaattttgtgtcaagcgaat

SEQ ID NO: 619000 - DNA, 75 bp, synthetic construct
  source 1..75: mol_type = other DNA
ccgaccgactggcaggaagaagcagcgcagcaatccaacagtggtagcagcagccagggctttggttacacggcg

SEQ ID NO: 619001 - DNA, 75 bp, synthetic construct
  source 1..75: mol_type = other DNA
tgactcctacgccgttgcaatcacctgcggtagccagaactatcacgacgccgttctgatggcgtcgatggaact

SEQ ID NO: 619002 - DNA, 75 bp, synthetic construct
  source 1..75: mol_type = other DNA
gggacttccgcgttaggcgggactgctggggctgccgtgggggcaaccgctggttctgcgcttggtgggggagtt

SEQ ID NO: 619003 - DNA, 75 bp, synthetic construct
  source 1..75: mol_type = other DNA
agaatctcttaagaagggagcttcgctctgtgattcacatgaatgtgattctcttggtattgaagaggctattaa

SEQ ID NO: 619004 - DNA, 75 bp, synthetic construct
  source 1..75: mol_type = other DNA
gatcctctggccgattctgcttcccatgacgatcggctttctgtggatgtggtttcagcatccggcccagccccg

SEQ ID NO: 619005 - DNA, 75 bp, synthetic construct
  source 1..75: mol_type = other DNA
aagcctgtggcacggggatctattccagagcggtatgtacaaagtatgtttacaggtaccagccagatttgctcc

SEQ ID NO: 619006 - DNA, 75 bp, synthetic construct
  source 1..75: mol_type = other DNA
ttcctgtggggaaggtatactgattaaaaatggaaatatgatcactggcggcgatattgcttctgtgtatcaggg

SEQ ID NO: 619007 - DNA, 75 bp, synthetic construct
  source 1..75: mol_type = other DNA
caccggcttcaacgaaatgaaacagttatttcgtatgcacctggtggaggaaaccgccagctacagcgatcgtgc

SEQ ID NO: 619008 - DNA, 75 bp, synthetic construct
  source 1..75: mol_type = other DNA
ttcgacctggcaggtgttcgcgcgccagtgcagacttatcaggtgctgcctgctccgggcgcggccccggctgaa

SEQ ID NO: 619009 - DNA, 75 bp, synthetic construct
  source 1..75: mol_type = other DNA
tgatttatcttcgcccagaggcttatgccaatgaaaaggcggcgagcgagaagataaaaaaacatagcgatatgg

SEQ ID NO: 619010 - DNA, 75 bp, synthetic construct
  source 1..75: mol_type = other DNA
aatctctgatgtgaatgaagttagtgaccagcaagatacaccttgccgcctcgaatcaactgatgatgaattacc

SEQ ID NO: 619011 - DNA, 75 bp, synthetic construct
  source 1..75: mol_type = other DNA
gattaagtcacgcattaaactggcaaaacaaaagaacaaggttagtgacctcgatgactttgatgatagtgacga

SEQ ID NO: 619012 - DNA, 75 bp, synthetic construct
  source 1..75: mol_type = other DNA
gctgcccgcgccgaaccggagatgctggagcacgccgtacaactactggcctacgccgacaccatttacatcgcc

SEQ ID NO: 619013 - DNA, 75 bp, synthetic construct
  source 1..75: mol_type = other DNA
gatgaagcggtggaaggcttacggcgggatatgctcagtctcgggcttatctgggatgaaccacaaccagatcgc

SEQ ID NO: 619014 - DNA, 75 bp, synthetic construct
  source 1..75: mol_type = other DNA
gccggcgtggtggccgttgcccgggcagaaaatgaagcatgtcgtctcggcctcccctgcccggaaccctgcgtg

SEQ ID NO: 619015 - DNA, 75 bp, synthetic construct
  source 1..75: mol_type = other DNA
accacgccgccatgataacgatgaaggctcagatactggtgaaaccaccgaaaccactgaaaccactgaaacccg

SEQ ID NO: 619016 - DNA, 75 bp, synthetic construct
  source 1..75: mol_type = other DNA
acgcctttatccgggtcatcaaaacagaaggcgcacaacagtggctcaggcagcaccgttacgttcgcagcggtc

SEQ ID NO: 619017 - DNA, 75 bp, synthetic construct
  source 1..75: mol_type = other DNA
gaccacttttatggattggcgattagccctgtttttttatttaagtcttttcttctacataaagcactcgtcttc

SEQ ID NO: 619018 - DNA, 75 bp, synthetic construct
  source 1..75: mol_type = other DNA
tgtcatattatcgaaaaaaccattacttaaagcatcaggcaatcgtgttaatttgattaagcttactgattacac

SEQ ID NO: 619019 - DNA, 75 bp, synthetic construct
  source 1..75: mol_type = other DNA
tctgtcttacgacataacaatacaaaatatgaaagatgctgtttactttaatgacttcatttatcttaacgtaaa

SEQ ID NO: 619020 - DNA, 75 bp, synthetic construct
  source 1..75: mol_type = other DNA
aaaagatcgacgccattatttcgtcgctttccattaccgataaacgtcagcaggagattgccttctccgacaaac

SEQ ID NO: 619021 - DNA, 75 bp, synthetic construct
  source 1..75: mol_type = other DNA
agatgctaaaggtgactttgttggctttgatatcgatctcggtaacgagatgtgcaaacggatgcaggtgaaatg

SEQ ID NO: 619022 - DNA, 75 bp, synthetic construct
  source 1..75: mol_type = other DNA
gagacggtacgtatcggaaccgataccacctatgcgccgttctcatcgaaagatgccaaaggtgactttgttggc

SEQ ID NO: 619023 - DNA, 75 bp, synthetic construct
  source 1..75: mol_type = other DNA
tattctgtggatgtacctcttacctgtgacactctggtgtttgtgggaatggtatcaacatccgggacaaagccg

SEQ ID NO: 619024 - DNA, 75 bp, synthetic construct
  source 1..75: mol_type = other DNA
gaaaaatggacacataaccccctgttccgcatgtccagggataacagtaaacattatgtgttggtttataagccg

SEQ ID NO: 619025 - DNA, 75 bp, synthetic construct
  source 1..75: mol_type = other DNA
caagcaacctgctggtaaagacttcgcctttgctggctcatcagtaaaagacaaaaaatacttcggtgatggcac

SEQ ID NO: 619026 - DNA, 75 bp, synthetic construct
  source 1..75: mol_type = other DNA
cgccagaaattgcatccagttatatggaactatgtaatggatggcataactcactcataaaagaagagataatat

SEQ ID NO: 619027 - DNA, 75 bp, synthetic construct
  source 1..75: mol_type = other DNA
aacagagtcttgaccagctatctcgcatctcgtcagagttcgagccatcaagccagaagcgcaggaaaatgtctc

SEQ ID NO: 619028 - DNA, 75 bp, synthetic construct
  source 1..75: mol_type = other DNA
gctgttgagttccagcgttcaattgaacacagtcttgagcagctatctcgcatctcgtcagagttcgaaccatca

SEQ ID NO: 619029 - DNA, 75 bp, synthetic construct
  source 1..75: mol_type = other DNA
agatttttttacatggctccgcagggcaccggcagttgcgagaagtcctcagcgcccaggttgttgctctgatta

SEQ ID NO: 619030 - DNA, 75 bp, synthetic construct
  source 1..75: mol_type = other DNA
agccggtctctcctgacgaagcattgctggatgcctggggtgacgtcaggtatatcgcttataaatggctgaacg

SEQ ID NO: 619031 - DNA, 75 bp, synthetic construct
  source 1..75: mol_type = other DNA
tatatgatgacgtcattactggccaaagggaaatgccgctgactgataatgacgggagcatcattgttgatgagg

SEQ ID NO: 619032 - DNA, 75 bp, synthetic construct
  source 1..75: mol_type = other DNA
aacacagtcttgagcagctatctcgcatctcgtcagagttcgaaccatcgaaccaaaagcgcaggaaaatgtctc

SEQ ID NO: 619033 - DNA, 75 bp, synthetic construct
  source 1..75: mol_type = other DNA
gcttacctgaacttccagtcgatttcccacttttgatgcctgaaaactcgggaaacatgattcatgctgaagccc

SEQ ID NO: 619034 - DNA, 75 bp, synthetic construct
  source 1..75: mol_type = other DNA
ggcgctgcacaaccgggtgtccgacctgtacctgctacagcgtttttgatgtggcttatgacgaaaatcctcagc

SEQ ID NO: 619035 - DNA, 75 bp, synthetic construct
  source 1..75: mol_type = other DNA
tgtttttatcagggatgttttttttgaagacgccttacagggaatgggacagagcacagaatatgagcctgtctt

SEQ ID NO: 619036 - DNA, 75 bp, synthetic construct
  source 1..75: mol_type = other DNA
gccaccggacaatcactcctcggcttaattggtgaaatccttgatgtcgacaaaattgaatcgggtaactatcaa

SEQ ID NO: 619037 - DNA, 75 bp, synthetic construct
  source 1..75: mol_type = other DNA
cagaagtcctgttaactcaaccactaatggttgtagtgggcgatagagtgggcgcttttggtgcctatcgtgacg

SEQ ID NO: 619038 - DNA, 75 bp, synthetic construct
  source 1..75: mol_type = other DNA
cgttgattacctcacaaccttaccttacgttgatgccgggcgtattggcgtactgggtatttgcggtggcggtgg

SEQ ID NO: 619039 - DNA, 75 bp, synthetic construct
  source 1..75: mol_type = other DNA
tctcgatttatttaacgaacgcgtgttataccgtaaggccatttcagaaaagagcgatgaagaaatagtagcctt

SEQ ID NO: 619040 - DNA, 75 bp, synthetic construct
  source 1..75: mol_type = other DNA
atggatcaggaaatgacgttttcactcagctatgaacaactgacccggtttgcggaaaaacgcattcgggaatgc

SEQ ID NO: 619041 - DNA, 75 bp, synthetic construct
  source 1..75: mol_type = other DNA
atctctgcgagtcagccaaagccggagccgtgctgatcttctggcatgaactggccataaatggctatacctcaa

SEQ ID NO: 619042 - DNA, 75 bp, synthetic construct
  source 1..75: mol_type = other DNA
ctaatttctggcactatcttgagtcagcaactcttccggtgatcacaaaaagcaccactacagaaaatcgggagg

SEQ ID NO: 619043 - DNA, 75 bp, synthetic construct
  source 1..75: mol_type = other DNA
acccgatgtatcgctatcagcttgagaaaaaagcggaaaaaatcgtctttcgcggtgagtgggcggaagtggcgg

SEQ ID NO: 619044 - DNA, 75 bp, synthetic construct
  source 1..75: mol_type = other DNA
cagggcgcgatttatctctgcgagtcagccaaagccggagccgtgctgatcttctggcatgaactggccataaat

SEQ ID NO: 619045 - DNA, 75 bp, synthetic construct
  source 1..75: mol_type = other DNA
aatctggacagccagggcgtaacttatctctgcgagtcagccaaagccggagctgtgctgatcttctggcatgaa

SEQ ID NO: 619046 - DNA, 75 bp, synthetic construct
  source 1..75: mol_type = other DNA
cggcgagcccagcagggcagtttaatttcgtggcgaagcgcccaaccgaagagacgctgcgtaaagtgacgctgg

SEQ ID NO: 619047 - DNA, 75 bp, synthetic construct
  source 1..75: mol_type = other DNA
atgatttaattcagtacatgaacaccattaaagcattaaaaaaatatccaacgatgactgaatacagagatgaat

SEQ ID NO: 619048 - DNA, 75 bp, synthetic construct
  source 1..75: mol_type = other DNA
aaatctgcccataccgaagttcgcaggttggaaaaaaagagagaatctcttattgaatactttattgacgagtta

SEQ ID NO: 619049 - DNA, 75 bp, synthetic construct
  source 1..75: mol_type = other DNA
cgtgattttcggctgcacagaaattggtttactggtgcctgaagaacgcagtgttcttcccgtatttgatactgc

SEQ ID NO: 619050 - DNA, 75 bp, synthetic construct
  source 1..75: mol_type = other DNA
gcatgagctgggaatccacaatcccttactatcgtttgataaacgagggaattaagcagcggcttggtgggcttc

SEQ ID NO: 619051 - DNA, 75 bp, synthetic construct
  source 1..75: mol_type = other DNA
ccaaaagctgcaatagaagtttgtaatgaagcagcgaaaaaaggcttatggattttgggcattgatggtgggcat

SEQ ID NO: 619052 - DNA, 75 bp, synthetic construct
  source 1..75: mol_type = other DNA
ggccccgttctgtttcagggcctgccatcgtcatgaccgtggctgttgtggttgcgctttgcacgtttattcacc

SEQ ID NO: 619053 - DNA, 75 bp, synthetic construct
  source 1..75: mol_type = other DNA
cggcgggcatgttgctaccatcggctcgcaattccactacgttctggccgatggctcccaaggtaacggtatccc

SEQ ID NO: 619054 - DNA, 75 bp, synthetic construct
  source 1..75: mol_type = other DNA
tgtttttcgctgcggctgaaggcttattcaccgatcttgaatcacgtctggaaggcaaacgaattgttattctga

SEQ ID NO: 619055 - DNA, 75 bp, synthetic construct
  source 1..75: mol_type = other DNA
gattaaagattttctcggtctgcaaatggcacatgtcccggaacattatctgcaaaaagtcggcgcattatttat

SEQ ID NO: 619056 - DNA, 75 bp, synthetic construct
  source 1..75: mol_type = other DNA
ctacgcattcaacccatatttcatcagtatcaaatatttcaactactaatgtacttgtaaaaaaaggacttgaaa

SEQ ID NO: 619057 - DNA, 75 bp, synthetic construct
  source 1..75: mol_type = other DNA
accttgccatattataagcgatatcttgtagaaaatgactttcatcgaggactagggacagcgtttggtcattgg

SEQ ID NO: 619058 - DNA, 75 bp, synthetic construct
  source 1..75: mol_type = other DNA
gctcgatccggtattcaaccgattccgggacgcctggcgttcttcccgaatcgcagcgcagcgatggctgatctg

SEQ ID NO: 619059 - DNA, 75 bp, synthetic construct
  source 1..75: mol_type = other DNA
tgtttcgatggttacggatgctgctggcatactggttactgatgccatggcgctacttgatggattgaggaaaga

SEQ ID NO: 619060 - DNA, 75 bp, synthetic construct
  source 1..75: mol_type = other DNA
cttttcgcgcgatgccgtcattttcgcagggcacctcagatgatattatgtttttaaagactgatgtggatcagg

SEQ ID NO: 619061 - DNA, 75 bp, synthetic construct
  source 1..75: mol_type = other DNA
gaataagcgtactgaagccgcaaaacgcctctctgcggcgattgctgcaagggaaaaagatgaaaacacactgaa

SEQ ID NO: 619062 - DNA, 75 bp, synthetic construct
  source 1..75: mol_type = other DNA
cctgattgagtatatcccggtttccgttaccttaggcttcacttcgggtatcgggatcaccatcggtacgatgca

SEQ ID NO: 619063 - DNA, 75 bp, synthetic construct
  source 1..75: mol_type = other DNA
cttgctggaaagaaaaatacactgccgcacggtttacccgtgacctgattgccgggattaccgtcgggattattg

SEQ ID NO: 619064 - DNA, 75 bp, synthetic construct
  source 1..75: mol_type = other DNA
gctgtctacggtcggaaactgactgaagcgggttttatcacactggctttcgatgcttccactcagggagaaagc

SEQ ID NO: 619065 - DNA, 75 bp, synthetic construct
  source 1..75: mol_type = other DNA
atttagatgctgccttggcagtattccaagagcattgccctaatgatcctttaactcttttgcttgaggttcatt

SEQ ID NO: 619066 - DNA, 75 bp, synthetic construct
  source 1..75: mol_type = other DNA
ctgctgattaacaatcatctgaaagcacacgatatgcgccgtggcgatcgcgatgctttacgccgtattttgctg

SEQ ID NO: 619067 - DNA, 75 bp, synthetic construct
  source 1..75: mol_type = other DNA
cagcaccgcagtgaataacgaactgcgtattttgcgagcaataaatgaagagattgtgtcactgctgccactcgg

SEQ ID NO: 619068 - DNA, 75 bp, synthetic construct
  source 1..75: mol_type = other DNA
cacatgacatgcgccgtggcgatcgtgatgccttacgccatattttgctgctgctgatgcaatatgccgtcacct

SEQ ID NO: 619069 - DNA, 75 bp, synthetic construct
  source 1..75: mol_type = other DNA
ggattcttcggaactgataaacaaattaaccacaaccttaatcaatatgattgaagagctggaaccagatgaagc

SEQ ID NO: 619070 - DNA, 75 bp, synthetic construct
  source 1..75: mol_type = other DNA
ggcgtcaaaggggggaaagctgttgagtacgatgtaatgtctatgcctgacaaagaacgggggcaggtcatcgct

SEQ ID NO: 619071 - DNA, 75 bp, synthetic construct
  source 1..75: mol_type = other DNA
gagacgctgcgtaaagtgacgctgggctatcaaagccgcagtgcgtttaccggccatgccgatctgggtggccat

SEQ ID NO: 619072 - DNA, 75 bp, synthetic construct
  source 1..75: mol_type = other DNA
attgatatgactcatattttaaaggctaatgcatttattatattgtacaatctcattgaagcaaccatttccaat

SEQ ID NO: 619073 - DNA, 75 bp, synthetic construct
  source 1..75: mol_type = other DNA
cttacggcgatgtccacggagcctggcgtgccatggaagagctgcaccaggccggtaaaattcgcgcgattggcg

SEQ ID NO: 619074 - DNA, 75 bp, synthetic construct
  source 1..75: mol_type = other DNA
acaggccgttccgtggatgcaaagtcgtggcattcagccagaagcctgggcaccgtttgcggaagggaaaaatgg

SEQ ID NO: 619075 - DNA, 75 bp, synthetic construct
  source 1..75: mol_type = other DNA
actggatgaacgcgaaagtttttctaatctgcgtcgtcttgcctggcagaacggccattactttaccttgcgtac

SEQ ID NO: 619076 - DNA, 75 bp, synthetic construct
  source 1..75: mol_type = other DNA
cccgctggcattctggctgagcgatcaactggcacgtaaactgggcggtcatttaaacatcaaaacgcgggatgg

SEQ ID NO: 619077 - DNA, 75 bp, synthetic construct
  source 1..75: mol_type = other DNA
cgctgtggggcgcagaaaacgtaccgtggtcaatgtattatctcaatggtctggataacagcctggtgctgattt

SEQ ID NO: 619078 - DNA, 75 bp, synthetic construct
  source 1..75: mol_type = other DNA
cactgcaactctgatcgatatcgcagctaacagcctgtggccaacatcgactttcggtattgataactccaatac

SEQ ID NO: 619079 - DNA, 75 bp, synthetic construct
  source 1..75: mol_type = other DNA
ggcacagaccgtatggatgtgactctgaacaacggtagtaagtgggttggtgcagcaatgtctgtacatcaggtt

SEQ ID NO: 619080 - DNA, 75 bp, synthetic construct
  source 1..75: mol_type = other DNA
atcaacgaagatggtcatgttgcaactgattcactgactgtcgacaacagtaccgtaaccatttctgatgaagtt

SEQ ID NO: 619081 - DNA, 75 bp, synthetic construct
  source 1..75: mol_type = other DNA
gttgataccaaaattgacggtaacaacgctaagtggatcgtcggtgcggctgcaggcttcgctaaaggtgacatg

SEQ ID NO: 619082 - DNA, 75 bp, synthetic construct
  source 1..75: mol_type = other DNA
gtgataacagatgtctggaaatataggggcaaatccagtaacgaagtataccagagcggtctgttcaatgtgacc

SEQ ID NO: 619083 - DNA, 75 bp, synthetic construct
  source 1..75: mol_type = other DNA
tagcttgagttactctcacttcaacaacgacctgtctgcaaccatgagcaacggtacttacgttgacggtagcac

SEQ ID NO: 619084 - DNA, 75 bp, synthetic construct
  source 1..75: mol_type = other DNA
gactggggaatatcatcgctccgttctttggtggtattaccgctacagctgccatcgcgcgttctgccgctaacg

SEQ ID NO: 619085 - DNA, 75 bp, synthetic construct
  source 1..75: mol_type = other DNA
tcgggatcaccatcggtaccatgcagattaaagattttctcggtctgcaaatggctcatgtcccggaacattatc

SEQ ID NO: 619086 - DNA, 75 bp, synthetic construct
  source 1..75: mol_type = other DNA
tgctcaacgccttctcggacataaatcagattcaatggcggcgcggtatagggacagccgagggagagaatggga

SEQ ID NO: 619087 - DNA, 75 bp, synthetic construct
  source 1..75: mol_type = other DNA
actgttaaagactctactgtgacctctggttcatggtctgatgaaggtactactggttggttcggtaatacaggt

SEQ ID NO: 619088 - DNA, 75 bp, synthetic construct
  source 1..75: mol_type = other DNA
gtcaaacttacaatactttccatcactacaacgacgccacctatgctgatgacgtttactatgatggttatgtag

SEQ ID NO: 619089 - DNA, 75 bp, synthetic construct
  source 1..75: mol_type = other DNA
ctctgctctgcgccgtggtactggatggtatgaccggaacgaaacacaaagcgaacagcgaactggttggacagg

SEQ ID NO: 619090 - DNA, 75 bp, synthetic construct
  source 1..75: mol_type = other DNA
cgtctggcgctgactgttgataattcaacgatcgacgacaactacgaacactacacatataacggcacttacaat

SEQ ID NO: 619091 - DNA, 75 bp, synthetic construct
  source 1..75: mol_type = other DNA
agccgtggcatcgatcaagtcgcattggcggtttcggaaatggatcgcgtcacgcaacagaacgcatcgctggtg

SEQ ID NO: 619092 - DNA, 75 bp, synthetic construct
  source 1..75: mol_type = other DNA
atgtcgcaaaaatcgcttacggccatcacgttctgcgtgacggtaatcctcatcatctggatgttacacggttcg

SEQ ID NO: 619093 - DNA, 75 bp, synthetic construct
  source 1..75: mol_type = other DNA
tcacgttctgcgtgacggcaatcctcatcatctggatgttacatggttcgctgtgtgaaatacggatgaacatct

SEQ ID NO: 619094 - DNA, 75 bp, synthetic construct
  source 1..75: mol_type = other DNA
aagagggatatttttgacatctatacttaacgaatttgtagaaagtagaaatgctgatggaacatactcggaaag

SEQ ID NO: 619095 - DNA, 75 bp, synthetic construct
  source 1..75: mol_type = other DNA
tttgtttatccagattcttgggatggtttcctgaaatatgtcacagagaaatttccattcgttagattttcaact

SEQ ID NO: 619096 - DNA, 75 bp, synthetic construct
  source 1..75: mol_type = other DNA
gtgaatgttaactttttcgtcacctgcattggtgatgcatttaaatcccgtatggcacaaaacagcgtgctgtta

SEQ ID NO: 619097 - DNA, 75 bp, synthetic construct
  source 1..75: mol_type = other DNA
tcgtgctgatggtcgcctttatactggtgaatacttacaactggaaagaactgccgttgctgggcgcatcatgtt

SEQ ID NO: 619098 - DNA, 75 bp, synthetic construct
  source 1..75: mol_type = other DNA
aatccggtacttggcgtaaaagcaattctggtagtacggtgataactggtcgtatagcaaatggtcagcaaatac

SEQ ID NO: 619099 - DNA, 75 bp, synthetic construct
  source 1..75: mol_type = other DNA
aacaacaccatcaatgttgcgaactctactgtcacttcaggttcatggtctgatgaaggaacagaaggttggttt

SEQ ID NO: 619100 - DNA, 75 bp, synthetic construct
  source 1..75: mol_type = other DNA
catcatctggatgctgcacggttcgctgtgcgagatacggatgagcttctggggagcggagtttgcggcgttctt

SEQ ID NO: 619101 - DNA, 75 bp, synthetic construct
  source 1..75: mol_type = other DNA
tccaccacaggttatctgggcaattcgacttctgtgccattgccagaatgggcaacgcagaggatgcccactact

SEQ ID NO: 619102 - DNA, 75 bp, synthetic construct
  source 1..75: mol_type = other DNA
aatccggtacgtggcgtaaaagatcaattcatcaggtgatactggactgcaatatcatggttccatatacagcac

SEQ ID NO: 619103 - DNA, 75 bp, synthetic construct
  source 1..75: mol_type = other DNA
ggcagagagtgggcgatttgtgcagaatgaagtggtcagacataaacgatggtcatcttcacattggacagagta

SEQ ID NO: 619104 - DNA, 75 bp, synthetic construct
  source 1..75: mol_type = other DNA
attatttttgggccgcaaacgctgcatcgtctaccggagatgatcaactccgtgcgcggcgaccgcagcccggtt

SEQ ID NO: 619105 - DNA, 75 bp, synthetic construct
  source 1..75: mol_type = other DNA
atgcagatcggatagcagaagagatcgaaacggcagaacacattaagaagttacgtgacatgcgcaggaaataga

SEQ ID NO: 619106 - DNA, 75 bp, synthetic construct
  source 1..75: mol_type = other DNA
ctctcagatctggtattcacagattaaagacatgcctgtcagtgatgccagcgtgcaggcgctgaaaaaatatct

SEQ ID NO: 619107 - DNA, 75 bp, synthetic construct
  source 1..75: mol_type = other DNA
gcggaagaagcggatgtgctgctgctgaacacctgctcaatccgcgagaaggctcaggaaaaagtcttccatcag

SEQ ID NO: 619108 - DNA, 75 bp, synthetic construct
  source 1..75: mol_type = other DNA
agaagatccgtttgagatccgtcttgagcgcctgaacgaagagtatttcttgcgtatgcatcatgattttaccca

SEQ ID NO: 619109 - DNA, 75 bp, synthetic construct
  source 1..75: mol_type = other DNA
tgcccgccgctatcaatctgccgttaatgaataacgatgaacgcgccgccgttggcacctgctataaacagcaag

SEQ ID NO: 619110 - DNA, 75 bp, synthetic construct
  source 1..75: mol_type = other DNA
gcgaaatgaagaaagggatgttctcaatgatgaactacctgctgccgctgaaaggcattgcctccatgcactgct

SEQ ID NO: 619111 - DNA, 75 bp, synthetic construct
  source 1..75: mol_type = other DNA
accaacccgcagtggaaagaacagggtctgaactctgaaaacttcgttgcgtttaacctgactgagcgcatgcag

SEQ ID NO: 619112 - DNA, 75 bp, synthetic construct
  source 1..75: mol_type = other DNA
atggatgaagaaagggtgttttcactcagctataaacaactgacccggtttgcggaacaatgcatccgaaaatgc

SEQ ID NO: 619113 - DNA, 75 bp, synthetic construct
  source 1..75: mol_type = other DNA
actccagacatagaactttttgcattatacgataaatcgtcacctgacgatcaggaaccacataccacaggaatg

SEQ ID NO: 619114 - DNA, 75 bp, synthetic construct
  source 1..75: mol_type = other DNA
gtgttcttcggcctttccggcaccggtaaaaccaccctttccaccgacccgaaacgtcgcctgattggcgatgac

SEQ ID NO: 619115 - DNA, 75 bp, synthetic construct
  source 1..75: mol_type = other DNA
tccattaaagatacccgcgccattatcgatgccatcctgaacggttcgctggataacgcagaaaccttcaccctg

SEQ ID NO: 619116 - DNA, 75 bp, synthetic construct
  source 1..75: mol_type = other DNA
ctcagtggcggtcccctgaccgtgaatacccgcgactttacccagagcggccgcactggcgcgaagggcaaagtg

SEQ ID NO: 619117 - DNA, 75 bp, synthetic construct
  source 1..75: mol_type = other DNA
tggatacagacggtgcggcccctgaatccggggatttaccgcaggtgcagtctgatgcggcggtgttcgggcgca

SEQ ID NO: 619118 - DNA, 75 bp, synthetic construct
  source 1..75: mol_type = other DNA
tggctggtatcacaaagcacccgaagtgcataaaagcatcggcattttgttaatgatggggctggttattcgcgt

SEQ ID NO: 619119 - DNA, 75 bp, synthetic construct
  source 1..75: mol_type = other DNA
tctgtggcgtgtcatatctccaccgccgggtccgctgccgagttattcgcccatgactcgtcttgccgcaaaagc

SEQ ID NO: 619120 - DNA, 75 bp, synthetic construct
  source 1..75: mol_type = other DNA
agagagtaggcgatttatgcagaatgaaatggtcagacataaacgacaaccatcttcacattgagcagggtaaaa

SEQ ID NO: 619121 - DNA, 75 bp, synthetic construct
  source 1..75: mol_type = other DNA
ctaacgccctgaatatcgtggtgttgacggcggcactttccgtgtacaacagttgcgtctactgcaacagccgta

SEQ ID NO: 619122 - DNA, 75 bp, synthetic construct
  source 1..75: mol_type = other DNA
gactgttaatggcgctggtggtatctgcactggtgatcaactgggcgatgattagcctggcgcatatgaaattcc

SEQ ID NO: 619123 - DNA, 75 bp, synthetic construct
  source 1..75: mol_type = other DNA
atgtgtgagtatttattctttgctagtgctcgcattgttgggaatacgcgtaagtgttatgagtgtcatctctct

SEQ ID NO: 619124 - DNA, 75 bp, synthetic construct
  source 1..75: mol_type = other DNA
gttggtgctggtgctgtaaccgccggtactgttgatgctcaaggtataatgactataaaggcaactgccactggt

SEQ ID NO: 619125 - DNA, 75 bp, synthetic construct
  source 1..75: mol_type = other DNA
ggaaactcactggataacagcggcactgtccagggtgaccatgtcacgattcgccagaacagtgtcaccaacagt

SEQ ID NO: 619126 - DNA, 75 bp, synthetic construct
  source 1..75: mol_type = other DNA
gctgcaggtggcggtggaagcaaacatagacatgaaaatgatgactctgatactacagccccatcgtcaccagca

SEQ ID NO: 619127 - DNA, 75 bp, synthetic construct
  source 1..75: mol_type = other DNA
acagctatgcggtgctggggctgggtgatgtggcgatggcgcgcaaagattaccctgcagccgaacgttattatc

SEQ ID NO: 619128 - DNA, 75 bp, synthetic construct
  source 1..75: mol_type = other DNA
ctgccgggtgatgccaataaaggcgataccgtggatgtcacctttgaagatgaaaaaggtggtaagcacaccgtg

SEQ ID NO: 619129 - DNA, 75 bp, synthetic construct
  source 1..75: mol_type = other DNA
ggtgatcgaattaacaatgctggttaaacaattggtcagccaactgaaaaaagcaaaacctgattgcaaattacc

SEQ ID NO: 619130 - DNA, 75 bp, synthetic construct
  source 1..75: mol_type = other DNA
aagctgtagtgagcgaatgcctgaaaagggccagaacgtgcttatttcggtgaatttcgatagctctctggttga

SEQ ID NO: 619131 - DNA, 75 bp, synthetic construct
  source 1..75: mol_type = other DNA
attttttgaaatgatgaataattattcgagttattgtaaggataatagttttgaaatattaacgtgtatttatga

SEQ ID NO: 619132 - DNA, 75 bp, synthetic construct
  source 1..75: mol_type = other DNA
actaatgaggatgttaaccctgatagcgataacatgctacgtctgtgggatgacctgaatgaccgtcacgcgccc

SEQ ID NO: 619133 - DNA, 75 bp, synthetic construct
  source 1..75: mol_type = other DNA
ataacgccggaggccattgaaaacgcaattgaatacatccgcagtatcgcttttcacatcgatgaagacgattac

SEQ ID NO: 619134 - DNA, 75 bp, synthetic construct
  source 1..75: mol_type = other DNA
gcggtctggaaaggtgtcatcttgaggcagcattaaacattaagccggggcatacgcttggcattattgatgcac

SEQ ID NO: 619135 - DNA, 75 bp, synthetic construct
  source 1..75: mol_type = other DNA
gtgcaaaatgaccgtgttattgggggaatatcagcaaaatgttctaagcggtcagttgaactttacaaaatattt

SEQ ID NO: 619136 - DNA, 75 bp, synthetic construct
  source 1..75: mol_type = other DNA
gaaccagagcttgatatgttggttcaggcagctgtgagtcaaggctattttaaagccgtaatggctcctgagcct

SEQ ID NO: 619137 - DNA, 75 bp, synthetic construct
  source 1..75: mol_type = other DNA
tatcaacattgctttccagagaacgaactgatttagctttcccactgaatgcggatgatttagcagatgtaaata

SEQ ID NO: 619138 - DNA, 75 bp, synthetic construct
  source 1..75: mol_type = other DNA
cacaccagaggcatatatagggaagagattcactaatgatggccttttgatggataaacctcaagatattgtgga

SEQ ID NO: 619139 - DNA, 75 bp, synthetic construct
  source 1..75: mol_type = other DNA
gggagatgtttctggcagtcatacatttacgataaatctggaaggatgtccaacggcaaccagtactatttatag

SEQ ID NO: 619140 - DNA, 75 bp, synthetic construct
  source 1..75: mol_type = other DNA
gttaactgaaaatagctctcgtgatgtccaaattgctttcgctaatgagttatcgatgatctgcgataaattaag

SEQ ID NO: 619141 - DNA, 75 bp, synthetic construct
  source 1..75: mol_type = other DNA
gttattacaccagatcatcataaacaagccgagaaaagtggcctggaaaggtgtcaccttgaggcggcattaaac

SEQ ID NO: 619142 - DNA, 75 bp, synthetic construct
  source 1..75: mol_type = other DNA
gtgaaagctgacaacccttttgatcttttacttcctgctgcaatggccaaagtggccgaagaggcgggtgtctat

SEQ ID NO: 619143 - DNA, 75 bp, synthetic construct
  source 1..75: mol_type = other DNA
tcaagcaacctaaaacgttataaaaacaaagagcactatataaaacatatagttgcaaaatcattattgccaaaa

SEQ ID NO: 619144 - DNA, 75 bp, synthetic construct
  source 1..75: mol_type = other DNA
ccggtgatattgtatggatggattttaatccgcaagccgggcatgaacaagcgggccatagaccagctttagtgt

SEQ ID NO: 619145 - DNA, 75 bp, synthetic construct
  source 1..75: mol_type = other DNA
ctcctggcgtctgctcagtacggacaacgggcaaagctggaagctgatgagccatgaacgttataacaagatgat

SEQ ID NO: 619146 - DNA, 75 bp, synthetic construct
  source 1..75: mol_type = other DNA
tggtcaatgggggctgaacgtcctacaaaccgccgaccacaaagtgcaccatacttttattgaggccgtctgcct

SEQ ID NO: 619147 - DNA, 75 bp, synthetic construct
  source 1..75: mol_type = other DNA
cctgattccggttactatcggtaatattatcggcggtggtttgttggttgggttgacatactgggtcatttacct

SEQ ID NO: 619148 - DNA, 75 bp, synthetic construct
  source 1..75: mol_type = other DNA
gttcagaccgtaacgggatcgctggcgtgcggcgttcttgccatggccgtggccgggtcgttgcgcttcttcggg

SEQ ID NO: 619149 - DNA, 75 bp, synthetic construct
  source 1..75: mol_type = other DNA
cgggtaaacgttcgcgcgcagtaagcgcgaagaaaaaagcgattcttagcgcagcactggacactttttcacaat

SEQ ID NO: 619150 - DNA, 75 bp, synthetic construct
  source 1..75: mol_type = other DNA
agaccgtattgtgaaacgttttatgcgtgaaaacagccgcggtccgcaagttccggcagggttaccgatgactga

SEQ ID NO: 619151 - DNA, 75 bp, synthetic construct
  source 1..75: mol_type = other DNA
caagggcattcagtaaaaatggttgataaggaggtggtgttaataacattacgtgttaatcacaaacgaagataa

SEQ ID NO: 619152 - DNA, 75 bp, synthetic construct
  source 1..75: mol_type = other DNA
gagaaagcggcaaagaagctgaagcggaagcgatgctgcgccagcaaccaccttccacgcgcatagacctcacgc

SEQ ID NO: 619153 - DNA, 75 bp, synthetic construct
  source 1..75: mol_type = other DNA
gttactacggcacgacgcagggcgtcaccgaaaaggtgctggatgccaaccccggattctgtcagcaggtatttc

SEQ ID NO: 619154 - DNA, 75 bp, synthetic construct
  source 1..75: mol_type = other DNA
aatagtgattcttgttgatcataaagagtttaaaatggccaaatcagaaataattggtgattttgttatagatac

SEQ ID NO: 619155 - DNA, 75 bp, synthetic construct
  source 1..75: mol_type = other DNA
aacgattcaaggtaaatcggtattctttgtcgatgatgatgcactggtggcctgttttgatctgcgcataaatga

SEQ ID NO: 619156 - DNA, 75 bp, synthetic construct
  source 1..75: mol_type = other DNA
tctgcttctacagctcatgctgtaatgcagttaaatgcagaagatggtggaaatcgcaaatttgtcatggttcaa

SEQ ID NO: 619157 - DNA, 75 bp, synthetic construct
  source 1..75: mol_type = other DNA
aggactttatttattctgataattttttattaagtcgagccaaaaacgatctagctgaggggcttaaggatgaaa

SEQ ID NO: 619158 - DNA, 75 bp, synthetic construct
  source 1..75: mol_type = other DNA
gcatttcgcccctaacggctggggctgcaaatgcaccatccgtcaggtcagccgtggtgaatatgcgcaactggc

SEQ ID NO: 619159 - DNA, 75 bp, synthetic construct
  source 1..75: mol_type = other DNA
aggcgctggcgtggctgaaggcgaagaagctgcgccccggttttgattaccgggatgtatggcgggaagagcacc

SEQ ID NO: 619160 - DNA, 75 bp, synthetic construct
  source 1..75: mol_type = other DNA
ttagtgaaattgcaaaagaacgtattcgactttcggggcaaaagtataccgaagatttcgatattggattccgag

SEQ ID NO: 619161 - DNA, 75 bp, synthetic construct
  source 1..75: mol_type = other DNA
ccaacagtaaatctcaatggtagtgcatgtttttgcaatctccttctgacgctattttttgtcgccatctgtcat

SEQ ID NO: 619162 - DNA, 75 bp, synthetic construct
  source 1..75: mol_type = other DNA
gaactcattataagtctcctcatagaatgcacatcgatagcgacataccaacgccttcatcagagcctattaatc

SEQ ID NO: 619163 - DNA, 75 bp, synthetic construct
  source 1..75: mol_type = other DNA
gttcggggtttcgatgccacctccgaaaaaactgagccattctcgctctatgacatcgttgatgacattgtaaac

SEQ ID NO: 619164 - DNA, 75 bp, synthetic construct
  source 1..75: mol_type = other DNA
tttagggcgctggttaattaacgccatccgccagcaggattacgcagccatttccgccggagtgatggtgtgtgg

SEQ ID NO: 619165 - DNA, 75 bp, synthetic construct
  source 1..75: mol_type = other DNA
atgacttcatatacgaagatgactttgccgaggatgctgaagactatctgcatcgttcaaatcaaaaggatcaag

SEQ ID NO: 619166 - DNA, 75 bp, synthetic construct
  source 1..75: mol_type = other DNA
cattacattacactataaaaaagatatcatttccttattactggaaaccacgcctattaaagctaaccatttgca

SEQ ID NO: 619167 - DNA, 75 bp, synthetic construct
  source 1..75: mol_type = other DNA
tttttatctctggttgcagtggctggcttacagccagtttgccgcctgctgggagataagccagggctatgaaat

SEQ ID NO: 619168 - DNA, 75 bp, synthetic construct
  source 1..75: mol_type = other DNA
ttactgcgaaagtttattaatggaaaggaaaccgccaaaattagccaccatgccgcgcatctcacacccgcgcat

SEQ ID NO: 619169 - DNA, 75 bp, synthetic construct
  source 1..75: mol_type = other DNA
tccagtacgcttgactccattcctttgtccatgcaacgacagttcccggatttaacgccgcgtcatattgatcat

SEQ ID NO: 619170 - DNA, 75 bp, synthetic construct
  source 1..75: mol_type = other DNA
gcgatagcgaagacgactatgaagaaaagttactcattgccagatggaagttgatcgaagaacaggcaatcgccc

SEQ ID NO: 619171 - DNA, 75 bp, synthetic construct
  source 1..75: mol_type = other DNA
tagcggcagaattgccgccagcatgctcgtcccatatcccccaggcattcctgtactgatgccgggcgaacggat

SEQ ID NO: 619172 - DNA, 75 bp, synthetic construct
  source 1..75: mol_type = other DNA
catttcgggatttgtttttctccgtgatggcaaacatccacagcgttatatcgccgatggtgtggatgtcatccg

SEQ ID NO: 619173 - DNA, 75 bp, synthetic construct
  source 1..75: mol_type = other DNA
aggggcatatgtccactatccggtggatgatctgctcgctattctggcgctggaaagtaaacgccatcgctgcat

SEQ ID NO: 619174 - DNA, 75 bp, synthetic construct
  source 1..75: mol_type = other DNA
ctacatgcacaacaagtaaaagaagacgaaatgcgctggggctggccagcatggcccgagatgtatcagaacgta

SEQ ID NO: 619175 - DNA, 75 bp, synthetic construct
  source 1..75: mol_type = other DNA
aacggggggcaaagcgttcaatctaccgacgaagttgccggaaggttatcacacgctgacactcacccaggacga

SEQ ID NO: 619176 - DNA, 75 bp, synthetic construct
  source 1..75: mol_type = other DNA
aaagggagcaaatcagtgcgcacgggcaggggataaattaccggagttacttgatgagtatatccagacaacaac

SEQ ID NO: 619177 - DNA, 75 bp, synthetic construct
  source 1..75: mol_type = other DNA
taatcgtggtttgcaacgttatatcgctgatagtaacagtgctctgttagggctacagccagaagactggctgga

SEQ ID NO: 619178 - DNA, 75 bp, synthetic construct
  source 1..75: mol_type = other DNA
ggcaaatccggaaagtgccagcccatacagcccgtcttctcgccgttggctgaatgtgatttatatcgacgttaa

SEQ ID NO: 619179 - DNA, 75 bp, synthetic construct
  source 1..75: mol_type = other DNA
gtacgctgctgctggcgctagtggctggcttatcgattaatggtactttcgcagcgctgtttagctccattgtgc

SEQ ID NO: 619180 - DNA, 75 bp, synthetic construct
  source 1..75: mol_type = other DNA
atcagaccgggagaagcagattttaaatatggtgcatctccactacaggcaactctagggctggagtttggcgca

SEQ ID NO: 619181 - DNA, 75 bp, synthetic construct
  source 1..75: mol_type = other DNA
cagaggatgtggtaatcgatatcgaaagcaatggcttaccacatcataacccatcaaatcatgttgatatctttg

SEQ ID NO: 619182 - DNA, 75 bp, synthetic construct
  source 1..75: mol_type = other DNA
ggaatatcggcaccagcccggatgcgaacctggtcaataccatgctggatcacgcggtacggacactgcgacccg

SEQ ID NO: 619183 - DNA, 75 bp, synthetic construct
  source 1..75: mol_type = other DNA
gcagcgctgtttagctccattgtaccattttctgtattcccgattatttccctggtgctgacggtttactgcctg

SEQ ID NO: 619184 - DNA, 75 bp, synthetic construct
  source 1..75: mol_type = other DNA
cttcttcccggcagtactctccgtcattatggtgttctggattggcgcgaagatgcgtaaccgtaagcaggaagt

SEQ ID NO: 619185 - DNA, 75 bp, synthetic construct
  source 1..75: mol_type = other DNA
atacagcaacatgcaccggaatgtggtgaaacaacagctctattgagtttgataaaagatgaaggcctgctctca

SEQ ID NO: 619186 - DNA, 75 bp, synthetic construct
  source 1..75: mol_type = other DNA
gatatgaccggtgatactgatgtctcccgcctcttttttacggatgaagtggttcccggtatgttcacccgccag

SEQ ID NO: 619187 - DNA, 75 bp, synthetic construct
  source 1..75: mol_type = other DNA
tatggatacgctcggctggaaacttcccctgtacgtttggtccctgcatctgcgggccggtaagccggaagggcg

SEQ ID NO: 619188 - DNA, 75 bp, synthetic construct
  source 1..75: mol_type = other DNA
tatatggtggcacgcaagagaaggtgccatcttccctaataaagaagatattgcccgtgcaacaggggctgatat

SEQ ID NO: 619189 - DNA, 75 bp, synthetic construct
  source 1..75: mol_type = other DNA
tcgtatatggtggcacgcaagagaaggagctattttccccaataaagcagatattgaacatgccacaggtgctga

SEQ ID NO: 619190 - DNA, 75 bp, synthetic construct
  source 1..75: mol_type = other DNA
aagaccttcctggcccgttaaaaaatgcattaagcaacagtaatatatcaaccactgcagtgtcgactattgcat

SEQ ID NO: 619191 - DNA, 75 bp, synthetic construct
  source 1..75: mol_type = other DNA
ccctcagagtcacgtttccattagccaatctgttgtgcggcctgaagctggcgcgcagcacatacttctatcaac

SEQ ID NO: 619192 - DNA, 75 bp, synthetic construct
  source 1..75: mol_type = other DNA
taacgtgatgccgatgatgcacgtcgggctggataatttcgatctggtgaaatatctggtgagtcaggtgatgtt

SEQ ID NO: 619193 - DNA, 75 bp, synthetic construct
  source 1..75: mol_type = other DNA
tgtcgcgcaggagagttcgaacggctggaacaacgccggaaccgggcattctgcgctgatggaactcaattacac

SEQ ID NO: 619194 - DNA, 75 bp, synthetic construct
  source 1..75: mol_type = other DNA
aaggactattgatcgctgcgattgtggtggtagatggctgggcgctatttcaggtggtcagctacaccttacaga

SEQ ID NO: 619195 - DNA, 75 bp, synthetic construct
  source 1..75: mol_type = other DNA
acgaagcatttcagatttcccgccagttctgggcgcaccaggtcgagcgcggcgtgctgcgtactccgcgttcat

SEQ ID NO: 619196 - DNA, 75 bp, synthetic construct
  source 1..75: mol_type = other DNA
gctgaaatacgacaagccgcaggcagcagataatacgccgaaaccgcagttgaagctgcaacccgttcaaaaaga

SEQ ID NO: 619197 - DNA, 75 bp, synthetic construct
  source 1..75: mol_type = other DNA
agtattgaaaaagcagtcgccattaacgaagcattccagatttcccgccagttctgggcgcaccaggtcgagcgc

SEQ ID NO: 619198 - DNA, 75 bp, synthetic construct
  source 1..75: mol_type = other DNA
cccagtttggttcgctaacgcgccccgtgaacgacagtgcaatgaacaactggcagcaagaaggctggaaagaag

SEQ ID NO: 619199 - DNA, 75 bp, synthetic construct
  source 1..75: mol_type = other DNA
aattaccgcagcgaacgcgaaaccgcaatgcgatattattcatgaagcctggcagagcagggctgttatccgcta

SEQ ID NO: 619200 - DNA, 75 bp, synthetic construct
  source 1..75: mol_type = other DNA
gtcatgctgctgtgcatgtcgctgaccgtgctgttcgatatggttattgccatcagcgtggggatcgtgctggca

SEQ ID NO: 619201 - DNA, 75 bp, synthetic construct
  source 1..75: mol_type = other DNA
gttattcttgccctgctggtactggcaccgctgctctcctggctgccgctttccgccatggcagccctgctgttg

SEQ ID NO: 619202 - DNA, 75 bp, synthetic construct
  source 1..75: mol_type = other DNA
agttattaacaccactgtgcggctgcgcgccagccagtttaatctacgagacgatcgcggtcagcctgtaccgta

SEQ ID NO: 619203 - DNA, 75 bp, synthetic construct
  source 1..75: mol_type = other DNA
gcgactgttgctttcagtcgcgaggtgatttcttgctcagaaacgatgatggatgaacacattaccaccgaggaa

SEQ ID NO: 619204 - DNA, 75 bp, synthetic construct
  source 1..75: mol_type = other DNA
cggaaaacgcagactggctggctgcgttacgccgtctgcgttaccggcctgctgatggcattgtctgggtaactt

SEQ ID NO: 619205 - DNA, 75 bp, synthetic construct
  source 1..75: mol_type = other DNA
aagctcaacgccagcagcagcgagcgagagaaaaagccgcatcgcctgaatatcggcaaaagaaaattgaaaaag

SEQ ID NO: 619206 - DNA, 75 bp, synthetic construct
  source 1..75: mol_type = other DNA
attgacgtccgtgtctccaccatgccttccgcctggggggaacgggtggtgctgcgactgctggacaaaaaccag

SEQ ID NO: 619207 - DNA, 75 bp, synthetic construct
  source 1..75: mol_type = other DNA
ctactgtaacttcagggtcctggactgaagacgagcaatcagatcgtggtcatttcggcaactctgttgaaccaa

SEQ ID NO: 619208 - DNA, 75 bp, synthetic construct
  source 1..75: mol_type = other DNA
tttgcaaacggtggtgttggccttgggctggcagtgaatcttgatgtcgaaagtaacatcaatatttctaacaac

SEQ ID NO: 619209 - DNA, 75 bp, synthetic construct
  source 1..75: mol_type = other DNA
ttcgctggttattattgttaacgttatttctgatattttaggggctatggctaatcctctgaaatataaggagtg

SEQ ID NO: 619210 - DNA, 75 bp, synthetic construct
  source 1..75: mol_type = other DNA
accatgctgacgctggcgatgatcaccgaaatggtctttagctggccgggtttagggcgctggttaattaacgcc

SEQ ID NO: 619211 - DNA, 75 bp, synthetic construct
  source 1..75: mol_type = other DNA
aacatcgttgttaatgactctactgtaacttctggttctctgtcagaagatgagcaatcaacatcagatcgcggt

SEQ ID NO: 619212 - DNA, 75 bp, synthetic construct
  source 1..75: mol_type = other DNA
tggacattccccctgaaaccacgatctggcagcctgccgggtgtcagcactgcagtttcacgggctatcacgggc

SEQ ID NO: 619213 - DNA, 75 bp, synthetic construct
  source 1..75: mol_type = other DNA
cagaagcagacgctaagtacgctggcgagtatctcagcaggtatggcgggtggtgttgcaggtgggaatactgcg

SEQ ID NO: 619214 - DNA, 75 bp, synthetic construct
  source 1..75: mol_type = other DNA
gttctgaacaatggttctgattgggaaaccacgaaagattctctgatcgataccctggctatcaacagcggttct

SEQ ID NO: 619215 - DNA, 75 bp, synthetic construct
  source 1..75: mol_type = other DNA
gtgactacggcaatggtgcatctgctgctgatgatgttgcgttagccttcattgatgatgtaacttctgattatc

SEQ ID NO: 619216 - DNA, 75 bp, synthetic construct
  source 1..75: mol_type = other DNA
acggtatgattacttccgatcagatcggatacggtgattacgtctggaccaacggtagcgattatactggtcatg

SEQ ID NO: 619217 - DNA, 75 bp, synthetic construct
  source 1..75: mol_type = other DNA
cttattacgacaatccaactactgctcttgactggagcaatatggatgcaccgggtactgtagatggtaactatg

SEQ ID NO: 619218 - DNA, 75 bp, synthetic construct
  source 1..75: mol_type = other DNA
atgcagcgacatgcaccggaatgcggtgaaacaacagctctgttgggtttaataagagataaaggtctgctctca

SEQ ID NO: 619219 - DNA, 75 bp, synthetic construct
  source 1..75: mol_type = other DNA
gaccactaaaaaatgtattgtcatcggatgcagtgccttggtttggattaacggctcaggttgttcgtaaccatg

SEQ ID NO: 619220 - DNA, 75 bp, synthetic construct
  source 1..75: mol_type = other DNA
ttagacgcatatcttgctcctcaccttgaagaaggctcggcaggaaaaaaagcattggatatgtttggtttattc

SEQ ID NO: 619221 - DNA, 75 bp, synthetic construct
  source 1..75: mol_type = other DNA
taaatatgccgttcttaccaatgctgccgcaaatgcgcttggtgctgtagggggatttgcagtatccagatttgc

SEQ ID NO: 619222 - DNA, 75 bp, synthetic construct
  source 1..75: mol_type = other DNA
tgttgtttatatcccagaggatatgcagcgacatgcaccggaatgcggtgaaacaacagctctgttgggtttaat

SEQ ID NO: 619223 - DNA, 75 bp, synthetic construct
  source 1..75: mol_type = other DNA
gtggcacgcaagagaaggagctattttccccaataaagcagatattgaacatgccacaggtgctgatatacgcgc

SEQ ID NO: 619224 - DNA, 75 bp, synthetic construct
  source 1..75: mol_type = other DNA
atgtctggaaatataggggcaaatccagccacttcaggccgtattattgacaacaaagtattccagagcggcgta

SEQ ID NO: 619225 - DNA, 75 bp, synthetic construct
  source 1..75: mol_type = other DNA
gtgatgctggttacgtgactccttacggcagcgtttctggtctgttccagtctggtgatgactaccagctgagca

SEQ ID NO: 619226 - DNA, 75 bp, synthetic construct
  source 1..75: mol_type = other DNA
ttcaccaagaacttcagcgcctataccgatgctaactacctcggtggtggtgacgtagatcaagactggtccgcg

SEQ ID NO: 619227 - DNA, 75 bp, synthetic construct
  source 1..75: mol_type = other DNA
ttaccaatgcggcagcgaatgcggttggcgcagtagggggatttgcggtatccagacttgctggtacagatccaa

SEQ ID NO: 619228 - DNA, 75 bp, synthetic construct
  source 1..75: mol_type = other DNA
aaaaaggactggacatccacccagcgcgctttccatcagcacttccggagtattttattcgtatgactacagatc

SEQ ID NO: 619229 - DNA, 75 bp, synthetic construct
  source 1..75: mol_type = other DNA
tgtatggtgaaataaaatccataagaatggtgaataataaaccaattgtagagttatttactccaggggaaaatg

SEQ ID NO: 619230 - DNA, 75 bp, synthetic construct
  source 1..75: mol_type = other DNA
ttccttgcctccagcgcttcagattatgtgaatggttataccattgctgtggatggcggttggctggcgcgttaa

SEQ ID NO: 619231 - DNA, 75 bp, synthetic construct
  source 1..75: mol_type = other DNA
aacactctggttctggctgatgcgatcaacggcattgctatcggcagtaacgcacgcgcaaaccatgcaaacagt

SEQ ID NO: 619232 - DNA, 75 bp, synthetic construct
  source 1..75: mol_type = other DNA
agatgagcaaaaccatgacgccgaagtcatgtaaaaatgtcaccgttatacagatgctcggttccatgccatctc

SEQ ID NO: 619233 - DNA, 75 bp, synthetic construct
  source 1..75: mol_type = other DNA
gcccgggaaaatggactggttcatatcaacctggatgtgaatgtctttggctctatcgacgctgctttgcaaatt

SEQ ID NO: 619234 - DNA, 75 bp, synthetic construct
  source 1..75: mol_type = other DNA
gcgggtgtattaaccgggccaacctacactattggtggtactgactacaataacgtcggtgatgctctggctgcc

SEQ ID NO: 619235 - DNA, 75 bp, synthetic construct
  source 1..75: mol_type = other DNA
tacgacaccaaagctgatggttctatagactacagcaacatcactctcggtggtggtaatggcggtacgactcgc

SEQ ID NO: 619236 - DNA, 75 bp, synthetic construct
  source 1..75: mol_type = other DNA
gggtaatggttctcagaccactcgcggcgctcagactggctacaccgcctacaacatggatgcaccgcagaactc

SEQ ID NO: 619237 - DNA, 75 bp, synthetic construct
  source 1..75: mol_type = other DNA
cagcatttctttttttgacttcggcgtgtgtgcatgcctcgtctccggccttttttgttgaccgtattccgctca

SEQ ID NO: 619238 - DNA, 75 bp, synthetic construct
  source 1..75: mol_type = other DNA
gaggagtatgtgcgctggctcaggcagctgaatattgctgttgagacacgtaatggcgttgatcattatcgctcg

SEQ ID NO: 619239 - DNA, 75 bp, synthetic construct
  source 1..75: mol_type = other DNA
gtcggaccgcactggtgccctacagcgcggagcaaatgtatcagttagtgaatgacgttcagtcttatcctcagt

SEQ ID NO: 619240 - DNA, 75 bp, synthetic construct
  source 1..75: mol_type = other DNA
atgagtgagtcagtgcaaactaacacttcgctatggtcgaaagggatgaaagcggttatcgtcgcgcagtttctc

SEQ ID NO: 619241 - DNA, 75 bp, synthetic construct
  source 1..75: mol_type = other DNA
ggcgggtattccggttgtaccaatcggtattggtttcggtgcgctgtttgcgctggcaataacggcgctgtggat

SEQ ID NO: 619242 - DNA, 75 bp, synthetic construct
  source 1..75: mol_type = other DNA
cgacagggcgttcatcacaggtatcttcagagaatgcggctgcatcgtctccggtaacttccggctcattcttat

SEQ ID NO: 619243 - DNA, 75 bp, synthetic construct
  source 1..75: mol_type = other DNA
gaccgccaagggcggtgacggtgcgtttagcgccggtcgcggaaaagataacacggccagcatcattactaatgt

SEQ ID NO: 619244 - DNA, 75 bp, synthetic construct
  source 1..75: mol_type = other DNA
ctgacggcgaactgctaggtgcattgtcaattggggatgacggtaaataccgccaaatcatcaacgtagctgatg

SEQ ID NO: 619245 - DNA, 75 bp, synthetic construct
  source 1..75: mol_type = other DNA
cagaccaactacaccgcctacaacatggacgcaccgcagaactctgtgggtgagttctctgtcggcagtgaagac

SEQ ID NO: 619246 - DNA, 75 bp, synthetic construct
  source 1..75: mol_type = other DNA
tgaagcaggcggcgttcgctacgacaccaaagctgatggctctatcgactacagcaacatcactctcggtggtgg

SEQ ID NO: 619247 - DNA, 75 bp, synthetic construct
  source 1..75: mol_type = other DNA
caagtattgccaccaacaccactaatatcaccaacctgacggattccgttggtgaccttaaggatgatgccctgc

SEQ ID NO: 619248 - DNA, 75 bp, synthetic construct
  source 1..75: mol_type = other DNA
aaggcaaaagggactaatagcatggcaatagggttcggaagccttgccgataaagtcaatactatcgcattagga

SEQ ID NO: 619249 - DNA, 75 bp, synthetic construct
  source 1..75: mol_type = other DNA
ctgtaggttataacgctgtcgcgtctggtgccagcagcgtagccattggtcagaacagcagcagcaccgttgata

SEQ ID NO: 619250 - DNA, 75 bp, synthetic construct
  source 1..75: mol_type = other DNA
aaatggcgatcgttcgatggcttttggtcgttacgcaaagacgaatggttttacatctcttgctattggggactc

SEQ ID NO: 619251 - DNA, 75 bp, synthetic construct
  source 1..75: mol_type = other DNA
cgctaacggtgcaatctctgccaccagcagcgatgccattaacggttcacaactgtataccaccaacaagtacat

SEQ ID NO: 619252 - DNA, 75 bp, synthetic construct
  source 1..75: mol_type = other DNA
agctctatgacaccagcaagtacattgccgatactctgggtggtgacgcagaagtcaatgctgacggcacaatca

SEQ ID NO: 619253 - DNA, 75 bp, synthetic construct
  source 1..75: mol_type = other DNA
taccggtttaaccttcaccgatgccagcgcagcaggtattggctctaccgctgtggggtataacactgttgccaa

SEQ ID NO: 619254 - DNA, 75 bp, synthetic construct
  source 1..75: mol_type = other DNA
cattgccgatgctctgggcgggaatgctgtggtgaacactgacggcagtatcactacaccgacttatgccatcgc

SEQ ID NO: 619255 - DNA, 75 bp, synthetic construct
  source 1..75: mol_type = other DNA
tgcgcagttgaagcaaagtgtgcaggaaacgaagcaatacaccgatcagcgcatggttgagatggataacaaact

SEQ ID NO: 619256 - DNA, 75 bp, synthetic construct
  source 1..75: mol_type = other DNA
acagattgaactggtgcgcagccagagtaaggctggtaataacgggccatgggtaactcactgggaagaaatggc

SEQ ID NO: 619257 - DNA, 75 bp, synthetic construct
  source 1..75: mol_type = other DNA
ctatagctttgtctgtatttctacaggtgtggggggcgcaagctgatattattgatggaggtgaagtaagattca

SEQ ID NO: 619258 - DNA, 75 bp, synthetic construct
  source 1..75: mol_type = other DNA
tgaggtggcagagcgagggggacccggattaacaccattggttaccttcagcagtaacggacagactttttccat

SEQ ID NO: 619259 - DNA, 75 bp, synthetic construct
  source 1..75: mol_type = other DNA
ggccgggatgtcgctggtcagtggacagagcgtgacggatgtacagtcaggagcgctgccacaggggctgaaagc

SEQ ID NO: 619260 - DNA, 75 bp, synthetic construct
  source 1..75: mol_type = other DNA
tggcactgttggtatctccgctcggtattgttgatgtggcaggccatcagattgccctgaacttcagctcgctga

SEQ ID NO: 619261 - DNA, 75 bp, synthetic construct
  source 1..75: mol_type = other DNA
actgacgaagcacccaaatggacctggcagataggttcaccggaccagacttggtcagtggatactgccgatgcg

SEQ ID NO: 619262 - DNA, 75 bp, synthetic construct
  source 1..75: mol_type = other DNA
caacgttttcgcgcctctgttccggtgcgtgacccggagacgggaaacgtgtcgggacagctttctttcaccctg

SEQ ID NO: 619263 - DNA, 75 bp, synthetic construct
  source 1..75: mol_type = other DNA
aggggatactggctgacggtcgggtgatgaatctggctgcggcatatgcctcagcagtgtcggattttgaactgc

SEQ ID NO: 619264 - DNA, 75 bp, synthetic construct
  source 1..75: mol_type = other DNA
tacagagaacgggcaactggtttttaatttgcatgataaaggggctctgccatttctggagggacatctgcatga

SEQ ID NO: 619265 - DNA, 75 bp, synthetic construct
  source 1..75: mol_type = other DNA
tcttcctttctgctgttattttggtaacaatattttattcggcagtgccatatgcaaatattcttgatggcggcg

SEQ ID NO: 619266 - DNA, 75 bp, synthetic construct
  source 1..75: mol_type = other DNA
agaatggacaactggtttttaatttgcgtgacaaagggcccttgccgtttctggaagggcatttgtatgaggtgg

SEQ ID NO: 619267 - DNA, 75 bp, synthetic construct
  source 1..75: mol_type = other DNA
ttttcttttattctttttttattacgttccctttggaagttatgtccactcctttggctattattgatggtggcg

SEQ ID NO: 619268 - DNA, 75 bp, synthetic construct
  source 1..75: mol_type = other DNA
gggcagagcgtgacggatgtacagtcaggaacgctgccacaggggctgaaagcccgactctcttctctgttactg

SEQ ID NO: 619269 - DNA, 75 bp, synthetic construct
  source 1..75: mol_type = other DNA
ttaccaggaactatttcagaatggtttgaatatggagggaaggcttatttttttaaggttgatatagagctggtg

SEQ ID NO: 619270 - DNA, 75 bp, synthetic construct
  source 1..75: mol_type = other DNA
gtcaggccgtggcagtgatgccccttgcggcgaaggttctcaaacaggtgatggtgaataccggagggaacaaaa

SEQ ID NO: 619271 - DNA, 75 bp, synthetic construct
  source 1..75: mol_type = other DNA
atgcacatcccgcaaaactttttgccgcagacgtcaaaaacttttgcgttctgccccggacaggtgcgtcaggcc

SEQ ID NO: 619272 - DNA, 75 bp, synthetic construct
  source 1..75: mol_type = other DNA
ggaaaagaggtggaaacaattaatccagacgacatatcggttatagccggggaatacagtgtaatcgataatcca

SEQ ID NO: 619273 - DNA, 75 bp, synthetic construct
  source 1..75: mol_type = other DNA
agttttgtcagtgcaatcgttcagtgttcacagctcggccttgagccaggtagcgccctcggccacgcatattta

SEQ ID NO: 619274 - DNA, 75 bp, synthetic construct
  source 1..75: mol_type = other DNA
taaggctgggatcagcaaaacgtttactacccgcaaccagttgaccagtaaccaaagtattcttatgaatctggt

SEQ ID NO: 619275 - DNA, 75 bp, synthetic construct
  source 1..75: mol_type = other DNA
cgaaggttctcaaacaggtgatggtgaataccggggggaacaaagagcaggtccccgcaaaacgtcaaaaccgcg

SEQ ID NO: 619276 - DNA, 75 bp, synthetic construct
  source 1..75: mol_type = other DNA
gttattactgtattaccccctattgcggaaagtatttgccagtcatcgacactatttttagcgacaggttactgt

SEQ ID NO: 619277 - DNA, 75 bp, synthetic construct
  source 1..75: mol_type = other DNA
acggcgggtactggaaatactttctctaccaggaactatttcagaatggtttgaatatgaggggaaggcttattt

SEQ ID NO: 619278 - DNA, 75 bp, synthetic construct
  source 1..75: mol_type = other DNA
tacgggaagtacagcaaaacacatcaatctattacggaacagggcaatggagccttgaaattacatctatttacc

SEQ ID NO: 619279 - DNA, 75 bp, synthetic construct
  source 1..75: mol_type = other DNA
aatgaacagcccacaaaattttttacccaaaacccggtaaaaaattttgcgttctgcccaggacaggtgcgtcag

SEQ ID NO: 619280 - DNA, 75 bp, synthetic construct
  source 1..75: mol_type = other DNA
ggtactagtttggggcatgaaaggtatgtagagaggatcagaggatggaaccatcaaaatgtagatgaatacata

SEQ ID NO: 619281 - DNA, 75 bp, synthetic construct
  source 1..75: mol_type = other DNA
tcgtgagtgccactctgccgcctcaatgcttaaagttttggttataaatgatgcgaaagcacacagactaacgcc

SEQ ID NO: 619282 - DNA, 75 bp, synthetic construct
  source 1..75: mol_type = other DNA
gttgattgaactcgcctttggtcgcgtgtttaaagagctggcggctaatatggtccaggcttttacggttcgtgc

SEQ ID NO: 619283 - DNA, 75 bp, synthetic construct
  source 1..75: mol_type = other DNA
actttgggatgcaaccgcaggcaaattcagcgccaaacacggcattaataatgctcccagtgtaatcactgatgt

SEQ ID NO: 619284 - DNA, 75 bp, synthetic construct
  source 1..75: mol_type = other DNA
aggaaacgaagcaatacaccgatcagcgcatggttgagatggataacaaactgtccaaaactgaaagcaagctga

SEQ ID NO: 619285 - DNA, 75 bp, synthetic construct
  source 1..75: mol_type = other DNA
gtatcggcctgaacactttagttctggcagatgcgattaacggtattgctatcggtagcaacgcgcgtgcaaacc

SEQ ID NO: 619286 - DNA, 75 bp, synthetic construct
  source 1..75: mol_type = other DNA
tgcagtagccaccacgccgaccaaatactatcacgccaactcaacggctgaagactcactggcagtcggtgaaga

SEQ ID NO: 619287 - DNA, 75 bp, synthetic construct
  source 1..75: mol_type = other DNA
gccagcgcaggaaaccagtggggtactggcgttaatacaactggtactgtgggtaatttgtggattgccctcggt

SEQ ID NO: 619288 - DNA, 75 bp, synthetic construct
  source 1..75: mol_type = other DNA
agcaagtagcaaagctaacggcacagacagccttgctttaggcagactatccgtcgccagcgcagcaaacgcgat

SEQ ID NO: 619289 - DNA, 75 bp, synthetic construct
  source 1..75: mol_type = other DNA
tgatgcagaagtcaacgctgacggttctatcactgcgccgacttacaccattgcaaataccgattacaacaacgt

SEQ ID NO: 619290 - DNA, 75 bp, synthetic construct
  source 1..75: mol_type = other DNA
cagcaaaatcactaatgttgaagatggtactatttcagacaccagtaaagatgcggttaacggttcccagttgaa

SEQ ID NO: 619291 - DNA, 75 bp, synthetic construct
  source 1..75: mol_type = other DNA
caccagcgtatcggaagaaggtgttgtgattggttatgacaccacggatggcgaactgcttggcgcgttgtcaat

SEQ ID NO: 619292 - DNA, 75 bp, synthetic construct
  source 1..75: mol_type = other DNA
cgcaaatcatgccgacagcattgcaatgggtaatggttctcagactacccgtggtgcacagaccaactacactgc

SEQ ID NO: 619293 - DNA, 75 bp, synthetic construct
  source 1..75: mol_type = other DNA
tagtaataccaatgccaatggtattaactctgtcgcgctaggtgcagattccattgcggatcaagacaattccgt

SEQ ID NO: 619294 - DNA, 75 bp, synthetic construct
  source 1..75: mol_type = other DNA
acggatgcgcaggtttcccagaatacccagagcattactaacctgaacaatcaggtgacgaatctggatactcgc

SEQ ID NO: 619295 - DNA, 75 bp, synthetic construct
  source 1..75: mol_type = other DNA
gttgagacgggtatcgccctgggtagcagttccgtttccagccgtttaatagttaaaggttctcgtgacaccagc

SEQ ID NO: 619296 - DNA, 75 bp, synthetic construct
  source 1..75: mol_type = other DNA
agaacgcgctgctgtgggatgcgaccgccaataacggcgaaggggcttacaacgccagtcatgacggcaaggcca

SEQ ID NO: 619297 - DNA, 75 bp, synthetic construct
  source 1..75: mol_type = other DNA
cactgacgccgttaacggctcgcagctcaaaaccaccaacgagaacgtgacgaccaacaccaccaacatcgccac

SEQ ID NO: 619298 - DNA, 75 bp, synthetic construct
  source 1..75: mol_type = other DNA
ataaagcggccagtgtaatcactaacgtcgctaacggtgcaatctctgccaccagcagcgatgctgtgaacggct

SEQ ID NO: 619299 - DNA, 75 bp, synthetic construct
  source 1..75: mol_type = other DNA
ctggcagcactgatgccgttaacggctctcagctgaaaaccaccaacgatgctgtggcgacgaataccaccaata

SEQ ID NO: 619300 - DNA, 75 bp, synthetic construct
  source 1..75: mol_type = other DNA
agaccaacaccgatggcgtagatgccaacgcgcagggtaaagacagtgttgcgattggttctggttccattgctg

SEQ ID NO: 619301 - DNA, 75 bp, synthetic construct
  source 1..75: mol_type = other DNA
actatcacgccaactcaacggctgaagactcactggcagtcggtgaagactcgctggcaatgggcgcaaaaacca

SEQ ID NO: 619302 - DNA, 75 bp, synthetic construct
  source 1..75: mol_type = other DNA
atgctatcaacggttctcagctgtttaacaccaatatgctgatccagcagaacagcgaagtcatcaatcagcttg

SEQ ID NO: 619303 - DNA, 75 bp, synthetic construct
  source 1..75: mol_type = other DNA
gaactatgcacagttgaagcaaagtgtgcaggaaacgaagcaatacaccgatcagcgcatggttgagatggataa

SEQ ID NO: 619304 - DNA, 75 bp, synthetic construct
  source 1..75: mol_type = other DNA
cactgacgccgttaacggctcgcagctcaaaaccaccaacgaaaacgtggcgaccaacaccaccaacatcgccac

SEQ ID NO: 619305 - DNA, 75 bp, synthetic construct
  source 1..75: mol_type = other DNA
cactgacgccgttaacggctctcagctcaaaaccaccaacgagaacgtgtcgaccaacaccaccaacatcgccac

SEQ ID NO: 619306 - DNA, 75 bp, synthetic construct
  source 1..75: mol_type = other DNA
cactgacgccgttaacggctcacagctcaaaaccaccaacgagaacgtggcgaccaacaccaccaacatcgccac

SEQ ID NO: 619307 - DNA, 75 bp, synthetic construct
  source 1..75: mol_type = other DNA
gcggcgcatcgtcaatatggcggcaggtacaatctcaacggacagtaaagaagccattaacggttcgcaacttta

SEQ ID NO: 619308 - DNA, 75 bp, synthetic construct
  source 1..75: mol_type = other DNA
aggtgctgttgcgatagggtatatgtctaacgctacaggagaagggagtacggccttaggctattacaccagagc

SEQ ID NO: 619309 - DNA, 75 bp, synthetic construct
  source 1..75: mol_type = other DNA
aagtactaccatgccaactcaacggaagaagattcactggcggtaggtactgactcgctggcgatgggcgcgaaa

SEQ ID NO: 619310 - DNA, 75 bp, synthetic construct
  source 1..75: mol_type = other DNA
aagccctggatgcgctcgatgataacgcgctgctgtgggatgaagacgcaggtgcctacaacgccagccatgatg

SEQ ID NO: 619311 - DNA, 75 bp, synthetic construct
  source 1..75: mol_type = other DNA
cgcatttactgccgcacacggcaccgaagccaccaacaaaatcactaatgtcaccgctggaacaatatcgtctac

SEQ ID NO: 619312 - DNA, 75 bp, synthetic construct
  source 1..75: mol_type = other DNA
cgttgggtctacaaattacaaggtagtaccaatagccagggtgaatactccgccgcactcggtgccggtattcag

SEQ ID NO: 619313 - DNA, 75 bp, synthetic construct
  source 1..75: mol_type = other DNA
gctcagactggctacaccgcctacaacatggacgcgccgcagaactctgtcggtgagttctctgtcggcagtgaa

SEQ ID NO: 619314 - DNA, 75 bp, synthetic construct
  source 1..75: mol_type = other DNA
tgccggactcgttggtgccggacgtaccgagactattcagtgcctgtttggcgtgtggcccggacaatgggaagg

SEQ ID NO: 619315 - DNA, 75 bp, synthetic construct
  source 1..75: mol_type = other DNA
gcggttaacgtgtcgcagctgaaatcttctgaagcaggcggcgtgcgctacgacaccaaagctgatggttctatc

SEQ ID NO: 619316 - DNA, 75 bp, synthetic construct
  source 1..75: mol_type = other DNA
ttgctctgggtgcgggttctgtagcgactgaagataattccgtctctgtgggtaacacaacagatcagcgaaaaa

SEQ ID NO: 619317 - DNA, 75 bp, synthetic construct
  source 1..75: mol_type = other DNA
tggtaccaatagcattattactaacgttgcagacggtacaatttcctctaccagcagcgatgctgtaaatggctc

SEQ ID NO: 619318 - DNA, 75 bp, synthetic construct
  source 1..75: mol_type = other DNA
tatggaatggcactgcgtttagcgccaaacatggcaccagcaatactgacagcaaaatcaccaacgtactggcag

SEQ ID NO: 619319 - DNA, 75 bp, synthetic construct
  source 1..75: mol_type = other DNA
ccgacacgatttgcgttattcgcgatggtctgcatataggaacccgcgatgcaacaggaatgagcgaagacgata

SEQ ID NO: 619320 - DNA, 75 bp, synthetic construct
  source 1..75: mol_type = other DNA
tccagccgtgtgattgttaaaggttctcgtaacaccagcgtaaccgaagaaggcgttgtgattggttacgacacc

SEQ ID NO: 619321 - DNA, 75 bp, synthetic construct
  source 1..75: mol_type = other DNA
ggaacccggcgacgggcagttatagcgttgccagcgaaacggcaaaaagccgtgggaagaagagcgggcgcagta

SEQ ID NO: 619322 - DNA, 75 bp, synthetic construct
  source 1..75: mol_type = other DNA
cgatgaatgctgacggcaccattaatgcgccaacttacagtatcgccaataccgactacagcaacatcggcgacg

SEQ ID NO: 619323 - DNA, 75 bp, synthetic construct
  source 1..75: mol_type = other DNA
tcgttgggtctacaaattacaaggtagtaccaatagccagggtgaatactccgcagccatcggcgcgggtattca

SEQ ID NO: 619324 - DNA, 75 bp, synthetic construct
  source 1..75: mol_type = other DNA
atgatgtcgcggatatcaacaccacgatcacgggcctggaagatgatgccctgcagtggaatggtacggcgttca

SEQ ID NO: 619325 - DNA, 75 bp, synthetic construct
  source 1..75: mol_type = other DNA
ggaagatgatgcactgcagtggaatggtactgcgttcagcgccaaacatggcaccaacaccaccagcaaaatcac

SEQ ID NO: 619326 - DNA, 75 bp, synthetic construct
  source 1..75: mol_type = other DNA
ctccggtatagcactgggcagtggctcaacctctgaccgtgtcatcgtcaagggctcccgttctggcagcgtaac

SEQ ID NO: 619327 - DNA, 75 bp, synthetic construct
  source 1..75: mol_type = other DNA
ccagtgtaatcactaacgtcgctaacggtgcagtctctgccaccagtagcgacgccattaatggctcacagctct

SEQ ID NO: 619328 - DNA, 75 bp, synthetic construct
  source 1..75: mol_type = other DNA
gattatcacttgccagtgcagcgaacgctattgcgatgggggcagacagtagcagttcgaacgataacgccatcg

SEQ ID NO: 619329 - DNA, 75 bp, synthetic construct
  source 1..75: mol_type = other DNA
gcaagctgagtggtggtatcgcttctgcaatggcaatgaccggtctgccgcaggcttacacgccgggtgccagca

SEQ ID NO: 619330 - DNA, 75 bp, synthetic construct
  source 1..75: mol_type = other DNA
aggcttacacgccgggcgccagcatgacctccattggcggcggtacttacaactgtgaatcggctgttgcgttag

SEQ ID NO: 619331 - DNA, 75 bp, synthetic construct
  source 1..75: mol_type = other DNA
ccaaagctgatggctctatcgactacagcaacatcactctcggtggtggtaacggcggtacgactcgcatcagca

SEQ ID NO: 619332 - DNA, 75 bp, synthetic construct
  source 1..75: mol_type = other DNA
agcgcaaaatacccagagcattactaacctgaacaatcaggtcactaatctggatactcgcgtggccaatatcga

SEQ ID NO: 619333 - DNA, 75 bp, synthetic construct
  source 1..75: mol_type = other DNA
tatggcgacgaacgccacaacatgattaatcgcctgctgagactaaaccatcgaccagatgaagaacgctcacgt

SEQ ID NO: 619334 - DNA, 75 bp, synthetic construct
  source 1..75: mol_type = other DNA
gctaccagatgaaggttaaagagttcgttggtgtacctgagttcaaagtggatacaaacatccctacgatggttt

SEQ ID NO: 619335 - DNA, 75 bp, synthetic construct
  source 1..75: mol_type = other DNA
aaaattgtgcatcgttttttaacccagcaaccaaggcgtttgtcgtcgttgattcgtttgacaactacgaattcg

SEQ ID NO: 619336 - DNA, 75 bp, synthetic construct
  source 1..75: mol_type = other DNA
acgctacctcggcttaccgtctgaagaggcatttaaaggccgcggcgtttctgcctgcgccacctgcgatggttt

SEQ ID NO: 619337 - DNA, 75 bp, synthetic construct
  source 1..75: mol_type = other DNA
tcgtccgttccgtctgaatggcgatagcggcgaatacacttgcgacgcgctgattattgccaccggagcttctgc

SEQ ID NO: 619338 - DNA, 75 bp, synthetic construct
  source 1..75: mol_type = other DNA
atgaatacagccctttccatcattgacgctttcaccccaaacactgatatcgactaccggcaggaaatgaacgtc

SEQ ID NO: 619339 - DNA, 75 bp, synthetic construct
  source 1..75: mol_type = other DNA
gtcatgcagttgcagacacgttcgcgatggttgtttactgttctgtcgtgaacatgtgtattgaagttttcctct

SEQ ID NO: 619340 - DNA, 75 bp, synthetic construct
  source 1..75: mol_type = other DNA
tgaaacccggcgttgaactggttgagccaaccagcggcaatacgggtatcgcactggcttatgtggccgccgctc

SEQ ID NO: 619341 - DNA, 75 bp, synthetic construct
  source 1..75: mol_type = other DNA
actgcaaaccgtgcgttctattggtctggttcaaaacggtacgctctattgctccagtatttttggctatcgaaa

SEQ ID NO: 619342 - DNA, 75 bp, synthetic construct
  source 1..75: mol_type = other DNA
caaattcaggaaaatcagtatcaactgaatcaggttgtagagcggcagaaacagattctgttacagatggatagc

SEQ ID NO: 619343 - DNA, 75 bp, synthetic construct
  source 1..75: mol_type = other DNA
tgaatcaggtcgtggagcggcaaaagcagatcctgttgcagatcgatagcctcagcagcggtggtgcagcggcgc

SEQ ID NO: 619344 - DNA, 75 bp, synthetic construct
  source 1..75: mol_type = other DNA
gctgatgctggtactgcgaatgctggcgcgccggtgaaaagcggcgatgcaaacacggattacaatgcagctatt

SEQ ID NO: 619345 - DNA, 75 bp, synthetic construct
  source 1..75: mol_type = other DNA
atctgaccggtccgttattaatggagcgcatgcacgaacatgccaccaaatttgaaactgagatcatttttgatc

SEQ ID NO: 619346 - DNA, 75 bp, synthetic construct
  source 1..75: mol_type = other DNA
tccagcgtgcctgtagtcaggttgatgagctgcatatcattatggggtttgacgacacccgtgaccgcgcgttgt

SEQ ID NO: 619347 - DNA, 75 bp, synthetic construct
  source 1..75: mol_type = other DNA
acgataaaatcgcgctgggacacgctcaatatattgattttgcagtaaaatatgccaataaagtggcgtttatcg

SEQ ID NO: 619348 - DNA, 75 bp, synthetic construct
  source 1..75: mol_type = other DNA
tgggtggcggatggtttacgcagcctcggtagttcggtggatcgcaaagagttccagaacttgctggtggagatg

SEQ ID NO: 619349 - DNA, 75 bp, synthetic construct
  source 1..75: mol_type = other DNA
ctgtcccccaccgtggtgccaatggtgaacggtggtcaggccagtattgccatcagcaataccagcccgaatctg

SEQ ID NO: 619350 - DNA, 75 bp, synthetic construct
  source 1..75: mol_type = other DNA
atgcaatttatcgaattgctagaaaccgggacgccgaatattgatttcagtggtcatagtgagaacacattccgt

SEQ ID NO: 619351 - DNA, 75 bp, synthetic construct
  source 1..75: mol_type = other DNA
acggcatcaaaaagtttatggctgaaaaagggattcagccggacctgatctacacctcggaagaagccgatgcgc

SEQ ID NO: 619352 - DNA, 75 bp, synthetic construct
  source 1..75: mol_type = other DNA
gtgacaaagtggcatcaagactacgctcgcgactttccgatctttccgtgacagacaacatattactgttgcccg

SEQ ID NO: 619353 - DNA, 75 bp, synthetic construct
  source 1..75: mol_type = other DNA
acgcgtttaaagccggctccggcagtcttgatgtgaacatccttcatctgctctgcatcggggcattgctggcgt

SEQ ID NO: 619354 - DNA, 75 bp, synthetic construct
  source 1..75: mol_type = other DNA
ccgctgctgctgctgtagctgtagctgctggcccggctgctgaagctgctgaagaaaaaactgaattcgacgtaa

SEQ ID NO: 619355 - DNA, 75 bp, synthetic construct
  source 1..75: mol_type = other DNA
tggcgatcctcggtggtgaatcgagcggtaaatccaccctggtaaacaaacttgccaatatcttcaacactacca

SEQ ID NO: 619356 - DNA, 75 bp, synthetic construct
  source 1..75: mol_type = other DNA
tgaaccctatatcacgcatccggtagcggttgcttgcattctggccgagatgaaactcgactatgaaacgctcat

SEQ ID NO: 619357 - DNA, 75 bp, synthetic construct
  source 1..75: mol_type = other DNA
atgccgtatggacggggaatcacctgaagatggtccgctttgccgtggaaaataaaacgctgtctgccctgaata

SEQ ID NO: 619358 - DNA, 75 bp, synthetic construct
  source 1..75: mol_type = other DNA
tcagcgccatgttttcccgatgaggggggtgcggacgatttcttggacggtttatacggacatcaatccgaccgc

SEQ ID NO: 619359 - DNA, 75 bp, synthetic construct
  source 1..75: mol_type = other DNA
cacttacgtccgtttgctttctgttaaaaacgctgacgctcgtagcttttatgaaaaagagacgctccgctgtgg

SEQ ID NO: 619360 - DNA, 75 bp, synthetic construct
  source 1..75: mol_type = other DNA
agatgcaactacctgatgagaaacgactcgcagatgaactcgttcgaacacaggcggtgctagaggaaggctata

SEQ ID NO: 619361 - DNA, 75 bp, synthetic construct
  source 1..75: mol_type = other DNA
aagtgagcgttacggcactgaccgatgataaagcgctgatgatgattagctgtgaagcaggcgcgtataacacca

SEQ ID NO: 619362 - DNA, 75 bp, synthetic construct
  source 1..75: mol_type = other DNA
cgctaaaaagtgtatagcaaaatcaccttccattttcagaaagaaacaatatcttcgattggccaatatcattag

SEQ ID NO: 619363 - DNA, 75 bp, synthetic construct
  source 1..75: mol_type = other DNA
tttcacataaaaacaatggaatttcgaactatgtggcgagtgcatatcatctactattagaaaatggcattgatg

SEQ ID NO: 619364 - DNA, 75 bp, synthetic construct
  source 1..75: mol_type = other DNA
tgaagatggcccacctgatatcctgctgaatgccagtagcaatccgcgcctgaaagaatttttacagcacgtttc

SEQ ID NO: 619365 - DNA, 75 bp, synthetic construct
  source 1..75: mol_type = other DNA
tgcgcactgagctgttgaaagagcttgaccgccagcaacgtaaactccagacctggattggcgtgccaggcgttg

SEQ ID NO: 619366 - DNA, 75 bp, synthetic construct
  source 1..75: mol_type = other DNA
ccagcctgaacccacttacccaggcacttaccatggtgctggatttaattcgccagtcggccccttccgtaaaca

SEQ ID NO: 619367 - DNA, 75 bp, synthetic construct
  source 1..75: mol_type = other DNA
caggttaagggacatggcctgacgaaatgggtctggcaaaatgaacctgaactgcgccctgaaaacacgcaaaac

SEQ ID NO: 619368 - DNA, 75 bp, synthetic construct
  source 1..75: mol_type = other DNA
atcgctgtggtacatggggaaagtgataaaaatgatgatcaacgcttttggtgataaccgcaattttcgcgtgca

SEQ ID NO: 619369 - DNA, 75 bp, synthetic construct
  source 1..75: mol_type = other DNA
agcgttaaaaaattgatgattgccttagggattggtgcgggactcacggcgtttaactacctgtttggtcagtcg

SEQ ID NO: 619370 - DNA, 75 bp, synthetic construct
  source 1..75: mol_type = other DNA
ccagcctgaacccgctcacccaggcacttaccatggtgcttgatttaattcgccagtctgcacccttccgcaaac

SEQ ID NO: 619371 - DNA, 75 bp, synthetic construct
  source 1..75: mol_type = other DNA
atcgctttagctatgaccgtgcttaatcacagcaacatcactgacaccaggcgctatctggacttagacaagcaa

SEQ ID NO: 619372 - DNA, 75 bp, synthetic construct
  source 1..75: mol_type = other DNA
atgatgctttacaggctgattcaagcgcaaattatttttgcaatttatcggaattatcattaacaaccgctttag

SEQ ID NO: 619373 - DNA, 75 bp, synthetic construct
  source 1..75: mol_type = other DNA
tgtgctttcgggctatccgcatctggaagaagcgtatcgggtcggcgagttgctgttcccacatctggatgtcgc

SEQ ID NO: 619374 - DNA, 75 bp, synthetic construct
  source 1..75: mol_type = other DNA
caacgatcatgaccatgacgttaaagaagttcagtccggcgatagcacgatcacaagcgaaaaaacagagagtca

SEQ ID NO: 619375 - DNA, 75 bp, synthetic construct
  source 1..75: mol_type = other DNA
gtaaaaacgtcaaactggcgattgatgatttcggcaccggcaacagttcgttttcctggctggaaacgttacgcc

SEQ ID NO: 619376 - DNA, 75 bp, synthetic construct
  source 1..75: mol_type = other DNA
tcagcaacaggtggtgctctttgccaaccatgccgttgaagaattagataaggaactgctgcctctacaggcagg

SEQ ID NO: 619377 - DNA, 75 bp, synthetic construct
  source 1..75: mol_type = other DNA
ggttcattggtctatttccgcaagatcccggtgggaaaagtctacgactatgccatcaatcccaacaaacaaggc

SEQ ID NO: 619378 - DNA, 75 bp, synthetic construct
  source 1..75: mol_type = other DNA
gccagaaggtcgatttgcagaagctggtgcatgaagatatggcgaagaattttgccgattatccacaaaagtggc

SEQ ID NO: 619379 - DNA, 75 bp, synthetic construct
  source 1..75: mol_type = other DNA
cgaagatatggcgaagaattttgctgagtacccgcaaaaatggaagttaaagcgcccggacagcaacatcgatca

SEQ ID NO: 619380 - DNA, 75 bp, synthetic construct
  source 1..75: mol_type = other DNA
gcctgctaacggcatttaccagcaactccttaaaatctcccgccgttccaccaaccgtggtacaaatccaggcca

SEQ ID NO: 619381 - DNA, 75 bp, synthetic construct
  source 1..75: mol_type = other DNA
cgctcaaagcgctgcgggatgctcacaacgatcatgaccatgacgttaaagaagttcagtccggcgatagcacga

SEQ ID NO: 619382 - DNA, 75 bp, synthetic construct
  source 1..75: mol_type = other DNA
agtaccagactccgctggaagtggccagcgccccacggctctctgattttggtttttcatcggggttgccggcgg

SEQ ID NO: 619383 - DNA, 75 bp, synthetic construct
  source 1..75: mol_type = other DNA
ccacgcgcatcgccggcatgctgggcattggccgtattaccacgcagaaagatagcggggttgtgcaggaaatcc

SEQ ID NO: 619384 - DNA, 75 bp, synthetic construct
  source 1..75: mol_type = other DNA
gcgtaaagcccaccggcactgcagacaatgtcgccacgattattatggggaacgctattgtacacactgccatac

SEQ ID NO: 619385 - DNA, 75 bp, synthetic construct
  source 1..75: mol_type = other DNA
atgtacgcaaaatcctttctcgcacttgatggcaacggacgtctgacgggcgcccgtaccgcacagactgcacct

SEQ ID NO: 619386 - DNA, 75 bp, synthetic construct
  source 1..75: mol_type = other DNA
tttgaacacactgacgacgggctgactgagcacggtcaacagtgcccttatgtcagaccggagcgcagagaaata

SEQ ID NO: 619387 - DNA, 75 bp, synthetic construct
  source 1..75: mol_type = other DNA
atatatcatgtaaaggcttggctttttcttgttatcgcaatagttggcgaagtaatcgcaacatccgcattaaaa

SEQ ID NO: 619388 - DNA, 75 bp, synthetic construct
  source 1..75: mol_type = other DNA
gctgaagaagaaagctgaagcggcagaagcagctgaagcaagaaagaaagcggcaaccgaagctgctgaaaaagc

SEQ ID NO: 619389 - DNA, 75 bp, synthetic construct
  source 1..75: mol_type = other DNA
agaaagcggaagcggcagaagcagctgcagctgaagcaagaaagaaagcggcaactgaagctgctgaaaaagcca

SEQ ID NO: 619390 - DNA, 75 bp, synthetic construct
  source 1..75: mol_type = other DNA
cgcccgtaccgcacagactgcaccttacgatcgctacacctgccacctttgcggcagtgcgctcagataccaccc

SEQ ID NO: 619391 - DNA, 75 bp, synthetic construct
  source 1..75: mol_type = other DNA
ttgatggcaacggacgtctgacgggcgcccgtaccgcacagactgcaccttacgatcgctacacctgccaccttt

SEQ ID NO: 619392 - DNA, 75 bp, synthetic construct
  source 1..75: mol_type = other DNA
tttgcaggagagatttcaccgcatagtcccttttttatcgctgcgttgctaaatattgtcactttccttgtggtt

SEQ ID NO: 619393 - DNA, 75 bp, synthetic construct
  source 1..75: mol_type = other DNA
gcggcagtgcactcagataccacccgcagtacgacactgaacttccctggtttgaacacactgacgacgggctga

SEQ ID NO: 619394 - DNA, 75 bp, synthetic construct
  source 1..75: mol_type = other DNA
aacgtctgcagcaattcgtaccggatgccttacccgtggtgcgtaaagccagctggcactgcagacaatgtcacc

SEQ ID NO: 619395 - DNA, 75 bp, synthetic construct
  source 1..75: mol_type = other DNA
tttgaacacactgacgacgggctgaccgagcacggtcaacagtgtccttatgtcagaccggagcgcaaggagata

SEQ ID NO: 619396 - DNA, 75 bp, synthetic construct
  source 1..75: mol_type = other DNA
tctcactggcggatgccagggcacgcagggatgaggcccgtaagctattagctatttggaaagtggcaccaaaat

SEQ ID NO: 619397 - DNA, 75 bp, synthetic construct
  source 1..75: mol_type = other DNA
aagagtgcagaatatagcagcagcctttgcttctgctttatcggattttgaactgtatctgtcatctgaaaatac

SEQ ID NO: 619398 - DNA, 75 bp, synthetic construct
  source 1..75: mol_type = other DNA
taccttcccactgcaactatttggtttccattacaaatcccgtactcactcgacctacggcaacattgatgtcct

SEQ ID NO: 619399 - DNA, 75 bp, synthetic construct
  source 1..75: mol_type = other DNA
gtggttgaagcgatttctgcgattcacgggttaacggctgatattgagcaggatgaagccgggcgtgcaatctgg

SEQ ID NO: 619400 - DNA, 75 bp, synthetic construct
  source 1..75: mol_type = other DNA
cgggtgatgaatctggctgcggcatatgcctcagcagtgtcggattttgaactgcggttaccggcagagggcacg

SEQ ID NO: 619401 - DNA, 75 bp, synthetic construct
  source 1..75: mol_type = other DNA
cagattggttcatccgaacagtcttgggcagtggataccgctgatgctcgaacagagaatgggcagcttattttt

SEQ ID NO: 619402 - DNA, 75 bp, synthetic construct
  source 1..75: mol_type = other DNA
ctgaaaatggtcaggtgacagggcaactttattttacccttgatcaggggatggctgtcagtactggtgtccagg

SEQ ID NO: 619403 - DNA, 75 bp, synthetic construct
  source 1..75: mol_type = other DNA
ccggcgatctggaagaggcgctgaacgcggcgcaggccatcggcgatgaccgtttacaacagcaaagtcaggggc

SEQ ID NO: 619404 - DNA, 75 bp, synthetic construct
  source 1..75: mol_type = other DNA
aaacctgaacatctcttcgaaaggtggttgggtggcgatgctgcaacagtatttcgcgacggcgtggatcccgca

SEQ ID NO: 619405 - DNA, 75 bp, synthetic construct
  source 1..75: mol_type = other DNA
gaaacgtggtgattacgctgtcaacgtcaactacaacgtgcagaacgctggcgagaaaccgctggaaatctccac

SEQ ID NO: 619406 - DNA, 75 bp, synthetic construct
  source 1..75: mol_type = other DNA
gaacgctacaacgatcagttgtctgccgttcaacattcccatgccagctgtgtttgttttgaatatgaatttgcc

SEQ ID NO: 619407 - DNA, 75 bp, synthetic construct
  source 1..75: mol_type = other DNA
aaccggttgccggaggtatagaagataccggtgccaataatgaccacgcggccagaagattgaaacaggttgtcg

SEQ ID NO: 619408 - DNA, 75 bp, synthetic construct
  source 1..75: mol_type = other DNA
tcagcccggtggttttcgctatgagtctggaagcgttgaatggtaacgtcgcgccggtactgccgcagtcgatcg

SEQ ID NO: 619409 - DNA, 75 bp, synthetic construct
  source 1..75: mol_type = other DNA
aatacgtgcctgaaatgcgcgagaaaggtgccgatgtcgttgtcgttctggcgcattccgggctgtctgccgatc

SEQ ID NO: 619410 - DNA, 75 bp, synthetic construct
  source 1..75: mol_type = other DNA
tcgtaccggatgccttacccgtagtacgtaaagccagctggcactgcaggcaatgtcaccacgattattatgggg

SEQ ID NO: 619411 - DNA, 75 bp, synthetic construct
  source 1..75: mol_type = other DNA
aaagtagcttcgcggctgatctttatcgacaaaggccggattgcggaagatggcgatccgcaggtgttgatcaag

SEQ ID NO: 619412 - DNA, 75 bp, synthetic construct
  source 1..75: mol_type = other DNA
gaagaaatcacttccggcgatctgattgtggacggtctgaaagtcaacgatccgaaagtcgatgagcgcctgatt

SEQ ID NO: 619413 - DNA, 75 bp, synthetic construct
  source 1..75: mol_type = other DNA
cgcttgattaatcgtctgcagcaattcgttccggatgccttacccgtggtacgtaaagccagctggcactgcagc

SEQ ID NO: 619414 - DNA, 75 bp, synthetic construct
  source 1..75: mol_type = other DNA
acttaggcgcatcaaaaagcactatggcaaacagatacttaagagatagctttcccgcagagtgggtgattcagt

SEQ ID NO: 619415 - DNA, 75 bp, synthetic construct
  source 1..75: mol_type = other DNA
gctatcagtctttgcacacctcgatgattggcccgcacggcgtgccggttgaggtccagatccgtaccgaagata

SEQ ID NO: 619416 - DNA, 75 bp, synthetic construct
  source 1..75: mol_type = other DNA
acgccttacgaatccctgcttgtgaccatcagccaggccgtccgtggcggaaaattacccgcaggctggtatcag

SEQ ID NO: 619417 - DNA, 75 bp, synthetic construct
  source 1..75: mol_type = other DNA
gtaaagagatgatccaaaaaatcctctcggaaatcgaagggcgtttgcaggaagcgggaataccgtgccgcgtca

SEQ ID NO: 619418 - DNA, 75 bp, synthetic construct
  source 1..75: mol_type = other DNA
catcagtaataccagcccgaatctgtttaccgttcccggtgaccggattatcgccgtgaacagtctggatggtgc

SEQ ID NO: 619419 - DNA, 75 bp, synthetic construct
  source 1..75: mol_type = other DNA
aatgagcagaccgcctccggcggtgtggtggtggccaccgtcaacaaaaagccctttacgttcattctggaaaca

SEQ ID NO: 619420 - DNA, 75 bp, synthetic construct
  source 1..75: mol_type = other DNA
tgtcagaccggagcgcagagaaatactgttgattaaacgcttacagcaatgggtaccggatgccttacccgtggt

SEQ ID NO: 619421 - DNA, 75 bp, synthetic construct
  source 1..75: mol_type = other DNA
ggcgttctgataggtgaactggcccgcggcaatttaggggcgctgtggcaatatcagcgacaaaaagggcagaag

SEQ ID NO: 619422 - DNA, 75 bp, synthetic construct
  source 1..75: mol_type = other DNA
cgcttgattaatcgtctgcagcaattcgttccggatgccttacccgtggtccgtaaagccagctggcactgcaga

SEQ ID NO: 619423 - DNA, 75 bp, synthetic construct
  source 1..75: mol_type = other DNA
atgtacgcaaaatcctttctcgctcttgatcgcaacggacgtctgacgggcgcccgtactgtacaggccgcacct

SEQ ID NO: 619424 - DNA, 75 bp, synthetic construct
  source 1..75: mol_type = other DNA
atgtacgcaaaatcctttttcgctcttgatggcaacggacgtctgacgggcgcccgtactggacaggccgcacct

SEQ ID NO: 619425 - DNA, 75 bp, synthetic construct
  source 1..75: mol_type = other DNA
agtcaggttctttcttgtgctttttccattgatgtttatcgggtcaggctggctgatttactcatttttcagcac

SEQ ID NO: 619426 - DNA, 75 bp, synthetic construct
  source 1..75: mol_type = other DNA
gattgatcccaacagcacgaaaccacagtcactcatcaactgggatggtttccgcacttataactttgatgttat

SEQ ID NO: 619427 - DNA, 75 bp, synthetic construct
  source 1..75: mol_type = other DNA
cacgctgaatggtgttccggcggtaatgccgggcatgtggggcgatcatcttggtgtggtcgacttacaactcag

SEQ ID NO: 619428 - DNA, 75 bp, synthetic construct
  source 1..75: mol_type = other DNA
atgtacgcaaaatcctttgtcgctcttgattgcaacggacgtctgacgggcgcccgtactggacaggccgcacct

SEQ ID NO: 619429 - DNA, 75 bp, synthetic construct
  source 1..75: mol_type = other DNA
gcgagctacttctcgtaaataccaatggcgattcatatttaattgaccgtaaccagacactaccagtgaatggga

SEQ ID NO: 619430 - DNA, 75 bp, synthetic construct
  source 1..75: mol_type = other DNA
cgcttgattgatcgtctgcagcaattcgttccggatgccttacccgtggtgcgtaaagccagctggcactgcagg

SEQ ID NO: 619431 - DNA, 75 bp, synthetic construct
  source 1..75: mol_type = other DNA
cgcttgattcatcgtctgcagcaattcgttccggatgccttacccgtggtacgtaaagccagctggcactgcaga

SEQ ID NO: 619432 - DNA, 75 bp, synthetic construct
  source 1..75: mol_type = other DNA
tttcctgccgaatgggtaatccaatgtgcccttgaaacaggagcttcccttctatggctggctactggtcaagga

SEQ ID NO: 619433 - DNA, 75 bp, synthetic construct
  source 1..75: mol_type = other DNA
caatgtcaccacgattattatggggagccgtactgcacacactgccagaccgggcggttcagtgaggaggtggta

SEQ ID NO: 619434 - DNA, 75 bp, synthetic construct
  source 1..75: mol_type = other DNA
caatgtcaccacgattattatggggagctgtactgcacacactgccagaccgggcgattcagtgaggagggggta

SEQ ID NO: 619435 - DNA, 75 bp, synthetic construct
  source 1..75: mol_type = other DNA
acatcgcgggtccgatgactggttatcccgactacaaccgcacagcgtttttttcgaaagcaaaagagctgatgg

SEQ ID NO: 619436 - DNA, 75 bp, synthetic construct
  source 1..75: mol_type = other DNA
cagttaaagataaatttggcccgggcaagaacggatttactgacgggaatattcgtacagggcgtcatgccacct

SEQ ID NO: 619437 - DNA, 75 bp, synthetic construct
  source 1..75: mol_type = other DNA
ggtgcgattaacgaagaagcattgctgataaaaaataatctttcggatgtcgaagacagtgatgaggctgttgaa

SEQ ID NO: 619438 - DNA, 75 bp, synthetic construct
  source 1..75: mol_type = other DNA
tgtgctcatctctaacaggtggagtaggtattaatggattgactgcctcagctaacggtgcagcaaataaattag

SEQ ID NO: 619439 - DNA, 75 bp, synthetic construct
  source 1..75: mol_type = other DNA
tccgtgaagatccgcaggctaatccactgaccacgccatcaggcaaaattgagatctattcacaggcgctggctg

SEQ ID NO: 619440 - DNA, 75 bp, synthetic construct
  source 1..75: mol_type = other DNA
gccgaccctcgaaaacccgatccagaccagcatttcgatgtttatgtggaccgatgccattgaacgtggcccgga

SEQ ID NO: 619441 - DNA, 75 bp, synthetic construct
  source 1..75: mol_type = other DNA
tgacaactatgacggcctgcaccaggtgcgcgcctgtctgcgtgggcgttccatgcgtcgccgtgtctacaatcc

SEQ ID NO: 619442 - DNA, 75 bp, synthetic construct
  source 1..75: mol_type = other DNA
atcttttttatagtatatcgttcagcttcgtcatcagctttgtagagcaaacagtcccatcaagcggaaatataa

SEQ ID NO: 619443 - DNA, 75 bp, synthetic construct
  source 1..75: mol_type = other DNA
tataaatggccttacatcagccgctaatggctttggaggtaaggttgcatctggttttatgcgagcatcaggact

SEQ ID NO: 619444 - DNA, 75 bp, synthetic construct
  source 1..75: mol_type = other DNA
cacagcggcgacgaacgccgctaaagtcgcacaagcaatatctcctacattctttgctgccatagccttatacgt

SEQ ID NO: 619445 - DNA, 75 bp, synthetic construct
  source 1..75: mol_type = other DNA
aaaacgccggaatgggcttcgcaaattacgggtattccggcggacaaaatcatcaaactggcgcgggaaattggc

SEQ ID NO: 619446 - DNA, 75 bp, synthetic construct
  source 1..75: mol_type = other DNA
ggcactggcctttgacagtgtagacgatgtgaacgtgagacgttcggcagatgtcacaagctaccccgtagaaaa

SEQ ID NO: 619447 - DNA, 75 bp, synthetic construct
  source 1..75: mol_type = other DNA
aggcatcgaatacacagaagaggcaagcgaatccctagtatttgatcttagctttgagcaaataagattagtgtc

SEQ ID NO: 619448 - DNA, 75 bp, synthetic construct
  source 1..75: mol_type = other DNA
cgtattggtgtcagtcgcgcggtattgtataaatggaaagatgaaattatcggcaacagtgcttaccagactatg

SEQ ID NO: 619449 - DNA, 75 bp, synthetic construct
  source 1..75: mol_type = other DNA
gcctatggcgccagcaatacagttattaaccaggggacgattaacctcgaaaaaaatggtaattatgacgatagt

SEQ ID NO: 619450 - DNA, 75 bp, synthetic construct
  source 1..75: mol_type = other DNA
gaacgtgagacgttcggcagatgttacaagctaccccgtagaaaatggtgctactgtgtctgatcacgttcaaat

SEQ ID NO: 619451 - DNA, 75 bp, synthetic construct
  source 1..75: mol_type = other DNA
agaactttttaaaaatagactgcgtcaatgcactttatctgctagaaatcttttaagcaaaattatcagtgagat

SEQ ID NO: 619452 - DNA, 75 bp, synthetic construct
  source 1..75: mol_type = other DNA
atgagattacagaacaaaacgacgatatcgaccgtgaggatgcggctcagcggttcgacgctgactttgttctga

SEQ ID NO: 619453 - DNA, 75 bp, synthetic construct
  source 1..75: mol_type = other DNA
tgaccacgccatcgggcaaaattgagatttattcgcaggcgctggctgacattgccgctacctgggaattgccag

SEQ ID NO: 619454 - DNA, 75 bp, synthetic construct
  source 1..75: mol_type = other DNA
aatccattcgtcataagcaccgttactccgatgagcaaaaacaggttgccgttgaacattatcttaaccacggct

SEQ ID NO: 619455 - DNA, 75 bp, synthetic construct
  source 1..75: mol_type = other DNA
atggcgaccgccgggattttaaccatacgtgcagcaaactccccagaacaacacgctcaggctgtttacaaagca

SEQ ID NO: 619456 - DNA, 75 bp, synthetic construct
  source 1..75: mol_type = other DNA
ccttttcttcttgttacagaaaataaaacttttgagaacgttgttttaacaggcatcgaatacacagaagaggca

SEQ ID NO: 619457 - DNA, 75 bp, synthetic construct
  source 1..75: mol_type = other DNA
tattccggcgattgttattggcggacagatggcgggtgcaatcggcgtcacgcttggttttctgctggtgcagat

SEQ ID NO: 619458 - DNA, 75 bp, synthetic construct
  source 1..75: mol_type = other DNA
tttttaatcctgtctcaatctttataaatggctcgtactcaaagtatgcctggtcggataaggcgaattattccg

SEQ ID NO: 619459 - DNA, 75 bp, synthetic construct
  source 1..75: mol_type = other DNA
tatgccaagagcttcacggacaggactgacctgcagttgctgacgtaccgctaccagagtaaaaggtatgtggag

SEQ ID NO: 619460 - DNA, 75 bp, synthetic construct
  source 1..75: mol_type = other DNA
ccgcggtgcgtctgcatcggccagttatgcgtttgatgccattcagaccaatttcggtgtgtcccgctcttactc

SEQ ID NO: 619461 - DNA, 75 bp, synthetic construct
  source 1..75: mol_type = other DNA
agtaacagtgtgggatataaccggagcaatggttcagcgttcaatacaagcatttcagcttcagtgaatgatcgc

SEQ ID NO: 619462 - DNA, 75 bp, synthetic construct
  source 1..75: mol_type = other DNA
atatctccgggattgcctccacgccttcccgtattaccgtgaaacagaacggatatacggtctattcaaaaatgg

SEQ ID NO: 619463 - DNA, 75 bp, synthetic construct
  source 1..75: mol_type = other DNA
tatctctgttggcactgagtatatattctcatttttgtgtcgcgacagaattaaacctggattttattcagggaa

SEQ ID NO: 619464 - DNA, 75 bp, synthetic construct
  source 1..75: mol_type = other DNA
ccgacggacgattcaaaaaagtgtccgcctctttctacctcccggattcaccgtccaatccgaagcccggcgtgc

SEQ ID NO: 619465 - DNA, 75 bp, synthetic construct
  source 1..75: mol_type = other DNA
tctacctgcgccatgtgggctttcttggggcacagccaccttccgtcaaaggactgaaacaggtgtccttcagtg

SEQ ID NO: 619466 - DNA, 75 bp, synthetic construct
  source 1..75: mol_type = other DNA
gccagcaggcttctggatagggtttattatcggcctgacatcggcagctattatgatgatgctgcgaatgcgttt

SEQ ID NO: 619467 - DNA, 75 bp, synthetic construct
  source 1..75: mol_type = other DNA
ctgcgggtgtaggcattacacagatgttgggaactctgggagctatgtcatttagtgccggggtatcaaaggctt

SEQ ID NO: 619468 - DNA, 75 bp, synthetic construct
  source 1..75: mol_type = other DNA
tgtccacggccatcagccaggtgcagggagacctgctgctgggaaaatcacagacccgtacagaactgttttctg

SEQ ID NO: 619469 - DNA, 75 bp, synthetic construct
  source 1..75: mol_type = other DNA
tctggctccccgcgcctcctccgtggtggttgccctgctggatgccgtcgccggtggcgacaagccggtggagtt

SEQ ID NO: 619470 - DNA, 75 bp, synthetic construct
  source 1..75: mol_type = other DNA
ggggttcgttattataacacaacgggtctaagttatgatcgtagtggtcagttggggctgaatagtggagtatca

SEQ ID NO: 619471 - DNA, 75 bp, synthetic construct
  source 1..75: mol_type = other DNA
agctcaacccgattatcacccgcgtgttgttcccggcgttcgccaaaattcaggacgacactgaaaagctgcgcg

SEQ ID NO: 619472 - DNA, 75 bp, synthetic construct
  source 1..75: mol_type = other DNA
tccaataaagaaatcttcctgcgtgagcttatctctaacgcctccgatgcggcggacaagctgcgtttccgtgcg

SEQ ID NO: 619473 - DNA, 75 bp, synthetic construct
  source 1..75: mol_type = other DNA
gtggattgggatttcagagaagcggagcgacttgctaaagagcaggcgaaagcagcgggtaaaggagaggcatca

SEQ ID NO: 619474 - DNA, 75 bp, synthetic construct
  source 1..75: mol_type = other DNA
cttgtggctaccgttttatctctcgctgccgacgctggtggttagttatgcgctgggcgtgctgctgaaagggca

SEQ ID NO: 619475 - DNA, 75 bp, synthetic construct
  source 1..75: mol_type = other DNA
cgcgcgaagcgctcgcgtggattgaagaagggatggtgatagccttagacgccagttcaacttgctggtatctgg

SEQ ID NO: 619476 - DNA, 75 bp, synthetic construct
  source 1..75: mol_type = other DNA
cattatgcgcataaagcagatatcgcgcgcgaggcgctcgcgtggattgaagaagggatggtgatagccttagac

SEQ ID NO: 619477 - DNA, 75 bp, synthetic construct
  source 1..75: mol_type = other DNA
ctgttggtctgggacttacacgggctatggggagtctgggagccatttcagtcagtgctggtgtttcaaaagcca

SEQ ID NO: 619478 - DNA, 75 bp, synthetic construct
  source 1..75: mol_type = other DNA
gcgttcccgctatgaggcgcgtctgtcgcaccgttttgatggtacatacctgagtggctcttactggcgtcagga

SEQ ID NO: 619479 - DNA, 75 bp, synthetic construct
  source 1..75: mol_type = other DNA
ggacaacagacagtggtctgttgatgacaaaggagaccagtaatacgctgggagtggtacgcattccgaatgtaa

SEQ ID NO: 619480 - DNA, 75 bp, synthetic construct
  source 1..75: mol_type = other DNA
gtatgaggcgcgtctgtctcatcggtttgatacgacttatctgagtggagcgtggtggcaccagaattactggga

SEQ ID NO: 619481 - DNA, 75 bp, synthetic construct
  source 1..75: mol_type = other DNA
aacgtggccgttgtgccgccgatgaagctgaacccaatcatcacccgcgtgttgtttccggcgtttgccaaaatt

SEQ ID NO: 619482 - DNA, 75 bp, synthetic construct
  source 1..75: mol_type = other DNA
gtgatgattaaaccggttcttggttccagttatcgtcagtacatcctgagtttgtggctgccgttttatctctcg

SEQ ID NO: 619483 - DNA, 75 bp, synthetic construct
  source 1..75: mol_type = other DNA
ggaaaaacatgcacaacaggaaaatatgaccctgcctgaactgaaaaaggtcattgccgacatctatcctgggca

SEQ ID NO: 619484 - DNA, 75 bp, synthetic construct
  source 1..75: mol_type = other DNA
gattcgtcacggtatcactatcggcaatcgcggcccggagagtctggcgtgcccaaggattggtgatggcgttga

SEQ ID NO: 619485 - DNA, 75 bp, synthetic construct
  source 1..75: mol_type = other DNA
taccgacgctaatcccgccaacgggccaatgcgcgatatgttgcatagttttatggctatcaaaagacatgggca

SEQ ID NO: 619486 - DNA, 75 bp, synthetic construct
  source 1..75: mol_type = other DNA
ctacaagccctgatagagtgtattaatcaacaaaaaatattattgaagcgttcactattcgcgatgttaaaaagg

SEQ ID NO: 619487 - DNA, 75 bp, synthetic construct
  source 1..75: mol_type = other DNA
gttttacgatgatgaagtggatattcacctcaatcccaaaattggcgcagactggcagttacgtgggctgcaaaa

SEQ ID NO: 619488 - DNA, 75 bp, synthetic construct
  source 1..75: mol_type = other DNA
cgaaatgcagtgcggaaaaccccgtgttttacgatgatgaagtggatattcacctcaatcccaaaattggcgcag

SEQ ID NO: 619489 - DNA, 75 bp, synthetic construct
  source 1..75: mol_type = other DNA
tatgcgtcttcgcaatatgaaactggaagccgcagtagaaaaagtttttggtatccgggcgagggaaagaataaa

SEQ ID NO: 619490 - DNA, 75 bp, synthetic construct
  source 1..75: mol_type = other DNA
ccgcactggctcctgcgccagctcaaacaaaagcaatgtcgtttagtgtggaatttggcggcgcggagcgagtcc

SEQ ID NO: 619491 - DNA, 75 bp, synthetic construct
  source 1..75: mol_type = other DNA
ccactgacggcaaaacaaaattattgttacgcgacggcgaatataaagaatatgccgcaaaagatattattttta

SEQ ID NO: 619492 - DNA, 75 bp, synthetic construct
  source 1..75: mol_type = other DNA
tgccgctgaacgcctggcacatgagactggagcgacagcagtattcacagatagtgctgacagagacgctgttat

SEQ ID NO: 619493 - DNA, 75 bp, synthetic construct
  source 1..75: mol_type = other DNA
acatcgccatgccgacacagaagacaccgtgctggaaattcagcggctggctgccgtttgccgtgacaccctcaa

SEQ ID NO: 619494 - DNA, 75 bp, synthetic construct
  source 1..75: mol_type = other DNA
tgcctaccaagcagagaacgagcgccgacaggaaatggctgatgcggcgttctctgccacgccactgggcaacct

SEQ ID NO: 619495 - DNA, 75 bp, synthetic construct
  source 1..75: mol_type = other DNA
tcttggacagtgatgcgctttagcgaaaccacccagaacgataagctggaatggctgatccgcaaagacggttgc

SEQ ID NO: 619496 - DNA, 75 bp, synthetic construct
  source 1..75: mol_type = other DNA
ctggcacaaaaagcgccgctgtcgagtccgacactcaccggaacgccaacagcacctactgcggcacagtcggtc

SEQ ID NO: 619497 - DNA, 75 bp, synthetic construct
  source 1..75: mol_type = other DNA
tcaggagtaatagaacttattaatgaaccagcaataaaaaatagtgatggagaaatacttctgaataaaggtcat

SEQ ID NO: 619498 - DNA, 75 bp, synthetic construct
  source 1..75: mol_type = other DNA
gtttaatacctatccttctgattctggtgcttttacaaccagcgtcatcggagatgcttcatctgattcaactaa

SEQ ID NO: 619499 - DNA, 75 bp, synthetic construct
  source 1..75: mol_type = other DNA
ctgttggtgcgcctgttccgtggccttcagagacacctccaacaggctggctgaaatgcaacggggcggcttttt

SEQ ID NO: 619500 - DNA, 75 bp, synthetic construct
  source 1..75: mol_type = other DNA
ttaaaacatataaacaatcagtggctggtttaggtgccgcagcctcagaaacgcgtccgcgtaatattgtattta

SEQ ID NO: 619501 - DNA, 75 bp, synthetic construct
  source 1..75: mol_type = other DNA
tcggcgatggcggcggaacattgccaacgccggacgccaagcagacagcattggtaaatgagaaacgccgggctg

SEQ ID NO: 619502 - DNA, 75 bp, synthetic construct
  source 1..75: mol_type = other DNA
acacagattgccactacggcttttgtgaaatcggcgattgcaggaatggtgggttctgcacctgcggcactggat

SEQ ID NO: 619503 - DNA, 75 bp, synthetic construct
  source 1..75: mol_type = other DNA
catttgtgaaatcggcgattgcggcaatggtgggttctgcacctgcggcactggatacactgaacgaactggcgg

SEQ ID NO: 619504 - DNA, 75 bp, synthetic construct
  source 1..75: mol_type = other DNA
actaatttgagtggaaaggatgtagctggtcttctcacataccttggtttgggagaaggctctgcattacctgtt

SEQ ID NO: 619505 - DNA, 75 bp, synthetic construct
  source 1..75: mol_type = other DNA
tatgtggatgaccaaatggcaaaacaccttgccgcagcggacccacattcacagtatgcgccaaaagccagcccg

SEQ ID NO: 619506 - DNA, 75 bp, synthetic construct
  source 1..75: mol_type = other DNA
attcagcgagaaatactgatggttcagataaattcggtaacgaatcacgtccacgaaatatttcatttaattata

SEQ ID NO: 619507 - DNA, 75 bp, synthetic construct
  source 1..75: mol_type = other DNA
ttcacttctcggcggcaaatgttgttccaacagcaaatgaaaatcgtccacgtaacatcgcctttaattatattg

SEQ ID NO: 619508 - DNA, 75 bp, synthetic construct
  source 1..75: mol_type = other DNA
cgacgaacggcgcagtaatgggagatgttgagaaagcgtccaaaacctaccgcaaagcagaaattttgcccattc

SEQ ID NO: 619509 - DNA, 75 bp, synthetic construct
  source 1..75: mol_type = other DNA
ggaacggcatcacccagcaaaaccgtaacggcttattatgggataaaaccatgaatgtcgatggcctgaaaaccg

SEQ ID NO: 619510 - DNA, 75 bp, synthetic construct
  source 1..75: mol_type = other DNA
cccgctgttggtgctgtatcgcattatcaccgaaggctttttcggttatgaaatccaggcagccgcaaccattgg

SEQ ID NO: 619511 - DNA, 75 bp, synthetic construct
  source 1..75: mol_type = other DNA
tcgccagtgattgtttcattgctcattcttttggtggctttcatgaggccatcaaacatgatgttgagagaagtc

SEQ ID NO: 619512 - DNA, 75 bp, synthetic construct
  source 1..75: mol_type = other DNA
ccgctcccgttatggcaaaacatttcactcctgtgatcgctacccggagtgtcaatttgccattaacttcaaacc

SEQ ID NO: 619513 - DNA, 75 bp, synthetic construct
  source 1..75: mol_type = other DNA
ggattacacaaccggtcagatcctcacggcgggtaatgagcatcaacaacgcaatcctgccagcctgactaagct

SEQ ID NO: 619514 - DNA, 75 bp, synthetic construct
  source 1..75: mol_type = other DNA
atcacttatttaagtgatactggttgtctggagattcagggggccagtctagctgcttctttgttcgtttttaat

SEQ ID NO: 619515 - DNA, 75 bp, synthetic construct
  source 1..75: mol_type = other DNA
cgcagcgtcacactgccggtgatcctgtacaactttccggatctaaccggtcaggacttaaccccggagaccgtg

SEQ ID NO: 619516 - DNA, 75 bp, synthetic construct
  source 1..75: mol_type = other DNA
ctgacgaagcggtcaaactggcgcagcatgcgcaagcctacggcgctgatggtatcgtcgccatcaacccctact

SEQ ID NO: 619517 - DNA, 75 bp, synthetic construct
  source 1..75: mol_type = other DNA
cgggaactggttattcacccgcattttgttctggtttatgaggtcgacagccagtggggaaaagtgtatatcctg

SEQ ID NO: 619518 - DNA, 75 bp, synthetic construct
  source 1..75: mol_type = other DNA
cttggtgccaacgatccatcctgtccggtcatcggtaacagcgttgagttgggggccaatgtcactctgctcggc

SEQ ID NO: 619519 - DNA, 75 bp, synthetic construct
  source 1..75: mol_type = other DNA
atcaccgaatgcctgtttggctatgaaattcaggctgctgcatcaatcggtcgtcgtttcaccatccatcatggt

SEQ ID NO: 619520 - DNA, 75 bp, synthetic construct
  source 1..75: mol_type = other DNA
attgcgccagtgtttactcactgaagaggaaattctctggtggcagcagggggggattttccacgatccctggcc

SEQ ID NO: 619521 - DNA, 75 bp, synthetic construct
  source 1..75: mol_type = other DNA
cgatagcgtgacatttggttgttatcaactgatggcgcgttatttacagggtgataaaccgactattgtcggtat

SEQ ID NO: 619522 - DNA, 75 bp, synthetic construct
  source 1..75: mol_type = other DNA
ccgggcaagagcaactcggtcgccgcatacactattctcagaatgacttggttgagtactccaaggttgccgggt

SEQ ID NO: 619523 - DNA, 75 bp, synthetic construct
  source 1..75: mol_type = other DNA
gtgatctttaaaggcttgttcattaaaggcatttacggtcgtgagatgtttgaaacctggtacaagatggcggcg

SEQ ID NO: 619524 - DNA, 75 bp, synthetic construct
  source 1..75: mol_type = other DNA
gccgccagcgtttcgtaccatgctcgacaccatgaaccacggcggtcgtattgcgatgctgggtattccaccgtc

SEQ ID NO: 619525 - DNA, 75 bp, synthetic construct
  source 1..75: mol_type = other DNA
gtgatcgacctgctgccgctgccgtcgctgtatctgcgctgccggaaagacggctcttttgctgtactgcaggaa

SEQ ID NO: 619526 - DNA, 75 bp, synthetic construct
  source 1..75: mol_type = other DNA
aacaatgacccggagatccccgcacatttgcacctggtttttgatgtagatatcccggcaattaccgccgaaaag

SEQ ID NO: 619527 - DNA, 75 bp, synthetic construct
  source 1..75: mol_type = other DNA
acctttggccagccggaaccggtgctgaccaccggcacggactaccataacatctggtatgacaacgaacacaac

SEQ ID NO: 619528 - DNA, 75 bp, synthetic construct
  source 1..75: mol_type = other DNA
ggtagcgacctgtggcgctatatcgactggcctgctgaacgggcgattccccatgtggtgcgtgagtcggtggag

SEQ ID NO: 619529 - DNA, 75 bp, synthetic construct
  source 1..75: mol_type = other DNA
aattctcgggcgctttatcgacgccgacggcaacgtggtggaaaaccatattaaccggatgatcaccagctacga

SEQ ID NO: 619530 - DNA, 75 bp, synthetic construct
  source 1..75: mol_type = other DNA
ttaaccggatgatcaccagctacgatatccgcgaaagtcagtgtccgcgaattgccgccgcctgcggtgaagata

SEQ ID NO: 619531 - DNA, 75 bp, synthetic construct
  source 1..75: mol_type = other DNA
ctccgacgacctggcttccatttttgatcccttcggtaacgccgtgcataccgcgctgtcgttcgatctggttgg

SEQ ID NO: 619532 - DNA, 75 bp, synthetic construct
  source 1..75: mol_type = other DNA
taagccgcggaacaggtgcttacacctacgactggacgccagaaacacgctacggcagcatgaagagcatcagtt

SEQ ID NO: 619533 - DNA, 75 bp, synthetic construct
  source 1..75: mol_type = other DNA
agagaattacaattaatccaggtgaaggtatctcgttgcaaatgcattatcaccgttcagaacactggatcattg

SEQ ID NO: 619534 - DNA, 75 bp, synthetic construct
  source 1..75: mol_type = other DNA
gccgcgctttatggcgatatcggtaaacaggcggaatcgctcatcggtaaggctggcagtatggcgactaaattc

SEQ ID NO: 619535 - DNA, 75 bp, synthetic construct
  source 1..75: mol_type = other DNA
gggcaattaagccgcgcacaacaggtgctggggattggctatttgtatgttgaggcgcagttacgacagatttga

SEQ ID NO: 619536 - DNA, 75 bp, synthetic construct
  source 1..75: mol_type = other DNA
ctggaagagaagctgggcattcgggtaatggtcgataatgactgcgtgatgctggcgctggcggagaaatggcaa

SEQ ID NO: 619537 - DNA, 75 bp, synthetic construct
  source 1..75: mol_type = other DNA
atagaacaactggaaaaaatagctatttttttcaggcaatctgaacccaccagtcctgtaccttatcttcttgag

SEQ ID NO: 619538 - DNA, 75 bp, synthetic construct
  source 1..75: mol_type = other DNA
agacaatgagataatatctttgccgcctaacaagttaaataaaaaaattgcacaaataggtgctcaaaaaggcat

SEQ ID NO: 619539 - DNA, 75 bp, synthetic construct
  source 1..75: mol_type = other DNA
tttatgcaatcaaaaaactcttacaaaacatgtcaagataagataaatgcttatattcaaacccttcctgatgat

SEQ ID NO: 619540 - DNA, 75 bp, synthetic construct
  source 1..75: mol_type = other DNA
tttgagtctgtataacttcctcaacatcctcaatattaatcagatttggttgtacggtcgcagttgtgcctttgg

SEQ ID NO: 619541 - DNA, 75 bp, synthetic construct
  source 1..75: mol_type = other DNA
agcgacgcaaattggctttgggcaattaagccgctcacaacaggtgctggggataggctatttgtatgttgaagc

SEQ ID NO: 619542 - DNA, 75 bp, synthetic construct
  source 1..75: mol_type = other DNA
tgtgcctgaacgtgacgcccaccagcattgagtgtcaggtcgctaatgcctgtttaagtccgaaaggcgaatttg

SEQ ID NO: 619543 - DNA, 75 bp, synthetic construct
  source 1..75: mol_type = other DNA
gagtatttacagattgatgcaccgacgccgcaggcgctgctgtccgaaatcgaaaaatgctggcatcgccaccgt

SEQ ID NO: 619544 - DNA, 75 bp, synthetic construct
  source 1..75: mol_type = other DNA
agcgacacagattggctttgggcaattaagccgcgcacaacaggtactgggaattggctatttgtatgttgaggc

SEQ ID NO: 619545 - DNA, 75 bp, synthetic construct
  source 1..75: mol_type = other DNA
gccgcaggcgctgctgtccgaaatcgaaaaatgctggcatcgccaccgtaaattgtggccggaccgtaccatcaa

SEQ ID NO: 619546 - DNA, 75 bp, synthetic construct
  source 1..75: mol_type = other DNA
ttgagtccttcaaaagagctgtaggaaaatataatccccgcaaggttagtgagcaacttctccagctttatgatc

SEQ ID NO: 619547 - DNA, 75 bp, synthetic construct
  source 1..75: mol_type = other DNA
caagcagaatcatgcgcctgcgttgccgaaaggcgatccacgcccggtactaatcgcggcacttcaatttctggg

SEQ ID NO: 619548 - DNA, 75 bp, synthetic construct
  source 1..75: mol_type = other DNA
tattcacagtattggcggtatctacgacggtcattgccgtgaattgcatcatggcccggacaacgcggctgtacg

SEQ ID NO: 619549 - DNA, 75 bp, synthetic construct
  source 1..75: mol_type = other DNA
gtcagccgtcaaaaactggacgctgaccgccgtgcctgagtcggcaattgtaaattcaacattctcaaatgcgtc

SEQ ID NO: 619550 - DNA, 75 bp, synthetic construct
  source 1..75: mol_type = other DNA
cgtgatggtttgtttgcctataacctggcggtggttgttgacgatcactttcagggcgtgacagaaattgtccgt

SEQ ID NO: 619551 - DNA, 75 bp, synthetic construct
  source 1..75: mol_type = other DNA
agcgtcgagcaaattctccagtcagccgtcacaaactggacgctgactaccattcctgactcggcaattgtaaat

SEQ ID NO: 619552 - DNA, 75 bp, synthetic construct
  source 1..75: mol_type = other DNA
attactgcacctgcacgcgcgcgcgtattcaaagcattggcggtatttacgacggtcattgccgggaattgcatc

SEQ ID NO: 619553 - DNA, 75 bp, synthetic construct
  source 1..75: mol_type = other DNA
tttccggaggaacaaaaggaatttgatactgtattaacaaactcaatagataaagagatgtcaagggagaaagct

SEQ ID NO: 619554 - DNA, 75 bp, synthetic construct
  source 1..75: mol_type = other DNA
tcctcttcttgatgataaagaaatcacgcttgctgaatggtataaggcgctggcgtttgagcatggcgcaagttt

SEQ ID NO: 619555 - DNA, 75 bp, synthetic construct
  source 1..75: mol_type = other DNA
atcattttatttctttcataccaacgaagatatacataatattttcagcaaaacaagacatgctattgatgatat

SEQ ID NO: 619556 - DNA, 75 bp, synthetic construct
  source 1..75: mol_type = other DNA
cagtttactgaccagctgcgcggcattattcacgccgacgaaaaactggcacgggaagattttattattcatcgc

SEQ ID NO: 619557 - DNA, 75 bp, synthetic construct
  source 1..75: mol_type = other DNA
tgctcgatcttaacggcaacatcatgcaggaaagtctgtttgccctgcgtgaaaatctgctggtggatcagccga

SEQ ID NO: 619558 - DNA, 75 bp, synthetic construct
  source 1..75: mol_type = other DNA
agtgaacctcgcagagctgactggagaaaagtaagaaaattatgtgaggttactttacgaaataagagcaaagac

SEQ ID NO: 619559 - DNA, 75 bp, synthetic construct
  source 1..75: mol_type = other DNA
aactgtggccagagcgcactatcaatctggcgctggcaattcacggccaggttgatccggtcaccggcgtatcgc

SEQ ID NO: 619560 - DNA, 75 bp, synthetic construct
  source 1..75: mol_type = other DNA
agccaatggcggtaacggtgcatttagcgctgctcacggaaaagataaaactgccagtgtaatcactaacgtcgc

SEQ ID NO: 619561 - DNA, 75 bp, synthetic construct
  source 1..75: mol_type = other DNA
gacaccactgacggtgagttgctcggtgcattgtcaattggtgatgacggtaaataccgtcaaatcatcaacgtc

SEQ ID NO: 619562 - DNA, 75 bp, synthetic construct
  source 1..75: mol_type = other DNA
ccaacgtcaccgctggcaacctgactgccggcagcactgacgccgttaacggctcccagctcaaaaccaccaacg

SEQ ID NO: 619563 - DNA, 75 bp, synthetic construct
  source 1..75: mol_type = other DNA
tcggtaaacaggcggaatcgctcatcggtaaagctggcagtatggcgaccagattcacgggtatgacgggggcgg

SEQ ID NO: 619564 - DNA, 75 bp, synthetic construct
  source 1..75: mol_type = other DNA
gcggcagttacaacaacgtcggtgacgcgctggaagcgatcgataccacgctggatgatgctctgctgtgggata

SEQ ID NO: 619565 - DNA, 75 bp, synthetic construct
  source 1..75: mol_type = other DNA
tcttttgccaaaggcgatagcagcgtggccatcggtcagggcagctacagcggcgttgatacgggtatcgctctg

SEQ ID NO: 619566 - DNA, 75 bp, synthetic construct
  source 1..75: mol_type = other DNA
gactggtagcttcaataataatttttttttctaaattaaagaactctattataaattcatcatataaacggcgct

SEQ ID NO: 619567 - DNA, 75 bp, synthetic construct
  source 1..75: mol_type = other DNA
agctgtgttacctggtggcctttgtcagagtgaatacatggatatttgcctggcaatggtgcgttctgctgatgc

SEQ ID NO: 619568 - DNA, 75 bp, synthetic construct
  source 1..75: mol_type = other DNA
atatttaccgggaactggtcaatgcactgcgtgatatcgctgctgtatatcacggcacagaacagcttcgtgagc

SEQ ID NO: 619569 - DNA, 75 bp, synthetic construct
  source 1..75: mol_type = other DNA
attcagtgccgcacacggcaccgaagccaccagcaaaatcactaacgtcaccgctggcaacctgactgccggcag

SEQ ID NO: 619570 - DNA, 75 bp, synthetic construct
  source 1..75: mol_type = other DNA
ctgtaaatggctcgcaactctatgacacgagcaagtacattgctgatgccctgggtggtgacgcagaagttaacg

SEQ ID NO: 619571 - DNA, 75 bp, synthetic construct
  source 1..75: mol_type = other DNA
attgcgctgggaagtaacagcaggtcagcgggtgagaacgccattgcactgggcaacaacagtaatgcggggggc

SEQ ID NO: 619572 - DNA, 75 bp, synthetic construct
  source 1..75: mol_type = other DNA
gaacgccgcgcaaaattgattttacgctgacgctcacccgcgtggatgaatcccttgcggcgctgtatggcgata

SEQ ID NO: 619573 - DNA, 75 bp, synthetic construct
  source 1..75: mol_type = other DNA
gtgaagaaagccagaaacggttatggattacggccagcacatacgacttcggcgggatttcaacgcaggtggatt

SEQ ID NO: 619574 - DNA, 75 bp, synthetic construct
  source 1..75: mol_type = other DNA
tgctgatcatggacggggattttgttcttaatacaggtaatgaacctgaattatgtaataaccgcagaagtatcg

SEQ ID NO: 619575 - DNA, 75 bp, synthetic construct
  source 1..75: mol_type = other DNA
gtgaagaaagccagaaacggctgtgggtgaccgcgagcacatacgattttggcacgctttcatatcaggtggatt

SEQ ID NO: 619576 - DNA, 75 bp, synthetic construct
  source 1..75: mol_type = other DNA
tcttgcaatgacaactccagcttataatttatctcctgtgtttaatctgaatcctacatttgaagtggtaacaga

SEQ ID NO: 619577 - DNA, 75 bp, synthetic construct
  source 1..75: mol_type = other DNA
atatttcgctcttttgaggaaatttgcccttccctagattgcaaaatgtttacaagaagctctgaaagctatgca

SEQ ID NO: 619578 - DNA, 75 bp, synthetic construct
  source 1..75: mol_type = other DNA
aagaaagcctgaccaggctgcttatcaccggtgatacctatgattttgggccgctatccgagggagtggattatg

SEQ ID NO: 619579 - DNA, 75 bp, synthetic construct
  source 1..75: mol_type = other DNA
ggtgaagactcgctggcaatgggcgcgaaaaccatcgttaatggtaatgcgggtattggtatcggcctgaacact

SEQ ID NO: 619580 - DNA, 75 bp, synthetic construct
  source 1..75: mol_type = other DNA
tgctgaaaatgctattgcactgggaaaactcagtaacgcaagtaaaatcaattcaatcgccctgggtagtaacag

SEQ ID NO: 619581 - DNA, 75 bp, synthetic construct
  source 1..75: mol_type = other DNA
cggaatcctacgctaaggctttggccagcgatattctccggtgagattgatgtgttcccaggggataggagaagt

SEQ ID NO: 619582 - DNA, 75 bp, synthetic construct
  source 1..75: mol_type = other DNA
ttgacgaagagcaacgcggccagctccttgttaccgccgatacctacgattttggtcagttaagccaggggatgc

SEQ ID NO: 619583 - DNA, 75 bp, synthetic construct
  source 1..75: mol_type = other DNA
caacgttagtcagttgaaagttaccgatgagcgtgtggcgcaaaacacccagaatatctctaacctgaataatca

SEQ ID NO: 619584 - DNA, 75 bp, synthetic construct
  source 1..75: mol_type = other DNA
ttgggcgggaacgctgtggtgaatgcagacggcagtatcactacaccgacttatgccatagcgggcggcagttac

SEQ ID NO: 619585 - DNA, 75 bp, synthetic construct
  source 1..75: mol_type = other DNA
agagggcaccgatccggcatacgcagaaaaactgattcagttcggttgggaaaccatcaccgaagcgctgaaaca

SEQ ID NO: 619586 - DNA, 75 bp, synthetic construct
  source 1..75: mol_type = other DNA
aaaccatcaccgaagcgctgaaacagggcggcatcacgctgatgatggaccgtctctctaacccggcgaaactgc

SEQ ID NO: 619587 - DNA, 75 bp, synthetic construct
  source 1..75: mol_type = other DNA
gggcgttgagctggctttcgaaaccatggttgattctggcatcatcgaagagtcggcttactatgaatcactgca

SEQ ID NO: 619588 - DNA, 75 bp, synthetic construct
  source 1..75: mol_type = other DNA
gtgattggctatgacgatatcgaactggcaagctttatgacgccaccattaaccactatccaccaaccgaaagat

SEQ ID NO: 619589 - DNA, 75 bp, synthetic construct
  source 1..75: mol_type = other DNA
tactcatccatcggataacccagccgacccttcagcaacaacgattacaacttactccgattctgatggaacgtg

SEQ ID NO: 619590 - DNA, 75 bp, synthetic construct
  source 1..75: mol_type = other DNA
agcttaacccaatcatcacccgcgtgctgttcccggcgttcgccaagattcaggacgacaccgacaagctgcgag

SEQ ID NO: 619591 - DNA, 75 bp, synthetic construct
  source 1..75: mol_type = other DNA
ccatgcgattgagcaggtaggtaagaaactgcgcggctatatgacagatatgaaacgtattgctgttgcgggtta

SEQ ID NO: 619592 - DNA, 75 bp, synthetic construct
  source 1..75: mol_type = other DNA
tacgcttgtgtgccgttgctgaaaccgtttatggcagagctgcaaccgggcgacttgggtaaagctattccggaa

SEQ ID NO: 619593 - DNA, 75 bp, synthetic construct
  source 1..75: mol_type = other DNA
gaaaaactgattcagttcggttgggaaaccatcaccgaagctctgaagcagggtggcatcaccctgatgatggac

SEQ ID NO: 619594 - DNA, 75 bp, synthetic construct
  source 1..75: mol_type = other DNA
ccgaagtgcgtgaagagtacaaacgtgggttcggcgtaccgacgctgattgccgttcacccggaaaacgatccga

SEQ ID NO: 619595 - DNA, 75 bp, synthetic construct
  source 1..75: mol_type = other DNA
ctggtggttaacctgacgccagacaagcagcactctgacgtagtgcgttccgttcagccgctgatgaaagacggc

SEQ ID NO: 619596 - DNA, 75 bp, synthetic construct
  source 1..75: mol_type = other DNA
ccatgcgattgagcaggttggtaagaaactgcgcggttatatgacggatatgaaacgtattgctgttgcgggtta

SEQ ID NO: 619597 - DNA, 75 bp, synthetic construct
  source 1..75: mol_type = other DNA
gactactactgacagaaaatgacgggagcctttcaatgaagggaaatcctgaaaaaacgcactttaataacgttt

SEQ ID NO: 619598 - DNA, 75 bp, synthetic construct
  source 1..75: mol_type = other DNA
atgacccgtccgtccatgaagcgcctctcgttattggccaccccaaaacggaagacccggcgtggggctgggtga

SEQ ID NO: 619599 - DNA, 75 bp, synthetic construct
  source 1..75: mol_type = other DNA
cgcctcgttctatctccctgactcaccgaacaacccgaagcccggcacgctttacctgcgtcatgtcggctttct

SEQ ID NO: 619600 - DNA, 75 bp, synthetic construct
  source 1..75: mol_type = other DNA
actcgttattggccacccaaaaacggaagacccggcgtggggctgggtgaagtccctgtcgcttaacggcggcga

SEQ ID NO: 619601 - DNA, 75 bp, synthetic construct
  source 1..75: mol_type = other DNA
cctgctggtgaacattccggtgaactatatctttatttatggtcatttcggtatgcctgagctcggtggcgttgg

SEQ ID NO: 619602 - DNA, 75 bp, synthetic construct
  source 1..75: mol_type = other DNA
gtcgtgaaggatgtacttgttctttatgccgtagccacgggtacagaaaaagtaacgcctatgacgctgtaaccc

SEQ ID NO: 619603 - DNA, 75 bp, synthetic construct
  source 1..75: mol_type = other DNA
gcggtttctgcaggtgacaagccggttgagtttgccgaaggcgatacccgcaccccgctggccacggcgtttaag

SEQ ID NO: 619604 - DNA, 75 bp, synthetic construct
  source 1..75: mol_type = other DNA
gggtcccgatcatgatgatcgggaccacaaagaggcgatggttctgtcagaaggtcacattcagcgtggcctgac

SEQ ID NO: 619605 - DNA, 75 bp, synthetic construct
  source 1..75: mol_type = other DNA
atgacaatcagactgaagttgctcgctacgatctgacagaagacgcttctactgaaactgccatgctgtttgggg

SEQ ID NO: 619606 - DNA, 75 bp, synthetic construct
  source 1..75: mol_type = other DNA
agtaatactgaaagctcagtgacatttaaacataaaaagtcgatgagaataacttcagttaaacagtttaaaatt

SEQ ID NO: 619607 - DNA, 75 bp, synthetic construct
  source 1..75: mol_type = other DNA
catgacgccccggcttatggctgggtgaagtcgttaaccgcctcgcaggatgatttgcaggccgagcctgaccag

SEQ ID NO: 619608 - DNA, 75 bp, synthetic construct
  source 1..75: mol_type = other DNA
tgatatatatggtgacaacaaaggaataagaataacatttaagagttgcgagttcaggaaggtttgctttggtta

SEQ ID NO: 619609 - DNA, 75 bp, synthetic construct
  source 1..75: mol_type = other DNA
tgaaacaatacacctgattaacatgatgattggtgtatggtggtatggtatattaataccaactttaataaataa

SEQ ID NO: 619610 - DNA, 75 bp, synthetic construct
  source 1..75: mol_type = other DNA
atcgcccgtaagcgtctgtacgaaatgaacgtggttatctctgataccgctgagtacggtaactatctgttctct

SEQ ID NO: 619611 - DNA, 75 bp, synthetic construct
  source 1..75: mol_type = other DNA
aacgattacaaccgacgtttttcaaaagcgcctcgccaggagttcgatgttcatcgggaactggatgtcgatgat

SEQ ID NO: 619612 - DNA, 75 bp, synthetic construct
  source 1..75: mol_type = other DNA
tatggtgtttacttggcgtgaagcccgccgcgtgtcgaaatcactcactgtgcagtacgacaaagtgctttacct

SEQ ID NO: 619613 - DNA, 75 bp, synthetic construct
  source 1..75: mol_type = other DNA
tggagcaggctcagtgtgactgggcctttaagccaatacgaacaaagaaagatgttattgaaatattgatgagat

SEQ ID NO: 619614 - DNA, 75 bp, synthetic construct
  source 1..75: mol_type = other DNA
ggtaacacaacagctcagcgacaaattgtcaatatggcagcaggtgatatcagcactaccagtactgatgccatc

SEQ ID NO: 619615 - DNA, 75 bp, synthetic construct
  source 1..75: mol_type = other DNA
ctcaggagaaggaaaagagatcatttcttttataagaaattttggagtgggacaaaaaataggaaacgaagctgg

SEQ ID NO: 619616 - DNA, 75 bp, synthetic construct
  source 1..75: mol_type = other DNA
ttttctggtgaagaaggggagggggttcttgaattattttatcgcggattgatgttaataacgaccagctatgaa

SEQ ID NO: 619617 - DNA, 75 bp, synthetic construct
  source 1..75: mol_type = other DNA
gcaaccttggggcaatttcctttaatgtcattggcagacgcaagaattgctgctgcttattttcgaaaagaagta

SEQ ID NO: 619618 - DNA, 75 bp, synthetic construct
  source 1..75: mol_type = other DNA
ccaccactggcaattgaaatactaaaagagttaaaggtcagagcttttggttctgattatgtctttcctaaccgc

SEQ ID NO: 619619 - DNA, 75 bp, synthetic construct
  source 1..75: mol_type = other DNA
tggcggtggttgttgacgatcactttcagggcgtgacagaaattgtccgtggtgcggatttgattgaaccaacgg

SEQ ID NO: 619620 - DNA, 75 bp, synthetic construct
  source 1..75: mol_type = other DNA
aatcttagattattagcgggtgagacattagaaagcgttcatggtcctaagctagttattacataccaagattca

SEQ ID NO: 619621 - DNA, 75 bp, synthetic construct
  source 1..75: mol_type = other DNA
tgatctacccctctgcttccagcgcgatgatgcacaggcaataactcgctccttcgagtcactgaaaagccagct

SEQ ID NO: 619622 - DNA, 75 bp, synthetic construct
  source 1..75: mol_type = other DNA
ccatatcaatagctttggccgcgacaactacctcgcttgctgcctgtttttggtattgggcgtgcgcaaaagcga

SEQ ID NO: 619623 - DNA, 75 bp, synthetic construct
  source 1..75: mol_type = other DNA
acctgacggctggcagcaccgacgcggttaacggctctcagctcaaaaccactaacgataatgtggcaaccaaca

SEQ ID NO: 619624 - DNA, 75 bp, synthetic construct
  source 1..75: mol_type = other DNA
gccacgaccgggagtctgctgtggtaccagggcatgaagataaacgcgaatatgaatattctccgcgagcagaaa

SEQ ID NO: 619625 - DNA, 75 bp, synthetic construct
  source 1..75: mol_type = other DNA
catgaatattctccgcgagcagaaagagagtctggagaagctgaacgcgaagacatggggcgtgcgttatcacga

SEQ ID NO: 619626 - DNA, 75 bp, synthetic construct
  source 1..75: mol_type = other DNA
atagccattgcgcaagatcagcaattgaagaatctaaaaagcttgacccatacactggcggcactgtacgttttt

SEQ ID NO: 619627 - DNA, 75 bp, synthetic construct
  source 1..75: mol_type = other DNA
ccatgcgattgagcaggtaggtaagaaactacgcggctatatgacggatatgaaacgtattgctgttgcgggtta

SEQ ID NO: 619628 - DNA, 75 bp, synthetic construct
  source 1..75: mol_type = other DNA
catcggttcgctattaatggcgaaagcccgcgtcgatatcagctttaaattcaatgtctttaaaacttttctctt

SEQ ID NO: 619629 - DNA, 75 bp, synthetic construct
  source 1..75: mol_type = other DNA
ctcaaacgaatctttaatcaggaacgctatcaacgaccatacagcagccctgaaagaacttctggagaggtatca

SEQ ID NO: 619630 - DNA, 75 bp, synthetic construct
  source 1..75: mol_type = other DNA
cggctctcagctgaaaaccaccaacgataacgtggcgaccaataccgccaatatcaccaccaacactaccaatat

SEQ ID NO: 619631 - DNA, 75 bp, synthetic construct
  source 1..75: mol_type = other DNA
cgatggcgtagatgccaacgcgcagggtaaagatagtgttgcgattggttctggttccattgctgccgctgacaa

SEQ ID NO: 619632 - DNA, 75 bp, synthetic construct
  source 1..75: mol_type = other DNA
gccattggtgcagtcgctaccacgccgaccaaatacttccacgctaattcaacggaagaagattcactggcagtg

SEQ ID NO: 619633 - DNA, 75 bp, synthetic construct
  source 1..75: mol_type = other DNA
tcaagtacaaccgagacagcaaaggcgagcgtcacgtaatagttaacggcgtcctgatggtcacgccaggcacaa

SEQ ID NO: 619634 - DNA, 75 bp, synthetic construct
  source 1..75: mol_type = other DNA
actaacgtcgctaacggtgcaatctctgccaccagcagcgatgccattaacggttcacaactgtataccaccaac

SEQ ID NO: 619635 - DNA, 75 bp, synthetic construct
  source 1..75: mol_type = other DNA
ttcgccagttgcagaatgcgattggtgccgtagcaacgacaccgtccaaatacttccatgctaattcaacggaag

SEQ ID NO: 619636 - DNA, 75 bp, synthetic construct
  source 1..75: mol_type = other DNA
aaaaacctggcactcaccgcagcgacaatgacttacagtctggaagctgctgtcgtttttgccgatggtccggca

SEQ ID NO: 619637 - DNA, 75 bp, synthetic construct
  source 1..75: mol_type = other DNA
ggcaaaatcagagctgggaaatcgttgttttcgatgaacaggggcggcgttgctgcacctgtcggctgggtacgg

SEQ ID NO: 619638 - DNA, 75 bp, synthetic construct
  source 1..75: mol_type = other DNA
ggtttactacatggcggcgcgtcggcggcgctggcggaaacgctgggatcgatggccggatttatgatgacccgc

SEQ ID NO: 619639 - DNA, 75 bp, synthetic construct
  source 1..75: mol_type = other DNA
cgcagcttctacgtaccgcgctacatgacccattaaccgggctggctaaccgcgcagcgtttcgtagcggcatca

SEQ ID NO: 619640 - DNA, 75 bp, synthetic construct
  source 1..75: mol_type = other DNA
gtgataagcagcaaaatattctggcattacacccataaggaaccaggcgatactttcagcaatttcataagccac

SEQ ID NO: 619641 - DNA, 75 bp, synthetic construct
  source 1..75: mol_type = other DNA
tgaagtgcagcagatatgctcagcactgacacaaatctttaatctcccgtttgatcttcataatggccatcagac

SEQ ID NO: 619642 - DNA, 75 bp, synthetic construct
  source 1..75: mol_type = other DNA
atggcgcgggtcggtaagctgtggggtaaacgcgaagacacaaagcatacgccagtgcgtggcttatatatgtgg

SEQ ID NO: 619643 - DNA, 75 bp, synthetic construct
  source 1..75: mol_type = other DNA
atggcctgcaacgtgcgcgttttttgcctgcaatcgatgccattaaacagcattgtgatgtaatgaacgtggacg

SEQ ID NO: 619644 - DNA, 75 bp, synthetic construct
  source 1..75: mol_type = other DNA
tattaccctggtagcgacgtcaaatattccgccggacgaactttatcgaaatggcctgcaacgtgcgcgttttct

SEQ ID NO: 619645 - DNA, 75 bp, synthetic construct
  source 1..75: mol_type = other DNA
ggcctgctgcatggcggcgcgtcggcggcgctggcggaaacgctgggatcgatggccggatttatgatgacccgc

SEQ ID NO: 619646 - DNA, 75 bp, synthetic construct
  source 1..75: mol_type = other DNA
gtcagaactgacacaggccgaagcagtgaaagctcttggattcctgaaacaaaaagccactgagcagaaggtggc

SEQ ID NO: 619647 - DNA, 75 bp, synthetic construct
  source 1..75: mol_type = other DNA
gcaactcttacgtactgccctgcatgatccgttaaccggcctggctaaccgcgctgcattccgcaactgcatcaa

SEQ ID NO: 619648 - DNA, 75 bp, synthetic construct
  source 1..75: mol_type = other DNA
gccagtgtgtggtggttggcggcagcgttggtttggcggaaggatacctggcgctggtggaaacgtatctcgctc

SEQ ID NO: 619649 - DNA, 75 bp, synthetic construct
  source 1..75: mol_type = other DNA
atgaccacgctggcgattgatatcggcggtactaaacttgccgccgcgctgattggcgctgacgggcagatccgc

SEQ ID NO: 619650 - DNA, 75 bp, synthetic construct
  source 1..75: mol_type = other DNA
catcgtcagaactgacacaggacgaagcagtgaaagctctgggattcctgaaacagaaagccgcacaacagaagg

SEQ ID NO: 619651 - DNA, 75 bp, synthetic construct
  source 1..75: mol_type = other DNA
tgcggaaaaattacaagagcttgccgatcacaatatgtatcaggccaaacaccagcgtgccgaaaagctggtgag

SEQ ID NO: 619652 - DNA, 75 bp, synthetic construct
  source 1..75: mol_type = other DNA
atgctcagcactgacacaaatctttaatctcccgtttgatcttcataatggccatcagaccaccatgacattaag

SEQ ID NO: 619653 - DNA, 75 bp, synthetic construct
  source 1..75: mol_type = other DNA
cgggctgcgacatcaggcataccgcataggtggcgatgaattcgctatggtcctctatggcgtgcagtcggaatc

SEQ ID NO: 619654 - DNA, 75 bp, synthetic construct
  source 1..75: mol_type = other DNA
ccagtagttgcggcaatctggtttgtcgtttactacgccatcttccgtttcgctatcactcgtttcaatctgaaa

SEQ ID NO: 619655 - DNA, 75 bp, synthetic construct
  source 1..75: mol_type = other DNA
gcggtgatcgccggtattatcgtctggatgctgcatgagcgttttcataatatccgcctgccggatgcgctggca

SEQ ID NO: 619656 - DNA, 75 bp, synthetic construct
  source 1..75: mol_type = other DNA
tcgccacaaaattaaaggactgctgatttctggtctgattgcttgtgtcgttggtggtacgaccgaaccgttgga

SEQ ID NO: 619657 - DNA, 75 bp, synthetic construct
  source 1..75: mol_type = other DNA
gtgccgacaatattgtcagcctcgataactgcattacccgtctgcgtttgtctgtgaaagatatgtcgcttgtta

SEQ ID NO: 619658 - DNA, 75 bp, synthetic construct
  source 1..75: mol_type = other DNA
ttgttaatgtgcaggcactgaaggacaatcgggcaattggcgtagtacaacttaatcaacataacctgcaggttg

SEQ ID NO: 619659 - DNA, 75 bp, synthetic construct
  source 1..75: mol_type = other DNA
aggtaaaatgcctgcgtttctcggcggtctgccaggtgcagcgttagctatgtatcactgcgcgcgcccggaaaa

SEQ ID NO: 619660 - DNA, 75 bp, synthetic construct
  source 1..75: mol_type = other DNA
atcaacctggagaaaaatgaaaattacaacgattccctcggtgtgaataaactcgttggcatggcggtttatcac

SEQ ID NO: 619661 - DNA, 75 bp, synthetic construct
  source 1..75: mol_type = other DNA
ggcaagaagcgacaggtgttaatgtttcgggtgatggtaatactatcgaaatagcgggcagtattctggttgata

SEQ ID NO: 619662 - DNA, 75 bp, synthetic construct
  source 1..75: mol_type = other DNA
gtgcgggcgctattcactacgacgatggcgccagccagtttattaacaagggcgtggtggatgcgaaagtcaccg

SEQ ID NO: 619663 - DNA, 75 bp, synthetic construct
  source 1..75: mol_type = other DNA
cggtgcgccgggtaaatcaggttacaacgttcctgcaaatcctcgaagcattaggcggtgccgacaatattgtca

SEQ ID NO: 619664 - DNA, 75 bp, synthetic construct
  source 1..75: mol_type = other DNA
ttgaatcaacataacctgcaggttgttattgggccgcaagttcaatcggtaaaagatgaaatggccggtttgatg

SEQ ID NO: 619665 - DNA, 75 bp, synthetic construct
  source 1..75: mol_type = other DNA
taaataaactcgtcggcatggctgtttacgagaaaggaacggctatcaatgatcaaaccggtgttattaatatta

SEQ ID NO: 619666 - DNA, 75 bp, synthetic construct
  source 1..75: mol_type = other DNA
tttactggcggcgcactaccgccatgatgcaggtttacttggggctgcgctgttggcccagggagaaaaattatg

SEQ ID NO: 619667 - DNA, 75 bp, synthetic construct
  source 1..75: mol_type = other DNA
aagcgtcccgtttcgatcttagtggtcatttacgcacaagatacgaaacgggtgctgatgttacagcggcgtgac

SEQ ID NO: 619668 - DNA, 75 bp, synthetic construct
  source 1..75: mol_type = other DNA
catcgtcagaactgacacaaggcgaagcagtgaaagctcttggattcctgaaacaaaaagccactgaacagaagg

SEQ ID NO: 619669 - DNA, 75 bp, synthetic construct
  source 1..75: mol_type = other DNA
cgtcgtcagaactgtcccaggccgaagcagagaaggttcttggattcctgaaacagaaagccacggagcagaagg

SEQ ID NO: 619670 - DNA, 75 bp, synthetic construct
  source 1..75: mol_type = other DNA
tggtctaatttgcaggaccagcaatccatcgatgaacgtcgtgtcaccttcctcggctttgacgccgccactgaa

SEQ ID NO: 619671 - DNA, 75 bp, synthetic construct
  source 1..75: mol_type = other DNA
cgttgtcagaactgtcccaggccgaagcagagaaggctcttggattccttaaacagaaagccacagagcataagg

SEQ ID NO: 619672 - DNA, 75 bp, synthetic construct
  source 1..75: mol_type = other DNA
gatgctacagcaacaggggagccgcaccgaagtcttaagtgggcaacaagccgcttgcgatatggctgcgcttga

SEQ ID NO: 619673 - DNA, 75 bp, synthetic construct
  source 1..75: mol_type = other DNA
gggagaaatatcagcgcatgttgaacgtctggcattcctgcccgcgtcagtatcatttgagtaccaacgaaatta

SEQ ID NO: 619674 - DNA, 75 bp, synthetic construct
  source 1..75: mol_type = other DNA
gcacgttacctcggttatgtgcgctttatggttaacgtggaggggcgctatacccattttgacgccggaactcac

SEQ ID NO: 619675 - DNA, 75 bp, synthetic construct
  source 1..75: mol_type = other DNA
catctttcgcacaaatatgtccgtactctacagcgccggtcgctgggctgagcagatggagaacgtcgacgacag

SEQ ID NO: 619676 - DNA, 75 bp, synthetic construct
  source 1..75: mol_type = other DNA
caccctgaacttcggcgatgtgccgtgtccggtctgggccatgtgggaacaggaggccattgatgacacccatgc

SEQ ID NO: 619677 - DNA, 75 bp, synthetic construct
  source 1..75: mol_type = other DNA
ccatccccgatgacagcagtattgagctcagggcagcggatggcaaggcagacagcagcgaggtatttcgcgagc

SEQ ID NO: 619678 - DNA, 75 bp, synthetic construct
  source 1..75: mol_type = other DNA
accatgcaaatcgtcctgacccccgtcgctgcgggtaaagtgaaagctacagcgcataaatgcgacctgtgcgca

SEQ ID NO: 619679 - DNA, 75 bp, synthetic construct
  source 1..75: mol_type = other DNA
accattaatatcctcaaagatcgcgatggttcgcggtggggaaacctgcctgatatctattgcacttacctgatc

SEQ ID NO: 619680 - DNA, 75 bp, synthetic construct
  source 1..75: mol_type = other DNA
gtcttatgcaccgggggcagcataccgtcccgacctggcccgctatcagggtacgcttcagccactggcacaaca

SEQ ID NO: 619681 - DNA, 75 bp, synthetic construct
  source 1..75: mol_type = other DNA
ccactgcgctaaccggtgatggtggcatggttttatttgaatactctccgtttggggttattggctcagtcacgc

SEQ ID NO: 619682 - DNA, 75 bp, synthetic construct
  source 1..75: mol_type = other DNA
aaagccgccgaggacatcatcaacggcgcctcatttgattacaacctgccgtgtatcgctgaaaaaagcctgatc

SEQ ID NO: 619683 - DNA, 75 bp, synthetic construct
  source 1..75: mol_type = other DNA
ccaggcctttttacgctttcaacagtgcccgcttaaaacccgtagcgccattatcagcgccattcgcgaagaatt

SEQ ID NO: 619684 - DNA, 75 bp, synthetic construct
  source 1..75: mol_type = other DNA
cagctggttgccgatccggaggccacggtccggcagctctaccggcatattattctgggccagaccttcggttcc

SEQ ID NO: 619685 - DNA, 75 bp, synthetic construct
  source 1..75: mol_type = other DNA
tttatgccggcggaggcctttgagacgctggtccgtgagctcaccataggatgtgctcaaggctcgctggcggag

SEQ ID NO: 619686 - DNA, 75 bp, synthetic construct
  source 1..75: mol_type = other DNA
ggatcaggttcacccggttgtacccgctgtgcgcgaaaccctgcaagctggtacgctgcgctttgaaatacgcat

SEQ ID NO: 619687 - DNA, 75 bp, synthetic construct
  source 1..75: mol_type = other DNA
gggcgcatcgtggctgatgttgaaagtcagtaccgttaccagacgacgaacccgaaaatcttcgccggtggcgat

SEQ ID NO: 619688 - DNA, 75 bp, synthetic construct
  source 1..75: mol_type = other DNA
ggtatggcgaatgatttggtatcgacgatttgccttgcgactcctgcacctgttgccgtgctgccagcgatgaac

SEQ ID NO: 619689 - DNA, 75 bp, synthetic construct
  source 1..75: mol_type = other DNA
ccagacagcggcagtcaggcttgtggtgatatcggcccagggcgaatgctcgatccgttaaccattgtggatatg

SEQ ID NO: 619690 - DNA, 75 bp, synthetic construct
  source 1..75: mol_type = other DNA
gtacaggctgaatttaatctggtggaagatttcgacgccaccgaccgcggtgaaggcggctttggtcactctggt

SEQ ID NO: 619691 - DNA, 75 bp, synthetic construct
  source 1..75: mol_type = other DNA
gaactgttggccgagtttgatattccgctggtgcatgatttacccggcgtcggtgaaaatcttcaggatcatctg

SEQ ID NO: 619692 - DNA, 75 bp, synthetic construct
  source 1..75: mol_type = other DNA
ctacctcgactgtctgccctactatcgcaaggccgagactcgcgatgtgggcgagaacgactaccacggcggtga

SEQ ID NO: 619693 - DNA, 75 bp, synthetic construct
  source 1..75: mol_type = other DNA
ggtaacaacgccgaactcggcgcgaagaaactggctgacagtggcctgaatattattgcagcaaaaggtctgacg

SEQ ID NO: 619694 - DNA, 75 bp, synthetic construct
  source 1..75: mol_type = other DNA
ctcatggtatgccgtggttggagtcgcacggtgtaacggtggataaatggggccgcatcgtagcggacgttgaaa

SEQ ID NO: 619695 - DNA, 75 bp, synthetic construct
  source 1..75: mol_type = other DNA
atgaaagcgggtttacctaatgaagatgcgccgggcgtttatgacgcgctgccattcctcatcgccaacactaaa

SEQ ID NO: 619696 - DNA, 75 bp, synthetic construct
  source 1..75: mol_type = other DNA
tgcgcaccgcacgtcaggagcatcaaccgtggcatgccagtaccgctgcacaagaaatgccggtaatgagtaaag

SEQ ID NO: 619697 - DNA, 75 bp, synthetic construct
  source 1..75: mol_type = other DNA
acgtatccgtaaaaaccttgatctgatctgcgcgaacgatgtttcccagccaactcaaggatttaacagcgacaa

SEQ ID NO: 619698 - DNA, 75 bp, synthetic construct
  source 1..75: mol_type = other DNA
tggtatcaggtccggtttcactaccgacgccaccgtttgttaaacgtgttgatgtgatgaccgcgctggaaatgg

SEQ ID NO: 619699 - DNA, 75 bp, synthetic construct
  source 1..75: mol_type = other DNA
atgcttgtgaaatcgcctgtgtcatggctcacaatgatgagacaacatgtcttgagccaacaccattttcatccc

SEQ ID NO: 619700 - DNA, 75 bp, synthetic construct
  source 1..75: mol_type = other DNA
tgattgctgttgttgacgccgatgatagttgggttacgtgtgaacaactgatgccaatgctgcccattgtgaagg

SEQ ID NO: 619701 - DNA, 75 bp, synthetic construct
  source 1..75: mol_type = other DNA
accgcacgttaacccaggaagatgtcgaagcactcgagaagcggatgcatgagcttgctgagaaaaactacgacg

SEQ ID NO: 619702 - DNA, 75 bp, synthetic construct
  source 1..75: mol_type = other DNA
gacattggtccaggtctggcgaaagcctgtatcgcagggcgcgttaatggcgaactggttgatgcttgcgatctg

SEQ ID NO: 619703 - DNA, 75 bp, synthetic construct
  source 1..75: mol_type = other DNA
aatgaatcgtgtacatgccggatttaccgcaacgaccggaatcatccgatctgcgttaccgactggatggatgaa

SEQ ID NO: 619704 - DNA, 75 bp, synthetic construct
  source 1..75: mol_type = other DNA
tcaatggcaactgtcggtcagtctgcgacgggttacggtctgaactatcaatatggtttgttccgccagtctttt

SEQ ID NO: 619705 - DNA, 75 bp, synthetic construct
  source 1..75: mol_type = other DNA
agctggacttctctttgccttctcgtctgagcgcttcttatgtaggcgaagacaacgagcgtaaggtaccggtaa

SEQ ID NO: 619706 - DNA, 75 bp, synthetic construct
  source 1..75: mol_type = other DNA
tgattcaccgcgcaattctggggtcgatggaacgtttcatcggtatcctgaccgaagaattcgctggtttcttcc

SEQ ID NO: 619707 - DNA, 75 bp, synthetic construct
  source 1..75: mol_type = other DNA
aatgaatcatgtacatgccggatttaccgcaacgaccgaaatcatccgatctgcgttaccgactggatggatgaa

SEQ ID NO: 619708 - DNA, 75 bp, synthetic construct
  source 1..75: mol_type = other DNA
ctgctcgccactcttcgccagacagcatttaaaggcaatgccagcgatgcgcaattcatcgcgctgctgatcgtc

SEQ ID NO: 619709 - DNA, 75 bp, synthetic construct
  source 1..75: mol_type = other DNA
gtcacggatgggaaagctgaaaactggtctgagacaaagctcgaagtaccatttgaagcaaacggcccggacacg

SEQ ID NO: 619710 - DNA, 75 bp, synthetic construct
  source 1..75: mol_type = other DNA
tggaagaagagatcgacccggcgctgggtaacggtggtctgggacgtctggcggcgtgcttcctcgactcaatgg

SEQ ID NO: 619711 - DNA, 75 bp, synthetic construct
  source 1..75: mol_type = other DNA
gacgccagtccggtgatctccgacctggtcctgcgccaccgtggaacgctggtgatggtgggtgatccacatcag

SEQ ID NO: 619712 - DNA, 75 bp, synthetic construct
  source 1..75: mol_type = other DNA
gtgctctttgcactcgccgccattccactgctcttctttcgtaaatatgaagcgatggaagagtgcatccaacac

SEQ ID NO: 619713 - DNA, 75 bp, synthetic construct
  source 1..75: mol_type = other DNA
aacacatccgtttgtggtgcatgagctgatgatgccggtcctgccggtggtgcgcgtagacaatgttgatgaagc

SEQ ID NO: 619714 - DNA, 75 bp, synthetic construct
  source 1..75: mol_type = other DNA
aaaagtggtaagaaagtgattggtgccggtgcgggtaacccgccgtgtatcgtcgatgaaacggcggatattgtg

SEQ ID NO: 619715 - DNA, 75 bp, synthetic construct
  source 1..75: mol_type = other DNA
tttggtgttattggctcggtcacgccgagtaccaatcctacggaaaccgtcattaataacagcatcagcatgttg

SEQ ID NO: 619716 - DNA, 75 bp, synthetic construct
  source 1..75: mol_type = other DNA
aaaaaacaaagcggcacttgataacacgccaggaattgaagatttaaccaccactgcactaaccggtgatggtgg

SEQ ID NO: 619717 - DNA, 75 bp, synthetic construct
  source 1..75: mol_type = other DNA
aaaccttcgcttataccaaccataccctgatgccagaagcactggagtgctgggatgagaagctgattaaagcgc

SEQ ID NO: 619718 - DNA, 75 bp, synthetic construct
  source 1..75: mol_type = other DNA
taacgaagcgctggatgtgcaggtgggcattggcggcaaagtgacgaaagatggacgctgggaaccggaatttac

SEQ ID NO: 619719 - DNA, 75 bp, synthetic construct
  source 1..75: mol_type = other DNA
ggataaatcactgaaaaaagagtgggctaacgatctcgatcaactgatcaatctggaaaaattcgctgatgatgc

SEQ ID NO: 619720 - DNA, 75 bp, synthetic construct
  source 1..75: mol_type = other DNA
cgctgtcttttccgccgttaccggaactgacttcatacggtgcaaccgggcctgtttccccgggaaacacggctt

SEQ ID NO: 619721 - DNA, 75 bp, synthetic construct
  source 1..75: mol_type = other DNA
gaggctgagggttttaccacctttactattgcaactcccactggcgaggggacaacatctgcacggagcttcgcc

SEQ ID NO: 619722 - DNA, 75 bp, synthetic construct
  source 1..75: mol_type = other DNA
gtaaagtgacgaaagacggacgctgggagccggaatttaccattaccggtcaagcgtgggatctccccgttgtcg

SEQ ID NO: 619723 - DNA, 75 bp, synthetic construct
  source 1..75: mol_type = other DNA
ctcaggcaatgcgtatgtcagtctggaataagccccgtgttataggttgtgcggagaattacccgcaacacattg

SEQ ID NO: 619724 - DNA, 75 bp, synthetic construct
  source 1..75: mol_type = other DNA
ttgaccaccctccgctggatacgctgattcttgccatgcctgtgtcatggaaagggacattgaaccgccccggga

SEQ ID NO: 619725 - DNA, 75 bp, synthetic construct
  source 1..75: mol_type = other DNA
ggcgagaatatgcggtaaaccccggataaaatgcggggactgtacgcaccgtcagttactccctgtatctgatct

SEQ ID NO: 619726 - DNA, 75 bp, synthetic construct
  source 1..75: mol_type = other DNA
cgtctacttcactgaaggacgcgcgtgttatcgtcggtgagatgcgcgcattgtacatgaagggagttaacccta

SEQ ID NO: 619727 - DNA, 75 bp, synthetic construct
  source 1..75: mol_type = other DNA
acaggcagacttattggtgagggatttgaccaccctccgctggatacgctgattcttgccatgcctgtgtcatgg

SEQ ID NO: 619728 - DNA, 75 bp, synthetic construct
  source 1..75: mol_type = other DNA
ccaaaagggggatttggtaatctcatagcgttacctctgcaaaaaagaccgcgtgaattggggggaagcgttttt

SEQ ID NO: 619729 - DNA, 75 bp, synthetic construct
  source 1..75: mol_type = other DNA
taatgactcaggcggcagaaatcggtgcggtaattatgcctcccgttccggcattttatcatcgcccacaatccc

SEQ ID NO: 619730 - DNA, 75 bp, synthetic construct
  source 1..75: mol_type = other DNA
aggaattatgggcaaatcattgtggatgagtgccatcatattggtgcggtttcattttctgcgattctgaaggaa

SEQ ID NO: 619731 - DNA, 75 bp, synthetic construct
  source 1..75: mol_type = other DNA
ctcaggcaatgcgtatgtcagtctggaataagccccgtgttacaggttgtgcggagaattacccgcaacatattg

SEQ ID NO: 619732 - DNA, 75 bp, synthetic construct
  source 1..75: mol_type = other DNA
ttcatccggcggcaaaactccccgtttacgccaccgccggatcggcggcgatggattttgttgctgttgaaataa

SEQ ID NO: 619733 - DNA, 75 bp, synthetic construct
  source 1..75: mol_type = other DNA
acgatgcgcgcgatattgccgccagcatctcttccggttctttccagacgctggggatggtgattttaccctgtt

SEQ ID NO: 619734 - DNA, 75 bp, synthetic construct
  source 1..75: mol_type = other DNA
gatggtttactgacccgtgctgcagatgtagtgctgaaagaacgccgcccgctggtgctctgcgtgcgtgaaaca

SEQ ID NO: 619735 - DNA, 75 bp, synthetic construct
  source 1..75: mol_type = other DNA
ggtggaacagaaagaagcctatgagatttatgcagataaaattatgtggtatgtgaaaaaaatgataaatggtca

SEQ ID NO: 619736 - DNA, 75 bp, synthetic construct
  source 1..75: mol_type = other DNA
tgctcagaatgtgggataaacgccagcggggttataaggcgatggggtacaggattgtggctgatggcgatgaat

SEQ ID NO: 619737 - DNA, 75 bp, synthetic construct
  source 1..75: mol_type = other DNA
tcttatgaccgattatttcctaatcaggatactatgccaaaagggggatttggtaatctcatagcgttacctctg

SEQ ID NO: 619738 - DNA, 75 bp, synthetic construct
  source 1..75: mol_type = other DNA
tggtctgcatcccattatttttatgtactgtggtgccatttcgccatacagcggtccgcccgaagggaaagccca

SEQ ID NO: 619739 - DNA, 75 bp, synthetic construct
  source 1..75: mol_type = other DNA
tgccactaaatcaaacggtttagccatcagcatgccgtactgggatgagcgagtggaagcaatggccgagaatta

SEQ ID NO: 619740 - DNA, 75 bp, synthetic construct
  source 1..75: mol_type = other DNA
tacagccatcacggtaaaatgatgccggacgactggcatgagcaacttagccgtttcgacgccatctattttggt

SEQ ID NO: 619741 - DNA, 75 bp, synthetic construct
  source 1..75: mol_type = other DNA
aagccgctgcagcaaaagcggccgcagaggcagatgatattttcggtgagctaagctctggtaagaatgcaccga

SEQ ID NO: 619742 - DNA, 75 bp, synthetic construct
  source 1..75: mol_type = other DNA
ggctggcaattcgtatgttgcgttgtgaactatgctatgttgccagcgattgtcccgatgaacaggacacatgga

SEQ ID NO: 619743 - DNA, 75 bp, synthetic construct
  source 1..75: mol_type = other DNA
cgaactctgctatgttgcaggtgattatcccgatgaactggaatcatggagtgaagccgggctaaacgccctggc

SEQ ID NO: 619744 - DNA, 75 bp, synthetic construct
  source 1..75: mol_type = other DNA
cgtatacaataaacacgactggatagaagctcagcgcaaagcgtatgagcttcacgctgataaattgttctggca

SEQ ID NO: 619745 - DNA, 75 bp, synthetic construct
  source 1..75: mol_type = other DNA
ccgggctggcatttaatccggcgaccccaatcgacgcctggcaatatctggcgtctgagctggacggggtgatgg

SEQ ID NO: 619746 - DNA, 75 bp, synthetic construct
  source 1..75: mol_type = other DNA
cgaactctgctatgttgcaggtgattgtcccgatgagctggataactggagtgaagccggactaaacgccctggc

SEQ ID NO: 619747 - DNA, 75 bp, synthetic construct
  source 1..75: mol_type = other DNA
gcgtgtgctgaatgcagccggggaattaggctgggaagtgcactttcttgatgatggtgctatctgccttgagga

SEQ ID NO: 619748 - DNA, 75 bp, synthetic construct
  source 1..75: mol_type = other DNA
attatttcctaaccaggatactatgccaaaagggggatttggtaatcttatcgcgttacctctgcaaaaaagacc

SEQ ID NO: 619749 - DNA, 75 bp, synthetic construct
  source 1..75: mol_type = other DNA
ttgactacctgcgcgataacatggcgtttagccctgaagagcgtgtacagcgtaaactgcattatgcgctggtgg

SEQ ID NO: 619750 - DNA, 75 bp, synthetic construct
  source 1..75: mol_type = other DNA
cagtcatttgattgcggaacacatcatcgagctggcgcacagcctggggttaaaaacgatcgctgaaggcgtcga

SEQ ID NO: 619751 - DNA, 75 bp, synthetic construct
  source 1..75: mol_type = other DNA
acctggcaacacatgcagatcgctatgtttctattaacctgtcggcctccgattttcatacgtcacggttgatag

SEQ ID NO: 619752 - DNA, 75 bp, synthetic construct
  source 1..75: mol_type = other DNA
tcaaagcgaccattgatgcctacattccgccacagtcgctggaagaaatgtgggatattccggggctgcaggaac

SEQ ID NO: 619753 - DNA, 75 bp, synthetic construct
  source 1..75: mol_type = other DNA
ggatgtcagcgatgtgagcgaaaccatcaacagcattcgtgaagatgtgttcaaagcgaccattgatgcctacat

SEQ ID NO: 619754 - DNA, 75 bp, synthetic construct
  source 1..75: mol_type = other DNA
cgttgttccgaccaaccgtccaatgattcgtaaagatctgccggacctggtctacatgactgaagcggaaaaaat

SEQ ID NO: 619755 - DNA, 75 bp, synthetic construct
  source 1..75: mol_type = other DNA
aaactattcaatacatctgttcccggtttgtattatacaatattaatttcaaatatgtggtcagcttacggtact

SEQ ID NO: 619756 - DNA, 75 bp, synthetic construct
  source 1..75: mol_type = other DNA
atgattactgtgccagttgaggccctgggttttgaactggttggcatcgaatttattcgcggtcgcacatccaca

SEQ ID NO: 619757 - DNA, 75 bp, synthetic construct
  source 1..75: mol_type = other DNA
cgtaaatggcagggcgttatcaaagcggtagacggtgaaatgatcacagttaccgtcgaaggtaaagatgaagtg

SEQ ID NO: 619758 - DNA, 75 bp, synthetic construct
  source 1..75: mol_type = other DNA
ggttggtactgaaaacgggcaactccttggtaatactctcacaggtaatgacgcagcaaaaggagtcggtgtact

SEQ ID NO: 619759 - DNA, 75 bp, synthetic construct
  source 1..75: mol_type = other DNA
cggatcaagatacaggtataacataccctctccatttccaggccacgctacaacaggatggaactataccaatag

SEQ ID NO: 619760 - DNA, 75 bp, synthetic construct
  source 1..75: mol_type = other DNA
gattttgacctactaaatattaaattaagtaatcccacttgttttacagctatgttaagtggaacatctgttact

SEQ ID NO: 619761 - DNA, 75 bp, synthetic construct
  source 1..75: mol_type = other DNA
aaatgtataagcgagtgaacaaaattattccgcacttgatccgtcaggaaaaagaagactccgaaaccttccagg

SEQ ID NO: 619762 - DNA, 75 bp, synthetic construct
  source 1..75: mol_type = other DNA
gaagttcaggcccgcatcgatagcaacatcactaaatctctttgtataagtattgtaaccaaagacgacgcagag

SEQ ID NO: 619763 - DNA, 75 bp, synthetic construct
  source 1..75: mol_type = other DNA
taagttactttttgaatacaaccaccttatcgcttgcaagtctacggaatcattcacctttgatacgaaaattac

SEQ ID NO: 619764 - DNA, 75 bp, synthetic construct
  source 1..75: mol_type = other DNA
cagcaactgccatctccacttggagtggttacgtctaccaagggaaaattgccctttatcactcactcaaactga

SEQ ID NO: 619765 - DNA, 75 bp, synthetic construct
  source 1..75: mol_type = other DNA
gtcgcgttttatcaaacgaactctacgcaagaatgtgctggagtacatcaagtatacagaacgtaaagcgatcac

SEQ ID NO: 619766 - DNA, 75 bp, synthetic construct
  source 1..75: mol_type = other DNA
caacgaaagtctcggtggctgagcagctgaaagggcaatcagggtggttaacactaaatttgcttactgttgatg

SEQ ID NO: 619767 - DNA, 75 bp, synthetic construct
  source 1..75: mol_type = other DNA
gtgagccaagaagatgatgataagtatccagctagcgccgtatcctcatggagcggcttcgtttatcaagggaaa

SEQ ID NO: 619768 - DNA, 75 bp, synthetic construct
  source 1..75: mol_type = other DNA
tccgccacagtcactggaagaaatgtgggatattccggggctgcaggaacgtctgaagaacgatttcgacctcga

SEQ ID NO: 619769 - DNA, 75 bp, synthetic construct
  source 1..75: mol_type = other DNA
caggaatacaaacgtgaatccttcgcaatgtttgcggcgatgctggaatcattgaaatatgaagtggttagcacg

SEQ ID NO: 619770 - DNA, 75 bp, synthetic construct
  source 1..75: mol_type = other DNA
ccgtcgtcgttccgactaaccgtccgatgattcgtaaagatctgccggatctggtctacatgaccgaagcggaaa

SEQ ID NO: 619771 - DNA, 75 bp, synthetic construct
  source 1..75: mol_type = other DNA
gtcttgaaagaagccgaaaaatgcctggttgcctggaaagcatttgtggacgtatgccgcaatgctggtgggaaa

SEQ ID NO: 619772 - DNA, 75 bp, synthetic construct
  source 1..75: mol_type = other DNA
agacgcgcggaaaagatacggtaaaaccatagaagaacgttacgggttcactttctcccaaacacagcacgccgc

SEQ ID NO: 619773 - DNA, 75 bp, synthetic construct
  source 1..75: mol_type = other DNA
catcgagcacccgtgggtgaccaaagcgattgccaacgctcagcgtaaagttgaaagccgtaacttcgatattcg

SEQ ID NO: 619774 - DNA, 75 bp, synthetic construct
  source 1..75: mol_type = other DNA
tgtcggtggggggcgcgctgaacagccgtggcatgaacggcgaagggcagccgtggcgggtggcgatccaaaaac

SEQ ID NO: 619775 - DNA, 75 bp, synthetic construct
  source 1..75: mol_type = other DNA
cattgctggctgccgcgctcttgtttgttggttgcgatcaaaaaccacaacccgccaaacccaacgctcctgaag

SEQ ID NO: 619776 - DNA, 75 bp, synthetic construct
  source 1..75: mol_type = other DNA
cattgctggctgccgcgctcctttttgttggttgcgatcaacagccacaacccgccgccccccaggctactgaag

SEQ ID NO: 619777 - DNA, 75 bp, synthetic construct
  source 1..75: mol_type = other DNA
aattccgagccaggaacagatcgatgcgatgaaagccaaaaccggcttacagcacctgacggtcattaatcagtc

SEQ ID NO: 619778 - DNA, 75 bp, synthetic construct
  source 1..75: mol_type = other DNA
caggaaggtatttcccgctatctggtgtcggttggcggcgcactgaacagccggggcatgaatggtgaagggcag

SEQ ID NO: 619779 - DNA, 75 bp, synthetic construct
  source 1..75: mol_type = other DNA
tgacggtgcgatggatattaccgtcgggccgctggtgaatttgtggggctttggcccggagcaacagccggtaca

SEQ ID NO: 619780 - DNA, 75 bp, synthetic construct
  source 1..75: mol_type = other DNA
ccgacgccagaaccggtcagggcaatacgccggtcattttgatcgatggacaatccgatctctatcttgccggtc

SEQ ID NO: 619781 - DNA, 75 bp, synthetic construct
  source 1..75: mol_type = other DNA
acggcacggttaacaacaaaggagatattgttgtttccgatactggatcgattggcgtgctcatcaacggtgagg

SEQ ID NO: 619782 - DNA, 75 bp, synthetic construct
  source 1..75: mol_type = other DNA
aagacatggagtcacttgagtttatctctgtatggatagagctctatacgtgtaattcaaagcaacagcagtttg

SEQ ID NO: 619783 - DNA, 75 bp, synthetic construct
  source 1..75: mol_type = other DNA
aagtttatcgccgtggccggtaagtgaagcgatggccgatatcgtcaccacctcgctgcgcattggcgcaaggac

SEQ ID NO: 619784 - DNA, 75 bp, synthetic construct
  source 1..75: mol_type = other DNA
ccgtggtatgaacggtgaaggccagccgtggcgggtagcgattcaaaaaccaaccgataaagaaaacgcggttca

SEQ ID NO: 619785 - DNA, 75 bp, synthetic construct
  source 1..75: mol_type = other DNA
gggtatggcggcggcaatgggcggcgaggccgtcaataagggaaccatcagtttatatagtttgtggatcgatcc

SEQ ID NO: 619786 - DNA, 75 bp, synthetic construct
  source 1..75: mol_type = other DNA
ggatttatatgtcgatctctccaccgtcggcgaaggctatgcggccgatcatttggcacgcttgatggagcagga

SEQ ID NO: 619787 - DNA, 75 bp, synthetic construct
  source 1..75: mol_type = other DNA
acgacgatgatgggctcatccatatcactaaagaggccggtgtcgttgttgatggcacaaccggaactgcgattg

SEQ ID NO: 619788 - DNA, 75 bp, synthetic construct
  source 1..75: mol_type = other DNA
tgaccggttccgggttgattaagcagggcgacagcgtgaacgtggaaggggtgaacggcaacaacggtaataata

SEQ ID NO: 619789 - DNA, 75 bp, synthetic construct
  source 1..75: mol_type = other DNA
atgcgaaatgaaaaaaatcgcttaaaacgcgatacagcgcgttttaaggggtattcacaaaacacacgttgcctt

SEQ ID NO: 619790 - DNA, 75 bp, synthetic construct
  source 1..75: mol_type = other DNA
accatcgacctgagcgaaagccagacgatgagtctggagtacggtatcgctcgtctcgatggtgatggtgcgcag

SEQ ID NO: 619791 - DNA, 75 bp, synthetic construct
  source 1..75: mol_type = other DNA
gtgtgattactgtctacaacgccggtgcggggatggcggcgtatgggaatactaatacggtcattaaccagggaa

SEQ ID NO: 619792 - DNA, 75 bp, synthetic construct
  source 1..75: mol_type = other DNA
ccaccatcaaacaggaaggcgacttatacgtaagcggtggtgcgcacggtattgacgttgacggcaatgatacgt

SEQ ID NO: 619793 - DNA, 75 bp, synthetic construct
  source 1..75: mol_type = other DNA
aacatcactattctggtccagatagaaagtcagcagggcgtagataacgtcgatgccattgccgctaccgaaggc

SEQ ID NO: 619794 - DNA, 75 bp, synthetic construct
  source 1..75: mol_type = other DNA
gagtaccggtgcgaatttgggggctttttcccggtgcaggtccgcttttctccggcccattgccattttgatgtc

SEQ ID NO: 619795 - DNA, 75 bp, synthetic construct
  source 1..75: mol_type = other DNA
atgatcaccaaagagggcgatagttttaaaacctggatgtcgccgcagtttaaaagtttccaggtgagcgaaaaa

SEQ ID NO: 619796 - DNA, 75 bp, synthetic construct
  source 1..75: mol_type = other DNA
gtgattcaggtgccaatcgatctctataccaaaacggaagatggtaaacagtggctggcaacgcacgttgatggt

SEQ ID NO: 619797 - DNA, 75 bp, synthetic construct
  source 1..75: mol_type = other DNA
cagtggcggattacttcgtccagtcgaataagaacatcactattctggtgcaaattgaaagccagcaaggcgtag

SEQ ID NO: 619798 - DNA, 75 bp, synthetic construct
  source 1..75: mol_type = other DNA
catattttcaaccgcgccagcgcttacggtaaacccagtggcatcctcgcgccagttgaagccgatgcacgccgt

SEQ ID NO: 619799 - DNA, 75 bp, synthetic construct
  source 1..75: mol_type = other DNA
tcgcctctatgtagatagaaaaatggagctttgctttacgactgacagcaccgatcgtggaaaactatgggaaat

SEQ ID NO: 619800 - DNA, 75 bp, synthetic construct
  source 1..75: mol_type = other DNA
atgactggaccgacgatgaaatgaaccgccgccggcttgaagccatcgttgctgtgaagcacaccctgatccgcc

SEQ ID NO: 619801 - DNA, 75 bp, synthetic construct
  source 1..75: mol_type = other DNA
acccgggtgaaacggggtgtcacggggatgtatgacacatggcttatccttggcggtcagcggtgggaggcggat

SEQ ID NO: 619802 - DNA, 75 bp, synthetic construct
  source 1..75: mol_type = other DNA
gggtagcgagcggctgggagatgcggcgataaggcattcagttcgggtatgtgtggaaggggcgctggagcaaac

SEQ ID NO: 619803 - DNA, 75 bp, synthetic construct
  source 1..75: mol_type = other DNA
atgagcgagattaattatcaggaagggtatgaaacggcggggcaagcaaaaccagtggcatggcgatatcgctac

SEQ ID NO: 619804 - DNA, 75 bp, synthetic construct
  source 1..75: mol_type = other DNA
ttctggctgcgtctgccggggcaggatcgccggacgcttgacgcacacttttccccgatgggctttgaggatgat

SEQ ID NO: 619805 - DNA, 75 bp, synthetic construct
  source 1..75: mol_type = other DNA
ccgatactgccttcagtggttaccagttgctgctggagtatttcagcttccgtccgaagtttatgtttgttgaac

SEQ ID NO: 619806 - DNA, 75 bp, synthetic construct
  source 1..75: mol_type = other DNA
cctggctgacgctggcattgacactaccggaagttgacgaagcgtggctggaggcatttagtgatagcctgtttg

SEQ ID NO: 619807 - DNA, 75 bp, synthetic construct
  source 1..75: mol_type = other DNA
tacatcaaacctggtatgagcgtcgaagcaatccagggcattattgccagcatgaaaggcgactatgaagatcgc

SEQ ID NO: 619808 - DNA, 75 bp, synthetic construct
  source 1..75: mol_type = other DNA
ccgtcgctcttcgagccagtccacggttccgcgccggatatctacgggaaaaacattgctaaccctatcgccacg

SEQ ID NO: 619809 - DNA, 75 bp, synthetic construct
  source 1..75: mol_type = other DNA
ggccacaggaacagtgccacatcattgatcaactgtatccttacagtgccgtaaacatcattggtggtgtggtca

SEQ ID NO: 619810 - DNA, 75 bp, synthetic construct
  source 1..75: mol_type = other DNA
ctatcaagccgcattcgcgtgggacacgtccacggcgggagcgaattgaggtttgggtcagcattgatgagaaaa

SEQ ID NO: 619811 - DNA, 75 bp, synthetic construct
  source 1..75: mol_type = other DNA
ccgagcggcccaggcggcaggtgccgccgatcaaggtatgggtgacggatagcgagaaggcagagatagccgacc

SEQ ID NO: 619812 - DNA, 75 bp, synthetic construct
  source 1..75: mol_type = other DNA
atttgtcgctgatccaggatgatgaattcgcgggcaatatccgtcgcctgatggcagagcagcatcaggggctgg

SEQ ID NO: 619813 - DNA, 75 bp, synthetic construct
  source 1..75: mol_type = other DNA
gtgcctttctgaaaggcgatgcggggaaatatcaggccattttgagctgggttgaggagcagggcggcattcagg

SEQ ID NO: 619814 - DNA, 75 bp, synthetic construct
  source 1..75: mol_type = other DNA
cagcgactgatagaggaaggaaagatggttagcaaaagcaaaggcgcattgccgccgcatgctgcaggcattgca

SEQ ID NO: 619815 - DNA, 75 bp, synthetic construct
  source 1..75: mol_type = other DNA
cggatcgctggcgatgattgtcggcggtcactcgcaagatccagtctgtatggcagcggaaaataaaaagcaggt

SEQ ID NO: 619816 - DNA, 75 bp, synthetic construct
  source 1..75: mol_type = other DNA
ttacaaaacgagaagtcgcaaatcttcttcgcctcagtacaacaagtattgacacaatggttaaggctggtgagt

SEQ ID NO: 619817 - DNA, 75 bp, synthetic construct
  source 1..75: mol_type = other DNA
gcgccgtgttggctggtatgaagatgaagtgctggcctggctgaaagagcgcgaggaagaagcgcgcggaacggc

SEQ ID NO: 619818 - DNA, 75 bp, synthetic construct
  source 1..75: mol_type = other DNA
gtcggcgctcggcacaaacgcggtgtccgatctcgggcaaaaactcggcgtagatacccgtgctgcttccagctt

SEQ ID NO: 619819 - DNA, 75 bp, synthetic construct
  source 1..75: mol_type = other DNA
atgatgcaatggcgatcggtaatcatgaatttgataacccgctcaccgtattacgccagcaggaaaagtgggcta

SEQ ID NO: 619820 - DNA, 75 bp, synthetic construct
  source 1..75: mol_type = other DNA
acaggtcgattacgtgccgggtacgccatgcaaaccagatcaacaaaacggcatctggattgtgcaggcgcatga

SEQ ID NO: 619821 - DNA, 75 bp, synthetic construct
  source 1..75: mol_type = other DNA
aactgggcgcacctcgcataccctgattctgacccgcgcctcggcgatcccggtactgagcggcctgccgctgga

SEQ ID NO: 619822 - DNA, 75 bp, synthetic construct
  source 1..75: mol_type = other DNA
aaaccggatcaacaaaacggcatctggattgtacaggcgcacgaatggggcaagtatgttggccgggccgatttt

SEQ ID NO: 619823 - DNA, 75 bp, synthetic construct
  source 1..75: mol_type = other DNA
tttcgcggcatgaatctggtgggttacgatgcgatggcaatcggtaatcatgaatttgataacccgctcaccgta

SEQ ID NO: 619824 - DNA, 75 bp, synthetic construct
  source 1..75: mol_type = other DNA
cgcgcgctgcctgccggatcgctggcgatgatcgtcggtggtcactcgcaagatccggtctgtatggcggcagaa

SEQ ID NO: 619825 - DNA, 75 bp, synthetic construct
  source 1..75: mol_type = other DNA
ctggcgttcccgctacagggtaaacgctataactgggcctatgagaccgagccggaaccgtttatgaacaaccgt

SEQ ID NO: 619826 - DNA, 75 bp, synthetic construct
  source 1..75: mol_type = other DNA
acttcttctccaagcgtcatgacgatgtactgaaaaagatccgcacgcttgaatgctccgcatcattcactgccc

SEQ ID NO: 619827 - DNA, 75 bp, synthetic construct
  source 1..75: mol_type = other DNA
ctgcacttttggaacgttacactgtctctgcaccttataaagcgggtgccgggcgtggaaacccgaaattcaata

SEQ ID NO: 619828 - DNA, 75 bp, synthetic construct
  source 1..75: mol_type = other DNA
gtgtaggagatgctgtttttggcgctgcacttgttgattccagacttaatggttctgacaaggaggcgcccccat

SEQ ID NO: 619829 - DNA, 75 bp, synthetic construct
  source 1..75: mol_type = other DNA
gtcattaaccgccaggaatacgaagatgcggaactgctgatggcattgcgtgaagagctaaatcacgacggcaac

SEQ ID NO: 619830 - DNA, 75 bp, synthetic construct
  source 1..75: mol_type = other DNA
tgcgcccgaataacagattgtcagatatgcaggcaacaatggaacaaacccaggcctttgaaaaccgtgtgcttg

SEQ ID NO: 619831 - DNA, 75 bp, synthetic construct
  source 1..75: mol_type = other DNA
atgatccgctacctgaatattgattctgccattccgggacgttacactgttcaggcaccttataaagcgggtgcc

SEQ ID NO: 619832 - DNA, 75 bp, synthetic construct
  source 1..75: mol_type = other DNA
ttcgtaccgccgacaataagctttataccgggattaccacggatgtcgaacgtcgctatcagcagcaccagagcg

SEQ ID NO: 619833 - DNA, 75 bp, synthetic construct
  source 1..75: mol_type = other DNA
gaatgcctggttgcggaaggcgctgggtttgcagagttattaagtagcctgcaaaccccggaggttaaaagcgat

SEQ ID NO: 619834 - DNA, 75 bp, synthetic construct
  source 1..75: mol_type = other DNA
atgacaccctggtttctttacttgatccgtaccgccgataataagctttataccgggatcaccacggatgtcgaa

SEQ ID NO: 619835 - DNA, 75 bp, synthetic construct
  source 1..75: mol_type = other DNA
ctcaccctgaaatcacgattatcaatggtcgcgttgtcaccacatctcttgcagtagctaattactttactaaac

SEQ ID NO: 619836 - DNA, 75 bp, synthetic construct
  source 1..75: mol_type = other DNA
gttcaaagaggcatacatcaatgcctttaaccagatggagaaacagctttcaaagcccgctgtaccgagcgacgt

SEQ ID NO: 619837 - DNA, 75 bp, synthetic construct
  source 1..75: mol_type = other DNA
taagcaactgaccaaacggcaaaaagagcgtctggtagcggaaggcgcagggggggggggggggggggggggggg

SEQ ID NO: 619838 - DNA, 75 bp, synthetic construct
  source 1..75: mol_type = other DNA
gtaattagtcgccatgaatacgaagatgcggaactgttgatggcgctgcgggaagagctgaaccacgacggcaac

SEQ ID NO: 619839 - DNA, 75 bp, synthetic construct
  source 1..75: mol_type = other DNA
ggatacccttcgatacaacacccgcatggggctgggaatgagcctctcaggattgtataacattggtcatgatgt

SEQ ID NO: 619840 - DNA, 75 bp, synthetic construct
  source 1..75: mol_type = other DNA
cctaaaatgatgagtcaggagtttcataatgcagggatacaccttgccgctaatataaaaccatgtttattgcag

SEQ ID NO: 619841 - DNA, 75 bp, synthetic construct
  source 1..75: mol_type = other DNA
tcatgatgtcggtggtttttctggtgataagcccgatccagaattatttgttcgttgggttcagaacggtgttat

SEQ ID NO: 619842 - DNA, 75 bp, synthetic construct
  source 1..75: mol_type = other DNA
ctcgcaccaaagaagaaaccgacatcacgagggtaattaacgacattgactccagcgtcattggcgtgattgtcg

SEQ ID NO: 619843 - DNA, 75 bp, synthetic construct
  source 1..75: mol_type = other DNA
atggggaaaacagataagctactggcaaagtttttaaacagtaaaaaaacgtttgaatgggatgaactggtcgtt

SEQ ID NO: 619844 - DNA, 75 bp, synthetic construct
  source 1..75: mol_type = other DNA
atacctcaattaacggcaagcgctatgtgttcaactggaattacgacaaagtgccgcagccgaaagtgatgagcc

SEQ ID NO: 619845 - DNA, 75 bp, synthetic construct
  source 1..75: mol_type = other DNA
ctgagtgaagtcgccaaacgcttaggaccagacgtttatcaaacctttactgaaggtcgcagtcagcatgaatgg

SEQ ID NO: 619846 - DNA, 75 bp, synthetic construct
  source 1..75: mol_type = other DNA
ccgacctgatgccaacagagcaagaagaccttatctctcatgaatctgcagggaatatgggctatgtgatcctcg

SEQ ID NO: 619847 - DNA, 75 bp, synthetic construct
  source 1..75: mol_type = other DNA
gccgcagtgggcttcgcaaatcaccggcatccctgtagaccgtatcatcaaactggcgcgtgagatcggcacagc

SEQ ID NO: 619848 - DNA, 75 bp, synthetic construct
  source 1..75: mol_type = other DNA
gattctttccagctatcttctggctatacttctatcaatggtaaacgctacgtattcaactggaattacgacaaa

SEQ ID NO: 619849 - DNA, 75 bp, synthetic construct
  source 1..75: mol_type = other DNA
aagtcagtgaagtttgctggctgacaccggaagaaatcaccgcacgctgcgatgagttcactccagactcgctga

SEQ ID NO: 619850 - DNA, 75 bp, synthetic construct
  source 1..75: mol_type = other DNA
atggaacagcgtcgtttggcaagtactgaatgggtggatattgtcaatgaagagaacgaagtcattgcacaagcc

SEQ ID NO: 619851 - DNA, 75 bp, synthetic construct
  source 1..75: mol_type = other DNA
atggaaagcactgccttacagcaggcctttgacacctgtcagaataacaaagcagcatggctgcaacgcaaaaat

SEQ ID NO: 619852 - DNA, 75 bp, synthetic construct
  source 1..75: mol_type = other DNA
gtaatgggcacagcgaagatgcaggtcgaagaggccagccgctccggtaaaatcgtctttgaaatagaagatgtt

SEQ ID NO: 619853 - DNA, 75 bp, synthetic construct
  source 1..75: mol_type = other DNA
ctaaccacctggatatcgaaaccatcgactggctggaagggttcctcaaaaccttcaatgggacgattattttca

SEQ ID NO: 619854 - DNA, 75 bp, synthetic construct
  source 1..75: mol_type = other DNA
gataacaccgttacagaatgctggatcttcgaaggcggcggtaaaattggtcgttatgtcggcggttatcatgat

SEQ ID NO: 619855 - DNA, 75 bp, synthetic construct
  source 1..75: mol_type = other DNA
cgatgctggcgatcgttttgatggatcacctgttacggcaacgggcgcaaaatgccgatgtgaagactgatattc

SEQ ID NO: 619856 - DNA, 75 bp, synthetic construct
  source 1..75: mol_type = other DNA
gcttctcgataacgcagaactgcatatcgaagataacgaacgtgtttgtctggtggggcgtaacggtgcaggcaa

SEQ ID NO: 619857 - DNA, 75 bp, synthetic construct
  source 1..75: mol_type = other DNA
gcaacttcagccagacagcgggcgcatccatgtcgggacgaaactggaggtggcttatttcgatcagcatcgtgc

SEQ ID NO: 619858 - DNA, 75 bp, synthetic construct
  source 1..75: mol_type = other DNA
gacgatgacgggctgcatgtggtgatcaacggcgaaacgcaggtattcgcggtggacaatgtggtgatctgcgca

SEQ ID NO: 619859 - DNA, 75 bp, synthetic construct
  source 1..75: mol_type = other DNA
gctcaaacttaatcacactgtgacagcggatcaattacagatgttcgatgaaacgatcctcgccagcgggatcgt

SEQ ID NO: 619860 - DNA, 75 bp, synthetic construct
  source 1..75: mol_type = other DNA
caatggcgcgaccatttctcgccgatgcggaactgttatcaaaagcgcgatcggggcgagcggatgagatcaaca

SEQ ID NO: 619861 - DNA, 75 bp, synthetic construct
  source 1..75: mol_type = other DNA
caacgaactggcgaaagtacaggaattgctggatcaccataacctgtggcaactggaaaaccgcatcaatgaagt

SEQ ID NO: 619862 - DNA, 75 bp, synthetic construct
  source 1..75: mol_type = other DNA
ggctggcatgaagcgcggattccgaccatcgccacgcccgtgccgcgcggcgcatttagctgggtcacgcgcaaa

SEQ ID NO: 619863 - DNA, 75 bp, synthetic construct
  source 1..75: mol_type = other DNA
tggtgaccaccaaccggattaacgatccgcaggttgccgacgacattctctcgcgcggtgatgccgatatggtat

SEQ ID NO: 619864 - DNA, 75 bp, synthetic construct
  source 1..75: mol_type = other DNA
acttggcgagccggtctttgatcgcctggatgccgacatcgcccatgcgctgatgagcatcaacgcggtgaaagg

SEQ ID NO: 619865 - DNA, 75 bp, synthetic construct
  source 1..75: mol_type = other DNA
ggctgaatgattttatgcagcagcacggcacagcactggcggcggcactggcaccggagctgatgggctacagtg

SEQ ID NO: 619866 - DNA, 75 bp, synthetic construct
  source 1..75: mol_type = other DNA
ccggggcgtacaattaaccgcgttggcgaagaagtagagatgatcaccaaaggtcgccatgatccttgtgtcggg

SEQ ID NO: 619867 - DNA, 75 bp, synthetic construct
  source 1..75: mol_type = other DNA
gcgtggcagcaggggcgattgctaaaaaatatctcgccgagaaatttggtatcgaaattcgcggctgcctgagtc

SEQ ID NO: 619868 - DNA, 75 bp, synthetic construct
  source 1..75: mol_type = other DNA
ttgcgaagggtgaaaaaattaattattccgtacaggatagcgacattttaacggccatcggattcaggcctgacg

SEQ ID NO: 619869 - DNA, 75 bp, synthetic construct
  source 1..75: mol_type = other DNA
ttacgcaatattatcgaagtcagaaaatggcaggtgaatcaggccgccggtcgttatgttcgttcgcatgaagcc

SEQ ID NO: 619870 - DNA, 75 bp, synthetic construct
  source 1..75: mol_type = other DNA
atgacagccgtgaaaaattcacccctgcgcagaacatgattttttcgcgtaaaagtgcgcaactggcatcacgtc

SEQ ID NO: 619871 - DNA, 75 bp, synthetic construct
  source 1..75: mol_type = other DNA
cctttgacacctgtcagaataacaaagcagcatggctgcaacgcaaaaatgagctggcagcggccaaacaggaat

SEQ ID NO: 619872 - DNA, 75 bp, synthetic construct
  source 1..75: mol_type = other DNA
tctctccggcgtttttgaaggcgtcaccaccggcaccagcattggcttgttgatcgaaaacaccgatcagcgttc

SEQ ID NO: 619873 - DNA, 75 bp, synthetic construct
  source 1..75: mol_type = other DNA
attaaagacgttttccgcccaggccatgctgattacacctacgaacaaaaatacggtctgcgcgattatcgcggc

SEQ ID NO: 619874 - DNA, 75 bp, synthetic construct
  source 1..75: mol_type = other DNA
atcgaaattcgcggctgcctgacccagatgggcgacattccgctggaaatcaaagactggtcgcaggtcgagcaa

SEQ ID NO: 619875 - DNA, 75 bp, synthetic construct
  source 1..75: mol_type = other DNA
ctggcacccgagctgatgggaattaagaaccagcccacgatgataaaaaaccgtgcgcttgaccgttcagtagca

SEQ ID NO: 619876 - DNA, 75 bp, synthetic construct
  source 1..75: mol_type = other DNA
gtgcatctggcgaatataatgcgcaaaatccgcgtgatgccagacgtgattaaagtcacccgaaaccgaaattaa

SEQ ID NO: 619877 - DNA, 75 bp, synthetic construct
  source 1..75: mol_type = other DNA
ttaacgcgctgatgaccgcgacatactgggaaattggccgacgaattgtcgaatttgaacaaggtggcgaggcca

SEQ ID NO: 619878 - DNA, 75 bp, synthetic construct
  source 1..75: mol_type = other DNA
ttgcccaacgttttacgccacgccaggagtggaaatttggcctctctcggcccggtgattatttccgccgtcgtg

SEQ ID NO: 619879 - DNA, 75 bp, synthetic construct
  source 1..75: mol_type = other DNA
gcccgggatcggattgatatgatcaccggacgctacaggcaaaacatttttggtcagtccggaggtgaatactgg

SEQ ID NO: 619880 - DNA, 75 bp, synthetic construct
  source 1..75: mol_type = other DNA
atgacaaatcagccatgctgcaacaacacgctcctaccgagacgcatattcttccgcagcaggcgatacgcgatc

SEQ ID NO: 619881 - DNA, 75 bp, synthetic construct
  source 1..75: mol_type = other DNA
tgcgtgttgaagaggacgattacgacagccgtttcctgcgctgtgtggagctggtgcgggagatgatgggcgagc

SEQ ID NO: 619882 - DNA, 75 bp, synthetic construct
  source 1..75: mol_type = other DNA
tggcgatcctcggcggcgaatcgagcggtaaatccaccctggtaaacaaacttgccaatatcttcaacactacca

SEQ ID NO: 619883 - DNA, 75 bp, synthetic construct
  source 1..75: mol_type = other DNA
ttgatttaccttcattgcacatttggctgcatctaccccaggcgcagcgcgacagccaggtagaaacctggattg

SEQ ID NO: 619884 - DNA, 75 bp, synthetic construct
  source 1..75: mol_type = other DNA
gtcatatgcgaatttgcgaaccttttggcccggagcaacggcaaggattatggctctatcacgttatcgaaccgg

SEQ ID NO: 619885 - DNA, 75 bp, synthetic construct
  source 1..75: mol_type = other DNA
aaaaattggatggctcaacggtattgacctttaaagaacagggaactcgtgcccgctttcctgcccatcttatct

SEQ ID NO: 619886 - DNA, 75 bp, synthetic construct
  source 1..75: mol_type = other DNA
atggatcaacatcccctgattattaaaggctacaagagcatcgcggagctttcccttgtggaaagcccaccattt

SEQ ID NO: 619887 - DNA, 75 bp, synthetic construct
  source 1..75: mol_type = other DNA
atccactaaatgaaaaaatgcgtacatggctgcgcattgagtttttaattcaacaactcaccgtaaatttgcccg

SEQ ID NO: 619888 - DNA, 75 bp, synthetic construct
  source 1..75: mol_type = other DNA
acaaggtgaaattgatgcgatcagaaaacaagccagccagcagcttgctggcgtgcaggctgatgccgatcgtgc

SEQ ID NO: 619889 - DNA, 75 bp, synthetic construct
  source 1..75: mol_type = other DNA
ctgaccgcgcgccagacgcagagggatatgtgtgggtgaaactggaaattggtgaaatttcagttgaggcatctg

SEQ ID NO: 619890 - DNA, 75 bp, synthetic construct
  source 1..75: mol_type = other DNA
gtgccagagcgtgggtttttactgccagcggagacaccggcaccacgttactggaactgatgaaggacattccgc

SEQ ID NO: 619891 - DNA, 75 bp, synthetic construct
  source 1..75: mol_type = other DNA
gccgcagcgctggctattgaaaagatgcagatccctgcgaaaaccgccgctgcgttacctgcgcccataccgctg

SEQ ID NO: 619892 - DNA, 75 bp, synthetic construct
  source 1..75: mol_type = other DNA
aaagttctaaaccggtcatcaatgccgagcacgatggtcgccactggcgacgaataccagaaccaatgcgactgt

SEQ ID NO: 619893 - DNA, 75 bp, synthetic construct
  source 1..75: mol_type = other DNA
attgcctactggcgacattttctcaaaccgaatggtctggtttgaagatgatcaaatcagtgccgagctggtgca

SEQ ID NO: 619894 - DNA, 75 bp, synthetic construct
  source 1..75: mol_type = other DNA
tgcccacggtaaaggcgttctggttgccctacgtccggtaccgggtatccgcgttgaacaagccctgacgctgtg

SEQ ID NO: 619895 - DNA, 75 bp, synthetic construct
  source 1..75: mol_type = other DNA
tcgtttgtcttgtgctggccgctgctgctgtatggggttttagccactggcgttacagcgccggttacggtgatg

SEQ ID NO: 619896 - DNA, 75 bp, synthetic construct
  source 1..75: mol_type = other DNA
atggggctgttatcacgctggaaagtgattgtttgttttgtgctggccgctgctgctgtatggggttttagccac

SEQ ID NO: 619897 - DNA, 75 bp, synthetic construct
  source 1..75: mol_type = other DNA
atgtggcgtgaagcacgtctggccttcacggattctgttgctgcgtcgaactgttcgatcgtccctgcgcatccg

SEQ ID NO: 619898 - DNA, 75 bp, synthetic construct
  source 1..75: mol_type = other DNA
gtctacgttcgtacagtagcagcaaataacgcccaaccactgactcaggatcaatgcttacgcgcaatacatcac

SEQ ID NO: 619899 - DNA, 75 bp, synthetic construct
  source 1..75: mol_type = other DNA
gagtttatctctctggtgagcgatttagagctaattgaggacgatgccaagatgtgcactcaaaccatcacagac

SEQ ID NO: 619900 - DNA, 75 bp, synthetic construct
  source 1..75: mol_type = other DNA
tgattctggtggaattgagcgacgtgattttcgccgtggatagcattccggctatcttcgccgtgaccactgatc

SEQ ID NO: 619901 - DNA, 75 bp, synthetic construct
  source 1..75: mol_type = other DNA
tacgccacaccgctgatgctggtactgattctggtggaattgagcgacgtgattttcgccgtggatagcattccg

SEQ ID NO: 619902 - DNA, 75 bp, synthetic construct
  source 1..75: mol_type = other DNA
atcggtatcaagatgctgattgtcgatttctaccatattccgatcgccgtttcgctgggcgtggtgtttggcatt

SEQ ID NO: 619903 - DNA, 75 bp, synthetic construct
  source 1..75: mol_type = other DNA
caaaattttttgcatttcagaaagtaatgacgcccgcgagtgtgcagctccgggcgccgtggcgtgtcgtgactg

SEQ ID NO: 619904 - DNA, 75 bp, synthetic construct
  source 1..75: mol_type = other DNA
atgccatgaccatgaaacaggctgcggcctggtcgctggtctgggtgacgctgtcgttactgtttaatgccgctt

SEQ ID NO: 619905 - DNA, 75 bp, synthetic construct
  source 1..75: mol_type = other DNA
cgtaccatcatgatcttcactggcagctggctgatttcacagttcgactggatcctgtatatcttcggtgccttc

SEQ ID NO: 619906 - DNA, 75 bp, synthetic construct
  source 1..75: mol_type = other DNA
caccgggggggcatgttcagataaaaaaccctgatggtaatgaatgccttgcaattctaaatgggcaattagcag

SEQ ID NO: 619907 - DNA, 75 bp, synthetic construct
  source 1..75: mol_type = other DNA
ggcctgactttactggctgggacacggtgctgaatgccgacgcaacggcatatgccaccgcccgtgcgcttggtc

SEQ ID NO: 619908 - DNA, 75 bp, synthetic construct
  source 1..75: mol_type = other DNA
ggcacgataataaagccgttgctactgagttgctgggcgtggcgcaaagcctgcgtgggtttgcttacctgtcag

SEQ ID NO: 619909 - DNA, 75 bp, synthetic construct
  source 1..75: mol_type = other DNA
gcctgtacaagccgcgtccgggccgcgtgaaagactatatcgccattccaaaagcgaacggctatcagtctttgc

SEQ ID NO: 619910 - DNA, 75 bp, synthetic construct
  source 1..75: mol_type = other DNA
agttactcaaagcagattcgttcggcaatcgaagatggggtagtggagccacacgagcagacagcaattaatgat

SEQ ID NO: 619911 - DNA, 75 bp, synthetic construct
  source 1..75: mol_type = other DNA
gatgggcaatggttttacagcgtgctggtggcactcacttcattgctgatgctgtggcgcagtctgcaaatggcg

SEQ ID NO: 619912 - DNA, 75 bp, synthetic construct
  source 1..75: mol_type = other DNA
ttatcgacgccgctgaacgcgctcagattgaagagaatagctatcaggttatgaccaaatggcaggaacacctga

SEQ ID NO: 619913 - DNA, 75 bp, synthetic construct
  source 1..75: mol_type = other DNA
ggaatttttctgtattgatgacgacagtcctgatttaatggatgaatactttaatacgctcttagacgctgccta

SEQ ID NO: 619914 - DNA, 75 bp, synthetic construct
  source 1..75: mol_type = other DNA
ctcacttctacggcatcaataaaccggaatttttctgtattgatgacaacaatcctgatttaatggatgaatact

SEQ ID NO: 619915 - DNA, 75 bp, synthetic construct
  source 1..75: mol_type = other DNA
tgtgtctcttcctgacgtcgaggatgtggacaacgccgatattaaccagcgcctgctggaagtcattgaacagat

SEQ ID NO: 619916 - DNA, 75 bp, synthetic construct
  source 1..75: mol_type = other DNA
agattggcagttattccagacagattcgttcagcaatcgaagacggtgtagtggaaccgcatgagaagacagcaa

SEQ ID NO: 619917 - DNA, 75 bp, synthetic construct
  source 1..75: mol_type = other DNA
tagaaaaacagcctgagtggtacgtgaaagctgtcagaaaaactatcgcagcgttgccgggtggttacgctgaag

SEQ ID NO: 619918 - DNA, 75 bp, synthetic construct
  source 1..75: mol_type = other DNA
acattgcggatgctgtcgcacagtctgctggtggggtgtttgtatcgcttcctgaaattgaggaagtagagaacg

SEQ ID NO: 619919 - DNA, 75 bp, synthetic construct
  source 1..75: mol_type = other DNA
cgctctggacgatcaactctatcaggaaccgcaagccgctcccgttgctgtacccatggggaaatttgccatgta

SEQ ID NO: 619920 - DNA, 75 bp, synthetic construct
  source 1..75: mol_type = other DNA
aaaaacagcctgagtggtacgtgaaagctgtcagaaaaactatcgcggcgttgccggggggttactctgaagctg

SEQ ID NO: 619921 - DNA, 75 bp, synthetic construct
  source 1..75: mol_type = other DNA
gtgggtaatcatcactggaaagtggaaaaacagcctgagtggtacgtgaaagctgtcagaaaaaccatcgcggcg

SEQ ID NO: 619922 - DNA, 75 bp, synthetic construct
  source 1..75: mol_type = other DNA
gtggagccacacgagcagacagcaattaacgatgagctgtacctctcaatttcgaagctgcaggagcatgcagca

SEQ ID NO: 619923 - DNA, 75 bp, synthetic construct
  source 1..75: mol_type = other DNA
ttgccgggtggttacgctgaagcggctgactggctcgatgtaacagaaaacgctttattcaaccgccttcgtgca

SEQ ID NO: 619924 - DNA, 75 bp, synthetic construct
  source 1..75: mol_type = other DNA
tctttcatcatgtgcaatggcaacaaaaactggcgcgcagtctgcaaattggtcgtgccagcaatggcggactgc

SEQ ID NO: 619925 - DNA, 75 bp, synthetic construct
  source 1..75: mol_type = other DNA
agagaggcttgccgccactgagtctgcccgttatttcagcacggaatctcttgcggaacgcatggaacaaaaaag

SEQ ID NO: 619926 - DNA, 75 bp, synthetic construct
  source 1..75: mol_type = other DNA
atatggggggtttatccggcaaatgaaccgcgtcgtttactcaacgcctttcgtgtggccgcagagggggagttc

SEQ ID NO: 619927 - DNA, 75 bp, synthetic construct
  source 1..75: mol_type = other DNA
cacaagatgagccaattgacctgcctgcggatgctctgattggcattgcccacccgttagaaatgacagcagaaa

SEQ ID NO: 619928 - DNA, 75 bp, synthetic construct
  source 1..75: mol_type = other DNA
acgggctatggctatcgctcagagacttatagcaatttcgattttcgtctgcgtaaacatctttcactggcagag

SEQ ID NO: 619929 - DNA, 75 bp, synthetic construct
  source 1..75: mol_type = other DNA
aatcgccaacgagctggtaagccttgaatgttcgcaaactcattttcgctcaaaagagtggttaaaagttgttgc

SEQ ID NO: 619930 - DNA, 75 bp, synthetic construct
  source 1..75: mol_type = other DNA
tcaggctgccagatcatcgtttccgatggaagcataataagctttttctgcttctgccggaggagtatggcccag

SEQ ID NO: 619931 - DNA, 75 bp, synthetic construct
  source 1..75: mol_type = other DNA
gcgggaataaagtctgcaattcctcaactacgggatattgatgctgacaatgacaatatggatgacgtatctctt

SEQ ID NO: 619932 - DNA, 75 bp, synthetic construct
  source 1..75: mol_type = other DNA
ggcgattttgaccgctcattctctgatggcgttctcgaagatatcgccgcccagcttggaaaaggaggcaaacag

SEQ ID NO: 619933 - DNA, 75 bp, synthetic construct
  source 1..75: mol_type = other DNA
gacattcatatttctcatatggctctgagcataatttcgaatggcacaaaactgctgaggaagctatcgaatcgg

SEQ ID NO: 619934 - DNA, 75 bp, synthetic construct
  source 1..75: mol_type = other DNA
ttgctactgatactacggcggtaaaaagcctcgaacgatactggagccaggacgtatttagctatcgtgaagcca

SEQ ID NO: 619935 - DNA, 75 bp, synthetic construct
  source 1..75: mol_type = other DNA
taccttcttgcgggaattaggttttgaagatcacaggtggaagtttaatgagtttattctcacaggacagttgga

SEQ ID NO: 619936 - DNA, 75 bp, synthetic construct
  source 1..75: mol_type = other DNA
gaggagaactcgtggctgaagatgctcatagaagatcatgctggttgtactgctgtctgcccaaattgctctcat

SEQ ID NO: 619937 - DNA, 75 bp, synthetic construct
  source 1..75: mol_type = other DNA
gatccccatagttcgccgcccttttattgcgctgctgcttccggaaaaaccagatatagcgaatgagcttgccag

SEQ ID NO: 619938 - DNA, 75 bp, synthetic construct
  source 1..75: mol_type = other DNA
tccaccgaaggcggcgtggaaatcgaaaaagtggcggaagaaactccgcacctgatccataaagttgcgcttgat

SEQ ID NO: 619939 - DNA, 75 bp, synthetic construct
  source 1..75: mol_type = other DNA
tatgtgatgaccgtcgcaggttcatcatgaatggggtgcagatgggttatatcaaggtgccagcagcggaaacag

SEQ ID NO: 619940 - DNA, 75 bp, synthetic construct
  source 1..75: mol_type = other DNA
ggaaggcgattttgaccgctcattctctgatggcgttctcgaagatatcgccgcccagcttcgcaaaggatgtga

SEQ ID NO: 619941 - DNA, 75 bp, synthetic construct
  source 1..75: mol_type = other DNA
acatcgcttttgctgtttctctttttgctcttagcgccagtagttatgccactaccctttgtcaggaaaaggagc

SEQ ID NO: 619942 - DNA, 75 bp, synthetic construct
  source 1..75: mol_type = other DNA
ccaactgttcagatagccagctgcgtgccgatcatcacaagaaaatcgcaaagcagaaagatgaggtggcggaac

SEQ ID NO: 619943 - DNA, 75 bp, synthetic construct
  source 1..75: mol_type = other DNA
tggtgaatcgtattttgtccagcaaccacagccatcgtcgagatatggatgtaacgatcgttgttcattcgcctg

SEQ ID NO: 619944 - DNA, 75 bp, synthetic construct
  source 1..75: mol_type = other DNA
taagcgcacctgacgtcatttccattaaaacacagcgggcagtgatgcgactgcccgttatctacacgacttacc

SEQ ID NO: 619945 - DNA, 75 bp, synthetic construct
  source 1..75: mol_type = other DNA
ggcattgcccacccgttagaaatgacagcagaaatgcgcagtgaatttgcacagctttttgccgattacgaaatt

SEQ ID NO: 619946 - DNA, 75 bp, synthetic construct
  source 1..75: mol_type = other DNA
gcacaaaccgtgctgaatagttttttatccgtgccgccgaaatctgccattgatagccctgatagcagtgctctg

SEQ ID NO: 619947 - DNA, 75 bp, synthetic construct
  source 1..75: mol_type = other DNA
ggtccttaagttttcacccggttttaaccactacaatgttgatagcaaagcgctaatgagcttccgttctcttcg

SEQ ID NO: 619948 - DNA, 75 bp, synthetic construct
  source 1..75: mol_type = other DNA
gcaaaaagcacgcgatgaatactggcgtacgctgttacaaacgctgatggcatcgcagccacaactggcagaaga

SEQ ID NO: 619949 - DNA, 75 bp, synthetic construct
  source 1..75: mol_type = other DNA
gacgtatttagcgatcgcgaagccagctacatgtcacaaaaaaaccgcttcggctacgcggcctgcgcctccctt

SEQ ID NO: 619950 - DNA, 75 bp, synthetic construct
  source 1..75: mol_type = other DNA
agcagggtgagtcatcttttgagtgcagccttgatgatatcgaggtagtaggccgtgctataaaagtaattaaga

SEQ ID NO: 619951 - DNA, 75 bp, synthetic construct
  source 1..75: mol_type = other DNA
ccttgccgaaggcgaagaagctctcagcttcagcgaatttaaacgggcgctttccagctcggcaaaatctaacgg

SEQ ID NO: 619952 - DNA, 75 bp, synthetic construct
  source 1..75: mol_type = other DNA
aggcttacgaagaatacttcgatggtcttgccgaaggcgaagaagctctcagcttcagtgaatttaaacaggcgc

SEQ ID NO: 619953 - DNA, 75 bp, synthetic construct
  source 1..75: mol_type = other DNA
atggatttcgacacaatcatgaaaaaggcttacgaagaatacttcgaaggccttgccgaaggcgaagaagctctc

SEQ ID NO: 619954 - DNA, 75 bp, synthetic construct
  source 1..75: mol_type = other DNA
ctgaaacttggcgcgtcgcttgatggccgcacggcgatggccaacggcgaaagccagtggatcacttctccccag

SEQ ID NO: 619955 - DNA, 75 bp, synthetic construct
  source 1..75: mol_type = other DNA
attgacagtgataatcgcgtgacgccagaacaccgcattgtgcaacagccgggcgagacctggtttgcccgaacg

SEQ ID NO: 619956 - DNA, 75 bp, synthetic construct
  source 1..75: mol_type = other DNA
accttgcagtcatcatggtcgaacgccgccgtgctgtgacgcactcatcgccgctggcgtagcgcgcgtggtcgc

SEQ ID NO: 619957 - DNA, 75 bp, synthetic construct
  source 1..75: mol_type = other DNA
gaactgctggcggagtttgatattccgctggtgcatgaattacccggcgtcggcgaaaatcttcaggatcacctg

SEQ ID NO: 619958 - DNA, 75 bp, synthetic construct
  source 1..75: mol_type = other DNA
cgcaaattatcaccggcaatttgaacgctacgacgattatgattggcgagaaaatagcggatatgattcgcgggc

SEQ ID NO: 619959 - DNA, 75 bp, synthetic construct
  source 1..75: mol_type = other DNA
gcgctggatctcgacaactgggcgaaagaacccggcctggagaactggagctatctcgattgcctgccctactat

SEQ ID NO: 619960 - DNA, 75 bp, synthetic construct
  source 1..75: mol_type = other DNA
aggcttacgaagaatacttcgaagaccttgccgaaggcgaagaagctctcagcttcagtgagtttaaacaggcgc

SEQ ID NO: 619961 - DNA, 75 bp, synthetic construct
  source 1..75: mol_type = other DNA
ccttgccgaaggcgaagaagctcacagcttcaacgaatttaaacaggtgcttttcagttcggcaaaatctaacgg

SEQ ID NO: 619962 - DNA, 75 bp, synthetic construct
  source 1..75: mol_type = other DNA
cgcagattatcaccgggaatttgaacgccacgacaattatgattggcgagaaaatagcggacatgattcgcgggc

SEQ ID NO: 619963 - DNA, 75 bp, synthetic construct
  source 1..75: mol_type = other DNA
ttaggcagcgacgcccgcggattatgcacgctgccagggcttgagaaattagccgacgcccccaatttaaattca

SEQ ID NO: 619964 - DNA, 75 bp, synthetic construct
  source 1..75: mol_type = other DNA
aggagcacggcaagatattttgtggcaaatgggatgccggtgagagcgaaaaaaatgagtcgtgatgtgaactga

SEQ ID NO: 619965 - DNA, 75 bp, synthetic construct
  source 1..75: mol_type = other DNA
atggatttcgacgcaatcatggaaaaggcttacgaagaatacttcgaaggccttgccgaaggcgaagaagctctc

SEQ ID NO: 619966 - DNA, 75 bp, synthetic construct
  source 1..75: mol_type = other DNA
aacctgtaaaggattatcaggagattgatgacgtgctgttcaagttttcgctcaatttgccggacgaacaaatcc

SEQ ID NO: 619967 - DNA, 75 bp, synthetic construct
  source 1..75: mol_type = other DNA
ccattgagaacggaacgctcgaagagctggaagatgttttccttgatcagagtttgatacccggaaaagccgaat

SEQ ID NO: 619968 - DNA, 75 bp, synthetic construct
  source 1..75: mol_type = other DNA
cggcatgtgttacatccgtggtaacgcgctggatctcgataactgggcgaaagaacccggtctggagaactggag

SEQ ID NO: 619969 - DNA, 75 bp, synthetic construct
  source 1..75: mol_type = other DNA
cgagcaggactggcaggagttccgcgacgcaattcgcatcacccgcgagatcatgcatcaacccgcgctggatca

SEQ ID NO: 619970 - DNA, 75 bp, synthetic construct
  source 1..75: mol_type = other DNA
agcgaacggcatttcacggttactgaaacgctgggatctgtcgccgcaaaatgtggtggcaattggcgacagcgg

SEQ ID NO: 619971 - DNA, 75 bp, synthetic construct
  source 1..75: mol_type = other DNA
tgacccgacatgaatcgcggattgttattggcgagttgctaaaagataagcaactcaattttgtcgcctgcggtc

SEQ ID NO: 619972 - DNA, 75 bp, synthetic construct
  source 1..75: mol_type = other DNA
agtcatcatggtcgtacgccgccatgttgcgatgcgttgattgctgcgggggtcacgcgcgtggttgccgcgatg

SEQ ID NO: 619973 - DNA, 75 bp, synthetic construct
  source 1..75: mol_type = other DNA
gatgataataatcatgaaggcgcgctgaatgtgattcaggcggtgctggataacaccgctcctttcaataagtaa

SEQ ID NO: 619974 - DNA, 75 bp, synthetic construct
  source 1..75: mol_type = other DNA
tgacccgacatgaatcaagagttgtcattggtgaactgctgaaagacaagcagctcaattttgttgcctgcggtt

SEQ ID NO: 619975 - DNA, 75 bp, synthetic construct
  source 1..75: mol_type = other DNA
atgcagcggaaaacattaaacacatcgcccgttacactaccgatgataataatcatgacggcgcgctgaatgtga

SEQ ID NO: 619976 - DNA, 75 bp, synthetic construct
  source 1..75: mol_type = other DNA
tgtgggaactgaaaaaggctggcttcgttgataaaagcgtatacacctggcgtgtggcttatagcaacgttcagc

SEQ ID NO: 619977 - DNA, 75 bp, synthetic construct
  source 1..75: mol_type = other DNA
tttctggctggtaaaggtgaatccggggtaaccgaagagcagccagcacaatctgaagtaccggatgtgctgacc

SEQ ID NO: 619978 - DNA, 75 bp, synthetic construct
  source 1..75: mol_type = other DNA
tctgcgccgcgctgcgggagttgaacaagcacagggatattgtacgacagattactgattcttcccgccgtgttg

SEQ ID NO: 619979 - DNA, 75 bp, synthetic construct
  source 1..75: mol_type = other DNA
cagaaacacaggaagaaataaaaacggaaagtgtggcggtcacagtgcagtcacagccgtcgttcaccagaaaac

SEQ ID NO: 619980 - DNA, 75 bp, synthetic construct
  source 1..75: mol_type = other DNA
atgcaaagaagggaaattgccagaaaattaggcatgccgctgcgcatagtgaataactacgtttatttcgacagg

SEQ ID NO: 619981 - DNA, 75 bp, synthetic construct
  source 1..75: mol_type = other DNA
gagcggatgacctggttttaccatcgctgcatgtggctaaccgcgagctgcgccgggcaaaaggtcaggttcaga

SEQ ID NO: 619982 - DNA, 75 bp, synthetic construct
  source 1..75: mol_type = other DNA
tgtggaaactgaagcgtcgtggggaagctgataacaagggcccgatgtggtggttgactcaaaccgacgaaaacg

SEQ ID NO: 619983 - DNA, 75 bp, synthetic construct
  source 1..75: mol_type = other DNA
cttctgcccgtaaggtgaatggtaaggcgctttcagcggatataacactgacgccgaaagatattggtacgctta

SEQ ID NO: 619984 - DNA, 75 bp, synthetic construct
  source 1..75: mol_type = other DNA
ggagattattatccagcaagccacggttccggtggtcgttgatgctggcatcggcgttcccagccatgccgcgca

SEQ ID NO: 619985 - DNA, 75 bp, synthetic construct
  source 1..75: mol_type = other DNA
ttactgcataccgggcgataatttaccggcagagccgaaagctgcatcggtaacggaaaccgatggtaaagcctt

SEQ ID NO: 619986 - DNA, 75 bp, synthetic construct
  source 1..75: mol_type = other DNA
cggccccaaaaaccactgcagagatgctgattaacgcgattgaacagcatggtcctcagtcggctgacgaactgg

SEQ ID NO: 619987 - DNA, 75 bp, synthetic construct
  source 1..75: mol_type = other DNA
cggtaaatttcgttactgcattccgggtgctgatttaccggcagagccggaagcagcatctgtagcgaaaagcga

SEQ ID NO: 619988 - DNA, 75 bp, synthetic construct
  source 1..75: mol_type = other DNA
aatgcacagcttgaaagacaggttaccattgatgtcgcgatctataatgttacaacaactgacagcagtgatctg

SEQ ID NO: 619989 - DNA, 75 bp, synthetic construct
  source 1..75: mol_type = other DNA
ctcagctatctgtgcggtcgcccgttagcggcgaactggctggcggtggggcttaatctgctgttctgcgtgctg

SEQ ID NO: 619990 - DNA, 75 bp, synthetic construct
  source 1..75: mol_type = other DNA
atatcggatttattttcccgactgccttccggtgtgctctggttgctgcatgtattttctttggatgtggtgctt

SEQ ID NO: 619991 - DNA, 75 bp, synthetic construct
  source 1..75: mol_type = other DNA
atttcggaactgttctcccgtctgccttccggagtgctctggttactgaatgttttttctgttgatatttttctt

SEQ ID NO: 619992 - DNA, 75 bp, synthetic construct
  source 1..75: mol_type = other DNA
ccctggcgtaagttaccagaagatcgacgatgacgggctgcatgtggtgatcaacggcgaaacgcagataatagc

SEQ ID NO: 619993 - DNA, 75 bp, synthetic construct
  source 1..75: mol_type = other DNA
cgcaaccattatcaacactggaataggctggcatgaagcgcggattccgaccatcgccacgccagtgccgcgcgg

SEQ ID NO: 619994 - DNA, 75 bp, synthetic construct
  source 1..75: mol_type = other DNA
tggctggtcgtcctgattaacctggtgttctgcgtgctggtgatacgagcacgcgggaacgtatcaaaaatcctt

SEQ ID NO: 619995 - DNA, 75 bp, synthetic construct
  source 1..75: mol_type = other DNA
tacgcgctcactctgctcgcgcctggctggcgttttcactccattcagaacataaaattccagtccccgttgctg

SEQ ID NO: 619996 - DNA, 75 bp, synthetic construct
  source 1..75: mol_type = other DNA
gtgtccagcaaaagtctggccgcaactgtcgcggaaaaaatgaacagtgcaacaggcggaaaaagtactgatcaa

SEQ ID NO: 619997 - DNA, 75 bp, synthetic construct
  source 1..75: mol_type = other DNA
ttccggttccggaagcagtagctccagtagcgactcacaattggatgtaagtgtatctcttgatgtctggaaaga

SEQ ID NO: 619998 - DNA, 75 bp, synthetic construct
  source 1..75: mol_type = other DNA
aagctgcgactgaagtgaaaaccgggttttcacccggcgggaccgcattaaatctggttctggattcaatcgacc

SEQ ID NO: 619999 - DNA, 75 bp, synthetic construct
  source 1..75: mol_type = other DNA
atgactggtgtcacccgccaggtcggtacggtcagtgccgttgatgccgacagggttcaggcccgcgttcgtctg

SEQ ID NO: 620000 - DNA, 75 bp, synthetic construct
  source 1..75: mol_type = other DNA
cctctcgccagaagcacatgaaagaaccagtgaaagcaaagtattaatttgtgatgaagacaactcttccagaga

SEQ ID NO: 620001 - DNA, 75 bp, synthetic construct
  source 1..75: mol_type = other DNA
aacgacgatatcctcgccccgcttatcgcggcgggtgtgacactgctgccgaatacttccggggcgaaaacggcg

SEQ ID NO: 620002 - DNA, 75 bp, synthetic construct
  source 1..75: mol_type = other DNA
acggcatgaaagacgctggcgtggaagtcatcaccgaacttgatcgcaaagcctttagcgacgtactgggtactc

SEQ ID NO: 620003 - DNA, 75 bp, synthetic construct
  source 1..75: mol_type = other DNA
aaaggctcacttatttcatgccgtgatgcatggtttttttctatgtctatcctgcttcgctttcatatatgtact

SEQ ID NO: 620004 - DNA, 75 bp, synthetic construct
  source 1..75: mol_type = other DNA
atgctggtatggatacattgattattactaatggtagtgtattctctgaacatttttctggctttgagaaaattg

SEQ ID NO: 620005 - DNA, 75 bp, synthetic construct
  source 1..75: mol_type = other DNA
tgcatgaatttggtggcgatattactaagttccgggtagtgaaggtctggccgtcaattctgcaacaaattgcta

SEQ ID NO: 620006 - DNA, 75 bp, synthetic construct
  source 1..75: mol_type = other DNA
gaaacacgcggctcaggggctggaagagaagaaacaaatcctgtatctgctggggcctgtgggtgggggtaaatc

SEQ ID NO: 620007 - DNA, 75 bp, synthetic construct
  source 1..75: mol_type = other DNA
agataaaatcactgagcgttatcctgatgcaacgggacaaattattgttgtggataatgacgatatgcttaaaac

SEQ ID NO: 620008 - DNA, 75 bp, synthetic construct
  source 1..75: mol_type = other DNA
ggaactctcactactacagatttctcaggatttgaggtaattgaacttggtgataataatggagggataaatgta

SEQ ID NO: 620009 - DNA, 75 bp, synthetic construct
  source 1..75: mol_type = other DNA
gtaaggctattgttaattccaacattgatttaggtgcaggaaatgacatcattcatgttaatggtgatgtggagg

SEQ ID NO: 620010 - DNA, 75 bp, synthetic construct
  source 1..75: mol_type = other DNA
gatgccgataagatagctaaacgagaaaggaaactggcggaagcgcaggaagagctgaaacagctggaagcgcgc

SEQ ID NO: 620011 - DNA, 75 bp, synthetic construct
  source 1..75: mol_type = other DNA
gtaaacttagatggagatgactggaagtctgatggagttcaatctgaagatggtgttaactataatgtgtataca

SEQ ID NO: 620012 - DNA, 75 bp, synthetic construct
  source 1..75: mol_type = other DNA
ttgacatcaacgggagatggtgatgacattctgattgtcggcctaggtaataataatgttggtatacatctgaaa

SEQ ID NO: 620013 - DNA, 75 bp, synthetic construct
  source 1..75: mol_type = other DNA
aagcggtaagtattaaaggtggctctggtatggatattctggccattagtcatggaaccctttcaactaaagatt

SEQ ID NO: 620014 - DNA, 75 bp, synthetic construct
  source 1..75: mol_type = other DNA
tctgaaagacactgatcccaaagccaagtcgtatcaggaatatcgtgactacgccggtgtcgatgaagggatgaa

SEQ ID NO: 620015 - DNA, 75 bp, synthetic construct
  source 1..75: mol_type = other DNA
gaagactttgcttggcggcgacaacctgattgaagtgaataaccttgccgccgacccgctgattaaacccgcaca

SEQ ID NO: 620016 - DNA, 75 bp, synthetic construct
  source 1..75: mol_type = other DNA
accgttcggcggcattcgtatcgaagacaacgtggtgatccacgaaaacaacgtggagaacatgacccgggatct

SEQ ID NO: 620017 - DNA, 75 bp, synthetic construct
  source 1..75: mol_type = other DNA
gtcgaaaacgatctcaccggaccgtttatgccgcacggtatcggccatccgctgggcctgcaggtgcatgacgta

SEQ ID NO: 620018 - DNA, 75 bp, synthetic construct
  source 1..75: mol_type = other DNA
atgttacatattgcggacaaaacgtttgattcacatctgtttactggcaccggaaaattcgcctcttcacaactg

SEQ ID NO: 620019 - DNA, 75 bp, synthetic construct
  source 1..75: mol_type = other DNA
gcagccaactggtgacactggcgatgaaacgtgtcgacttgcgccagcacaacgacgctatcctcgaaccgctta

SEQ ID NO: 620020 - DNA, 75 bp, synthetic construct
  source 1..75: mol_type = other DNA
gaatacatccggggcgaaaacagcggaagaagccattttcgccgcccatctggcacgtgaagcgttaggcacaaa

SEQ ID NO: 620021 - DNA, 75 bp, synthetic construct
  source 1..75: mol_type = other DNA
gaacaaccaggatatctcagcactggtagggaaagtcgatattcgtaaactcgaacactacgcccagaacgatcc

SEQ ID NO: 620022 - DNA, 75 bp, synthetic construct
  source 1..75: mol_type = other DNA
tttaacgccaaaacgtcaaccgacgagcagaagaaacacgacgattttgtcgaccgtatgatggaaaaaaggcta

SEQ ID NO: 620023 - DNA, 75 bp, synthetic construct
  source 1..75: mol_type = other DNA
cccggtcaacgatcatccgttctgtcttttcaatccgcaggaagatgcgcagattctggaaaaagagtatggcat

SEQ ID NO: 620024 - DNA, 75 bp, synthetic construct
  source 1..75: mol_type = other DNA
cgccaggcgtacagctgacggatgatgatattcaaaatatgccctacgccagccagtacatgcagcttaatggcg

SEQ ID NO: 620025 - DNA, 75 bp, synthetic construct
  source 1..75: mol_type = other DNA
tccggtgtggttattctgcccctctggagaagagtcgtgaagcgacctgcactcattcttatctgcctgttatta

SEQ ID NO: 620026 - DNA, 75 bp, synthetic construct
  source 1..75: mol_type = other DNA
agatgcgggtttatgatggtgaaagtctgaaagacaccgatcccaaagccaagtcgtatcaggaatatcgtgact

SEQ ID NO: 620027 - DNA, 75 bp, synthetic construct
  source 1..75: mol_type = other DNA
cacttgatttccatgaatttccagttccagggaaaatccaggtttcaccgaccaaacctctggcaacgcagcgcg

SEQ ID NO: 620028 - DNA, 75 bp, synthetic construct
  source 1..75: mol_type = other DNA
gactgcgcttaacgctaaccgcagcgcatgaaatgcaggatatcgatagtctgctggaggtgctgcatgacaacg

SEQ ID NO: 620029 - DNA, 75 bp, synthetic construct
  source 1..75: mol_type = other DNA
cctcattgctggaagctgccagtttaagcccgtcgcagcttcgccgttttgctcataacgatgtcactcatttgg

SEQ ID NO: 620030 - DNA, 75 bp, synthetic construct
  source 1..75: mol_type = other DNA
cagtatctgaacttttccagtaacgattatttaggtttaagccatcatccgcaaattatccgtgcctggcagcag

SEQ ID NO: 620031 - DNA, 75 bp, synthetic construct
  source 1..75: mol_type = other DNA
aataaggggatagcaacgatggttagagggtatttctatgatagtgcggtccatttatttcaggtttcaaaaaaa

SEQ ID NO: 620032 - DNA, 75 bp, synthetic construct
  source 1..75: mol_type = other DNA
gtggcggattatctgctgcaatttgcccgccatcttatctacagcaccagtatgccgcccgctcaggcgcaggca

SEQ ID NO: 620033 - DNA, 75 bp, synthetic construct
  source 1..75: mol_type = other DNA
cgggcgctgctgtttatctccggttttgccgctaatcaggcggtcattgccgcgatgatggcgaaagatgaccgc

SEQ ID NO: 620034 - DNA, 75 bp, synthetic construct
  source 1..75: mol_type = other DNA
gtctggcagctggcacagcaattaaatcttcacggcgatgtctgtaatgacggcgatggcgtagaagtccggctg

SEQ ID NO: 620035 - DNA, 75 bp, synthetic construct
  source 1..75: mol_type = other DNA
tatccgtttatcaactgtacccactgcggcccacgtttcaccattattcgcgcgatgccttacgatcgcccgttt

SEQ ID NO: 620036 - DNA, 75 bp, synthetic construct
  source 1..75: mol_type = other DNA
aagcagggctcaacctgcgtggccgccctccagtccggacgccggtatatcggtatcgagctgcttgagcagtat

SEQ ID NO: 620037 - DNA, 75 bp, synthetic construct
  source 1..75: mol_type = other DNA
agcgtgctggcgcgggccattgagcgtggaatcaatgcgccgctggcgtcatcgtgcgggcgtttgtttgatgct

SEQ ID NO: 620038 - DNA, 75 bp, synthetic construct
  source 1..75: mol_type = other DNA
agcggcttgtgctctggaggcgctggcggcttcgtgccacggcgtgacgcatccggtgacgatgccgctggtgga

SEQ ID NO: 620039 - DNA, 75 bp, synthetic construct
  source 1..75: mol_type = other DNA
agttaaaaatgggcaacattgtcgccatcaaagggattggcggatttcatcttgcctgcgatgcacgtaacagta

SEQ ID NO: 620040 - DNA, 75 bp, synthetic construct
  source 1..75: mol_type = other DNA
gtatgaccgtctggcaaaggcagcaatacctgatcataactcagggggagatccattctggacagaagcaccacg

SEQ ID NO: 620041 - DNA, 75 bp, synthetic construct
  source 1..75: mol_type = other DNA
cggcaaaactcagcgatattgtgcatgatggcgatcgggtggagatttatcgtcctctcattgccgatccgaaag

SEQ ID NO: 620042 - DNA, 75 bp, synthetic construct
  source 1..75: mol_type = other DNA
cgtgtggtaagtatcgttactctttatcaagagtctgggatgattcaaaaccatatacgcttttcatcgggctga

SEQ ID NO: 620043 - DNA, 75 bp, synthetic construct
  source 1..75: mol_type = other DNA
gcttcgtcttaaacgctacaggtgagccgaagcaccctttgtatatgaaaaacgacagtgttctcatacctttag

SEQ ID NO: 620044 - DNA, 75 bp, synthetic construct
  source 1..75: mol_type = other DNA
aagcactgccaccacgccgcaaatcattgccggccctctggcacaaaccgaacgcgatttgctcggtcatagcct

SEQ ID NO: 620045 - DNA, 75 bp, synthetic construct
  source 1..75: mol_type = other DNA
cgggccattaagcaactggcgcaaaactgctatgccaataaaaaacgcgccgccaatagaataaaccttcaagga

SEQ ID NO: 620046 - DNA, 75 bp, synthetic construct
  source 1..75: mol_type = other DNA
aagcctcaaatacacccaaaggtctcttgctaaagccctgaaaatttctcatgtatcggtttcacaatgggaacg

SEQ ID NO: 620047 - DNA, 75 bp, synthetic construct
  source 1..75: mol_type = other DNA
aaacgattgcgcagcaggtgcgctctgaagttgctcaaaaagttcaggcgcgcgttgcggccggactgcgggcgc

SEQ ID NO: 620048 - DNA, 75 bp, synthetic construct
  source 1..75: mol_type = other DNA
attttttctgtccccaatgtatgaattaatattcgggaatatcatgatattcctgctgaaacgtcgtatgcgccg

SEQ ID NO: 620049 - DNA, 75 bp, synthetic construct
  source 1..75: mol_type = other DNA
gtattgatggattccatcggttcgcttgccgcatttcgtatcaatggtattaaaggcgcaggatggcttgccgag

SEQ ID NO: 620050 - DNA, 75 bp, synthetic construct
  source 1..75: mol_type = other DNA
cggtgactggatcaaagaaggcgcaattgtgattgatgtcggcatcaaccgtctggaaaatggcaaggttgtagg

SEQ ID NO: 620051 - DNA, 75 bp, synthetic construct
  source 1..75: mol_type = other DNA
gtcttaacgccgtggtgattggcgcatcgaatatcgtcggtcgcccaatgagcatggaactgctgctcgcaggtt

SEQ ID NO: 620052 - DNA, 75 bp, synthetic construct
  source 1..75: mol_type = other DNA
gcaccactaccgtgactcaccgcttcactaaaaatctgcgtcatcacgtagaaaatgccgatctgttgatcgttg

SEQ ID NO: 620053 - DNA, 75 bp, synthetic construct
  source 1..75: mol_type = other DNA
tacaactggacacctacaaaagaagtcacttttaagatcactggctcgggtaaaactcccgcagggatcaaaaat

SEQ ID NO: 620054 - DNA, 75 bp, synthetic construct
  source 1..75: mol_type = other DNA
gcatgattgcattactttgcaattgctgctatgcgtcgcgaactatttcgaatagagtaaacatcacggcgacga

SEQ ID NO: 620055 - DNA, 75 bp, synthetic construct
  source 1..75: mol_type = other DNA
agatttaaaagcaaggcaaagttatcctatggttatcagcatggatttacttttcttctcaatgaacccttacgg

SEQ ID NO: 620056 - DNA, 75 bp, synthetic construct
  source 1..75: mol_type = other DNA
aataaaggagaagaatattatctgttcttggatgaggtgagaaggaatctgagagttatttattctgcgtgtcgt

SEQ ID NO: 620057 - DNA, 75 bp, synthetic construct
  source 1..75: mol_type = other DNA
gctttacggggctgaaacggggttaccgactggcagagctggtcctgatgcatgagcgactggcacgacagcagg

SEQ ID NO: 620058 - DNA, 75 bp, synthetic construct
  source 1..75: mol_type = other DNA
tgcctggcaaactcaggactgggtggcgctgggtggatgtgccgctggggcattgattatcggcgctggcgtagg

SEQ ID NO: 620059 - DNA, 75 bp, synthetic construct
  source 1..75: mol_type = other DNA
tattacgctatgccagaagctgcatcgcagtatcagcagggaaatattgaagagtggaagaatatcaaaaaagga

SEQ ID NO: 620060 - DNA, 75 bp, synthetic construct
  source 1..75: mol_type = other DNA
aaacgctcgattaccaaagcccgttgcccaccacgcgctatacgctgccggagctgttagacaactcccagcagt

SEQ ID NO: 620061 - DNA, 75 bp, synthetic construct
  source 1..75: mol_type = other DNA
agcaccgctcaggctcatagagacttgtttcaggactataccaaagcatatttcaattgaagaaatcaatgaaat

SEQ ID NO: 620062 - DNA, 75 bp, synthetic construct
  source 1..75: mol_type = other DNA
tcggaacccctgaacgttatcgctcaaaccatgtcgtttcgtgaaatgctgttacgccagcgggtcaatgagggt

SEQ ID NO: 620063 - DNA, 75 bp, synthetic construct
  source 1..75: mol_type = other DNA
atcaataactttagaaaacatcttcaggccatgattgattgtatgggaaatgattatgagcgtcactttaaagac

SEQ ID NO: 620064 - DNA, 75 bp, synthetic construct
  source 1..75: mol_type = other DNA
tattatgggcactgagctgaactccgatctggcgaaagcgatgaaagttgacgcccagcgcggtgctttcgtaag

SEQ ID NO: 620065 - DNA, 75 bp, synthetic construct
  source 1..75: mol_type = other DNA
atcaacgccgctcgctttcatgactggcagccagatttcacgccggagaatgcccgccaggcgattctggcgttt

SEQ ID NO: 620066 - DNA, 75 bp, synthetic construct
  source 1..75: mol_type = other DNA
tgcatcctgtgcggaagtcagatgcggtttacggggctgaagcggggatactgtctggcagagctggttatgatg

SEQ ID NO: 620067 - DNA, 75 bp, synthetic construct
  source 1..75: mol_type = other DNA
gggcatttttcgcccgacagccgtgtatggtcccggcgataaagagttaaaaccgctgtttgactggatgctgcg

SEQ ID NO: 620068 - DNA, 75 bp, synthetic construct
  source 1..75: mol_type = other DNA
gtacagacgcaaacctatgaattatgcgatggcgtcgctggcggctatgactggcaacgcgtacgacagcttgcc

SEQ ID NO: 620069 - DNA, 75 bp, synthetic construct
  source 1..75: mol_type = other DNA
cggttacactgcgggtcaggtgttacgtgcctggacaccgttcctgttcctgaccgctaccgtaacactgtggag

SEQ ID NO: 620070 - DNA, 75 bp, synthetic construct
  source 1..75: mol_type = other DNA
tggctcctacgcttgtacgtagcccgatgtttaatgatgatggaactgttgcaggctacagggaaacgcatcgca

SEQ ID NO: 620071 - DNA, 75 bp, synthetic construct
  source 1..75: mol_type = other DNA
gcgtggcaacaggcggaaaaacggcaaccgaatgcctggcaacatcgcgccgtagcataccaggcttatcaggtt

SEQ ID NO: 620072 - DNA, 75 bp, synthetic construct
  source 1..75: mol_type = other DNA
aaaggagatgcgcagccatgagtgtcacgaacggtgcaatagtgatccacacccaacgcctgaaatcagatccag

SEQ ID NO: 620073 - DNA, 75 bp, synthetic construct
  source 1..75: mol_type = other DNA
gacattatctcttcgctggtatcgctactctgcctgacactgttcctcaaacgctggcagccggtgcgcgttttc

SEQ ID NO: 620074 - DNA, 75 bp, synthetic construct
  source 1..75: mol_type = other DNA
cgtccggttgaagcaattgcatttaacgaggcggtttctgtcggagcattattaactgccgcaccggatattcca

SEQ ID NO: 620075 - DNA, 75 bp, synthetic construct
  source 1..75: mol_type = other DNA
ccagttcaccctgtttgcgtctctgcccgtgggcggtttcgcgctggagtggctgcgcaacacgttccggctaac

SEQ ID NO: 620076 - DNA, 75 bp, synthetic construct
  source 1..75: mol_type = other DNA
agtgggtgatcaacattccggtgccgtacctcgataaactggttgcccgtatgccgccagtggtcagcgaggcta

SEQ ID NO: 620077 - DNA, 75 bp, synthetic construct
  source 1..75: mol_type = other DNA
gctttggcgcaccggtagcaattaccgccgcattgctggtcggtctgggctttaaaccgctgtacgccgccgggc

SEQ ID NO: 620078 - DNA, 75 bp, synthetic construct
  source 1..75: mol_type = other DNA
ggactgtcatcaacgctggcgctggcactggcgcacaccggccatgcattcaccttcttctcgccgttcctcggc

SEQ ID NO: 620079 - DNA, 75 bp, synthetic construct
  source 1..75: mol_type = other DNA
ccatgggggtgggcattgcgcctacaaaaacgctggctaaaagtgcacagtgggcaacaaagcaatggccacagt

SEQ ID NO: 620080 - DNA, 75 bp, synthetic construct
  source 1..75: mol_type = other DNA
tcgggataacgctcatgctgcgtttgacaaccaacgctgaagtacgcgttgacgctgttttgcttcaggcggaac

SEQ ID NO: 620081 - DNA, 75 bp, synthetic construct
  source 1..75: mol_type = other DNA
cctggcgagagcaacgccggacggcctttcttcgcttctggttgctgatgttcgttgctcctctgctgctggctg

SEQ ID NO: 620082 - DNA, 75 bp, synthetic construct
  source 1..75: mol_type = other DNA
agtggaagtggaggatatcgacaacctctcgcgcaaccaagacatcgcggtcggactgcaagtgatcttgaagcc

SEQ ID NO: 620083 - DNA, 75 bp, synthetic construct
  source 1..75: mol_type = other DNA
cagacaaagatgccatgcaccaggctgttgtgaaccgccccgggtttcctggagagtgttttatctgtgaactca

SEQ ID NO: 620084 - DNA, 75 bp, synthetic construct
  source 1..75: mol_type = other DNA
gtaagttggagtcattaccttggcaactatgcatatcttcgcgcagaaaaacttgggcaactggatgattttttt

SEQ ID NO: 620085 - DNA, 75 bp, synthetic construct
  source 1..75: mol_type = other DNA
cgtggcgtcaggtgatgaaatcccagatctgtcaacgctgcgggcgtttatcaccaacggtgagcagggggtgaa

SEQ ID NO: 620086 - DNA, 75 bp, synthetic construct
  source 1..75: mol_type = other DNA
ggataaatcattgcatctctccggagttttttggtcatcagctcagggaacaggtaaaaagctggacaggactca

SEQ ID NO: 620087 - DNA, 75 bp, synthetic construct
  source 1..75: mol_type = other DNA
aacactcgatgaactgaaccagtcgggaaaagggaaaatgtggtttgcgggcgaggaaccgcccctgaatggcaa

SEQ ID NO: 620088 - DNA, 75 bp, synthetic construct
  source 1..75: mol_type = other DNA
gcagcagggaacgctggaggtaaagggacttacggcgaacattaccgcgttaaatgcgctggaaacgtcacttcg

SEQ ID NO: 620089 - DNA, 75 bp, synthetic construct
  source 1..75: mol_type = other DNA
catgcggcaaaaaaatggcagcggcagacgggcggggtggtggatttatcaaatctggaacgccagcgtaaatta

SEQ ID NO: 620090 - DNA, 75 bp, synthetic construct
  source 1..75: mol_type = other DNA
gccaggaagcgttcagcgcttatggcgatgttatcgaaacgcaacagcgggattttttccacatcaacaatggcc

SEQ ID NO: 620091 - DNA, 75 bp, synthetic construct
  source 1..75: mol_type = other DNA
aaagaaccctgttacagcaatgccgctgtggaaaagctttcattgcccacacaggacagccgggacattattgcc

SEQ ID NO: 620092 - DNA, 75 bp, synthetic construct
  source 1..75: mol_type = other DNA
gttgcaaattcagaatcccggcaaattaacgcaaattgccattgccgactccgataaactgcgcgtcggtgattt

SEQ ID NO: 620093 - DNA, 75 bp, synthetic construct
  source 1..75: mol_type = other DNA
agctaaaagatggcggcaaaggtattaagatcgatgaggttgtcaaaggaagcccagctgctcaggctggcttgc

SEQ ID NO: 620094 - DNA, 75 bp, synthetic construct
  source 1..75: mol_type = other DNA
cacgggtgacccgctacgaatttgcggatactaaggctgttgtaggccggaaaaggcgttcacgccgtatccggc

SEQ ID NO: 620095 - DNA, 75 bp, synthetic construct
  source 1..75: mol_type = other DNA
gcatcctgctcgccagatccagcttcccagcctgcaacgcggtgaaggtgaagcgatgcttaccgccctcaccca

SEQ ID NO: 620096 - DNA, 75 bp, synthetic construct
  source 1..75: mol_type = other DNA
gctgaaatgcgcaaagtgctggcgacaaaaccggccatcatcgccctgcagatcgtacgtggcaatgagagcatt

SEQ ID NO: 620097 - DNA, 75 bp, synthetic construct
  source 1..75: mol_type = other DNA
gctgagttgcgttctcgtatcgcgaccaccgagccgggcacgaaagtgaaactcggcctgctgcgtaacggcaaa

SEQ ID NO: 620098 - DNA, 75 bp, synthetic construct
  source 1..75: mol_type = other DNA
cagttcggtaaaagctcagaaaaacttcgtgcaaaaaccgaacggcagatacaggaagcacaggagcgaatcagc

SEQ ID NO: 620099 - DNA, 75 bp, synthetic construct
  source 1..75: mol_type = other DNA
aagggctgcaattctatgaagtggttcctgttgcattagtggttgcggggacgcaaatggctacaggccaccgta

SEQ ID NO: 620100 - DNA, 75 bp, synthetic construct
  source 1..75: mol_type = other DNA
atgaaagaagcgatagcgcagcgtaaaccactggttaccaccgctgggccgcgtagtctgattttccgtggggcc

SEQ ID NO: 620101 - DNA, 75 bp, synthetic construct
  source 1..75: mol_type = other DNA
atgagtttttttgatgagttgaaaacctctctggaagaggctgtcgagattaaacaaggtttgaaagaaccagca

SEQ ID NO: 620102 - DNA, 75 bp, synthetic construct
  source 1..75: mol_type = other DNA
ttggttgattctggtgtatcccaaatcgtagtatatctggcgtcatcatcagtcagaaaacatatgcattctttg

SEQ ID NO: 620103 - DNA, 75 bp, synthetic construct
  source 1..75: mol_type = other DNA
cttcaggtggtgctgatacaacagataactgtgttgccctttgtccgaattgccatagagaattgcactatagta

SEQ ID NO: 620104 - DNA, 75 bp, synthetic construct
  source 1..75: mol_type = other DNA
gtaatcggatcttgaagctactggggctgcagccagttggtgaggtctggggagtaggacgcagactgacggaaa

SEQ ID NO: 620105 - DNA, 75 bp, synthetic construct
  source 1..75: mol_type = other DNA
atgccttctggaaatcaggaaccccgcagggaccctgaaatgaaacgtaaagcctggcttgcggtatttcttggg

SEQ ID NO: 620106 - DNA, 75 bp, synthetic construct
  source 1..75: mol_type = other DNA
aagaaggcgaagtagaactgccagaaggagagtttaacaccgcctttaacccggaagccgtggtgaaagtaaccg

SEQ ID NO: 620107 - DNA, 75 bp, synthetic construct
  source 1..75: mol_type = other DNA
gtatttttcgatatcgaagctctttccgatcacacctccccgtttccgcacatgctgccgcgcccggaaacgttc

SEQ ID NO: 620108 - DNA, 75 bp, synthetic construct
  source 1..75: mol_type = other DNA
gcctttcgcttgaggaagccccttcgactaaacagcaaattgtgtgcagccgcagttttggcgtgaagatcactg

SEQ ID NO: 620109 - DNA, 75 bp, synthetic construct
  source 1..75: mol_type = other DNA
gacgaatgtttcctggatgcccggggaattagccactgtatggatctggaggattttggcaggcagctgcgtggg

SEQ ID NO: 620110 - DNA, 75 bp, synthetic construct
  source 1..75: mol_type = other DNA
cctgcagccggtggaagaaatctggggcgtggggaaccggatagcgaaaaagctgcacgttatggggatcaccac

SEQ ID NO: 620111 - DNA, 75 bp, synthetic construct
  source 1..75: mol_type = other DNA
aagcgcaggacggtacgccggactggaacctcatcgaacgtttactgaaagagtggcagccggacgaaatcatcg

SEQ ID NO: 620112 - DNA, 75 bp, synthetic construct
  source 1..75: mol_type = other DNA
atgagtggaaccttactcgccttcgacttcggtaccaaaagcattggtgtagcggtcggccaacgcattaccggc

SEQ ID NO: 620113 - DNA, 75 bp, synthetic construct
  source 1..75: mol_type = other DNA
gcgcgtaaatttgccaaccgtattcatggtcgtttcggtgttgaagtaaagctccatgacgagcgtcttagcacc

SEQ ID NO: 620114 - DNA, 75 bp, synthetic construct
  source 1..75: mol_type = other DNA
tttgcccctatatttccagacacctgttatcacttaacccattactggcttgctgccgtagatattcccgtggcg

SEQ ID NO: 620115 - DNA, 75 bp, synthetic construct
  source 1..75: mol_type = other DNA
cgcaaccggcgaatctgccgctgactattcacgaactcgaacgtcatccgctgggtacacaggcgtttatcccga

SEQ ID NO: 620116 - DNA, 75 bp, synthetic construct
  source 1..75: mol_type = other DNA
atgttgcgatttttgaaccaatgttcacaaggccggggcgcatggctgttgatggcgtttactgctctggcactg

SEQ ID NO: 620117 - DNA, 75 bp, synthetic construct
  source 1..75: mol_type = other DNA
caaaacgtccccgttcgccgctaaagagccgtactacggcaacgtggccacggaaaaactgcttaccccgactca

SEQ ID NO: 620118 - DNA, 75 bp, synthetic construct
  source 1..75: mol_type = other DNA
atgggcgtcccctggttccaactgaagacggcacaattcccggagccggtcatcaccttctcgagcaattacgag

SEQ ID NO: 620119 - DNA, 75 bp, synthetic construct
  source 1..75: mol_type = other DNA
tgaatttgtttgatgaagtacagccgcgggaacggagcgagcagctgatgcaagtactggatggtattaaccatt

SEQ ID NO: 620120 - DNA, 75 bp, synthetic construct
  source 1..75: mol_type = other DNA
atgggggtaccgtggtttcagctgaggtcgatgaaatttccggagccggttatcgcgttctccagtaattatgct

SEQ ID NO: 620121 - DNA, 75 bp, synthetic construct
  source 1..75: mol_type = other DNA
tgccgatcaccgtcgcgcagagctggtttctggcgggcgtttgtttgacctcggccaggtaccgaagtccgtctg

SEQ ID NO: 620122 - DNA, 75 bp, synthetic construct
  source 1..75: mol_type = other DNA
atgttgcgatttttgaaccaatgttcacaaggccggggggcgtggctgttaatggcgtttaccgctctggctctg

SEQ ID NO: 620123 - DNA, 75 bp, synthetic construct
  source 1..75: mol_type = other DNA
ccagccactcagggggttgtagacctgaccaatccagatcggcaacgtcgattgctcgcattagtcccggttaat

SEQ ID NO: 620124 - DNA, 75 bp, synthetic construct
  source 1..75: mol_type = other DNA
gcatgtcgcttgaggaagccccgccagtgaaacagcagatcgtctgcagccgcagttttggagagaaaatcacgg

SEQ ID NO: 620125 - DNA, 75 bp, synthetic construct
  source 1..75: mol_type = other DNA
ggcacgccgtggtttcagatgaaaaacgaaagatacccggaaaaaatatacgcgttctcaagcaactatgaactt

SEQ ID NO: 620126 - DNA, 75 bp, synthetic construct
  source 1..75: mol_type = other DNA
gcttttatgccagctgcgaacgtgttttccgcccggatttgaaaggaaagccggttgtggtgctcagtaataacg

SEQ ID NO: 620127 - DNA, 75 bp, synthetic construct
  source 1..75: mol_type = other DNA
tgtgaaaacatcgccgtttgccgtaaatgagccctactacggtaatctggccagtgaaaagctgctcatccccac

SEQ ID NO: 620128 - DNA, 75 bp, synthetic construct
  source 1..75: mol_type = other DNA
aaatttcagcgttgtgctggagagaaccgttcgggaactcaacggagaaagctgtatttcgcttgaagaagcgcc

SEQ ID NO: 620129 - DNA, 75 bp, synthetic construct
  source 1..75: mol_type = other DNA
ggactttggccggcagctacgcgaacacgtgcgctcaggaacggggctgacaataggtgtcgggatggggccaac

SEQ ID NO: 620130 - DNA, 75 bp, synthetic construct
  source 1..75: mol_type = other DNA
gactatgttcacaaactggaagtaacagacccatgcaataaacgctttatcattgaagagtgcaatcgacttgat

SEQ ID NO: 620131 - DNA, 75 bp, synthetic construct
  source 1..75: mol_type = other DNA
gataacccggttgagcaggtagaagtaaatgtcagtgaacaaacgacaaaaggggctgaatctcgtactacccga

SEQ ID NO: 620132 - DNA, 75 bp, synthetic construct
  source 1..75: mol_type = other DNA
cgatcttcgttcaaatattgcagctgaagctcgggcaaagatcatttacgaacgtctcattaatgttactgatga

SEQ ID NO: 620133 - DNA, 75 bp, synthetic construct
  source 1..75: mol_type = other DNA
agcaacaggctggcgtgatagccggcaaaccaaaactcgacctgacgaacactgactggatttacggggtggagc

SEQ ID NO: 620134 - DNA, 75 bp, synthetic construct
  source 1..75: mol_type = other DNA
agcttaatcataaatggaatgataattttttcattcgctatgataaaataagacgtaaaaggacttacacggtaa

SEQ ID NO: 620135 - DNA, 75 bp, synthetic construct
  source 1..75: mol_type = other DNA
cggaacgcactgaaaggcccgattaccgcactggcggaagatctggcgcaacttcgtggtgtgctggggctggac

SEQ ID NO: 620136 - DNA, 75 bp, synthetic construct
  source 1..75: mol_type = other DNA
atgaccattaacttccgccgtagtgcactgcaattaagcgtggctgcgctgttctcttctgcttttatggcaaat

SEQ ID NO: 620137 - DNA, 75 bp, synthetic construct
  source 1..75: mol_type = other DNA
tttaatatctatttcatgcattgttttgaagcatcaacgtatattgacaagcatacaatcaacgaaattaaactt

SEQ ID NO: 620138 - DNA, 75 bp, synthetic construct
  source 1..75: mol_type = other DNA
ttgaccaagaaactatgaattggcttaatgacctgaacaggtcaggctttaatatctatttcatgcattgttttg

SEQ ID NO: 620139 - DNA, 75 bp, synthetic construct
  source 1..75: mol_type = other DNA
tgatgatcaggtcaggcagtcagcgaaaactgatttttcacctgcagtcgtccgctctgttaccgatgtcattct

SEQ ID NO: 620140 - DNA, 75 bp, synthetic construct
  source 1..75: mol_type = other DNA
gcgacgcagagcatgcggcgcagatgttgcgcaaattatcgggtcagacccatcaggtgatgacggcagtggcgt

SEQ ID NO: 620141 - DNA, 75 bp, synthetic construct
  source 1..75: mol_type = other DNA
ttgggtgttcaaagctctggctattggtacactgaagcaggtattcaatgacgctgacaattgcattgaacttaa

SEQ ID NO: 620142 - DNA, 75 bp, synthetic construct
  source 1..75: mol_type = other DNA
aatagcttaccatccgcgttggataatgcagaggctcgcaagtcactgatcgaggaatggctagaggcctatata

SEQ ID NO: 620143 - DNA, 75 bp, synthetic construct
  source 1..75: mol_type = other DNA
ttggtacttccatggccggtgtaggggtaggtgtagacagtcaaaagcttgcagcagcaacgtcagcaacaacga

SEQ ID NO: 620144 - DNA, 75 bp, synthetic construct
  source 1..75: mol_type = other DNA
atgctgatacagcggtggcgcaagccgcttcaccgttgctcgggcatatcggctacgtgattgtcgttatcggcg

SEQ ID NO: 620145 - DNA, 75 bp, synthetic construct
  source 1..75: mol_type = other DNA
taggcgttaccacactgctctatatttccctggcactggtgctgcttagtgatgtttcggcattagagttagaaa

SEQ ID NO: 620146 - DNA, 75 bp, synthetic construct
  source 1..75: mol_type = other DNA
taaagtgaaagatccgcaggtcattatgccacgggcgtttctggtggcaattggcgttaccacgttgctttatat

SEQ ID NO: 620147 - DNA, 75 bp, synthetic construct
  source 1..75: mol_type = other DNA
catgggattctggcgctttgatgacagtgctttgcctatggccgtctttaatcaccccgaacatcgtctggtcag

SEQ ID NO: 620148 - DNA, 75 bp, synthetic construct
  source 1..75: mol_type = other DNA
tgaagccggtgacgggtatctatggcatgggattctggcgctttgatgacagtgcttcgcctatggccgtcttta

SEQ ID NO: 620149 - DNA, 75 bp, synthetic construct
  source 1..75: mol_type = other DNA
gcgatgcagaacatgcggcgcagatgttgcgcaaattatcgggacagactcatcaggtaatgacggcggtggcgc

SEQ ID NO: 620150 - DNA, 75 bp, synthetic construct
  source 1..75: mol_type = other DNA
accaagcttccaaaatcagcttgtgttagcctcgcaactttaaatttaggtacatcagctgccggatatggtatt

SEQ ID NO: 620151 - DNA, 75 bp, synthetic construct
  source 1..75: mol_type = other DNA
tacctccgccatccccgaaaactacaaggatggtaaaaaaatcatacacccgttcgggggagaaattaaaatcgg

SEQ ID NO: 620152 - DNA, 75 bp, synthetic construct
  source 1..75: mol_type = other DNA
gctgcttctgacaataacaagactcagagcaccgtctccgaagtcatgagtatcatctccgctgttaacggtctc

SEQ ID NO: 620153 - DNA, 75 bp, synthetic construct
  source 1..75: mol_type = other DNA
gctgctgatgttccgcaggtcaaagtaactgtgacggataaacagtgcgaaccgatgaccattacggtcaacgcc

SEQ ID NO: 620154 - DNA, 75 bp, synthetic construct
  source 1..75: mol_type = other DNA
cgtcgtggggtggagtccgtgccgacgctgctgaaaaaaatgttttcacgcgtgctgtggctggcgcgcggtcgg

SEQ ID NO: 620155 - DNA, 75 bp, synthetic construct
  source 1..75: mol_type = other DNA
caacgggcgagaacatcatctgcatattattttgaccttccgcgaatcgctgccaggccgacatcgggttcgccg

SEQ ID NO: 620156 - DNA, 75 bp, synthetic construct
  source 1..75: mol_type = other DNA
gctgagtgatatggaagttagaaaaagaagtaaatatgctgttgcttgtgttaatgatgatgacctgtatgttcc

SEQ ID NO: 620157 - DNA, 75 bp, synthetic construct
  source 1..75: mol_type = other DNA
ggacgtcgtggtgtggactccgtaccgacgctgctgaaaaaaatgttctcacgcgtgctgtggctggcgcgcggt

SEQ ID NO: 620158 - DNA, 75 bp, synthetic construct
  source 1..75: mol_type = other DNA
cgatatcgtttaatgcggcggcgagccagcaatgagcaacgaagctggcgctatctggatatcatcaaccggatg

SEQ ID NO: 620159 - DNA, 75 bp, synthetic construct
  source 1..75: mol_type = other DNA
tctgatggacagattcgtcagggactttccgcaatggtgcagctgcttgagcattatttctctgagcagggggcc

SEQ ID NO: 620160 - DNA, 75 bp, synthetic construct
  source 1..75: mol_type = other DNA
agatgagcaacattctacctggaaagaaatcttgtcaagacaaaaacaatgagtcacaggtagtacagactactc

SEQ ID NO: 620161 - DNA, 75 bp, synthetic construct
  source 1..75: mol_type = other DNA
gcatcaacttataccgcgcttacactatctagttttgccttccctcccatcgcattagccactctgccgcttatt

SEQ ID NO: 620162 - DNA, 75 bp, synthetic construct
  source 1..75: mol_type = other DNA
ataataaaaatataaatgttaatattgatacttcagatttaaatataacgctcagacaaggccttgattcattaa

SEQ ID NO: 620163 - DNA, 75 bp, synthetic construct
  source 1..75: mol_type = other DNA
cttgtgttaatgatgatgacctgtatgttcctagttttggtgggggaatagaggggaaagatgcagggaactatc

SEQ ID NO: 620164 - DNA, 75 bp, synthetic construct
  source 1..75: mol_type = other DNA
ggcatgaaaccgtgataaaatactccggtagtgagccaagatatcatccccagatgttgctttcacccaatgaag

SEQ ID NO: 620165 - DNA, 75 bp, synthetic construct
  source 1..75: mol_type = other DNA
tttgaggattattactttgatgtcgggcaggctctactcttgccaacatcccaattaattatattcgggataaat

SEQ ID NO: 620166 - DNA, 75 bp, synthetic construct
  source 1..75: mol_type = other DNA
ggctgctggtggaaggggaaacggaaacctgggttatcaatgaactggcgcgtcagtgcggacatcattttgatg

SEQ ID NO: 620167 - DNA, 75 bp, synthetic construct
  source 1..75: mol_type = other DNA
aacttctggtccggtaacgtgctgagtccggccaaactccgcgacaagtggacccagctcgaaatcaaccgtaac

SEQ ID NO: 620168 - DNA, 75 bp, synthetic construct
  source 1..75: mol_type = other DNA
ttttgcactgtgccgaacgtcgacgcgatatttcagatggtggtgtagagctattggtagaccctgccaaagtgc

SEQ ID NO: 620169 - DNA, 75 bp, synthetic construct
  source 1..75: mol_type = other DNA
agcaacgagcaactttccgaattgaccgggatattgccgcacaagtgttctgctgcaaaaagcgttctggtaaag

SEQ ID NO: 620170 - DNA, 75 bp, synthetic construct
  source 1..75: mol_type = other DNA
gatgaatctgcgcaaaattatctcgaaagcgatccatcgctcttccaaacccgatcttgccattgaagtggcaat

SEQ ID NO: 620171 - DNA, 75 bp, synthetic construct
  source 1..75: mol_type = other DNA
tggtacgtgagtcctcgcgcgttgccgcctggcgtctggggccgagtggcttgagtaccgaagatagccgacgca

SEQ ID NO: 620172 - DNA, 75 bp, synthetic construct
  source 1..75: mol_type = other DNA
acactgcgcagttttctcgataaagacggacatccgattgatgttgaggatattaacgatcaggctcgtcatctg

SEQ ID NO: 620173 - DNA, 75 bp, synthetic construct
  source 1..75: mol_type = other DNA
ctggggccgagtggcttgagtaccgaagacagccgacgcatatcctttcacattcgttttaaccgtccgtcatcg

SEQ ID NO: 620174 - DNA, 75 bp, synthetic construct
  source 1..75: mol_type = other DNA
aagacgcgcgtccgttattgttgatagaagatccggaaacgcgcctgcatccgattatgctttcagtcgcctggc

SEQ ID NO: 620175 - DNA, 75 bp, synthetic construct
  source 1..75: mol_type = other DNA
caggaccatcggcctcttatgaatactttgcccgaagtgccagtggtcaggttgctgatgccagggcggtcagcc

SEQ ID NO: 620176 - DNA, 75 bp, synthetic construct
  source 1..75: mol_type = other DNA
gcgtactgcactgaacgtggtgggtaatgcgctggcggtgctggtgattgccaagtgggaacacaaatttgaccg

SEQ ID NO: 620177 - DNA, 75 bp, synthetic construct
  source 1..75: mol_type = other DNA
ctgatcaaaatgattgtggtgccaattgttatctccacgctggtggtgggtatcgcgggtgttggtgatgccaaa

SEQ ID NO: 620178 - DNA, 75 bp, synthetic construct
  source 1..75: mol_type = other DNA
cctatcctgccgaacagcgtgaagccgtctccgccgcgctggggctggaatcggaacccctgaacgttatcgccc

SEQ ID NO: 620179 - DNA, 75 bp, synthetic construct
  source 1..75: mol_type = other DNA
agattaaaagaagatagcaaacaatttctagcgattggcattgagatacaaaattctaggataaaacgagctaca

SEQ ID NO: 620180 - DNA, 75 bp, synthetic construct
  source 1..75: mol_type = other DNA
tgcatgtacagggcgtccagcgggtggagctggaggaaccagcaagcaatatcgcggttgacgactcgcagttcg

SEQ ID NO: 620181 - DNA, 75 bp, synthetic construct
  source 1..75: mol_type = other DNA
atgatgagtattattttgctaatacgcaaaatatgcttgcttatcatggtgtcgaatcaatggttgatctacatt

SEQ ID NO: 620182 - DNA, 75 bp, synthetic construct
  source 1..75: mol_type = other DNA
tgcatcgatggtcgcggttggtccgctggctgaaacgctgacggagcctcacgaactcggtcacgccttggggga

SEQ ID NO: 620183 - DNA, 75 bp, synthetic construct
  source 1..75: mol_type = other DNA
ttatgatgcgctggggcaggcagcggaacgcattctgtccctgagtggcatggccccggcggaagtccgtgatga

SEQ ID NO: 620184 - DNA, 75 bp, synthetic construct
  source 1..75: mol_type = other DNA
ccaagtgggaacacaaatttgaccgcaaaaaggcgctggcttatgagcgtgaagtgctgggcaaatttgataaaa

SEQ ID NO: 620185 - DNA, 75 bp, synthetic construct
  source 1..75: mol_type = other DNA
gcgtgtcgtttgtggtgctgctggcaacgctgggtagcgtaggtattccgctggaaggtctggcgtttattgccg

SEQ ID NO: 620186 - DNA, 75 bp, synthetic construct
  source 1..75: mol_type = other DNA
tcaatttgctctctccggcgggtgatatcttcatccatctgatcaaaatgattgttgtgccgattgtgatctcca

SEQ ID NO: 620187 - DNA, 75 bp, synthetic construct
  source 1..75: mol_type = other DNA
taccggaacccgccatcatcgcgaagcctgattttgaggcaattctggctgacacaaaggccatgatgattgcgt

SEQ ID NO: 620188 - DNA, 75 bp, synthetic construct
  source 1..75: mol_type = other DNA
gcctgattttgaggcaattctggctgacacaaaggccatgatgattgcggcttatcccgccgaacagcgtgaagc

SEQ ID NO: 620189 - DNA, 75 bp, synthetic construct
  source 1..75: mol_type = other DNA
cgtctccggccaacgtgacggtttccatcctgtccactgaaggcgacggcacagcaacggaggcgttgcttaata

SEQ ID NO: 620190 - DNA, 75 bp, synthetic construct
  source 1..75: mol_type = other DNA
ctggttatcactccggcaacggataccaccgacgcggtgatggaaagcgacacatcgctgagactgcgggcgcaa

SEQ ID NO: 620191 - DNA, 75 bp, synthetic construct
  source 1..75: mol_type = other DNA
cgcgggcaatatgaacacaaagcgcctggttatcactccggcaacggataccaccgacgcggtgatggaaagtga

SEQ ID NO: 620192 - DNA, 75 bp, synthetic construct
  source 1..75: mol_type = other DNA
tcagaacccctgaacattattgcccagggcatggcttttcgtgagctcattattcgccagagaatcaatgacgcc

SEQ ID NO: 620193 - DNA, 75 bp, synthetic construct
  source 1..75: mol_type = other DNA
gaacccacacagaatatggccatcagcgacatacaggcggcgcgctgtgagtcattcaccatcagcgaaggtggg

SEQ ID NO: 620194 - DNA, 75 bp, synthetic construct
  source 1..75: mol_type = other DNA
aagtgaaagccgtactgaacgacgaaacagttcgccccgtggcggacagactgacggtgaaaagcgcggaaatca

SEQ ID NO: 620195 - DNA, 75 bp, synthetic construct
  source 1..75: mol_type = other DNA
ttttgcacgcagcgcaagcggaaaagtggcagatgccagagcaaccagcccggcaccggcggaagttgtggttgc

SEQ ID NO: 620196 - DNA, 75 bp, synthetic construct
  source 1..75: mol_type = other DNA
aggctatggcatggcgggagctgttactgcggcagcgaatcaatgatggcgcagcggcctgtatgctgagtcatt

SEQ ID NO: 620197 - DNA, 75 bp, synthetic construct
  source 1..75: mol_type = other DNA
aatttggaattcgttactgcctcggcgtcactaaccccgactccgggattgccgaaaaacagtatcttcgccatc

SEQ ID NO: 620198 - DNA, 75 bp, synthetic construct
  source 1..75: mol_type = other DNA
agggaatatatgcgccagcaatatcacgacgtacagcatacgctaaactggtactgttttgattactggagtgag

SEQ ID NO: 620199 - DNA, 75 bp, synthetic construct
  source 1..75: mol_type = other DNA
cgtgactaatcctgactccgggattgccgagaaacagtatcaacgccatccgtcactgaatgactaccgccgcct

SEQ ID NO: 620200 - DNA, 75 bp, synthetic construct
  source 1..75: mol_type = other DNA
tttgcaagttatttttttgctggagataaactattactgttcaccaatttgctctctaaactgtgtactgaacgt

SEQ ID NO: 620201 - DNA, 75 bp, synthetic construct
  source 1..75: mol_type = other DNA
ttgccaccgtcctgagcggaatctctctcacggcttatgccgcgcaaccgatgagtaacctggacagaggtcaac

SEQ ID NO: 620202 - DNA, 75 bp, synthetic construct
  source 1..75: mol_type = other DNA
ctgaccgcctaccaacgccgccagatgaataagcgtgtcgaggctgagcgtatcgctaaagagctggcgtctcag

SEQ ID NO: 620203 - DNA, 75 bp, synthetic construct
  source 1..75: mol_type = other DNA
ctatgaaaatactgtgagtctggacggtcagtcctatccgctgtctctggcgattaagaccctgattccgggcta

SEQ ID NO: 620204 - DNA, 75 bp, synthetic construct
  source 1..75: mol_type = other DNA
aaatacaaccagcgacggcttgagtataatgatatgctggcgcgcgatcagcctgtgatggcggcgcttggaaag

SEQ ID NO: 620205 - DNA, 75 bp, synthetic construct
  source 1..75: mol_type = other DNA
aaccgggaaaaagacaataaaagaggccaggattggcagtatcgtaccggcacagcaggaagggtacgtacttat

SEQ ID NO: 620206 - DNA, 75 bp, synthetic construct
  source 1..75: mol_type = other DNA
ttgccaccgtcctgagcggaatcaccttcacggcttatgccgcgcaaccactgagtaaccaggacagcggtcaac

SEQ ID NO: 620207 - DNA, 75 bp, synthetic construct
  source 1..75: mol_type = other DNA
agtagccaaaggcgcgctgtctgcagtggttgcggattcccgtggcgtgactgtagataaaatgactgaactgcg

SEQ ID NO: 620208 - DNA, 75 bp, synthetic construct
  source 1..75: mol_type = other DNA
cacctatgacgcgtccagatcctttgactgggggagaacgccgtttatggcgtgtccgtctgggtgttgcattag

SEQ ID NO: 620209 - DNA, 75 bp, synthetic construct
  source 1..75: mol_type = other DNA
gctcggctacaacatggtattagccaggcagtcgctcgtcatgtcttaacccataggaataatcctttaggaggg

SEQ ID NO: 620210 - DNA, 75 bp, synthetic construct
  source 1..75: mol_type = other DNA
cgcgaggcaatggagctgttagaggctctggctgaagctggcgtgaccattggtaacttcttcagtaatgacctg

SEQ ID NO: 620211 - DNA, 75 bp, synthetic construct
  source 1..75: mol_type = other DNA
tagcgataaaagttgcacaggacggcggtgatgcgcagggggcagtgacgcaatattacgcctcgatgggactgc

SEQ ID NO: 620212 - DNA, 75 bp, synthetic construct
  source 1..75: mol_type = other DNA
acatggactttgtggcttcccgtccatgctgtggctgtggagctgcgggagctggcgctcacattacgccttata

SEQ ID NO: 620213 - DNA, 75 bp, synthetic construct
  source 1..75: mol_type = other DNA
aagcgggtcaggccgtgaacaacctgcaaaaaatctttgatgacaagccagacagggctatcgcttcacttaata

SEQ ID NO: 620214 - DNA, 75 bp, synthetic construct
  source 1..75: mol_type = other DNA
tctgatcatttcagccatgtctcggtgatgcgcaaagtgctgttacgcatgaccagttgggtgcattacctttat

SEQ ID NO: 620215 - DNA, 75 bp, synthetic construct
  source 1..75: mol_type = other DNA
atgtggctttcgcatgggcaatgtttaagatcttcaaaattcctgtaaataaatggaccattcccaccgcggccc

SEQ ID NO: 620216 - DNA, 75 bp, synthetic construct
  source 1..75: mol_type = other DNA
cgcgactgcttgcttccccctgtccggggcagcaactggtagtgacagaaggcgtgttcagcatggacggcgata

SEQ ID NO: 620217 - DNA, 75 bp, synthetic construct
  source 1..75: mol_type = other DNA
ccctctgccgtggattgacgatgacaagccacgcctcggggatttccgtcgtcagcttatcggtcaggtgaaaga

SEQ ID NO: 620218 - DNA, 75 bp, synthetic construct
  source 1..75: mol_type = other DNA
tgtatggctatcccgtaccaaccacaccgtggctgaatacggtacccggtttatttattgacgattatactgtag

SEQ ID NO: 620219 - DNA, 75 bp, synthetic construct
  source 1..75: mol_type = other DNA
ttgaaaaggttcagcctgttcgtaccaaggaaagccgcatccaggacattcttgagtcggtgccgctcgattctg

SEQ ID NO: 620220 - DNA, 75 bp, synthetic construct
  source 1..75: mol_type = other DNA
cctccgggataaaaaggcagagcatgaaaaggcgctggattatagcgcttccgcatctgccgataagatcagaag

SEQ ID NO: 620221 - DNA, 75 bp, synthetic construct
  source 1..75: mol_type = other DNA
gcaattgatgctggcgatcaggaggctgcaatgcgtatttacgggcagttaccaaagggacatccattaactctt

SEQ ID NO: 620222 - DNA, 75 bp, synthetic construct
  source 1..75: mol_type = other DNA
tcaaaaggctaagagtgaacaggccagagatgatagcgcagcctctgcatctgagtttatccgtggactgaaaca

SEQ ID NO: 620223 - DNA, 75 bp, synthetic construct
  source 1..75: mol_type = other DNA
atgatctggcaggagaaaatcgacgcggcgctcgatgcgcggcgtgttgctgatgccttgcgtcgccgttatccg

SEQ ID NO: 620224 - DNA, 75 bp, synthetic construct
  source 1..75: mol_type = other DNA
caagtcgaagcggtaatggatgcggcgctgcgtccgaaacgcagtctgtggcgtaaaatggtcatgggtggggtg

SEQ ID NO: 620225 - DNA, 75 bp, synthetic construct
  source 1..75: mol_type = other DNA
caggaatgctcaggcggaggtggatgagttttacgctacaactggttcaccgcaacatcagcagaaaattcagca

SEQ ID NO: 620226 - DNA, 75 bp, synthetic construct
  source 1..75: mol_type = other DNA
gcagaaatatcatctgtcgattcatgaagtggcgcagcgttgcgggtttccggatagcgactatttttgtcgcgt

SEQ ID NO: 620227 - DNA, 75 bp, synthetic construct
  source 1..75: mol_type = other DNA
ttgaatcactggtaacgtccgtaggtccggataccttcactgcagatgtctctcccggtgtcagaatgcaggtat

SEQ ID NO: 620228 - DNA, 75 bp, synthetic construct
  source 1..75: mol_type = other DNA
gacatggtggatgtgaacgtctatcaggaaaatatcttccataccaagatgttgcttaaagagttcgaccttaag

SEQ ID NO: 620229 - DNA, 75 bp, synthetic construct
  source 1..75: mol_type = other DNA
aagaaccggttgacccgaaactcatcgacaaaacagaacaccccggcccactgccagaaacggtcgttgcccatc

SEQ ID NO: 620230 - DNA, 75 bp, synthetic construct
  source 1..75: mol_type = other DNA
caattgtcgccgtcacgctgcgcggagtgctgtcgggatgaaaggctggcaaccgcgcgacatggaaaattattg

SEQ ID NO: 620231 - DNA, 75 bp, synthetic construct
  source 1..75: mol_type = other DNA
tgattatcgtcgtcacggtgcgcggagtgcggtaggcatgaaaggctggcaaccgcgcgacatggaaaactattg

SEQ ID NO: 620232 - DNA, 75 bp, synthetic construct
  source 1..75: mol_type = other DNA
aaatgtttagatcttaaggttgtagaaacaaaaaatatttttcggctcatgtatttgaagtttttaaaattaatt

SEQ ID NO: 620233 - DNA, 75 bp, synthetic construct
  source 1..75: mol_type = other DNA
atccacgcttactcattaattcatgatgatctaccggcaatggatgatgacgatttacgtcgtggtttacccacc

SEQ ID NO: 620234 - DNA, 75 bp, synthetic construct
  source 1..75: mol_type = other DNA
cccggaagaaagcccgggatctgatcgacgatgcccgccagtcattgagtcaactggctgaacagtcactcgata

SEQ ID NO: 620235 - DNA, 75 bp, synthetic construct
  source 1..75: mol_type = other DNA
gcttaccacgcccgctgcgccgattgtgctggtggataaaaaatacgtacctgagctttgtgatgatatcgcccc

SEQ ID NO: 620236 - DNA, 75 bp, synthetic construct
  source 1..75: mol_type = other DNA
tcggggccaatattcttaacatcgcccgccaggattacgaaccacagggtgccagcgtcactattctggtgagtg

SEQ ID NO: 620237 - DNA, 75 bp, synthetic construct
  source 1..75: mol_type = other DNA
atgatttaccggcaatggatgatgacgatctgcgtcgcggtttgccgacctgccatgtgaagtttggcgaagcaa

SEQ ID NO: 620238 - DNA, 75 bp, synthetic construct
  source 1..75: mol_type = other DNA
aggtggtaagcgcctgcgacctttcctggtttatgccaccggtcatatgttcggcgttagcacaaacacgctgga

SEQ ID NO: 620239 - DNA, 75 bp, synthetic construct
  source 1..75: mol_type = other DNA
atgaaaatcagggtaagttatttccgggcgaaagataaggcaacaggaaagcggatggcgatcctggttaatgaa

SEQ ID NO: 620240 - DNA, 75 bp, synthetic construct
  source 1..75: mol_type = other DNA
aaagatcatctcgcgatctacggcgtgaaaaacgccttactggcaccaggctatagcacctctataaaggctgac

SEQ ID NO: 620241 - DNA, 75 bp, synthetic construct
  source 1..75: mol_type = other DNA
cgtgccgcacccgcgcattgaacgccccgagatcatcaagatggactacgggatggccgatggctcgattaggat

SEQ ID NO: 620242 - DNA, 75 bp, synthetic construct
  source 1..75: mol_type = other DNA
ggcgctggctctgggctttggcgatggcgtgaatggcccaatgcaggcgttgctaccctgtgaatcccccacagt

SEQ ID NO: 620243 - DNA, 75 bp, synthetic construct
  source 1..75: mol_type = other DNA
aaacgcatgactctgcaaccgtcatctcttccagaactgtttgaattaaaaaatggtgaatggaattatattggt

SEQ ID NO: 620244 - DNA, 75 bp, synthetic construct
  source 1..75: mol_type = other DNA
attctaaaattccaaacacgatacatgaaataaccctaggccctggttgcaatgttccaggctatgcgggaacca

SEQ ID NO: 620245 - DNA, 75 bp, synthetic construct
  source 1..75: mol_type = other DNA
gcagttgataatggcactgattcatcgcgtagccatttcgaaagggcgttacaactaatgacggatagagagcag

SEQ ID NO: 620246 - DNA, 75 bp, synthetic construct
  source 1..75: mol_type = other DNA
cggcgctgttacccccggctcacgatctcgaaacattcgccgtctggattggtatggcaagagaagcgggtattg

SEQ ID NO: 620247 - DNA, 75 bp, synthetic construct
  source 1..75: mol_type = other DNA
gaatggcttgaactcgtccctgcgggtgagttcaccgggcgcgatggccggacgtggattaaccgcaatccgcat

SEQ ID NO: 620248 - DNA, 75 bp, synthetic construct
  source 1..75: mol_type = other DNA
cgccaccgaaattaaaggcccgcgtggtgaagatgctccggcgtatggctgggttgaagaactgcgggtgacgga

SEQ ID NO: 620249 - DNA, 75 bp, synthetic construct
  source 1..75: mol_type = other DNA
ttgacgacttgagccaggtccagcgcgaacggctggcctacatcgattttcggctttacttcttcggtgagatcg

SEQ ID NO: 620250 - DNA, 75 bp, synthetic construct
  source 1..75: mol_type = other DNA
taatacgccggaaggaagagtcttcgacagttttcagcaacagttacgccagtcagctgagctgtctgcaatgag

SEQ ID NO: 620251 - DNA, 75 bp, synthetic construct
  source 1..75: mol_type = other DNA
taaacgccgtttgattgttgaaagggatggacgtatttttgcgaccgatgcgcttgaggtcgcgattacgtttgt

SEQ ID NO: 620252 - DNA, 75 bp, synthetic construct
  source 1..75: mol_type = other DNA
ggtgatggcggattgtctctggggcagggggttattgctgcggcgcgcatcctgcaatgcggtatagtggcggat

SEQ ID NO: 620253 - DNA, 75 bp, synthetic construct
  source 1..75: mol_type = other DNA
ccgactgggctgtgcgggccgtgctgttttactggcgaatggttactggacgttggctgtggaaataccctcgat

SEQ ID NO: 620254 - DNA, 75 bp, synthetic construct
  source 1..75: mol_type = other DNA
gacagaagttaaagcactggcgttgacttatctggagctgacggtactcagttatccagcagctgccatcactct

SEQ ID NO: 620255 - DNA, 75 bp, synthetic construct
  source 1..75: mol_type = other DNA
gtcgttgtgattctgatttggctaaatgctttatttatgcctatttggtccgcctcatgggtgctacccgctgga

SEQ ID NO: 620256 - DNA, 75 bp, synthetic construct
  source 1..75: mol_type = other DNA
cgcggatctcgtcatccatctcttgacgagattggtgtggtgtttaaataccttggtattgataacgtctcattc

SEQ ID NO: 620257 - DNA, 75 bp, synthetic construct
  source 1..75: mol_type = other DNA
aaaacctggccttgcttgatgaagtggaacaagcagcgcacgcactgaaaggtagcgaacggtcctggcaacggg

SEQ ID NO: 620258 - DNA, 75 bp, synthetic construct
  source 1..75: mol_type = other DNA
gggattaaccctctctcgttatattggcgctattgcgatcctttgggttttgaagagtggcgttaatccggcgtt

SEQ ID NO: 620259 - DNA, 75 bp, synthetic construct
  source 1..75: mol_type = other DNA
cgggcggcgtggacagggcaccattgccgcatgtggggtcttaataagggcagggtggtcagttttgctcgatgc

SEQ ID NO: 620260 - DNA, 75 bp, synthetic construct
  source 1..75: mol_type = other DNA
gtaattaaacccgacgggcaggtactcaggagcgtcgttagtcagccggcgaatggcctctatcactttacctgg

SEQ ID NO: 620261 - DNA, 75 bp, synthetic construct
  source 1..75: mol_type = other DNA
taacaatgttgatgttaacttcttccgtgtgaagcccgaatctctgcctgcattcattagccaatgggaataccg

SEQ ID NO: 620262 - DNA, 75 bp, synthetic construct
  source 1..75: mol_type = other DNA
ctggggatctttgtattaatatccgtaaacaaaacatggttaattaaactactgactattcgctggcgcgaatag

SEQ ID NO: 620263 - DNA, 75 bp, synthetic construct
  source 1..75: mol_type = other DNA
ctggggatctttgtattaatatccgtaaacaaaacatggttaattaaactactgactattcgctggcgcgaatga

SEQ ID NO: 620264 - DNA, 75 bp, synthetic construct
  source 1..75: mol_type = other DNA
cagtggctggatgttctggaggagtgccggcagacagaggccgggccagaagaacggctgcgtattgccctgctg

SEQ ID NO: 620265 - DNA, 75 bp, synthetic construct
  source 1..75: mol_type = other DNA
tggcagagcatcactggccgctggatggcggtgatgtcattgcgttgacgctcgacggtatcggtatgggggaga

SEQ ID NO: 620266 - DNA, 75 bp, synthetic construct
  source 1..75: mol_type = other DNA
atgacgcgcatccgggctatgtctccagccagtgggcgcgcgaaatgaatctgccgacgcaaacggtgctgcatc

SEQ ID NO: 620267 - DNA, 75 bp, synthetic construct
  source 1..75: mol_type = other DNA
ggggatggcgggttgtctctggggcaggggggtattgctgcggcgcggtgggtagggggggaagtccagaacgga

SEQ ID NO: 620268 - DNA, 75 bp, synthetic construct
  source 1..75: mol_type = other DNA
acggcgctttgtggggcggcgagtgcctgcgggtgaactatcgtgaatgccagcacctgggcggcttgcctgcgg

SEQ ID NO: 620269 - DNA, 75 bp, synthetic construct
  source 1..75: mol_type = other DNA
gttgccgagttgatgcgcgagcaggctacgatgcgcggtatcactacgctggtattcagcggcggggttattcat

SEQ ID NO: 620270 - DNA, 75 bp, synthetic construct
  source 1..75: mol_type = other DNA
ctgccgacgcaaacggtgctgcatcatcatgcccacgcagcggcgtgtctggcagagcatcagtggccgctggat

SEQ ID NO: 620271 - DNA, 75 bp, synthetic construct
  source 1..75: mol_type = other DNA
gctcttcccgcagagtttacctgcgggggatggcgggttgtctctggggcagggggttattgttgcggcccgttg

SEQ ID NO: 620272 - DNA, 75 bp, synthetic construct
  source 1..75: mol_type = other DNA
caaattgttcccgatgccgcgacttgtcctgcctgtcttgccgaaatgaataccccgggcgagcggcgttatcgt

SEQ ID NO: 620273 - DNA, 75 bp, synthetic construct
  source 1..75: mol_type = other DNA
ctggaggagtgtcggctgacagaggccggaccagaagaacggctgcgtattgccctgctgaatgtggattacgtc

SEQ ID NO: 620274 - DNA, 75 bp, synthetic construct
  source 1..75: mol_type = other DNA
tggcgcttgctgggggcgatttggcggcgaagcagccgtggcgtaacctgctggcgcagtgcctgcgctttgtgc

SEQ ID NO: 620275 - DNA, 75 bp, synthetic construct
  source 1..75: mol_type = other DNA
ttcaattgcatcagcactgcccgccgctggcgcgtattgatagcgtcgagcgtgagccgtttatctggtcacaac

SEQ ID NO: 620276 - DNA, 75 bp, synthetic construct
  source 1..75: mol_type = other DNA
ggggatggcgggttgtctctggggcagggggttattgttgcggcccgttgggtggcgggtgaagtccagaacgga

SEQ ID NO: 620277 - DNA, 75 bp, synthetic construct
  source 1..75: mol_type = other DNA
ttagctctgttctccctacagttaaatgcgccgtcaggtggtaaaggctaccgcaccggtttacgcggcggtggg

SEQ ID NO: 620278 - DNA, 75 bp, synthetic construct
  source 1..75: mol_type = other DNA
caaacaacgaagtttaataaagaccactttattaagcgtggcgtgactgaacacgtatgctctcattgttctgcg

SEQ ID NO: 620279 - DNA, 75 bp, synthetic construct
  source 1..75: mol_type = other DNA
ccagtttgggccagattccccttcatttatgcaggatttcgaggcgctcacgggagataaagttcaggtcgcttc

SEQ ID NO: 620280 - DNA, 75 bp, synthetic construct
  source 1..75: mol_type = other DNA
agcagtctcaagcaggcaaaagtgggcctgtggggatttggttatgattttgacaacatgaaagcgcgctgttgg

SEQ ID NO: 620281 - DNA, 75 bp, synthetic construct
  source 1..75: mol_type = other DNA
atgccgcaggatgaagccgacttaccgctacccaaaaaatttgacgatctggttttcccctggcttggcccgacg

SEQ ID NO: 620282 - DNA, 75 bp, synthetic construct
  source 1..75: mol_type = other DNA
aaaattacggtgcgaattatgccatgtggcagcatcctttaacgccttaccgtataccacttaaagagggtggcg

SEQ ID NO: 620283 - DNA, 75 bp, synthetic construct
  source 1..75: mol_type = other DNA
cctgaggttagtgcgtcaaattgaagaaggtcaggagccggatgaattactcagcaaatggcaaaaggaaatgtg

SEQ ID NO: 620284 - DNA, 75 bp, synthetic construct
  source 1..75: mol_type = other DNA
caaacaacgaagtttaataaagaccactttatcaagcgtggtgtaacggaatacctgtgcccacattgttctgcg

SEQ ID NO: 620285 - DNA, 75 bp, synthetic construct
  source 1..75: mol_type = other DNA
accatcatacactaaatcagtaagttggcagcatcacccagaagcggcaatgaagaaagtgtctgaactggaaac

SEQ ID NO: 620286 - DNA, 75 bp, synthetic construct
  source 1..75: mol_type = other DNA
ttgggatgatatctgggaagacggactggaatctgaaaagctacgggaagcattgctgtccttagaacacgcttt

SEQ ID NO: 620287 - DNA, 75 bp, synthetic construct
  source 1..75: mol_type = other DNA
gcgctcctgagcctgatgacgaccaaaaattacggtgccaattatgccatgtggcagcatcccttaacgccttac

SEQ ID NO: 620288 - DNA, 75 bp, synthetic construct
  source 1..75: mol_type = other DNA
gcctgtggggatttggttatgattttgacaacatgaaagcccgttgttggtacgaacaccatttcccgctgctgc

SEQ ID NO: 620289 - DNA, 75 bp, synthetic construct
  source 1..75: mol_type = other DNA
tacgaacatcatttcccgctgctgctcaataaaaagaaggccagataccgaaactgcggctggctgcgcaaacgg

SEQ ID NO: 620290 - DNA, 75 bp, synthetic construct
  source 1..75: mol_type = other DNA
ttgatgaccggtcacgcctggcaacagcaagggatgttgctcgccttggcgcgattgtgcaacgtccctgcaact

SEQ ID NO: 620291 - DNA, 75 bp, synthetic construct
  source 1..75: mol_type = other DNA
tgcgattgtacagcgccacctgcaactccagcagcaacaaagagataaaacagcctttacggtaattcgtctggg

SEQ ID NO: 620292 - DNA, 75 bp, synthetic construct
  source 1..75: mol_type = other DNA
gtcccctttctattcaggcgctaaaagatgaagggcgctatgaacgtttaaccagcggttacctgccggaagcag

SEQ ID NO: 620293 - DNA, 75 bp, synthetic construct
  source 1..75: mol_type = other DNA
agggactaataatactcagatcgcaagcacggcttatgttatggctgcgatcgctgccctcgtggattcgtcgcc

SEQ ID NO: 620294 - DNA, 75 bp, synthetic construct
  source 1..75: mol_type = other DNA
ggcgtgttaacccctcggattacggtaactttgattcccgctatgtgagagatgtcagacttggcacacgagttg

SEQ ID NO: 620295 - DNA, 75 bp, synthetic construct
  source 1..75: mol_type = other DNA
gatgcatctatgttttttaactcctttcaaccaaggaaatttgaaaacaaccccctttatgagaaagaggatgat

SEQ ID NO: 620296 - DNA, 75 bp, synthetic construct
  source 1..75: mol_type = other DNA
tgttttttggctgcgggatttgaaaaagagtgtctgaacctggttaagaaattaggtaacgataaaatcaagctg

SEQ ID NO: 620297 - DNA, 75 bp, synthetic construct
  source 1..75: mol_type = other DNA
ccgggtttgagcgtgagtgccttcacctggtgaaaaaattaggggataacaaaattaaattggttctggaattaa

SEQ ID NO: 620298 - DNA, 75 bp, synthetic construct
  source 1..75: mol_type = other DNA
actcatccctttttattgcttacatgggatgtcttggatggggtagtgcatatttttatggatggggtgtttctt

SEQ ID NO: 620299 - DNA, 75 bp, synthetic construct
  source 1..75: mol_type = other DNA
aaagaatttcccgcctgagcagttcgttggaaaaggggctttatgaacgtagccacgccatccgcttgtgtttat

SEQ ID NO: 620300 - DNA, 75 bp, synthetic construct
  source 1..75: mol_type = other DNA
tcgacctacaagcggctcagagactgaaacaaatctggatagaaaagaaaactaagctaggattaacccaagagc

SEQ ID NO: 620301 - DNA, 75 bp, synthetic construct
  source 1..75: mol_type = other DNA
cagacgttcagggctttccccaaagaagataaagagaaaatgcttaaggaaatgaaggagaaaaaagaatcaatt

SEQ ID NO: 620302 - DNA, 75 bp, synthetic construct
  source 1..75: mol_type = other DNA
ggtggtggagctgaccgggcggcgcaatagcggtgtgccagtttccctttccgtatcaacaggagcagagaatgg

SEQ ID NO: 620303 - DNA, 75 bp, synthetic construct
  source 1..75: mol_type = other DNA
aaacaattcgcgattgcacgagtgttatcgcaactcatgtgctgaataagcgcaaacttgaggtgcgtaaactta

SEQ ID NO: 620304 - DNA, 75 bp, synthetic construct
  source 1..75: mol_type = other DNA
ctcgacccgcgcgaatgcggcctgaaaagcgtcgctgaagcggcaaataccccggtggcgctggtgtttggtcgc

SEQ ID NO: 620305 - DNA, 75 bp, synthetic construct
  source 1..75: mol_type = other DNA
cgtgaaaaccatccggggcaggtgatgaataagctgcgtcgtctgtttacccgtgcgcgcccggaaagccaggag

SEQ ID NO: 620306 - DNA, 75 bp, synthetic construct
  source 1..75: mol_type = other DNA
tttcgttaacgtcaacttcaccctgccaaaagaaggggaaaaatatgttcccccgaaaggacaatcattacgtgc

SEQ ID NO: 620307 - DNA, 75 bp, synthetic construct
  source 1..75: mol_type = other DNA
ggacgttttcgcgaggtatattactgggacagttacttcaccatgttaggacttgccgaaagcggtcactgggat

SEQ ID NO: 620308 - DNA, 75 bp, synthetic construct
  source 1..75: mol_type = other DNA
gatcagcctcagaacccggcgctgcgcctgcaggttatgtctgccgtttatgtggcgctgagccgctgggaacct

SEQ ID NO: 620309 - DNA, 75 bp, synthetic construct
  source 1..75: mol_type = other DNA
tctggcttgagtctggctgcgtctatggttatcgcaagatccatctcgatctgcgtgataccggacagcagtgcg

SEQ ID NO: 620310 - DNA, 75 bp, synthetic construct
  source 1..75: mol_type = other DNA
ttgggtaacggatataacctacatcaggacccacgaaggctggctgtatcttgccgtggttgttgatctgttctc

SEQ ID NO: 620311 - DNA, 75 bp, synthetic construct
  source 1..75: mol_type = other DNA
gcccaacaggctccagcgacagttcaatccggatgctccggataagcgttgggtaacggacataacctacatcag

SEQ ID NO: 620312 - DNA, 75 bp, synthetic construct
  source 1..75: mol_type = other DNA
gcacgctgccgtggccgatgctcgacccgcgcgaatgcggtttgaaaagcgtcgctgaagcggcaaatacgccgg

SEQ ID NO: 620313 - DNA, 75 bp, synthetic construct
  source 1..75: mol_type = other DNA
tggtggagacgtcacacaccggcaatatggggtctgttgcccgtgccatgaaaacaatgggattaaccaatctgt

SEQ ID NO: 620314 - DNA, 75 bp, synthetic construct
  source 1..75: mol_type = other DNA
acggataaagaaaaagttctacggaacgcgggaagaagcccgcagtgatatttttgattacatcgaaatgtttta

SEQ ID NO: 620315 - DNA, 75 bp, synthetic construct
  source 1..75: mol_type = other DNA
cacaaagaatggcgttaattcccaccacactttttttgtgttttgccgcgctatcggcacaagcggaagaaattg

SEQ ID NO: 620316 - DNA, 75 bp, synthetic construct
  source 1..75: mol_type = other DNA
ggtggtagagcttaccgggcagcgcaacaacggcgcgccggtttccctttcggtatcaacaggagcagacaatgg

SEQ ID NO: 620317 - DNA, 75 bp, synthetic construct
  source 1..75: mol_type = other DNA
agggcaacggcaaggccattactgatacggaccatctccgccagtcagtgcgggatattctgctgacgccgcagg

SEQ ID NO: 620318 - DNA, 75 bp, synthetic construct
  source 1..75: mol_type = other DNA
ataccagcggtaaagccattactgatattgaccatctgcgtcagtcggtgcgggacattctactgacaccgcagg

SEQ ID NO: 620319 - DNA, 75 bp, synthetic construct
  source 1..75: mol_type = other DNA
tggttccctgctgtcggcactgatagcccagccacaaaatccggcgttacgcctgcaggtcatgtcggcagtgta

SEQ ID NO: 620320 - DNA, 75 bp, synthetic construct
  source 1..75: mol_type = other DNA
gtagccgcattgctcgccgtgaatatggttccctgctgtcagccctgatagaccagccacaaaatccggcgttac

SEQ ID NO: 620321 - DNA, 75 bp, synthetic construct
  source 1..75: mol_type = other DNA
tgtggcactgagtcgctgggagccacggctgacgctagatgccatcactattaacagcaattttgacggttcaat

SEQ ID NO: 620322 - DNA, 75 bp, synthetic construct
  source 1..75: mol_type = other DNA
ttagctggcacttcctgaccaatgttcagcacacctatgaccgggagaaaaagctggtggaaaaatatgatgtca

SEQ ID NO: 620323 - DNA, 75 bp, synthetic construct
  source 1..75: mol_type = other DNA
cgcaaaaaatagcgttaattcccgcctgcgttttgttgtgtttcgctgcgctagcggtgcaggcagaagaaacgc

SEQ ID NO: 620324 - DNA, 75 bp, synthetic construct
  source 1..75: mol_type = other DNA
cttcgtgaaagtcaatttctccctgccaaaagaaggcgagaaacacatcccaccaaagggacagtcgctacgtga

SEQ ID NO: 620325 - DNA, 75 bp, synthetic construct
  source 1..75: mol_type = other DNA
cgaccattatctcgcagcgaattttgagggggtgggatgttgaagctgccatcttcacaccgtccaaacgaccag

SEQ ID NO: 620326 - DNA, 75 bp, synthetic construct
  source 1..75: mol_type = other DNA
gtaaacgttttggaaagttggttgcacttaaatattccggtatttcaaacaaacaagggcgactttgggattgca

SEQ ID NO: 620327 - DNA, 75 bp, synthetic construct
  source 1..75: mol_type = other DNA
aactcaaggatggcactattcttaaccgctactgggatgaccacgatacgccacgtccggagtcgtgggtagaag

SEQ ID NO: 620328 - DNA, 75 bp, synthetic construct
  source 1..75: mol_type = other DNA
atttatcgcaccaaaagcggtgctgatttggtggcgacgctcaatcagcccaacccttggctggtatgctcttta

SEQ ID NO: 620329 - DNA, 75 bp, synthetic construct
  source 1..75: mol_type = other DNA
ttgaagcggcaaaacgccatatcgcaaggcgggaaggcggcattatttggcatacgcaaggttctggcaaaagcc

SEQ ID NO: 620330 - DNA, 75 bp, synthetic construct
  source 1..75: mol_type = other DNA
atacagttggcacacgtattgtcagaattgttactgacagaccgactcaaaatgtagtcacacagttattcagtg

SEQ ID NO: 620331 - DNA, 75 bp, synthetic construct
  source 1..75: mol_type = other DNA
tggagcagatcgttaacgacattttgctggatatggatacccgtccacgcctgatggacgggcgcggcaacgcca

SEQ ID NO: 620332 - DNA, 75 bp, synthetic construct
  source 1..75: mol_type = other DNA
attcctgatcatgaaattcttgtcggtgggtttccttgcgtagcattctctcaagcagggctcaaaaaaggattt

SEQ ID NO: 620333 - DNA, 75 bp, synthetic construct
  source 1..75: mol_type = other DNA
aacagatgtcagtattactgaatgaactgatcgaacttcgtcgacaaaaagccattgaatatcaagattacctcg

SEQ ID NO: 620334 - DNA, 75 bp, synthetic construct
  source 1..75: mol_type = other DNA
aaggcgaccagcaatctcgataccgaccggggagaacgaagccggacaacgtttgtgtgggaagggttccggctg

SEQ ID NO: 620335 - DNA, 75 bp, synthetic construct
  source 1..75: mol_type = other DNA
tttccggcagcctgcaacaggccgaacggtttgtacagctgggctacaaaattggcgtaggcggtactatcacct

SEQ ID NO: 620336 - DNA, 75 bp, synthetic construct
  source 1..75: mol_type = other DNA
gctgcccgtgtgtttgccgtgctttgcgagttacgcccggaacccgcggatgagattgccgaagtgttgcttaat

SEQ ID NO: 620337 - DNA, 75 bp, synthetic construct
  source 1..75: mol_type = other DNA
agcgacaactggcggaacgggacgaggaattggcctccctccaaaaggccgcgacatacttcgcgaagcgcctga

SEQ ID NO: 620338 - DNA, 75 bp, synthetic construct
  source 1..75: mol_type = other DNA
ggcggtaattagctggcagtggttaactcagggcgacgccgatcaacaaacgaaaggtgcactcgccagcctgct

SEQ ID NO: 620339 - DNA, 75 bp, synthetic construct
  source 1..75: mol_type = other DNA
cgtagatggcgttcgtaagcctgccacgcctttattgccaggcaatacgctggcgagttttttacccttaaccgg

SEQ ID NO: 620340 - DNA, 75 bp, synthetic construct
  source 1..75: mol_type = other DNA
attgataaaaccatgaccgaccatacgctgtttcaggcgatttgtcgggtgaaccggctggacggtgaggataaa

SEQ ID NO: 620341 - DNA, 75 bp, synthetic construct
  source 1..75: mol_type = other DNA
gaacgtattgatgtcgatgaaggagccagcggcgcgatggtcgggtttaacgttcatttccactctctggcaagc

SEQ ID NO: 620342 - DNA, 75 bp, synthetic construct
  source 1..75: mol_type = other DNA
ttaccgcaagggtttggctctggtctggtagcaatgccagacggcgttttgcagacgcgtaccgattttggtaaa

SEQ ID NO: 620343 - DNA, 75 bp, synthetic construct
  source 1..75: mol_type = other DNA
atgaaactcatcagtaacgatctgcgcgatggcaataaattgccacttcgtcatgtctttaacggcatgggttac

SEQ ID NO: 620344 - DNA, 75 bp, synthetic construct
  source 1..75: mol_type = other DNA
ggcaatggaaccggaagttctgctgtttgatgaacccacctcggcgctcgatcctgaactggtaggcgaagtgct

SEQ ID NO: 620345 - DNA, 75 bp, synthetic construct
  source 1..75: mol_type = other DNA
gatggtcaactcaaagtcgccgataaaaatcagctgcgcttactgcgcacacgcctgacgatggtattccagcac

SEQ ID NO: 620346 - DNA, 75 bp, synthetic construct
  source 1..75: mol_type = other DNA
ggcgcgccggagcagttatttggcaacccgcaaagccctcgtctgcaacagttccttaagggatcgctgaaataa

SEQ ID NO: 620347 - DNA, 75 bp, synthetic construct
  source 1..75: mol_type = other DNA
aaaaagaggtgattctggcggcgctggagaaaacgggcggcaacaaaaccgaagccgcccgtcagttagggatca

SEQ ID NO: 620348 - DNA, 75 bp, synthetic construct
  source 1..75: mol_type = other DNA
caaaatgcttgcggagtattttgaacaacctgaggctgaagcagccaaacgtgtgagtgatttcgaaaaagaggt

SEQ ID NO: 620349 - DNA, 75 bp, synthetic construct
  source 1..75: mol_type = other DNA
agggaaaattattcgtgtttgtggatgagtgccaccgaacccaatccggcaaattgcattcggcaatgacaagca

SEQ ID NO: 620350 - DNA, 75 bp, synthetic construct
  source 1..75: mol_type = other DNA
tggttatttggtttatgaagaaacagtgcaaaaaagttgaaattggtaagttcgataatgacggacgctcatgtg

SEQ ID NO: 620351 - DNA, 75 bp, synthetic construct
  source 1..75: mol_type = other DNA
gacaatggtttgggatagcaaaggagatattaaccttcttatcatgccattggttggagttttgactctgtgggg

SEQ ID NO: 620352 - DNA, 75 bp, synthetic construct
  source 1..75: mol_type = other DNA
cggcgggaggatatccctctgctggctagccattttcttcagcgttttgccgagcgtaatcgcaaggcggtaaaa

SEQ ID NO: 620353 - DNA, 75 bp, synthetic construct
  source 1..75: mol_type = other DNA
actgccattttgatttcccgccgtttagcggtgatgaagaggccagcctgcaacgcgcggcacaagcgggcgtag

SEQ ID NO: 620354 - DNA, 75 bp, synthetic construct
  source 1..75: mol_type = other DNA
gctttttgacggctgcagctgcgggaatgtggtttgcggatgcccaggggctgacatcgccatggtttatcgtgc

SEQ ID NO: 620355 - DNA, 75 bp, synthetic construct
  source 1..75: mol_type = other DNA
ctcgatcggtggctatgttggcgatcatctgttggggaccaaacgcactattgtcctcggggcaattgtgctggc

SEQ ID NO: 620356 - DNA, 75 bp, synthetic construct
  source 1..75: mol_type = other DNA
ggcgttgcagtagtgatgctgttgatggtgccgtggctgaaacgcatgattgcgacgccggaaagccatagctag

SEQ ID NO: 620357 - DNA, 75 bp, synthetic construct
  source 1..75: mol_type = other DNA
ctgtcgtggaatggtaaaagatattggttctgcgccagacttccgaccaatgagcttcagcaaactgttgtacgt

SEQ ID NO: 620358 - DNA, 75 bp, synthetic construct
  source 1..75: mol_type = other DNA
ctcgaagcggtggtgttttacattctctacgcccagatgccaacgtcactgaacttctttgccatcaacaacgtg

SEQ ID NO: 620359 - DNA, 75 bp, synthetic construct
  source 1..75: mol_type = other DNA
actcgccagcccaatactggcaggcatttacacgcatctgggtaacaaaggcaaagacctctcgatgccgatgaa

SEQ ID NO: 620360 - DNA, 75 bp, synthetic construct
  source 1..75: mol_type = other DNA
gtttgctcagcatggaacaatgcgttttatcgagtatgttcgctgggtacgaatggcaaaagcgaggatgatttt

SEQ ID NO: 620361 - DNA, 75 bp, synthetic construct
  source 1..75: mol_type = other DNA
gagagcgtggcgcagttttttaatatcacgccaaatcatctgtcaaaactgtttgctcagcatggaacaatgcgt

SEQ ID NO: 620362 - DNA, 75 bp, synthetic construct
  source 1..75: mol_type = other DNA
gagtttatgtattgattttccgcgtctggatattgtgctacgcggcgaatacggcaactcgctggaagcaaagca

SEQ ID NO: 620363 - DNA, 75 bp, synthetic construct
  source 1..75: mol_type = other DNA
gagattgtcggcacctttgacgacggtctggacgtgttgaagttgcagcataaccgcgtcgacgccatttttctg

SEQ ID NO: 620364 - DNA, 75 bp, synthetic construct
  source 1..75: mol_type = other DNA
ttagctacgaaggaaaaccgatcagcaaaaaacgtaacagtatatgggctggagaacgtccgtatacagctcacc

SEQ ID NO: 620365 - DNA, 75 bp, synthetic construct
  source 1..75: mol_type = other DNA
attcgcagccgcgcggcgattttctctatcacagcatttgtaactgggttcaggataattatgcccaaccgctca

SEQ ID NO: 620366 - DNA, 75 bp, synthetic construct
  source 1..75: mol_type = other DNA
ggcggaaaattttgcccgcgtgcaggcgttagcggaaaaatatcaaccgctgtatgccgcattggggttgcatcc

SEQ ID NO: 620367 - DNA, 75 bp, synthetic construct
  source 1..75: mol_type = other DNA
atgcgagggaaaaaacgcattgggttattgtttttgctgatagcggttgtggttggtggcggcgggttattactg

SEQ ID NO: 620368 - DNA, 75 bp, synthetic construct
  source 1..75: mol_type = other DNA
cgtgcggaatgtgccgattgccatattccaaagtcagggatggattatttatttgctaaattaaaagcatctaaa

SEQ ID NO: 620369 - DNA, 75 bp, synthetic construct
  source 1..75: mol_type = other DNA
ctggaaacaattaagagaaacagattcagcgacctgccgcagttgtcatacgttcaatgctatggatattgcatc

SEQ ID NO: 620370 - DNA, 75 bp, synthetic construct
  source 1..75: mol_type = other DNA
gcgttagcggaaaattatcaaccgctgtatgccgctttagggttgcatccggggatgttggaaaaacataacgat

SEQ ID NO: 620371 - DNA, 75 bp, synthetic construct
  source 1..75: mol_type = other DNA
tggattatttatttgctaaattaaaagcatctaaagatatttatcatgaatttgttagcggcaaaatagacagtg

SEQ ID NO: 620372 - DNA, 75 bp, synthetic construct
  source 1..75: mol_type = other DNA
atgcgagggaaaaaacgcattgggttattgtttttgctgatagcggttgtggttggtggcgggttattactggcg

SEQ ID NO: 620373 - DNA, 75 bp, synthetic construct
  source 1..75: mol_type = other DNA
ttcaatcgccctaccgctatcgttttttcaaccggttataccgctaatttaggcgtcatcagcgcacttgccgac

SEQ ID NO: 620374 - DNA, 75 bp, synthetic construct
  source 1..75: mol_type = other DNA
ggtagcggtgggggagatcggtctggatctctttggcgatgatccacagtttgagaggcaacagtggttgctcga

SEQ ID NO: 620375 - DNA, 75 bp, synthetic construct
  source 1..75: mol_type = other DNA
gcgagttgcgccgggaacccgcggatgagattgccgaagtgttgcttaataacacgtatacgttgtttaacgtgc

SEQ ID NO: 620376 - DNA, 75 bp, synthetic construct
  source 1..75: mol_type = other DNA
atgaaaatgccccttacctctactctgattgcttctgccgttgcgctggcaaccttaacgggtgccgcacaagcg

SEQ ID NO: 620377 - DNA, 75 bp, synthetic construct
  source 1..75: mol_type = other DNA
aaggtcaggcagcgttagcggcccaaggcaccggcaccaccggttctcgtatggcaaacggcagttatgcgccgc

SEQ ID NO: 620378 - DNA, 75 bp, synthetic construct
  source 1..75: mol_type = other DNA
gcttatctcgctgggcgtgtatgtgaatcttatcctgccgcctgccgcctgccgcgcctgcaggcatcacgctgc

SEQ ID NO: 620379 - DNA, 75 bp, synthetic construct
  source 1..75: mol_type = other DNA
gaaacggtaatcctcaatggtttgctgcgtgatgcagacggtaaagcgttgcccaatcaacccatcaagttagac

SEQ ID NO: 620380 - DNA, 75 bp, synthetic construct
  source 1..75: mol_type = other DNA
tctgcgccggagaggcaaaagctggcacaacagagtgccggtaagacactgacattgcttgatctctctgaggtc

SEQ ID NO: 620381 - DNA, 75 bp, synthetic construct
  source 1..75: mol_type = other DNA
gtggggcgcttatcgtctggaagtcaaagcgccgaatgaagcggtcagtagtgtgcgtttctgggctggctatag

SEQ ID NO: 620382 - DNA, 75 bp, synthetic construct
  source 1..75: mol_type = other DNA
tgggttactacctttatggtgcgcccgcgaacggcaacacattacaagggcagcttttcctgcgccctctgcgtg

SEQ ID NO: 620383 - DNA, 75 bp, synthetic construct
  source 1..75: mol_type = other DNA
taacaatgtcgatgttaacttcttccgtgtgaaaccagaatcactgcccgctttcattagccagtgggaataccg

SEQ ID NO: 620384 - DNA, 75 bp, synthetic construct
  source 1..75: mol_type = other DNA
agaaacgctatggcgcagacatttacgatatttacggtcaggttattgaaggtcaggggcgtctggcagctctgc

SEQ ID NO: 620385 - DNA, 75 bp, synthetic construct
  source 1..75: mol_type = other DNA
tggcaaacaaaaagagccgggacgcgaggcgggaggttacagggattctgcgcaatcaggctgaaaagctggttg

SEQ ID NO: 620386 - DNA, 75 bp, synthetic construct
  source 1..75: mol_type = other DNA
ggtaaaacgtgaagtggagcgtcgtgtgaaggagcgcatgattctgtcacgtgtcagatgggtgtctaagttacc

SEQ ID NO: 620387 - DNA, 75 bp, synthetic construct
  source 1..75: mol_type = other DNA
gatatgaccgagccgtttgaggagcgtcgtgcggagtaccacgcccgctatctcgacatccagattgtgttaaaa

SEQ ID NO: 620388 - DNA, 75 bp, synthetic construct
  source 1..75: mol_type = other DNA
atatgaattagacgatgttacggatgcttatgtatatcatccaaaacctgaaacaatagaagcagaagagggaaa

SEQ ID NO: 620389 - DNA, 75 bp, synthetic construct
  source 1..75: mol_type = other DNA
cgttgaaaggggaaggggtgctcaaatctgaagaaatcaactcactttatgagcgtggcttttatatatgtaaaa

SEQ ID NO: 620390 - DNA, 75 bp, synthetic construct
  source 1..75: mol_type = other DNA
tcttattaatatcaggtatctttcaactaattatggtaaaagtgatttcaaacaggctattaataaagaggcgtt

SEQ ID NO: 620391 - DNA, 75 bp, synthetic construct
  source 1..75: mol_type = other DNA
gtggggcgcttatcgtctggaagttaaagcgccgaatgaagcggtcagtagtgtgcgtttctgggctggttatag

SEQ ID NO: 620392 - DNA, 75 bp, synthetic construct
  source 1..75: mol_type = other DNA
tttaacattgctggcgcgccaggctatagcaaacagtttttcatgtttggcccgcgcgatctttatcgcccgggt

SEQ ID NO: 620393 - DNA, 75 bp, synthetic construct
  source 1..75: mol_type = other DNA
cccgtacgattcaggatttaccgggtaaatggcaggcgcaaacctctttctcagctgagccgctgacaggcgaga

SEQ ID NO: 620394 - DNA, 75 bp, synthetic construct
  source 1..75: mol_type = other DNA
aaacggtcaattacggtatggcattgcagcctggtgaaacatgggtgatgccggttgaggaattgcaaaacttct

SEQ ID NO: 620395 - DNA, 75 bp, synthetic construct
  source 1..75: mol_type = other DNA
atggtggaatcaatgtatgttccccaatggcgggcgaccggcgcggctgaagatctgctgattgtcagaccgtaa

SEQ ID NO: 620396 - DNA, 75 bp, synthetic construct
  source 1..75: mol_type = other DNA
tggtccgcgcaggcgaacagggttacagcgtgccgacagacgccattaaccggggtaatgagcgtctgctgcgct

SEQ ID NO: 620397 - DNA, 75 bp, synthetic construct
  source 1..75: mol_type = other DNA
gaaaataagctgttgcctaatgagcagaacgtcttgttgaacacactttcacagcaggcgtttggtgaacgctgg

SEQ ID NO: 620398 - DNA, 75 bp, synthetic construct
  source 1..75: mol_type = other DNA
taataatgtcgatgttaacttcttccgtgttaagccagaatctctgccagcattcattagccaatgggaataccg

SEQ ID NO: 620399 - DNA, 75 bp, synthetic construct
  source 1..75: mol_type = other DNA
attgctgccgaaaacctttcccgaacgcttgatgaagtccagttaactctggatgacaaaggacgcggcgaagtt

SEQ ID NO: 620400 - DNA, 75 bp, synthetic construct
  source 1..75: mol_type = other DNA
gacattgctggatctctctgaagttcaacttgatggcgcagccacgctggtgctgacgttctccatccctctcga

SEQ ID NO: 620401 - DNA, 75 bp, synthetic construct
  source 1..75: mol_type = other DNA
gtgattaaacccgacgggcaggttcttaggagcgtcgttagtcagccgcaaaatggcctctatcactttacctgg

SEQ ID NO: 620402 - DNA, 75 bp, synthetic construct
  source 1..75: mol_type = other DNA
cgtgtgaagcctgaatctctgcctgctttcattagccagtgggaataccgcaattcgctggcgaactggcaatcg

SEQ ID NO: 620403 - DNA, 75 bp, synthetic construct
  source 1..75: mol_type = other DNA
atcagataatctcaaagagctacgcttgcgccaccttgaacctaaacgtgatttgatcgtcactattggcaagga

SEQ ID NO: 620404 - DNA, 75 bp, synthetic construct
  source 1..75: mol_type = other DNA
atccagtaaagagctggtgctgaacagtgcggagatgattaagaaacagcagctccagatgagaaatttctcgca

SEQ ID NO: 620405 - DNA, 75 bp, synthetic construct
  source 1..75: mol_type = other DNA
agacagccacgaattagcggcaacagagcaatcacagcagcgcatagcgtgaatatgagcaaacttcgtgacttt

SEQ ID NO: 620406 - DNA, 75 bp, synthetic construct
  source 1..75: mol_type = other DNA
atcgctgaactgcaatcacagtttgctggttttggtgcttcagctaaagaatctatgggtattcagggttctgaa

SEQ ID NO: 620407 - DNA, 75 bp, synthetic construct
  source 1..75: mol_type = other DNA
tacgatccggatgcgccaacgggttctggctggtggcactgggtagttgttaacttgcctgccgatacccgcgta

SEQ ID NO: 620408 - DNA, 75 bp, synthetic construct
  source 1..75: mol_type = other DNA
ggttaacagactttacaaggtcactgactaatttacttggttcattaggtggtcaatctaaaaatcttggtgaac

SEQ ID NO: 620409 - DNA, 75 bp, synthetic construct
  source 1..75: mol_type = other DNA
taattcatggaacaataatttagctcttatgttcgacggttcacaggaagggttaacagactttacaaggtcact

SEQ ID NO: 620410 - DNA, 75 bp, synthetic construct
  source 1..75: mol_type = other DNA
cgagcaagggcaagattcaagctgaagaattacgcggtcagttaggggacagaatggcaggtgcttttcagttat

SEQ ID NO: 620411 - DNA, 75 bp, synthetic construct
  source 1..75: mol_type = other DNA
gccgcagaataaactgactatccgtctgcaacctgatgaaggcgtggatatccaggtactgaataaagttcctgg

SEQ ID NO: 620412 - DNA, 75 bp, synthetic construct
  source 1..75: mol_type = other DNA
ggtttattacgatatatgcactgtatttgttcctatatttggctcaattatgggtgttttaattattgccttcaa

SEQ ID NO: 620413 - DNA, 75 bp, synthetic construct
  source 1..75: mol_type = other DNA
gctatctgtgtattggtgattatagcgtgtgtttatctgatgatttttgcatggaataaaggagatgatgcagat

SEQ ID NO: 620414 - DNA, 75 bp, synthetic construct
  source 1..75: mol_type = other DNA
cgtggtgatggaaaaaccgctgggtacgtcgctggcgacctcgcgtgaaatcaacgatcaggtaggcgaatactt

SEQ ID NO: 620415 - DNA, 75 bp, synthetic construct
  source 1..75: mol_type = other DNA
ggctatccgcgtcgacatcgataactggcgttgggctggcgtgccgttctacctgcgaacaggtaaacgtctgcc

SEQ ID NO: 620416 - DNA, 75 bp, synthetic construct
  source 1..75: mol_type = other DNA
gcgatctgcaaagggctgggtgaggcaaaactgaatgctaaacctgctcgcgtggtcatggaaaaaccgctggga

SEQ ID NO: 620417 - DNA, 75 bp, synthetic construct
  source 1..75: mol_type = other DNA
aaaattatctgtagctgatgcaattaccaaagtaatgattgtcggtatggcaactgatgtgattaatgccattgt

SEQ ID NO: 620418 - DNA, 75 bp, synthetic construct
  source 1..75: mol_type = other DNA
agattcagttgcggcatgtgttctggctgtccactcttggattaacggccatcgcctggctaacggctccctttg

SEQ ID NO: 620419 - DNA, 75 bp, synthetic construct
  source 1..75: mol_type = other DNA
tacgatcattacaggccgaaggttgggggtagggcagatagcgcaagcagagattcagttgcggcatgtgttctg

SEQ ID NO: 620420 - DNA, 75 bp, synthetic construct
  source 1..75: mol_type = other DNA
atggctggtgcatttaagctattcgctgaagcactgggtatgactgctacagagcttgatgcagccatgaaaaac

SEQ ID NO: 620421 - DNA, 75 bp, synthetic construct
  source 1..75: mol_type = other DNA
agtgcggagatgattaagaaacagcagctccagatgagaaatttctcgcaaataaaacagtcgatgattcaaagc

SEQ ID NO: 620422 - DNA, 75 bp, synthetic construct
  source 1..75: mol_type = other DNA
tgttgatgttggctacgaccattatcagaacgataaaacaaagtctaagcaacattttataaagctaaagactct

SEQ ID NO: 620423 - DNA, 75 bp, synthetic construct
  source 1..75: mol_type = other DNA
tggcgattggttttaatcctgcgctaaggatttcgttaaagggtaatgactccaacttattgatagtgttttatg

SEQ ID NO: 620424 - DNA, 75 bp, synthetic construct
  source 1..75: mol_type = other DNA
aaaagacttcagctatggtgatcggtagcctgatatttctgttcattattcttctgacttttttctggaaaaaag

SEQ ID NO: 620425 - DNA, 75 bp, synthetic construct
  source 1..75: mol_type = other DNA
ggaagattcaggctgaagagctacgtggtcaattaggtgacagaatggcaggtgctttccagttatttgccagaa

SEQ ID NO: 620426 - DNA, 75 bp, synthetic construct
  source 1..75: mol_type = other DNA
ttgctaagttttccgctggtgctggtgatatgaatacagaccagaaagaatccctattttctaatgtgattggca

SEQ ID NO: 620427 - DNA, 75 bp, synthetic construct
  source 1..75: mol_type = other DNA
tccagtttaccaccagatttaatgacactgttaatcctccaaaacaaccgagacagccacgaattagcggaaaca

SEQ ID NO: 620428 - DNA, 75 bp, synthetic construct
  source 1..75: mol_type = other DNA
tatagcgttatctgcaaagacactattcagtgctactacaggggttatgaacctgacaagagcaatcacaacgtt

SEQ ID NO: 620429 - DNA, 75 bp, synthetic construct
  source 1..75: mol_type = other DNA
aaagccgagaaacaaacgatgcaaatcgcatcaagaattgaaaaacgactaaataaagcttttagagttaatcct

SEQ ID NO: 620430 - DNA, 75 bp, synthetic construct
  source 1..75: mol_type = other DNA
gctgacgttaacccgtgccgccaaacctattacccatcgtaccgtgctggtggggaatgcggcgcaaactctgca

SEQ ID NO: 620431 - DNA, 75 bp, synthetic construct
  source 1..75: mol_type = other DNA
tcctgttgccatcgattatccggcagcgctggcactccgccagatgtcgatggttcatgatgaactgccaaaata

SEQ ID NO: 620432 - DNA, 75 bp, synthetic construct
  source 1..75: mol_type = other DNA
gacctgggaacaggcgcagcagtggcgtgacgcaggcattgggcaggtggtttatcaccgcagccgtgacgcgca

SEQ ID NO: 620433 - DNA, 75 bp, synthetic construct
  source 1..75: mol_type = other DNA
ggatttttcgctcgcgcctccgtatccgtttgtgcagcttgcgaccctgaaacaacggatcgaaaaggcagccag

SEQ ID NO: 620434 - DNA, 75 bp, synthetic construct
  source 1..75: mol_type = other DNA
gaggtctatacgaaggtgtttgcgctcgatgtcgcagcgcgccatcgtgtgcagttcgccatgcccgaagctgaa

SEQ ID NO: 620435 - DNA, 75 bp, synthetic construct
  source 1..75: mol_type = other DNA
gctggatgtggctgcccggcaccgggtgcagtttgcgatgcctgagtccgatgcggtcacaatgctgaaaaacag

SEQ ID NO: 620436 - DNA, 75 bp, synthetic construct
  source 1..75: mol_type = other DNA
tggatatggctgccacgctggcagtgcctttcacaggtgacggtcgggatgctgcggagatcctgcgtacactgc

SEQ ID NO: 620437 - DNA, 75 bp, synthetic construct
  source 1..75: mol_type = other DNA
agcgccctgctccattacgtccccgatctgcacagaaagatattgctggccactctgtggaataccggggcgcga

SEQ ID NO: 620438 - DNA, 75 bp, synthetic construct
  source 1..75: mol_type = other DNA
gatcaccactacgtcagccagctgcagatgatggtggccaccctgaaaattccgctggaaagacgaaacaagcgc

SEQ ID NO: 620439 - DNA, 75 bp, synthetic construct
  source 1..75: mol_type = other DNA
tttatcaccgcagccgtgacgcgcaggccgcaggcgtggcgtggggcgaagcggacattaccgcgatcaaacgtc

SEQ ID NO: 620440 - DNA, 75 bp, synthetic construct
  source 1..75: mol_type = other DNA
tgcttcgaagccaacgctgactgggtgaccgtaatttgctgtgcggatatcaacaccgccaaaggcgcgctggac

SEQ ID NO: 620441 - DNA, 75 bp, synthetic construct
  source 1..75: mol_type = other DNA
caataccgccaaaggcgcgctggacgtggcaaaagagtttaacggtgacgtacagatcgaactgaccggttactg

SEQ ID NO: 620442 - DNA, 75 bp, synthetic construct
  source 1..75: mol_type = other DNA
tttactttgttcccgcgcagttatcaaaagcaaaaggaataggtaaaaatattcttctcaaattacagttggtta

SEQ ID NO: 620443 - DNA, 75 bp, synthetic construct
  source 1..75: mol_type = other DNA
atgtcaggctccgttatacacagccagtctgcagccagggtaccggcagtttattctgccggacagtctccacaa

SEQ ID NO: 620444 - DNA, 75 bp, synthetic construct
  source 1..75: mol_type = other DNA
ggatttttcgctcacgcctccgtatccgtttgtgcagcttgcgaccctgaaacaacggaccgaaaaagctgccag

SEQ ID NO: 620445 - DNA, 75 bp, synthetic construct
  source 1..75: mol_type = other DNA
accactgaaggtcctgcagagcctgatggggcataagtccatcagctcaacggaggtctacacgaaggtgtttgc

SEQ ID NO: 620446 - DNA, 75 bp, synthetic construct
  source 1..75: mol_type = other DNA
tatgccggtataccgctgaaggtcctgcagagcctgatggggcataagtccatcagctcaacggaggtctacacg

SEQ ID NO: 620447 - DNA, 75 bp, synthetic construct
  source 1..75: mol_type = other DNA
tggatgtggctgcacggcaccgggtgcagttttcgatgtctgagtctgatgctgtgtctatgctcaaaagaattc

SEQ ID NO: 620448 - DNA, 75 bp, synthetic construct
  source 1..75: mol_type = other DNA
cagccggccagcagactcaccggctggttccgctctccgacaccgggtacgtcagccagctgcagacgatggtag

SEQ ID NO: 620449 - DNA, 75 bp, synthetic construct
  source 1..75: mol_type = other DNA
tagccgctgatggcacccattcagcgttagccactgcgtgcggtgttgactggcagcaagagccttacgagcaac

SEQ ID NO: 620450 - DNA, 75 bp, synthetic construct
  source 1..75: mol_type = other DNA
gaagcactggcgctgacgcggggggatttttcgctcacgcccccgtatccgtttgtgcaactggccactctgaag

SEQ ID NO: 620451 - DNA, 75 bp, synthetic construct
  source 1..75: mol_type = other DNA
gggtgatgtttttcacggcgcattggcggtggcgctggcaacaggtggggatttagcggagtcagtccgcttcgc

SEQ ID NO: 620452 - DNA, 75 bp, synthetic construct
  source 1..75: mol_type = other DNA
actggatgtggctgcacggcaccgggtgcagtttgcgatgccggaatctgatgcggttgtgatgctgaaacaatt

SEQ ID NO: 620453 - DNA, 75 bp, synthetic construct
  source 1..75: mol_type = other DNA
cagcagactcaccggctggttccgctctccgactcctggtacgtcagtcagctgcagacgatggtggcaacactg

SEQ ID NO: 620454 - DNA, 75 bp, synthetic construct
  source 1..75: mol_type = other DNA
aggctgtcgccagaacggattactggcagtctgtacaggcgcgggccggatatgtctacctcagctggaatgccg

SEQ ID NO: 620455 - DNA, 75 bp, synthetic construct
  source 1..75: mol_type = other DNA
ctgctccactacgtgccggatctgcgccgcaagatgctgctggccacactgtggaacaccggtgcgcgcattaat

SEQ ID NO: 620456 - DNA, 75 bp, synthetic construct
  source 1..75: mol_type = other DNA
gggattgagaaagcgcatcagcacggcattgccgccgtggcgctacataactcgcatcatatcggccgtatcggt

SEQ ID NO: 620457 - DNA, 75 bp, synthetic construct
  source 1..75: mol_type = other DNA
cggggtttgtctctatccactttgtcagtgtggtagggagcaaggctgttgcgccgttccgtggtcgtgacagtc

SEQ ID NO: 620458 - DNA, 75 bp, synthetic construct
  source 1..75: mol_type = other DNA
ataaaggttatgccctggcagtgatgtgcgaaattctcggtggtgcactttctggcggcaaaactacttatcagg

SEQ ID NO: 620459 - DNA, 75 bp, synthetic construct
  source 1..75: mol_type = other DNA
ggcaaaattaaagatggtgaatgccctcatttttatgaagatggaaaaatcaaacagcaacatagctatctgaat

SEQ ID NO: 620460 - DNA, 75 bp, synthetic construct
  source 1..75: mol_type = other DNA
gcaagcactataactttcattgcacaaatcgatcatgttgagctaaataaaacagcattatctcatgatatgaaa

SEQ ID NO: 620461 - DNA, 75 bp, synthetic construct
  source 1..75: mol_type = other DNA
ggggtgattttgccgcagataaacacagtctctatttcgaaggcaagcgcaccgataacaatggcggggaaatag

SEQ ID NO: 620462 - DNA, 75 bp, synthetic construct
  source 1..75: mol_type = other DNA
gggcgccagctcaggcggctaaacaggaagcggctccggcagcaggcccgtgcatcagcggctggcgtgaaagaa

SEQ ID NO: 620463 - DNA, 75 bp, synthetic construct
  source 1..75: mol_type = other DNA
gcgcgccagctcaggcggctaaacagaaagcggctccggcagcaggcccatgcatcagcggctggcgtgaaagaa

SEQ ID NO: 620464 - DNA, 75 bp, synthetic construct
  source 1..75: mol_type = other DNA
gagcgccagctcaggcggctaaacagcaagcggctccggcagcaggcccatgcatcagcggctggcgtgaaagaa

SEQ ID NO: 620465 - DNA, 75 bp, synthetic construct
  source 1..75: mol_type = other DNA
atggcgatcgcgcattgggtcaggtcgcggcgcacgaagcgatggcactggggattgagaaggcacgtcagcacg

SEQ ID NO: 620466 - DNA, 75 bp, synthetic construct
  source 1..75: mol_type = other DNA
ccgatcatttaatcgcggcaaacctggcagggcatgattctcatggtattggcatgatcccaagctatgtgcgtt

SEQ ID NO: 620467 - DNA, 75 bp, synthetic construct
  source 1..75: mol_type = other DNA
gatgggggcgattgtcgcgggactggcattattgctggtgtttatgtcagtcagaaaacaacctgaaacagtttg

SEQ ID NO: 620468 - DNA, 75 bp, synthetic construct
  source 1..75: mol_type = other DNA
tgatcagaaattatcgtctttagacaatccaacacaaataaaagataatgcaacaacaggcgattccagtgctca

SEQ ID NO: 620469 - DNA, 75 bp, synthetic construct
  source 1..75: mol_type = other DNA
aacgcacccgcttaaaagaagatgccatcatcggcctgatcttctcgtccttttttggcctggggctgtttatgg

SEQ ID NO: 620470 - DNA, 75 bp, synthetic construct
  source 1..75: mol_type = other DNA
tccccgcctgctcataattgctgtaactattggcagtgtaaccagtttcctcggcgcgtgggtcagttactttct

SEQ ID NO: 620471 - DNA, 75 bp, synthetic construct
  source 1..75: mol_type = other DNA
agcgccagcgcgccaacctcgctaccgctgcgcacctggcgacatctttctgatcatgcccctttgagtgcggag

SEQ ID NO: 620472 - DNA, 75 bp, synthetic construct
  source 1..75: mol_type = other DNA
accaaaatatctgttggcgccggagatcagcgccctgctccactatgtaccggatctgcaccgcaaaatgttgct

SEQ ID NO: 620473 - DNA, 75 bp, synthetic construct
  source 1..75: mol_type = other DNA
gtgctcagggccactccttgcctgaaaaacactataccggtgcttttgcctatgggttgtcagaggacggtttcg

SEQ ID NO: 620474 - DNA, 75 bp, synthetic construct
  source 1..75: mol_type = other DNA
ctcgcactacgagtttctcgccgacaccatgtggagcgattttgcctacggtcgcaatgccgtatacccggaagg

SEQ ID NO: 620475 - DNA, 75 bp, synthetic construct
  source 1..75: mol_type = other DNA
tgatgctaaaaggctggtcgctgattggcgatgcgctgtcgcactctattgtcccgggtgttgcgggggcatata

SEQ ID NO: 620476 - DNA, 75 bp, synthetic construct
  source 1..75: mol_type = other DNA
agcgatgccggtagccagattcgccactggcatacctatctccatgacatgattggtaatttcaaatcgggttgt

SEQ ID NO: 620477 - DNA, 75 bp, synthetic construct
  source 1..75: mol_type = other DNA
ctcattcttgccgatcgtttttatttcaagaccagtaatccttgtgaaacaaattcaatttccgctcgaccagaa

SEQ ID NO: 620478 - DNA, 75 bp, synthetic construct
  source 1..75: mol_type = other DNA
cgcattgtgccaccggtgaccgggaaagcgattcatgtgatgtgcgtgcatcttggcctgcgtgaggcgcaccgt

SEQ ID NO: 620479 - DNA, 75 bp, synthetic construct
  source 1..75: mol_type = other DNA
ttttcgacgagaatcacgcccgtgctattggattgcatccgggcagattaaaaatcctcttcttcaccctgctgt

SEQ ID NO: 620480 - DNA, 75 bp, synthetic construct
  source 1..75: mol_type = other DNA
ttttcgacgaaaatcacgcccgtgctattggattatatccaggaagattaaaaatcctcttcttcacactgctgg

SEQ ID NO: 620481 - DNA, 75 bp, synthetic construct
  source 1..75: mol_type = other DNA
aaatgtgggcaacggggaaaaccaaatccctgatatgtctttctggacggttactggtggcaatggaaattttgt

SEQ ID NO: 620482 - DNA, 75 bp, synthetic construct
  source 1..75: mol_type = other DNA
ggctctcgaaaaccttggtttaggagaaggctcagcattgcctgttggcgtacctgttccgtggccttcagtcac

SEQ ID NO: 620483 - DNA, 75 bp, synthetic construct
  source 1..75: mol_type = other DNA
gcgaggcgatggggttaattatgtgaccattcgtccccgtaacattgcgtttaattacatcgtaagggcggcata

SEQ ID NO: 620484 - DNA, 75 bp, synthetic construct
  source 1..75: mol_type = other DNA
atggtgggctggacagggcagccgaaaggctggccggtttccttgtacgccggtactgcgaactctgttcagtcc

SEQ ID NO: 620485 - DNA, 75 bp, synthetic construct
  source 1..75: mol_type = other DNA
gtcgtatccgcatggaggtggcacatgattaaaacctacgatgtgcatatggatcccctcgaacgcacaagccag

SEQ ID NO: 620486 - DNA, 75 bp, synthetic construct
  source 1..75: mol_type = other DNA
gactgataatgcttatgccattacaggttctaataagtcttatattgccacagccacattgccctttgtatttcc

SEQ ID NO: 620487 - DNA, 75 bp, synthetic construct
  source 1..75: mol_type = other DNA
accgaaaaattacgatacctattttgcggtggtggatcgtaatttgaaaccggaaggcatattcctgctccatac

SEQ ID NO: 620488 - DNA, 75 bp, synthetic construct
  source 1..75: mol_type = other DNA
ctgaatgcctgtgcaggtgctttccgcgcccgtgatattcagctctggcaggtggtgttctctcgcggagtcgaa

SEQ ID NO: 620489 - DNA, 75 bp, synthetic construct
  source 1..75: mol_type = other DNA
agcgaaccgcatttcgtgatggaagactggcataactttggtgccgattacgacaccacgttaatggcctggtat

SEQ ID NO: 620490 - DNA, 75 bp, synthetic construct
  source 1..75: mol_type = other DNA
cccgtttttcatttgcaggtccttcgcgaggcgatggggttaattatgtgaccattcgtccccgtaacattgcgt

SEQ ID NO: 620491 - DNA, 75 bp, synthetic construct
  source 1..75: mol_type = other DNA
ggccttcacgaggtgatggggttaattatgtaaccattcgtcctcgtaacattgcgtttaattatatcgtaaggg

SEQ ID NO: 620492 - DNA, 75 bp, synthetic construct
  source 1..75: mol_type = other DNA
ctggcaaaagtgtttccttcgctggtattacctgaagcccgcggtgatttcattcgtatctgggatgatgggcga

SEQ ID NO: 620493 - DNA, 75 bp, synthetic construct
  source 1..75: mol_type = other DNA
caaaaccgcacgttaacgtaggtactatcggccacgttgaccaaggtaaaacaactctgaccgctgcaatcacga

SEQ ID NO: 620494 - DNA, 75 bp, synthetic construct
  source 1..75: mol_type = other DNA
ctctgaaagcgctggaaggcgacgcagagtgggaagcgaaaatcctggaactggctggcttcctggattcctata

SEQ ID NO: 620495 - DNA, 75 bp, synthetic construct
  source 1..75: mol_type = other DNA
ggggctaccttcgggtaggctggtttccttgattgccagtaaggccaactccgtacagtccaccgccagcaagat

SEQ ID NO: 620496 - DNA, 75 bp, synthetic construct
  source 1..75: mol_type = other DNA
cccctacccaaaaaccgcaatttatctggattatcgccgcagttcgccgcgattgcccgacaattaccgccaaaa

SEQ ID NO: 620497 - DNA, 75 bp, synthetic construct
  source 1..75: mol_type = other DNA
caaagttggtgaagaagttgaaatcgttggtatcaaggagactcagaagtctacctgtactggcgttgaaatgtt

SEQ ID NO: 620498 - DNA, 75 bp, synthetic construct
  source 1..75: mol_type = other DNA
ccgtactggctaaaacctacggcggtgctgctcgtgcattcgaccagatcgataacgcgccggaagaaaaagctc

SEQ ID NO: 620499 - DNA, 75 bp, synthetic construct
  source 1..75: mol_type = other DNA
tagccgctgatggcacccattcagcgttagccaccgcgtgcggcgttgactggcagcaggagccttacgaacaac

SEQ ID NO: 620500 - DNA, 75 bp, synthetic construct
  source 1..75: mol_type = other DNA
tatcggccacgttgaccatggtaaaaccacactgaccgctgcaatcacgaccgtactggctaaaacctacggcgg

SEQ ID NO: 620501 - DNA, 75 bp, synthetic construct
  source 1..75: mol_type = other DNA
caaaaccgcacgttaacgtgggtactatcggccacgttgaccaaggtaaaacaaccctgaccgctgcaatcacta

SEQ ID NO: 620502 - DNA, 75 bp, synthetic construct
  source 1..75: mol_type = other DNA
caaaaccgcacgttaacgtcggtactatcggccacgttgaccaaggtaaaacaacgctgaccgctgcaatcacta

SEQ ID NO: 620503 - DNA, 75 bp, synthetic construct
  source 1..75: mol_type = other DNA
acaacgctgaccgctgcaatcaccaccgtactggctaaaacctacggcggtgctgctcgcgcattcgaccagatc

SEQ ID NO: 620504 - DNA, 75 bp, synthetic construct
  source 1..75: mol_type = other DNA
tatcggccacgttgaccatggtaaaacgacactgaccgctgcaatcaccaccgtactggctaaaacctacggcgg

SEQ ID NO: 620505 - DNA, 75 bp, synthetic construct
  source 1..75: mol_type = other DNA
ggatcgccatttttattggtttgcagtatcaacgtaaaatctcacctgcagagattatgtttttagccataaata

SEQ ID NO: 620506 - DNA, 75 bp, synthetic construct
  source 1..75: mol_type = other DNA
ccgctgaaggtcctgcagagcctgatggggcataagtccatcagctcaacggaggtctacacgaaggtgtttgca

SEQ ID NO: 620507 - DNA, 75 bp, synthetic construct
  source 1..75: mol_type = other DNA
ctccgactcctggtacgtcagccagctgcagacgatggtggcaacactgaaaatccccatggaacggcgtaataa

SEQ ID NO: 620508 - DNA, 75 bp, synthetic construct
  source 1..75: mol_type = other DNA
ctatgcgatgcacatgctgtatgctggtataccactgaaggtcctgcagagcctgatggggcataagaccatcgc

SEQ ID NO: 620509 - DNA, 75 bp, synthetic construct
  source 1..75: mol_type = other DNA
attggcgttgaattattacctgtggagatgacgctggatgagcgtccttaccccgtttttacgcgaggtaattat

SEQ ID NO: 620510 - DNA, 75 bp, synthetic construct
  source 1..75: mol_type = other DNA
ttcgatcatgtaaagaacaaatacgtgaagagcgtcgccgatcatcagacgctgcaacaacagatccacggtgtt

SEQ ID NO: 620511 - DNA, 75 bp, synthetic construct
  source 1..75: mol_type = other DNA
gttccgctctccgacgcctggtacgtcagccagctgcagacgatggtggccacactgaaaatccccatggaacgg

SEQ ID NO: 620512 - DNA, 75 bp, synthetic construct
  source 1..75: mol_type = other DNA
accgtaagatgctgctggccaccctctggaatacgggcgcccgcattaacgaggcgctggcgcttactcgagggg

SEQ ID NO: 620513 - DNA, 75 bp, synthetic construct
  source 1..75: mol_type = other DNA
gctggatgtggctgcacggcaccgggtgcagttttcgatgcctgagtccgatgcggtgtctatgctcaaaagaat

SEQ ID NO: 620514 - DNA, 75 bp, synthetic construct
  source 1..75: mol_type = other DNA
gcgctggcggcgggtacctgtcagcaactggcgcgcatcggcgtctggcaatctctggctgattgcgcaactgcc

SEQ ID NO: 620515 - DNA, 75 bp, synthetic construct
  source 1..75: mol_type = other DNA
gccactctgaagcagcggacagaaaaagccgccaggacggcaggaagaatgccagccggtcagcagactcaccgg

SEQ ID NO: 620516 - DNA, 75 bp, synthetic construct
  source 1..75: mol_type = other DNA
gtttgtgcagcttgcgaccctgaaacaacggaccgaaaaagccgccaggacggcaggaagaacgcccgccgggca

SEQ ID NO: 620517 - DNA, 75 bp, synthetic construct
  source 1..75: mol_type = other DNA
ccacatacgttccgccattcctatgcgatgcacatgctgtatgccggtataccgctgaaggttctgcagagcctg

SEQ ID NO: 620518 - DNA, 75 bp, synthetic construct
  source 1..75: mol_type = other DNA
accagaccacacgcagagccacgggacgcacatcatggcgacacatgacgaagcggcagcggaagaaccggaagc

SEQ ID NO: 620519 - DNA, 75 bp, synthetic construct
  source 1..75: mol_type = other DNA
acgcagattggcgatatcaaacgcatcaaactttccgccaactggatggcggcggcaggccaccctggtgaagat

SEQ ID NO: 620520 - DNA, 75 bp, synthetic construct
  source 1..75: mol_type = other DNA
gaaagttgccgtgctgcgtgagcagggcgtgaactcgcatgttgaaatggcggcagctttccaccgtgcaggctt

SEQ ID NO: 620521 - DNA, 75 bp, synthetic construct
  source 1..75: mol_type = other DNA
ggtaacgaagagcgcgaaatgacgtcgccgctgtcgctggtgatttccgcatttgcccgcgtggaagatgtacgt

SEQ ID NO: 620522 - DNA, 75 bp, synthetic construct
  source 1..75: mol_type = other DNA
aaaattacccgcaagcatggcaatgtgcggagcggatcgccatttttattggtttgcagtatcaacgtaaaatct

SEQ ID NO: 620523 - DNA, 75 bp, synthetic construct
  source 1..75: mol_type = other DNA
tgcgcagtctccgcgctattaccgcgccctgatagctggtggcgcacgttacgacctgaaaggccagccatgtgg

SEQ ID NO: 620524 - DNA, 75 bp, synthetic construct
  source 1..75: mol_type = other DNA
ggtgcggtgattcaggttcgtgccgctgaccgtgaagcggtcgagtccgtactggcacagcatgggcttgcggat

SEQ ID NO: 620525 - DNA, 75 bp, synthetic construct
  source 1..75: mol_type = other DNA
gaccacgaaacgggccgctacgatttccatcaggaaccggcgcatattctgatgaaagtcgaaacccacaaccac

SEQ ID NO: 620526 - DNA, 75 bp, synthetic construct
  source 1..75: mol_type = other DNA
gcatgatggaaacggtctttttcgctttagatgatgcagagcagctgtttgctcatcatcaaccgactccggtta

SEQ ID NO: 620527 - DNA, 75 bp, synthetic construct
  source 1..75: mol_type = other DNA
cgcacccggaacgtgtattccgtaccgtcagcaactcctggcatccggaaaactggggggaagatggtccgtgga

SEQ ID NO: 620528 - DNA, 75 bp, synthetic construct
  source 1..75: mol_type = other DNA
ggtcattgcggtattgaagcggatatcgccactctgggtgacgatcgcctggcggcgttgtttaacgaagagctg

SEQ ID NO: 620529 - DNA, 75 bp, synthetic construct
  source 1..75: mol_type = other DNA
cgccaacgggcagactgtattcagcgaaagccgcaccacgttgcgtgtctggtgggcagaaactacctggcagat

SEQ ID NO: 620530 - DNA, 75 bp, synthetic construct
  source 1..75: mol_type = other DNA
agcgcgacaacccggagatggagcgtcgctgccaggaagtgatcgaccgttgctggcagcttggtgatgctaacc

SEQ ID NO: 620531 - DNA, 75 bp, synthetic construct
  source 1..75: mol_type = other DNA
atgagtggcggcgcatgaaggacaataactcgcaggagtgccgtaactgtcacaacttcgagtatatggatacaa

SEQ ID NO: 620532 - DNA, 75 bp, synthetic construct
  source 1..75: mol_type = other DNA
taactcgcaggagtgccgtaactgtcacaacttcgagtatatggatacaaccgcccagaaatcagttgccgcgaa

SEQ ID NO: 620533 - DNA, 75 bp, synthetic construct
  source 1..75: mol_type = other DNA
gctacgaccagcgttttgtctgcctgctccgaaacagcattaaatgcactttgcgagttgtgtagccatcttttt

SEQ ID NO: 620534 - DNA, 75 bp, synthetic construct
  source 1..75: mol_type = other DNA
tgcgtcgcgggttctcaacctatcttgtcgatcagccacgacggggcagcgccgggcgcacgacggtagaaggta

SEQ ID NO: 620535 - DNA, 75 bp, synthetic construct
  source 1..75: mol_type = other DNA
cccgaagccttaccctctcggcaagcaatctgttggctggctcgaatccgagctggatgaatgggttctccagcg

SEQ ID NO: 620536 - DNA, 75 bp, synthetic construct
  source 1..75: mol_type = other DNA
aaatcctgcgcatgcgagcagttgcggccaaactcggcatcgctcgttccaccatctacgactggctgaatgcca

SEQ ID NO: 620537 - DNA, 75 bp, synthetic construct
  source 1..75: mol_type = other DNA
ttaaatttaccttgcccgcgaaagctgcccctgtaagaaaagtgggtgggaattatgttcataaattactttgcc

SEQ ID NO: 620538 - DNA, 75 bp, synthetic construct
  source 1..75: mol_type = other DNA
actactcgtataatccaagcatatcaaattcaggactcacgagtaattttgattaataatttttttgataaaggt

SEQ ID NO: 620539 - DNA, 75 bp, synthetic construct
  source 1..75: mol_type = other DNA
tttcagtaccaccattaacaatgcgctggcacttaaagcaccgttgtcgagtccggcactcaccggaacgccaac

SEQ ID NO: 620540 - DNA, 75 bp, synthetic construct
  source 1..75: mol_type = other DNA
gatatttgccagagctaacagtcgttccacccaacattgcactccctaatgtcgctattattaagaagggaattc

SEQ ID NO: 620541 - DNA, 75 bp, synthetic construct
  source 1..75: mol_type = other DNA
atgctggctaccatgatataccagcgatgcgagcgaattttgctcatagtcccatctgactctctccgaacacag

SEQ ID NO: 620542 - DNA, 75 bp, synthetic construct
  source 1..75: mol_type = other DNA
tttgaacttgttacgggtctaaagccccctctggactatgtctatctgaaagatccaaattccagggggaaatgc

SEQ ID NO: 620543 - DNA, 75 bp, synthetic construct
  source 1..75: mol_type = other DNA
cgatagccagtagcaacgataccgtgggttactatctctatttaggtgataacagcgatgtcctggatgtttctg

SEQ ID NO: 620544 - DNA, 75 bp, synthetic construct
  source 1..75: mol_type = other DNA
atgcgtttctgccttattttaatcacagcactgtttctggccgggtgtagccatcataaagcgccgccaccaaac

SEQ ID NO: 620545 - DNA, 75 bp, synthetic construct
  source 1..75: mol_type = other DNA
ccaccataaagcgccgccaccaaacgtcagactttctgactctattaccgtgattgctggtttgaacgatcaact

SEQ ID NO: 620546 - DNA, 75 bp, synthetic construct
  source 1..75: mol_type = other DNA
gtgtggactgttcgggatttgtggttgtgacgatgcgcgatcgtttcgatttgcagctgccccgagaaaccaaag

SEQ ID NO: 620547 - DNA, 75 bp, synthetic construct
  source 1..75: mol_type = other DNA
cgctctgattaacggcgcgccagccacgctggacacactgaaagaaattgccgcagccattaacaatgacccgaa

SEQ ID NO: 620548 - DNA, 75 bp, synthetic construct
  source 1..75: mol_type = other DNA
ggtttgggagaagcggcaaaacggaatgtggggacaggggaaatcagataccggacatggcctcgtttgccagtg

SEQ ID NO: 620549 - DNA, 75 bp, synthetic construct
  source 1..75: mol_type = other DNA
cgttatggtggcatgacgcggcgcggtgtggactgttcggggtttgtggttgtgacgatgcgcgatcgtttcgat

SEQ ID NO: 620550 - DNA, 75 bp, synthetic construct
  source 1..75: mol_type = other DNA
tgtaaaactctcgttgatcaccaatgataaaataaccggcaacgataaggctatagccagtagtaacgataccgt

SEQ ID NO: 620551 - DNA, 75 bp, synthetic construct
  source 1..75: mol_type = other DNA
acctatgatgatgcagtcggtgtaaccagcagcatgttaaaaattagctgtccgaaagaagttgctggtgtaaaa

SEQ ID NO: 620552 - DNA, 75 bp, synthetic construct
  source 1..75: mol_type = other DNA
atgaaacgttcaattattgctgccgctgtcttttcttctttttttatgagcgctggggtatttgccgcagacgtt

SEQ ID NO: 620553 - DNA, 75 bp, synthetic construct
  source 1..75: mol_type = other DNA
ccggacaaaatggtttgcatgtaggtatttacgataccaacaaccaatttatccacgcctctaccagcaagggag

SEQ ID NO: 620554 - DNA, 75 bp, synthetic construct
  source 1..75: mol_type = other DNA
ccgctggacaatacgctgactaatttgagtggaaaggatgtcgctggtcttctcgcataccttggtttgggagaa

SEQ ID NO: 620555 - DNA, 75 bp, synthetic construct
  source 1..75: mol_type = other DNA
tatgtggatgacaaagtactggagctgaaggtgtacgtggatgacctgatggcaaaacatcttgctacacaggac

SEQ ID NO: 620556 - DNA, 75 bp, synthetic construct
  source 1..75: mol_type = other DNA
attatccagatcggtgtagtcccgtttttttctgcttcaacgtacacgaaaacgtttaatgttccgtttcctaat

SEQ ID NO: 620557 - DNA, 75 bp, synthetic construct
  source 1..75: mol_type = other DNA
cctgatttacgcggtgaatttattcgtggatgggatgatgggcgcggggtggatgcggggcgagccttgttaagt

SEQ ID NO: 620558 - DNA, 75 bp, synthetic construct
  source 1..75: mol_type = other DNA
agtcaggcagcatctatccttgaacataaccatgaaatgcatggatggacagggaacccactcatggctggagat

SEQ ID NO: 620559 - DNA, 75 bp, synthetic construct
  source 1..75: mol_type = other DNA
aacggattgcgcgtggtagagaaaaacatctccgacgtgcggatggtggtttccggcgcgggggcggccgcaatc

SEQ ID NO: 620560 - DNA, 75 bp, synthetic construct
  source 1..75: mol_type = other DNA
aggctctgcactgcccgttggtgtgcccgttccgtggccctcagcaacaccaccagcagggtggctgaaatgtaa

SEQ ID NO: 620561 - DNA, 75 bp, synthetic construct
  source 1..75: mol_type = other DNA
attaccggatttacggggtgagtttattcgtggctgggatgacgggcggggaattgattcagggcgttccttgct

SEQ ID NO: 620562 - DNA, 75 bp, synthetic construct
  source 1..75: mol_type = other DNA
aataataccacgcaggttgcgaccaccgcatttgttcaggcggcactgacggctcttattaatggtgcgccagcc

SEQ ID NO: 620563 - DNA, 75 bp, synthetic construct
  source 1..75: mol_type = other DNA
aatgaatccgatccgcgttttaaagagtactggactgaatacttccagatcatgaagcgtcgcggcgtaacccag

SEQ ID NO: 620564 - DNA, 75 bp, synthetic construct
  source 1..75: mol_type = other DNA
agagtgaagtggtggcttcagcgtatggcgatcaggatctgagctttggccctgaatacatcattccaaaaccgt

SEQ ID NO: 620565 - DNA, 75 bp, synthetic construct
  source 1..75: mol_type = other DNA
tccacgacgaccagcacgggacggcaatcatcagcactgccgctatcctcaatggtttgcgcgtggtggaaaaaa

SEQ ID NO: 620566 - DNA, 75 bp, synthetic construct
  source 1..75: mol_type = other DNA
agaaacggtccgtcgtttcggtattgagccgcgcgttgctctgctgtcgcattccaacttcggctcttctgactg

SEQ ID NO: 620567 - DNA, 75 bp, synthetic construct
  source 1..75: mol_type = other DNA
aaaatggctcgcgcgccgatgatcctggcgctggcgaatccggaaccggaaattctgccgccgctggcgaaagaa

SEQ ID NO: 620568 - DNA, 75 bp, synthetic construct
  source 1..75: mol_type = other DNA
aacggcttgcgcgtggtagagaaaaacatctccgacgtgcggatggtagtttccggcgcgggggcagccgccatc

SEQ ID NO: 620569 - DNA, 75 bp, synthetic construct
  source 1..75: mol_type = other DNA
aataataccacgcaggttgcgaccaccgcgtttgtacaggcggcactgacggcccttattaatggtgcgccagcc

SEQ ID NO: 620570 - DNA, 75 bp, synthetic construct
  source 1..75: mol_type = other DNA
atggtgctgattaccagcagtacggacaatatcatcctgaaaatcgaccctgctgtagtgctggcaacccgtaaa

SEQ ID NO: 620571 - DNA, 75 bp, synthetic construct
  source 1..75: mol_type = other DNA
gcataccttggtttgggagaaggttcagcattacctgttggtgcgcctgttccgtggccttcagagacacctcca

SEQ ID NO: 620572 - DNA, 75 bp, synthetic construct
  source 1..75: mol_type = other DNA
ccgttggtgtgcctgttccgtggccttccgccactccgccaacaggctggctgaaatgcaacggtgcagcatttt

SEQ ID NO: 620573 - DNA, 75 bp, synthetic construct
  source 1..75: mol_type = other DNA
taaccccgccgatctgagcgccaagtcctggacggtgatgcgctttagcgaaaccgaacagaacggcaagctgga

SEQ ID NO: 620574 - DNA, 75 bp, synthetic construct
  source 1..75: mol_type = other DNA
taaagcctgtcaggtggcgtgttcggagtggaacgacatccgtgatgaagtggggcactgcgtcggggtttacga

SEQ ID NO: 620575 - DNA, 75 bp, synthetic construct
  source 1..75: mol_type = other DNA
ttcgttgagggagtagagagggagttaattattcagtgggtaactggggtcatctctgatggtaacggagtagcg

SEQ ID NO: 620576 - DNA, 75 bp, synthetic construct
  source 1..75: mol_type = other DNA
tatgtggatgacaaggtactggagctgaaggtgtacgtggatgacctgatggcaaaacatcttatcgcacaggac

SEQ ID NO: 620577 - DNA, 75 bp, synthetic construct
  source 1..75: mol_type = other DNA
cgctgactaatttgagtggaaaggatgtagctggtcttctcacataccttggtttgggagaagcggcaaaacgaa

SEQ ID NO: 620578 - DNA, 75 bp, synthetic construct
  source 1..75: mol_type = other DNA
ggagcgcgtcctctgactctaacagtggcggcactgcaagagatgttaactttgacgcatcccatgttgttccca

SEQ ID NO: 620579 - DNA, 75 bp, synthetic construct
  source 1..75: mol_type = other DNA
ctggcacaaaaagcgccgctgtcgagtccagcactcaccggaacgccaacagcacctactgcggcacagtcggtc

SEQ ID NO: 620580 - DNA, 75 bp, synthetic construct
  source 1..75: mol_type = other DNA
gcggggaaacagcccctcgatgccactttgactaacctcagcgggaaaagtgtttcagcccttctacaatacctt

SEQ ID NO: 620581 - DNA, 75 bp, synthetic construct
  source 1..75: mol_type = other DNA
ggcggaggcggagcctgcgcatctgccggaagtgaggctcaatcgggaggtgacggtgccccgggaatagttatt

SEQ ID NO: 620582 - DNA, 75 bp, synthetic construct
  source 1..75: mol_type = other DNA
ttcgactgtccagcgcttttgagacgctgtgcgcatattgtgctgaaaacatgattgatacccccagagacttca

SEQ ID NO: 620583 - DNA, 75 bp, synthetic construct
  source 1..75: mol_type = other DNA
tctggtgccgaaactggcgcgtgaaattggtggcgaacccagcaaaacgccgttggatctccagctacgccagca

SEQ ID NO: 620584 - DNA, 75 bp, synthetic construct
  source 1..75: mol_type = other DNA
tccgctggaagaacagcacagcgtggtgcctggtttgttgcataaataccacaaccgagcgctattgctggtaaa

SEQ ID NO: 620585 - DNA, 75 bp, synthetic construct
  source 1..75: mol_type = other DNA
ggtttatatggctattgccagagttatgattatgttggtgactatctaacaatcactgcgaggggaggaatcggc

SEQ ID NO: 620586 - DNA, 75 bp, synthetic construct
  source 1..75: mol_type = other DNA
tctgtattagtcggattggcaggacaaggaaagactcgagggactgtagcaattaatcgcattgaattatgtact

SEQ ID NO: 620587 - DNA, 75 bp, synthetic construct
  source 1..75: mol_type = other DNA
attggaattgtattaatcttggtgagctaggtaattgcattattgggttaacttacaaacctgaagatacatctg

SEQ ID NO: 620588 - DNA, 75 bp, synthetic construct
  source 1..75: mol_type = other DNA
gttggggctggcataccggacatctgtgagaatgatgcaagcatcgacaaaatacttatccccgacgctgaaacc

SEQ ID NO: 620589 - DNA, 75 bp, synthetic construct
  source 1..75: mol_type = other DNA
atgacagaagacgacgaagagcttgccgaactggccgacggcggcacagttgccggcctgacgcttgacgacgtt

SEQ ID NO: 620590 - DNA, 75 bp, synthetic construct
  source 1..75: mol_type = other DNA
attgcctgtgccattgtcctatcccttcctgccagaaacgaagacgggacgcaggacctgaagtttatgctgtgc

SEQ ID NO: 620591 - DNA, 75 bp, synthetic construct
  source 1..75: mol_type = other DNA
cccgctggaagaacagcacagcgtagtgcctggtttgttgcataaataccacaaccgggcgcttttgctggtcaa

SEQ ID NO: 620592 - DNA, 75 bp, synthetic construct
  source 1..75: mol_type = other DNA
tgccggatgagccaacaggcaatgccgcgccttcatggctgactgagccgacgccacagattaacgggctggagg

SEQ ID NO: 620593 - DNA, 75 bp, synthetic construct
  source 1..75: mol_type = other DNA
ttgtggactgacgataaagacaatttgtggaccaatatcgtcgaacgccagagacatgcgttacaggagataggt

SEQ ID NO: 620594 - DNA, 75 bp, synthetic construct
  source 1..75: mol_type = other DNA
aacagcgtctggacaaaacccgtcagcttaaacaggggatgatgcaggagttgttaaccgggaaaacccgcttaa

SEQ ID NO: 620595 - DNA, 75 bp, synthetic construct
  source 1..75: mol_type = other DNA
gccgaacccgcacaacttcctggcgaccgttgcgcacatcatcacttacggcaaaccgccgaaactggatgacaa

SEQ ID NO: 620596 - DNA, 75 bp, synthetic construct
  source 1..75: mol_type = other DNA
cgtggggcggtgttgccgcagctggagttaacccaactggcgcagtcagcctgcaagaagttctgccgggcaaaa

SEQ ID NO: 620597 - DNA, 75 bp, synthetic construct
  source 1..75: mol_type = other DNA
ctatggctgtaacgaagaaggtatcggcttccataaaggcatccatcagcttgccaacgtcgaaaatcagacgcc

SEQ ID NO: 620598 - DNA, 75 bp, synthetic construct
  source 1..75: mol_type = other DNA
gagcgccagctcaggcggctaaacagaaagcggctccggcagcaggcccctgcatcagcggctggcgtgaaagaa

SEQ ID NO: 620599 - DNA, 75 bp, synthetic construct
  source 1..75: mol_type = other DNA
atcacttacggcaaaccgccgaaactggatgacaaaaatcgtccgaccttcgcctatggccgtctgattcacgaa

SEQ ID NO: 620600 - DNA, 75 bp, synthetic construct
  source 1..75: mol_type = other DNA
caaagcggcggaaggcgcagcagccattatcgctatcggttcctgctctgcgtggggcggtgttgccgcagctgg

SEQ ID NO: 620601 - DNA, 75 bp, synthetic construct
  source 1..75: mol_type = other DNA
aggactatatgatcggctatctggcctacctcgtgaaacaatttatcggattgggttacgacggtaccgttaaga

SEQ ID NO: 620602 - DNA, 75 bp, synthetic construct
  source 1..75: mol_type = other DNA
gcgttggctgcggctttaattaccagccagggattttccggagaggccacggatatgttcttatgatggcctgcc

SEQ ID NO: 620603 - DNA, 75 bp, synthetic construct
  source 1..75: mol_type = other DNA
tttatctctgtatttcaccgctattatggcttcccgccagacagatatgtatctatgcaagggcttgatttttga

SEQ ID NO: 620604 - DNA, 75 bp, synthetic construct
  source 1..75: mol_type = other DNA
tttcatgaagctttgtgcagcattagccgccaccatggggttaagtagcaaagccgctgcagagatggccgaatc

SEQ ID NO: 620605 - DNA, 75 bp, synthetic construct
  source 1..75: mol_type = other DNA
aaaggtgtaacgacagaagtggttgttgcaggtagtgatagcaaacgtcgaatcgtgttaaatcgctacgattaa

SEQ ID NO: 620606 - DNA, 75 bp, synthetic construct
  source 1..75: mol_type = other DNA
atcacttatacagagagttacttaatcgcgggggagaagaaaagtggtcgtttagtcaaaatggtcataaacatg

SEQ ID NO: 620607 - DNA, 75 bp, synthetic construct
  source 1..75: mol_type = other DNA
tcgacgtttccacctgtatcggctgtaaagcctgccaggtggcctgttcggagtggaacgacatccgtgacgaag

SEQ ID NO: 620608 - DNA, 75 bp, synthetic construct
  source 1..75: mol_type = other DNA
tacgtggatgataaagtcctggaattaaagctgtatgtggatgaccagatgagaaaccacattgccgcacaggat

SEQ ID NO: 620609 - DNA, 75 bp, synthetic construct
  source 1..75: mol_type = other DNA
cgctctgattaatggtgcgcctgccacgctggacacactgaaagaaattgccgcagccattaataatgacccgaa

SEQ ID NO: 620610 - DNA, 75 bp, synthetic construct
  source 1..75: mol_type = other DNA
gggaatcagtaggctcgtttaagggggcagtggtgcctttgaacccctcaacgaacaatagttatttctccttaa

SEQ ID NO: 620611 - DNA, 75 bp, synthetic construct
  source 1..75: mol_type = other DNA
tgtcgctggtgctctcctggtttgaacagaaagcgattgtcattctgctgacactgctttctctgggtgtgaaaa

SEQ ID NO: 620612 - DNA, 75 bp, synthetic construct
  source 1..75: mol_type = other DNA
aaagcgcgtgaatacggcatcatcaaccacgatgtagacagctttgcgccacgtgcctttttctcaaccctgacc

SEQ ID NO: 620613 - DNA, 75 bp, synthetic construct
  source 1..75: mol_type = other DNA
tggaagctacttcagaatattatatcatctattgaagttcattgatgaaaatgctggataccatccctttgatct

SEQ ID NO: 620614 - DNA, 75 bp, synthetic construct
  source 1..75: mol_type = other DNA
tcaatgatcgtggatgaccaggtcactaataccggtttttatgtccgctgccagatgtacgacggaaaaccatca

SEQ ID NO: 620615 - DNA, 75 bp, synthetic construct
  source 1..75: mol_type = other DNA
gtttgccgggaatataggcgaaggtgcgggacacgcaattaactttcatgatggcatcgccggaaatcagccagg

SEQ ID NO: 620616 - DNA, 75 bp, synthetic construct
  source 1..75: mol_type = other DNA
ggcaaaacatcttgccgcaccggacccgcattcacagtatgcacagaaagaaagtccggcgtttaccgggacacc

SEQ ID NO: 620617 - DNA, 75 bp, synthetic construct
  source 1..75: mol_type = other DNA
aagctgaatctgacgcaaatggccgttggtgatgcaaatggtgtcttgccgacaccagacccggcacagacaaaa

SEQ ID NO: 620618 - DNA, 75 bp, synthetic construct
  source 1..75: mol_type = other DNA
agggaacccactcatggctagagatgttggtgaattaggtacatcatacgtatttgcggtgcagttgagcattgg

SEQ ID NO: 620619 - DNA, 75 bp, synthetic construct
  source 1..75: mol_type = other DNA
ccgtagccattaacaatgatccgaaattcagtaccaccattaataatgcgctggcactgaaagcgccgctgttga

SEQ ID NO: 620620 - DNA, 75 bp, synthetic construct
  source 1..75: mol_type = other DNA
cgtctacacccacggcgaaatgctgccagcgcatggctatccggaactgcgtaaattcaaacatctggtcggtaa

SEQ ID NO: 620621 - DNA, 75 bp, synthetic construct
  source 1..75: mol_type = other DNA
taacctgaacaacggcgcgctggtaatgcggcagtacatatcgaccgaccttagctacccggcggcaccacctat

SEQ ID NO: 620622 - DNA, 75 bp, synthetic construct
  source 1..75: mol_type = other DNA
cattattgggcttggaggtacaactgcactcgcagcaggaaatactctcattgacttaattcgtcagatcaatgg

SEQ ID NO: 620623 - DNA, 75 bp, synthetic construct
  source 1..75: mol_type = other DNA
agcaagaagaaaatattactgataaattagttgttaaatatgatggtcccgcactagcagatcataaaatagatt

SEQ ID NO: 620624 - DNA, 75 bp, synthetic construct
  source 1..75: mol_type = other DNA
ccgtttaatattccgcgcctcaacaaagaggataaccgggtatataaatgcacgctctgcgtcgatcgcgtcagc

SEQ ID NO: 620625 - DNA, 75 bp, synthetic construct
  source 1..75: mol_type = other DNA
gctatatgaatgtcctcaaaacagcctggccccgtaaacgttacaacctcgccgaacatccgggcttacgttact

SEQ ID NO: 620626 - DNA, 75 bp, synthetic construct
  source 1..75: mol_type = other DNA
gaaaatcaagtctggttactggacggcgacagaggtgcagatcactgcgggctacatgaatatcctcgataccgc

SEQ ID NO: 620627 - DNA, 75 bp, synthetic construct
  source 1..75: mol_type = other DNA
acgtctaaattgtgggtgcaggatatgttgaatcaggatacggcagcagcaggtattgaagcatcattaaaaaat

SEQ ID NO: 620628 - DNA, 75 bp, synthetic construct
  source 1..75: mol_type = other DNA
aatgaagatgccgtcggtgaagccgttcgtgaagctatatctgaaggtttatgtacccgagatgagttatttata

SEQ ID NO: 620629 - DNA, 75 bp, synthetic construct
  source 1..75: mol_type = other DNA
acgatgcttactcagcaattattctggcggtaacgctggcagaaaaactgggctgcggtgtcaacgatctgccgc

SEQ ID NO: 620630 - DNA, 75 bp, synthetic construct
  source 1..75: mol_type = other DNA
gcaggatgtttacagacccaggcttgttacaggccaggtttatcttaaaattacggtaattcatgacgtactgat

SEQ ID NO: 620631 - DNA, 75 bp, synthetic construct
  source 1..75: mol_type = other DNA
caatgccgggcaagttcgtacaacacgtagtgccctgttaaatgcagatgagttaggtttggattttgatggtat

SEQ ID NO: 620632 - DNA, 75 bp, synthetic construct
  source 1..75: mol_type = other DNA
atgatctggcagcctgagttcacagataaaatactctccaggaaacccggggcggttcatatcctgtacgcactg

SEQ ID NO: 620633 - DNA, 75 bp, synthetic construct
  source 1..75: mol_type = other DNA
ctgccgtgaactccagtctgcgtttggctggcgactggggcaaattacccacgccggaaaacgtagtgcttatcc

SEQ ID NO: 620634 - DNA, 75 bp, synthetic construct
  source 1..75: mol_type = other DNA
gaaagatgagctgattctggcgtactccactgccagctctgaaagcgtgctgccgcgaattattgagaagatgga

SEQ ID NO: 620635 - DNA, 75 bp, synthetic construct
  source 1..75: mol_type = other DNA
cctcgataaactggttgcccgtatgccgccagtggtcagcgaagcgacagcgtacgccgccgtgtttaagtttga

SEQ ID NO: 620636 - DNA, 75 bp, synthetic construct
  source 1..75: mol_type = other DNA
agccagcaaatctcagcgcattacgacagctaacagaacaatgcttccgtgaggatgaccatcctctgacaacac

SEQ ID NO: 620637 - DNA, 75 bp, synthetic construct
  source 1..75: mol_type = other DNA
attataattgatggatgtgtagccaggttgcgtaaatataagtcagaagattacgagctgataatcgcccacttt

SEQ ID NO: 620638 - DNA, 75 bp, synthetic construct
  source 1..75: mol_type = other DNA
gaatatgagttaattgttgctcatttcgtgattggtttatctcttcgtgctattgcaaagcaacaaggatgttca

SEQ ID NO: 620639 - DNA, 75 bp, synthetic construct
  source 1..75: mol_type = other DNA
tctcgtatggcttcatgactcaggacgatttgtcaaagcggttcctgaatgtggccaccggctttaagcctaatt

SEQ ID NO: 620640 - DNA, 75 bp, synthetic construct
  source 1..75: mol_type = other DNA
tatagatttgataatcttgataaacttctacaaattattactcgcatgaaagtgagggaactatatgctgcctga

SEQ ID NO: 620641 - DNA, 75 bp, synthetic construct
  source 1..75: mol_type = other DNA
tagacgaaaatggcatagctaaagaaatattgagtttccgcaaaagaaagagtattcaaacagatagggtaatat

SEQ ID NO: 620642 - DNA, 75 bp, synthetic construct
  source 1..75: mol_type = other DNA
atggaaaactatcaggctttatcattgatgaagatgatacaggcccttcatcttctgtttatagaacccgatttg

SEQ ID NO: 620643 - DNA, 75 bp, synthetic construct
  source 1..75: mol_type = other DNA
gaggatgaccatcctctgacaacacagatattcatccgccgtaacggtcacttttatccctgggtagaaaccttg

SEQ ID NO: 620644 - DNA, 75 bp, synthetic construct
  source 1..75: mol_type = other DNA
gcctgggaagactttaacgatgagttaattatcttgtttgctgaagatggtagcgaaaccatgcgctatctgatg

SEQ ID NO: 620645 - DNA, 75 bp, synthetic construct
  source 1..75: mol_type = other DNA
ttttatatcataccaaagattgaaaacgaatatagtaaaatgtgtatgacggaaacaaacaacattcgattagat

SEQ ID NO: 620646 - DNA, 75 bp, synthetic construct
  source 1..75: mol_type = other DNA
gcgagattggcgtcggcattatggcagcgttaatcggcggaccgttcttcgtgctgctggttaaacgctggcagg

SEQ ID NO: 620647 - DNA, 75 bp, synthetic construct
  source 1..75: mol_type = other DNA
aaacagcccgttatttcgatgtttccattcctaccgagttaaataatgatgaaaagaaaaaacttgtccttgagt

SEQ ID NO: 620648 - DNA, 75 bp, synthetic construct
  source 1..75: mol_type = other DNA
ccaacaccggatgagatcacccgtttcccaagtcgtcctaagcacgaactgccagaaaacgatcacagcaaggat

SEQ ID NO: 620649 - DNA, 75 bp, synthetic construct
  source 1..75: mol_type = other DNA
gtttgatgaacgagcggaagaaagagaagcgcgtcctggagctcgaacatgagcacatcatgcaggtaacgcagc

SEQ ID NO: 620650 - DNA, 75 bp, synthetic construct
  source 1..75: mol_type = other DNA
accggaacacgataatagtttgggtctcactcaatctatactatccagaaaagataatacattaaaattaaaacc

SEQ ID NO: 620651 - DNA, 75 bp, synthetic construct
  source 1..75: mol_type = other DNA
ctgaaaacatcctcctctcaaaaccaaaacagggcatccagaagcgcccctgaacgtgttaagaggaaacagact

SEQ ID NO: 620652 - DNA, 75 bp, synthetic construct
  source 1..75: mol_type = other DNA
aactataggaccagaaggttttggtaaaaagaaaaggagctggaacgacagaaaaatgtctgttttatggcgtga

SEQ ID NO: 620653 - DNA, 75 bp, synthetic construct
  source 1..75: mol_type = other DNA
tgaaacgtgctcctgtgaggagtaggaaacagaccaagccccatcagagcggtttgtttaaacgtttcacgctgc

SEQ ID NO: 620654 - DNA, 75 bp, synthetic construct
  source 1..75: mol_type = other DNA
agacgacccggcaacagttgaacaacagccgattgtggcaacaggaactacaagcagaagaccagcagcaaaatc

SEQ ID NO: 620655 - DNA, 75 bp, synthetic construct
  source 1..75: mol_type = other DNA
gtcatgggccaccatgtcaaacagctaccttgaagccgcagggagtgaggaacgtatcgatcaccgttctctcag

SEQ ID NO: 620656 - DNA, 75 bp, synthetic construct
  source 1..75: mol_type = other DNA
tgctgatgctgacataaacactctttggaaaacatctccatctaaaaccaaaaatatggcatccaaaagtaccgc

SEQ ID NO: 620657 - DNA, 75 bp, synthetic construct
  source 1..75: mol_type = other DNA
acatccagaaaaattgccaagtacttcggcaagcgacacggtgatgttctcaggaaaatcgagcaggttaaggct

SEQ ID NO: 620658 - DNA, 75 bp, synthetic construct
  source 1..75: mol_type = other DNA
ggatcatggttgtgatggggttcaccgggaaagctgctgcggcaatcaaggagagctatatcgcagcattcaact

SEQ ID NO: 620659 - DNA, 75 bp, synthetic construct
  source 1..75: mol_type = other DNA
cgtcttttagtagacgaaaatggcatagctaaagaaatattgaatttccgcaaaagaaagagtattcaaacagat

SEQ ID NO: 620660 - DNA, 75 bp, synthetic construct
  source 1..75: mol_type = other DNA
gacccagccagattacgattaccaggacggtaaaagtattctgaaaggttaccgggctgtgagaacggtagaagt

SEQ ID NO: 620661 - DNA, 75 bp, synthetic construct
  source 1..75: mol_type = other DNA
cacgctccgtcagttagacaaactgaattccttgctggatggcgcgctgaaggcgggtcttaacgaaattcgttc

SEQ ID NO: 620662 - DNA, 75 bp, synthetic construct
  source 1..75: mol_type = other DNA
attcagggattgaaatccgcaccactgaatgtgggctttgatattgatgacacgttgctttattcaagtcctggt

SEQ ID NO: 620663 - DNA, 75 bp, synthetic construct
  source 1..75: mol_type = other DNA
ctgcttatacccataaggctaaacaccttgaccagcgccgactgatgctccagtggtgggctgacttccttgatg

SEQ ID NO: 620664 - DNA, 75 bp, synthetic construct
  source 1..75: mol_type = other DNA
gaagcaggacatctgtggacacggtttccgcactctggcctgtagtgccttaattgagtccgggctatggtcaga

SEQ ID NO: 620665 - DNA, 75 bp, synthetic construct
  source 1..75: mol_type = other DNA
gtcaacgtggcagcgaaggatgccgcgaccgccaagaagcaggcggatgagcgtgtggcgcaatatatctctttc

SEQ ID NO: 620666 - DNA, 75 bp, synthetic construct
  source 1..75: mol_type = other DNA
tcttagggagttgaactctcttgttaattacatcgatagaaatcaagaacaaacagaagaaatctatgcaacatt

SEQ ID NO: 620667 - DNA, 75 bp, synthetic construct
  source 1..75: mol_type = other DNA
cagagcacaatatgaaatgaaagtaatcgagaaagagttaacccatgaagttcgcgtaagagccgtcaggttata

SEQ ID NO: 620668 - DNA, 75 bp, synthetic construct
  source 1..75: mol_type = other DNA
catgtggctgactggccggattgagacagacaacaacgatgcaacctttacggcccgttttgaagggcaggaagt

SEQ ID NO: 620669 - DNA, 75 bp, synthetic construct
  source 1..75: mol_type = other DNA
tatcatgtctgctttttagctcattatcttttgcagcgactgacactggcgagttaaaagcaggggcaacattat

SEQ ID NO: 620670 - DNA, 63 bp, synthetic construct
  source 1..63: mol_type = other DNA
atgtggctggggtacgaggattcgaacctcggaatgccggaatcagaatccggtgccttaccg

SEQ ID NO: 620671 - DNA, 75 bp, synthetic construct
  source 1..75: mol_type = other DNA
caaagcacaatatgaaatgaaagtaattgagaaagagttaacctatgacgttcgcgtaagaaccgtcaggttata

SEQ ID NO: 620672 - DNA, 75 bp, synthetic construct
  source 1..75: mol_type = other DNA
atccgacaactgacttatgaagaaggtcaagatgatgggttaatctttactggctgttatgactcgtttaagccc

SEQ ID NO: 620673 - DNA, 75 bp, synthetic construct
  source 1..75: mol_type = other DNA
atgggcaaaaccgaccgcagcgccaacccttcgccgggcaacaaaaagggcggtctcgcgaacgtggtaaagaaa

SEQ ID NO: 620674 - DNA, 75 bp, synthetic construct
  source 1..75: mol_type = other DNA
atgggcaaaaccgaccgcagcgccaacccttcgccgggcaacaaaaatggcggcctcgcaaacgtggtaaagaaa

SEQ ID NO: 620675 - DNA, 75 bp, synthetic construct
  source 1..75: mol_type = other DNA
atgggcaaaaccgaccgcagcgccaacccttcgccgggcaacaaaaaaggcggcctcgctaacgtggtaaagaaa

SEQ ID NO: 620676 - DNA, 75 bp, synthetic construct
  source 1..75: mol_type = other DNA
gcggcgctggttgctgggggaagcttcgctgtcacgcagttctttacctctaactatattggtccggaactgccg

SEQ ID NO: 620677 - DNA, 75 bp, synthetic construct
  source 1..75: mol_type = other DNA
gttctacccctgcacaggcctgataagatgcgccagcgtcgcatcaggcaagaccgtattaattcggtgtatagc

SEQ ID NO: 620678 - DNA, 75 bp, synthetic construct
  source 1..75: mol_type = other DNA
actctgctgaaccgctccgctcgcggcgtggcgctgactgaaagtggccagcgttgttacgaacatgcgctggaa

SEQ ID NO: 620679 - DNA, 75 bp, synthetic construct
  source 1..75: mol_type = other DNA
atgtcacttactgatactaaagtaaaaaatgccagaccagcggaaaaagccgtcaagctcactgatggatttagt

SEQ ID NO: 620680 - DNA, 75 bp, synthetic construct
  source 1..75: mol_type = other DNA
tcgcttcgatggtaaacagaaagtgttttccattggtgtttaccctgcggtttctcttgctgatgccagacaacg

SEQ ID NO: 620681 - DNA, 75 bp, synthetic construct
  source 1..75: mol_type = other DNA
cgctgcgtaagatgggctatgacaccacgcaggacatctgcggtcatggtttccgcacactggcatgtagtgctc

SEQ ID NO: 620682 - DNA, 75 bp, synthetic construct
  source 1..75: mol_type = other DNA
cgcggattaatttacgccgcgacgccagccagcgattttatctgtggcacgcaacaggtggcttcgggtatcacc

SEQ ID NO: 620683 - DNA, 75 bp, synthetic construct
  source 1..75: mol_type = other DNA
ggcgaagaaaccattgaagaagtgggctggaagttgttccactttattctcgacgtcgccagcgggaagaagaaa

SEQ ID NO: 620684 - DNA, 75 bp, synthetic construct
  source 1..75: mol_type = other DNA
tgaagcgattgagcgcgtcaaatattccacgcgtggcgcaaaaatgaaacgccagcacttcgttcccctctgcag

SEQ ID NO: 620685 - DNA, 75 bp, synthetic construct
  source 1..75: mol_type = other DNA
gctacaactcaagtcagtggtggggcttctgcattaaaagcagcatttgaatctgcacaagctgccatggctgat

SEQ ID NO: 620686 - DNA, 75 bp, synthetic construct
  source 1..75: mol_type = other DNA
cgcacaatcattttcccgcgctggccgaatggcttctcatatggcgagtagccttgctgacggtatggctgcgcg

SEQ ID NO: 620687 - DNA, 75 bp, synthetic construct
  source 1..75: mol_type = other DNA
atgattttgatcgtgggtataggccagtcattcattgaccagtattacacggcaatgggggatggaaccgttcag

SEQ ID NO: 620688 - DNA, 75 bp, synthetic construct
  source 1..75: mol_type = other DNA
gatttggcggaggggaagataccggttccgtagatacttctggaggacaaccatcaggcggttccggtggttctt

SEQ ID NO: 620689 - DNA, 75 bp, synthetic construct
  source 1..75: mol_type = other DNA
aagccccgaaaagaaatggtgacagaatgaaattcaggcatctaatttatccttgcttatctgtgttgctgatat

SEQ ID NO: 620690 - DNA, 75 bp, synthetic construct
  source 1..75: mol_type = other DNA
ggcgggtgcagcaaacgctgccgggggcgcatcagcactcaaagcggcgtttgaatcagcacaagcggcaatggc

SEQ ID NO: 620691 - DNA, 75 bp, synthetic construct
  source 1..75: mol_type = other DNA
ctgttactgggcattatgatgaactggggagtgtttatgaggaaccttcagttgattatatctgctttacagact

SEQ ID NO: 620692 - DNA, 75 bp, synthetic construct
  source 1..75: mol_type = other DNA
ggctgcgcggattcttttgttcgtgaaagaccctggtgtagtgtgggtacagcggctgcggtaggtatttttatc

SEQ ID NO: 620693 - DNA, 75 bp, synthetic construct
  source 1..75: mol_type = other DNA
ggttttgtcggcaacacctcatttgaagatttctctcacatgatggtatctatggcacaaaaagcaacggtgccg

SEQ ID NO: 620694 - DNA, 75 bp, synthetic construct
  source 1..75: mol_type = other DNA
acacagtaaaaataaaccattaaaagaaaagatacttatgagagttaatcgagccattcaatttgtctatccttg

SEQ ID NO: 620695 - DNA, 75 bp, synthetic construct
  source 1..75: mol_type = other DNA
tatctgcatggaggaaaaagagatcaatattcatttacatatgcatcttataaagtagggatagtaattaaatca

SEQ ID NO: 620696 - DNA, 75 bp, synthetic construct
  source 1..75: mol_type = other DNA
ctccaagaaaaggccgttaaaacaatatatctggattataataaatagaatctatatttatctaacgagatggag

SEQ ID NO: 620697 - DNA, 75 bp, synthetic construct
  source 1..75: mol_type = other DNA
tggggcttctgcattaaaagccgcatttgaatctgcacaaacggcaatggccgaagaatccggatctgtcgatgg

SEQ ID NO: 620698 - DNA, 75 bp, synthetic construct
  source 1..75: mol_type = other DNA
gaatatgttcaatctatttatgtgaatgttcatcccgtaagagatactgagttgttgtcaaaaattcaagcctat

SEQ ID NO: 620699 - DNA, 75 bp, synthetic construct
  source 1..75: mol_type = other DNA
agatatagttatgtctctctttttggtataaattcactagattctttaaagtattctatttttgagaatgcaatt

SEQ ID NO: 620700 - DNA, 75 bp, synthetic construct
  source 1..75: mol_type = other DNA
atttccaaaggcaagtaagtctaaggaatgatgaacttatccgtgatagtaagcgaggttcactgtttgaagcat

SEQ ID NO: 620701 - DNA, 75 bp, synthetic construct
  source 1..75: mol_type = other DNA
atgacgctctgttattaagagatatattcgagttatctaagcaaaccagtggggatgttctaatctataatactc

SEQ ID NO: 620702 - DNA, 75 bp, synthetic construct
  source 1..75: mol_type = other DNA
taaaatactccggtagtgagccaagatatcatccccagatgttgctttcacccaatgaagggcgttgtatcggtt

SEQ ID NO: 620703 - DNA, 75 bp, synthetic construct
  source 1..75: mol_type = other DNA
taaatattccatttctttaggtatcaagaatattcgaatcttaaaaaagatagaacgttttttcgtgtccttaac

SEQ ID NO: 620704 - DNA, 75 bp, synthetic construct
  source 1..75: mol_type = other DNA
gaggaagcgattctaatggcgaataacactcgcttcggactctcttgcggtctggtttcccccgagcgggaaaaa

SEQ ID NO: 620705 - DNA, 75 bp, synthetic construct
  source 1..75: mol_type = other DNA
tagacatggcttttgtcatattaacaaaggttagttcggctgcttctatctggtcccctatgatttccactatta

SEQ ID NO: 620706 - DNA, 75 bp, synthetic construct
  source 1..75: mol_type = other DNA
tagattaccacagctcttatcaggaattgttggtggtgcatccttacacgggatggggggatttggtgcaggtat

SEQ ID NO: 620707 - DNA, 75 bp, synthetic construct
  source 1..75: mol_type = other DNA
tcatctgtatctggtcagggattcgcagccaggtgaacgtgccacagcatcagctgagtcctcaggggcgacagc

SEQ ID NO: 620708 - DNA, 75 bp, synthetic construct
  source 1..75: mol_type = other DNA
caccagaaggtaaaaggcaggatcgctatcgccgttgagctgaagaaaggtcccgtggtgtatgctcttcagaaa

SEQ ID NO: 620709 - DNA, 75 bp, synthetic construct
  source 1..75: mol_type = other DNA
gaactcgtaaaaatccggtcatatggagatagcgagggctggattgaatcaaaaggtggtcccatcaacatcgtt

SEQ ID NO: 620710 - DNA, 75 bp, synthetic construct
  source 1..75: mol_type = other DNA
aactgcaatttcgttgggtatcgcgaaaatcaacattcatacggagctctttcaggccgcaatggtagcagtgaa

SEQ ID NO: 620711 - DNA, 75 bp, synthetic construct
  source 1..75: mol_type = other DNA
gacgacgatcgcgcaaatggctgtattcgctcgctggaacacgcctacagcaaagacggtggcctggcggtgctc

SEQ ID NO: 620712 - DNA, 75 bp, synthetic construct
  source 1..75: mol_type = other DNA
ctatcgacatcccgaaccgtggcattcagttacaggtaagcgatgccgaactggcggcgcgtcgtgaagcgcagg

SEQ ID NO: 620713 - DNA, 75 bp, synthetic construct
  source 1..75: mol_type = other DNA
ggcgtcgatgacagcatcctcaaattcaccggcccggcgaaagtgtacgaaagccaggacgacgcggtagaagcg

SEQ ID NO: 620714 - DNA, 75 bp, synthetic construct
  source 1..75: mol_type = other DNA
ctgcgtgcttatgccagcctggcaaccagcgccgacaaaggcgcggtgcgtgataaatcgaaactggggggttaa

SEQ ID NO: 620715 - DNA, 75 bp, synthetic construct
  source 1..75: mol_type = other DNA
tgacagcatcctcaaattcaccggcccggcgaaagtgtacgaaagccaggacgacgcggtagaagcgattctcgg

SEQ ID NO: 620716 - DNA, 75 bp, synthetic construct
  source 1..75: mol_type = other DNA
ttgcgcgcctacgccagcctggcaaccagcgccgacaaaggtgcggtgcgcgataaatcgaaactggggggttaa

SEQ ID NO: 620717 - DNA, 75 bp, synthetic construct
  source 1..75: mol_type = other DNA
attgtcagaaaaatttcgttgataaaggcatgattgccgatattgctttccacgatctcgatagcgataaccctc

SEQ ID NO: 620718 - DNA, 75 bp, synthetic construct
  source 1..75: mol_type = other DNA
aacgcttcactgccctcttagttgattttatcagggataaattcatatgggctaaaacagacaaaattaaagttg

SEQ ID NO: 620719 - DNA, 75 bp, synthetic construct
  source 1..75: mol_type = other DNA
aaattgtgaaacgttcagaaggcaggtcttccgttgcgaaggctgcctatcatgctcgtacacgtataacagatg

SEQ ID NO: 620720 - DNA, 75 bp, synthetic construct
  source 1..75: mol_type = other DNA
cggtaaaaaatatgttccgcgcaggccctgcgggcattcgtactacacaggcattctcgcaggattgccgttggg

SEQ ID NO: 620721 - DNA, 75 bp, synthetic construct
  source 1..75: mol_type = other DNA
aataacattgaaaaagcaaacaatgaatgtattgagaagaatagtttttcaaaaaaatttaaagcttgcataaat

SEQ ID NO: 620722 - DNA, 75 bp, synthetic construct
  source 1..75: mol_type = other DNA
aaatttaaaaatcgcattgataatatatcatctgaagaaacccgctcggctaaagataatcacaaacccaaataa

SEQ ID NO: 620723 - DNA, 75 bp, synthetic construct
  source 1..75: mol_type = other DNA
atcgtgaacgtcagatctcctttgccctgcgtgcttatgccagcctggcaaccagcgccgacaaaggcgcggtgc

SEQ ID NO: 620724 - DNA, 75 bp, synthetic construct
  source 1..75: mol_type = other DNA
ttaccattgattctctggcacgattagaagaaaagaaatttccggttggtgaaagcgagtcgaaatttaatcaga

SEQ ID NO: 620725 - DNA, 75 bp, synthetic construct
  source 1..75: mol_type = other DNA
gtggtgagtggtcattgattgctgaatctattgatccctcagcggtgcgccaatttatcatccagtataacattg

SEQ ID NO: 620726 - DNA, 75 bp, synthetic construct
  source 1..75: mol_type = other DNA
cccatcacaatgttaatgcgtggtaatgtcatcccagcactggcagcggcaaaagtgaacttagtgaataatgaa

SEQ ID NO: 620727 - DNA, 75 bp, synthetic construct
  source 1..75: mol_type = other DNA
gtgatgccgacattaaaactgcaatttcgttgggtatcgcgaaaatcaacattcatacggagctctgtcaggccg

SEQ ID NO: 620728 - DNA, 75 bp, synthetic construct
  source 1..75: mol_type = other DNA
ctgaatttgttgaacgtacgggctgtgactcattggctgtcgccatcggcaaccagcatggggtttatacgtcag

SEQ ID NO: 620729 - DNA, 75 bp, synthetic construct
  source 1..75: mol_type = other DNA
aaagggaatcagcaactcggtagtggtgagtggtcattgattgctgaatctattgatccctcagcggtgcgccaa

SEQ ID NO: 620730 - DNA, 75 bp, synthetic construct
  source 1..75: mol_type = other DNA
tggcacatcgaggaagactcaatgtgctggtgaatttactgaataaagacccggcacaactgtttgccaggcaat

SEQ ID NO: 620731 - DNA, 75 bp, synthetic construct
  source 1..75: mol_type = other DNA
atctcgcgaactgatcgctgattccgttgagtatatggtcaacgcccactgcgccgacgccatggtctgcatctc

SEQ ID NO: 620732 - DNA, 75 bp, synthetic construct
  source 1..75: mol_type = other DNA
gctgcgtgcctacgccagcctggcaaccagcgccgacaaaggcgcggtgcgtgataaatcgaaactggggggtta

SEQ ID NO: 620733 - DNA, 75 bp, synthetic construct
  source 1..75: mol_type = other DNA
tggagcatgacttcagcctgtactacgatcccgcccccattgctcgcttgcggcacggaattagtcaggcggtcg

SEQ ID NO: 620734 - DNA, 75 bp, synthetic construct
  source 1..75: mol_type = other DNA
tcgcgtctggcgcagtcgggtgggatgaacgcggtggtgccgcaaaacagcagcagcgttcctgcaccatcatcc

SEQ ID NO: 620735 - DNA, 75 bp, synthetic construct
  source 1..75: mol_type = other DNA
tatctgaacgaacagccgcagggctggctttcggcacaccggctgatgaaaaccctgcgctgggacacggtgcat

SEQ ID NO: 620736 - DNA, 75 bp, synthetic construct
  source 1..75: mol_type = other DNA
gataccggtagcagcacgatttcactgttaaaaaacaaagcgttgccggtaggtacgctgttggtggaactgatt

SEQ ID NO: 620737 - DNA, 75 bp, synthetic construct
  source 1..75: mol_type = other DNA
tggtgtaatacacactgtaaaacctgctaatttaaaagtggcttctcaacgaattaaaagacttgaagcagaaaa

SEQ ID NO: 620738 - DNA, 75 bp, synthetic construct
  source 1..75: mol_type = other DNA
aacccgaaaacgtcgggtaacgcgcgttatacctaccttgcggcatggggcgcagcggacaaagccgacggtggt

SEQ ID NO: 620739 - DNA, 75 bp, synthetic construct
  source 1..75: mol_type = other DNA
acgaccctgaccgctgcaatcactaccgtactggctaaaacctacggcggtgctgctcgtgcattcgaccagatc

SEQ ID NO: 620740 - DNA, 75 bp, synthetic construct
  source 1..75: mol_type = other DNA
accacgctgaccgctgcaatcactaccgtactggctaaaacctacggcggtgctgctcgtgcattcgaccagatc

SEQ ID NO: 620741 - DNA, 75 bp, synthetic construct
  source 1..75: mol_type = other DNA
tgacattgaatcaacgctggctttgctaagtagtacgggagcacgtattacctgctacggcggaagaaataaaga

SEQ ID NO: 620742 - DNA, 75 bp, synthetic construct
  source 1..75: mol_type = other DNA
agatactacagaactggttttatcggaactccggtaacaaattatcaaaaagaacagatgcaggaaacaggagtg

SEQ ID NO: 620743 - DNA, 75 bp, synthetic construct
  source 1..75: mol_type = other DNA
aaaagccatatatcgatactaactccatcaggcctggtgtaaaggagatcactaaagatatatttcatttagact

SEQ ID NO: 620744 - DNA, 75 bp, synthetic construct
  source 1..75: mol_type = other DNA
gacgtgactggtaccatcgaactgccggaaggcgtagagatggtaatgccgggcgacaacatcaaaatggttgtt

SEQ ID NO: 620745 - DNA, 75 bp, synthetic construct
  source 1..75: mol_type = other DNA
aagttcgaatctgaagtgtacatactgtccgaagatgaaggcggccgtcatgctccgttcttcaaaggctaccgt

SEQ ID NO: 620746 - DNA, 75 bp, synthetic construct
  source 1..75: mol_type = other DNA
tatcaggatcatatgatcaacaccctcgccgatgcccgccgttacatcgtcgaaaacgatcttaaacatgtacag

SEQ ID NO: 620747 - DNA, 75 bp, synthetic construct
  source 1..75: mol_type = other DNA
atacgctgatcctgcgtccgctgatttcttacgacaaagagcacatcatcaacctggctcgccagattggcaccg

SEQ ID NO: 620748 - DNA, 75 bp, synthetic construct
  source 1..75: mol_type = other DNA
acaacgctgaccgctgcaatcactaccgtattggctaaaacctacggcggtgctgctcgcgcattcgaccagatc

SEQ ID NO: 620749 - DNA, 75 bp, synthetic construct
  source 1..75: mol_type = other DNA
agcgtctgactattcgcgacgccctgacccgtattcctggtatccaccatattctcgaagtcgaagacgtgccgt

SEQ ID NO: 620750 - DNA, 75 bp, synthetic construct
  source 1..75: mol_type = other DNA
acctggctgttgtggtgtgagcgcggggtgatgagccgcctgcaggcgctctatctgcgcgagcagggctttaac

SEQ ID NO: 620751 - DNA, 75 bp, synthetic construct
  source 1..75: mol_type = other DNA
gatggtgcgtgccgcgtccaaagtggcagaacgttacggcgtacaggcgctggttaccggtgaagcgctcggcca

SEQ ID NO: 620752 - DNA, 75 bp, synthetic construct
  source 1..75: mol_type = other DNA
actaccctgaccgctgcaatcacaaccgtactggctaaaacctacggcggtgctgctcgtgcattcgaccagatc

SEQ ID NO: 620753 - DNA, 75 bp, synthetic construct
  source 1..75: mol_type = other DNA
gtatcaaagagactcagaagtctacctgtactggcgttgaaatgttccgcaaactgctggacgaaggccgtgctg

SEQ ID NO: 620754 - DNA, 75 bp, synthetic construct
  source 1..75: mol_type = other DNA
caggtactggctaagccgggcaccatcaagccgcacaccaagttcgaatctgaagtgtacattctgtccaaagat

SEQ ID NO: 620755 - DNA, 75 bp, synthetic construct
  source 1..75: mol_type = other DNA
ccgcggataacagcgtcgcactgggtacagggtctgtggcaaccgaagaaaatacgatctctgtaggctcatcta

SEQ ID NO: 620756 - DNA, 75 bp, synthetic construct
  source 1..75: mol_type = other DNA
caaacggtgcaatttcctccaccagcagcgatgctgtgaacggctcacaactctatactaccaatcagtacattg

SEQ ID NO: 620757 - DNA, 75 bp, synthetic construct
  source 1..75: mol_type = other DNA
ctaacggtgcaatctctgctgccagcagcgacgcgattaacggctcacaactctataccaccaataagtacatcg

SEQ ID NO: 620758 - DNA, 75 bp, synthetic construct
  source 1..75: mol_type = other DNA
ctgcaatttgtccttttctcgggggcggtgtttgctttattgggggcaatttttacatgtgttttttcttataaa

SEQ ID NO: 620759 - DNA, 75 bp, synthetic construct
  source 1..75: mol_type = other DNA
gcgggcgacaatttatcgccaacgtcataatgtcccagcggcagtgagtgatttgcgcgccgcgctggaactgga

SEQ ID NO: 620760 - DNA, 75 bp, synthetic construct
  source 1..75: mol_type = other DNA
tataacgtcggcgatgcactggctgcgattaactcctcatttagcacgtctctcggcgatgctctgctttgggat

SEQ ID NO: 620761 - DNA, 75 bp, synthetic construct
  source 1..75: mol_type = other DNA
acaactctgaccgctgcaatcacgaccgtactggctaaaacctacggcggtgctgctcgtgcattcgaccagatc

SEQ ID NO: 620762 - DNA, 75 bp, synthetic construct
  source 1..75: mol_type = other DNA
tatcggccacgttgaccaaggtaaaacaacgctgaccgctgcaatcactaccgtactggctaaaacctacggcgg

SEQ ID NO: 620763 - DNA, 75 bp, synthetic construct
  source 1..75: mol_type = other DNA
caaaaccgcacgttaacgtgggtactatcggccacgttgaccaaggtaaaaccacactgaccgctgcaatcacta

SEQ ID NO: 620764 - DNA, 75 bp, synthetic construct
  source 1..75: mol_type = other DNA
ttcgtgaacttctgtctcagtacgacttcccaggcgacgacactccgatcgttcgtggttctgctctgaaagcgc

SEQ ID NO: 620765 - DNA, 75 bp, synthetic construct
  source 1..75: mol_type = other DNA
ctgggaaacaatgccctctactggtggctgcatgcgcaacgttacattccaggtcagccggaactcgcactgaac

SEQ ID NO: 620766 - DNA, 75 bp, synthetic construct
  source 1..75: mol_type = other DNA
taacgtgtcgcagctgaaatcttctgaagcaggcggcgtgcgctacgacaccaaagctgatggttctatcgacta

SEQ ID NO: 620767 - DNA, 75 bp, synthetic construct
  source 1..75: mol_type = other DNA
caaaaccgcacgttaacgtaggtactatcggccacgttgaccagggtaaaaccacactgaccgctgcaatcacta

SEQ ID NO: 620768 - DNA, 75 bp, synthetic construct
  source 1..75: mol_type = other DNA
caaaaccgcacgttaacgtaggtactatcggccacgttgaccaaggtaaaaccacgctgaccgctgcaatcacta

SEQ ID NO: 620769 - DNA, 75 bp, synthetic construct
  source 1..75: mol_type = other DNA
gcgtcagataagatgctatacgcaatagtgataagcactattctatgcccatattcaaaatatgctattgaacac

SEQ ID NO: 620770 - DNA, 75 bp, synthetic construct
  source 1..75: mol_type = other DNA
aactctctcggcgtcatttcaggccgtcgcgtcgattccaggccaggttgccgatcaggccccctccccagtctg

SEQ ID NO: 620771 - DNA, 75 bp, synthetic construct
  source 1..75: mol_type = other DNA
aaaaagcacctgcatgtatatttcagagctgcccggtattgtgctatatgacactataccattcactgaatattc

SEQ ID NO: 620772 - DNA, 75 bp, synthetic construct
  source 1..75: mol_type = other DNA
tgaaacttttgttcgttcgattgcaacgccaaaagagtcaaatccggttcagccgcatcctcataaatttaaaca

SEQ ID NO: 620773 - DNA, 75 bp, synthetic construct
  source 1..75: mol_type = other DNA
atcagtgggctcagtttattgagcattcaggctcctggtatcgctgatttccaggctgagactcagggccgcagt

SEQ ID NO: 620774 - DNA, 75 bp, synthetic construct
  source 1..75: mol_type = other DNA
gtggcaaaattaaacctatttatgctatacaatctactttgtttggtcctagcaatcccatttggattgctagga

SEQ ID NO: 620775 - DNA, 75 bp, synthetic construct
  source 1..75: mol_type = other DNA
agtccggtatgtttccggctctgttttttctgacttcagccagtgtgctggcgcaacccctgattattccgccgg

SEQ ID NO: 620776 - DNA, 75 bp, synthetic construct
  source 1..75: mol_type = other DNA
ctgtatgtccgcgatgtgtcctggcagtggcagccccgttctgtgcggatggggacaccagacgccgtgcaggcc

SEQ ID NO: 620777 - DNA, 75 bp, synthetic construct
  source 1..75: mol_type = other DNA
ggatttttatattcttggcggacatatcacatcactgaccactgcccgtccggggctgcagccgtcagtgacatt

SEQ ID NO: 620778 - DNA, 75 bp, synthetic construct
  source 1..75: mol_type = other DNA
gggggcaataacgccatctttgctgttgaccggcgggcacccatttttgtgaccgaagataactggttcggacat

SEQ ID NO: 620779 - DNA, 75 bp, synthetic construct
  source 1..75: mol_type = other DNA
tgttgtcacaggagaatggcagccagcatattgccggtgcctgggtgacatccctgagtgatgtgcgggtgaatt

SEQ ID NO: 620780 - DNA, 75 bp, synthetic construct
  source 1..75: mol_type = other DNA
cgtattgaggcccggggagagcttgcccgggggcaggtgcgttacggggaaattacgttcaccgttcgccatttg

SEQ ID NO: 620781 - DNA, 75 bp, synthetic construct
  source 1..75: mol_type = other DNA
aagctgatcccggctgactggcagtcgcgcctgccgaataatagctcgccgttctactccaccatgggcttcctg

SEQ ID NO: 620782 - DNA, 75 bp, synthetic construct
  source 1..75: mol_type = other DNA
tgtttgatgagccgttaagtaacctcgatgccaacctgcgccgcagcatgcgcgataagatccgcgagctgcaaa

SEQ ID NO: 620783 - DNA, 75 bp, synthetic construct
  source 1..75: mol_type = other DNA
ttcagtcctatgccctgttcccgcatatgtcgctgggagagaatgtcggttatggcctgaaaatgctcggcgtac

SEQ ID NO: 620784 - DNA, 75 bp, synthetic construct
  source 1..75: mol_type = other DNA
atgcttgagagattccggcttgtgaccgtcattgctcttctggtgatggcggtgttggtggattttacgggaaag

SEQ ID NO: 620785 - DNA, 75 bp, synthetic construct
  source 1..75: mol_type = other DNA
atgtggagtacgaaacagaagatgatgagtgatgtttttatttttatctatttgttttataaggataaattaact

SEQ ID NO: 620786 - DNA, 75 bp, synthetic construct
  source 1..75: mol_type = other DNA
ctggttgccgggctggaaaaaccgagcgaagggcaaatttttattgatggcgaagatgtcacgcatcgttccatt

SEQ ID NO: 620787 - DNA, 75 bp, synthetic construct
  source 1..75: mol_type = other DNA
tttgcggtttctgatactgtgctggtgatgaacaagggacacatcatgcagatcggctcaccgcaggatctttac

SEQ ID NO: 620788 - DNA, 75 bp, synthetic construct
  source 1..75: mol_type = other DNA
cgcagcggataaagctgacggtggcgacaaagccaaaaccgaacagtttatgactcagttcctgaaaaacgttga

SEQ ID NO: 620789 - DNA, 75 bp, synthetic construct
  source 1..75: mol_type = other DNA
gacaaagccaaaaccgaacagtttatgactcagttcctgaaaaacgttgaagtgttcgatactggcggtcgtggc

SEQ ID NO: 620790 - DNA, 75 bp, synthetic construct
  source 1..75: mol_type = other DNA
gataaagccaaaaccgaacagtttatgactcagttcctgaaaaacgttgaagtgttcgataccggcggtcgtggc

SEQ ID NO: 620791 - DNA, 75 bp, synthetic construct
  source 1..75: mol_type = other DNA
ttatttctcctgagatccgaaaactccaagttccggatcttcctctccccccacacaacgccacctcctgtcagc

SEQ ID NO: 620792 - DNA, 75 bp, synthetic construct
  source 1..75: mol_type = other DNA
ccactggacgcacgtaaccacggctataccgtactggatatccaacaagacgggccgaccattcgttatttaatt

SEQ ID NO: 620793 - DNA, 75 bp, synthetic construct
  source 1..75: mol_type = other DNA
atgaaaaatatcgttcctgattaccgtcttgatatggtgggtgaaccctgcccttatccggcagtcgcaactctt

SEQ ID NO: 620794 - DNA, 75 bp, synthetic construct
  source 1..75: mol_type = other DNA
cttgtctggtacacaaaaatagtaagccctgattttttccttcatatgaataactcaggtgcaataaacattaat

SEQ ID NO: 620795 - DNA, 75 bp, synthetic construct
  source 1..75: mol_type = other DNA
cggaagaaaaggctcgtggtatcaccatcaacacttctcacgttgaatacgacaccccgacccgtcactacgcac

SEQ ID NO: 620796 - DNA, 75 bp, synthetic construct
  source 1..75: mol_type = other DNA
tatcggccacgttgaccacggtaaaactaccctgaccgctgcaatcacgaccgtactggctaaaacctacggcgg

SEQ ID NO: 620797 - DNA, 75 bp, synthetic construct
  source 1..75: mol_type = other DNA
gaagcgcattaaaaggcgaccgcaaaagctatcagatgaacccaatgaaccgtcgcgaggcgattcgtgagtcac

SEQ ID NO: 620798 - DNA, 75 bp, synthetic construct
  source 1..75: mol_type = other DNA
tctcacggtcactgcggtgtgctgtgcgagcatggcgtcgacaacgacgcgactctggaaaatttaggcaagcaa

SEQ ID NO: 620799 - DNA, 75 bp, synthetic construct
  source 1..75: mol_type = other DNA
gcggtggttgctgctgctgcgggcgcagacttcatcgccccttccgccgcaatggatggtcaggtgcaggcgatt

SEQ ID NO: 620800 - DNA, 75 bp, synthetic construct
  source 1..75: mol_type = other DNA
gcggtatcatcaaagttggtgaagaagttgaaatcgttggtatcaaagaaactcagaagtctacctgtactggcg

SEQ ID NO: 620801 - DNA, 75 bp, synthetic construct
  source 1..75: mol_type = other DNA
ttgaaatgttccgcaaactgctagacgaaggccgtgctggtgagaacgtaggtgttctgctgcgtggtatcaaac

SEQ ID NO: 620802 - DNA, 75 bp, synthetic construct
  source 1..75: mol_type = other DNA
caaaaccgcacgttaacgtcggtactatcggccacgttgaccagggtaaaactacactgaccgctgcaatcacga

SEQ ID NO: 620803 - DNA, 75 bp, synthetic construct
  source 1..75: mol_type = other DNA
gtaatgccgggcgacaacatcaagatggttgttaccctgatccacccgatcgcgatggacgacggtctgcgtttc

SEQ ID NO: 620804 - DNA, 75 bp, synthetic construct
  source 1..75: mol_type = other DNA
atcaaagagactcagaagtctacctgtactggcgttgaaatgttccgcaaactgctggacgaaggccgtgctggt

SEQ ID NO: 620805 - DNA, 75 bp, synthetic construct
  source 1..75: mol_type = other DNA
cttgttgatgggatgaagaatattgatacatcaacaccaggtattgaatataactttggacacaaccaagaaaca

SEQ ID NO: 620806 - DNA, 75 bp, synthetic construct
  source 1..75: mol_type = other DNA
cttgttgatgggatgaagaatattgatacatcaacaccagatattgaatataactttgggcacaaccaagaaaca

SEQ ID NO: 620807 - DNA, 75 bp, synthetic construct
  source 1..75: mol_type = other DNA
ggtaccatcgaactgccggaaggcgtagagatggtaatgccgggcgacaacatcaaaatggttgttaccctgatc

SEQ ID NO: 620808 - DNA, 75 bp, synthetic construct
  source 1..75: mol_type = other DNA
gggggattattattcaatgggggagtttttctgtctcaccaaccggaggaagtgttggaacagttgatataacat

SEQ ID NO: 620809 - DNA, 75 bp, synthetic construct
  source 1..75: mol_type = other DNA
cgcagaaggataagttcggcgcgggtaagaacggttttacccgtggtaacccccagactggtacgcctgccaccg

SEQ ID NO: 620810 - DNA, 75 bp, synthetic construct
  source 1..75: mol_type = other DNA
aaccgattgctgaactgttctccgatctggatggtagcattgacgcccgtgaagatgattacgagcaaaaagccg

SEQ ID NO: 620811 - DNA, 75 bp, synthetic construct
  source 1..75: mol_type = other DNA
aagaagtcaataatactgacccagagagtttcaaagttaaggtccgacgcgtagataccgaccaacgtctaacct

SEQ ID NO: 620812 - DNA, 75 bp, synthetic construct
  source 1..75: mol_type = other DNA
tacggcggtgctgctcgcgcattcgaccagatcgataacgcgccggaagaaaaagctcgtggtatcaccatcaac

SEQ ID NO: 620813 - DNA, 75 bp, synthetic construct
  source 1..75: mol_type = other DNA
ctgaatttggcgggctgcgacataaagcataccgcctgggcggcgatgaattcgctatggtgctctatgatgtac

SEQ ID NO: 620814 - DNA, 75 bp, synthetic construct
  source 1..75: mol_type = other DNA
ataggcgggagtattttagctgccagcaaagcagcaggaacagcaaaagatattggcaccggagcttatgaagga

SEQ ID NO: 620815 - DNA, 75 bp, synthetic construct
  source 1..75: mol_type = other DNA
tacatccaataagtccaacattagaaaaattgggacctgataagtggcaatttacttcggatgcaccagctcgta

SEQ ID NO: 620816 - DNA, 75 bp, synthetic construct
  source 1..75: mol_type = other DNA
ttaggcttgtgccaggcgtccgcggttgtcatgacccaggacgatcttcctttcgcgaaaagtgccgcactggta

SEQ ID NO: 620817 - DNA, 75 bp, synthetic construct
  source 1..75: mol_type = other DNA
gttatgccaacgatcgtggtaactgggtgaagatcccacagattggtcgcgtaattattggcgatcgcgtggaga

SEQ ID NO: 620818 - DNA, 75 bp, synthetic construct
  source 1..75: mol_type = other DNA
ggatgaattatgcgaatttatcaataccctgaacacctatgcaatcaggagccactgtctaagagcttacggcat

SEQ ID NO: 620819 - DNA, 75 bp, synthetic construct
  source 1..75: mol_type = other DNA
gaattcaccgctccatggcttgattacgagccctatctcaatggtgaaacggatgtgtactttttactggatgaa

SEQ ID NO: 620820 - DNA, 75 bp, synthetic construct
  source 1..75: mol_type = other DNA
atataggctataaagttgtttggaatatactcaaagctcaccactacggtgtaccgcaagagcgtaagagattaa

SEQ ID NO: 620821 - DNA, 75 bp, synthetic construct
  source 1..75: mol_type = other DNA
aatcattatctattatggttcgccagcgtctgaaacaggttcgcgcccttgttttcgaacagcttgatttagcaa

SEQ ID NO: 620822 - DNA, 75 bp, synthetic construct
  source 1..75: mol_type = other DNA
tgactggcgaagatggcgtggtgacgtatgccgacggcagtaaagaggagttccagtgcagcggaaccgttgcga

SEQ ID NO: 620823 - DNA, 75 bp, synthetic construct
  source 1..75: mol_type = other DNA
agactctgttcatgatccatcccgtatggagccgaaagagagaaaggactggtaccaatctgaaaatgaaaggat

SEQ ID NO: 620824 - DNA, 75 bp, synthetic construct
  source 1..75: mol_type = other DNA
ggtgaagatcccacagattggtcgcgtaattattggcgatcgcgtggagatcggtgcctgcactaccattgatcg

SEQ ID NO: 620825 - DNA, 75 bp, synthetic construct
  source 1..75: mol_type = other DNA
cggttacgggcatgggtatggtgatgcgtcccatcactgaacctggcgtctattcctcaggcattccgctgcaac

SEQ ID NO: 620826 - DNA, 75 bp, synthetic construct
  source 1..75: mol_type = other DNA
tcagtggattgatgaagcaggtgatactgatgtaattatcgataacggcgcaccttcatttatcccgttatcaag

SEQ ID NO: 620827 - DNA, 75 bp, synthetic construct
  source 1..75: mol_type = other DNA
aataaatgcatataggatctgggtagacaaatattcggattacaatgaaagatatttatctaaacaatacatgaa

SEQ ID NO: 620828 - DNA, 75 bp, synthetic construct
  source 1..75: mol_type = other DNA
ttgagatcctgctgaccatcctcaaagcggtggtgatcctgctggtggtagtcacctgtggggcattcatgagct

SEQ ID NO: 620829 - DNA, 75 bp, synthetic construct
  source 1..75: mol_type = other DNA
ttgagatcctgctgaccatcctcaaagcggtggtgatcctactggtggttgtcacctgcggggcattcatgagct

SEQ ID NO: 620830 - DNA, 75 bp, synthetic construct
  source 1..75: mol_type = other DNA
cgtgttggctggggtggttcgctccagttagtcgcggacatgatcaaaatgttctttaaagaagactggatcccc

SEQ ID NO: 620831 - DNA, 75 bp, synthetic construct
  source 1..75: mol_type = other DNA
aagcagaagcagatatttctgaatatataacaaaaaaaatcattgagcttaagaaaaagaccgggaaagaagtta

SEQ ID NO: 620832 - DNA, 75 bp, synthetic construct
  source 1..75: mol_type = other DNA
acgggtgtgctgggcggactgaatgcagggaatccggggcaggtactggctggcggtctgaatccagcagtggca

SEQ ID NO: 620833 - DNA, 75 bp, synthetic construct
  source 1..75: mol_type = other DNA
cgtgttggctggggcggttcgctccagttggttgcggacatgatcaaaatgttctttaaagaagactggatcccg

SEQ ID NO: 620834 - DNA, 75 bp, synthetic construct
  source 1..75: mol_type = other DNA
atgcaaaccgatacgctggaataccagtgtgatgaaaaaccgttgacggtcaaactgaataatccgcgccaggaa

SEQ ID NO: 620835 - DNA, 75 bp, synthetic construct
  source 1..75: mol_type = other DNA
attatataaaagacaatgactcaatgtctattcgttatagatcaaaatattattccagagattccgccttaatag

SEQ ID NO: 620836 - DNA, 75 bp, synthetic construct
  source 1..75: mol_type = other DNA
atcaggacttaatttaaccactcaaccaccagggctgcaaaacttcacatctatcaatcttgataataaccaact

SEQ ID NO: 620837 - DNA, 75 bp, synthetic construct
  source 1..75: mol_type = other DNA
atgacgtatggcgaaactgaagcgatgaaagcagccaggaaagagcatcctggcatgagcgatgcacagttgcgg

SEQ ID NO: 620838 - DNA, 75 bp, synthetic construct
  source 1..75: mol_type = other DNA
tcagcaaatcagcatgctggccaccattgcctcaggtattgcgggcgggcttgccggcaacagtacaagtgctgc

SEQ ID NO: 620839 - DNA, 75 bp, synthetic construct
  source 1..75: mol_type = other DNA
tgccggtacttctcactggctgtagtgcgtttaatcaactggctgaacgcctgcaaactgacacactggaatacc

SEQ ID NO: 620840 - DNA, 75 bp, synthetic construct
  source 1..75: mol_type = other DNA
gcagctggagtggaacgcgcagggccagttaacgcgggtcatcagcagcaacagcgagacgcggtatcagtacga

SEQ ID NO: 620841 - DNA, 75 bp, synthetic construct
  source 1..75: mol_type = other DNA
gcctgcccgtcctgcggaaagaaggccacagacctgtggatagcgacacagctgaatcgtcttcctgactgcgac

SEQ ID NO: 620842 - DNA, 75 bp, synthetic construct
  source 1..75: mol_type = other DNA
ggaaccagtggcgaaagtgtgctatgcacaaatggtgaaacagttcctgagtcgtgacccgttcgaatgcgtgct

SEQ ID NO: 620843 - DNA, 75 bp, synthetic construct
  source 1..75: mol_type = other DNA
cgccgggccatcgcgggactgaatgtggaggggctgaagaaaaacgcgcgggatatcagtctgctgaggtatatg

SEQ ID NO: 620844 - DNA, 75 bp, synthetic construct
  source 1..75: mol_type = other DNA
catttgtgtcaataattatagtcattatctgttatcagagtctgtaagtcgttgtgataaaaacaggttgaaaaa

SEQ ID NO: 620845 - DNA, 75 bp, synthetic construct
  source 1..75: mol_type = other DNA
agttttttaagatggtgaggtacttcgggttccttgccaaccgggtgtgtggagagaagctgccacaggtgtacc

SEQ ID NO: 620846 - DNA, 75 bp, synthetic construct
  source 1..75: mol_type = other DNA
ggactgtcagcacgtaaagtacctgaccaactcatgcggcagccgtgcctgcccgtcctgcggaaagaaggccac

SEQ ID NO: 620847 - DNA, 75 bp, synthetic construct
  source 1..75: mol_type = other DNA
caaatgatcaatgacaacgcgatccccgcctggaatctgccttccgggatcttatttgatatgcaccgggaagcg

SEQ ID NO: 620848 - DNA, 75 bp, synthetic construct
  source 1..75: mol_type = other DNA
atgggacgtcgcagcagtattgatactctcccgacagaagtacgccgctggctggagcgggcgctgacggagaat

SEQ ID NO: 620849 - DNA, 75 bp, synthetic construct
  source 1..75: mol_type = other DNA
gataatatagagttagctaatagagatgtcgttttatcctttatgcttacatcatattattgctttattaataat

SEQ ID NO: 620850 - DNA, 75 bp, synthetic construct
  source 1..75: mol_type = other DNA
cgagcctgagcttccgttacctggaccacaaaacgggagaaacggcgacggaaacgctgacacagcgtgagctgg

SEQ ID NO: 620851 - DNA, 75 bp, synthetic construct
  source 1..75: mol_type = other DNA
tacgcgcgggatatcagtctgctgaggtatatgccggcctgacacaggctaagtgtgcccgggaatcggtgcaag

SEQ ID NO: 620852 - DNA, 75 bp, synthetic construct
  source 1..75: mol_type = other DNA
cgcgcaagaactacaaagtggagatgcggtaaatattggctttggtatttctgccaacgtaccacgcattttact

SEQ ID NO: 620853 - DNA, 75 bp, synthetic construct
  source 1..75: mol_type = other DNA
cgttctgaaaatgaccgacgaagccggtgaagatgcgaaactgattgctgttccgcacagcaagctgagcaaaga

SEQ ID NO: 620854 - DNA, 75 bp, synthetic construct
  source 1..75: mol_type = other DNA
tcgtgtatggagcgcggcggcgtcgacaggtgaagagccgtacagcattgccatgacgctggcggacacattagg

SEQ ID NO: 620855 - DNA, 75 bp, synthetic construct
  source 1..75: mol_type = other DNA
ttatcgccatgaagagttgaaaaacctgacgccgcagcaactgcaacggtatttcatgcgagggacgggaccgca

SEQ ID NO: 620856 - DNA, 75 bp, synthetic construct
  source 1..75: mol_type = other DNA
tccagaaactgtaagtttctggaggaaatcaatatctaatatgacttcacaagcatgtattaaatgtggtggtgg

SEQ ID NO: 620857 - DNA, 75 bp, synthetic construct
  source 1..75: mol_type = other DNA
atgaaaccaacgacactactgcttattttcacttttttcgctatgccaggcatcgtatacgccgagtcgcctttt

SEQ ID NO: 620858 - DNA, 75 bp, synthetic construct
  source 1..75: mol_type = other DNA
ttatcagatgaagcgtgggaaaagttaatgttgtctgatgaaagcaataaacaacacatacgcgaagccatcgta

SEQ ID NO: 620859 - DNA, 75 bp, synthetic construct
  source 1..75: mol_type = other DNA
tacaaccggttgatacgccgtttgcgctcgctaggactggccgattttggtcattatctgaacatgctggaatct

SEQ ID NO: 620860 - DNA, 75 bp, synthetic construct
  source 1..75: mol_type = other DNA
caggacaacattttctacctgccggaagaggcgcgctgccagacaactacttcagccgtcagaatctggaaacca

SEQ ID NO: 620861 - DNA, 75 bp, synthetic construct
  source 1..75: mol_type = other DNA
caaatgcaagaggaaaaccagaagctaaaggaatgtccttcgacaaatatgcaaaaatctattgggcaaccaagt

SEQ ID NO: 620862 - DNA, 75 bp, synthetic construct
  source 1..75: mol_type = other DNA
cggtcagaaaatcgtgtttatgctgaatatatagtaaagaacggaaaaaaattgcagcgcctgctggcggaaaat

SEQ ID NO: 620863 - DNA, 75 bp, synthetic construct
  source 1..75: mol_type = other DNA
ctgccaatgaacgaatataaaaaaatagatgatttcaacacgccgtggctggaagtacaggattttttaagctaa

SEQ ID NO: 620864 - DNA, 75 bp, synthetic construct
  source 1..75: mol_type = other DNA
gaactgccggactacctgaggcaccactggccagagctgaaagcgcaactgctgtccggcagataccgcccatct

SEQ ID NO: 620865 - DNA, 75 bp, synthetic construct
  source 1..75: mol_type = other DNA
gcgaacgtctgttgggcatcccgacggtggtggatcgctttatccagcaggcgatgatgcaggtgttgcaggcac

SEQ ID NO: 620866 - DNA, 75 bp, synthetic construct
  source 1..75: mol_type = other DNA
cagggattccgcgatctgttttccggggctaatccggcgaaaaaattgctgcgtgatattggtctgaaactggct

SEQ ID NO: 620867 - DNA, 75 bp, synthetic construct
  source 1..75: mol_type = other DNA
gggacaaagacagttttggtcacatctcgtttgacgatcaaagcatgggctatagccatcttgggcatatcgttg

SEQ ID NO: 620868 - DNA, 75 bp, synthetic construct
  source 1..75: mol_type = other DNA
caccgcagacaatgatgaggcgtaccgcagcaacgcgaggaacgaacatcattgtcgaggaagcggataaaaata

SEQ ID NO: 620869 - DNA, 75 bp, synthetic construct
  source 1..75: mol_type = other DNA
ggcgtgccgctggatgagggctggtatcagcgtttacgtgcgatgcccgcgttaattattccgctaacacacaat

SEQ ID NO: 620870 - DNA, 75 bp, synthetic construct
  source 1..75: mol_type = other DNA
agggctggtatcagcgtttacgtgcgatgcccgcgttaattattccgctaacacacaatgcgctaaacgatctgg

SEQ ID NO: 620871 - DNA, 75 bp, synthetic construct
  source 1..75: mol_type = other DNA
gatacgcttcctggcgttaaaccacaactgatccgtcaggctatgggattaaatgatttgcctgaatggctgcgt

SEQ ID NO: 620872 - DNA, 75 bp, synthetic construct
  source 1..75: mol_type = other DNA
cgcagaagaagccgatatcgcctgggtattgaaaacctatggtgaagagcgttttgccaaacgcattgcccgcgc

SEQ ID NO: 620873 - DNA, 75 bp, synthetic construct
  source 1..75: mol_type = other DNA
ctgggtggccgtcagctgcgagcactaggcaagttaatgccgggcgaagaagaggtggctgagaatcctcgtgcc

SEQ ID NO: 620874 - DNA, 75 bp, synthetic construct
  source 1..75: mol_type = other DNA
atctacattgatgggacttttggtcgcggtggtcactcacgtctgatcctctcgcagcttggcgaagaggggcgt

SEQ ID NO: 620875 - DNA, 75 bp, synthetic construct
  source 1..75: mol_type = other DNA
ccgatgacccgcaccaaagaactggcggaagtcgtggctgccgcaacgccggtgaaagacaagttcaaacatccc

SEQ ID NO: 620876 - DNA, 75 bp, synthetic construct
  source 1..75: mol_type = other DNA
gtattgaaaacctatggcgaagaacgttttgccaaacgtatagcacgcgccattgtcgagcgtaaccgcgaacag

SEQ ID NO: 620877 - DNA, 75 bp, synthetic construct
  source 1..75: mol_type = other DNA
gtccgcaagttccggcaggattaccgatgactgaagaacagctcaaaaaactgggtggccgtcagttgcgagcac

SEQ ID NO: 620878 - DNA, 75 bp, synthetic construct
  source 1..75: mol_type = other DNA
atgagaaatcataccacacacccgcaagggcgggactcgcacaacctgaataaatatatctggcgttttatcgcc

SEQ ID NO: 620879 - DNA, 75 bp, synthetic construct
  source 1..75: mol_type = other DNA
tccaggtaagacaaccaagtgattatataatgaacaaaacagaattttacgcggatttaaatcgcgactttaacg

SEQ ID NO: 620880 - DNA, 75 bp, synthetic construct
  source 1..75: mol_type = other DNA
ggcgtgatcacaaatattcctgtcagtacgtaccaaaaaatgatttacgcatatcaggaaaagaataaaggaggt

SEQ ID NO: 620881 - DNA, 75 bp, synthetic construct
  source 1..75: mol_type = other DNA
cgtttgtgggagctatcagcgtcggctttttgatttcgcttatcattgtaatttggttaatgtggcgttatcgca

SEQ ID NO: 620882 - DNA, 75 bp, synthetic construct
  source 1..75: mol_type = other DNA
aaactgggcaggtttttatttgcttgaggacgatacactggtactcggaccatttcagggcaaaattgcctgtgt

SEQ ID NO: 620883 - DNA, 75 bp, synthetic construct
  source 1..75: mol_type = other DNA
tgcggcactgcggttgcccgcaatcaagtgcagcgtatcgaggatgttcacgcgtttgacgggcatattgcctgt

SEQ ID NO: 620884 - DNA, 75 bp, synthetic construct
  source 1..75: mol_type = other DNA
acagacgaggacgagcaaggcttacgtcagcttgtggcacagcttgaaaaggtgcttgcaacgacggattacaaa

SEQ ID NO: 620885 - DNA, 75 bp, synthetic construct
  source 1..75: mol_type = other DNA
gcagacaggccgaagcactggccagacaccagaaaggcgaactggtaagcgtggcaggtaacatgcaggtcagcc

SEQ ID NO: 620886 - DNA, 75 bp, synthetic construct
  source 1..75: mol_type = other DNA
ggaagcacgccagcaatccccggctggctgcgtgatggtattcgctgcccgtattcgccaggaggtaggccatgt

SEQ ID NO: 620887 - DNA, 75 bp, synthetic construct
  source 1..75: mol_type = other DNA
tacacatcgaggccgccagcgaacaggaagcccgccaacaatccccaactggctgcgtgatgatatttgccgccc

SEQ ID NO: 620888 - DNA, 75 bp, synthetic construct
  source 1..75: mol_type = other DNA
agtaccgctactagatgcgtttggaattgtagttattcaagtcccattaggggagcttttacaggtgcttttgat

SEQ ID NO: 620889 - DNA, 75 bp, synthetic construct
  source 1..75: mol_type = other DNA
tccaccttgaagaacacacaggattattacttgtggattgattttatttataataatttaaagatctcaaacatc

SEQ ID NO: 620890 - DNA, 75 bp, synthetic construct
  source 1..75: mol_type = other DNA
ttatcctcttttatctcatgctcaaatattagtataaattttaatagtgattgtaaaggattggcatttagatta

SEQ ID NO: 620891 - DNA, 75 bp, synthetic construct
  source 1..75: mol_type = other DNA
taggcaagttaatgccgggtgaagaagaggtggctgagaaccctcgtgcccgtagttcagttctgcgtatcgcag

SEQ ID NO: 620892 - DNA, 75 bp, synthetic construct
  source 1..75: mol_type = other DNA
ccctctgtttatccgcagggctattggcgagcgcgcctggaatcagcctcgccgatgtcaactatgtaccgcaaa

SEQ ID NO: 620893 - DNA, 75 bp, synthetic construct
  source 1..75: mol_type = other DNA
cgaacgtgctgattcttgatcagaacatgacaccatcagccttcttccccagcagttatttcacctaccaggaac

SEQ ID NO: 620894 - DNA, 75 bp, synthetic construct
  source 1..75: mol_type = other DNA
ggatacgtctggttcgctgaccgctcccagagactggccgctgtttgaaatcggctggtccaacaataagccgct

SEQ ID NO: 620895 - DNA, 75 bp, synthetic construct
  source 1..75: mol_type = other DNA
ctcattaatgcactgagggatgaggctagaaattctgtctccatatttcaggccattgtgaacgaggaaatctgc

SEQ ID NO: 620896 - DNA, 75 bp, synthetic construct
  source 1..75: mol_type = other DNA
ctggagtaataagcgctgaccgtctggaaggggtaatgcgtctgactccggcgctggggcaacagaaactctatg

SEQ ID NO: 620897 - DNA, 75 bp, synthetic construct
  source 1..75: mol_type = other DNA
gttgataaggcgttaaaactgcttgatgaagctgaacgcctgggatcgatatctgcccgttccacctttatcagc

SEQ ID NO: 620898 - DNA, 75 bp, synthetic construct
  source 1..75: mol_type = other DNA
aggtaactggatcacagtgagtaaaggtcacgctacgctgggtggcccgaacaccacttatgtgtttaaggctgg

SEQ ID NO: 620899 - DNA, 75 bp, synthetic construct
  source 1..75: mol_type = other DNA
ccggctcaacgccaggcgattgccaactcttttgcccgcgccttgcagtcctcgatcaacgaagacaaagcgcac

SEQ ID NO: 620900 - DNA, 75 bp, synthetic construct
  source 1..75: mol_type = other DNA
cgagttttacgccagaccggcatcaacgtgattacgcgtattatggggctattgctgatggcattggggattgaa

SEQ ID NO: 620901 - DNA, 75 bp, synthetic construct
  source 1..75: mol_type = other DNA
agggtgtggattcagaacagtatcagtatctgaaacaatgtgtaaaaaatgcaagcgcactggctaatcttaatg

SEQ ID NO: 620902 - DNA, 75 bp, synthetic construct
  source 1..75: mol_type = other DNA
caataccaataccaataccaataccaataccaatgctgatattgatattcagggtgtggattcagaacagtatca

SEQ ID NO: 620903 - DNA, 75 bp, synthetic construct
  source 1..75: mol_type = other DNA
ggtcacgctacgctgggcggcccgaataccacctatgtgtttaaagcgggtgaggaagcagtaccgctggaagcc

SEQ ID NO: 620904 - DNA, 75 bp, synthetic construct
  source 1..75: mol_type = other DNA
aaaatgcagatcaatttatttcagatattgcattgcgcgaatgtacgcttaagattttttcacctggaacgcttt

SEQ ID NO: 620905 - DNA, 75 bp, synthetic construct
  source 1..75: mol_type = other DNA
atgaaaatgacaaaactggccacattatttctgactgccactctaagccttgccagcggtgccgcactggctgcc

SEQ ID NO: 620906 - DNA, 75 bp, synthetic construct
  source 1..75: mol_type = other DNA
aggcagggaaggctttactggaacgaattaaagaaggtaactggagcgatcgaaaacccatcgctcccagtttgt

SEQ ID NO: 620907 - DNA, 75 bp, synthetic construct
  source 1..75: mol_type = other DNA
gttcctcatcggaaaattggtctggaggcagggaaggctttactggaacgaattaaagaaggtaactggagcgat

SEQ ID NO: 620908 - DNA, 75 bp, synthetic construct
  source 1..75: mol_type = other DNA
atgatggaaaactataaacatactacggtgctgctggatgaagccgttaatggcctcaatatccgtcctgatggc

SEQ ID NO: 620909 - DNA, 75 bp, synthetic construct
  source 1..75: mol_type = other DNA
cctgatagatttgctcacgcccggtagctccttcactatcgcaaccgccccgcagacgatgatgaagcgtaccgc

SEQ ID NO: 620910 - DNA, 75 bp, synthetic construct
  source 1..75: mol_type = other DNA
ccggacattaataaaaaagtacaaactggcgatggcatcaacaatgatgtcgataccaaaacagacggtactacg

SEQ ID NO: 620911 - DNA, 75 bp, synthetic construct
  source 1..75: mol_type = other DNA
tccgccgcagtgctgattgccattatcgtcgccgtgattacctggtgcatcctgttatggtcgcattttggataa

SEQ ID NO: 620912 - DNA, 75 bp, synthetic construct
  source 1..75: mol_type = other DNA
acgcgctaaagatatgggatccgccgcggtgctgattgcgattatcgtcgccgtgattacctggtgcatcctgtt

SEQ ID NO: 620913 - DNA, 75 bp, synthetic construct
  source 1..75: mol_type = other DNA
acgcgctaaagatatggggtccgctgcggtactgatcgcgattatcgtcgccgtgattacctggtgcatcctgtt

SEQ ID NO: 620914 - DNA, 75 bp, synthetic construct
  source 1..75: mol_type = other DNA
tatgtctcccaaccgtgttattaacgctgctctgccacctgttttttccaccggagcatcacaactaccggaatt

SEQ ID NO: 620915 - DNA, 75 bp, synthetic construct
  source 1..75: mol_type = other DNA
atgaaaacatgtcaggcagtgttctggcttgctgcccccgcctggatttgcccctatatttccagacatctgtta

SEQ ID NO: 620916 - DNA, 75 bp, synthetic construct
  source 1..75: mol_type = other DNA
attaagtttgccgaaacggtaaaaaatgccgtgcgcagcggggtgctggagcatggcaatattttgcccggtgag

SEQ ID NO: 620917 - DNA, 75 bp, synthetic construct
  source 1..75: mol_type = other DNA
aaacgtgacactgaataaccactcattactggatattggtaataaatttacaggaggagtaacagcaactgacag

SEQ ID NO: 620918 - DNA, 75 bp, synthetic construct
  source 1..75: mol_type = other DNA
cgcaactaaacttgaaaaaattaataataactataaagatcttagttttagtggtggtggaagtattaatttcga

SEQ ID NO: 620919 - DNA, 75 bp, synthetic construct
  source 1..75: mol_type = other DNA
tttgttgttgaaacttcaggtgtaaaaaattctgtagacttctctctcaatagccatgatgctcttgagcgttat

SEQ ID NO: 620920 - DNA, 75 bp, synthetic construct
  source 1..75: mol_type = other DNA
caacttctttgccgcgcttaatgcggcggtagcctctgacggtacgtttatttatgtgcctaaaggcgtgcgctg

SEQ ID NO: 620921 - DNA, 75 bp, synthetic construct
  source 1..75: mol_type = other DNA
gcttagccagcaggcatttacccgttttgtgcaggattatctggtttttggtaacgcctatctggagaagcgcgc

SEQ ID NO: 620922 - DNA, 75 bp, synthetic construct
  source 1..75: mol_type = other DNA
aaaaaacggatgatgccacaaaatggatgctgacagggtatcagaccgtctctgatgccggtgcctcgaaaaccg

SEQ ID NO: 620923 - DNA, 75 bp, synthetic construct
  source 1..75: mol_type = other DNA
cggtgtgcgtggtggtgaacagtttgatgccatcaaccagagtgtcgcgcgttttgcgtctgcatccggtgtgga

SEQ ID NO: 620924 - DNA, 75 bp, synthetic construct
  source 1..75: mol_type = other DNA
gggctgacgtttaaccaggcgagagagtcactggcagccctggtgaatgccggtgtgcgtggtggtgaacagttt

SEQ ID NO: 620925 - DNA, 75 bp, synthetic construct
  source 1..75: mol_type = other DNA
cgggagagtcactggcagccctggtcagtgccggtgtgcgtggtggtgaacagtttgatgccattaaccagagtg

SEQ ID NO: 620926 - DNA, 75 bp, synthetic construct
  source 1..75: mol_type = other DNA
gggccgaacgggacgcatcacagctgaagtataccggagaggcgcagaaggcgtatgagcgtctgctgacgccgc

SEQ ID NO: 620927 - DNA, 75 bp, synthetic construct
  source 1..75: mol_type = other DNA
tttgtcttcacgaaggaggcgaccagccggattggtgtcggcaatctgtaccgcctgatgcggggctatgcggaa

SEQ ID NO: 620928 - DNA, 75 bp, synthetic construct
  source 1..75: mol_type = other DNA
gcggggagtttgttttcacgaaggaggcaaccagccggataggcgtggggaatctttaccgtctgatgcgcggct

SEQ ID NO: 620929 - DNA, 75 bp, synthetic construct
  source 1..75: mol_type = other DNA
cgacgaagacagctacgtcagctacattgaaggctgttccgctccggtgcgtgacagctatcagttacacgcggc

SEQ ID NO: 620930 - DNA, 75 bp, synthetic construct
  source 1..75: mol_type = other DNA
gatgccgctgcagaagcgactgcaggagcttaacgactggcttggcgaagaagtgatccgcttcgaagcctacac

SEQ ID NO: 620931 - DNA, 75 bp, synthetic construct
  source 1..75: mol_type = other DNA
ggctttggtgatgtggaaaaggccagccgtgtctttgttcgcaacgagctgatgccgctgcagaagcgactgcag

SEQ ID NO: 620932 - DNA, 75 bp, synthetic construct
  source 1..75: mol_type = other DNA
tactcgaccgccgtgacattctggattacgtcgagtgcatcagtaacggcagatggtatgagccaccggtcagct

SEQ ID NO: 620933 - DNA, 75 bp, synthetic construct
  source 1..75: mol_type = other DNA
tcccgttatcggaggttgcggcgaaagacgagtttctgaacatcaagaacgtcagccgcgatgacatgatggcag

SEQ ID NO: 620934 - DNA, 75 bp, synthetic construct
  source 1..75: mol_type = other DNA
ctggagcacgaggcaacgacatcacgtattggtgaagatcaactgttttactgcctgcaacgcgggatcagcgaa

SEQ ID NO: 620935 - DNA, 75 bp, synthetic construct
  source 1..75: mol_type = other DNA
ctcctttggcgaagcgattcatgaacacccggaactggtgaggaaatatctcggcactgtggtgccaggtaatga

SEQ ID NO: 620936 - DNA, 75 bp, synthetic construct
  source 1..75: mol_type = other DNA
ggtgcgcgcaatttcggctaagcgtaatgagccagaatggatgctggaatttcggctcaatgcctaccgcgcatg

SEQ ID NO: 620937 - DNA, 75 bp, synthetic construct
  source 1..75: mol_type = other DNA
tttgtggtgtttattgccagccacgtactgtcgtttttatcgtggagctttaccgttctggtgatcagtcgcatt

SEQ ID NO: 620938 - DNA, 75 bp, synthetic construct
  source 1..75: mol_type = other DNA
agccatgcgggattcatcatgtatatgactgacgccgcacagaaccaggaggacgtgaacaacatccggcaggca

SEQ ID NO: 620939 - DNA, 75 bp, synthetic construct
  source 1..75: mol_type = other DNA
aaccaccaggccagaaatatggacgatgtgcaaagcttaggcgtgatttatatcaatcataacttcgccactgaa

SEQ ID NO: 620940 - DNA, 75 bp, synthetic construct
  source 1..75: mol_type = other DNA
accggcagcgaacagaactggcgtggtttcacccgttctgtgctgtccatgctgacagagatttttctgaagcag

SEQ ID NO: 620941 - DNA, 75 bp, synthetic construct
  source 1..75: mol_type = other DNA
cctgctgcaacagggcggtcaggtgaaggactcattcggcgggatgatccccatgttccgggggcttgccggtgc

SEQ ID NO: 620942 - DNA, 75 bp, synthetic construct
  source 1..75: mol_type = other DNA
cttcacgaaggaggcaaccagccggattggtgtcggcaacctgtaccgcctgatgcggggctatgcggaaggtgg

SEQ ID NO: 620943 - DNA, 75 bp, synthetic construct
  source 1..75: mol_type = other DNA
ttatgtgggcggtgccggaagtccggcgcagatgcggcgggctgaaggcattaattttaatcagaacaatcacgt

SEQ ID NO: 620944 - DNA, 75 bp, synthetic construct
  source 1..75: mol_type = other DNA
accagcaaaatatgcgcggtatcaccagttctcaggcggaatggatgaagtacggcgaacagatgtcgacgggta

SEQ ID NO: 620945 - DNA, 75 bp, synthetic construct
  source 1..75: mol_type = other DNA
accagcaaaacatgcgcggcatcaccaattctcaggcagaatggatgaagtacggcgagcagatgtcgacaggta

SEQ ID NO: 620946 - DNA, 75 bp, synthetic construct
  source 1..75: mol_type = other DNA
gcaggggatggtgaaatcgggcgaatgcccgccgccagatactgtatacgcctatgctaacagcctgcaacgtac

SEQ ID NO: 620947 - DNA, 75 bp, synthetic construct
  source 1..75: mol_type = other DNA
cggcagcgccattggaggtgctaccggtggcggctcatcagcgtcaggtggtgcagccattcaggccgctgcggc

SEQ ID NO: 620948 - DNA, 75 bp, synthetic construct
  source 1..75: mol_type = other DNA
ttggtgtcgggaacctgtaccgcctgatgcggggctatgcggaaggggggtatgtgggttctgccggaagtccgg

SEQ ID NO: 620949 - DNA, 75 bp, synthetic construct
  source 1..75: mol_type = other DNA
taattttaatcagaacaatcacgtggtgattcagaacgacggtatcaacggacaggccgggccgcagctgatgaa

SEQ ID NO: 620950 - DNA, 75 bp, synthetic construct
  source 1..75: mol_type = other DNA
gtactaccatccgatcctgatacgggaaccgggaagtaacggcaatatgcacgccagcgcggatatttatcgcta

SEQ ID NO: 620951 - DNA, 75 bp, synthetic construct
  source 1..75: mol_type = other DNA
gattaacaacgacggcacgaacggtcagatagggccacaggcgctgaaggcggtttatgacgtagcccgtaaggc

SEQ ID NO: 620952 - DNA, 75 bp, synthetic construct
  source 1..75: mol_type = other DNA
catgcagccctgctggcgcttgaaactgagctccggacgctggagaagcacagcggtgcgaatgagaaaatcagc

SEQ ID NO: 620953 - DNA, 75 bp, synthetic construct
  source 1..75: mol_type = other DNA
gcaggtgaaagatgcctgtaccgccgactcactggctgaatttgcctgggatctgtttaccgcctggctgactgc

SEQ ID NO: 620954 - DNA, 75 bp, synthetic construct
  source 1..75: mol_type = other DNA
tactaccacgtgattctgatgcgggaaccggggagtaacggcaacatgcacgccagcgcggatatttatcgctag

SEQ ID NO: 620955 - DNA, 75 bp, synthetic construct
  source 1..75: mol_type = other DNA
tacgggaaccggtggcaaatatgagccagcggggattgtccaccgcggggagtttgtcttcacgaaggaggcaac

SEQ ID NO: 620956 - DNA, 75 bp, synthetic construct
  source 1..75: mol_type = other DNA
agcggatatgctcgccagtgcgcagaaggcatttgatgaggcggataaaaaatggcagtggtaccagagtcggag

SEQ ID NO: 620957 - DNA, 75 bp, synthetic construct
  source 1..75: mol_type = other DNA
tgtcggcaacctgtaccgcctgatgcggggctatgcggaaggtggttatgtgggcggtgccggaagtccggcgca

SEQ ID NO: 620958 - DNA, 75 bp, synthetic construct
  source 1..75: mol_type = other DNA
ccgtttcgatgagcagatgagccgggtaaggcgtcatttttcaggtctggataccgacgccaagaaaaaaccgcc

SEQ ID NO: 620959 - DNA, 75 bp, synthetic construct
  source 1..75: mol_type = other DNA
ggcggtaacgccccagataaccaacaaatgggacaagctgcttgcctgctatgtttctgccgggttctcggtgac

SEQ ID NO: 620960 - DNA, 75 bp, synthetic construct
  source 1..75: mol_type = other DNA
ccttatttgccgtactcagaaatttaaaaagaaaaccatggtatatttgtagtttacgtatgcctatttgtgaac

SEQ ID NO: 620961 - DNA, 75 bp, synthetic construct
  source 1..75: mol_type = other DNA
gcttccggccatcaccctgatacgtatactggcctgcctgttactgatgagtgccattgcagcactgtgtgcctc

SEQ ID NO: 620962 - DNA, 75 bp, synthetic construct
  source 1..75: mol_type = other DNA
aagattttacttgaggtgttaactgtttctgcttttattcagtttcttgcgttaataacacctcttttttttcag

SEQ ID NO: 620963 - DNA, 75 bp, synthetic construct
  source 1..75: mol_type = other DNA
aaatctttagaactaaaggtaaaacaggtaaaaaaaacaattgaccgattaaactttatttctctgcccgcatta

SEQ ID NO: 620964 - DNA, 75 bp, synthetic construct
  source 1..75: mol_type = other DNA
caggatagacgttgagctgggtgcgcgcttattccgacacatgttagctctgcctctctcttatttttccatgcg

SEQ ID NO: 620965 - DNA, 75 bp, synthetic construct
  source 1..75: mol_type = other DNA
tgccaaggccaggtattgttaccagcatgtgggagccagcgcgtctgattgaattggtcagaacgccgggttgtt

SEQ ID NO: 620966 - DNA, 75 bp, synthetic construct
  source 1..75: mol_type = other DNA
gacaatggcttaggtattccggcaataacgaggagtaaaaacattgctgacagttatcaaagagctggtatgttc

SEQ ID NO: 620967 - DNA, 75 bp, synthetic construct
  source 1..75: mol_type = other DNA
cgaaggtctgctgatggacatcaatgaaggtgctgactgggcaacttcgctggcgattgaagacggcgctgacca

SEQ ID NO: 620968 - DNA, 75 bp, synthetic construct
  source 1..75: mol_type = other DNA
cagtactatgcaacaggtcaggccaccgccggcaacgtttctgccactgtgaattacaccatcgcttatcagtaa

SEQ ID NO: 620969 - DNA, 75 bp, synthetic construct
  source 1..75: mol_type = other DNA
ccgtggccagtgcggccccgggctccaccccgacccctgacgataaaatcgactgccataaacatccctcctcac

SEQ ID NO: 620970 - DNA, 75 bp, synthetic construct
  source 1..75: mol_type = other DNA
ggcagggtgatgccctgctgcatacgtcgtttatggcagatgtgctgggggcggtgctggaggtggccgcaaatg

SEQ ID NO: 620971 - DNA, 75 bp, synthetic construct
  source 1..75: mol_type = other DNA
ataccagactaactggcagtttagcgtcactaagaaaacacagcatggatatcactcttaactcttatagtctgt

SEQ ID NO: 620972 - DNA, 75 bp, synthetic construct
  source 1..75: mol_type = other DNA
aacaataataacagcattaaagttgataataccgaagatgccgccagtaacatggcaagtatcgcgcttgaaaac

SEQ ID NO: 620973 - DNA, 75 bp, synthetic construct
  source 1..75: mol_type = other DNA
caggatatattaatcagggcgaactgatttcaatcattgttccgcgcgatacctattttgataatgtttatgatg

SEQ ID NO: 620974 - DNA, 75 bp, synthetic construct
  source 1..75: mol_type = other DNA
cgtatgccagaaccgatgcgctgttgttctggctgggtattgatttctcggcaatcctgtttggccctgtgaagt

SEQ ID NO: 620975 - DNA, 75 bp, synthetic construct
  source 1..75: mol_type = other DNA
tactggcgaaaaaacaggcgcaaaatatcagccaaaacctgccgattaaatctgcgggatataccttagtgctgg

SEQ ID NO: 620976 - DNA, 75 bp, synthetic construct
  source 1..75: mol_type = other DNA
aattgttatggataatggttttatttctgaagatggcacacataaagagcttatctccaaaaaagacagtttata

SEQ ID NO: 620977 - DNA, 75 bp, synthetic construct
  source 1..75: mol_type = other DNA
cgcactggtcaggcgcatcgtggtggcgaacaccggctgaacacggggccaccggactggcagaccgtggaataa

SEQ ID NO: 620978 - DNA, 75 bp, synthetic construct
  source 1..75: mol_type = other DNA
cgtcggtggtggcattgtggtacatggtattgcgccgctgcatcatgctattgaacatttctccgggcagcagag

SEQ ID NO: 620979 - DNA, 75 bp, synthetic construct
  source 1..75: mol_type = other DNA
gttgatgattggtggcgcatttctctgctttgaaggggtagagaaggtgctgcatatgctggaggcgcgtaagca

SEQ ID NO: 620980 - DNA, 75 bp, synthetic construct
  source 1..75: mol_type = other DNA
ggcaaaaacaacgaatttcgttagcgcggctgtttttgagaaaacctgcaataattattattgatgaagccacat

SEQ ID NO: 620981 - DNA, 75 bp, synthetic construct
  source 1..75: mol_type = other DNA
catcacgtatccctaaaaccctgcgtgttgcctctgatgaactgtacagtctgtggcgtgaatattcgcccgtca

SEQ ID NO: 620982 - DNA, 75 bp, synthetic construct
  source 1..75: mol_type = other DNA
atatcaggggcatattattcttatcgcttcccgttcttctgttgccgggaaactggcgaaatttgactttacctg

SEQ ID NO: 620983 - DNA, 75 bp, synthetic construct
  source 1..75: mol_type = other DNA
gtcttaattgatggacatgatcttgcgttggccgatcctaactggttacgtcgtcaggtgggggttgtgttgcag

SEQ ID NO: 620984 - DNA, 75 bp, synthetic construct
  source 1..75: mol_type = other DNA
ttatgccattagcgcaaactcgtgaggaaataaatgctacggcggcatcgttacgccatttggcagctatctggg

SEQ ID NO: 620985 - DNA, 75 bp, synthetic construct
  source 1..75: mol_type = other DNA
aatgcgtacagacagatcgatggtatgagccgccagtgagttttgacgggctggcgcgcacctttcgcgccgccg

SEQ ID NO: 620986 - DNA, 75 bp, synthetic construct
  source 1..75: mol_type = other DNA
tgtcagaagtcgcggcaaaggatgaatttttgaatatcaagaacgtgagccgggatgacatgatggcagcacacc

SEQ ID NO: 620987 - DNA, 75 bp, synthetic construct
  source 1..75: mol_type = other DNA
ggcctgcccggctatctttctgctattccgtcagccctgctcaatgagtccgccacgctgttccgtcgcaagtat

SEQ ID NO: 620988 - DNA, 75 bp, synthetic construct
  source 1..75: mol_type = other DNA
gcttcagagacgctttgaggagcttaataaatggctggataaaaacgcgatagggttcacaaattacgaattatc

SEQ ID NO: 620989 - DNA, 75 bp, synthetic construct
  source 1..75: mol_type = other DNA
atttctgagcatcaagaacgtcagccgtgatgacatgatggcggcacaccgcgtaccgcctcagatgatgggaat

SEQ ID NO: 620990 - DNA, 75 bp, synthetic construct
  source 1..75: mol_type = other DNA
ggggatgtggagaaagccagccgcgtctttgttcgcaacgagttgatacctctgcagaagcgccttcaggaattg

SEQ ID NO: 620991 - DNA, 75 bp, synthetic construct
  source 1..75: mol_type = other DNA
ctccgcaacgcaatgaaaagcgccaaaggtccaggcaacttccgcaacttgtttatgtactcgcctaacggtaaa

SEQ ID NO: 620992 - DNA, 75 bp, synthetic construct
  source 1..75: mol_type = other DNA
gggatgcggtgctggatattggccgcccggactcctctgctgatatgctcgccaaagctgaaaaggcttttgatg

SEQ ID NO: 620993 - DNA, 75 bp, synthetic construct
  source 1..75: mol_type = other DNA
gtcgggagtatcggcagcgccattggcggggctgaaccgccccggaaatcctggagactaaactccctgagaaag

SEQ ID NO: 620994 - DNA, 75 bp, synthetic construct
  source 1..75: mol_type = other DNA
cgccacgctgttccgccggaagtattacattaacggcagccatgcaggcttcatcatgtacatgaccgacgccgc

SEQ ID NO: 620995 - DNA, 75 bp, synthetic construct
  source 1..75: mol_type = other DNA
atgggaaagagtaagaagaaccgcgctgcgtcgacgaaccagatccagcataaaagccagactacagccgaagca

SEQ ID NO: 620996 - DNA, 75 bp, synthetic construct
  source 1..75: mol_type = other DNA
attgcagaaacgtatgtgcgaactgaacgaatggattgaggaaaaagtaataaattttgaagcgtatcagctctc

SEQ ID NO: 620997 - DNA, 75 bp, synthetic construct
  source 1..75: mol_type = other DNA
ggggatgtggagaaggccagtaaggtattcgtacgtaatgaattgctcccgcttcagaaaagaatagaagaactt

SEQ ID NO: 620998 - DNA, 75 bp, synthetic construct
  source 1..75: mol_type = other DNA
tttacaaaaacgcattgccgaaattaatgaatggttagatgaagaggtagtcaaatttgaatattatggcttaga

SEQ ID NO: 620999 - DNA, 75 bp, synthetic construct
  source 1..75: mol_type = other DNA
aaggtcctggcaacttccgcaatctgtttatgtactcgcctaacggcaaaaaagacgggcttcagattatcccgt

SEQ ID NO: 621000 - DNA, 75 bp, synthetic construct
  source 1..75: mol_type = other DNA
ttctggaccgccgcgaactgctggactatgtggaatgcgtacagatggagcgttggtacgagccacccgtcagtt

SEQ ID NO: 621001 - DNA, 75 bp, synthetic construct
  source 1..75: mol_type = other DNA
gtgcttcagcgggagagccaatcccgatggcggggattccctaccatgcggtggaaaactacctcgccaaactgg

SEQ ID NO: 621002 - DNA, 75 bp, synthetic construct
  source 1..75: mol_type = other DNA
tatgcctaataatgttggagggtttggggatgtggagaaggccgcaaatgtgtttgtgcgcaatgaacttttgcc

SEQ ID NO: 621003 - DNA, 75 bp, synthetic construct
  source 1..75: mol_type = other DNA
ccattccgtcagctctgctcaacgagtccgccacgttgttccgtcgtaagtattacattaacggcagccatgcag

SEQ ID NO: 621004 - DNA, 75 bp, synthetic construct
  source 1..75: mol_type = other DNA
tcatgtatatgaccgacgccgcgcagaaccaggaagatgtgaacaacctccgcaacgcgatgaaaagcgccaaag

SEQ ID NO: 621005 - DNA, 75 bp, synthetic construct
  source 1..75: mol_type = other DNA
ggcttgcccggctatctttctgccattccgtccgccctgctcaatgagtccgccacgctgttccgtcgaaagtat

SEQ ID NO: 621006 - DNA, 75 bp, synthetic construct
  source 1..75: mol_type = other DNA
aaggatgggcttcagatcattcctctgtcagaagtcgcggcgaaggatgagtttctaaacatcaagaacgtgagc

SEQ ID NO: 621007 - DNA, 75 bp, synthetic construct
  source 1..75: mol_type = other DNA
gtgtaccgccacagatgatggggattatgccgaataatgttggggggtttggggatgtggagaaggcggcgaatg

SEQ ID NO: 621008 - DNA, 75 bp, synthetic construct
  source 1..75: mol_type = other DNA
cttgagcctgctctggcaaaatatacccgacgcgggttagacctggagacctactggtttgtgcaatacggtatg

SEQ ID NO: 621009 - DNA, 75 bp, synthetic construct
  source 1..75: mol_type = other DNA
attgcaaaaaagatttgaagaattgaatatatggttaggtaaaactgttatcagttttgacgcctacaaacttta

SEQ ID NO: 621010 - DNA, 75 bp, synthetic construct
  source 1..75: mol_type = other DNA
atcaaaaccaacggcgtcggcccgaagttggcgctggcgatcctctccggaatgtcagcgcagcagttcgttaat

SEQ ID NO: 621011 - DNA, 75 bp, synthetic construct
  source 1..75: mol_type = other DNA
gaagttaaaaccagaatatctcgagacattggttttgcaccgggaggaaaacaatcttattttagatggtgtatt

SEQ ID NO: 621012 - DNA, 75 bp, synthetic construct
  source 1..75: mol_type = other DNA
agaatagccgcgaaacgttgtcattacaacacaggcggctatatgacgctcgcagagctgggcatggccttctgg

SEQ ID NO: 621013 - DNA, 75 bp, synthetic construct
  source 1..75: mol_type = other DNA
cctgacaacatcacgggggctaatcttgaacccaaacaactcaagaatagccgcgaaacgttgtcattacaacag

SEQ ID NO: 621014 - DNA, 75 bp, synthetic construct
  source 1..75: mol_type = other DNA
tacagaatatccgtgccactattatccctactatcgccgtgccggtcgttattctcggaacgttcgctatcttgt

SEQ ID NO: 621015 - DNA, 75 bp, synthetic construct
  source 1..75: mol_type = other DNA
ccgccaagaacgccatcctgattgtcgaatttgccgttgagatgatgcagaaagaagggaaaacgccgatagagg

SEQ ID NO: 621016 - DNA, 75 bp, synthetic construct
  source 1..75: mol_type = other DNA
ttatcactggcagcgcaatcaccgaatcaggtcaccggggtacgcccgaacggactggaagatacgccgatgttc

SEQ ID NO: 621017 - DNA, 75 bp, synthetic construct
  source 1..75: mol_type = other DNA
tgaatatctgttgctgacggtaccattaccgtttgagtgcgaaacctatgccacgccggaggtgccgttggcagg

SEQ ID NO: 621018 - DNA, 75 bp, synthetic construct
  source 1..75: mol_type = other DNA
ccaaagcgatcattaacaatggtgaaattaacctgctgtgtgatacgggatgtgatatctatgcaccgggtacca

SEQ ID NO: 621019 - DNA, 75 bp, synthetic construct
  source 1..75: mol_type = other DNA
caattaaaacggcaagtacgggttctaacagcaacgggaaatggatctggaataccgacacgggggtaattagcg

SEQ ID NO: 621020 - DNA, 75 bp, synthetic construct
  source 1..75: mol_type = other DNA
aatggtatgaccgattagaacttcttgcgggtaaacatcaaaatgtggtgctgttacctgtagctaatagagatt

SEQ ID NO: 621021 - DNA, 75 bp, synthetic construct
  source 1..75: mol_type = other DNA
cctcaggtaaagatccaaagcaccagttggcgctgaccactcaggaaacgcttaaaccggtcactgttaaggaag

SEQ ID NO: 621022 - DNA, 75 bp, synthetic construct
  source 1..75: mol_type = other DNA
aaactgcagataatgcggcagactatttcttcgagtcatctgtcggggtgaatgtcacgggtaacaataatacag

SEQ ID NO: 621023 - DNA, 75 bp, synthetic construct
  source 1..75: mol_type = other DNA
ccgaggcgatgggcgtcgcattgtctgacatcaaccaaactatctctacagcttttgggagtagctacgttaacg

SEQ ID NO: 621024 - DNA, 75 bp, synthetic construct
  source 1..75: mol_type = other DNA
ctaacgaaagttatcttcatcttgatttctacgaccgctccaaactcatccaatggttgcgccaacatccatcag

SEQ ID NO: 621025 - DNA, 75 bp, synthetic construct
  source 1..75: mol_type = other DNA
agctttgcttgagaggattgaagaaacgcttgttacgtctaattttgagcattttaaatcacgctacaacccaca

SEQ ID NO: 621026 - DNA, 75 bp, synthetic construct
  source 1..75: mol_type = other DNA
tcacgttatccagaaaagagctaattggcgggctgttctacctcatgctattgcaaacaagctagctgcatcggc

SEQ ID NO: 621027 - DNA, 75 bp, synthetic construct
  source 1..75: mol_type = other DNA
caaaccggaatgctgatgaaatttaaggaggaacagaggtttttttgtagggaacgctatgagggcagcaaaact

SEQ ID NO: 621028 - DNA, 75 bp, synthetic construct
  source 1..75: mol_type = other DNA
taagaacgggagagactgtttttcctatggggcacctgcaccctcagaggtgctgtgttgatgtaaacggtactt

SEQ ID NO: 621029 - DNA, 75 bp, synthetic construct
  source 1..75: mol_type = other DNA
cacattgcgcttcgatggcaacgaggctgaaaagctagaatggctgaatacaatcttcgctgttgttgatgagca

SEQ ID NO: 621030 - DNA, 75 bp, synthetic construct
  source 1..75: mol_type = other DNA
tcctgccgctggttatcagtcatggcgcaggttctggcgcacaaaatgcggtaggtaccggggttatggggggga

SEQ ID NO: 621031 - DNA, 75 bp, synthetic construct
  source 1..75: mol_type = other DNA
ggcagacctggtcgcaaaacttccggcaggcgtcggctactcatggaccggactgtcgtatcaggaagcgttatc

SEQ ID NO: 621032 - DNA, 75 bp, synthetic construct
  source 1..75: mol_type = other DNA
gtaccggtgacgccatgaaatttatggcagacctggtcgcaaaacttccggcaggcgtcggctactcatggaccg

SEQ ID NO: 621033 - DNA, 75 bp, synthetic construct
  source 1..75: mol_type = other DNA
caatagcagagagggtagaagagggtgaaagtctagctcaattgtctgatgcacagttgtttaaccgcctttttg

SEQ ID NO: 621034 - DNA, 75 bp, synthetic construct
  source 1..75: mol_type = other DNA
tggagagccatccttccccatgccattgctaacaagttggcagcatctgcacttaatagtattccgattgatcaa

SEQ ID NO: 621035 - DNA, 75 bp, synthetic construct
  source 1..75: mol_type = other DNA
ccgtaccgcaggcgtcggtagcgtacagctctttggttcagagtacgccatgcgtatctggctggatccgcaaaa

SEQ ID NO: 621036 - DNA, 75 bp, synthetic construct
  source 1..75: mol_type = other DNA
acagaggcaccgctatcaacgataaaacaggcgtgatcaatattaacgtcgatacggggcaggcgttttataacg

SEQ ID NO: 621037 - DNA, 75 bp, synthetic construct
  source 1..75: mol_type = other DNA
cttaaaaagattagattctacaattgtgctattatttatcttcgcaatgcccaattactggttaaaacaatagat

SEQ ID NO: 621038 - DNA, 75 bp, synthetic construct
  source 1..75: mol_type = other DNA
attctggggatcccaacagtatccgatcgaattgctcagggagcgataaaactttttatggaagaaaagcttgac

SEQ ID NO: 621039 - DNA, 75 bp, synthetic construct
  source 1..75: mol_type = other DNA
atgcaacgaaaatcattcgaaataccaaaagcactggtctgggcatcatatctggatgtgcgtcgcaacaaggga

SEQ ID NO: 621040 - DNA, 75 bp, synthetic construct
  source 1..75: mol_type = other DNA
tttaatatctccgtctacttttgatggagtaatttattactccccaactattttctggggtggtctggttagaaa

SEQ ID NO: 621041 - DNA, 75 bp, synthetic construct
  source 1..75: mol_type = other DNA
tggatatgttagcacatcatattttatccgtaattttaaaagttattttggtataacgccgaaacagttttcctt

SEQ ID NO: 621042 - DNA, 75 bp, synthetic construct
  source 1..75: mol_type = other DNA
atattttccacatagacaacaatatattaagctgtatctgcaaagtcatggaaccattgttactgaatccacata

SEQ ID NO: 621043 - DNA, 75 bp, synthetic construct
  source 1..75: mol_type = other DNA
agactgttctgctggagacaaactatgatattgcagaagctctacggcgtattgatgaacagcgctatacactga

SEQ ID NO: 621044 - DNA, 75 bp, synthetic construct
  source 1..75: mol_type = other DNA
ggccaaatcgcaatgggtctggtcattatggtggtcatggcgcaaatccctccgcgcgtctatgaaggctgggca

SEQ ID NO: 621045 - DNA, 75 bp, synthetic construct
  source 1..75: mol_type = other DNA
attgtgctgatggctgggtttgggattgtaatgtcaatccacacccacaggaaaatgttgtcgaaaagcgtgtaa

SEQ ID NO: 621046 - DNA, 75 bp, synthetic construct
  source 1..75: mol_type = other DNA
ttggcgcaggtgcattacgcgcggcagtagcgtcttatgtgcagtctccgcgctattaccgtgcgttaatggctg

SEQ ID NO: 621047 - DNA, 75 bp, synthetic construct
  source 1..75: mol_type = other DNA
atatcatcaaacggctcaatcgtgcagccggccatctgagaagtacaattcagatgctggaagacgaaaagcctt

SEQ ID NO: 621048 - DNA, 75 bp, synthetic construct
  source 1..75: mol_type = other DNA
ccagaatacttgatatgggtgttctgctggagatgaaagcgcttgtgaatgcaaatggtggtgtgtcacggtgca

SEQ ID NO: 621049 - DNA, 75 bp, synthetic construct
  source 1..75: mol_type = other DNA
cgctggcgatcgacgataaaggttttggtgctgacctggctgctgttcaggacgattatatctcgcgctcacgtc

SEQ ID NO: 621050 - DNA, 75 bp, synthetic construct
  source 1..75: mol_type = other DNA
cttgatcttgatagcgatgatttcgaatacatcccgccagtcacttaccgcgtcgtcgatgatttcctggctgaa

SEQ ID NO: 621051 - DNA, 75 bp, synthetic construct
  source 1..75: mol_type = other DNA
tcatctgctaaggtgtatggagccgatgttggcccagaatgtccgccagaacttcgaattgctctattcgcgtcg

SEQ ID NO: 621052 - DNA, 75 bp, synthetic construct
  source 1..75: mol_type = other DNA
aaaccaatcaactggtttgccacttccgctttgacagccaccagactattacccgtctgacgcaggattctcgtg

SEQ ID NO: 621053 - DNA, 75 bp, synthetic construct
  source 1..75: mol_type = other DNA
ggagtacgccgaagccgcaagcgtaacgccgccaacggtcgatgatgccctgcgcgcccgactggctgcgcattt

SEQ ID NO: 621054 - DNA, 75 bp, synthetic construct
  source 1..75: mol_type = other DNA
acagcattaatcggcctgcaaaatctgtcggctcgttttaattctgctatggacattcccgcccagggactctgc

SEQ ID NO: 621055 - DNA, 75 bp, synthetic construct
  source 1..75: mol_type = other DNA
agatccggtgtaaaggcgaataccctgggtttacgattggttgcgaatacctgggccacattgggtacggccctt

SEQ ID NO: 621056 - DNA, 75 bp, synthetic construct
  source 1..75: mol_type = other DNA
tttgacagctttcagggtgtcaaaacatggcgttttaaaagtggtccgctcaaggatgtaagtaaagttcagcga

SEQ ID NO: 621057 - DNA, 75 bp, synthetic construct
  source 1..75: mol_type = other DNA
tttgatacctttcagggggtaaaaacatggcgttttaaaagcgggccgctcaaggatgtaagtaaaattcagcga

SEQ ID NO: 621058 - DNA, 75 bp, synthetic construct
  source 1..75: mol_type = other DNA
gacgattatatttcgcgttcacgtctgctcgatgcccgtttatggctaaaacgtccattatggcaacgtgtcgcc

SEQ ID NO: 621059 - DNA, 75 bp, synthetic construct
  source 1..75: mol_type = other DNA
gttagtatgattgacggtataaaggtttggcgtttcaaaagtggacctgtaaaagatgtaggcaaggctaaacgt

SEQ ID NO: 621060 - DNA, 75 bp, synthetic construct
  source 1..75: mol_type = other DNA
ggtatcgtttattattccccctctattttttggggaggcttggttaaaaaaattaaagagcgatgccagtgccca

SEQ ID NO: 621061 - DNA, 75 bp, synthetic construct
  source 1..75: mol_type = other DNA
gcggctgggcagctggtggcgcgcgccgtgtttctctcgccaccctatttggttgcagaagaggaactgtcagtt

SEQ ID NO: 621062 - DNA, 75 bp, synthetic construct
  source 1..75: mol_type = other DNA
ccagcagcagttagcgcaggtagggattaaagcccaggtgacggcgatggatgccggacaacgggcggcggaagt

SEQ ID NO: 621063 - DNA, 75 bp, synthetic construct
  source 1..75: mol_type = other DNA
ctgggcgctatcgccactgttcgcctcgcagaactggccgccgacgctgtttaatactgcgttttacagcaataa

SEQ ID NO: 621064 - DNA, 75 bp, synthetic construct
  source 1..75: mol_type = other DNA
gaaccggaccgtatgaactggatacctggaatcagaccgattttgtgaaggtgaaaaaattcgcgggttactggc

SEQ ID NO: 621065 - DNA, 75 bp, synthetic construct
  source 1..75: mol_type = other DNA
ctggaatcagaccgatttcgtgaaagtgaagagattcgcgggttactggcagccggggcagcccaaactggacag

SEQ ID NO: 621066 - DNA, 75 bp, synthetic construct
  source 1..75: mol_type = other DNA
ttttcagcgtttattaatattctcgcccatccggcgacagtgatgatctcgcctgcggcgctggaaaaatatggt

SEQ ID NO: 621067 - DNA, 75 bp, synthetic construct
  source 1..75: mol_type = other DNA
ggcaccgacttcaacgcggcggcggtaaaagcgaatctggatcgggccagtgacccagcgaatcatcttaaacgc

SEQ ID NO: 621068 - DNA, 75 bp, synthetic construct
  source 1..75: mol_type = other DNA
gtaacgacggacagtgggtaaataccccgagtgacggggaagcgaaggtactgcgttccctggtcaaaggagaag

SEQ ID NO: 621069 - DNA, 75 bp, synthetic construct
  source 1..75: mol_type = other DNA
agtaggccaaatcagcagaacaatggttatcaaccaccacggcaaacgcagcaaacgcagcaagtagccccacca

SEQ ID NO: 621070 - DNA, 75 bp, synthetic construct
  source 1..75: mol_type = other DNA
aaaaacgtcatgcctgacgttctggtaaagcaaataccaattctcaaactagatgaagttatgcattacctaaac

SEQ ID NO: 621071 - DNA, 75 bp, synthetic construct
  source 1..75: mol_type = other DNA
cgccacatccagggcatgtaagtatgatcctgacgttaaccctacctaccagcttgagcattataatgtcgcagt

SEQ ID NO: 621072 - DNA, 75 bp, synthetic construct
  source 1..75: mol_type = other DNA
cgaatcaggcatgagatcttctacagccttgcatcgcttaatcagcgcattcgggagttgctggaaagactgaat

SEQ ID NO: 621073 - DNA, 75 bp, synthetic construct
  source 1..75: mol_type = other DNA
aaaaaagaacccgccaccagtttctggaagcgggttatggtcagactggcgtcgatattgcccgtggaatggtta

SEQ ID NO: 621074 - DNA, 75 bp, synthetic construct
  source 1..75: mol_type = other DNA
aactggtgtcggcacacagtaaaaatctgaccggtttttggatcatgccagacaccggcttcagctttgaagatg

SEQ ID NO: 621075 - DNA, 75 bp, synthetic construct
  source 1..75: mol_type = other DNA
gctctttgcgatatcaccagaactatgggtaattctgaacactcaggcaaagaatgcaattgcaatggttgagaa

SEQ ID NO: 621076 - DNA, 75 bp, synthetic construct
  source 1..75: mol_type = other DNA
cagcattatcgcggtggcagatgtgatcatgcgttgtgcaaaacgtcgtgaagagcttagtccacagggagcaat

SEQ ID NO: 621077 - DNA, 75 bp, synthetic construct
  source 1..75: mol_type = other DNA
gtgaaaaatataactggcgacatccagattgctgctgtacttgatcgcagcattatcgcggttgcagatgtaatc

SEQ ID NO: 621078 - DNA, 75 bp, synthetic construct
  source 1..75: mol_type = other DNA
ttattgtcctgttttgcgccagcggcaccgggatcttcggggcgatgaacgaagggatgaccggcgatccgagta

SEQ ID NO: 621079 - DNA, 75 bp, synthetic construct
  source 1..75: mol_type = other DNA
gtgaaatgcgccaaccttccagcgatggttttagctacgctacttggcgctctaattggcgaaatttgtctgctg

SEQ ID NO: 621080 - DNA, 75 bp, synthetic construct
  source 1..75: mol_type = other DNA
gcaattagcagaaaaaaactcccggtaacaaaaaaatcaatccttgcctattcaacaggaatttttgagccattt

SEQ ID NO: 621081 - DNA, 75 bp, synthetic construct
  source 1..75: mol_type = other DNA
gcagattaatggattttaacggactcagttgtctgtttccgggagattccccagctgattttgggtataaactaa

SEQ ID NO: 621082 - DNA, 75 bp, synthetic construct
  source 1..75: mol_type = other DNA
ggattatgtgaactggcacgtcgtgaggcctggcaaatggcattttgtcgaacacgtttcctgagattgacaact

SEQ ID NO: 621083 - DNA, 75 bp, synthetic construct
  source 1..75: mol_type = other DNA
tatcaggcgctggctgagcactatggcacggttattatcccggcccgcccgcgcaaacctaaagataaaccaaaa

SEQ ID NO: 621084 - DNA, 75 bp, synthetic construct
  source 1..75: mol_type = other DNA
cgctgacggataatgaacttcaagcgtttaacgaagcggttgtacgagcttatgaaaagagcgtaataaccatcg

SEQ ID NO: 621085 - DNA, 75 bp, synthetic construct
  source 1..75: mol_type = other DNA
catcatcgctgtggcagatgtgattatgcgttgcgctaaacgtcgtgaagagcttggtaaagagggattaattac

SEQ ID NO: 621086 - DNA, 75 bp, synthetic construct
  source 1..75: mol_type = other DNA
atattctctgcggagaaaatgaaaagggtgaacccttctatgtgttgaatgtgccgcgagccaagcaacgtaaca

SEQ ID NO: 621087 - DNA, 75 bp, synthetic construct
  source 1..75: mol_type = other DNA
cggtagaagccaggaactgtcagtcagaaaacaatacctgcccatatcctttcgacctgtacaaaaccgacccgg

SEQ ID NO: 621088 - DNA, 75 bp, synthetic construct
  source 1..75: mol_type = other DNA
attcgtctgcatgtaattgtccgcgaaaccaacgacgaagcctggcgggccgccgaacggttaatctcccatctt

SEQ ID NO: 621089 - DNA, 75 bp, synthetic construct
  source 1..75: mol_type = other DNA
gaaaatcgaacaagtgcgggcgaaagctgccgcgcatggacgcaaaattcgtttcggtattcgtctgcatgtgat

SEQ ID NO: 621090 - DNA, 75 bp, synthetic construct
  source 1..75: mol_type = other DNA
ctctggtttgatatggataccacccggcagcgttatgataaccgggacgggcagctggggagtctgaccggggga

SEQ ID NO: 621091 - DNA, 75 bp, synthetic construct
  source 1..75: mol_type = other DNA
attgcagggggaaaccgtcgatttcaacggcaaacatattcatgtgcgaggagcaaaactgctctttccaccgat

SEQ ID NO: 621092 - DNA, 75 bp, synthetic construct
  source 1..75: mol_type = other DNA
gtcgccattccggaaattccccagccgcagccgctgaatccgcaaggcgaagcggtggagaatgattttatccct

SEQ ID NO: 621093 - DNA, 75 bp, synthetic construct
  source 1..75: mol_type = other DNA
cgccacgcttgaccgtctctctaatggacgcgtgttgtttaacctggtaacaggcagcgatccccaagagctggc

SEQ ID NO: 621094 - DNA, 75 bp, synthetic construct
  source 1..75: mol_type = other DNA
caaagttcgtactagatggacgcttaaaagagcttttatggactgatgacaaggtaggaaaaccgtcacataagg

SEQ ID NO: 621095 - DNA, 75 bp, synthetic construct
  source 1..75: mol_type = other DNA
tttggcaccgcctgcctgttcatcacccacgacttacgcctggtagaacgcttttgccagcgggtaatggttatg

SEQ ID NO: 621096 - DNA, 75 bp, synthetic construct
  source 1..75: mol_type = other DNA
ataaatcatattgattttagtcgcgatcaatctaaagattttagctgcgatcaatctaaaattaaaatagctgag

SEQ ID NO: 621097 - DNA, 75 bp, synthetic construct
  source 1..75: mol_type = other DNA
atgaggtgttcggaggacacctcagtccgcgggcatatatggtctgggatgtggctgatgagtggacgctgaaag

SEQ ID NO: 621098 - DNA, 75 bp, synthetic construct
  source 1..75: mol_type = other DNA
tgccggtgattacttccagacgggatcatcaacaacgggctatgtgatacctgagcgaaattactggatgtcact

SEQ ID NO: 621099 - DNA, 75 bp, synthetic construct
  source 1..75: mol_type = other DNA
atgcagacaaatggcattcttcagttaatgccgggctgaacctgcaggaaagtaacaaatgggggaacagcagcc

SEQ ID NO: 621100 - DNA, 75 bp, synthetic construct
  source 1..75: mol_type = other DNA
gacgtacgaatctactaggtaaccccgaactgaagccggaagagagtgtaagttatgaagcgggggtatattacg

SEQ ID NO: 621101 - DNA, 75 bp, synthetic construct
  source 1..75: mol_type = other DNA
ccgattgtgctgccattgcggaaatttataaccacgccgtgttgtatacggcggctatctggaatgaccaaacgg

SEQ ID NO: 621102 - DNA, 75 bp, synthetic construct
  source 1..75: mol_type = other DNA
gaggccacctggtcacagtcactgccggactggctgcaaagccatgtccgtgcctttgagtttttcggcgggaca

SEQ ID NO: 621103 - DNA, 75 bp, synthetic construct
  source 1..75: mol_type = other DNA
ccttctgccgaatggagcgtgaagtgaaatgccagcagacgcggccagtggtccaccccctgctgaacaaaacgc

SEQ ID NO: 621104 - DNA, 75 bp, synthetic construct
  source 1..75: mol_type = other DNA
gcgcatcaaacttagcaagccaggtgcggtggcgcgagcggcgaatgtcggcgtcatcattgagcgtggcaataa

SEQ ID NO: 621105 - DNA, 75 bp, synthetic construct
  source 1..75: mol_type = other DNA
ggtgcgtatcaaactcagcaagccaggcgcagtggcgcgggcggcgaatgttggcgtaatcattgagcgtggcaa

SEQ ID NO: 621106 - DNA, 75 bp, synthetic construct
  source 1..75: mol_type = other DNA
ttacgcgcgttgattgatgaagcgcggaactgcggtaagcatgtgatggttgccggcatagaatcacaaaatcag

SEQ ID NO: 621107 - DNA, 75 bp, synthetic construct
  source 1..75: mol_type = other DNA
gaaacaaaatttcagctggctatgatcattctttcaccttcggtacctggaaatcgtatctgaactggaacgaga

SEQ ID NO: 621108 - DNA, 75 bp, synthetic construct
  source 1..75: mol_type = other DNA
gtatatcacggatgcatttgcactgactgcgggtagccgctatgaacgctatgaggtgttcggaggacacttcag

SEQ ID NO: 621109 - DNA, 75 bp, synthetic construct
  source 1..75: mol_type = other DNA
tgaacacatggtgaatgcgaaactgaactggcagatcaccgaagaggtggcatcatggctgggtgcccgttatcg

SEQ ID NO: 621110 - DNA, 75 bp, synthetic construct
  source 1..75: mol_type = other DNA
gcatatccgaaaaattgcaacgcttaccattgatgcaaaagcccgactccagcctgcccgtggttacacaattgt

SEQ ID NO: 621111 - DNA, 75 bp, synthetic construct
  source 1..75: mol_type = other DNA
ttgcagaggaaaacgctgtcaaaacatgcggagatggcgaaggcgttcgaatatatcctgaatcaccagaaaccg

SEQ ID NO: 621112 - DNA, 75 bp, synthetic construct
  source 1..75: mol_type = other DNA
cgctcgcggctatgttgggatgcgtatctgttaatacagccaatgcaactgcgttacctgcacaattcagggcag

SEQ ID NO: 621113 - DNA, 75 bp, synthetic construct
  source 1..75: mol_type = other DNA
atcagttgaataatgacaactttgcaccaggaaaaacggcggctgattattcgtttcaaactcggcctcttgggt

SEQ ID NO: 621114 - DNA, 75 bp, synthetic construct
  source 1..75: mol_type = other DNA
atttaccggggcgtattatcagttgaataatgacaactttgcaccaggaaaaacggcggctgattattcgttttc

SEQ ID NO: 621115 - DNA, 75 bp, synthetic construct
  source 1..75: mol_type = other DNA
gattctgaagggatggaatttgtgcaatcaggtacaaacgtgccctatatgaaaattagcgcaattgattacagt

SEQ ID NO: 621116 - DNA, 75 bp, synthetic construct
  source 1..75: mol_type = other DNA
atattatgcaaaagaatcatgaagtcagggtttgtcaacctagttccagaattgttcaagcaggtctataaggaa

SEQ ID NO: 621117 - DNA, 75 bp, synthetic construct
  source 1..75: mol_type = other DNA
atatgtgtgtggaaaaagattcattccctcatactcagaagtctaatctaagcatgcacatatatgaatttgcac

SEQ ID NO: 621118 - DNA, 75 bp, synthetic construct
  source 1..75: mol_type = other DNA
actcaaacgaacaatacgtagtttccctggcaacaggtgatcaaagcgtatttgaaaagcttgggtttgcttatg

SEQ ID NO: 621119 - DNA, 75 bp, synthetic construct
  source 1..75: mol_type = other DNA
cggtggagaagcaaaggcggcaactatgcttgggcgcttcggtgagcgtctttccactggtactcggcttggcgc

SEQ ID NO: 621120 - DNA, 75 bp, synthetic construct
  source 1..75: mol_type = other DNA
catagacaaaaggcgagaagaaggacgtatcgagtgggaacaggtcagaacaggcaaacagaagggcaaagaaca

SEQ ID NO: 621121 - DNA, 75 bp, synthetic construct
  source 1..75: mol_type = other DNA
atgactcacactcacacagttacgcgccttttgccagaggcatttgaacgactggcagcaatcaaagccaaatac

SEQ ID NO: 621122 - DNA, 75 bp, synthetic construct
  source 1..75: mol_type = other DNA
ggtaacgttgccgacctgcgtgccgagcttgcggctaatcaacgtcatgctgactcgcttgatgcgacgctgcag

SEQ ID NO: 621123 - DNA, 75 bp, synthetic construct
  source 1..75: mol_type = other DNA
cggtggagaagcgaaagcggctaccatgctcgggcggttcggcgaacgcttggctaccggcgcgcggcttggcgc

SEQ ID NO: 621124 - DNA, 75 bp, synthetic construct
  source 1..75: mol_type = other DNA
ggcagggtataaaccagccgttgtcgaatgcccaggcagggttgggtgaatcactgctttcttccctgaaagagg

SEQ ID NO: 621125 - DNA, 75 bp, synthetic construct
  source 1..75: mol_type = other DNA
agcgcattactggctgaagacagcacggcgttaatacaaggatggcgaacttttcaacgtaaatttaactatagt

SEQ ID NO: 621126 - DNA, 75 bp, synthetic construct
  source 1..75: mol_type = other DNA
gtgctgactggggagcgaaaaagcgcgatgtgatggcttttggtccggttgaaacaacgattccagaggggttca

SEQ ID NO: 621127 - DNA, 75 bp, synthetic construct
  source 1..75: mol_type = other DNA
ttagcgaacgcaagaaatattaatggtgtcagatttgatggctctgccgatataaatattaatacactggtatcc

SEQ ID NO: 621128 - DNA, 75 bp, synthetic construct
  source 1..75: mol_type = other DNA
ccgcacaggacgctaccaccgcgcgaaaaggccttgttcagctcagtagtgcgactaacagcacgtctgaaacgc

SEQ ID NO: 621129 - DNA, 75 bp, synthetic construct
  source 1..75: mol_type = other DNA
atgaacatgacaaaaggtgcactcatcctcagcctttcatttttgcttgccgcatgtagttcaattccgcaaaat

SEQ ID NO: 621130 - DNA, 75 bp, synthetic construct
  source 1..75: mol_type = other DNA
atatgcagcagtggtatctgcgtgcctgccaggttcagcagactgaagcgccccgcatcatcaccccggacaacc

SEQ ID NO: 621131 - DNA, 75 bp, synthetic construct
  source 1..75: mol_type = other DNA
aggcaatgtcttactgccaggattaattaaacgcgatttccctcattccgtcgccagacttaccggcgcatattc

SEQ ID NO: 621132 - DNA, 75 bp, synthetic construct
  source 1..75: mol_type = other DNA
tatacgacgcgactggccgctctcaagtttgcgaaagtcagcttgcaggaagaggtccaatattgcgaggccgag

SEQ ID NO: 621133 - DNA, 75 bp, synthetic construct
  source 1..75: mol_type = other DNA
ttggcggaactgatgtctgccctgccgtgggcgatctgccgggcggagacagccaggtacgatcgctctatcagg

SEQ ID NO: 621134 - DNA, 75 bp, synthetic construct
  source 1..75: mol_type = other DNA
acgcgaaatggcagtgtcgtgctggcaacaaattgtcgaggctgatttttattataccggggtggaatatctgtt

SEQ ID NO: 621135 - DNA, 75 bp, synthetic construct
  source 1..75: mol_type = other DNA
tgggcggtttctggatgcgtgagcttggcctgtacgatgatgcgggaacattaattgccgtggcgaacatggccg

SEQ ID NO: 621136 - DNA, 75 bp, synthetic construct
  source 1..75: mol_type = other DNA
ccaacagcgattctgaaacgcttgcggcaacgccaaaggcggttaagacagcgtatgaccttgctaacgggaaat

SEQ ID NO: 621137 - DNA, 75 bp, synthetic construct
  source 1..75: mol_type = other DNA
caggtattcagatgtatgaggcatacaacaatggctacccaacagcctatggtaatgtgcttcatctcactggcg

SEQ ID NO: 621138 - DNA, 75 bp, synthetic construct
  source 1..75: mol_type = other DNA
atgaagcatacggcgcttgttggagagcttttaaaagagtcggtaacccttaccccttttgataacgttaagggc

SEQ ID NO: 621139 - DNA, 75 bp, synthetic construct
  source 1..75: mol_type = other DNA
cccgccgtatttatcgctttccttgccggtttaccgctgctgttaattgccgggctgatccactggcgtctgggt

SEQ ID NO: 621140 - DNA, 75 bp, synthetic construct
  source 1..75: mol_type = other DNA
agcaggttaaccagcagacgctgcgtattaccatgttgctgatgtttgcgctgttcggtgtcatgttctgggcaa

SEQ ID NO: 621141 - DNA, 75 bp, synthetic construct
  source 1..75: mol_type = other DNA
gcaagcgcctgacattaactgaaaaaacagcgcaggaagcggcaacgccggacgaagctgcgcgtattcaggcta

SEQ ID NO: 621142 - DNA, 75 bp, synthetic construct
  source 1..75: mol_type = other DNA
aagatgaatttaagtcgatgaaaatcacggtgaactgggaaaaagcctggcccgccgtattcatcgccttcctcg

SEQ ID NO: 621143 - DNA, 75 bp, synthetic construct
  source 1..75: mol_type = other DNA
aaactcgcgttgcccaggcgctggacgatttgcaaaacgcacaaaacgatctggcgtcttataacagccagttag

SEQ ID NO: 621144 - DNA, 75 bp, synthetic construct
  source 1..75: mol_type = other DNA
gggataaactccagtggctggcggcggcattatctgtaggtctgggttttggtttacaagagatcttcggtaact

SEQ ID NO: 621145 - DNA, 75 bp, synthetic construct
  source 1..75: mol_type = other DNA
gcaagcgcctgactttaaccgaaaaaacggcgcaggaagccgtctccccggatgaagccgcgcgtattcaggcta

SEQ ID NO: 621146 - DNA, 75 bp, synthetic construct
  source 1..75: mol_type = other DNA
agagcgcacgttgtttaaagagttgatcaaaactaacggcgtgggaccgaaactggcactggcgatcctctcggg

SEQ ID NO: 621147 - DNA, 75 bp, synthetic construct
  source 1..75: mol_type = other DNA
agagcgcacgttatttaaagagttgatcaaaactaacggcgtgggaccgaaattggcactggctatcctctcggg

SEQ ID NO: 621148 - DNA, 75 bp, synthetic construct
  source 1..75: mol_type = other DNA
ggcttacaggagatcttcggtaactttgtctctggtttgatcatcctgttcgaacgtccggtgcgtattggtgat

SEQ ID NO: 621149 - DNA, 75 bp, synthetic construct
  source 1..75: mol_type = other DNA
ctttgctgaatgccgagattgaccagcagcgtaaaagcctggaagggaacaccgtcttgcaggataccttgcaaa

SEQ ID NO: 621150 - DNA, 75 bp, synthetic construct
  source 1..75: mol_type = other DNA
gatgaagccgcgcgtattcaggctaatccgctggtgaagcaggaactggaaattaaccagcagttaagtcagcgt

SEQ ID NO: 621151 - DNA, 75 bp, synthetic construct
  source 1..75: mol_type = other DNA
accatgcagctcaacatcagtgaactactgtggtcgttcagcaaaaaactggcgattttttggctggtatttggt

SEQ ID NO: 621152 - DNA, 75 bp, synthetic construct
  source 1..75: mol_type = other DNA
tgttcgctttatgttgctggggattgttccgcatggcaccgtgctggtacgagttttacgccagaccggcatcaa

SEQ ID NO: 621153 - DNA, 75 bp, synthetic construct
  source 1..75: mol_type = other DNA
aacctgtcggtagcgattatcttgtggatctcgctttttctcggcgacacgattctgcaactttttggaatatcg

SEQ ID NO: 621154 - DNA, 75 bp, synthetic construct
  source 1..75: mol_type = other DNA
actcaaagcacagtccgcagtggcaggttgctcaatgattcaggtgttgagcgctaaggtccatcaattagcgga

SEQ ID NO: 621155 - DNA, 75 bp, synthetic construct
  source 1..75: mol_type = other DNA
actcaaagcacagtccgcagtagcaggttgctcaatgattcaggtgttaagcgctaaggtccatcaattagcgga

SEQ ID NO: 621156 - DNA, 75 bp, synthetic construct
  source 1..75: mol_type = other DNA
acgtgattacgcgtattatggggttgttgttgatggcgttgggtattgaatttatcgtcacaggcataaagggga

SEQ ID NO: 621157 - DNA, 75 bp, synthetic construct
  source 1..75: mol_type = other DNA
gtcgatgatcagcggtaagctcggcgaggacaaacagaacaagcaagaaaaatcagaaacagcgatccgggagaa

SEQ ID NO: 621158 - DNA, 75 bp, synthetic construct
  source 1..75: mol_type = other DNA
ttatcagtatgcgccgaatccgttgtcatggatcgatccactcggtttattggctgggtgctggagaaataaact

SEQ ID NO: 621159 - DNA, 75 bp, synthetic construct
  source 1..75: mol_type = other DNA
agtacgcagagtcctgcttcaggcagcgactgagcatccaagggtgatgcacgaaccgatgccggaagtcttctt

SEQ ID NO: 621160 - DNA, 75 bp, synthetic construct
  source 1..75: mol_type = other DNA
tcgtttctggtttgatcatcctgttcgaacgtccggtgcgcattggcgatacggtaaccatcggtactttctccg

SEQ ID NO: 621161 - DNA, 75 bp, synthetic construct
  source 1..75: mol_type = other DNA
cactggggctttaggtgctgactattatgttgatattgataccacaaagaaaaatgttgaattaaaaggaaaaac

SEQ ID NO: 621162 - DNA, 75 bp, synthetic construct
  source 1..75: mol_type = other DNA
acagggaaacggggctgcactacaatctgcaccgttactatgatccggatgtcgggcggttcatagtaacggacc

SEQ ID NO: 621163 - DNA, 75 bp, synthetic construct
  source 1..75: mol_type = other DNA
ataagccgcctgtatatctacagcgaccaggggagttatgaaccgctggcgcgggtggacaaggcgggcaaagag

SEQ ID NO: 621164 - DNA, 75 bp, synthetic construct
  source 1..75: mol_type = other DNA
gtgaagacatcgcagaaccagaacctacagacgtcctggcagagtttatccgccagcattcggtagcgggtcaac

SEQ ID NO: 621165 - DNA, 75 bp, synthetic construct
  source 1..75: mol_type = other DNA
tatcgtctgtatgacgggtagcaaagatgattattactactccacgcagaccatgagtgaaaactataccgcgat

SEQ ID NO: 621166 - DNA, 75 bp, synthetic construct
  source 1..75: mol_type = other DNA
cgccagcattcggtcgcgggtcaactggttgctcgcgccatgttcctgtcgccgccatattcggttgctgaagag

SEQ ID NO: 621167 - DNA, 75 bp, synthetic construct
  source 1..75: mol_type = other DNA
gtcataaaacggcgctgatttgtgaatccagcggcggagtcgttaaccggtatagttatcttgagttaaatcagg

SEQ ID NO: 621168 - DNA, 75 bp, synthetic construct
  source 1..75: mol_type = other DNA
aatatggcgaaatttaaagtgccctcttatctggagatcagaaaagatctgccacgtaattgctcggggaaaata

SEQ ID NO: 621169 - DNA, 75 bp, synthetic construct
  source 1..75: mol_type = other DNA
gatctgtctgttttgctggaaggcataaaacagaacagagactacgcggatatcgcctgtatcacgggaactcac

SEQ ID NO: 621170 - DNA, 75 bp, synthetic construct
  source 1..75: mol_type = other DNA
ggctggtggcggcgtcgatgatcccggtgacgcaacggctgaagtttcttgtcgccctgcgtcccagcgtaacct

SEQ ID NO: 621171 - DNA, 75 bp, synthetic construct
  source 1..75: mol_type = other DNA
ggtgacgcagcggctgaagtttcttgtcgccctgcgccccagtgtgacatcgcctaccgttgccgcccgccaggc

SEQ ID NO: 621172 - DNA, 75 bp, synthetic construct
  source 1..75: mol_type = other DNA
tattttcaatggcagtattgcgttatttaccaccttgtatggcaacatgcccttgtggacagcctggaacggtat

SEQ ID NO: 621173 - DNA, 75 bp, synthetic construct
  source 1..75: mol_type = other DNA
ggcagagttcattcgccagcattctgcggctgggcagctggtggcgcgcgccgtgtttctctcgccaccctattc

SEQ ID NO: 621174 - DNA, 75 bp, synthetic construct
  source 1..75: mol_type = other DNA
caattgagaatctgactcaggggaattacaccccaagcccgggcgttatttatccgacgctggatctcctccagg

SEQ ID NO: 621175 - DNA, 75 bp, synthetic construct
  source 1..75: mol_type = other DNA
gtaaacatgaaggccagccacgccatgagggctgctgcaaaggtgagaagtcagaacatgagcactgcggacacg

SEQ ID NO: 621176 - DNA, 75 bp, synthetic construct
  source 1..75: mol_type = other DNA
ggtgctgaatgaaggtgaaacattgagcgaggaagaatttttctgcttctgtgaacaaaatatggcgaaatttaa

SEQ ID NO: 621177 - DNA, 75 bp, synthetic construct
  source 1..75: mol_type = other DNA
atgatgataaatataaagaaaaaagaagtgtcgatactattagcaatattagctagtctgttattaactcagtca

SEQ ID NO: 621178 - DNA, 75 bp, synthetic construct
  source 1..75: mol_type = other DNA
gcgtttggcatgatgtcagccaatgccgggataggtatcattgagtcactggctctcattgctgtttatattgcg

SEQ ID NO: 621179 - DNA, 75 bp, synthetic construct
  source 1..75: mol_type = other DNA
cctggtgcgcagccacataagcaaggctttaagtggcgaaaagatgaagaagaaggatctcgatgctgatttgcg

SEQ ID NO: 621180 - DNA, 75 bp, synthetic construct
  source 1..75: mol_type = other DNA
tagggttagagtcgccctcacagggaaatattagctggcgcggcgaaccgttggcgaagctcaatcgcgcgcaac

SEQ ID NO: 621181 - DNA, 75 bp, synthetic construct
  source 1..75: mol_type = other DNA
gatgtcaacggcgcatgatggcgaaatgctgggtaagaaatggtcctctatgtggcttcctgtcaggacagcgtt

SEQ ID NO: 621182 - DNA, 75 bp, synthetic construct
  source 1..75: mol_type = other DNA
aaagctttaaggctccagagaaagggagcggtagtggatcttccggtggtagttcatcatcaaaagaaggtaatg

SEQ ID NO: 621183 - DNA, 75 bp, synthetic construct
  source 1..75: mol_type = other DNA
acaattttatcctatgtatcagcagattcagcaggaagacgaaacacagctacggcatatctgtctgacagatgt

SEQ ID NO: 621184 - DNA, 75 bp, synthetic construct
  source 1..75: mol_type = other DNA
tcgagaaatacagcgcccgcgccttctggggacaggtacagaagtaccgcgccaccgttaccgaatgtattccga

SEQ ID NO: 621185 - DNA, 75 bp, synthetic construct
  source 1..75: mol_type = other DNA
cctgcaaaatagccaggcgtgcctgctggtgaccagtgcgcaattctatcctatgtatcaacagattcagcagga

SEQ ID NO: 621186 - DNA, 75 bp, synthetic construct
  source 1..75: mol_type = other DNA
cgtttgcctggcggtttcaccattgaggaggcgaaggagttacatgaagacctggtgcgcagccacataagcaag

SEQ ID NO: 621187 - DNA, 75 bp, synthetic construct
  source 1..75: mol_type = other DNA
acatcctcgaatatgccgggcagcagaggcatattggtcagcattgtaaaattccaccaggagatatggttgaaa

SEQ ID NO: 621188 - DNA, 75 bp, synthetic construct
  source 1..75: mol_type = other DNA
tgaagaaaaaccaatgcctaaccctcttaaaatgtacgcggtcgatgatgttgccgctattgcagaggtgagagg

SEQ ID NO: 621189 - DNA, 75 bp, synthetic construct
  source 1..75: mol_type = other DNA
tttggcggttcgctgtggtcgacaatgccgatagttgagcggctggcacgtttgcaggagccagacctcccggaa

SEQ ID NO: 621190 - DNA, 75 bp, synthetic construct
  source 1..75: mol_type = other DNA
atacagaaacgggtaatcactgtctgtgaccgggaagcggatatctggcattacctgcattataaagtcagccac

SEQ ID NO: 621191 - DNA, 75 bp, synthetic construct
  source 1..75: mol_type = other DNA
cgttacaggtttaatcgcagcacttggcaatttaggtctatgcccaatagccgtagtgctagtatgtatagcttt

SEQ ID NO: 621192 - DNA, 75 bp, synthetic construct
  source 1..75: mol_type = other DNA
caattgacgttgcccgcgaacaggttctgattcagtccctgatgtttgaaaccagtgtttctaatggcgtggatc

SEQ ID NO: 621193 - DNA, 75 bp, synthetic construct
  source 1..75: mol_type = other DNA
aaggcgggcgggcagcccgccaggcccggatgctcatcagttacagcgaagtcagtataaaaaatcccgacaaca

SEQ ID NO: 621194 - DNA, 75 bp, synthetic construct
  source 1..75: mol_type = other DNA
aaaaaatcccgacaacagcggccaggcgctcccgctcacgtatgtctgttgccgggagcaggcagaggacggcgc

SEQ ID NO: 621195 - DNA, 75 bp, synthetic construct
  source 1..75: mol_type = other DNA
ggaaactgctgtgggttaagctggaaggaaaaccgcttccgtcacagatgccgacactgaaatgggcctgtctga

SEQ ID NO: 621196 - DNA, 75 bp, synthetic construct
  source 1..75: mol_type = other DNA
tgggatggaagagtctgcagaattcgagcaacagcaacaaacgccgcaggttaaacaacgcctgccggtaatgga

SEQ ID NO: 621197 - DNA, 75 bp, synthetic construct
  source 1..75: mol_type = other DNA
ctggatagtgttcttcgccatcatgctggctaacgtcgcacatgacatggtggtctgcgtacagcaacccatgtt

SEQ ID NO: 621198 - DNA, 75 bp, synthetic construct
  source 1..75: mol_type = other DNA
gtcctgatgaagcgactgcttcattaagccgcgctcgacgctcagcattgggcagttttgctggcgccgtcgtcg

SEQ ID NO: 621199 - DNA, 75 bp, synthetic construct
  source 1..75: mol_type = other DNA
acctatgatgatgaaagtgatggcgtagcgtatgaggcagtaccgcagtcggctgcgcctgctgtacctgccgat

SEQ ID NO: 621200 - DNA, 75 bp, synthetic construct
  source 1..75: mol_type = other DNA
aatcagcgccagatacagaccaccgttcagattaaagacggtcagaccctgcttttaggcggcctgattagctct

SEQ ID NO: 621201 - DNA, 75 bp, synthetic construct
  source 1..75: mol_type = other DNA
atcctgcagtagtctctttgccgtcaaaattaccatcacagatggcgtcagaccttgatgatgctgatattcggt

SEQ ID NO: 621202 - DNA, 75 bp, synthetic construct
  source 1..75: mol_type = other DNA
cgcgcgaacttttccttaatattggtttgctggtaggtggattaagctgcctgacaattccctgttttgcctggc

SEQ ID NO: 621203 - DNA, 75 bp, synthetic construct
  source 1..75: mol_type = other DNA
acgtccatcggctcttcgctgaaattctgcctggtggcggaaggacaggcgcagctgtacccgcgcttcggacca

SEQ ID NO: 621204 - DNA, 75 bp, synthetic construct
  source 1..75: mol_type = other DNA
aacattgcgctgatcgacaaaggcaaaccggtattaggtgtggtgtatgcgccggtaatgaacgtaatgtacagc

SEQ ID NO: 621205 - DNA, 75 bp, synthetic construct
  source 1..75: mol_type = other DNA
cgccggacatgacagcatgttgctcaatattggtggtgcgcataacgcatacttcacccgcaatatcgtggtact

SEQ ID NO: 621206 - DNA, 75 bp, synthetic construct
  source 1..75: mol_type = other DNA
gtatctgcaacagcttggcgaacatcagaccacgtccatcggctcttcgctgaaattctgcctggtggcggaagg

SEQ ID NO: 621207 - DNA, 75 bp, synthetic construct
  source 1..75: mol_type = other DNA
acgtctatcggctcttcgctgaaattctgcctggtggcggaagggcaggctcaactctatccgcgtttcgggcca

SEQ ID NO: 621208 - DNA, 75 bp, synthetic construct
  source 1..75: mol_type = other DNA
gacatgctgtggctgcagctgccggagcgcacgttcacgactggcagggtaaaccgctggattacactccgcgcg

SEQ ID NO: 621209 - DNA, 75 bp, synthetic construct
  source 1..75: mol_type = other DNA
agaacacacgatagaggaaatccgcgcaaaatatggttcgaccggacagcgcagggcgatgggatggcaacaagt

SEQ ID NO: 621210 - DNA, 75 bp, synthetic construct
  source 1..75: mol_type = other DNA
gtctggatgatgggcatcgcgacagccttgattggcattcttccttccttctcgaccattgggtggtgggctccc

SEQ ID NO: 621211 - DNA, 75 bp, synthetic construct
  source 1..75: mol_type = other DNA
gtgtttaatcgcgagtttttcccgcaagtaagcccggcgatgggaacgctcgccgcatttgccacctttggtgtc

SEQ ID NO: 621212 - DNA, 75 bp, synthetic construct
  source 1..75: mol_type = other DNA
atgttgcttaatattggtggtgcacataacgcatatttcacccgcaatattgtggtactcaccgataatgccggg

SEQ ID NO: 621213 - DNA, 75 bp, synthetic construct
  source 1..75: mol_type = other DNA
gcttttgacctgcttatgactcactttgataaaatcagtcaatacagctcagaaaatgatagcaacacttacaac

SEQ ID NO: 621214 - DNA, 75 bp, synthetic construct
  source 1..75: mol_type = other DNA
ggattaaaaaacgtgataacaatcacttatcgagtaaaaaaacgggagaaaacttgcaaatacgacttaaaggtc

SEQ ID NO: 621215 - DNA, 75 bp, synthetic construct
  source 1..75: mol_type = other DNA
ctgcatgctcaccacggtggcgattgtggtcgtgattattctcctcactgctgtcgtgcccaaaattaccgaaca

SEQ ID NO: 621216 - DNA, 75 bp, synthetic construct
  source 1..75: mol_type = other DNA
aaaagaaataatattctttatctgcgtaggggttttggtaggcggagtcatttctaggatgttttttaatttgta

SEQ ID NO: 621217 - DNA, 75 bp, synthetic construct
  source 1..75: mol_type = other DNA
aaaagaaataatattctttatctgcgtagggggggtggtaggtggtgccatttctaggatgttttttaatttgta

SEQ ID NO: 621218 - DNA, 75 bp, synthetic construct
  source 1..75: mol_type = other DNA
aattaatccttaactggtatcaaactcgtctggacgaaattagcccaggcgataaacaaaaagatccgaaaacgc

SEQ ID NO: 621219 - DNA, 75 bp, synthetic construct
  source 1..75: mol_type = other DNA
ccatctgccgctgccaacttatctggtagtccaggtacgtggcgaagcgcacgatcaggaatttattatccactg

SEQ ID NO: 621220 - DNA, 75 bp, synthetic construct
  source 1..75: mol_type = other DNA
tggcgcgcgaatttgagttaggcgagtgcttacgtttaggaccaggtgaacttaaaagcggtggatttcgtcgtg

SEQ ID NO: 621221 - DNA, 75 bp, synthetic construct
  source 1..75: mol_type = other DNA
caccgaatggcgcgatgttcacgtaaacccggaagtggccctgagtccggaccgttctgaatacatcaagcaatt

SEQ ID NO: 621222 - DNA, 75 bp, synthetic construct
  source 1..75: mol_type = other DNA
ggctgtcactttgataactacccgaacgcaaaatatgcgggaagttctccggcgcgcacctcttacagcgactgt

SEQ ID NO: 621223 - DNA, 75 bp, synthetic construct
  source 1..75: mol_type = other DNA
ggataaagaaacccagcagaaactggcggaacttgagaaaaaaaccggcaagaaaccgaacgtggttgttttctt

SEQ ID NO: 621224 - DNA, 75 bp, synthetic construct
  source 1..75: mol_type = other DNA
ccagtaccacaccgccgtcagttttctgcatgcaatgctggaaagaagcaaagaaaaggatgctagcaaggcgct

SEQ ID NO: 621225 - DNA, 75 bp, synthetic construct
  source 1..75: mol_type = other DNA
gctttaactctgtctctgatatgtataccgaatggcgcgatgttcacgtcaacccagaggtcgccctgagcccgg

SEQ ID NO: 621226 - DNA, 75 bp, synthetic construct
  source 1..75: mol_type = other DNA
attgtgttcacctctgataacggtccggaagccgaagttccgccgcacggtcgcacaccgttccgcggtgcgaaa

SEQ ID NO: 621227 - DNA, 75 bp, synthetic construct
  source 1..75: mol_type = other DNA
ttgctattacgacaacgtcgaacagagttggctcccggtcatttctggatttttattaagtcgggttattcgtaa

SEQ ID NO: 621228 - DNA, 75 bp, synthetic construct
  source 1..75: mol_type = other DNA
ggacgaagacgttctcgacacctggttctcttctgcgctgtggaccttctctacccttggctggccggaaaacac

SEQ ID NO: 621229 - DNA, 75 bp, synthetic construct
  source 1..75: mol_type = other DNA
ttcatcaaagatgaaaatggcaaaccgcaggtgccgttccacaccgtttacatgaccggtctgattcgtgacgac

SEQ ID NO: 621230 - DNA, 75 bp, synthetic construct
  source 1..75: mol_type = other DNA
ctgacctttgacggcgatatccgtgaaagcgcccaggtgttcgataccaaaggtaacgaatctgacgtttattcc

SEQ ID NO: 621231 - DNA, 75 bp, synthetic construct
  source 1..75: mol_type = other DNA
tgctggggatagtcggtgccgtagtcggcggatggatcagcacgctgtttggctttggtaaagtcgatggcttca

SEQ ID NO: 621232 - DNA, 75 bp, synthetic construct
  source 1..75: mol_type = other DNA
atgggcggtgccgcttttttcgtattgaaaggttgtggcgatagtggcgatgtcgataacgacggcgacggaacg

SEQ ID NO: 621233 - DNA, 75 bp, synthetic construct
  source 1..75: mol_type = other DNA
tcaggatgaagacgttctcgacacctggttctcctctgcgctgtggactttctccacgctcggctggccggaaaa

SEQ ID NO: 621234 - DNA, 75 bp, synthetic construct
  source 1..75: mol_type = other DNA
tggcacaaatacggactttttccgcagctacatatatcacatcagttatctggcgaaggagtacaccaaaaacca

SEQ ID NO: 621235 - DNA, 75 bp, synthetic construct
  source 1..75: mol_type = other DNA
aaagtcccctttcatttaccgggcgtctcttatgaactggatcgcagaaatggcacaaatacggactttttccgc

SEQ ID NO: 621236 - DNA, 75 bp, synthetic construct
  source 1..75: mol_type = other DNA
tcaacctagaacaaaaagccgaaggtcttattgcgcagatattgggtgtgaacgtgacggaagttcagggagaag

SEQ ID NO: 621237 - DNA, 75 bp, synthetic construct
  source 1..75: mol_type = other DNA
tttgtgctgatgaacacagaaggtcaggattgcggcttcaacggcggtgaaatgacgctgtcgctggcggatcgc

SEQ ID NO: 621238 - DNA, 75 bp, synthetic construct
  source 1..75: mol_type = other DNA
cttcaccatggacgaaggcctgtccaatgcggtgaaagaagttttcgttcgtctgtataaagaagacctgattta

SEQ ID NO: 621239 - DNA, 75 bp, synthetic construct
  source 1..75: mol_type = other DNA
ggaaactaagagatttaggtttcataactacaaaaccaggcacatcaggtgagtttcaatatgtaattttgctta

SEQ ID NO: 621240 - DNA, 75 bp, synthetic construct
  source 1..75: mol_type = other DNA
ttcttgttattgctgttgccactgctataccctttatggtcagtgcagcagataccccgtcaactgccaccgcgc

SEQ ID NO: 621241 - DNA, 75 bp, synthetic construct
  source 1..75: mol_type = other DNA
gccgcgctacccggaagacgaactcgccagcgaaccgtggtacagcgtctcgccaggcgatgttttcccggaaga

SEQ ID NO: 621242 - DNA, 75 bp, synthetic construct
  source 1..75: mol_type = other DNA
gaaaactttgtgctggagaagcggcatatttctccagcattaatggaattactgctccaggaagcgccggaaaaa

SEQ ID NO: 621243 - DNA, 75 bp, synthetic construct
  source 1..75: mol_type = other DNA
gccagcgaaccgtggtacagcgtctcgccgggcgatgttttcccggaagagttccgtcactggctatgcgccgac

SEQ ID NO: 621244 - DNA, 75 bp, synthetic construct
  source 1..75: mol_type = other DNA
tcgatgagaaattaacatcaccctccgcatcgatctctcttgaggatctttctgcactggcaggcaatgtttctg

SEQ ID NO: 621245 - DNA, 75 bp, synthetic construct
  source 1..75: mol_type = other DNA
ccgaagaagctggagtcttacacagaacgcgatccggacggtactattcgcagctacagcttcttgaatggcaag

SEQ ID NO: 621246 - DNA, 75 bp, synthetic construct
  source 1..75: mol_type = other DNA
gaattctttttatcgatacaacagagacaaatgttttatatgaccgtgtaaggaatgaatttaatccaatagata

SEQ ID NO: 621247 - DNA, 75 bp, synthetic construct
  source 1..75: mol_type = other DNA
tcaggctggcatttctatagtcagcgaaatacagataactcagtaatatttgctgttaacggtcagatacaaccc

SEQ ID NO: 621248 - DNA, 75 bp, synthetic construct
  source 1..75: mol_type = other DNA
catcgcaatatgaaaaaataggtgatatttcaaccagtaatgaaatgtcgactgcagatgcgaaagaagatctga

SEQ ID NO: 621249 - DNA, 75 bp, synthetic construct
  source 1..75: mol_type = other DNA
atgaaaataatctctaaaatgttagtcggtgcgttagcgtttgccgttaccaatgtctatgccgctgaattgatg

SEQ ID NO: 621250 - DNA, 75 bp, synthetic construct
  source 1..75: mol_type = other DNA
gctaacatttttcctggcgacatgctgtttaaaaacttcggtgtcacccgtcacgggcgtgtggtttttatgatt

SEQ ID NO: 621251 - DNA, 75 bp, synthetic construct
  source 1..75: mol_type = other DNA
cgtattttatcctctgtaagggatgcagctgctagctcggataatggggcgcaagtaaaggtgggcaacagaaca

SEQ ID NO: 621252 - DNA, 75 bp, synthetic construct
  source 1..75: mol_type = other DNA
aacagaaagccgctgcttcttttcacacggcaaagcgggtttttcgggcgatggttatggctgcagaagatggtg

SEQ ID NO: 621253 - DNA, 75 bp, synthetic construct
  source 1..75: mol_type = other DNA
aagggggcagaaaacatgcccgggcgaaatgacccgtgtccgtgtggcagcggtaaaaaatttaagaagtgctgt

SEQ ID NO: 621254 - DNA, 75 bp, synthetic construct
  source 1..75: mol_type = other DNA
atggaattttcgttttcacccaaacttcttgttgttgctgtcgccgccgctcttcctctcatggccagcgcagca

SEQ ID NO: 621255 - DNA, 75 bp, synthetic construct
  source 1..75: mol_type = other DNA
ctaatctctataaagcactggagaaaaatggtcagcttgataacacgctgattgtctttacctccgataatggcc

SEQ ID NO: 621256 - DNA, 75 bp, synthetic construct
  source 1..75: mol_type = other DNA
atgcgaaatatgcgggtagctctccggcgcgcacctcttacggcgactgcatggtggagatgaacgatatcttcg

SEQ ID NO: 621257 - DNA, 75 bp, synthetic construct
  source 1..75: mol_type = other DNA
cggcactcgtggctgccacttcgataactacccaaatgcgaaatatgcgggtagctctccggcacgcacctcgta

SEQ ID NO: 621258 - DNA, 75 bp, synthetic construct
  source 1..75: mol_type = other DNA
ccattgccgacattacgccgaaatatatggaagatctggatcaacgctggatggaatatggcgttaagttcctcg

SEQ ID NO: 621259 - DNA, 75 bp, synthetic construct
  source 1..75: mol_type = other DNA
ggaaaacaaagagtcgcagccgcagaacgttggctttgatgatttccgtggctttaactcggtgtctgatatgta

SEQ ID NO: 621260 - DNA, 75 bp, synthetic construct
  source 1..75: mol_type = other DNA
tgatcgctgccttatcactaatattatctatttacaggcatgaacaaatccctgtttggggacatttgattttat

SEQ ID NO: 621261 - DNA, 75 bp, synthetic construct
  source 1..75: mol_type = other DNA
tatgttgcctattttgacgggcaatgtcggcatcagcggcggaaatagtggcgcgcgtgaatcgacctataccat

SEQ ID NO: 621262 - DNA, 75 bp, synthetic construct
  source 1..75: mol_type = other DNA
acctctatttttgtatgttggcaagaaatggaaaaaccagactttgataaattatatgtatcttcattcatcaca

SEQ ID NO: 621263 - DNA, 75 bp, synthetic construct
  source 1..75: mol_type = other DNA
gatgaactggaagaactggcaattctggcagttcgcgcacttgatgcactgctggattatcaggattacccgatc

SEQ ID NO: 621264 - DNA, 75 bp, synthetic construct
  source 1..75: mol_type = other DNA
cgcatggcgatccacgaaatgatggtggtgacgccggaattacgggccgctattcatgaaaatgtggatgaacaa

SEQ ID NO: 621265 - DNA, 75 bp, synthetic construct
  source 1..75: mol_type = other DNA
acccgcgtgaaacgcgcctgcaatacgtgaagcgtttttacgacgcggtttccacatttaaaatttcgctgccga

SEQ ID NO: 621266 - DNA, 75 bp, synthetic construct
  source 1..75: mol_type = other DNA
ttatcaaaagaaaattaggattcacaaaaaaaagcagaaacccagtatataaattattaaacaaggctcttaaag

SEQ ID NO: 621267 - DNA, 75 bp, synthetic construct
  source 1..75: mol_type = other DNA
tgaactggctgaacgaccggattattttcagggaaagtgtagtggtcaagtaatactggccacggttttacagta

SEQ ID NO: 621268 - DNA, 75 bp, synthetic construct
  source 1..75: mol_type = other DNA
gtaatgtctttatgggttgccggagccggatatgcggtgtgtctcgatttctgcgcagataaaccagtacggcgc

SEQ ID NO: 621269 - DNA, 75 bp, synthetic construct
  source 1..75: mol_type = other DNA
gcagaggctttcggaaaactgaccaccgactctacgtcggggctgattgcgatggcgcgccagttccgtaacgtg

SEQ ID NO: 621270 - DNA, 75 bp, synthetic construct
  source 1..75: mol_type = other DNA
gggattatcacgttagatagcggcgcaatcgtcgccgtcgaaacggagcgctcaatgaaaacccgcgcacgctat

SEQ ID NO: 621271 - DNA, 75 bp, synthetic construct
  source 1..75: mol_type = other DNA
aatgaggaataatacacctgtgccttttgatgaaaaaaacagagaaatgtttatttttagaacaattgatgaact

SEQ ID NO: 621272 - DNA, 75 bp, synthetic construct
  source 1..75: mol_type = other DNA
tgaatataatgaaaattatggctatttgtggctcagggcttggtagtagttttatggtcgaaatgaatattaaaa

SEQ ID NO: 621273 - DNA, 75 bp, synthetic construct
  source 1..75: mol_type = other DNA
gacggctggttcgagtggaaacagcaaaacggcgtgaaacagccgtttttcatttaccgtaaggacggaaatcca

SEQ ID NO: 621274 - DNA, 75 bp, synthetic construct
  source 1..75: mol_type = other DNA
ttcactggggttatgccccggagtggtggaacaagaccgctctcatcaacgcccgaagtgaaactgcggccggca

SEQ ID NO: 621275 - DNA, 75 bp, synthetic construct
  source 1..75: mol_type = other DNA
gaaggggtcgaaacgccggaacaggcgcgatggctaagcgaacgcggcgttaatttcatgcaaggctactggatt

SEQ ID NO: 621276 - DNA, 75 bp, synthetic construct
  source 1..75: mol_type = other DNA
tcgtgaaaatgcagatattgacgctcaggaatcggttgaacgcatgatcacccatttaaagatggagcttaaatc

SEQ ID NO: 621277 - DNA, 75 bp, synthetic construct
  source 1..75: mol_type = other DNA
agacgagcaataaaatacgtcagaaagatgcttctgccgttcatcgtgagttgtatgataagtgggtgcgtcatt

SEQ ID NO: 621278 - DNA, 75 bp, synthetic construct
  source 1..75: mol_type = other DNA
aaacggcagttatctgagcaggaaaaatccctgctgacccatgagaaagagacgctggagtacaaacgccagctg

SEQ ID NO: 621279 - DNA, 75 bp, synthetic construct
  source 1..75: mol_type = other DNA
gcagggaatgtaacggtctacctcaaaggactgtctgtaccggtcattctgaatatcaccagtggtgaaaccgac

SEQ ID NO: 621280 - DNA, 75 bp, synthetic construct
  source 1..75: mol_type = other DNA
cgctgttaatgatgagaaattagctggtatcttttactacgcgattaaagcaagtaaacaagcacctgaagcgtt

SEQ ID NO: 621281 - DNA, 75 bp, synthetic construct
  source 1..75: mol_type = other DNA
tgaacctgattttacctttgcggcggaagagggtgtacgtgcggtggttatcaaacccacactcacaggcagtct

SEQ ID NO: 621282 - DNA, 75 bp, synthetic construct
  source 1..75: mol_type = other DNA
ccgctggcggcgaagctgcgtgagcgcctgaaaagcgatttcggcgtggtgaaaaacagtaaaggtaagctcggt

SEQ ID NO: 621283 - DNA, 75 bp, synthetic construct
  source 1..75: mol_type = other DNA
ggcggataacgagcgggccatcaatgcgcccatcaccagtgttgtaccccgtatcagctctctgacagttaatct

SEQ ID NO: 621284 - DNA, 75 bp, synthetic construct
  source 1..75: mol_type = other DNA
cactgctcctggtgtgcagcgccgccacgtctgcagataacgcaggatggcagaacgcacgcacaccacaaacga

SEQ ID NO: 621285 - DNA, 75 bp, synthetic construct
  source 1..75: mol_type = other DNA
cggtgatcagttcttccattgagtcgagcttaggcttaacgcaactggcgcggattgccgcctggttaacgccag

SEQ ID NO: 621286 - DNA, 75 bp, synthetic construct
  source 1..75: mol_type = other DNA
gatgtggtcgccaccaacgaaaaactgcatgtgcgccaggtcaatatcgtcaaaaacgctaccggatgtagcgca

SEQ ID NO: 621287 - DNA, 75 bp, synthetic construct
  source 1..75: mol_type = other DNA
acggtgataatccggatgcgctggcgaaggccacatctgcactgaagaacacctggtctgcggaggagcagcttc

SEQ ID NO: 621288 - DNA, 75 bp, synthetic construct
  source 1..75: mol_type = other DNA
ggataaagtacgcgagcaggtgcaggcggcgcatgcgctggggctgacggcggtgatcagttcttccattgagtc

SEQ ID NO: 621289 - DNA, 75 bp, synthetic construct
  source 1..75: mol_type = other DNA
ggatctgatgcaggcgcagcaggttcgtcgctggccgggtagcccgctaccgttagtggaagtagatgcactgga

SEQ ID NO: 621290 - DNA, 75 bp, synthetic construct
  source 1..75: mol_type = other DNA
cggattgctgcctggttaacgccagacaccattccggggctggacacgctggatctgatgcaggcgcagcaggtt

SEQ ID NO: 621291 - DNA, 75 bp, synthetic construct
  source 1..75: mol_type = other DNA
ggaaggcggaaagtcagtatgcggtcctgaaagaggccgccacgaaacggcagttatccgggcaggaaaaatccc

SEQ ID NO: 621292 - DNA, 75 bp, synthetic construct
  source 1..75: mol_type = other DNA
ctgaactgattaataaggccgctgaaaacggttattcactccgcgtggtggatgaccgtgactctaccgaaacac

SEQ ID NO: 621293 - DNA, 75 bp, synthetic construct
  source 1..75: mol_type = other DNA
ttgtctaatttgtcagattctgaccagacggttcaggctgtacgcttacaaacaatgggcattctgtcatggatt

SEQ ID NO: 621294 - DNA, 75 bp, synthetic construct
  source 1..75: mol_type = other DNA
ggttttggcaaagtcgatggcttcaactttggtagttttgtggttgccgtgattggtgcgcttgtcgtgctgttt

SEQ ID NO: 621295 - DNA, 75 bp, synthetic construct
  source 1..75: mol_type = other DNA
ctcaaatgcagtagttattcaataccaggataaaccgtacgttcgcctgaacggcggcgactgggtgccttaccc

SEQ ID NO: 621296 - DNA, 75 bp, synthetic construct
  source 1..75: mol_type = other DNA
ggcaaccattatccgggcgtcagcaaaacagcggattacaaagcgcgggcgcagaagttctttgatgaactggac

SEQ ID NO: 621297 - DNA, 75 bp, synthetic construct
  source 1..75: mol_type = other DNA
aggccgctgaaaacggttattcactccgcgtggtggatggccgtgactctaccgaaacaccggcaacttatgcca

SEQ ID NO: 621298 - DNA, 75 bp, synthetic construct
  source 1..75: mol_type = other DNA
gggcaatactggcaacagcgtcaggcacctgcgtggttagcgtctcttactacgctgaagccagaaacctcggta

SEQ ID NO: 621299 - DNA, 75 bp, synthetic construct
  source 1..75: mol_type = other DNA
tagccgctggggagcgccgcgctcaacctgccagttattacccaaagcgaaagcctggctggcgaaaaaaatgcc

SEQ ID NO: 621300 - DNA, 75 bp, synthetic construct
  source 1..75: mol_type = other DNA
ggacgctttcctggcggcacgctactgcccaggcggggcagggagagcgttacgatcagatacttgcgtttgctt

SEQ ID NO: 621301 - DNA, 75 bp, synthetic construct
  source 1..75: mol_type = other DNA
tttggtaaagtcgatggcttcaattttggcagcttcgtggttgccgttattggtgcgattgtcgtgctatttatc

SEQ ID NO: 621302 - DNA, 75 bp, synthetic construct
  source 1..75: mol_type = other DNA
gcggaagggccaaagcggatggattgtgcctcaggatttggcgcggcgacgatggtgaccgccacttttggcttt

SEQ ID NO: 621303 - DNA, 75 bp, synthetic construct
  source 1..75: mol_type = other DNA
attgatgctattgatagtgtacggcccaaagcggcgctgattgcttattgtcggcgcaataaaatcccgctggtc

SEQ ID NO: 621304 - DNA, 75 bp, synthetic construct
  source 1..75: mol_type = other DNA
tgttcttcccctggattacgaaaatctaaatttcggtagtatactaacagactaccatatgttcgataaaggcga

SEQ ID NO: 621305 - DNA, 75 bp, synthetic construct
  source 1..75: mol_type = other DNA
cagagcaaaaagcgtggatggagctgatcgctgaagtcggtggcgaaggtcagattttctatcgccgccgccgtc

SEQ ID NO: 621306 - DNA, 75 bp, synthetic construct
  source 1..75: mol_type = other DNA
ctgaacgagacgccagagaagctgaatcgcgatcgtcgtctggtgctgctaagcgatccggtgacgatggctcgt

SEQ ID NO: 621307 - DNA, 75 bp, synthetic construct
  source 1..75: mol_type = other DNA
tgggaagtggtatggaattcaccgcaacgcgatgatgactccacctcctggggggaagcattcaaacgtcatggc

SEQ ID NO: 621308 - DNA, 75 bp, synthetic construct
  source 1..75: mol_type = other DNA
ctggattgggcggcagaaggactgcataacgtttcgatttcccaggtcgagctgcgctcccacattcagttttat

SEQ ID NO: 621309 - DNA, 75 bp, synthetic construct
  source 1..75: mol_type = other DNA
ccggtgtgcgtggtggtgaacagtttgatgccatcaaccagagtgtcgcgcgttttgcgtctgcatccggtgtgg

SEQ ID NO: 621310 - DNA, 75 bp, synthetic construct
  source 1..75: mol_type = other DNA
aacacagcggtgtgaatgagaaaatcagccagcagcgccgggatttatgggaagcggaaaatcagtatgtggtcc

SEQ ID NO: 621311 - DNA, 75 bp, synthetic construct
  source 1..75: mol_type = other DNA
cggaagagtattcaccgccgcaggtgctggttgataccgatcggttccttgagatgaatcgtcaacgctcccttg

SEQ ID NO: 621312 - DNA, 75 bp, synthetic construct
  source 1..75: mol_type = other DNA
ggtgaagggtatgcacccggttcaccgtgcggtgttcctgacgggcgtgatgtcttatctctccgctccgctgtg

SEQ ID NO: 621313 - DNA, 75 bp, synthetic construct
  source 1..75: mol_type = other DNA
cggcattgccgaagactgatatccgcgccgttcatcaggcgctggatgccgaacaccgcacctgggcgcgggagg

SEQ ID NO: 621314 - DNA, 75 bp, synthetic construct
  source 1..75: mol_type = other DNA
acgcaatgcccatcgccgcaagcgagaaagcggcattgccgaagactgatatccgcgccgttcatcaggcgctgg

SEQ ID NO: 621315 - DNA, 75 bp, synthetic construct
  source 1..75: mol_type = other DNA
atccgccgttacatcctgctggtcctgacgctggcacaaaccgttgtcgcgacctggtatatgaagactatcctc

SEQ ID NO: 621316 - DNA, 75 bp, synthetic construct
  source 1..75: mol_type = other DNA
cggtgattgtttgtgcggtctggtgcgcctgatggaagccaacccgaacgccgggatcattcagtcgtcgccgaa

SEQ ID NO: 621317 - DNA, 75 bp, synthetic construct
  source 1..75: mol_type = other DNA
ataaagcgctgattgaccatcatattgcagagcttgattatcagatcagccgtcagctggatgccgtgcttcatc

SEQ ID NO: 621318 - DNA, 75 bp, synthetic construct
  source 1..75: mol_type = other DNA
aaacattaaaaggctgggagattacaaacagtaatattaaaaaggccggaaatttaagagcgctgatagttcatg

SEQ ID NO: 621319 - DNA, 75 bp, synthetic construct
  source 1..75: mol_type = other DNA
ggaaagggactgaatcagtttttgatacaactgctgccattcagtggtatgcgcagcgcgaagctgatattgaaa

SEQ ID NO: 621320 - DNA, 75 bp, synthetic construct
  source 1..75: mol_type = other DNA
agcgcttatcaggcagattctgattatcacggttgtctgttccttcgttggtggagcgctcggcgcggcggctat

SEQ ID NO: 621321 - DNA, 75 bp, synthetic construct
  source 1..75: mol_type = other DNA
agagcggcctttatctgcagacctatgtggctgaatatgacacgccgggtggtgaacccattgctgtcctggttt

SEQ ID NO: 621322 - DNA, 75 bp, synthetic construct
  source 1..75: mol_type = other DNA
agagcggcctttatctgcagacctatgtggctgagtatgacacgccgggtggtgagcccattgctgtcctggttt

SEQ ID NO: 621323 - DNA, 75 bp, synthetic construct
  source 1..75: mol_type = other DNA
ccgaaattttcaacgtggatccgcggacgattgaacgctggcagtctcaggggcttacttgtgtctccggaggtg

SEQ ID NO: 621324 - DNA, 75 bp, synthetic construct
  source 1..75: mol_type = other DNA
acaggctgatgcacaggaactgaagaatgcccgcgaagaagggctggtactggaaacggaattgtttaccttcat

SEQ ID NO: 621325 - DNA, 75 bp, synthetic construct
  source 1..75: mol_type = other DNA
ctccggtgcatcagccgttgttgctggatggtacgctcgatcaactacaacaactgcgtattcgcccgatggcct

SEQ ID NO: 621326 - DNA, 75 bp, synthetic construct
  source 1..75: mol_type = other DNA
gtcgcgccgatggttcactggacagagacctcgacagccgcatagaactggagatgcgtaccgaccataaagagc

SEQ ID NO: 621327 - DNA, 75 bp, synthetic construct
  source 1..75: mol_type = other DNA
atttgcacccccggcagccgctacgtcgccgacctcaccaaagttgaccgttactcttacgtgatgcacctggtc

SEQ ID NO: 621328 - DNA, 75 bp, synthetic construct
  source 1..75: mol_type = other DNA
gcgcagagggaagctgatatcgaaaatgaaaagctccggaaagaactggaagatttgcgggcggctgcagaatca

SEQ ID NO: 621329 - DNA, 75 bp, synthetic construct
  source 1..75: mol_type = other DNA
gttcttccttaaaaactcgatggaagaagtcgccgcaattaaagatatcggcaactattttgaccgcgcggaata

SEQ ID NO: 621330 - DNA, 75 bp, synthetic construct
  source 1..75: mol_type = other DNA
atggaagaggtggctgccatcaaggatattggcaaccactttgagcgtgccgagtacatcaagtggaacgctttc

SEQ ID NO: 621331 - DNA, 75 bp, synthetic construct
  source 1..75: mol_type = other DNA
actgtacgatacgccggatgcaacggcgaacagccgtattaatgcccgtcttccctatatcttcctgctgtcccg

SEQ ID NO: 621332 - DNA, 75 bp, synthetic construct
  source 1..75: mol_type = other DNA
ctggtgtgttcagatccgcggtcctcaggccggtggtgcggtgcaggatttgccgatccatctgtatgatctggg

SEQ ID NO: 621333 - DNA, 75 bp, synthetic construct
  source 1..75: mol_type = other DNA
gcacagcagaacttaagcgaaatcaccggggaatttacttcagacgacctgctggggcggattttctccagcttc

SEQ ID NO: 621334 - DNA, 75 bp, synthetic construct
  source 1..75: mol_type = other DNA
ggtcacgcgttaattcgtctttcggcgcggactggcgaaggcgtggatgtactgcgtaaccatctcaaacagagc

SEQ ID NO: 621335 - DNA, 75 bp, synthetic construct
  source 1..75: mol_type = other DNA
gcgaacagccgtattaatgcccgtcttccctatatcttcctgctgtcccgcattgcgcattacctgaagatcatt

SEQ ID NO: 621336 - DNA, 75 bp, synthetic construct
  source 1..75: mol_type = other DNA
tcatcacaagtatctctggacgaacgcgtcttttgcctttgcagctaatatggtgcgcagttttgtcaccaacgg

SEQ ID NO: 621337 - DNA, 75 bp, synthetic construct
  source 1..75: mol_type = other DNA
gcgcggcacatggttcgtcgtacagcgcactgattttcgcaaaaatgtcagaattgaattgctggatatcagcaa

SEQ ID NO: 621338 - DNA, 75 bp, synthetic construct
  source 1..75: mol_type = other DNA
gtgatgatcccggaaacccgcgagtttgagttcgccaaccttggctttattccactctcttattacaaaaaccgc

SEQ ID NO: 621339 - DNA, 75 bp, synthetic construct
  source 1..75: mol_type = other DNA
ttggtctggtgatgccacgtgttctgggacgcctgccgtatggtcctgataccgtacctgtccgcagctttaact

SEQ ID NO: 621340 - DNA, 75 bp, synthetic construct
  source 1..75: mol_type = other DNA
tgcagagcttgattatcagatcagccgtcaactggatgctgtgcttcatcatccggaatttcagaaagtggagtc

SEQ ID NO: 621341 - DNA, 75 bp, synthetic construct
  source 1..75: mol_type = other DNA
atgcccgcacatgcagtaccaattgatataaaagaacaaggtgttacctggttattaccaccttatagttggtcc

SEQ ID NO: 621342 - DNA, 75 bp, synthetic construct
  source 1..75: mol_type = other DNA
tgccgtttacccttgccactaatcaggtggaaatatccccggtgcatcagccgttactgctggatggcacgctcg

SEQ ID NO: 621343 - DNA, 75 bp, synthetic construct
  source 1..75: mol_type = other DNA
gtcctacagtgacgccgggagcgcctttatttttggttcgctggtggggccgaaaatggacgtcctgtttgacgg

SEQ ID NO: 621344 - DNA, 75 bp, synthetic construct
  source 1..75: mol_type = other DNA
tttatttttggttcgctggtcggtcccaaaatggatgttctgtttgacggtgcaggctttatcttcgcctttcgc

SEQ ID NO: 621345 - DNA, 75 bp, synthetic construct
  source 1..75: mol_type = other DNA
ctgcgctcatcagtctgctgtactacattggcgtgatgggactcctgattcgcattcttggcagtattttccaga

SEQ ID NO: 621346 - DNA, 75 bp, synthetic construct
  source 1..75: mol_type = other DNA
cgacgacgacccgcaggcatcgaacgagaaaatcctcgaagcgattttgttggtctggctggacgaagccgagtg

SEQ ID NO: 621347 - DNA, 75 bp, synthetic construct
  source 1..75: mol_type = other DNA
aaaaccagcgggagcggcagcagaaaaacctgcggcggcggctgaaaaacccgcagcatcagacaaggggacttc

SEQ ID NO: 621348 - DNA, 75 bp, synthetic construct
  source 1..75: mol_type = other DNA
atcaacggcattattggtggaattggcggctggtttggtttcgccaatgtttctctggaaagcattttcggctat

SEQ ID NO: 621349 - DNA, 75 bp, synthetic construct
  source 1..75: mol_type = other DNA
atgagtaaatcacacccgcgctggcgcttagcaaagaaactcctcacctggctgttttttatcgcggtgattgtg

SEQ ID NO: 621350 - DNA, 75 bp, synthetic construct
  source 1..75: mol_type = other DNA
tagtagtattgctggtgtcatcgtgcatattccggcgggaattggtgtgctggaagcggtgtttatcgcgctact

SEQ ID NO: 621351 - DNA, 75 bp, synthetic construct
  source 1..75: mol_type = other DNA
tcatggaaattcgccctcgcccagatgctgatttccagcgttaactggatggtcatgggagcgattatctggctg

SEQ ID NO: 621352 - DNA, 75 bp, synthetic construct
  source 1..75: mol_type = other DNA
cgatccccggcggtattttgtttgcacgtattcttagtccagcaaccgagctttcgcaggtcacgtttgaaaatc

SEQ ID NO: 621353 - DNA, 75 bp, synthetic construct
  source 1..75: mol_type = other DNA
ttctatcggggtggtggtgggggcgttttctgcggttgcgccacaccgtgcgccggaaatcgcccagcttggttt

SEQ ID NO: 621354 - DNA, 75 bp, synthetic construct
  source 1..75: mol_type = other DNA
atttctgttgtcagtgaataaaaagagcatcagtttgcgcacggttggagccgcactgctgctgcaaatcgctat

SEQ ID NO: 621355 - DNA, 75 bp, synthetic construct
  source 1..75: mol_type = other DNA
cttgacgggcagaagctgcatcgtctgactctgggacgatacccggatatgagcctcaaagaagcccgttcatcg

SEQ ID NO: 621356 - DNA, 75 bp, synthetic construct
  source 1..75: mol_type = other DNA
ttattgccctgctcgtcggtgccggtctgttctccgtgggggcactaatcaacagtacccagagccagtccggtc

SEQ ID NO: 621357 - DNA, 75 bp, synthetic construct
  source 1..75: mol_type = other DNA
agtggttatctgccaacggtggattactggcgactgggggcgatttttgggctgatattcctcgtgttgctggtg

SEQ ID NO: 621358 - DNA, 75 bp, synthetic construct
  source 1..75: mol_type = other DNA
ccaacgatggtgatggtggcgttgattgtggtgttttatctgctgcgctacttctttgccagcgccacggcgtat

SEQ ID NO: 621359 - DNA, 75 bp, synthetic construct
  source 1..75: mol_type = other DNA
actcggcctaagcgatatctcagcaaaagttgatccttacagacttattaaataccatttccctggcccaggttc

SEQ ID NO: 621360 - DNA, 75 bp, synthetic construct
  source 1..75: mol_type = other DNA
ggggatacctgttacttccccctgactatcctgaagttaacgattgtctggtggatttatcaactgaagacatga

SEQ ID NO: 621361 - DNA, 75 bp, synthetic construct
  source 1..75: mol_type = other DNA
taatttcttgggatgtattgattatggatactgattttcatcaggtttactctgtgctaaataatggagagtata

SEQ ID NO: 621362 - DNA, 75 bp, synthetic construct
  source 1..75: mol_type = other DNA
aatcccgctgccggtgttctgcctgatggttggcgcggcaattggtctggggagcattcttacaccatacgccac

SEQ ID NO: 621363 - DNA, 75 bp, synthetic construct
  source 1..75: mol_type = other DNA
gtggattttcggcggtgattatatcgatgccgcgatggtcggttacagcgtggtggcactgatgctgcttctgcg

SEQ ID NO: 621364 - DNA, 75 bp, synthetic construct
  source 1..75: mol_type = other DNA
aggacgggcttacttttgggtgaggagagaacgcatagagctgtttctctgaaaggtcgcagaatgtataaaata

SEQ ID NO: 621365 - DNA, 75 bp, synthetic construct
  source 1..75: mol_type = other DNA
cagtattttactggttctgctggttccctggctggcttacgtgctgtacccgccggtactgaagtctggtgatca

SEQ ID NO: 621366 - DNA, 75 bp, synthetic construct
  source 1..75: mol_type = other DNA
tgctgttaattggactgatgaaaagcgcatctcacgccacgctgagctggggcgactggttcctcgggatgttgc

SEQ ID NO: 621367 - DNA, 75 bp, synthetic construct
  source 1..75: mol_type = other DNA
ggagcattcttacaccatacgccaccggacccagtccgatttactacggtagtggttatctgccaacggtggatt

SEQ ID NO: 621368 - DNA, 75 bp, synthetic construct
  source 1..75: mol_type = other DNA
ctggatctgatttcaggcgttgggtgtggatcactattgcaccgttcgtgacaaatattacccttcgtgaagtta

SEQ ID NO: 621369 - DNA, 75 bp, synthetic construct
  source 1..75: mol_type = other DNA
gccgcaccgacgccgtggagctggccgctgacgacgagccagaaccggacggcgacgagcaggagaacggcaaga

SEQ ID NO: 621370 - DNA, 75 bp, synthetic construct
  source 1..75: mol_type = other DNA
acgtcgacatttttaacccggtgattttcccgtttgtcgattatttccgtaacagcatggtggtgtcggtagttt

SEQ ID NO: 621371 - DNA, 75 bp, synthetic construct
  source 1..75: mol_type = other DNA
cgcaacgtgcctcacgcctggctgccagcgtaaagcgttacaagacatcagaaatgctgcgctttatttttgcta

SEQ ID NO: 621372 - DNA, 75 bp, synthetic construct
  source 1..75: mol_type = other DNA
atgcggctttttttaggcggcaggtgctacacggctgaaaaacttgaaaaggattatctggctgaagtggctaat

SEQ ID NO: 621373 - DNA, 75 bp, synthetic construct
  source 1..75: mol_type = other DNA
ggggagccagtggctgattgtggaattattcggggataaggagcggcagcaccgcagcaacgacagcaccctgga

SEQ ID NO: 621374 - DNA, 75 bp, synthetic construct
  source 1..75: mol_type = other DNA
aacttagcatgagcgcaccgtcaattccggcggcaaaagcacgcatggcgcaactcgacagccgcgaatgtcgtc

SEQ ID NO: 621375 - DNA, 75 bp, synthetic construct
  source 1..75: mol_type = other DNA
gagtgcatcacgctggaaagcgactggcgcagcaaagaagaagtgctcaaaggcatgaccgataacctgctgctg

SEQ ID NO: 621376 - DNA, 75 bp, synthetic construct
  source 1..75: mol_type = other DNA
tccggcggcgaaagctcggatggcgcaacttgatagcgtgagtgccgcaagttgctcaaccaggcaatggcctgc

SEQ ID NO: 621377 - DNA, 75 bp, synthetic construct
  source 1..75: mol_type = other DNA
cattctcggggcttacgcgctttctcgcctgcgctttaaaggtcggatgaccatcaacgccagcttttacacggt

SEQ ID NO: 621378 - DNA, 75 bp, synthetic construct
  source 1..75: mol_type = other DNA
cagcctgaaaatcatgatcccgatgatctcctcaatggaagagatcttatgggtgaaagaaaaactggcggaagc

SEQ ID NO: 621379 - DNA, 75 bp, synthetic construct
  source 1..75: mol_type = other DNA
cctgacgcaatatctgctggcagtggatcgcgataacgctaaggtgactcgtcactacaacagcctgaatccggc

SEQ ID NO: 621380 - DNA, 75 bp, synthetic construct
  source 1..75: mol_type = other DNA
gaacgataaactcgatttagcccaggccgaagcgattgcagaccttatcgacgccagctcggaacaggcggcgcg

SEQ ID NO: 621381 - DNA, 75 bp, synthetic construct
  source 1..75: mol_type = other DNA
actttatgagtggatgcgccagaaaattaatgcagcgcaggatctgaaatgggctaatgaagccagggctaagca

SEQ ID NO: 621382 - DNA, 75 bp, synthetic construct
  source 1..75: mol_type = other DNA
gagttgattatatggtgattggtcgcccggtaacgcaatcggcagatccagcgcaaacgctgaaagcgatcaacg

SEQ ID NO: 621383 - DNA, 75 bp, synthetic construct
  source 1..75: mol_type = other DNA
atggtgtggtgtgttctgctcaggaagctgtgcgctttaaacaggtattcggtcaggagttcaaactggttacgc

SEQ ID NO: 621384 - DNA, 75 bp, synthetic construct
  source 1..75: mol_type = other DNA
catcacacatccctaacctgaaaaaacttggcgtaataaaagacaaatcagagcttattgataacccctgtctca

SEQ ID NO: 621385 - DNA, 75 bp, synthetic construct
  source 1..75: mol_type = other DNA
gaaagcggcctggtcgccactgcgataaatcacaataaaaataaatccggaaaaatcatcagtacggattacgga

SEQ ID NO: 621386 - DNA, 75 bp, synthetic construct
  source 1..75: mol_type = other DNA
tgattttattcagtcatacatcaatcgcatctgtgatgaataataatcatctcgattcctgttttattcaggccg

SEQ ID NO: 621387 - DNA, 75 bp, synthetic construct
  source 1..75: mol_type = other DNA
cgggaaatcgccaccgcgcgaggtcttgcccaggcgaaacagttttcgtgggagaactgtacgacccagaccatt

SEQ ID NO: 621388 - DNA, 75 bp, synthetic construct
  source 1..75: mol_type = other DNA
atggcggtccggtgatcctcgacctgctgttaaaacgtatcctgaccattccaggcctgcggattgcccgcccag

SEQ ID NO: 621389 - DNA, 75 bp, synthetic construct
  source 1..75: mol_type = other DNA
gcaataaagccgatatcaccggcgaaacgctgggaatgagtgaagtgaacggtcatgcgttgattcgtctgtctg

SEQ ID NO: 621390 - DNA, 75 bp, synthetic construct
  source 1..75: mol_type = other DNA
tcgcgccagactataccgatgatgaactttatgagtggatgcaccagaaaattaaggcagcgcaggacctgaaat

SEQ ID NO: 621391 - DNA, 75 bp, synthetic construct
  source 1..75: mol_type = other DNA
gcgcgtactgccggatatcgccgcggcgatcgatgttatccacgcccaggtaagcggcggcggccgtctgattta

SEQ ID NO: 621392 - DNA, 75 bp, synthetic construct
  source 1..75: mol_type = other DNA
ggctgggaagacgatgtgctgtggcagttagtcgagcgcggtactcgggaaggctggatccgttacctcggatat

SEQ ID NO: 621393 - DNA, 75 bp, synthetic construct
  source 1..75: mol_type = other DNA
ggaagtgccatcggtaatgttcatcatcgatcagtgctgtgaagagattgatttctttagtatcggcagtaacga

SEQ ID NO: 621394 - DNA, 75 bp, synthetic construct
  source 1..75: mol_type = other DNA
atgatgactgaacaggaacaaaacaggctgattcgtggactgataaggcagcatgacgcatggaagacacaggag

SEQ ID NO: 621395 - DNA, 75 bp, synthetic construct
  source 1..75: mol_type = other DNA
atgatgaatgagcaggaacaaaaccgccttattcgtggacttataaggcagcatgacgcatggaagacacaggag

SEQ ID NO: 621396 - DNA, 75 bp, synthetic construct
  source 1..75: mol_type = other DNA
agagcgcataagaagcccgtagcaaagcgcatgagccagcgtgaccgggagcttatggaatgctttcgcaaccgc

SEQ ID NO: 621397 - DNA, 75 bp, synthetic construct
  source 1..75: mol_type = other DNA
gctatcagcgcacacacagcagcggtgaaagaacaactggagacgctgaacagtgccgtgaacgcgcagttcagc

SEQ ID NO: 621398 - DNA, 75 bp, synthetic construct
  source 1..75: mol_type = other DNA
cctcgccgcctatacaagaggtctttttccgaccactattggcgcggtgctcatagcgtttgttatttggctcat

SEQ ID NO: 621399 - DNA, 75 bp, synthetic construct
  source 1..75: mol_type = other DNA
atgaccagcaatatcatcagcgccattttgagctttgtgtacctggaagtgggtgtaatagcgatttatctgctt

SEQ ID NO: 621400 - DNA, 75 bp, synthetic construct
  source 1..75: mol_type = other DNA
ggaaaatgaaaaaatcgtggagctgtatgctaaaaattctgcggtccctgagatcctgttaaataagtcaggtga

SEQ ID NO: 621401 - DNA, 75 bp, synthetic construct
  source 1..75: mol_type = other DNA
tgaaaatcatccagcgcgagaatatcggtaccaccaaagaccgccgcgtactggaactggaactgaacacctggg

SEQ ID NO: 621402 - DNA, 75 bp, synthetic construct
  source 1..75: mol_type = other DNA
acgccgttgatccggcagagatctggccggaatttatcgcccgtctgccagcgaaactgccgatcaccgtggtgc

SEQ ID NO: 621403 - DNA, 75 bp, synthetic construct
  source 1..75: mol_type = other DNA
attgtgagtggttttataaacttaccaaaattcggcttctttcttttgagtaccttgatgatgatgaatcaagaa

SEQ ID NO: 621404 - DNA, 75 bp, synthetic construct
  source 1..75: mol_type = other DNA
cctgcgatcgccactgcaaaacagcgattgtaatggtcttgaaaaatctcgatgccgcagaagcgaaaaaacgcc

SEQ ID NO: 621405 - DNA, 75 bp, synthetic construct
  source 1..75: mol_type = other DNA
cagacgcagtttgcactggctaaggaaagggatgtttcgcattaccgcgaaattttattcgctaacctggaagaa

SEQ ID NO: 621406 - DNA, 75 bp, synthetic construct
  source 1..75: mol_type = other DNA
tgaacgcgaagcacatcttaatgaccatccctttttgcgcagatggtatgcccgcgataaccgctacgtttacag

SEQ ID NO: 621407 - DNA, 75 bp, synthetic construct
  source 1..75: mol_type = other DNA
atggcgcggctggatatcgccgaaaagcgcgtaccgcaggatggccgtattgcgctgctgctgggcggtcgggcg

SEQ ID NO: 621408 - DNA, 75 bp, synthetic construct
  source 1..75: mol_type = other DNA
cgaggacttttttaccctcgctgaagaactgccggaaacggaagatctgctggaaagtgacgacgatgcgccgat

SEQ ID NO: 621409 - DNA, 75 bp, synthetic construct
  source 1..75: mol_type = other DNA
tgaaggatgctgttacggaatatattgaatactacaacagcagaagaattagcctgaaattaaaaggtctgactc

SEQ ID NO: 621410 - DNA, 75 bp, synthetic construct
  source 1..75: mol_type = other DNA
tggaaaacggcctgacgctggtactgaaaaacattgagtttcgtctgctggatagcgacggtgccaccagcgcga

SEQ ID NO: 621411 - DNA, 75 bp, synthetic construct
  source 1..75: mol_type = other DNA
gaaagcgagctgtacaacattttttgtcaggcgctggagtctgccaacggacgcagcattattgtgcgcactatg

SEQ ID NO: 621412 - DNA, 75 bp, synthetic construct
  source 1..75: mol_type = other DNA
cccagccagttcctcgaactggataaaaatcacctcaaaggtctgttactgaaaagtggcggcaccacctcacat

SEQ ID NO: 621413 - DNA, 75 bp, synthetic construct
  source 1..75: mol_type = other DNA
cgacatatactgatacctcctgtgtcaacgccaagattattggccgtttttcgccatttttaatgtccgctattg

SEQ ID NO: 621414 - DNA, 75 bp, synthetic construct
  source 1..75: mol_type = other DNA
gtttattaaagagaaagggcagtatccgatgaataaagtcgcgaccgatgatatcgggtttgcgatttatcaggt

SEQ ID NO: 621415 - DNA, 75 bp, synthetic construct
  source 1..75: mol_type = other DNA
tacaaaacgggatatctggacggaaaaattactgatgacggcgaatttattcctgccccgcgcaatgaggcgaca

SEQ ID NO: 621416 - DNA, 75 bp, synthetic construct
  source 1..75: mol_type = other DNA
ttatttcttacagcctttcggaaagaccagtgatgaacatggttgagaatatgctcgatcaggcattcaaaaagc

SEQ ID NO: 621417 - DNA, 75 bp, synthetic construct
  source 1..75: mol_type = other DNA
cggtggaaggcgctgaagatagccgggaaggcggtgttaatgatctgaaaaacatcggcttaaccgcgcaggatg

SEQ ID NO: 621418 - DNA, 75 bp, synthetic construct
  source 1..75: mol_type = other DNA
ctggggattctggatgccagcgagtgccccccaacctacggcgtgaaaccgggtctggtggttggtttgattgct

SEQ ID NO: 621419 - DNA, 75 bp, synthetic construct
  source 1..75: mol_type = other DNA
gcagaagggccgaagcggatggattgtgcatctggatttggcgcggcaacgatggtgaccgccacctttgggttt

SEQ ID NO: 621420 - DNA, 75 bp, synthetic construct
  source 1..75: mol_type = other DNA
acagggaaggcattcaaatcgatgtgggatgccattctggatatcggtcgtcctgaatcctcagcggatatgctc

SEQ ID NO: 621421 - DNA, 75 bp, synthetic construct
  source 1..75: mol_type = other DNA
acttccatttcgcgaccggaggatttacgggaaccggtggcaaatacgaacctgccggtattgtccaccgcgggg

SEQ ID NO: 621422 - DNA, 75 bp, synthetic construct
  source 1..75: mol_type = other DNA
cgcaggcgctggcccgggtcaccggggcactgaaacagacatgggcggatgaagacatgctgcgcggtgactggc

SEQ ID NO: 621423 - DNA, 75 bp, synthetic construct
  source 1..75: mol_type = other DNA
ccaactaccacgccaccagaccgaaatactttgatcacatagacctgagcacccggccgctgattgacatcacat

SEQ ID NO: 621424 - DNA, 75 bp, synthetic construct
  source 1..75: mol_type = other DNA
ttgcaaccactgatcggtatcgacaaaccgacggttaagcgaatcggcaagggccattccgaccgttgttttacc

SEQ ID NO: 621425 - DNA, 75 bp, synthetic construct
  source 1..75: mol_type = other DNA
ggcactaaattttttgggtttgatatggacaacgaatatatcggcggttttgataccggcgcttggggggtatta

SEQ ID NO: 621426 - DNA, 75 bp, synthetic construct
  source 1..75: mol_type = other DNA
cagcgccttcgtgacgtgtacggtgataatccggctgcgctggcgaaggccacatcggcactgaagaacacctgg

SEQ ID NO: 621427 - DNA, 75 bp, synthetic construct
  source 1..75: mol_type = other DNA
ggccatgcgaaccctgcccgcacagtttacggatatcgccacgcagcttgccggtggtcagaatccctggctgat

SEQ ID NO: 621428 - DNA, 75 bp, synthetic construct
  source 1..75: mol_type = other DNA
ttctaccgtgggctgaatgttagtgaagcttccgtactggttacgcgcgcttccgatcacaatccgctactcgtt

SEQ ID NO: 621429 - DNA, 75 bp, synthetic construct
  source 1..75: mol_type = other DNA
gaacatttacaaacagcaacgtgctgaatggttgtcggtactgaaaaattacggcaaagatgcgcatctggtgtt

SEQ ID NO: 621430 - DNA, 75 bp, synthetic construct
  source 1..75: mol_type = other DNA
cggaaatatggcgtcgatgagtcgctgattctggcgattatgcagaccgaatcctccttcaacccatatgcggtc

SEQ ID NO: 621431 - DNA, 75 bp, synthetic construct
  source 1..75: mol_type = other DNA
atggccggtctgaagtccggctggggcgagtgggcagaaagtgcgacggacagtttttcgcaggttaaaagcgtg

SEQ ID NO: 621432 - DNA, 75 bp, synthetic construct
  source 1..75: mol_type = other DNA
ttcggtggtggtgcatctgcttcctcggggacggctattgaggctgcggcggcgaacttccatttcgcgaccgga

SEQ ID NO: 621433 - DNA, 75 bp, synthetic construct
  source 1..75: mol_type = other DNA
atgatgacagaaatcctgcttaaacaggccatggtgggcattgtcgggcgtatcggcagcgccattggcggtgct

SEQ ID NO: 621434 - DNA, 75 bp, synthetic construct
  source 1..75: mol_type = other DNA
ggattccacgctttcagcgtttaataaaaccctggttctttccggtaatcagtccggactgactgccgagcgcat

SEQ ID NO: 621435 - DNA, 75 bp, synthetic construct
  source 1..75: mol_type = other DNA
atcgacgcaacaaacgaacccagccaggtgatttctgaaattcgcagcgctctggcacagacgatcaattgttga

SEQ ID NO: 621436 - DNA, 75 bp, synthetic construct
  source 1..75: mol_type = other DNA
ataccaacggttttgatatcctgatggggcagttcgcccacaatattgagaacatctggggattcaaagaagtgg

SEQ ID NO: 621437 - DNA, 75 bp, synthetic construct
  source 1..75: mol_type = other DNA
cgacccgccatccttctgcggaatctcgccgctatctctataaagtgaacatggcgcagaaatcttaccgccgtc

SEQ ID NO: 621438 - DNA, 75 bp, synthetic construct
  source 1..75: mol_type = other DNA
acggcattgcccagaaactgaaattcaaagcattacaggagcgggcgaaagaaaaaattgccgacattgccgaaa

SEQ ID NO: 621439 - DNA, 75 bp, synthetic construct
  source 1..75: mol_type = other DNA
acgatatcggtctgggtttttcccgagactgatatttctgatgtgtcactcgaactgatagccgctatcaaacag

SEQ ID NO: 621440 - DNA, 75 bp, synthetic construct
  source 1..75: mol_type = other DNA
aaaactctggttctttccggtaatcagtccggactgactgccgatcgtatgctgactctctcaagagccgggcag

SEQ ID NO: 621441 - DNA, 75 bp, synthetic construct
  source 1..75: mol_type = other DNA
cttttttacagcaaaacgccaatcgggaaggcgattgcctgaccatccccgacagcagcgccacgcagcgtgttt

SEQ ID NO: 621442 - DNA, 75 bp, synthetic construct
  source 1..75: mol_type = other DNA
ttgatctgtttgctcgttatcctttgaagaaagtcacccaggagaaaagcacaaagtccgtatcgccgggcgtgc

SEQ ID NO: 621443 - DNA, 75 bp, synthetic construct
  source 1..75: mol_type = other DNA
gtccagctcgatacgctcggcctctggattggtcgcagtcgcattgtcagccagccgataagcggcgtgtatttc

SEQ ID NO: 621444 - DNA, 75 bp, synthetic construct
  source 1..75: mol_type = other DNA
tcagagcaggagtcaccggcgcggtaaaacctcagcgtttctttccaatctccggggagcatgggaggacagggc

SEQ ID NO: 621445 - DNA, 75 bp, synthetic construct
  source 1..75: mol_type = other DNA
atgacatggcccgtaagggagcccgtgatgagattcaggcacagatgcgtgatggtggtatattctccggaggtg

SEQ ID NO: 621446 - DNA, 75 bp, synthetic construct
  source 1..75: mol_type = other DNA
caggcggggcagggagagcgttacgaccagatactcgcgtttgcttatcccgacaacagccttagccgctgggga

SEQ ID NO: 621447 - DNA, 75 bp, synthetic construct
  source 1..75: mol_type = other DNA
gctggtacaaagtcaggatattcagccgctggtggaagtcgaaaaagaggtgattcttgcggcactggagaaaac

SEQ ID NO: 621448 - DNA, 75 bp, synthetic construct
  source 1..75: mol_type = other DNA
tggcgatatttctccaatgatgcaggttcgtctgctgcgtgccattcaggagcgtgaagtccagcgtgttggcag

SEQ ID NO: 621449 - DNA, 75 bp, synthetic construct
  source 1..75: mol_type = other DNA
tttcttcagcgctttgccgaacgcaatcgcaaggcagtaaaaggttttacgccccaggcgatggatctgctgatc

SEQ ID NO: 621450 - DNA, 75 bp, synthetic construct
  source 1..75: mol_type = other DNA
gtgcaacttgacattcttggattgtggatcggacgtagccgtgttgtcagccagcctatctcaggtgtctatttc

SEQ ID NO: 621451 - DNA, 75 bp, synthetic construct
  source 1..75: mol_type = other DNA
atgacattagccactgcactattttgtttgcaggctttactgcgcggctggggctataacgtcgcgctggcgaac

SEQ ID NO: 621452 - DNA, 75 bp, synthetic construct
  source 1..75: mol_type = other DNA
ggtagaggcactgaaaaccggggcgctggattatctcatcaagccgctggatttcgataacctacaggcgacgct

SEQ ID NO: 621453 - DNA, 75 bp, synthetic construct
  source 1..75: mol_type = other DNA
ttgtcaggcaggggagagcataacgcgtgataccgcactggtacgttcctgcggactctattttgcgccgcaacg

SEQ ID NO: 621454 - DNA, 75 bp, synthetic construct
  source 1..75: mol_type = other DNA
cgataccgcgctggtacgttcctgtgggctctattttgcgccgcagcggttgcatattggcgcagatgtgtgggg

SEQ ID NO: 621455 - DNA, 75 bp, synthetic construct
  source 1..75: mol_type = other DNA
cccggacagcagcgccactcaacgtgtttctgcatcgccagcctctgttggcgcgcggacgatgaccgcctggac

SEQ ID NO: 621456 - DNA, 75 bp, synthetic construct
  source 1..75: mol_type = other DNA
ggcagtggtgctgctgaccggggaatatatttccgaacgcgagctgccgctggcgattgccagtacgccgatccc

SEQ ID NO: 621457 - DNA, 75 bp, synthetic construct
  source 1..75: mol_type = other DNA
tggcgaacagcgggcgacaggcgctggagcaggtgcgggagcgggtttttgatcttgtgctttgcgatgtgcgaa

SEQ ID NO: 621458 - DNA, 75 bp, synthetic construct
  source 1..75: mol_type = other DNA
cgcccacgtggataacgtcgcttaccacgctaaaaccagaaacatcggtaactgtaaagtcactgctcgattcac

SEQ ID NO: 621459 - DNA, 75 bp, synthetic construct
  source 1..75: mol_type = other DNA
tcggtggcaccggaaaccggcggttatgtcggtacacctggcagcatggcggacagccgctcgcaggcgtccggg

SEQ ID NO: 621460 - DNA, 75 bp, synthetic construct
  source 1..75: mol_type = other DNA
caaggatgattatttcgttaacgatgaagcacgggcgcgttactgggatgatcgtgaaaaaaaacgcttggagcg

SEQ ID NO: 621461 - DNA, 75 bp, synthetic construct
  source 1..75: mol_type = other DNA
acgaatatcaaactgggaaaaacgagctattcagaattcctgaaccaattagccaaccagtatgcgagctgcctg

SEQ ID NO: 621462 - DNA, 75 bp, synthetic construct
  source 1..75: mol_type = other DNA
gcaccaacggacaggcggggccgcagctgatgaaggcggtgtatgacatggcccgcaagggggcgcaggatgagc

SEQ ID NO: 621463 - DNA, 75 bp, synthetic construct
  source 1..75: mol_type = other DNA
gaaaaagccgaagtcgtcaggcgttaaagtgtcagccggtgagcgtcaggaagaccaggcgcatgccgcactgct

SEQ ID NO: 621464 - DNA, 75 bp, synthetic construct
  source 1..75: mol_type = other DNA
gaaaaagccgaagtcgtcaggcgttaaagtgtcagccggtgagcgtcaggaagaccagacgcatgccgcgctgct

SEQ ID NO: 621465 - DNA, 75 bp, synthetic construct
  source 1..75: mol_type = other DNA
gaaaaagccgaagtcgtcaggcgtaaaagtgtcagccggtgagcgtcaggaagaccagacgcatgccgctctgct

SEQ ID NO: 621466 - DNA, 75 bp, synthetic construct
  source 1..75: mol_type = other DNA
ccttacaggcggcgaacgatatcgccacgaaaggctttgatgagcagacccgtcgcctgaaagaaaacatgggga

SEQ ID NO: 621467 - DNA, 75 bp, synthetic construct
  source 1..75: mol_type = other DNA
gaaaaagccgaagtcgtcaggcgtgaaagtgtcagccggtgagcgtcaggaagaccaggcgcatgccgctctgct

SEQ ID NO: 621468 - DNA, 75 bp, synthetic construct
  source 1..75: mol_type = other DNA
gaaaaagccgaagtcgtcaggcgtcaaagtgtcagccggtgagcgtcaggaagaccagccgcatgccgctctgct

SEQ ID NO: 621469 - DNA, 75 bp, synthetic construct
  source 1..75: mol_type = other DNA
cggggacggccattcaggctgcggcggcgaacttccatttcgcgaccgggggatttacgggaaccggtggcaaat

SEQ ID NO: 621470 - DNA, 75 bp, synthetic construct
  source 1..75: mol_type = other DNA
ataccgacgccagaaaaaccgccagtgctgttgaacagggcctgagccgtcaggcgctggctgcacaaaaaagcc

SEQ ID NO: 621471 - DNA, 75 bp, synthetic construct
  source 1..75: mol_type = other DNA
cggtgggcagctcaccaccaaaggcggtgtgctggaagtgtatatgggccactatatgcgtgagtggctggcaga

SEQ ID NO: 621472 - DNA, 75 bp, synthetic construct
  source 1..75: mol_type = other DNA
ataaatggcccgaatgggacgtccccggtgggcaactcaccaccaaaggtggcgtgctcgaagtgtatatgggcc

SEQ ID NO: 621473 - DNA, 75 bp, synthetic construct
  source 1..75: mol_type = other DNA
gccgcagggctgacgtttaaccaggcgagtgagtcactggcagccatggtgaatgccggtgtgcgtggtggtgaa

SEQ ID NO: 621474 - DNA, 75 bp, synthetic construct
  source 1..75: mol_type = other DNA
cccgcgcggtgtcgccggacgtcgccattgtgcttgataccgcctgctgggcgaaaaactttgattatggcgcgg

SEQ ID NO: 621475 - DNA, 75 bp, synthetic construct
  source 1..75: mol_type = other DNA
gaatcgacaggtccgaaggtgatgatctgtgcgcatatggacgaagtgggatttatggtgcgcagcatctcccgc

SEQ ID NO: 621476 - DNA, 75 bp, synthetic construct
  source 1..75: mol_type = other DNA
acgttactgcgcgaactacacagcgccgaactgcctgcggaagtgtggctggtggccagttccagcgaagaggtg

SEQ ID NO: 621477 - DNA, 75 bp, synthetic construct
  source 1..75: mol_type = other DNA
atgttattgcgtgaattgcatgaagctgaactgcctgcggaagtctggctggtaggcagctccagcgaagaggtt

SEQ ID NO: 621478 - DNA, 75 bp, synthetic construct
  source 1..75: mol_type = other DNA
gatatgttcagcaacggcggcacggacggcggagcggtgcacttaaccggcaccggcgtgcccacagtggtgatg

SEQ ID NO: 621479 - DNA, 75 bp, synthetic construct
  source 1..75: mol_type = other DNA
gcgccgcatcgattgccgattgccgcgacattttgcagatggagcaacttttatctgcccttattcaacgtctta

SEQ ID NO: 621480 - DNA, 75 bp, synthetic construct
  source 1..75: mol_type = other DNA
tcctgaaagaggccgccacgaaacggcagttatctgagcaggaaaaatccctgctggctcatgagaaagagacgc

SEQ ID NO: 621481 - DNA, 75 bp, synthetic construct
  source 1..75: mol_type = other DNA
gtggcggcattgggcggcggtttctggacgtggtggttctggcttggtgtcgccgggctggggctgattgtgcca

SEQ ID NO: 621482 - DNA, 75 bp, synthetic construct
  source 1..75: mol_type = other DNA
ttgaatcgttggtatgggactggccgattgccatctatctgtttttagtgggtatttccgccggtctggtcacgc

SEQ ID NO: 621483 - DNA, 75 bp, synthetic construct
  source 1..75: mol_type = other DNA
tgccaggtccacagatgatgaaggcagtgtatgacatggcccgcaagggtgcccgtgatgaaattcaggcacaga

SEQ ID NO: 621484 - DNA, 75 bp, synthetic construct
  source 1..75: mol_type = other DNA
gctgacgctctccagagccggacaggcagcagggctgacgtttaaccaggcgagcgagtcactggcagccctggt

SEQ ID NO: 621485 - DNA, 75 bp, synthetic construct
  source 1..75: mol_type = other DNA
tccatcgcggggagtttgtcttcacgaaggaagcaaccagccggattggcgtcggcaacctgtaccgcctgatgc

SEQ ID NO: 621486 - DNA, 75 bp, synthetic construct
  source 1..75: mol_type = other DNA
cagcagggcgcgaagcaggcggcaatcagtgcccaggcgcggggcctcaccgaccgtcaggcgcagcgggagtcg

SEQ ID NO: 621487 - DNA, 75 bp, synthetic construct
  source 1..75: mol_type = other DNA
ccatgttccgggggcttgccggtgcgatcagcctgccgatggtcggggtcacctcgctggcggtggcgaccggtg

SEQ ID NO: 621488 - DNA, 75 bp, synthetic construct
  source 1..75: mol_type = other DNA
taccgcctggcagaccgctggcgcgccgtcgaaagagagttgggcgttcactgcgttaggcgttctcggtaacga

SEQ ID NO: 621489 - DNA, 75 bp, synthetic construct
  source 1..75: mol_type = other DNA
ttgaagagcagcagagcgcgaagcaggccgccatcagcgcaaaaagcccgcggtctcactgaccgtcaggcgcag

SEQ ID NO: 621490 - DNA, 75 bp, synthetic construct
  source 1..75: mol_type = other DNA
gggatgccatcctggatatcggtcgtccggaatcctcagcggatatgctcgccagtgcgcagaaggcatttgatg

SEQ ID NO: 621491 - DNA, 75 bp, synthetic construct
  source 1..75: mol_type = other DNA
tacagccattcaggcagctgcggcgaaattccattttgcggccggagggtttacgggaaccggcggcaaatatga

SEQ ID NO: 621492 - DNA, 75 bp, synthetic construct
  source 1..75: mol_type = other DNA
caggcgcagcgggagtcggaagagcagcgccttcgtgacgtgtacggtgataatccggatgcgctggcgaaggcc

SEQ ID NO: 621493 - DNA, 75 bp, synthetic construct
  source 1..75: mol_type = other DNA
gagtgccacggacagtatgtcgcaggttaaaagtgctgccacgcagacctttgatggtattgcgcagaatatggc

SEQ ID NO: 621494 - DNA, 75 bp, synthetic construct
  source 1..75: mol_type = other DNA
cagcgaaagggacggaagcgcttggccttggtgatgtgttcctgattgcggggatcgcaatgtggacgcaaccgc

SEQ ID NO: 621495 - DNA, 75 bp, synthetic construct
  source 1..75: mol_type = other DNA
atgagtgacctgaatcagtttcgtagtaaagggccggaactgttggtagaactggcacagcatacctctgagacc

SEQ ID NO: 621496 - DNA, 75 bp, synthetic construct
  source 1..75: mol_type = other DNA
tctacagcgtggttaagcgggtaagaaaagaagaactggatcggatgcagggcaagctatttgctgatgaacccg

SEQ ID NO: 621497 - DNA, 75 bp, synthetic construct
  source 1..75: mol_type = other DNA
acttccatttcgcgaccgggggatttacggggacggggggtaaatatgaacctgcggggattgttcatcgcgggg

SEQ ID NO: 621498 - DNA, 75 bp, synthetic construct
  source 1..75: mol_type = other DNA
aaggtggttatgtgggaggtgaagggagtccggcgcagatgcgtcgcgctgagggtatccggtttgagcagaaca

SEQ ID NO: 621499 - DNA, 75 bp, synthetic construct
  source 1..75: mol_type = other DNA
cgttgtagtgatgtatttaggcggttatgtcgcaccaggggcaacgcaatttttggtaatgactccaacttattg

SEQ ID NO: 621500 - DNA, 75 bp, synthetic construct
  source 1..75: mol_type = other DNA
tcaaacgaatataatgcgaccttacgagtcaaggctaatcgaaactggacgctccaaggataagcagcaattagt

SEQ ID NO: 621501 - DNA, 75 bp, synthetic construct
  source 1..75: mol_type = other DNA
tcagcatttcttgccaatctccggggagcatgggaggacagagcgaatgcgcaacttgggctttcagccgccacg

SEQ ID NO: 621502 - DNA, 75 bp, synthetic construct
  source 1..75: mol_type = other DNA
aaaagaagaactggatcggatgcagggcaggttgtttgatgaagatctgccagaggagacgaaagacgttaacaa

SEQ ID NO: 621503 - DNA, 75 bp, synthetic construct
  source 1..75: mol_type = other DNA
aaagatgtctgttgaaaaatcgcatgcaatttctcgaaggatgtttgcacgcactgctgaagacatggctcagga

SEQ ID NO: 621504 - DNA, 75 bp, synthetic construct
  source 1..75: mol_type = other DNA
atgaggttgtaatgcgagaagtaccaaagatgtctgttgaaaaatcgcatgcaatttctcgaaggatgtttgcac

SEQ ID NO: 621505 - DNA, 75 bp, synthetic construct
  source 1..75: mol_type = other DNA
cttcgtgacgtgtatggcgataatccgcaggcgctggcccgggtcaccggggcactgaaacagacatgggcggat

SEQ ID NO: 621506 - DNA, 75 bp, synthetic construct
  source 1..75: mol_type = other DNA
cggtaataattgttccaatccggagttctgagaatcgggaataccttcccgtggctctattcgatgagcggacta

SEQ ID NO: 621507 - DNA, 75 bp, synthetic construct
  source 1..75: mol_type = other DNA
gcaagccacaccaacggattcggcttttgttagcaccaactctatctgtcaaggccgaattgttcctatcctgtg

SEQ ID NO: 621508 - DNA, 75 bp, synthetic construct
  source 1..75: mol_type = other DNA
cgccgaagacactgacatatttataggcaaggggcgctttactgacactattgcgcagatgagtgagcgcgacgc

SEQ ID NO: 621509 - DNA, 75 bp, synthetic construct
  source 1..75: mol_type = other DNA
taaaaaaatcagcaggtggctgggaacctgactgggaagactttacacgcaaagccagtcaggccgacttacgtg

SEQ ID NO: 621510 - DNA, 75 bp, synthetic construct
  source 1..75: mol_type = other DNA
caggcaagggaatagcaaaaactctggccacagagcgggctattgcagttgcagctagaatggcatctacagtgc

SEQ ID NO: 621511 - DNA, 75 bp, synthetic construct
  source 1..75: mol_type = other DNA
gttgaaataggcggcattttcgctttggggggaagtttttttgccaactatgattttaataagaagtttaaagcc

SEQ ID NO: 621512 - DNA, 75 bp, synthetic construct
  source 1..75: mol_type = other DNA
ttgacggtattgcacagaatatggcagcgatgctgaccggcagcgaacagaactggcgtggtttcacccgttctg

SEQ ID NO: 621513 - DNA, 75 bp, synthetic construct
  source 1..75: mol_type = other DNA
gggagaaatctttagctacatgcctggggaaatagacagttatatgaaatacataaataataaactttctaaaat

SEQ ID NO: 621514 - DNA, 75 bp, synthetic construct
  source 1..75: mol_type = other DNA
ggctggaaaagttgttcgacctctacacgaaaatgattgcttcgactgcaccggtcaaaggtaagaagcgcaaag

SEQ ID NO: 621515 - DNA, 75 bp, synthetic construct
  source 1..75: mol_type = other DNA
atactagcaacaaagatagagctgccgctggaatcccgcgttgggccaatgaatttccttatgtcaacggacgct

SEQ ID NO: 621516 - DNA, 75 bp, synthetic construct
  source 1..75: mol_type = other DNA
gtcgggagtatcggcagcgccattggcggtgctttcggtggtggtgcgtctgcctccacggggacggccattcag

SEQ ID NO: 621517 - DNA, 75 bp, synthetic construct
  source 1..75: mol_type = other DNA
ccgctggcctcacgctttacttagcaatgccccggctccacaaacgacgaatattttcagccatcttcttttacc

SEQ ID NO: 621518 - DNA, 75 bp, synthetic construct
  source 1..75: mol_type = other DNA
cgttttattctcattacagacgcacctgagttgcggggcctataccagtttgttggggcggagctattccggtgg

SEQ ID NO: 621519 - DNA, 75 bp, synthetic construct
  source 1..75: mol_type = other DNA
tgcaaccggatggggtgctcgacatcaaagagaacattcattttcaggcgcgaaatcagcagattaagcacggat

SEQ ID NO: 621520 - DNA, 75 bp, synthetic construct
  source 1..75: mol_type = other DNA
acgcagatctacacgaaggtggccataaagccgttgcagaaggttcatgcgcggacgcacccggcagagaagcgg

SEQ ID NO: 621521 - DNA, 75 bp, synthetic construct
  source 1..75: mol_type = other DNA
gttctgccggccggaactctcaggcttaaaggtaaactgacgccggcgttattacagacacttatccgcgaataa

SEQ ID NO: 621522 - DNA, 75 bp, synthetic construct
  source 1..75: mol_type = other DNA
tacgacgataaaggtttttgtgccgatatcgtaaatctgattgtgaaaggaaaaattcatctggaagatcagtat

SEQ ID NO: 621523 - DNA, 75 bp, synthetic construct
  source 1..75: mol_type = other DNA
ttcctgggcggcggaagcgctggcgcgcacggggattggcgcaatcacgcttatcgatatggatgatgtgtgcgt

SEQ ID NO: 621524 - DNA, 75 bp, synthetic construct
  source 1..75: mol_type = other DNA
caaaagcggaagttatggcggagcgtattcgccagattaacccggagtgccgtgtaacggtggtggatgatttcg

SEQ ID NO: 621525 - DNA, 75 bp, synthetic construct
  source 1..75: mol_type = other DNA
cgctggtgtacccgcagtcagacggtactgtgtgtgcgatgaaagccacggcagaagggccgaagcggatggatt

SEQ ID NO: 621526 - DNA, 75 bp, synthetic construct
  source 1..75: mol_type = other DNA
cgacgaatattttcagccatcttcttttaccctccacgtcatcgttgttaatttggtttccgtgtctgttcctgg

SEQ ID NO: 621527 - DNA, 75 bp, synthetic construct
  source 1..75: mol_type = other DNA
tcctgccgcgtaccgcctgggcatcaggcaacgtcacggtgcttctgaaaggcctggaagtgccggtcatcatca

SEQ ID NO: 621528 - DNA, 75 bp, synthetic construct
  source 1..75: mol_type = other DNA
accgccacctttggttttgttgcggtttctcatgcgctgaagaagatgatggcgaaagcggcgcgtcaggggtaa

SEQ ID NO: 621529 - DNA, 75 bp, synthetic construct
  source 1..75: mol_type = other DNA
cggcacggatcgacaaaccgggcgcgtgccatatcttccggcactcgatggcgacgcagatgctggacaatggcg

SEQ ID NO: 621530 - DNA, 75 bp, synthetic construct
  source 1..75: mol_type = other DNA
atgaaaggagtaacccggcaaacggggattatcagcgatattgacgaaaccagcgttcgggtgcgggtcacgcta

SEQ ID NO: 621531 - DNA, 75 bp, synthetic construct
  source 1..75: mol_type = other DNA
cagcagccgctcgattgcatttggcaacacgaacaaaacggctgataccgacgtgaaacagcagtacctggagtt

SEQ ID NO: 621532 - DNA, 75 bp, synthetic construct
  source 1..75: mol_type = other DNA
cgcgtgccgagttaggtaataataccgaatacgacatgctggcattgcgtaaaactatcgacctgagcgaaagcc

SEQ ID NO: 621533 - DNA, 75 bp, synthetic construct
  source 1..75: mol_type = other DNA
cgctactacgatccccgccctcgcctttttggtatgcgcaccaatgtgtttcgccggatgcatcgcaaaattgtg

SEQ ID NO: 621534 - DNA, 75 bp, synthetic construct
  source 1..75: mol_type = other DNA
ttattcaaattaaggcctggggtccggttggctccgggctgttgtctattcagggcaccagcttcaactttgttg

SEQ ID NO: 621535 - DNA, 75 bp, synthetic construct
  source 1..75: mol_type = other DNA
acgcacgccgtatgtgattgccggactggaatacgcgcgccagctcggctgccgcacagtgggaatttcctgtaa

SEQ ID NO: 621536 - DNA, 75 bp, synthetic construct
  source 1..75: mol_type = other DNA
gaacctgacgcagcgccagtatgtggtggtgtggctggaatacctgacggcacagaactacagcgcggtcagcgt

SEQ ID NO: 621537 - DNA, 75 bp, synthetic construct
  source 1..75: mol_type = other DNA
cagggcaaatcaatctgctgcataaacttcccccttcagcaccaacggaagagataccgcagaccgattttcagt

SEQ ID NO: 621538 - DNA, 75 bp, synthetic construct
  source 1..75: mol_type = other DNA
cagggcaaatcaatctgctacataaacttccccttcagcaccaacggaagagataccgcagaccgattttcagtc

SEQ ID NO: 621539 - DNA, 75 bp, synthetic construct
  source 1..75: mol_type = other DNA
atgtggcttatgaagacattactaacatcggggtgtactaatcaacggggagcaggtcataacgtcgatgttagc

SEQ ID NO: 621540 - DNA, 75 bp, synthetic construct
  source 1..75: mol_type = other DNA
actgctgaactgaacagtgcgctgaaacaaattagcggcagccaggcaacaacggtatttaatgaagcacgagtg

SEQ ID NO: 621541 - DNA, 75 bp, synthetic construct
  source 1..75: mol_type = other DNA
cgaacggaaacgcgggggcagcagccggagagcacagagccggacggagccaccgtgtcgccggacaggctgaaa

SEQ ID NO: 621542 - DNA, 75 bp, synthetic construct
  source 1..75: mol_type = other DNA
gccaggtccacagatgatgaaggcagtgtatgacatggcccgcaagggtgcccgtgatgaaattcagacacagat

SEQ ID NO: 621543 - DNA, 75 bp, synthetic construct
  source 1..75: mol_type = other DNA
ataccgacgccagaaaaaccgccagtgctgttgaacagggcctgagccgccaggcgctggccgcacaaaaagccg

SEQ ID NO: 621544 - DNA, 75 bp, synthetic construct
  source 1..75: mol_type = other DNA
tgattcagaacgacggtatcaacggacaggcggggccgcagctgatgaaggcggtgtatgacatggcccgcaagg

SEQ ID NO: 621545 - DNA, 75 bp, synthetic construct
  source 1..75: mol_type = other DNA
cagcgggggattcaccggttcgggtgggaaatatgaacccgcaggtgtcgttcaccgtggcgaatttgttttcac

SEQ ID NO: 621546 - DNA, 75 bp, synthetic construct
  source 1..75: mol_type = other DNA
caggcagcggggctaacgttcaaccagaccagtgaagccctgaccgagcttatcaatgcaggtgtgcgtactggc

SEQ ID NO: 621547 - DNA, 75 bp, synthetic construct
  source 1..75: mol_type = other DNA
gaaagcggtgtatgagatggcccgcaagggggcacaggatgaactccggctgcagttgcgtgatggcggtatgtt

SEQ ID NO: 621548 - DNA, 75 bp, synthetic construct
  source 1..75: mol_type = other DNA
aaaaacacagcggtgcgaatgagaaaatcagccagcagcgtcgcgatttatggaaagcggaaaatcagtatgcgg

SEQ ID NO: 621549 - DNA, 75 bp, synthetic construct
  source 1..75: mol_type = other DNA
gctctctacctgtcagcagtacacgacacccggccgcccaggccggtggtgtacgtgtgttgccttctggccata

SEQ ID NO: 621550 - DNA, 75 bp, synthetic construct
  source 1..75: mol_type = other DNA
gacatgggcggatgaagacatgctgcgcggtgactggctggccgggctgaagtccggctggggggagtgggcgga

SEQ ID NO: 621551 - DNA, 75 bp, synthetic construct
  source 1..75: mol_type = other DNA
aagccgctaagtgaagaagttcgggaagtgctggaagaacgcgatgcgttatatcgtgaagtcgcgcatattatc

SEQ ID NO: 621552 - DNA, 75 bp, synthetic construct
  source 1..75: mol_type = other DNA
ggaaggcggaaagtcagttcgcggtactggcggaggcggcacaacgtcgcctgctgtccgtacaggagaaatccc

SEQ ID NO: 621553 - DNA, 75 bp, synthetic construct
  source 1..75: mol_type = other DNA
aggcggataaaaaatggcaatggtatcagagtcgcagtaaccggcgcggaaaaacgtcagcgtatctttctaatc

SEQ ID NO: 621554 - DNA, 75 bp, synthetic construct
  source 1..75: mol_type = other DNA
gcagcagggctgacgtttaatcaggcgagtgagtcactggcagcactggtgaacgccggtgtgcgtggtggtgaa

SEQ ID NO: 621555 - DNA, 75 bp, synthetic construct
  source 1..75: mol_type = other DNA
ggaggcaaccagccggattggtgtcggcaacctgtaccgcctgatgcgggggtatgcggatggcggttatgtggg

SEQ ID NO: 621556 - DNA, 75 bp, synthetic construct
  source 1..75: mol_type = other DNA
tattgcacagaatatggcggcaatgctgaccggcagtgaacagaactggcgcagtttcacccgttcggtgctgtc

SEQ ID NO: 621557 - DNA, 75 bp, synthetic construct
  source 1..75: mol_type = other DNA
caaaagcccgcggtctcaccgatcgtcaggcgaagcgtgagtctgaagagcagcgtcttcgtgacgtgtaccgcg

SEQ ID NO: 621558 - DNA, 75 bp, synthetic construct
  source 1..75: mol_type = other DNA
gggatgccattctggatatcggtcgtcctgagtcctcagcggatatgctcgccagtgcacagaaggcatttgatg

SEQ ID NO: 621559 - DNA, 75 bp, synthetic construct
  source 1..75: mol_type = other DNA
gctttcggaaaactgaccaccgaccctacgtcggggctgattgcgatggtgcgccagttccgtaacgtgacggca

SEQ ID NO: 621560 - DNA, 75 bp, synthetic construct
  source 1..75: mol_type = other DNA
gagcagattgcgtatgttgcacagctgcagcgttccggagacgaggccggagccttacaggcggcgaacgatatc

SEQ ID NO: 621561 - DNA, 75 bp, synthetic construct
  source 1..75: mol_type = other DNA
cgctggcgtacgcctggtaccagggagattccacgctttcagcgtttaataaaaccctggttctttcaggtaatc

SEQ ID NO: 621562 - DNA, 75 bp, synthetic construct
  source 1..75: mol_type = other DNA
ttcagggcgcatgggatgaccgtgaaaatgcccgcctcggtctttcagcagcgacactgcaggcagacctggaaa

SEQ ID NO: 621563 - DNA, 75 bp, synthetic construct
  source 1..75: mol_type = other DNA
aaaacgtcagcatttcttgccaatctccggggggcatgggagaagagagagaatgcgcgacttgggctttcagcc

SEQ ID NO: 621564 - DNA, 75 bp, synthetic construct
  source 1..75: mol_type = other DNA
atggccagagtcaggcgtcatttttccggtacggaaactgatgcgaaaaaaacagcggcagtcgttgaacagtcg

SEQ ID NO: 621565 - DNA, 75 bp, synthetic construct
  source 1..75: mol_type = other DNA
agctcgcactcactctcattgctgaccttgcaaacagcgaaaataacgaaacagaagaaaaaattttttataagg

SEQ ID NO: 621566 - DNA, 75 bp, synthetic construct
  source 1..75: mol_type = other DNA
tccgtggcgcatgggaggacagggcgaatgcgcaacttggtctttcagccgccacattgcaggcagatcttgaaa

SEQ ID NO: 621567 - DNA, 75 bp, synthetic construct
  source 1..75: mol_type = other DNA
atgtttcagtccagaggagtatggtttggcaactcacgagcgtcgtgtggtgtttttgacttagatggaacattg

SEQ ID NO: 621568 - DNA, 75 bp, synthetic construct
  source 1..75: mol_type = other DNA
gacaacccgctgctttacttttgccagcatcgctggcgagtaaccccgcgcggtgaactccagcaactggaatag

SEQ ID NO: 621569 - DNA, 75 bp, synthetic construct
  source 1..75: mol_type = other DNA
gccgttgttgccgattatagccattgcgttattgataaaaggtcgtgcggcacgctggccgatgagtctgcttct

SEQ ID NO: 621570 - DNA, 75 bp, synthetic construct
  source 1..75: mol_type = other DNA
ttggcaactcacgagcgtcgtgtggtgttttttgacttagatggaacattgcatcagcaggatatgttcggtagt

SEQ ID NO: 621571 - DNA, 75 bp, synthetic construct
  source 1..75: mol_type = other DNA
cagcggttgcgcgaggtgtatggtgataacccgcaggcgctggcgaaggcaacaggtgcgctgaaacagacatgg

SEQ ID NO: 621572 - DNA, 75 bp, synthetic construct
  source 1..75: mol_type = other DNA
acgatatcgccacgaaagggtttgatgagcagacccgtcgcctgaaagaaaacatggggacgctggaaacctggg

SEQ ID NO: 621573 - DNA, 75 bp, synthetic construct
  source 1..75: mol_type = other DNA
gcggattacaacacgctgatggcgtcggcgaaaaaggattatgaatcgacgctgaaaaaaccgaagtcgtcaggt

SEQ ID NO: 621574 - DNA, 75 bp, synthetic construct
  source 1..75: mol_type = other DNA
gctgcggcggcgaactttcattttgcgaccggcggctttacgggcacgggcggcaaatatgagcctgcggggata

SEQ ID NO: 621575 - DNA, 75 bp, synthetic construct
  source 1..75: mol_type = other DNA
ggtctgcggaggagcagcttcgtggaagctggatggccgggctgaaatccggctggggtgagtgggcggaaagtg

SEQ ID NO: 621576 - DNA, 75 bp, synthetic construct
  source 1..75: mol_type = other DNA
agtccggactgactgccgatcgtatgctgacgctctcaagagccgggcaggcagcagggctgacgtttaaccagg

SEQ ID NO: 621577 - DNA, 75 bp, synthetic construct
  source 1..75: mol_type = other DNA
agaggccgccacgaaacggcagttatctgagcaggaaaaatccctgctggctcatgagaaagagacgctggagta

SEQ ID NO: 621578 - DNA, 75 bp, synthetic construct
  source 1..75: mol_type = other DNA
gtgaaggtttaagcgaccctgcgaggttaggtaaccagttggcactgcgtgttcgccaagtggataaaggtaccg

SEQ ID NO: 621579 - DNA, 75 bp, synthetic construct
  source 1..75: mol_type = other DNA
atggctcaggaaatcgaattaaagtttattgttaatcacagtgccgttgaggcgctgcgtgaccatctcaatacg

SEQ ID NO: 621580 - DNA, 75 bp, synthetic construct
  source 1..75: mol_type = other DNA
atttctttgctggtattcgcgatatcgttggcggacgctccggtgcctacgaaaaagagctacgtaaagcgcggg

SEQ ID NO: 621581 - DNA, 75 bp, synthetic construct
  source 1..75: mol_type = other DNA
tacgaaacggtcgggcaaaacggcagtatgctgatggttagcgtcagcggtacggcggtgaaaacgcgtcgatga

SEQ ID NO: 621582 - DNA, 75 bp, synthetic construct
  source 1..75: mol_type = other DNA
atggcagccagattgaaatcgctctcgatcagggcgaggtgaaagccggtgaatttgctgaacctatctgtgagc

SEQ ID NO: 621583 - DNA, 75 bp, synthetic construct
  source 1..75: mol_type = other DNA
ctgcgtcacgctattgcgaccgggcaacgcattgaaattgaacatttccgtaatgaggcaaacaatcaggaaccg

SEQ ID NO: 621584 - DNA, 75 bp, synthetic construct
  source 1..75: mol_type = other DNA
gccactgttcagcaccgatttttatcgcgaaaaatggctggtggaactcgatggcagccgaattgaaatcgctct

SEQ ID NO: 621585 - DNA, 75 bp, synthetic construct
  source 1..75: mol_type = other DNA
taaacaaccgtctgacgtattggtggctctgggttatgcctcctgggagaaaggccaacttgaacaagagattct

SEQ ID NO: 621586 - DNA, 75 bp, synthetic construct
  source 1..75: mol_type = other DNA
ccatgcctgctctccaggatccgattttccgtcgttcggtggtctacatttgcgaacataatccagagggtgcaa

SEQ ID NO: 621587 - DNA, 75 bp, synthetic construct
  source 1..75: mol_type = other DNA
ctggaaaagctgaagatcacgccggagccgcgtgatgaatcaatccgtctggataaaccggttatgctcggcggt

SEQ ID NO: 621588 - DNA, 75 bp, synthetic construct
  source 1..75: mol_type = other DNA
gattcgtgaaggtgatacggtgcggggttcggcattaatcgggcagaattttaccagcaacggcagaaatgccct

SEQ ID NO: 621589 - DNA, 75 bp, synthetic construct
  source 1..75: mol_type = other DNA
gtgcccttctttccacgcatactgggcgctgttgcttttttgaaccaggaaacagaacctctgacaatgaattta

SEQ ID NO: 621590 - DNA, 75 bp, synthetic construct
  source 1..75: mol_type = other DNA
atgtacttgaaacgctcggcaccgataaacaaccgtctgacgtattggtggcgttgggttacgcctcctgggata

SEQ ID NO: 621591 - DNA, 75 bp, synthetic construct
  source 1..75: mol_type = other DNA
ccaccaccattctgcatgttgcggcaaaagccgatgtggaacaggggctggaagcggcgctggagctggcgttag

SEQ ID NO: 621592 - DNA, 75 bp, synthetic construct
  source 1..75: mol_type = other DNA
cgtcgaacaggcgcaggaagtgatggctgcggcaccgttgcaatacgttggcgtgttccgcaaccacaatattgc

SEQ ID NO: 621593 - DNA, 75 bp, synthetic construct
  source 1..75: mol_type = other DNA
actgttaaacggtcaatcgcttagcaatgtcctgctggcgggtggcttaggcgcagataactgcgtggaagcggc

SEQ ID NO: 621594 - DNA, 75 bp, synthetic construct
  source 1..75: mol_type = other DNA
cccatcgtcagccaaatcgcgccacagccgattttatgtaaagactttattatcgacccttaccagatctatctg

SEQ ID NO: 621595 - DNA, 75 bp, synthetic construct
  source 1..75: mol_type = other DNA
ggggttctgtgtccttaagtacgttatggcgagattactgggggcgtagcggcagcagtaaggattatcagttga

SEQ ID NO: 621596 - DNA, 75 bp, synthetic construct
  source 1..75: mol_type = other DNA
cgtcaaaaggtgtgatccgtgatgatttcgatcctgcacgtattgcctccatttataaacattacgcttcagcaa

SEQ ID NO: 621597 - DNA, 75 bp, synthetic construct
  source 1..75: mol_type = other DNA
gctacagggtgcacgcacggcgtttattctggagtgtaaaaaagcatcaccgtcaaaaggcgtgatccgcgatga

SEQ ID NO: 621598 - DNA, 75 bp, synthetic construct
  source 1..75: mol_type = other DNA
tggcagccattggcctggtccgtcatacgctgatgctgttcggtggcattgtgccgcgtaaagcgagcactcact

SEQ ID NO: 621599 - DNA, 75 bp, synthetic construct
  source 1..75: mol_type = other DNA
tgatatccatctctcccgccacgccgctgagctgaaaagtgttttttgccagccgttgggcgatcgctatcgtga

SEQ ID NO: 621600 - DNA, 75 bp, synthetic construct
  source 1..75: mol_type = other DNA
aaagagcaagtgttggcagccatcggcctggttcgtcatacgctgatgctgttcggtggcattgtcccacgtaaa

SEQ ID NO: 621601 - DNA, 75 bp, synthetic construct
  source 1..75: mol_type = other DNA
gccgtcgcccacagtctggagatgggtgtgctgaccgaagtcagtaatgaagaggaactggagcgcgccattgca

SEQ ID NO: 621602 - DNA, 75 bp, synthetic construct
  source 1..75: mol_type = other DNA
tatgtggtctgacgcgtggggaagatgctaaagcagcctatgacgcgggtgcgatttacggtggattgatatttg

SEQ ID NO: 621603 - DNA, 75 bp, synthetic construct
  source 1..75: mol_type = other DNA
gtcatcaacatcagggaaatgaaacgacagctggggcgaatttgacctggaacgcgccggttgcgacagtgaatg

SEQ ID NO: 621604 - DNA, 75 bp, synthetic construct
  source 1..75: mol_type = other DNA
aaccaccatccctgtcaaaggcgataatttcctctctccctggatagctaaagatactcgttattacaaattggg

SEQ ID NO: 621605 - DNA, 75 bp, synthetic construct
  source 1..75: mol_type = other DNA
aagtccatcagctcaacggaggtctacacgaaggtgtttgcactggatgtggctgcccggcaccgggtgcagttt

SEQ ID NO: 621606 - DNA, 75 bp, synthetic construct
  source 1..75: mol_type = other DNA
cgctgaaggtcctgcagagcctgatggggcataagtccatcagctcaacggaagtctacacgaaggtgtttgcgc

SEQ ID NO: 621607 - DNA, 75 bp, synthetic construct
  source 1..75: mol_type = other DNA
tgatcgttttcgacgatgcggatctcgatctcgccgccgatatcgccatgatggcgaacttcttcagctccggtc

SEQ ID NO: 621608 - DNA, 75 bp, synthetic construct
  source 1..75: mol_type = other DNA
atattgtggcgcaggtgaaaaacgtaactcagttgattgctcagattagccattcaacgctggaacaagctgatg

SEQ ID NO: 621609 - DNA, 75 bp, synthetic construct
  source 1..75: mol_type = other DNA
attggcactattacttcgctgattaacgatattgcttttcagaccaatatcctcgcgctgaatgcggcggtggaa

SEQ ID NO: 621610 - DNA, 75 bp, synthetic construct
  source 1..75: mol_type = other DNA
cagccgcataacatggtgcgccatccggatatgccgaaagcggcctttgctgatatgtggtacaccctgaaacag

SEQ ID NO: 621611 - DNA, 75 bp, synthetic construct
  source 1..75: mol_type = other DNA
ggcaaccaactatattgctgcggttggcggtactgacaacctgaaagccattgacgcctgtattactcgtctgcg

SEQ ID NO: 621612 - DNA, 75 bp, synthetic construct
  source 1..75: mol_type = other DNA
cggataaaatcgtcgtatcgccagccgcagggacaatcgtgaaaatcttcaataccaaccacgcgttctgcctgg

SEQ ID NO: 621613 - DNA, 75 bp, synthetic construct
  source 1..75: mol_type = other DNA
gatgggggttgtcttcttcgctatctacttcgtggtgttcagtttggttatccgcatgttcaacctgaaaacgcc

SEQ ID NO: 621614 - DNA, 75 bp, synthetic construct
  source 1..75: mol_type = other DNA
gtatttaacgtgttgccgggcgtgggcgcggagaccgggcaatatctgaccgagcatccgggcattgccaaagtg

SEQ ID NO: 621615 - DNA, 75 bp, synthetic construct
  source 1..75: mol_type = other DNA
tttgtttaaagctacaaaaagatggtgggattttttatgggtgtgggggaacttttagttattgggtcgtgcctc

SEQ ID NO: 621616 - DNA, 75 bp, synthetic construct
  source 1..75: mol_type = other DNA
gtacctccttgaccgtataggagagcttaaatcgggcgatgcctgtgtcgcagaatatcagcaagcgggtcgtgg

SEQ ID NO: 621617 - DNA, 75 bp, synthetic construct
  source 1..75: mol_type = other DNA
gccagtgccgccaacgatattcgcaagctgatcgatgccagtgctgataaggtgcaatccggttcgcagcaggta

SEQ ID NO: 621618 - DNA, 75 bp, synthetic construct
  source 1..75: mol_type = other DNA
ccgcgggagactcacaatgagtactacaacccagaatatcccgtggtatcgccatctcaaccgtgcacaatggcg

SEQ ID NO: 621619 - DNA, 75 bp, synthetic construct
  source 1..75: mol_type = other DNA
ggctgcacggcaccgggtgcagtttttgatgcctgagtccgatgcggtcacaatgctgaaaaacaggcaggcata

SEQ ID NO: 621620 - DNA, 75 bp, synthetic construct
  source 1..75: mol_type = other DNA
atgcccgccggccagcagactcaccggctggttccgctctcggactcctggtacgtcagccagctgcagacgata

SEQ ID NO: 621621 - DNA, 75 bp, synthetic construct
  source 1..75: mol_type = other DNA
actgatagccgcaccggcgcacagctcggcaatagccagttggttgatagtcttgtgcatgatgggttgtgggat

SEQ ID NO: 621622 - DNA, 75 bp, synthetic construct
  source 1..75: mol_type = other DNA
tcgggcataccagcatgaaagacagcgtggttcatgacggactatgggatgctttcaatgattaccacatgggca

SEQ ID NO: 621623 - DNA, 75 bp, synthetic construct
  source 1..75: mol_type = other DNA
gacgttcgtggtgatcctgctgattgggctggatatgccttctcgcgttcagcgttggttgcgcccggaagcgtt

SEQ ID NO: 621624 - DNA, 75 bp, synthetic construct
  source 1..75: mol_type = other DNA
gactggttcagctctcggactcctggtacgtcagccagctgcagacgatagtggccacactgaaaatccccatgg

SEQ ID NO: 621625 - DNA, 75 bp, synthetic construct
  source 1..75: mol_type = other DNA
gcgaccggagaacgtaatagtgttgagcatctgaatcgcagcgatgagctggggctgacattacgtgcggtaggg

SEQ ID NO: 621626 - DNA, 75 bp, synthetic construct
  source 1..75: mol_type = other DNA
ctggcggccatgctttggtttgttgctgccccggtggtgacgtatatcctctgtgcgttagtggtattgttggca

SEQ ID NO: 621627 - DNA, 75 bp, synthetic construct
  source 1..75: mol_type = other DNA
ggattggggaagcggttgccgccgctgctgctgacggtgtgacgttctctgttcttgtcacaccacatacattcc

SEQ ID NO: 621628 - DNA, 75 bp, synthetic construct
  source 1..75: mol_type = other DNA
aacggaggtctacacgaaggtgtttgcactggatgtggctgcacggcaccgggtgcagtttgcgatgcctgagtc

SEQ ID NO: 621629 - DNA, 75 bp, synthetic construct
  source 1..75: mol_type = other DNA
tgaaaatccccatggaacggcgtaataaacgaacaggcaggacagagaaagtgcggatctgggaagtgacggaca

SEQ ID NO: 621630 - DNA, 75 bp, synthetic construct
  source 1..75: mol_type = other DNA
tttcggggctggaggacatcagccgcgatttgcagcttctgagtggtgcagaaaataaccgggtgctgcgtgagg

SEQ ID NO: 621631 - DNA, 75 bp, synthetic construct
  source 1..75: mol_type = other DNA
ccgataggcgcttccggttgccgaatcctggtttctctggttcatgaaatggtgaaacgtaatgcccgcaaaggg

SEQ ID NO: 621632 - DNA, 75 bp, synthetic construct
  source 1..75: mol_type = other DNA
tatgagtcgtgcgccacatgttttgactgatagccgcaccggagcacagcttggcgatagccaattggttgatag

SEQ ID NO: 621633 - DNA, 75 bp, synthetic construct
  source 1..75: mol_type = other DNA
ctttgcgtgctgattgttcagtcgcaacgctttatcagtctgattaaaggagtacgtagccgtgataaaacgtaa

SEQ ID NO: 621634 - DNA, 75 bp, synthetic construct
  source 1..75: mol_type = other DNA
cggtggtgggggcgctgattattcaggggatgaacaccggaattttgctttcgggctttccgccagagatgaacc

SEQ ID NO: 621635 - DNA, 75 bp, synthetic construct
  source 1..75: mol_type = other DNA
gtgctttgcgtgctgattgttcagtcgcaacgctttatcagtctgattaaaggggtacgtaaccgtgataaaacg

SEQ ID NO: 621636 - DNA, 75 bp, synthetic construct
  source 1..75: mol_type = other DNA
cctgttccgtggccctcagccacacctccaacgggctggctgaaatgtaacggtgcagcattttcttctgaaatg

SEQ ID NO: 621637 - DNA, 75 bp, synthetic construct
  source 1..75: mol_type = other DNA
cctgttccgtggccctcagccacacctccaaccgggtggctgaaatgtaacggtgcagcattttcttctgaaatg

SEQ ID NO: 621638 - DNA, 75 bp, synthetic construct
  source 1..75: mol_type = other DNA
cctgttccgtggccctcagccacaccaccaaccggttggctgaaatgtaacggtgcagcattttcttctgaaatg

SEQ ID NO: 621639 - DNA, 75 bp, synthetic construct
  source 1..75: mol_type = other DNA
cgcgcatttgccagcgttggtgtagatccggcattgatgggaattgcgccggtgtatgcgacccgccgttgcctg

SEQ ID NO: 621640 - DNA, 75 bp, synthetic construct
  source 1..75: mol_type = other DNA
gaatttacccgtgcttgcccgcattcgcgcatttgccagcgttggtgtagatccggcattaatgggcattgcgcc

SEQ ID NO: 621641 - DNA, 75 bp, synthetic construct
  source 1..75: mol_type = other DNA
cctgttccgtggccctcagccacaccgccaactggatggctgaaatgtaacggtgcagcattttcttctgaaatg

SEQ ID NO: 621642 - DNA, 75 bp, synthetic construct
  source 1..75: mol_type = other DNA
cgccgccgaaaaggcgctttcgctggccaacaggaatgccgcagctggtagcactattgctggtgctgctggtcg

SEQ ID NO: 621643 - DNA, 75 bp, synthetic construct
  source 1..75: mol_type = other DNA
acggcaggttgttgctttgggccgtcaacagctggctgttcagcgtctggaagaacggcagaaaaagctgcagca

SEQ ID NO: 621644 - DNA, 75 bp, synthetic construct
  source 1..75: mol_type = other DNA
gctacggcagaacgccgatgaaacccgactggcactggagcgacagcaaaaatctctgaaacacctgggtgaaca

SEQ ID NO: 621645 - DNA, 75 bp, synthetic construct
  source 1..75: mol_type = other DNA
aggctctgcactacctgttggtgtgcctgttccatggccctcagccacaccgccaacagggtggctgaaatgtaa

SEQ ID NO: 621646 - DNA, 75 bp, synthetic construct
  source 1..75: mol_type = other DNA
cctaggcattaaaggtggaagtgcctttggcctgatcagcaaggccatcggcagtgttggtaaggggattatgtg

SEQ ID NO: 621647 - DNA, 75 bp, synthetic construct
  source 1..75: mol_type = other DNA
ggctccgcttcatccgttcagtctgcctgcgagggcataccagacgcagccagtgaaggctgacagcccgccgtc

SEQ ID NO: 621648 - DNA, 75 bp, synthetic construct
  source 1..75: mol_type = other DNA
agccaccactacagctgccgggctggcaatgggtgcgccggttttggctgcagtgaaaagctacgccagcatgga

SEQ ID NO: 621649 - DNA, 75 bp, synthetic construct
  source 1..75: mol_type = other DNA
acagcctggtagccccgcatttctggcaggtagtgcttcaggatgggcgtttgttcggtagccctatcgacattc

SEQ ID NO: 621650 - DNA, 75 bp, synthetic construct
  source 1..75: mol_type = other DNA
ttgttcggtagccccatcgacattcttaaccgtgcagcacccgttgcgctgttggcgattggcatgacgctggtg

SEQ ID NO: 621651 - DNA, 75 bp, synthetic construct
  source 1..75: mol_type = other DNA
ttgttcggtagccccatcgacattcttaatcgcgctgccccggttgcgctactggcgattggcatgacgctggtg

SEQ ID NO: 621652 - DNA, 75 bp, synthetic construct
  source 1..75: mol_type = other DNA
ggcatgcactatacagggaatgcaaccagtagcggtcaatgggatgattattctcagtcaaaaatctatatccgt

SEQ ID NO: 621653 - DNA, 75 bp, synthetic construct
  source 1..75: mol_type = other DNA
atgctcacctacgtgttgagtgggctgtgtgcggcaattgcgggcattatcgtggctgcggatattcgcggtgcc

SEQ ID NO: 621654 - DNA, 75 bp, synthetic construct
  source 1..75: mol_type = other DNA
cggtactgacgcttctcctcttctggctgttgacccgcaaaacggcactggggatgtttatcgaagccgttggta

SEQ ID NO: 621655 - DNA, 75 bp, synthetic construct
  source 1..75: mol_type = other DNA
ttttactggcgctttgtggagctgggaacgataaacatgcccgcgcatccattcattcgcccggctttcgatacg

SEQ ID NO: 621656 - DNA, 75 bp, synthetic construct
  source 1..75: mol_type = other DNA
tcagcaccctgaaagagctggcgcgccgctggaagccggaaattctggatggttttaccaagcaggggacgcatc

SEQ ID NO: 621657 - DNA, 75 bp, synthetic construct
  source 1..75: mol_type = other DNA
aacggttatctcgatgacacaccatttaagggaatatcaccactaagagaatcgcgagtggttcctgacccgcta

SEQ ID NO: 621658 - DNA, 75 bp, synthetic construct
  source 1..75: mol_type = other DNA
aatgcacaggtagccctgttaaatacacagctaagcgagtttgccccaaccatgccccaaaacaaggcgacgcaa

SEQ ID NO: 621659 - DNA, 75 bp, synthetic construct
  source 1..75: mol_type = other DNA
aaacgcgattcgaattgtggtatgggcagtggtttctcgacaccacagaggggacaccgtggattcagtccgtac

SEQ ID NO: 621660 - DNA, 75 bp, synthetic construct
  source 1..75: mol_type = other DNA
atgcgataccgacgagaagatgctgacggcgattacactttcgggcagggtgacgacaccttccttatcgacagc

SEQ ID NO: 621661 - DNA, 75 bp, synthetic construct
  source 1..75: mol_type = other DNA
cgctgctggcctttggagagtttatttttactcaatcgtacagactcctggtcgcccctgatgggcaaaacatct

SEQ ID NO: 621662 - DNA, 75 bp, synthetic construct
  source 1..75: mol_type = other DNA
aggtgtttatcgaagccggcgtgtcggcgcgtgactatgatgcggtgaaaaacagcatggcggtacgagccctga

SEQ ID NO: 621663 - DNA, 75 bp, synthetic construct
  source 1..75: mol_type = other DNA
gggactggagctgacagaagcctggtcggtggcaaaagttctgggtgtggaagataaagtggagttaccgctgtt

SEQ ID NO: 621664 - DNA, 75 bp, synthetic construct
  source 1..75: mol_type = other DNA
tggcaattgataagcaacaagggctttcatgcacaatcaccttcggtaaagagattgatgaaagtaaaaattata

SEQ ID NO: 621665 - DNA, 75 bp, synthetic construct
  source 1..75: mol_type = other DNA
cgggaaaatcttggggttcctgacacagcaaaaaacagacgcattgcaggtgagctacgcgcctctgtttgttac

SEQ ID NO: 621666 - DNA, 75 bp, synthetic construct
  source 1..75: mol_type = other DNA
ttgggaggatattgatttaaaagctaaaacaatgactatccgtcgtaattatacaaaactcggggagttctctct

SEQ ID NO: 621667 - DNA, 75 bp, synthetic construct
  source 1..75: mol_type = other DNA
cagtagttacggttaattactacatgacgacaattgcaggaatgtttcaatttgcggctgataacggctatatcg

SEQ ID NO: 621668 - DNA, 75 bp, synthetic construct
  source 1..75: mol_type = other DNA
tcctctctttcaatacgacgctggataccacgacccgacgtgtcatgttttccgctgaaatcgacactctttatg

SEQ ID NO: 621669 - DNA, 75 bp, synthetic construct
  source 1..75: mol_type = other DNA
atgtggtggtcctttcccggcgctcccgcgatggcgggatggaatccggtgtgcatatccggggtgttaatccgg

SEQ ID NO: 621670 - DNA, 75 bp, synthetic construct
  source 1..75: mol_type = other DNA
ggcagcaacgagctggtatccatttttcaacaatgtcactgaatcgccacgggtttaacagacacctcagagtca

SEQ ID NO: 621671 - DNA, 75 bp, synthetic construct
  source 1..75: mol_type = other DNA
cagcagcctagaggttcgagacgatattgagcgccgtgcttatgaaatcgcactcgtatctctggaagtagagcc

SEQ ID NO: 621672 - DNA, 75 bp, synthetic construct
  source 1..75: mol_type = other DNA
gtgaactccggcactgaagcgaccatgagcgccatccgcctggcccgtggttttaccggtcgcgacaaaatcatt

SEQ ID NO: 621673 - DNA, 75 bp, synthetic construct
  source 1..75: mol_type = other DNA
cttccgtgtggcgttagctggcgcgcaggattattacggcgtggtgccggatttaacctgcctgggcaaaattat

SEQ ID NO: 621674 - DNA, 75 bp, synthetic construct
  source 1..75: mol_type = other DNA
gtttgtgcgtcctgcctttgatgtgcgcagtgaacaggcagcccgggtggcgattgaccggatgaaccgggcaat

SEQ ID NO: 621675 - DNA, 75 bp, synthetic construct
  source 1..75: mol_type = other DNA
agccgcttctacatgaaaaatgcctctcacgatcccagcgaccaactcttcctgatgcaatatttttactggtaa

SEQ ID NO: 621676 - DNA, 75 bp, synthetic construct
  source 1..75: mol_type = other DNA
cagaccatagctggggtggtttcgagggcggaattaaccgtttctatggcggttatcgtaccaatgatggcaccg

SEQ ID NO: 621677 - DNA, 75 bp, synthetic construct
  source 1..75: mol_type = other DNA
gatatgactctcggttggatcgtctggcagcaacgagcaggtatccatttttcaacaatgtcacaacaagaggtg

SEQ ID NO: 621678 - DNA, 75 bp, synthetic construct
  source 1..75: mol_type = other DNA
tacgtcattcccaatacccgcgacattatgactgcgctgaaggtgcagaacttaagcggcaactttcgttatagc

SEQ ID NO: 621679 - DNA, 75 bp, synthetic construct
  source 1..75: mol_type = other DNA
atgaaattaatcactgcaccatgcagagcattacttgccctgcctttttgctacgctttttctgcacttggcgaa

SEQ ID NO: 621680 - DNA, 75 bp, synthetic construct
  source 1..75: mol_type = other DNA
atgaaatttaatagtacgccttgcagagcattagttgctctgccgttttgctacgcgttttttgcggccgctgat

SEQ ID NO: 621681 - DNA, 75 bp, synthetic construct
  source 1..75: mol_type = other DNA
tgcagtgagctggacgccgcattccgggtggcggatgaacttgaccggaaacggggattaccgccccggaacccg

SEQ ID NO: 621682 - DNA, 75 bp, synthetic construct
  source 1..75: mol_type = other DNA
ccaccggggccggtaaatccgccacgttatgtgcgcagttatcgcagctgatggcggtccgccgtccgcgcctgt

SEQ ID NO: 621683 - DNA, 75 bp, synthetic construct
  source 1..75: mol_type = other DNA
ggatgcgcttcaggacagtctggatgagcatgatgataacccgtgggtggtgcagtttttttgtcaggatgagga

SEQ ID NO: 621684 - DNA, 75 bp, synthetic construct
  source 1..75: mol_type = other DNA
atgtctctcttttctgattacagttccagtagtgaaatgcacaataatttaacaattgattattatttagcactt

SEQ ID NO: 621685 - DNA, 75 bp, synthetic construct
  source 1..75: mol_type = other DNA
tgctcacaaactggtggaagaaggcctggctgcccaggccgtggatgagagcgacctgccggatatcgacacgga

SEQ ID NO: 621686 - DNA, 75 bp, synthetic construct
  source 1..75: mol_type = other DNA
agccgcagccggtggctgatgaaccggcgttgccgtcacagaaaaagagcggcaggctgacgcaggacggcgtgt

SEQ ID NO: 621687 - DNA, 75 bp, synthetic construct
  source 1..75: mol_type = other DNA
gtttaatccagccccgcagatggccgactcgccccggcagttctggcaacagatggcgcagcaggatgacacgcc

SEQ ID NO: 621688 - DNA, 75 bp, synthetic construct
  source 1..75: mol_type = other DNA
gagcgtcttgagcaaatccgtgacacggtggaggatgccctgcaggacagctttgatgaatacgacacccacccc

SEQ ID NO: 621689 - DNA, 75 bp, synthetic construct
  source 1..75: mol_type = other DNA
ggatgcacatcacctggtggcacagggacagaccctgcaggatgtggatgaacagacactgccggatattgatga

SEQ ID NO: 621690 - DNA, 75 bp, synthetic construct
  source 1..75: mol_type = other DNA
cgtcacgctggccaccttgcgggactatatcctgccggcggcacggggcacggcgtttaccgaagcctggctggg

SEQ ID NO: 621691 - DNA, 75 bp, synthetic construct
  source 1..75: mol_type = other DNA
atgggattttcattattccgctcacgccggaaagcgcaggcggtttctgctgaaaaaacggatgaaaacaaggct

SEQ ID NO: 621692 - DNA, 75 bp, synthetic construct
  source 1..75: mol_type = other DNA
agcgccagctcctgctcagcgcgaccaaagcgccaggaaaatataccgaaggcgtggtgctttcaccgcgtgttg

SEQ ID NO: 621693 - DNA, 75 bp, synthetic construct
  source 1..75: mol_type = other DNA
gtgcgcaacggccagtcgctgatggaagagtgctcccctgccgttagcaggctggcggcagcaatcattacaagg

SEQ ID NO: 621694 - DNA, 75 bp, synthetic construct
  source 1..75: mol_type = other DNA
tggtgagtgtggcgatgaatgacgatcagccagtcgcggtacttaagcgtctgagcgacctgctgatcgacaata

SEQ ID NO: 621695 - DNA, 75 bp, synthetic construct
  source 1..75: mol_type = other DNA
gagcgatgattccgttgctgaacaactgaaatcagccaccactgcagaagaactgcgcgcactgctgatgggcga

SEQ ID NO: 621696 - DNA, 75 bp, synthetic construct
  source 1..75: mol_type = other DNA
gttcaggtgtttcagttcccggaaggcgtcacctggggtgacggtcaggtggcgtacgtggcgatcggtattgcc

SEQ ID NO: 621697 - DNA, 75 bp, synthetic construct
  source 1..75: mol_type = other DNA
tctggcttttcagtaggcgcggttgttgccgcacaggtttatagtctggttgtaccggtatggggatggagaaca

SEQ ID NO: 621698 - DNA, 75 bp, synthetic construct
  source 1..75: mol_type = other DNA
acgaactggcagagtgggttctgggccaggaaagtgtacttgctccactggtttttgccaccgccagcactgacg

SEQ ID NO: 621699 - DNA, 75 bp, synthetic construct
  source 1..75: mol_type = other DNA
accgcccagggtgcagatgctgaacaggcgctgaaagccattggcgacgctatcgctgctggtcttggggagggc

SEQ ID NO: 621700 - DNA, 75 bp, synthetic construct
  source 1..75: mol_type = other DNA
cgttgagcaaagcgcgtcagtatgtcgaagagttcgacggtaacatcgccagctttatcttttctggcaagccgg

SEQ ID NO: 621701 - DNA, 75 bp, synthetic construct
  source 1..75: mol_type = other DNA
gtggtctctccgctggaagatattctcgacgatgtattgtcccccctggacgatgtgctgcaaacgctgacggac

SEQ ID NO: 621702 - DNA, 75 bp, synthetic construct
  source 1..75: mol_type = other DNA
ctggagggtatcatgggcggcggcgtactgaccgatgctctcggcgaggtcgggcaagtcgcctcgcagatttac

SEQ ID NO: 621703 - DNA, 75 bp, synthetic construct
  source 1..75: mol_type = other DNA
taccgtgacaaacctcgatggcaccggcaaaccggcaaatggacgtagtctgatgaaagttgtagcacttggcgt

SEQ ID NO: 621704 - DNA, 75 bp, synthetic construct
  source 1..75: mol_type = other DNA
accgcccagggggcggatgctgaacaggcactgaaggcaattggcgacgccatcgccgcaggtcttggggagggc

SEQ ID NO: 621705 - DNA, 75 bp, synthetic construct
  source 1..75: mol_type = other DNA
cgcggcaaatcggtattgattattactgttgccgatattatgtcggcgatgaaagataccttcagaaatagcggc

SEQ ID NO: 621706 - DNA, 75 bp, synthetic construct
  source 1..75: mol_type = other DNA
ctggttcacgccgccggtgtcggatccggaaaacggcgtgtggtggctggacgggcttccgcatgccgccgtggt

SEQ ID NO: 621707 - DNA, 75 bp, synthetic construct
  source 1..75: mol_type = other DNA
aaaaaccgtattcagcagcctaaaagaatcgttctcatcaagcagcgaaggcactgcgcaggttaagaaagccgt

SEQ ID NO: 621708 - DNA, 75 bp, synthetic construct
  source 1..75: mol_type = other DNA
tgtagccctcaaaagtgctgcaaaaataggtgttaaatcagcagcatccacagcggcaagagcggtccctatcat

SEQ ID NO: 621709 - DNA, 75 bp, synthetic construct
  source 1..75: mol_type = other DNA
cccagcacggaaggccaatggaagttattgcatctgctgaaagagcagctcgaagagatggggcttatcaatgtg

SEQ ID NO: 621710 - DNA, 75 bp, synthetic construct
  source 1..75: mol_type = other DNA
caaaatgtgtgaagaggatacgacatttgattatcagagagatgattttgcgaagtcactctttcatacgttaaa

SEQ ID NO: 621711 - DNA, 75 bp, synthetic construct
  source 1..75: mol_type = other DNA
gaagccagaaatgtgctttttattgaggatacaggccccgtttatctggagaagttattcagtaagatggttagc

SEQ ID NO: 621712 - DNA, 75 bp, synthetic construct
  source 1..75: mol_type = other DNA
catttaacacaaacactggtcgatgggagggacaattctctgacgaaacattggcgcggattaataaaattcaga

SEQ ID NO: 621713 - DNA, 75 bp, synthetic construct
  source 1..75: mol_type = other DNA
agcgcagttagtcttaacacaagtggagcagcgccaagcgcgcgtgacagcgacccgcgagacctacgcgaagtg

SEQ ID NO: 621714 - DNA, 75 bp, synthetic construct
  source 1..75: mol_type = other DNA
agacaaagcaaaagaaacggagctttcatcaagagttggtgctcaatcgttgggtgatgcggttttttaaaggca

SEQ ID NO: 621715 - DNA, 75 bp, synthetic construct
  source 1..75: mol_type = other DNA
gtggaggatggcgtgctgctgccggaacagcggatggtcagcacaggacgtgctgttgtgtatggtggtgcgaat

SEQ ID NO: 621716 - DNA, 75 bp, synthetic construct
  source 1..75: mol_type = other DNA
tggcgacgttaccggctaacgtccctggcaatatcccggcgattggctttatttctcatgtggatacctcaccgg

SEQ ID NO: 621717 - DNA, 75 bp, synthetic construct
  source 1..75: mol_type = other DNA
aggctatagcaatcagccaggctatggcgggcttttcgtctgcagcgccagcaccgaaaaccccacagcaggagc

SEQ ID NO: 621718 - DNA, 75 bp, synthetic construct
  source 1..75: mol_type = other DNA
gcactctccgctggcgaaaaagttgctgccggtagcgctgcggctggcactggtgtcggagcagcaaaagtagtt

SEQ ID NO: 621719 - DNA, 75 bp, synthetic construct
  source 1..75: mol_type = other DNA
ttgttcgcaccttccctaaataacgagctggcagcatacaatgctgaaaatgataaaacagcaaaagaccgggct

SEQ ID NO: 621720 - DNA, 75 bp, synthetic construct
  source 1..75: mol_type = other DNA
ttcttagcccaccactgcgtaacgtgcgtgagcaggacaaactgtggtgtggcattagtgatggtgcgattgacg

SEQ ID NO: 621721 - DNA, 75 bp, synthetic construct
  source 1..75: mol_type = other DNA
cagacccgcctactgatttacggcttggcaggaaacctcatcgaggagctggacgcagccactggagacgtgctg

SEQ ID NO: 621722 - DNA, 75 bp, synthetic construct
  source 1..75: mol_type = other DNA
gatggcctgagccaaagctacaccatcaactacatgaacaactggttggtgaaggccgggcaaacctccagaagc

SEQ ID NO: 621723 - DNA, 75 bp, synthetic construct
  source 1..75: mol_type = other DNA
cctggttgtggctggccacgcagaacctgaaagactatccggatgtcgccgagaagatgctgaatatggccgagt

SEQ ID NO: 621724 - DNA, 75 bp, synthetic construct
  source 1..75: mol_type = other DNA
ccatcctcgacgaaatcccgatgatggtcgaggaagggctgagcagttttaaactctatttaacctatcaataca

SEQ ID NO: 621725 - DNA, 75 bp, synthetic construct
  source 1..75: mol_type = other DNA
ctggcacaaattgccggtaacgccccgctctatatcgtgcacctgtctaacggcttaggtctggattatctgcgt

SEQ ID NO: 621726 - DNA, 75 bp, synthetic construct
  source 1..75: mol_type = other DNA
gattatcgacccacgtcagagccaacaaattcaacatcgccatctccacgacaacgccgactattcgccctggga

SEQ ID NO: 621727 - DNA, 75 bp, synthetic construct
  source 1..75: mol_type = other DNA
ggcatcagcgatggtgcgattgacgtggtggcgaccgatcactgcaccttctcaatggcccagcgccagcagatt

SEQ ID NO: 621728 - DNA, 75 bp, synthetic construct
  source 1..75: mol_type = other DNA
cgaggaaggactgagcagttttaaactctatttaacctatcaatacaaactcaacgatgacgaggttttgcaggc

SEQ ID NO: 621729 - DNA, 75 bp, synthetic construct
  source 1..75: mol_type = other DNA
cgttggatagagcgccggatcttcaacgaaatcggctggctctccagtgtctccgacgcctatagcaatcagtca

SEQ ID NO: 621730 - DNA, 75 bp, synthetic construct
  source 1..75: mol_type = other DNA
aagccaaatggtgcaaccgtcagctatgagtacgacgctgcacatcggctggtggcggaaacagatgcacagggc

SEQ ID NO: 621731 - DNA, 75 bp, synthetic construct
  source 1..75: mol_type = other DNA
cggaacgcgcttttaaaaatacggctgatgattttgtagacctagccagttcccagagacgtaagcatattcttg

SEQ ID NO: 621732 - DNA, 75 bp, synthetic construct
  source 1..75: mol_type = other DNA
gtgaaggaagccgggtgcctggcccacgcccgccgaaaaatccatgacgaggatgtgcgccgtccgacagaaatg

SEQ ID NO: 621733 - DNA, 75 bp, synthetic construct
  source 1..75: mol_type = other DNA
gccacaccactttttaccaactccatccatgcaacaaatccactacactggataaagttactaaattttacttaa

SEQ ID NO: 621734 - DNA, 75 bp, synthetic construct
  source 1..75: mol_type = other DNA
ttttcctgccgctggcagcgtctgctggcacaacaatttataccgattctcagcacctccccgttaatactcccg

SEQ ID NO: 621735 - DNA, 75 bp, synthetic construct
  source 1..75: mol_type = other DNA
cagcgatatgaccattttattgcgtcatatcctgcctgggaccgtctcttctatcgtggtgtttttcaccatgcg

SEQ ID NO: 621736 - DNA, 75 bp, synthetic construct
  source 1..75: mol_type = other DNA
aacggaccttctttgcagcactggtttggcgtcgattcactggggcgcgacattttcagccgtgtcctggttggt

SEQ ID NO: 621737 - DNA, 75 bp, synthetic construct
  source 1..75: mol_type = other DNA
ttgcagaggaaaacgctgtcgaaacatgcggagatggcgaaggcgttcgactatatcctgaatcactggaatgcg

SEQ ID NO: 621738 - DNA, 75 bp, synthetic construct
  source 1..75: mol_type = other DNA
tggtaaagagcattaccgcgtgatgcgctggaaaaaaaccgcaaaccatgaagtcatcacaatggcgatcccgtg

SEQ ID NO: 621739 - DNA, 75 bp, synthetic construct
  source 1..75: mol_type = other DNA
aggaggtggagaactggcgcgaatatctggcccgtgagcggcagaatctttctgatggtctggttattgagtttc

SEQ ID NO: 621740 - DNA, 75 bp, synthetic construct
  source 1..75: mol_type = other DNA
ggcggtggcgggtgtgaaggaggcgcgttgctatagcagctttgttgaccagcagccggaggactggacaccgcg

SEQ ID NO: 621741 - DNA, 75 bp, synthetic construct
  source 1..75: mol_type = other DNA
cgttgccggcactaccgtttataccgactcggcacatctgccggttaatccgccccctgatgtacaggttgtgtt

SEQ ID NO: 621742 - DNA, 75 bp, synthetic construct
  source 1..75: mol_type = other DNA
acggtaaggaacatgctgacgcgttaaaggatgcctggacagcaaatcacggggcggcgggtcgtgagtgggtta

SEQ ID NO: 621743 - DNA, 75 bp, synthetic construct
  source 1..75: mol_type = other DNA
tgaacgtgacaaccaacggcaaatacagggcaatcctggcggactggatgcagttaagcggaagccatgaggaat

SEQ ID NO: 621744 - DNA, 75 bp, synthetic construct
  source 1..75: mol_type = other DNA
ccgtccaaaagaaaaagctaaagacgctattgaggtaaatctcgtagccatgctgaaagatgccattgcgaatag

SEQ ID NO: 621745 - DNA, 75 bp, synthetic construct
  source 1..75: mol_type = other DNA
cttagcaccaagtgagcgagttctgaaaaaatacgcgcaagggaaaatgatggccccacccgctataaaagttgg

SEQ ID NO: 621746 - DNA, 75 bp, synthetic construct
  source 1..75: mol_type = other DNA
cccgtcgcgaagcgattgaagaggcgggactgatagtcaaacggaccaaaccggtgttaagtttcctggcaagcc

SEQ ID NO: 621747 - DNA, 75 bp, synthetic construct
  source 1..75: mol_type = other DNA
aacgttctgctggcggggggcttaggcgcagataactgcgtggaagcggcacaaaccggctgcgccggacttgat

SEQ ID NO: 621748 - DNA, 75 bp, synthetic construct
  source 1..75: mol_type = other DNA
tacttcctggtgttcagtgcggttatccgtatgttcaacctgaaaacgccgggtcgtgaagataaagaagacgag

SEQ ID NO: 621749 - DNA, 75 bp, synthetic construct
  source 1..75: mol_type = other DNA
gcagcgatacggtgctccccgccttgctgacgaaatgctggagttcaatattaaaaccattgctgccagcctgcg

SEQ ID NO: 621750 - DNA, 75 bp, synthetic construct
  source 1..75: mol_type = other DNA
ggtcgatgtcaccgcgaatgacagcacaactggcctgtgatgcactgcaaatggcgttgtggcggagaagacgcc

SEQ ID NO: 621751 - DNA, 75 bp, synthetic construct
  source 1..75: mol_type = other DNA
ttacgcggcagtcttcagctatctggccgaagacctggcagaactgcaggaccttatcaaccagcagcaacacca

SEQ ID NO: 621752 - DNA, 75 bp, synthetic construct
  source 1..75: mol_type = other DNA
tgctaaagcagcttatgacgcgggcgcgatttacggtgggctgatttttgttgcgacatcaccgcgttgcgtcaa

SEQ ID NO: 621753 - DNA, 75 bp, synthetic construct
  source 1..75: mol_type = other DNA
aacaactttttggcaaaaatactttcccctgaaacactaaaaaaagcaaagaaaaatttcggtgtagatttatat

SEQ ID NO: 621754 - DNA, 75 bp, synthetic construct
  source 1..75: mol_type = other DNA
tatgtcgcggtgcgtcaggctgttgctcggggagcatggaaacagctacagggcgggaagattaaaggaaaaacg

SEQ ID NO: 621755 - DNA, 75 bp, synthetic construct
  source 1..75: mol_type = other DNA
gtactgtgtcctacgcgtgagctggcggatcaggttgccggggaattgcgtcggttggcgcgttttctgccaaat

SEQ ID NO: 621756 - DNA, 75 bp, synthetic construct
  source 1..75: mol_type = other DNA
tggttcgttttgccaatggtagcgcacgtgtgctggtggcgaccgatgtcgcggcacgtggtctggatatcaaat

SEQ ID NO: 621757 - DNA, 75 bp, synthetic construct
  source 1..75: mol_type = other DNA
caatcactcaatgatgcttggggtgctggtcgggctggcagccccgctaaattcccttgtgggtggtagttgttt

SEQ ID NO: 621758 - DNA, 75 bp, synthetic construct
  source 1..75: mol_type = other DNA
tgatgttgtttagtatttcttgtttttctgctactgagctagaaataaaaaaacttgctttgcctgaagctattt

SEQ ID NO: 621759 - DNA, 75 bp, synthetic construct
  source 1..75: mol_type = other DNA
tcaggatatgtttttgaggttcagactggtcagaatgatggctcaggatttttacttgctgctaaagttatatct

SEQ ID NO: 621760 - DNA, 75 bp, synthetic construct
  source 1..75: mol_type = other DNA
tttgcaaaattgttaagcaattctcttttattgaccgtatcagaatctatagcttgcatccatgccttaacaaac

SEQ ID NO: 621761 - DNA, 75 bp, synthetic construct
  source 1..75: mol_type = other DNA
cagcgtctgtggcgtcgccaggagacaaaaatctggacgaaatttaaaagaaagcgcgaaaaagatccgcagtga

SEQ ID NO: 621762 - DNA, 75 bp, synthetic construct
  source 1..75: mol_type = other DNA
gcttaattgccatcgccgcctgtcttggacacatctggcccgttttcttcggttttaaaggaggaaaaggcgttg

SEQ ID NO: 621763 - DNA, 75 bp, synthetic construct
  source 1..75: mol_type = other DNA
cggcaaactgtgggaacagggcgttgaaggcattgaaaagtacaatgacatcaacaaagtcgaaccgatgaaccg

SEQ ID NO: 621764 - DNA, 75 bp, synthetic construct
  source 1..75: mol_type = other DNA
atgaaaaaagacattaaagaaatggaaaggataattgatatcattaatgcttgttctatggacataaattcatat

SEQ ID NO: 621765 - DNA, 75 bp, synthetic construct
  source 1..75: mol_type = other DNA
gcgtacacatgatgctattgacgggaagccattcagtggtgccggtgtgattaaaaatgagtcttctctggaaat

SEQ ID NO: 621766 - DNA, 75 bp, synthetic construct
  source 1..75: mol_type = other DNA
gctgccggccttggattcacttataacgtaggcgctctggggggagcagttgctcctgtactgggggccgttgtt

SEQ ID NO: 621767 - DNA, 75 bp, synthetic construct
  source 1..75: mol_type = other DNA
cttgttaatgatgaaagaatgattacattcaggttaacgcctgatattgatgaacgggaatttataacccgttat

SEQ ID NO: 621768 - DNA, 75 bp, synthetic construct
  source 1..75: mol_type = other DNA
atttatcggtcggtgatacccatacaacccgtaaatgggaacccggcatggcggaagaagaaacgcgtttctttg

SEQ ID NO: 621769 - DNA, 75 bp, synthetic construct
  source 1..75: mol_type = other DNA
tgaatttcactctggcgagcagttgggtgaaacgctgggaatgagccgggcggctattaataaacacattcagac

SEQ ID NO: 621770 - DNA, 75 bp, synthetic construct
  source 1..75: mol_type = other DNA
agtgtcaataaatgatagttatttaacaagatccgatgaattggttgaatatattgtcgatgttaataatgtttc

SEQ ID NO: 621771 - DNA, 75 bp, synthetic construct
  source 1..75: mol_type = other DNA
agtcaaatgcgcaaacgctgccggagatcatcgaagagatgttggtgtccaccaccagcgaacgtcaggggcgcg

SEQ ID NO: 621772 - DNA, 75 bp, synthetic construct
  source 1..75: mol_type = other DNA
aacataccgatattatgaaaaccgaaggtttgaagcaggcgttgaacaagtacggttttgatgccgccttcggtg

SEQ ID NO: 621773 - DNA, 75 bp, synthetic construct
  source 1..75: mol_type = other DNA
cgtggtatcgccatctcaaccgtgcacaatggcgcgcattttctgccgcctggttgggatatctgcttgatggtt

SEQ ID NO: 621774 - DNA, 75 bp, synthetic construct
  source 1..75: mol_type = other DNA
ataaccgacgaaaaaagtgtcgagcaaaaatgctgtcagcatatccgtacaacaatttcagaagtgaatcgtacg

SEQ ID NO: 621775 - DNA, 75 bp, synthetic construct
  source 1..75: mol_type = other DNA
cgcgatcgtacggctaaagcctacggctgcgagctgctggtgcataaaaacccggaaggcgtggcgatggggatt

SEQ ID NO: 621776 - DNA, 75 bp, synthetic construct
  source 1..75: mol_type = other DNA
atgctctactctatcggtaaagattccagcgtcatgctgcatctggcgcgcaaggcgttttatccaggtacgctg

SEQ ID NO: 621777 - DNA, 75 bp, synthetic construct
  source 1..75: mol_type = other DNA
gcagcggggctgggctttacctacaacgtcggcgcacttggcggcgcactggctccaatcctcggcgcgttgatc

SEQ ID NO: 621778 - DNA, 75 bp, synthetic construct
  source 1..75: mol_type = other DNA
atgagtacaacgatccagaatatcccgtggtatcgccatctcaaccgtgcacaatggcgggcattttccgctgcc

SEQ ID NO: 621779 - DNA, 75 bp, synthetic construct
  source 1..75: mol_type = other DNA
ctactgcgctgtggttctgctttgccggcaacctgcaaaatgccgcaatcgtcgctgttcttgggctgttatgcg

SEQ ID NO: 621780 - DNA, 75 bp, synthetic construct
  source 1..75: mol_type = other DNA
gcgtactcatgactccatcgacggcaaaccattcagcggtgcggtgccgtttggcaacaccaaagatgatttagt

SEQ ID NO: 621781 - DNA, 75 bp, synthetic construct
  source 1..75: mol_type = other DNA
catcggcatggggatggcgggtgaatacggttccagcgccacctatgtcattgaaagctggccaaagcatctgcg

SEQ ID NO: 621782 - DNA, 75 bp, synthetic construct
  source 1..75: mol_type = other DNA
cggttatttcgataccgaccagcgtgcagcgggcctgggctttacctacaacgttggcgcactgggcggtgcact

SEQ ID NO: 621783 - DNA, 75 bp, synthetic construct
  source 1..75: mol_type = other DNA
gcaacagcctttgagctgccagcggatgaactgtcagaaagtctggggaaaatcgcccagctctacaaaatcccc

SEQ ID NO: 621784 - DNA, 75 bp, synthetic construct
  source 1..75: mol_type = other DNA
ctttccggccatctggatctggtgtttcccggcgaccataatccgtacaagccaatgagcgaaaacaccaccaac

SEQ ID NO: 621785 - DNA, 75 bp, synthetic construct
  source 1..75: mol_type = other DNA
aaccatatcttcccggcggttggtcacctgcccgttgctgcgcttaaaacgcaggatttcacggctttgttgcgg

SEQ ID NO: 621786 - DNA, 75 bp, synthetic construct
  source 1..75: mol_type = other DNA
agacaacgcgccactgccttagcaaaaattcgccgggcgctaaacgagtacgagcgccagctaaacaagacacat

SEQ ID NO: 621787 - DNA, 75 bp, synthetic construct
  source 1..75: mol_type = other DNA
gcgctgaacatcaacccggcgcagcaacgtgccgctgaacgcggctcgcgcatgcaggagaaaatgtttaaatcc

SEQ ID NO: 621788 - DNA, 75 bp, synthetic construct
  source 1..75: mol_type = other DNA
gagctttcagcagtgccgtgaactcacccgcctttccatcctgctaacactgcatctattcattcgctcgagtga

SEQ ID NO: 621789 - DNA, 75 bp, synthetic construct
  source 1..75: mol_type = other DNA
atctcaggagataatgcactcgtgtttcccggggaccataacccgtataaaccgatgtgtgaaaatacagtaaac

SEQ ID NO: 621790 - DNA, 75 bp, synthetic construct
  source 1..75: mol_type = other DNA
gacgatctgctgagtgattacgatgccgtcttccttggcgtcgggacttatcagtcaatgcgcggcgggctggaa

SEQ ID NO: 621791 - DNA, 75 bp, synthetic construct
  source 1..75: mol_type = other DNA
ccacaactgaatcacatcgacagcttcctgatgaataaacacttcatgcgtaagcacggtcccaacgcttattac

SEQ ID NO: 621792 - DNA, 75 bp, synthetic construct
  source 1..75: mol_type = other DNA
acgaatcagtcttgccactttttctacatatttcctacattcaggaaaaaggctggaaatggtatcaatgttatg

SEQ ID NO: 621793 - DNA, 75 bp, synthetic construct
  source 1..75: mol_type = other DNA
cagttcatggcgcggatctggttgtcactgcaatggccgcaggaaggcaggcggcgcgcgatatgttaactctgt

SEQ ID NO: 621794 - DNA, 75 bp, synthetic construct
  source 1..75: mol_type = other DNA
tgagccggatgctggtcaatggcggtgaaccggagccggatctgtctgaacacctgattagtgttggtatccgct

SEQ ID NO: 621795 - DNA, 75 bp, synthetic construct
  source 1..75: mol_type = other DNA
gacgcccggtgatggtgcgccggttccggacagcgtacaacgaagtcgcccgtaaaaacgcaaaatcaaccctgt

SEQ ID NO: 621796 - DNA, 75 bp, synthetic construct
  source 1..75: mol_type = other DNA
cgtcagttagcgccgcagttaccggatatgcagcaaacgctgctggataaacactatctgcgtaagcatggcgcg

SEQ ID NO: 621797 - DNA, 75 bp, synthetic construct
  source 1..75: mol_type = other DNA
aaatacagcagtcgttgtccaaattaaacctgctaaaaattcacccacgtgatgaacagataaaccaggccttta

SEQ ID NO: 621798 - DNA, 75 bp, synthetic construct
  source 1..75: mol_type = other DNA
tcacggattacaccgaagatgcgcgtttgcttgatgggatgttaggtcagattaactgccttccatccgtgccgg

SEQ ID NO: 621799 - DNA, 75 bp, synthetic construct
  source 1..75: mol_type = other DNA
gcttatccgtgctggcttataccgttgaaagccgtattcactctgcgccggttctggctgctgcggtggatctgg

SEQ ID NO: 621800 - DNA, 75 bp, synthetic construct
  source 1..75: mol_type = other DNA
gatggagatgaaagccggaggctacctgacagacggcaccgaactgcacgacaccaactttgcccgtatcgctga

SEQ ID NO: 621801 - DNA, 75 bp, synthetic construct
  source 1..75: mol_type = other DNA
tctggctttgtgggcacgcaaatacaacgcctgcatcatcttcttgaatcaggttcgcacaaaaatcggtgtaat

SEQ ID NO: 621802 - DNA, 75 bp, synthetic construct
  source 1..75: mol_type = other DNA
aatcccttcaatggttggaacacatcaattcggcgatcagcacttagataccaacatcgcaaaactgatgggcta

SEQ ID NO: 621803 - DNA, 75 bp, synthetic construct
  source 1..75: mol_type = other DNA
gccaccactgcgcgcagtcgggcgaaatatcattactacgccacgccagtagaactggtgccgctgttagaggaa

SEQ ID NO: 621804 - DNA, 75 bp, synthetic construct
  source 1..75: mol_type = other DNA
aggaattcccggatgtgcagtgggacaagatgctggtcgatgccatgacgcaccgcatgacgctgcatccccaga

SEQ ID NO: 621805 - DNA, 75 bp, synthetic construct
  source 1..75: mol_type = other DNA
acgcggcgcaaatgcctggtgtactggtgcattctcacggcccgtttgcatggggtaaaaacgccgaagatgcgg

SEQ ID NO: 621806 - DNA, 75 bp, synthetic construct
  source 1..75: mol_type = other DNA
ttacggattacaccgaagatgcacgtttactggatggaatgctggggcagataaactgcctcccatccgtaccgg

SEQ ID NO: 621807 - DNA, 75 bp, synthetic construct
  source 1..75: mol_type = other DNA
tgaaagccgtatccagtctgcgcctgttctggccgcagcggtggatctggtgacggctaacgccacaggcttgat

SEQ ID NO: 621808 - DNA, 75 bp, synthetic construct
  source 1..75: mol_type = other DNA
gttgccgacgcgatttgcaaaattattttgcgtaaggtcaaaccagtttatttgaaccgcgtcactgacgcggtt

SEQ ID NO: 621809 - DNA, 75 bp, synthetic construct
  source 1..75: mol_type = other DNA
aactgatagctgctggttgcgagttgaaacggcataaggcaagcagtcaccagatatggtggtcgccaataacag

SEQ ID NO: 621810 - DNA, 75 bp, synthetic construct
  source 1..75: mol_type = other DNA
attacggcagcagtaacacgaactagcagcgcgttgtcctggctggctggctggcgctccactggcagtgctgcg

SEQ ID NO: 621811 - DNA, 75 bp, synthetic construct
  source 1..75: mol_type = other DNA
tttctcggtggcgtggtggaaggattcaacgcggcggcaggtcccatcagtgcagcgttcgaaccgcttaagcct

SEQ ID NO: 621812 - DNA, 75 bp, synthetic construct
  source 1..75: mol_type = other DNA
ccgctgggtggaagctaacccagaactgacaggcacactgatgaaagtagcggctgttgtggctgcggttaccgt

SEQ ID NO: 621813 - DNA, 75 bp, synthetic construct
  source 1..75: mol_type = other DNA
tttctcggtggcgtggtggagggattcaaagcggcggcaggtcccgtcagtgccgcattcgaaccacttaagcct

SEQ ID NO: 621814 - DNA, 75 bp, synthetic construct
  source 1..75: mol_type = other DNA
aatccggcgtatcctggttgctggagaaactcggcgttgtcagtaaagaggccgcaaaggcgaaactaccggaaa

SEQ ID NO: 621815 - DNA, 75 bp, synthetic construct
  source 1..75: mol_type = other DNA
tggcagcactacgcggcgggctgactgccgcaggcgcggtgctacgagtactggcatccggtccgctggtgatgc

SEQ ID NO: 621816 - DNA, 75 bp, synthetic construct
  source 1..75: mol_type = other DNA
acgggaaatgtcctgaaaactatagcaggtgcgccggttgcacttttgctgtctggattatccggtttacgtgct

SEQ ID NO: 621817 - DNA, 75 bp, synthetic construct
  source 1..75: mol_type = other DNA
tgcgtgatcgtattgcaggagccggagccaccaccacggctgcagggctggcaatggggacaccagtgatggcgg

SEQ ID NO: 621818 - DNA, 75 bp, synthetic construct
  source 1..75: mol_type = other DNA
tgcgcgttatcctgtatgccgtgtctggtctgttaggtgctctgctcagcccgataggtcttgtggtgactgcac

SEQ ID NO: 621819 - DNA, 75 bp, synthetic construct
  source 1..75: mol_type = other DNA
tgcgcgatcgcatcgcaggaaccggagccaccaccacggcggcagggctggcaatggggacgccagtgatggcgg

SEQ ID NO: 621820 - DNA, 75 bp, synthetic construct
  source 1..75: mol_type = other DNA
ctggggaaaatcgcccagctctacaaaatacctacccgcaatattgaacagctcggcgatgcgctgaactatctg

SEQ ID NO: 621821 - DNA, 75 bp, synthetic construct
  source 1..75: mol_type = other DNA
gcgcgttgccctgtatgccgtatctggtctgttaggtgctctgcttagtccgataggtcttgtggttactgcact

SEQ ID NO: 621822 - DNA, 75 bp, synthetic construct
  source 1..75: mol_type = other DNA
gtgtggctgatcgtctggattaccgtaaagcggcggcgctgggttccaccttcctgacactgggcgctgcgccgg

SEQ ID NO: 621823 - DNA, 75 bp, synthetic construct
  source 1..75: mol_type = other DNA
gaaaatcgcccagctctacaaaatccctacccgcaatattgaacagctcggcgatgcgctgaactatctggatga

SEQ ID NO: 621824 - DNA, 75 bp, synthetic construct
  source 1..75: mol_type = other DNA
acgaaggatgcgatgggaaccatccagcgcgtgctggagaaggtgaacgcgctgccgcaggataagcgcctgtct

SEQ ID NO: 621825 - DNA, 75 bp, synthetic construct
  source 1..75: mol_type = other DNA
tgacagcggcggggatatcccgcgcgggcaggttggcatcgtcggggaaaacgggccggaaattgttaacggccc

SEQ ID NO: 621826 - DNA, 75 bp, synthetic construct
  source 1..75: mol_type = other DNA
aactgatagctgctggttgtgagttgaagcggcataaggcgagcagccaccagatatggtggtcgcccataacag

SEQ ID NO: 621827 - DNA, 75 bp, synthetic construct
  source 1..75: mol_type = other DNA
gtgcagccgctaaagtctggcgggcgccagatggccacgttcatgcggatttcaaattctggctaccggaaggac

SEQ ID NO: 621828 - DNA, 75 bp, synthetic construct
  source 1..75: mol_type = other DNA
tgccgcgttcgaaccgcttaagcctgtgttccagtggattggcgacaaagtacaggcgctgtggggctggtttac

SEQ ID NO: 621829 - DNA, 75 bp, synthetic construct
  source 1..75: mol_type = other DNA
cgcattcgaaccacttaagcctgtgttccagtggattggcgacaaagtgcaggcgctgtggggctggtttactga

SEQ ID NO: 621830 - DNA, 75 bp, synthetic construct
  source 1..75: mol_type = other DNA
accgtctggattatcgtaaagcggcggcactgggttccacctttctgacactgggcgctgcgccggaggttgcag

SEQ ID NO: 621831 - DNA, 75 bp, synthetic construct
  source 1..75: mol_type = other DNA
agcggcggcactgggttccacctttctgacactgggcgctgcgccggaggttgcagccagtgcagcaaacgcgat

SEQ ID NO: 621832 - DNA, 75 bp, synthetic construct
  source 1..75: mol_type = other DNA
tggcagcactacgcggtggactggctgccgcaggcgcggtgcttcgtgtgcttgcatctggtccgctggcgatgc

SEQ ID NO: 621833 - DNA, 75 bp, synthetic construct
  source 1..75: mol_type = other DNA
ctttctgctcagtggttgctggttaaaaccggagcgcagaataccttcagcagcctgggtgaaacgctgcgccag

SEQ ID NO: 621834 - DNA, 75 bp, synthetic construct
  source 1..75: mol_type = other DNA
ggttgaaggtggtgcgcgcatgaacgtagcaaaccctgatgacagctgggaagaccagaaacgtgatctgctggc

SEQ ID NO: 621835 - DNA, 75 bp, synthetic construct
  source 1..75: mol_type = other DNA
tcttgtcattcctgtttcctctgtgagatgcctgacagatatcaggcaggccatccgttgtggggcgtggctgtt

SEQ ID NO: 621836 - DNA, 75 bp, synthetic construct
  source 1..75: mol_type = other DNA
gaacccattctcattaagcctaaaatggtagagtctggtttaacttatggcggtaataagctatttaaaacctcc

SEQ ID NO: 621837 - DNA, 75 bp, synthetic construct
  source 1..75: mol_type = other DNA
caggttgtgcaggggcgggcttaggcagcgatctctatcgcgccgggcaatccgtagaacgcaccgcgcagcagg

SEQ ID NO: 621838 - DNA, 75 bp, synthetic construct
  source 1..75: mol_type = other DNA
gaagcattaaaagctggccattctcttgatgagtttctcatcaaaaaagacgcttccagctctgttggtgacgaa

SEQ ID NO: 621839 - DNA, 75 bp, synthetic construct
  source 1..75: mol_type = other DNA
tgaaatacttaaacttacccatgattataatataatcgcatctgaatcatgctttgataactttgagatcttaac

SEQ ID NO: 621840 - DNA, 75 bp, synthetic construct
  source 1..75: mol_type = other DNA
tgaaatacttaaacttactcatgattacaatataatcgcctctgaatcatgctttgataactttgagatcttaac

SEQ ID NO: 621841 - DNA, 75 bp, synthetic construct
  source 1..75: mol_type = other DNA
acggtaccgacacgatggaagaaacggcttacttcctggacctgacggtgaaatgggacaaaccggtggtgatgg

SEQ ID NO: 621842 - DNA, 75 bp, synthetic construct
  source 1..75: mol_type = other DNA
acggtaccgacacgatggaagaaacggcttacttcctcgacctgacggtgaaatgcgacaaaccggtggtgatgg

SEQ ID NO: 621843 - DNA, 75 bp, synthetic construct
  source 1..75: mol_type = other DNA
acggtaccgacacgatggaagaaacggcttacttcctagacctgacggtgaaatgagacaaaccggtggtgatgg

SEQ ID NO: 621844 - DNA, 75 bp, synthetic construct
  source 1..75: mol_type = other DNA
aaaatatttccgtcatcggcttttggtccgcaatacatcaaagcgttaaaagcggtattaccaccggacatcgca

SEQ ID NO: 621845 - DNA, 75 bp, synthetic construct
  source 1..75: mol_type = other DNA
agtaataacctggtattttaccacccaactcaactcggtccgactggggtacaattacgctggcctaatcaggat

SEQ ID NO: 621846 - DNA, 75 bp, synthetic construct
  source 1..75: mol_type = other DNA
ctgtataacgcggtagtgaccgcagctgataaagcctccgctaatcgtggcgtactggtagtaatgaacgacact

SEQ ID NO: 621847 - DNA, 75 bp, synthetic construct
  source 1..75: mol_type = other DNA
aaagcgcctcccaagtatcaatttgaagaaaatggtgaaacgaaatactggtctggtcgtggacgtgcgccaaaa

SEQ ID NO: 621848 - DNA, 75 bp, synthetic construct
  source 1..75: mol_type = other DNA
gataagctaaatatctggatctggggcgcggtcaatttctccaacgtggtcaccgttgataatcagggcaatatt

SEQ ID NO: 621849 - DNA, 75 bp, synthetic construct
  source 1..75: mol_type = other DNA
gtccggcctgccccctccttacggtgctaacctgtttgccggcggctatgaaaccgagcgcagcgacgggttaaa

SEQ ID NO: 621850 - DNA, 75 bp, synthetic construct
  source 1..75: mol_type = other DNA
tcttcaacctgtcgccggatatcaggaagttgcgggtaaatttgtttatttttttgatataagcgatctggccag

SEQ ID NO: 621851 - DNA, 75 bp, synthetic construct
  source 1..75: mol_type = other DNA
ttaggctctgaattggtgaattatgcacttcctctcgcaaaagtcagtcatgtcggtgtgattggcgatagggaa

SEQ ID NO: 621852 - DNA, 75 bp, synthetic construct
  source 1..75: mol_type = other DNA
ttcaacgacgacatgcatgcgcaggtgtacgacgtgcaggtgatgggcagctatcgcggaccatcctacttcacc

SEQ ID NO: 621853 - DNA, 75 bp, synthetic construct
  source 1..75: mol_type = other DNA
ctgggcgggcggctttaccgaccgtgcgaacgacaagcgtattgccgtggtacatgccaacgggctgatggagtt

SEQ ID NO: 621854 - DNA, 75 bp, synthetic construct
  source 1..75: mol_type = other DNA
tctatgtttcacaaaacgggggggaaagcgtaaaaacgacgtttaagaaccgttcatcaaataacgatgcaacga

SEQ ID NO: 621855 - DNA, 75 bp, synthetic construct
  source 1..75: mol_type = other DNA
atgagcgaactgactaaagaagatgaatacggcattatcagccggactatgatgaatattcgttcattgcgtgtt

SEQ ID NO: 621856 - DNA, 75 bp, synthetic construct
  source 1..75: mol_type = other DNA
aacgccaggaacttgaagccaaacgtcagcaggccattgaatacatcatatctttaggtcttgatccagaatcac

SEQ ID NO: 621857 - DNA, 75 bp, synthetic construct
  source 1..75: mol_type = other DNA
tggacctgtccttgaggtccagtgttaagcttgcccactcggcagactcaattgacaatgtaacgtttaagctga

SEQ ID NO: 621858 - DNA, 75 bp, synthetic construct
  source 1..75: mol_type = other DNA
cctgtaaccctgcttgataacgatgaacctataccagcaggcaccgctgaggttctctggtcagaggataaagtc

SEQ ID NO: 621859 - DNA, 75 bp, synthetic construct
  source 1..75: mol_type = other DNA
gggattaacttctaacggcttcactctttcaggcgttcccaacaccaccggtgatttaaaactaccttacaagat

SEQ ID NO: 621860 - DNA, 75 bp, synthetic construct
  source 1..75: mol_type = other DNA
acggtaccgacacgatggaagaaaccgcttacttcctggacctgacggtgaaatgcgacaaaccggtggtgatgg

SEQ ID NO: 621861 - DNA, 75 bp, synthetic construct
  source 1..75: mol_type = other DNA
aagttctcgtcttgatgtcgaactgggcattggcgacgattgcgcacttctcaatatccccgagaaacagaccct

SEQ ID NO: 621862 - DNA, 75 bp, synthetic construct
  source 1..75: mol_type = other DNA
tttacccaaatcagggtaacggtacttcacaacctcttcatttccaggcgaccttacaacaagacggaaatattc

SEQ ID NO: 621863 - DNA, 75 bp, synthetic construct
  source 1..75: mol_type = other DNA
aagccctgcaacgcgccttctccatcgacggtccggtgctggtggatgtggtggtcgccaaagaagagttagcca

SEQ ID NO: 621864 - DNA, 75 bp, synthetic construct
  source 1..75: mol_type = other DNA
attatacgttagtaatttcaaacatctggtccgcctataataccataactgacattccatcatctggcatgtata

SEQ ID NO: 621865 - DNA, 75 bp, synthetic construct
  source 1..75: mol_type = other DNA
gcggcacatcacagcctcttcacttccaggcaacgttaaaacaagacggaaatatcgctatcgaatccggtgaat

SEQ ID NO: 621866 - DNA, 75 bp, synthetic construct
  source 1..75: mol_type = other DNA
gcggtggcggttttctttactgtaatgcctctgacagggcaaatccagatggactaatggatattgaaaatgcca

SEQ ID NO: 621867 - DNA, 75 bp, synthetic construct
  source 1..75: mol_type = other DNA
gatggagatgaaagctggtggctatttgactgacggcaccgaactacacgacaccaactttgcccgcattgccga

SEQ ID NO: 621868 - DNA, 75 bp, synthetic construct
  source 1..75: mol_type = other DNA
taggcgatatcaaatcaaccttgcgtgcattactgccgctggtggaagaaaaaaccaatcgcaaatttctcgaca

SEQ ID NO: 621869 - DNA, 75 bp, synthetic construct
  source 1..75: mol_type = other DNA
gcaagagttattccgcgaatgtagtcactattgcgagctggtttccagcccggagcagatcccacaagtgctggc

SEQ ID NO: 621870 - DNA, 75 bp, synthetic construct
  source 1..75: mol_type = other DNA
aaccgtggcgtttccgttgtcgtgttaccgggcgacgtggcgttaaaacctgcaccagaaggggcaactacccac

SEQ ID NO: 621871 - DNA, 75 bp, synthetic construct
  source 1..75: mol_type = other DNA
gcggttttagtatgttaatgggcgatttcctctcggtggtacagatgaaactaccggtgaaaatcatcgtcttta

SEQ ID NO: 621872 - DNA, 75 bp, synthetic construct
  source 1..75: mol_type = other DNA
agcctgcggcattacgggtatccgcgtggaaaaagcgtctgaaattgatgaagctctgcaacgcgccttctccat

SEQ ID NO: 621873 - DNA, 75 bp, synthetic construct
  source 1..75: mol_type = other DNA
ttccggtaaaagttatggcggacataaactctttaagacatctgttccaggcctgtattacacgttagcaatatc

SEQ ID NO: 621874 - DNA, 75 bp, synthetic construct
  source 1..75: mol_type = other DNA
aaaacggcactgcggtagtgcgttcttcccgcgtaccgacgggcgcaaccactcaggatgccgaagtggatgatg

SEQ ID NO: 621875 - DNA, 75 bp, synthetic construct
  source 1..75: mol_type = other DNA
cgccaacgcatccgatcttccggtaaaagcactggtagatgcaggctacgacggtatcgttagcgccggtgtggg

SEQ ID NO: 621876 - DNA, 75 bp, synthetic construct
  source 1..75: mol_type = other DNA
caaatggtactaaaaccaaatgattcaacgtctatttataaagattatgaaacagaaaatgacactaccggaggg

SEQ ID NO: 621877 - DNA, 75 bp, synthetic construct
  source 1..75: mol_type = other DNA
acggtaccgacacgatggaagaaactgcttacttccttgacctgacggtgaaatgagacaaaccggtggtgatgg

SEQ ID NO: 621878 - DNA, 75 bp, synthetic construct
  source 1..75: mol_type = other DNA
acggtaccgacacgatggaagaaacagcttacttcctggacctgacggtgaaatgagacaaaccggtggtgatgg

SEQ ID NO: 621879 - DNA, 75 bp, synthetic construct
  source 1..75: mol_type = other DNA
tgagcgcagacggtccattcaacctgtataacgcggtagtgaccgcagctgataaagcctccgctaatcgtggcg

SEQ ID NO: 621880 - DNA, 75 bp, synthetic construct
  source 1..75: mol_type = other DNA
ggcactatcctgccctgccgctggagcggctgcctgaactgcttgaacgtattggggcatatcatcagggccgtg

SEQ ID NO: 621881 - DNA, 75 bp, synthetic construct
  source 1..75: mol_type = other DNA
cgcatagcttatattcataaggcagagcacctggaagcccgcaaaacgatgatgcagtggtggtcggattatctg

SEQ ID NO: 621882 - DNA, 75 bp, synthetic construct
  source 1..75: mol_type = other DNA
ttcgggtaaacgttatggcgggcataaactatttgaaacatctgtcccaggcctgtattatacattaaagatatc

SEQ ID NO: 621883 - DNA, 75 bp, synthetic construct
  source 1..75: mol_type = other DNA
tacctggatacaggtaccggtggtggtattctttactgcaatacatctggcagagcgaatcctggtccaataact

SEQ ID NO: 621884 - DNA, 75 bp, synthetic construct
  source 1..75: mol_type = other DNA
gtattctttactgcaatacatctggcagagcgaatcctggtccaataactattgaaaatgccatggtctattcag

SEQ ID NO: 621885 - DNA, 75 bp, synthetic construct
  source 1..75: mol_type = other DNA
atgaactgatcttccccggcgatcataacccgtataagccaatgtgtgaaaacacggtcaataaggcactgcggg

SEQ ID NO: 621886 - DNA, 75 bp, synthetic construct
  source 1..75: mol_type = other DNA
tattgttgaagttgtggacacggaagagtttgcggccattcgtgataatgcgaaagaaatcgtaacccgctttaa

SEQ ID NO: 621887 - DNA, 75 bp, synthetic construct
  source 1..75: mol_type = other DNA
tgtgtgttgccacagaaggcgatacggttgatggcagggtcatggaacggcaatggattattgacatgggggaaa

SEQ ID NO: 621888 - DNA, 75 bp, synthetic construct
  source 1..75: mol_type = other DNA
atgaagataaattacaggcgcttgccaatgtggtgaacgatctggaagcgcgagtggcgaaaattgaaactcaac

SEQ ID NO: 621889 - DNA, 75 bp, synthetic construct
  source 1..75: mol_type = other DNA
catgaacagtaagcaatggcccggtaaagccgctattggtcgtctgaaagatgaggaactggcgcaatataattt

SEQ ID NO: 621890 - DNA, 75 bp, synthetic construct
  source 1..75: mol_type = other DNA
gatgcgctggtggtgagtgtcggtggcgcggagccgagcggtaatccggcggggcgtcagtggttttcagtgtag

SEQ ID NO: 621891 - DNA, 75 bp, synthetic construct
  source 1..75: mol_type = other DNA
aattaaacaaacagggatattacagttgtgtgatttcccgtaacggtaaaattacgcaggaagggaagatgaaga

SEQ ID NO: 621892 - DNA, 75 bp, synthetic construct
  source 1..75: mol_type = other DNA
gcctgctggtcgctgacagctggtgctaacccggcatttatagcaaaccagatgggccatgcagatgcgcaaatg

SEQ ID NO: 621893 - DNA, 75 bp, synthetic construct
  source 1..75: mol_type = other DNA
cacgcaaggccattaccgaagtgaagaagatggagaaccgcgacgcagtggaggcgaccgtctggggtgcgtatt

SEQ ID NO: 621894 - DNA, 75 bp, synthetic construct
  source 1..75: mol_type = other DNA
atgtccggcggtgtcgattcctccgtttctgcctggctgttgcaacaacagggatatcaggttgaaggcctgttt

SEQ ID NO: 621895 - DNA, 75 bp, synthetic construct
  source 1..75: mol_type = other DNA
tgtgtgttgctactgaaggggataccgttgacggcagggtaattaaacggcagtggatcattgatatgggggaaa

SEQ ID NO: 621896 - DNA, 75 bp, synthetic construct
  source 1..75: mol_type = other DNA
ggaaaaattaaacaggacatacgcatgaagaactggcaaaaattgtttggtattaaaccgaagtttgaagatgaa

SEQ ID NO: 621897 - DNA, 75 bp, synthetic construct
  source 1..75: mol_type = other DNA
acattaacgagactgagcaaagagcatatcattgatgttcacctcagagagtatggcagaacagaaaaacaaaaa

SEQ ID NO: 621898 - DNA, 75 bp, synthetic construct
  source 1..75: mol_type = other DNA
atggcggaaccgccacaagggaaaatccgagttgcaggggaaaatggttttcccacatgggctgaaatacctcca

SEQ ID NO: 621899 - DNA, 75 bp, synthetic construct
  source 1..75: mol_type = other DNA
tgttgaaaccatatgccgacagcttgggttgggagaaagcacagtaagaacagcaatttcagagctggaggctga

SEQ ID NO: 621900 - DNA, 75 bp, synthetic construct
  source 1..75: mol_type = other DNA
atattcaccggaatttgaacaggcctggcaggaatatcccaaacgtgctggtggcaattccaagtcagcagcctt

SEQ ID NO: 621901 - DNA, 75 bp, synthetic construct
  source 1..75: mol_type = other DNA
tggtggccgcagcctgtgtatttgcagtaaatgcaggagcaaaggaaggtaaaagcggtttttatctgaccggta

SEQ ID NO: 621902 - DNA, 75 bp, synthetic construct
  source 1..75: mol_type = other DNA
atgtgccttatctggagaaaaccgctcagtcggtagactggccccctgaatctccagacaaccaatatcacttaa

SEQ ID NO: 621903 - DNA, 75 bp, synthetic construct
  source 1..75: mol_type = other DNA
tcggtactcgcctggatactgaagagtccggcgtagccctgcgtgaagttttccttgatagcaaactggtgttca

SEQ ID NO: 621904 - DNA, 75 bp, synthetic construct
  source 1..75: mol_type = other DNA
ctacaacccgttcgataccgaacaactggtgatttgctcgctagattttgcccgccgcagcaaacagcgtctgga

SEQ ID NO: 621905 - DNA, 75 bp, synthetic construct
  source 1..75: mol_type = other DNA
atgttggcggtatatgattgcaagatactcaaatgagttactggcaaacagactgtccgacttaatcgggatcgt

SEQ ID NO: 621906 - DNA, 75 bp, synthetic construct
  source 1..75: mol_type = other DNA
atacatcagcctatgtcataggctcattgggttttttaattttttttgtttggcagtaccagtcactatctccag

SEQ ID NO: 621907 - DNA, 75 bp, synthetic construct
  source 1..75: mol_type = other DNA
atgtgggggctggcgacgctgattggtcgtaaaaatttctccgcagaagagcgcgaaaccggcaaggcggcactg

SEQ ID NO: 621908 - DNA, 75 bp, synthetic construct
  source 1..75: mol_type = other DNA
cgcggacacgggaaacccctcgccgcggtgaagggaaaaccaatttcgatcttacagagaatacaacagagatta

SEQ ID NO: 621909 - DNA, 75 bp, synthetic construct
  source 1..75: mol_type = other DNA
ccagctacgtaacgcgctgcggtggtgttatcactctcgaagataatgatccctgcggtaccttgttttcaatct

SEQ ID NO: 621910 - DNA, 75 bp, synthetic construct
  source 1..75: mol_type = other DNA
agtttgcttttttcgaacgactggcatttccgttgcgtatcttcctgctgattctggtgttctcaatatttgtca

SEQ ID NO: 621911 - DNA, 75 bp, synthetic construct
  source 1..75: mol_type = other DNA
gccttgatattgccgatcaggacggcattggtgaacaagaagagcaggcactgaaaaagatcgcccaggcgcttc

SEQ ID NO: 621912 - DNA, 75 bp, synthetic construct
  source 1..75: mol_type = other DNA
cggtgaaaagcgtcacgggggcgttgcgtcgctgggtggaagctaacccggaactgacaggcacactgatgaaag

SEQ ID NO: 621913 - DNA, 75 bp, synthetic construct
  source 1..75: mol_type = other DNA
gtccggtttatccgctttacgtgctgttgctgtgatgtttatgaatcctctggcggtactgcgcggtggactggt

SEQ ID NO: 621914 - DNA, 75 bp, synthetic construct
  source 1..75: mol_type = other DNA
cgctccactggcagtgctgcgacgcgggcttgcttcatcgggtaacgcagcgggtttacttactgcgccgttgtc

SEQ ID NO: 621915 - DNA, 75 bp, synthetic construct
  source 1..75: mol_type = other DNA
atgaaatttcaggccattgtattagcaggttttcttgtcatgccttatgcgttagcggatgaccagggcggctta

SEQ ID NO: 621916 - DNA, 75 bp, synthetic construct
  source 1..75: mol_type = other DNA
atgaatagtctgctgccaccgggttcaacttcactggagcgccgactggcgcaaacgtgcagcgggatttctgat

SEQ ID NO: 621917 - DNA, 75 bp, synthetic construct
  source 1..75: mol_type = other DNA
ccggctcatcaccgcttgaagtcgctgccgcgaaagcctgtgcggaaattgaaaaaacgccggtcagtattcgtg

SEQ ID NO: 621918 - DNA, 75 bp, synthetic construct
  source 1..75: mol_type = other DNA
agcaacctgcgacggtgaatgcagacggaaaagtgatgatgccatcgggtggttttccctcatggggatatggct

SEQ ID NO: 621919 - DNA, 75 bp, synthetic construct
  source 1..75: mol_type = other DNA
ctggactccctgaaatccggcgtatcctggttgctggaaaaactcggcattgtcagtaaagaggccgcaaaggca

SEQ ID NO: 621920 - DNA, 75 bp, synthetic construct
  source 1..75: mol_type = other DNA
atgatgcgctcggttccatgcagaaagagtccgacatcaacaaagactcactttctgctcagtggttgctagtca

SEQ ID NO: 621921 - DNA, 75 bp, synthetic construct
  source 1..75: mol_type = other DNA
agcaacctgcgacggtgaatgcagacgggaaagtgatgataccatcgggtggttttccctcatggggatatggct

SEQ ID NO: 621922 - DNA, 75 bp, synthetic construct
  source 1..75: mol_type = other DNA
agcaacctgcgacggtgaatgcagacggcaaagtgatgatcccatcgggtggttttccatcatggggatatggct

SEQ ID NO: 621923 - DNA, 75 bp, synthetic construct
  source 1..75: mol_type = other DNA
agcaacctgcgacggtgaatgcagacggtaaagtgatgattccatcgggtggttttccctcatggggatatggct

SEQ ID NO: 621924 - DNA, 75 bp, synthetic construct
  source 1..75: mol_type = other DNA
cactatggataggaaataggatcgctgaattcagcgatcttgatacagcaaaagctatagcggcattaaaaattt

SEQ ID NO: 621925 - DNA, 75 bp, synthetic construct
  source 1..75: mol_type = other DNA
atatcaggtgcataaatccctgccagtgcagactgaaatcaacggtaatcgctttaccagtaaggcgcatatcaa

SEQ ID NO: 621926 - DNA, 75 bp, synthetic construct
  source 1..75: mol_type = other DNA
tactatgacgtgcgtattgaagataaaccgctggcgaacggctgcgcgggcaaaccgattgttgagcgcggtaaa

SEQ ID NO: 621927 - DNA, 75 bp, synthetic construct
  source 1..75: mol_type = other DNA
agctcgcggactacatcaacacctgtatgttcgacccggctacgcagtacttctatgacgtgcgtattgaagata

SEQ ID NO: 621928 - DNA, 75 bp, synthetic construct
  source 1..75: mol_type = other DNA
tggaaattccggcacaggttgctgcatcgtgggaatcggggcgtgatgatgccgccgtctttggttttatcgaca

SEQ ID NO: 621929 - DNA, 75 bp, synthetic construct
  source 1..75: mol_type = other DNA
atgtacccgaaactggtggcctatcacgactggtggttacgtaaccgcgatcacaacggcaacggcgtgccggaa

SEQ ID NO: 621930 - DNA, 75 bp, synthetic construct
  source 1..75: mol_type = other DNA
ggcggcaactggaacgaacgtaataccaaacccagccttgccgcctggtcggtgatggaagtgtataacgtcacc

SEQ ID NO: 621931 - DNA, 75 bp, synthetic construct
  source 1..75: mol_type = other DNA
ttgcgctgattcagcaggatctggaactggcaccagaacgtattcgtcatagtgaagcgctggtgaaaaaactgg

SEQ ID NO: 621932 - DNA, 75 bp, synthetic construct
  source 1..75: mol_type = other DNA
cggaaacctaccgctttattgacgagttaacggacaaactcaagctcaacctgaaagtgtaccgtgctaccgaaa

SEQ ID NO: 621933 - DNA, 75 bp, synthetic construct
  source 1..75: mol_type = other DNA
tcaacaaagtcgaaccgatgaaccgggcgctgaaagaactgaatgcgcaaacgtggtttgctggcctgcgccgtg

SEQ ID NO: 621934 - DNA, 75 bp, synthetic construct
  source 1..75: mol_type = other DNA
cgtaaccgcgatcacaacggcaacggcgtgccggaatatggcgcaacccgcgataaagcccacaatactgagaat

SEQ ID NO: 621935 - DNA, 75 bp, synthetic construct
  source 1..75: mol_type = other DNA
atgaaaatcaaaactattttaacgccagtagcctgcgctctactgatgagtttttccgcccatgccgctaatgcc

SEQ ID NO: 621936 - DNA, 75 bp, synthetic construct
  source 1..75: mol_type = other DNA
agctcgcggactacatcaacacctgtatgttcgacccgactacccagttctactatgacgtacgtattgaagata

SEQ ID NO: 621937 - DNA, 75 bp, synthetic construct
  source 1..75: mol_type = other DNA
ctggaaacggagtgcgtggaaaatgtcgccacaaccgaaatcattaaagcaactgaagaaagtaacggtcatcgt

SEQ ID NO: 621938 - DNA, 75 bp, synthetic construct
  source 1..75: mol_type = other DNA
tggccagcctgccgttatggctgacttatcaggaaatgatgccgatgttgcccaaaaggtcagcctttttctggc

SEQ ID NO: 621939 - DNA, 75 bp, synthetic construct
  source 1..75: mol_type = other DNA
atactgaccaggccagaacgcaatcattatttttccctggcactggctttctgctcatgggtcagaaatggatac

SEQ ID NO: 621940 - DNA, 75 bp, synthetic construct
  source 1..75: mol_type = other DNA
caggatcaacgttacatcagtatacgcaatacagatacgatatggctcccgggaaatatttgtgcctaccagttc

SEQ ID NO: 621941 - DNA, 75 bp, synthetic construct
  source 1..75: mol_type = other DNA
attacccacggtaccgacacgatggaagaaaccgcttacttcctcgacctgacggtgaaatgcgacaaaccggtg

SEQ ID NO: 621942 - DNA, 75 bp, synthetic construct
  source 1..75: mol_type = other DNA
catgagcgcagacggtccattcaacctgtataacgcggtagtgaccgcagctgataaagcctccgctaatcgtgg

SEQ ID NO: 621943 - DNA, 75 bp, synthetic construct
  source 1..75: mol_type = other DNA
tgggtatcgacaccgtagcgctggaaggtaaaggctttaaacgtctggtggaagagggcgcgcaagtaagcgcag

SEQ ID NO: 621944 - DNA, 75 bp, synthetic construct
  source 1..75: mol_type = other DNA
cctcctgcacgcactgctgaccggtatcagcctgtttgtggcaacgctgctgggtatccacgcgggcttctcttt

SEQ ID NO: 621945 - DNA, 75 bp, synthetic construct
  source 1..75: mol_type = other DNA
cagtgcaggtgcggcggcgctggcgggtgcagttggttactttgtgttaaccaaagccatggtcaccatcaaccc

SEQ ID NO: 621946 - DNA, 75 bp, synthetic construct
  source 1..75: mol_type = other DNA
cagacgctggtgaccagaaaaatggaaacggaagcttttggtgacagtaatgccacgcgaaccacagacgcattt

SEQ ID NO: 621947 - DNA, 75 bp, synthetic construct
  source 1..75: mol_type = other DNA
tccagctggtcgaaagacagcgcaggtgcggcggcgctggcgggtgcggtaggttactttgtgttaaccaaagcg

SEQ ID NO: 621948 - DNA, 75 bp, synthetic construct
  source 1..75: mol_type = other DNA
ggtttgcagcaatatcgacgatttcagcggtctgatcattaaagcccagggtcatgttgtggcgggtcaaacgcc

SEQ ID NO: 621949 - DNA, 75 bp, synthetic construct
  source 1..75: mol_type = other DNA
ctgccgttatcggttttcgatccccaggactaccatccactgctgattaccgtttccggaaaaaacgttaactga

SEQ ID NO: 621950 - DNA, 75 bp, synthetic construct
  source 1..75: mol_type = other DNA
attgatgtgatgcaacgtctgggcggtgtggctgaccgtctggattatcgtaaagcggcggcgctgggttccacc

SEQ ID NO: 621951 - DNA, 75 bp, synthetic construct
  source 1..75: mol_type = other DNA
cttcgccagcacggcagcaaaggcggcaacagcctttgagctgccagcggatgaactgtcagaaagtctggggaa

SEQ ID NO: 621952 - DNA, 75 bp, synthetic construct
  source 1..75: mol_type = other DNA
gccagcagagcttccaccgttgcatcctttggcacttcccacgaaaggcggtgaagcaatggtgagtcgtgcagc

SEQ ID NO: 621953 - DNA, 75 bp, synthetic construct
  source 1..75: mol_type = other DNA
tgcgcgatcgcatcgctggagccggagccaccaccacggctgcagggctggcagtggggacgccagtgatggcgg

SEQ ID NO: 621954 - DNA, 75 bp, synthetic construct
  source 1..75: mol_type = other DNA
cactgtgccgcccgtttacaggattgaggcaccgacgcagatcatcatccagacgcagccaggacaaagtgcgca

SEQ ID NO: 621955 - DNA, 75 bp, synthetic construct
  source 1..75: mol_type = other DNA
ttgcgttgttgcgtgcagctctggtgggcgttggcagcgtgcttggggtattgctcagtccgataggtctggttg

SEQ ID NO: 621956 - DNA, 75 bp, synthetic construct
  source 1..75: mol_type = other DNA
ccatcacgcttctgacatgcgccagcgtatgtcatctgtccggtctcacaccttatttcatctatacgtcaggta

SEQ ID NO: 621957 - DNA, 75 bp, synthetic construct
  source 1..75: mol_type = other DNA
agggaaaataacaacagcccggaacgtgtggaagatattcagcaacaactgaacacactgaaagatatccataaa

SEQ ID NO: 621958 - DNA, 75 bp, synthetic construct
  source 1..75: mol_type = other DNA
ctcgatacatatggagaaactattcctcaggggctaagaaaaagccttgaaagaaggaaagcgaagctatttgac

SEQ ID NO: 621959 - DNA, 75 bp, synthetic construct
  source 1..75: mol_type = other DNA
aaaccggagcgcagaacaccttcagcagcctgggcgaaacgctgcgccagccgctgatggatattctgtacacgg

SEQ ID NO: 621960 - DNA, 75 bp, synthetic construct
  source 1..75: mol_type = other DNA
gcaatggtcaaggcgtttggcgatcgtgccctgattggtgccggtacggtgttgcagcttgagcaggtggattta

SEQ ID NO: 621961 - DNA, 75 bp, synthetic construct
  source 1..75: mol_type = other DNA
actgatccgccgggcggtggaacacggtatgaccgtctgccccggctgcgccacggccacggaggcttttgatgc

SEQ ID NO: 621962 - DNA, 75 bp, synthetic construct
  source 1..75: mol_type = other DNA
ccaggcgggcggtgcgatttttgataacctcgcattaatcttcgccatcggtgtggcatccagctggtcgaaaga

SEQ ID NO: 621963 - DNA, 75 bp, synthetic construct
  source 1..75: mol_type = other DNA
cacgccatgggtatctgttggactgggttatgcacgggtacatcataaggcgacatatactgatacctcctggaa

SEQ ID NO: 621964 - DNA, 75 bp, synthetic construct
  source 1..75: mol_type = other DNA
ttacgggtacggatacagtggtcgtgaatcgttgtcacgttcaggctctgctgacaacttcgcatggagccttgg

SEQ ID NO: 621965 - DNA, 75 bp, synthetic construct
  source 1..75: mol_type = other DNA
tccacgaaggcatgtcgattattgagcgtgaccgcgctgcggcatggtttgccgaagaagacaccggcgcacagg

SEQ ID NO: 621966 - DNA, 75 bp, synthetic construct
  source 1..75: mol_type = other DNA
cgtactatgacttccggaatgacagcgcattcacaccatggatatctgcagggattggctacgccagagttcacc

SEQ ID NO: 621967 - DNA, 75 bp, synthetic construct
  source 1..75: mol_type = other DNA
cgagtggggcgataaatataagtcagaagttgatgttaaaagtcatgacatcctgcttggtgtgacttataactt

SEQ ID NO: 621968 - DNA, 75 bp, synthetic construct
  source 1..75: mol_type = other DNA
tgctgacgactctggcagtggcagatgacataaaactggtcgactggttacaacaacgcctggggcttttagagc

SEQ ID NO: 621969 - DNA, 75 bp, synthetic construct
  source 1..75: mol_type = other DNA
agccacatggtgatgttcgatctgccgttcaacccggatctactggagcagcgtattggtcgtctggatcgtatc

SEQ ID NO: 621970 - DNA, 75 bp, synthetic construct
  source 1..75: mol_type = other DNA
actgatttacgtggttgaagcccaggctccgaagcagttgcagctcaaccgcttcctgccaccgacgccggtacg

SEQ ID NO: 621971 - DNA, 75 bp, synthetic construct
  source 1..75: mol_type = other DNA
cctgaccagccatcgctctcagaaagtgctggtgatctgcgctaaagctgccactgcgctgcaactggagcaagt

SEQ ID NO: 621972 - DNA, 75 bp, synthetic construct
  source 1..75: mol_type = other DNA
catcgctcacagaaagtgctggtgatctgcgctaaagccgctaccgcgctgcaactggagcaggtactgcgcgag

SEQ ID NO: 621973 - DNA, 75 bp, synthetic construct
  source 1..75: mol_type = other DNA
tgctgctgtgctcggaaatcggttctgaagggcgtaacttccagttcgccagccacatggtaatgttcgatctgc

SEQ ID NO: 621974 - DNA, 75 bp, synthetic construct
  source 1..75: mol_type = other DNA
cagttgcagctcaaccgcttcctgccaccgacgccggtacgtatgctgctggataaaaacggcaacaacctggcg

SEQ ID NO: 621975 - DNA, 75 bp, synthetic construct
  source 1..75: mol_type = other DNA
acttcgcatggagctttggcgcgggtgtccgctatgacgtaaccccggatatcgctctggacctcagctatcgct

SEQ ID NO: 621976 - DNA, 75 bp, synthetic construct
  source 1..75: mol_type = other DNA
gtttatgttgcaaggcagttaaaaggtattgtactgctggatattaataagaataatctacgaaatatcttttac

SEQ ID NO: 621977 - DNA, 75 bp, synthetic construct
  source 1..75: mol_type = other DNA
ggattgtgctgctggatattaacaaaacaatctgcggaatatcttttatactcatgaccgccctctcctctggcg

SEQ ID NO: 621978 - DNA, 75 bp, synthetic construct
  source 1..75: mol_type = other DNA
gaaactggtgcaatccggttcttcggtgatgtttattgcaattgacatggacaagttaaagcaaataaatgacac

SEQ ID NO: 621979 - DNA, 75 bp, synthetic construct
  source 1..75: mol_type = other DNA
tccggctaaagcactggtagatgcgggctatgatggcatcgttagcgctggcgtgggtaacggcaacctgtataa

SEQ ID NO: 621980 - DNA, 75 bp, synthetic construct
  source 1..75: mol_type = other DNA
cacgtaagcacaccagtgatacgccgttcgatgtctctaagctgaatgaactgccgaaagtcggcattgtttata

SEQ ID NO: 621981 - DNA, 75 bp, synthetic construct
  source 1..75: mol_type = other DNA
acgataatgtctggctgacactggcgaaaaaaattaacaccgactgcgataaaaccgacggcttcgtcattaccc

SEQ ID NO: 621982 - DNA, 75 bp, synthetic construct
  source 1..75: mol_type = other DNA
agatcgacaagctcaacgggctgtggctgcgcgagttcagcgccatcaaggccgaactggatcgcgtgaacgccg

SEQ ID NO: 621983 - DNA, 75 bp, synthetic construct
  source 1..75: mol_type = other DNA
ttgtcacactcagactctgctgacaactttgcatggagccttggggctggtgtccgttatgacgtaaccccggat

SEQ ID NO: 621984 - DNA, 75 bp, synthetic construct
  source 1..75: mol_type = other DNA
gactctgctgacaactttgcatggagccttggggctggtgtccgttatgacgtaaccccggatatcgctcttgac

SEQ ID NO: 621985 - DNA, 75 bp, synthetic construct
  source 1..75: mol_type = other DNA
aggatttaagcaccgggaagaaagaggcgttaccagtagatgacgatggatacacgggcagtaatgctgtttttg

SEQ ID NO: 621986 - DNA, 75 bp, synthetic construct
  source 1..75: mol_type = other DNA
agcattgccaaaggatgacgatggatgcactggcagtactgccgtgtttggcgtgatcactcacatcatcaacga

SEQ ID NO: 621987 - DNA, 75 bp, synthetic construct
  source 1..75: mol_type = other DNA
cggtagctgcacttaccggcactttttcaacgctggcgctggcagatgcggataaaaccggtttctatatcacgg

SEQ ID NO: 621988 - DNA, 75 bp, synthetic construct
  source 1..75: mol_type = other DNA
agactggcgggtgcgccagcagctgcctgtcggagtcgggccgacgaccggatgccgccaggcagccgggagccg

SEQ ID NO: 621989 - DNA, 75 bp, synthetic construct
  source 1..75: mol_type = other DNA
atggctaaaaattttgtggccggtgcatctcaccctggacagatggaacgggagggggtcacgtctgccccccgg

SEQ ID NO: 621990 - DNA, 75 bp, synthetic construct
  source 1..75: mol_type = other DNA
gaagactgctgcgccatcaggcgcagtttcctcacacaccgtcaggtgtgcagggagcgcaggtcacggcgcgac

SEQ ID NO: 621991 - DNA, 75 bp, synthetic construct
  source 1..75: mol_type = other DNA
tctgcacgtacatgtggagtctacaggtgaacagtaccgatttgtcatgcctggcgcgacattaagtgacgatga

SEQ ID NO: 621992 - DNA, 75 bp, synthetic construct
  source 1..75: mol_type = other DNA
ggccgcaggggtggcggcaggagggaagactgctgcgccatcaggcgcagtttcctcacacaccgtcaggtgtgc

SEQ ID NO: 621993 - DNA, 75 bp, synthetic construct
  source 1..75: mol_type = other DNA
agtgaccgccgaggaaaaccgcctgctaattcactacaaaatcgcagatttcatcaacaatctgcgcggtggtga

SEQ ID NO: 621994 - DNA, 75 bp, synthetic construct
  source 1..75: mol_type = other DNA
ccgtggtcacctttttcgccaagttttaccatgtcaatgaatcgcccggtcattgggatagtaaccaaagcggat

SEQ ID NO: 621995 - DNA, 75 bp, synthetic construct
  source 1..75: mol_type = other DNA
cggggcacgcaacgtattagtaaccagcgcgataaataacatcggggttgcagaactttttaccttgttacatac

SEQ ID NO: 621996 - DNA, 75 bp, synthetic construct
  source 1..75: mol_type = other DNA
atgggatatatcacatatgtgactgatcaacgtccgggggagaccgatattctgaccggaaatgcgttttctgat

SEQ ID NO: 621997 - DNA, 75 bp, synthetic construct
  source 1..75: mol_type = other DNA
aaattgagcaagtaagaattttcatggataagcggggacttgagagcaagacccaggcaaaccatgagctggcaa

SEQ ID NO: 621998 - DNA, 75 bp, synthetic construct
  source 1..75: mol_type = other DNA
gcctgagtcgagtatacgggtggggatatgagcgtggatacgtgaagaataacccatgtaaaggagtcagaaaat

SEQ ID NO: 621999 - DNA, 75 bp, synthetic construct
  source 1..75: mol_type = other DNA
ggataaacgaggactagagagcaaaacccaggcaaaccatgaactggcaagcctgagtcgcgtatacggatgggg

SEQ ID NO: 622000 - DNA, 75 bp, synthetic construct
  source 1..75: mol_type = other DNA
gctgcccagcgttcgcctgtctacaaaatggcgatggactggaaactggcgctaccgctgcaccctgaatatcgc

SEQ ID NO: 622001 - DNA, 75 bp, synthetic construct
  source 1..75: mol_type = other DNA
ttgcagcagatgctggcagtttatccgcgcctggaaaactacgtcgacgagcgaaaccatgttgccaaagcatgg

SEQ ID NO: 622002 - DNA, 75 bp, synthetic construct
  source 1..75: mol_type = other DNA
aatagttcttcgcagggatattccacacggactgactacgatgccaaaagcacctgaactggtttccgctgaacc

SEQ ID NO: 622003 - DNA, 75 bp, synthetic construct
  source 1..75: mol_type = other DNA
acccaggcaaaccatgaactggcaagtctgagccgtgtatacggatggggatatgagcgtgggtatgtgaaaaat

SEQ ID NO: 622004 - DNA, 75 bp, synthetic construct
  source 1..75: mol_type = other DNA
atggtccttcctgcacatgccggaattgttatctacgggacgcgcattatttacccggcagaaaataaagaagtg

SEQ ID NO: 622005 - DNA, 75 bp, synthetic construct
  source 1..75: mol_type = other DNA
gggtatgtcagtatggcactggaacagcctgatagcactgtattactcagtctgctgctgttgtatgttatgtca

SEQ ID NO: 622006 - DNA, 75 bp, synthetic construct
  source 1..75: mol_type = other DNA
aatacagctttgatcaattgagtccggacgcagtgcgcaccacagaaacgcgttatcagtacagcgatgttaatg

SEQ ID NO: 622007 - DNA, 75 bp, synthetic construct
  source 1..75: mol_type = other DNA
cttcactggctgggattcaccattgatgagcctcagccatacggcattaataacctaccgtttcaccgtttccac

SEQ ID NO: 622008 - DNA, 75 bp, synthetic construct
  source 1..75: mol_type = other DNA
ggtattccgtggctggtgggcactgacgcgctggaaaaataccagcgtactttccttcgccgctgcggaaaagtg

SEQ ID NO: 622009 - DNA, 75 bp, synthetic construct
  source 1..75: mol_type = other DNA
cgccattgccaactatgaagatcgttttgttatcccgaccagccatcgggaaatggcgggcgatgccttcgcaga

SEQ ID NO: 622010 - DNA, 75 bp, synthetic construct
  source 1..75: mol_type = other DNA
ggataaacgagggcttgagagcaagacccaggcaaatcatgaactggcaagcctgagtcgagtatacgggtgggg

SEQ ID NO: 622011 - DNA, 75 bp, synthetic construct
  source 1..75: mol_type = other DNA
ctacagcagagcatatcgaagccattattccgcttgttcgccaggctgatatcgatgagtttctggcaaccaacg

SEQ ID NO: 622012 - DNA, 75 bp, synthetic construct
  source 1..75: mol_type = other DNA
gatggagtccgcgccgcgtgctggaaactggtctgcgcacgtcaacattttgctgtgccggattgattaacggtg

SEQ ID NO: 622013 - DNA, 75 bp, synthetic construct
  source 1..75: mol_type = other DNA
cgcacagtggggagaaatctcgtttgatgagattaaccaggccgttgccagcttgccgaaggccgggggcgatct

SEQ ID NO: 622014 - DNA, 75 bp, synthetic construct
  source 1..75: mol_type = other DNA
ataatagaataaatataacaccaatggggataaagatacatgaaatagtcaatgggaatgataagttgttttttt

SEQ ID NO: 622015 - DNA, 75 bp, synthetic construct
  source 1..75: mol_type = other DNA
ggcatccatttaggatagttctcgggaataaaatattgtatccatcagaagaacttgtaaagtttataagaacct

SEQ ID NO: 622016 - DNA, 75 bp, synthetic construct
  source 1..75: mol_type = other DNA
cattgatatatttgcctagcggtgatatttatcatatttcagatatctataaaatgtccagaggtagaaaatcgt

SEQ ID NO: 622017 - DNA, 75 bp, synthetic construct
  source 1..75: mol_type = other DNA
aatggcaaatgaaacgggaaatgttgagtcagtgttatacaactaaatggcgagatattcccctggccaggctgg

SEQ ID NO: 622018 - DNA, 75 bp, synthetic construct
  source 1..75: mol_type = other DNA
ggaaccgcccctgaatggcaaatgaaacgggaaatgctttctcctgcgtataccaccagatggacagatttgcca

SEQ ID NO: 622019 - DNA, 75 bp, synthetic construct
  source 1..75: mol_type = other DNA
ttttcatatttatatgataattttcagatcgttgatagtgatgtgcatattaagcttcttcatctcaacagagaa

SEQ ID NO: 622020 - DNA, 75 bp, synthetic construct
  source 1..75: mol_type = other DNA
gcggtggttgattactttaaagcgggtaataccatcacggatgaacagatcaacggtatgcgcgtgaaagatatt

SEQ ID NO: 622021 - DNA, 75 bp, synthetic construct
  source 1..75: mol_type = other DNA
atatattttatcagaacagcagcaaaacattgtgggataaaccttataccattattgagaaagatggtgtgaaaa

SEQ ID NO: 622022 - DNA, 75 bp, synthetic construct
  source 1..75: mol_type = other DNA
agaatggctaaatcatcagcagagcgcaaagccgatcagagagccaagcaagcatcatccggtatgcgtaagctg

SEQ ID NO: 622023 - DNA, 75 bp, synthetic construct
  source 1..75: mol_type = other DNA
cccaggaggcctggacatgcaacgatggctctgtccactggaaaaaactcgaccctaaccgtgatggacttctgt

SEQ ID NO: 622024 - DNA, 75 bp, synthetic construct
  source 1..75: mol_type = other DNA
ggtgattattttaccgggccatatatcagcagcctgaccaaaggtaaggctattatcgatattatgaatactatg

SEQ ID NO: 622025 - DNA, 75 bp, synthetic construct
  source 1..75: mol_type = other DNA
agacggcaagtcaggtgaaagggctggatattttgatcaccggacatgcacatgtgggtacgccggaaccgatta

SEQ ID NO: 622026 - DNA, 75 bp, synthetic construct
  source 1..75: mol_type = other DNA
ccacacaggacagccgggacattattgccgcagcatgcagagcgttaaaccatgtctggcgtgaagggtgccgct

SEQ ID NO: 622027 - DNA, 75 bp, synthetic construct
  source 1..75: mol_type = other DNA
gctggggaacggtgaatttctctatatacctattcctatctggatattaatcatcttattgctggttaatcattt

SEQ ID NO: 622028 - DNA, 75 bp, synthetic construct
  source 1..75: mol_type = other DNA
gcgttggcggcaagcgatccgctgcctgctgaattacgccagtttcgtcactgttttcaggccgcgctcaatggc

SEQ ID NO: 622029 - DNA, 75 bp, synthetic construct
  source 1..75: mol_type = other DNA
ctgaattacgccagtttcgtcactgttttcaggccgcgctcaatggcgttaagaccgactggcggcactggctgg

SEQ ID NO: 622030 - DNA, 75 bp, synthetic construct
  source 1..75: mol_type = other DNA
gggggtggatcactcccagtaaagacgatgtggcaacagggtataccattacgccaggtaaagaattcaatctca

SEQ ID NO: 622031 - DNA, 75 bp, synthetic construct
  source 1..75: mol_type = other DNA
tcgttcagcaccctttaaggactgcgaaggcggcctgtggggctggataactatcatgcacaacgatgtgtcgaa

SEQ ID NO: 622032 - DNA, 75 bp, synthetic construct
  source 1..75: mol_type = other DNA
cgtttattgtcaccgttgctactatggggatcttccgtggtatcgcttatatagtgactgatggtatgcccatca

SEQ ID NO: 622033 - DNA, 75 bp, synthetic construct
  source 1..75: mol_type = other DNA
tggctgcaaagaattttttcacatgttcatttattacctttttatccatggtcatctgatgatggattttcggta

SEQ ID NO: 622034 - DNA, 75 bp, synthetic construct
  source 1..75: mol_type = other DNA
gattaattacacagcgacgtaaaaaacactgggatgaaagtgatgtcgtgttaattacctatgccgatcaatttc

SEQ ID NO: 622035 - DNA, 75 bp, synthetic construct
  source 1..75: mol_type = other DNA
cagaagcagaagacaagctctccagcctaaaccaccgtaagaagcaaatccgcaatagaattactcaggggcgcg

SEQ ID NO: 622036 - DNA, 75 bp, synthetic construct
  source 1..75: mol_type = other DNA
tttacgttatgccgcgcaaggatatttcgcctcgccactcctgcactttgttcatgctctgagttgcccgaaacg

SEQ ID NO: 622037 - DNA, 75 bp, synthetic construct
  source 1..75: mol_type = other DNA
atgacgatcatccatcctctgcttgccagtcgtagcgcaccagactatcgccagtcctggcggttagcgggcgtc

SEQ ID NO: 622038 - DNA, 75 bp, synthetic construct
  source 1..75: mol_type = other DNA
attgattatcatcaggtcgccagtgaagcgggggagtggcaggatattcagcaactcggtgaatgcagtcattta

SEQ ID NO: 622039 - DNA, 75 bp, synthetic construct
  source 1..75: mol_type = other DNA
aaggtcgatgtttgtggtcatggtttcaggactatggcatgtagctcgttgattgaatcggggttgtggtcgagg

SEQ ID NO: 622040 - DNA, 75 bp, synthetic construct
  source 1..75: mol_type = other DNA
cttccgggcaatggcctgtagttcgttgattgagtcaggtctttggtccagagatgcggtcgaacgtcagatgag

SEQ ID NO: 622041 - DNA, 75 bp, synthetic construct
  source 1..75: mol_type = other DNA
acggcggtgggtgttacctggctggcaggctttgattttgaaattaaagtgatagcgcgcatccctgagctgtaa

SEQ ID NO: 622042 - DNA, 75 bp, synthetic construct
  source 1..75: mol_type = other DNA
actgacagaacttcagacatgggctggtgaaaatggtctgatatttacgggtgcacatgacccgcgtaaaccaat

SEQ ID NO: 622043 - DNA, 75 bp, synthetic construct
  source 1..75: mol_type = other DNA
cgataaggtactcaaaagcctcgaaacacacgttttcccctttatcggcaaccggaacatcacaacactcaatac

SEQ ID NO: 622044 - DNA, 75 bp, synthetic construct
  source 1..75: mol_type = other DNA
aggcgtaaaattctcacaccggggctccaagatgcgaacaccacatcttgtgccactcagcaaacaggctgtagc

SEQ ID NO: 622045 - DNA, 75 bp, synthetic construct
  source 1..75: mol_type = other DNA
atgcactctaggggggtgagaagccccgaccggggttcgacaactggcgcagccagttggacagaccacgaacgc

SEQ ID NO: 622046 - DNA, 75 bp, synthetic construct
  source 1..75: mol_type = other DNA
acctttcaattgggcaactccaccagttagtgttctcatggaagttaatgttaattgggattctgaaatgcctaa

SEQ ID NO: 622047 - DNA, 75 bp, synthetic construct
  source 1..75: mol_type = other DNA
cacagtgtgatcagaatgctgaaatatcagctgaagaacgagaatggctagatgcaccagcgactggtcagaagg

SEQ ID NO: 622048 - DNA, 75 bp, synthetic construct
  source 1..75: mol_type = other DNA
gtgggcggattatttggatgctaatcgtgaacaaacgatttcgccattcgactttgcaaagttgaataatccaat

SEQ ID NO: 622049 - DNA, 75 bp, synthetic construct
  source 1..75: mol_type = other DNA
tcagcaaacaggctgtagccatactgacagaacttcagacatgggctggtgaaaatggtctgatctttacaggag

SEQ ID NO: 622050 - DNA, 75 bp, synthetic construct
  source 1..75: mol_type = other DNA
cgagcttttttttcgcattttatctgtctgtacggcagtgaacatggtgggcgggtggagtatgttacctgtgaa

SEQ ID NO: 622051 - DNA, 75 bp, synthetic construct
  source 1..75: mol_type = other DNA
gcattgaccacggtaaaacgccagcatcgcccagctcttgatctttctcgcctgcctgaacttgtgtcgcgtatt

SEQ ID NO: 622052 - DNA, 75 bp, synthetic construct
  source 1..75: mol_type = other DNA
gttcccgttactggcgtctccgttatcgtattctgggtaaggagaagactctggcacttggtgtgtatccggaag

SEQ ID NO: 622053 - DNA, 75 bp, synthetic construct
  source 1..75: mol_type = other DNA
acaatgccatgtggactattccagccgaacgcaaacctctgccaggggtaaaattctcacaccggggctccaaga

SEQ ID NO: 622054 - DNA, 75 bp, synthetic construct
  source 1..75: mol_type = other DNA
caacgtcgcccgcgccattgcccatcttggaggcagtgccacagcgatcttcccggtgggtggtgcgaccggcga

SEQ ID NO: 622055 - DNA, 75 bp, synthetic construct
  source 1..75: mol_type = other DNA
cgacttgctgttatgctgaatttactggtttttattcgctccagtgaactcagatatgcccgctggtcagaaatt

SEQ ID NO: 622056 - DNA, 75 bp, synthetic construct
  source 1..75: mol_type = other DNA
tccaagatgcgaacaccacatcttgtgccactcagcaagcaggctgtggctattcttacagaacttcagacatgg

SEQ ID NO: 622057 - DNA, 75 bp, synthetic construct
  source 1..75: mol_type = other DNA
aatcacacagcgataaagtactcaaaagcctcgagacacacgttttcccctttatcggcaaccgggatatcacaa

SEQ ID NO: 622058 - DNA, 75 bp, synthetic construct
  source 1..75: mol_type = other DNA
gcattgaccacggtaaaacgccagcatcgcccggctcttgatctttctcgcctgcctgaacttatgtcgcgtatt

SEQ ID NO: 622059 - DNA, 75 bp, synthetic construct
  source 1..75: mol_type = other DNA
gcattgaccacggtaaaacgccagcatcgcccggctcttgatctttcacgcctgcctgaacttttgtcgcgtatt

SEQ ID NO: 622060 - DNA, 75 bp, synthetic construct
  source 1..75: mol_type = other DNA
gcattgaccacggtaaaacgccagcatcgcccagctcttgatctttcgcgcctgcctgaacttttgtcgcgtatt

SEQ ID NO: 622061 - DNA, 75 bp, synthetic construct
  source 1..75: mol_type = other DNA
agagtgttttatctgtgaactcaggctgccagatcatcgtttccgatggaagcataataagctttttctgcttct

SEQ ID NO: 622062 - DNA, 75 bp, synthetic construct
  source 1..75: mol_type = other DNA
cttgctgttatgctgaatttactggtttttattcgttccagtgaactcagatatgcccgttggtctgaaattgat

SEQ ID NO: 622063 - DNA, 75 bp, synthetic construct
  source 1..75: mol_type = other DNA
cttgcagttatgctgaatttactggtttttattcgttccagtgaactcagataggcccgttggtctgaaattgat

SEQ ID NO: 622064 - DNA, 75 bp, synthetic construct
  source 1..75: mol_type = other DNA
cgcgccgtatcgactttcgtcaactgcggcaaagcgttgccggaacatggcattgaaatccgcaatgaagcaggt

SEQ ID NO: 622065 - DNA, 75 bp, synthetic construct
  source 1..75: mol_type = other DNA
tctgccaaaaccgctacgcttgacgcgcccgcgcacaggcaacggtccgcgtcgtacaggcgctccacgtaatcg

SEQ ID NO: 622066 - DNA, 75 bp, synthetic construct
  source 1..75: mol_type = other DNA
cgattattttcgccaacaccaaacaccgttgtgaagagatctggggccacctggcggcagatggtcatcgtgtcg

SEQ ID NO: 622067 - DNA, 75 bp, synthetic construct
  source 1..75: mol_type = other DNA
ttctggttgctaccgacgtagccgcacgtggtttgcatattccggccgtaacccacgtctttaactacgatttac

SEQ ID NO: 622068 - DNA, 75 bp, synthetic construct
  source 1..75: mol_type = other DNA
aagatttttgaagaaaagatggttaatgaattaaaaattagaacaagaatgatgaaaatcctccggaagatttat

SEQ ID NO: 622069 - DNA, 75 bp, synthetic construct
  source 1..75: mol_type = other DNA
atgttgcaacgtatgctgggcagtggctggggagtgtttctgccaggattgctgattgcagggctgacgtatgcg

SEQ ID NO: 622070 - DNA, 75 bp, synthetic construct
  source 1..75: mol_type = other DNA
gctcagtctgacacgacgagtaggcatgtcagttaatagttttcaagtagttcctgatatattgcaagtgactga

SEQ ID NO: 622071 - DNA, 75 bp, synthetic construct
  source 1..75: mol_type = other DNA
tgttctggatattccaccaaatagtccagagcaagaaggtaagaatgcactgaagtttgcgatgcaaaacagaat

SEQ ID NO: 622072 - DNA, 75 bp, synthetic construct
  source 1..75: mol_type = other DNA
acaagaaggtaagaatgcactgaagtttgcgatgcaaaacagaatcaaattatttaccggccggcgggtattgct

SEQ ID NO: 622073 - DNA, 75 bp, synthetic construct
  source 1..75: mol_type = other DNA
aaattgctggtaaatcgtagcggcaatgggctggtgataaaaaatgattcgccgaactgggtgacgatttccgat

SEQ ID NO: 622074 - DNA, 75 bp, synthetic construct
  source 1..75: mol_type = other DNA
cctcaacatgctgttctccgccacgctttcgtaccgggtacgtgaactggcgttcgagcagatgaataacgccga

SEQ ID NO: 622075 - DNA, 75 bp, synthetic construct
  source 1..75: mol_type = other DNA
atatatcgaagtggaaccggaacagaaaacgggccaccgtattaaagaagagcttttctacccttctaacgaaga

SEQ ID NO: 622076 - DNA, 75 bp, synthetic construct
  source 1..75: mol_type = other DNA
acaggaaagtcagagagtcgatgtaaaaaatcataatgcgaatagttggcaactgaccattattgatgatcacgg

SEQ ID NO: 622077 - DNA, 75 bp, synthetic construct
  source 1..75: mol_type = other DNA
cagatattcgcctggtggcgtttatgcagtatctgcgagttctgtttgtcgcgggcgcggcggttctggtagcgc

SEQ ID NO: 622078 - DNA, 75 bp, synthetic construct
  source 1..75: mol_type = other DNA
ggcgggtttacgcaaggctattgaagagggtaaattagagagcttcgtaactgatttttaccagcgtcaggggcg

SEQ ID NO: 622079 - DNA, 75 bp, synthetic construct
  source 1..75: mol_type = other DNA
gccgtatcctgctgactgggattacgcaaaacgctccatggagatgtctctgcgttgggcgaagcgtagccgtga

SEQ ID NO: 622080 - DNA, 75 bp, synthetic construct
  source 1..75: mol_type = other DNA
aaatcaatggagattcagtacgatcttggttcggatatcgtcatgatctttgatgagtgtacgccgtatcctgct

SEQ ID NO: 622081 - DNA, 75 bp, synthetic construct
  source 1..75: mol_type = other DNA
atgccgattttccaacgctggttgatgctttggacctacgccgctctgagtagcgccggaatgaatttttatgac

SEQ ID NO: 622082 - DNA, 75 bp, synthetic construct
  source 1..75: mol_type = other DNA
acgccttgttttatgcctgttggcacttacggcaccgtaaaagggatgacgccggaagaagttgaagccactggc

SEQ ID NO: 622083 - DNA, 75 bp, synthetic construct
  source 1..75: mol_type = other DNA
aggtgagccgaaagcagatatgcaccgtattctggagcatgtgtgtccgcagattccggcagacaaaccgcgtta

SEQ ID NO: 622084 - DNA, 75 bp, synthetic construct
  source 1..75: mol_type = other DNA
gtacccggtttggtgctttccttgaccctgtcgcagataaagttctcgtggctatcgccatggtgctggtaaccg

SEQ ID NO: 622085 - DNA, 75 bp, synthetic construct
  source 1..75: mol_type = other DNA
acgctggaggttaactggccgattgtgttagctattttactggtgacgttgctttccagcgctatcgtgggatgg

SEQ ID NO: 622086 - DNA, 75 bp, synthetic construct
  source 1..75: mol_type = other DNA
atattactgcgggcattgcgcccgctgccacaaatcctgctgtcgatttttgctctgctggctatttgtgcaggt

SEQ ID NO: 622087 - DNA, 75 bp, synthetic construct
  source 1..75: mol_type = other DNA
caactacggcattatgtattgctaccatcgtgcctggcgcttatttctggtgtcatgctgatgataataaactgg

SEQ ID NO: 622088 - DNA, 75 bp, synthetic construct
  source 1..75: mol_type = other DNA
atgttgcaacgtatgctgggcagtggttggggagtgttgctgccgggattgctgattgcagggatgacgtatgcg

SEQ ID NO: 622089 - DNA, 75 bp, synthetic construct
  source 1..75: mol_type = other DNA
ttcaatgcgacgcattaactattcttgctcatctccaggattgcaaactggaagaggcgctccccgtcgctcttg

SEQ ID NO: 622090 - DNA, 75 bp, synthetic construct
  source 1..75: mol_type = other DNA
agccgatcctcaacgttgaagttatccgcaaaaatatggacgagcctcgggagttctggacgtatgattgccgga

SEQ ID NO: 622091 - DNA, 75 bp, synthetic construct
  source 1..75: mol_type = other DNA
cctttcacgtaatcgctgattacttagacaaagagtatattgaattattatcacaattagcaacgaaatatcgaa

SEQ ID NO: 622092 - DNA, 75 bp, synthetic construct
  source 1..75: mol_type = other DNA
cattctcaacgcccagtggttgcaagccagtatggacgcgccgcgtcagtatgcgacttatgactgtaagagagt

SEQ ID NO: 622093 - DNA, 75 bp, synthetic construct
  source 1..75: mol_type = other DNA
ttgcgcgtctggaaatgcgcgtcggaaagattgtggaagttaaacgccatgaaaacgctgataagctgtacatcg

SEQ ID NO: 622094 - DNA, 75 bp, synthetic construct
  source 1..75: mol_type = other DNA
caatctgcaaaaagcgaaaatgcgcggtgaaacgtcggaatgcatgctgttgtgtgcggaaaccgatgacggcag

SEQ ID NO: 622095 - DNA, 75 bp, synthetic construct
  source 1..75: mol_type = other DNA
ttgcgctggcggtcacaatttcgataagatcttatgggcgatttttatcggtatcatgcttctatgataagccat

SEQ ID NO: 622096 - DNA, 75 bp, synthetic construct
  source 1..75: mol_type = other DNA
tacagggatttgccgtcggcggcgaatggggaggcgcagcgttactttccgttgaaagtgcaccgaaaaataaaa

SEQ ID NO: 622097 - DNA, 75 bp, synthetic construct
  source 1..75: mol_type = other DNA
ttccgaccgctcggcggtgtcattttcggtcactttggtgaccgactgggacgtaagcgcatgttaatgctgacc

SEQ ID NO: 622098 - DNA, 75 bp, synthetic construct
  source 1..75: mol_type = other DNA
atgctggcaaacattgcgcatgacatggtggtgtgtgtgcaacaaccgatgtttaccgaaatgtttggtgccagt

SEQ ID NO: 622099 - DNA, 75 bp, synthetic construct
  source 1..75: mol_type = other DNA
cgcgagtttttcccgcaagtaagcccggcgatgggaacgctcgccgcatttgccacctttggcgtcggattcctt

SEQ ID NO: 622100 - DNA, 75 bp, synthetic construct
  source 1..75: mol_type = other DNA
cgttttggtcgccgcagggtttatatcacaggcgcgttaatcggaacgttgagcgcatttcctttctttatggcg

SEQ ID NO: 622101 - DNA, 75 bp, synthetic construct
  source 1..75: mol_type = other DNA
gcttttctgaagattattgcgctacgactgtgcgagttgctgacgatgtacatcgttaccgcctttgcgcttaac

SEQ ID NO: 622102 - DNA, 75 bp, synthetic construct
  source 1..75: mol_type = other DNA
tttggagagcctcagacacgcgctattactgatgggcaggagatgtggaactactcaagtatgacgggagaaagc

SEQ ID NO: 622103 - DNA, 75 bp, synthetic construct
  source 1..75: mol_type = other DNA
acattatagacctgctgtcgtcccagtatccgcagatacagttttctacgcctgataacccgtgtacggttgcgc

SEQ ID NO: 622104 - DNA, 75 bp, synthetic construct
  source 1..75: mol_type = other DNA
aaaagaccgtccggtgttgatttcattcccgacagggacattaggtgatctactcggttggtttccttatgcaga

SEQ ID NO: 622105 - DNA, 75 bp, synthetic construct
  source 1..75: mol_type = other DNA
atcccgactgggcgaacaatcgctggattgttggtggaacagggaccatcacaagctgttttcgctctgtagcgt

SEQ ID NO: 622106 - DNA, 75 bp, synthetic construct
  source 1..75: mol_type = other DNA
ggtaagcaggtaaacggcgtcatcgacaaacttcatgcctctctggcagaacaaagtagtattggtatgaattat

SEQ ID NO: 622107 - DNA, 75 bp, synthetic construct
  source 1..75: mol_type = other DNA
ccggcacccaggttaatggtgtcatcaataaacttcaccgtctttttagtgagcagagtgttgagagcgctctag

SEQ ID NO: 622108 - DNA, 75 bp, synthetic construct
  source 1..75: mol_type = other DNA
caagtttaagctatttacaggatctggatgtcgacattctgaagatcgataaatctttcgttgatgcgctggaat

SEQ ID NO: 622109 - DNA, 75 bp, synthetic construct
  source 1..75: mol_type = other DNA
cagacagatcgcgcttgaactcactgaacgcgagtttgccgatccgaaaaccagcgccccgataatttctcgcta

SEQ ID NO: 622110 - DNA, 75 bp, synthetic construct
  source 1..75: mol_type = other DNA
cgctggttttttctggacgataacagtatcagcgttcaacaagccgttaagtttgctcttattcatcaacatcac

SEQ ID NO: 622111 - DNA, 75 bp, synthetic construct
  source 1..75: mol_type = other DNA
aggtcggctttcatcgctcagccggttacattctgggtgttgacccacgggaagcaccggtccggcttgacctgt

SEQ ID NO: 622112 - DNA, 75 bp, synthetic construct
  source 1..75: mol_type = other DNA
acggcaccggctggagtgaggtcatcgcacacctgaaatcactgggttaccgggtgatgtgcattgaccgggatg

SEQ ID NO: 622113 - DNA, 75 bp, synthetic construct
  source 1..75: mol_type = other DNA
gtcgacgtgggcaacaaataccatctgttggaatgccgaatcacacatggttttgcgtacttgatatcgatggta

SEQ ID NO: 622114 - DNA, 75 bp, synthetic construct
  source 1..75: mol_type = other DNA
tatcgctacagcggcgcgggggtcggataccaggttgccagtgtggtagggggtggatttacaccttttattgct

SEQ ID NO: 622115 - DNA, 75 bp, synthetic construct
  source 1..75: mol_type = other DNA
ttaaaaacaggatttccggtctggaattattgaagacaaaaatcctttccgggacagtttctgatatagcagaaa

SEQ ID NO: 622116 - DNA, 75 bp, synthetic construct
  source 1..75: mol_type = other DNA
ctgatgagagctatcatggactgttaccacatgacaggttcaggaaaatccctcactccgtggatttgtgggaag

SEQ ID NO: 622117 - DNA, 75 bp, synthetic construct
  source 1..75: mol_type = other DNA
cagatggctgcttgataatgaaccggataccctgaaaaacaatataatggcattgctgagtcagacggatagtcg

SEQ ID NO: 622118 - DNA, 75 bp, synthetic construct
  source 1..75: mol_type = other DNA
agtcgtgtgtgaattactggggcgtaactacaccatcagttacccactggtggcgtttcagtccggaaaaatgtt

SEQ ID NO: 622119 - DNA, 75 bp, synthetic construct
  source 1..75: mol_type = other DNA
tgtatcaccgatacaaccgttgcccccgtgtggggcagtggttcaccaccagcaacggccacgttctgcgggttt

SEQ ID NO: 622120 - DNA, 75 bp, synthetic construct
  source 1..75: mol_type = other DNA
tggtacaccacgcctgcagggcatgttctacgtgttagcctggttgaccgtgaatgtcagaaggtgatttgtgaa

SEQ ID NO: 622121 - DNA, 75 bp, synthetic construct
  source 1..75: mol_type = other DNA
ctttggtcgtcagctgccggacacgctgccactgctggcattcgacaaacagcctttgaataaccctcttgaaat

SEQ ID NO: 622122 - DNA, 75 bp, synthetic construct
  source 1..75: mol_type = other DNA
cacaacctgagctttacgtctccgttgtatggtgtgtaccgaaaccctgactttggtcgtcgactgcctgacacg

SEQ ID NO: 622123 - DNA, 75 bp, synthetic construct
  source 1..75: mol_type = other DNA
caagtgcagtattactgggtggcgtcctcggcgcactgcttagtcaacgcttaccggaacggatccgtgtctcta

SEQ ID NO: 622124 - DNA, 75 bp, synthetic construct
  source 1..75: mol_type = other DNA
tcccttgattatattaatgaagagtatctgcctaatctctatatctatagtttaagagacatgaatgaattcaag

SEQ ID NO: 622125 - DNA, 75 bp, synthetic construct
  source 1..75: mol_type = other DNA
ccagttaacactggcgtgggctgccgcgctgatattaccgctgaccacaccgtcgatgatggcagacttcagcgc

SEQ ID NO: 622126 - DNA, 75 bp, synthetic construct
  source 1..75: mol_type = other DNA
gagctatgaaagtgcactgcgtgtattccagcgccatttccgttccgacccgggtgataacgaggcgatcgtcaa

SEQ ID NO: 622127 - DNA, 75 bp, synthetic construct
  source 1..75: mol_type = other DNA
caccgggatcttcggcgcgatgaatgaagggatgaccggcgatccgagcattttaatcgccaagtcatttctgga

SEQ ID NO: 622128 - DNA, 75 bp, synthetic construct
  source 1..75: mol_type = other DNA
aaagcacagcctggtggtgaagggggacctggcgaggaaggtgagtggcgcgctggggataaaggtcgacgggga

SEQ ID NO: 622129 - DNA, 75 bp, synthetic construct
  source 1..75: mol_type = other DNA
gaagcggctttaatgaactgcggtttgaagacgccacgggcggtgaacaggtctatatccacgcgcagaagaaca

SEQ ID NO: 622130 - DNA, 75 bp, synthetic construct
  source 1..75: mol_type = other DNA
aagaaaatgaagactctggagggaactgcgtgaccggaagtggtggtgatgatcgaggtgacgatgaggatgaac

SEQ ID NO: 622131 - DNA, 75 bp, synthetic construct
  source 1..75: mol_type = other DNA
tccggtacaaagctacagggttaacggacaactgatccattacaaaggtgtaggaaaatatccacgggtactcaa

SEQ ID NO: 622132 - DNA, 75 bp, synthetic construct
  source 1..75: mol_type = other DNA
tggctcgaatccaccagacgaacgctggaagcaatggtgaaagatgggttgctggagaggtaccggagcagggag

SEQ ID NO: 622133 - DNA, 75 bp, synthetic construct
  source 1..75: mol_type = other DNA
gcaacacgacgaacgttaaacgctatggtaaatgatgggatcctgtatcgcgtgaaagtgcacgaaccccgtttt

SEQ ID NO: 622134 - DNA, 75 bp, synthetic construct
  source 1..75: mol_type = other DNA
gagcaggatttttacgccagtggcccgaaccagaagtgggcgggagacatcacgtattgtgtgcccggagttcag

SEQ ID NO: 622135 - DNA, 75 bp, synthetic construct
  source 1..75: mol_type = other DNA
tacggttggcaggaggactcaacctatattcgcttatcgcctttctttgatgaaatgcaggcaacaccagcacca

SEQ ID NO: 622136 - DNA, 75 bp, synthetic construct
  source 1..75: mol_type = other DNA
gagaaaggagtcaatacagcggttgccagagcgcaaaatctgtttcgccactcgcacaagaagccagcgcatgaa

SEQ ID NO: 622137 - DNA, 75 bp, synthetic construct
  source 1..75: mol_type = other DNA
ctggcgaggaaggtgagtggcgcgctggggataaaggtcgacggggatatcgtgctggagagcagcagccggata

SEQ ID NO: 622138 - DNA, 75 bp, synthetic construct
  source 1..75: mol_type = other DNA
cggataagcctgaaggtgggtggctcgtttgtggtcatccattcagggggcgtggacatcgtcgggccgaaaatc

SEQ ID NO: 622139 - DNA, 75 bp, synthetic construct
  source 1..75: mol_type = other DNA
cgccgcgggcatctcagccgggattgcactggatgacgccactgccgccggtgaggtgatccgtatcctgcgcgg

SEQ ID NO: 622140 - DNA, 75 bp, synthetic construct
  source 1..75: mol_type = other DNA
caggccaaaaatggatcccgaaagattgaggttttcaaactcaaacatgtcaatcgcaaccgaacaacgattgtc

SEQ ID NO: 622141 - DNA, 75 bp, synthetic construct
  source 1..75: mol_type = other DNA
tggtgaaccggagaccaatctgttccagcagacctggaaagtcgctgtcaggaaaaacaccaaaaacagcgatca

SEQ ID NO: 622142 - DNA, 75 bp, synthetic construct
  source 1..75: mol_type = other DNA
atatccttgtaaaagaagagaaactggctcaggaacttctggaacagattaagaatggcgccgattttggcaagc

SEQ ID NO: 622143 - DNA, 75 bp, synthetic construct
  source 1..75: mol_type = other DNA
atgtgcgaactgctcgggatgagcgccaacgtcccaaccgatatctgctttagtttcactgggcttgtgcagcgc

SEQ ID NO: 622144 - DNA, 75 bp, synthetic construct
  source 1..75: mol_type = other DNA
ggtggtggaaccgggccacataaagatggctggggcattaccttttacgaaggtaaaggctgtcgcacatttaaa

SEQ ID NO: 622145 - DNA, 75 bp, synthetic construct
  source 1..75: mol_type = other DNA
gacaaactggaccgttttgtagaacagaacttaattcctgcatatacaagcggtacaaaacgaagagcgaatcca

SEQ ID NO: 622146 - DNA, 75 bp, synthetic construct
  source 1..75: mol_type = other DNA
gcgtcctgtcactctggatgggatggcggtggatgcgatacctcaagttcatccagttactcaggatcatgctgt

SEQ ID NO: 622147 - DNA, 75 bp, synthetic construct
  source 1..75: mol_type = other DNA
atgtgcgaattgctcgggatgagcgccaacgtccctaccgatatctgctttagtttcaccggtctggtgcagcgt

SEQ ID NO: 622148 - DNA, 75 bp, synthetic construct
  source 1..75: mol_type = other DNA
ggaaaccggcaacttccgcccggtcggtgaaaccgatagcgaaaaagccttttgctggctcctgcataaattaac

SEQ ID NO: 622149 - DNA, 75 bp, synthetic construct
  source 1..75: mol_type = other DNA
ttccggcgttcgataaagtggttttctcttgtccggtactggagccaaccggcccgctgcatacccagttcgggt

SEQ ID NO: 622150 - DNA, 75 bp, synthetic construct
  source 1..75: mol_type = other DNA
catgaatcgcgcaacaacccatacgcgataaacgtcaacgttcctaaaggaacaaaatcaccgttagccagacaa

SEQ ID NO: 622151 - DNA, 75 bp, synthetic construct
  source 1..75: mol_type = other DNA
acgtcaccaggcggcgattcaccgaagttttacgcttctgtgcgcatccgtctcggtgcatcggtgatgaaggat

SEQ ID NO: 622152 - DNA, 75 bp, synthetic construct
  source 1..75: mol_type = other DNA
aagcgcttaaaggccgtggccccaaaaatccgcgtccagctagtttgaacattgcagccgctaggattgtgaagc

SEQ ID NO: 622153 - DNA, 75 bp, synthetic construct
  source 1..75: mol_type = other DNA
atgaaatacccgttaaaatatccgcaagtaatgctgagacagcaaactttgctactgatgttgtaaatacctata

SEQ ID NO: 622154 - DNA, 75 bp, synthetic construct
  source 1..75: mol_type = other DNA
gttattatgggcatccgcacatcaattgccttagtaccttgcggatttatgctactggcattcgtcattatctgg

SEQ ID NO: 622155 - DNA, 75 bp, synthetic construct
  source 1..75: mol_type = other DNA
gtcactgccggtggcgttggttgcgttggccatcgcttcaattggtcagggcgttaccatgaccgtgatgtgggc

SEQ ID NO: 622156 - DNA, 75 bp, synthetic construct
  source 1..75: mol_type = other DNA
ttgaacagcgcatcgatctgaatcaactgttgatccagcatcccagcgcgacttatttcgtcaaagcaagtggtg

SEQ ID NO: 622157 - DNA, 75 bp, synthetic construct
  source 1..75: mol_type = other DNA
gttgaggacgtgaagtcgtgggtcagacgcacgcttgattcgtttgattttgaacgaaaaatactgttgctctgg

SEQ ID NO: 622158 - DNA, 75 bp, synthetic construct
  source 1..75: mol_type = other DNA
atgcataccactcgactgaagaaggttggcggctcagtaatgctgaccgttccaccggcactgctgaatgctctg

SEQ ID NO: 622159 - DNA, 75 bp, synthetic construct
  source 1..75: mol_type = other DNA
gctggcacagagccacgcccgccgcgcagacagcaaaaagcagctggccacagtgccactggatatctggaacga

SEQ ID NO: 622160 - DNA, 75 bp, synthetic construct
  source 1..75: mol_type = other DNA
gcggatatcgtccggggcgcacaaatccggttgcaggtgggagacgaaacggtgctcagtgggcgcatagacagc

SEQ ID NO: 622161 - DNA, 75 bp, synthetic construct
  source 1..75: mol_type = other DNA
cgccagggaagcccgacgtgaactggaagagattttccagcgtgaaatgcaacaagaacgacgccagctggacgg

SEQ ID NO: 622162 - DNA, 75 bp, synthetic construct
  source 1..75: mol_type = other DNA
atccgctcacggataaaaaattcaaagaaatcgtggttgaaattgataatcgtaaaaaagtgcagcagcaattaa

SEQ ID NO: 622163 - DNA, 75 bp, synthetic construct
  source 1..75: mol_type = other DNA
atcagctgacgctggacgaggtcatcgacaggatagtcagaccactggggatacagcgcatccgtatacaggcgt

SEQ ID NO: 622164 - DNA, 75 bp, synthetic construct
  source 1..75: mol_type = other DNA
cgacaggatagtcagaccgctggggatacagcgcatccgtattcaggcgtccggtgtgtcacgtaatgacaaggt

SEQ ID NO: 622165 - DNA, 75 bp, synthetic construct
  source 1..75: mol_type = other DNA
cgtaactggacttatgcccataatggacaactgacgggctacaaatcactggaaactggcaactttcgtccggta

SEQ ID NO: 622166 - DNA, 75 bp, synthetic construct
  source 1..75: mol_type = other DNA
gagcggggaatttaatgctaagttcctttttactgatgatgatggtctaccttatgccaacacaaaatatattgc

SEQ ID NO: 622167 - DNA, 75 bp, synthetic construct
  source 1..75: mol_type = other DNA
caaaggcgtggcgatcgccagcggagagcacctgcaactggcggcatcgaaaaacctgatcgcgaacgcaggaaa

SEQ ID NO: 622168 - DNA, 75 bp, synthetic construct
  source 1..75: mol_type = other DNA
cacccttaacggcggtggcagctacatccggctggatgcctgcgggatagaagcgggaacgccgggagaatataa

SEQ ID NO: 622169 - DNA, 75 bp, synthetic construct
  source 1..75: mol_type = other DNA
gtttaacgggtatcgtgaccaccacggataacggtggttcaacggggcgtattcgccgctcagaaggtggaattg

SEQ ID NO: 622170 - DNA, 75 bp, synthetic construct
  source 1..75: mol_type = other DNA
ctggaggccagcgatatcccctatcgtcatgaccgccagttgttacataacgcactggaaaaggcgttacaggcg

SEQ ID NO: 622171 - DNA, 75 bp, synthetic construct
  source 1..75: mol_type = other DNA
tgaagctggaaagcaagcgcagtatgttggtaaaaaggtcattgatgcggtcatcgtcgggccaaaagtggatgt

SEQ ID NO: 622172 - DNA, 75 bp, synthetic construct
  source 1..75: mol_type = other DNA
gaacggcctgagcgataaaatccagaaactgtccgatgacgcgacgatggcgaacgccgacccggcggatatggc

SEQ ID NO: 622173 - DNA, 75 bp, synthetic construct
  source 1..75: mol_type = other DNA
aaaagacggcattacaagcgatgatggtcgatcagaaatatttttttctgataaggatggggaaatattaataca

SEQ ID NO: 622174 - DNA, 75 bp, synthetic construct
  source 1..75: mol_type = other DNA
aaaaatgagtgggattactgatgaaaatggaaatacagaactaatatcctctgataaggaggaggtcgttaatat

SEQ ID NO: 622175 - DNA, 75 bp, synthetic construct
  source 1..75: mol_type = other DNA
ctgcatctgccgctgctggcgggaacggaagtcagcatcgcctttgaggaaggcaacccggaccgaccttatatt

SEQ ID NO: 622176 - DNA, 75 bp, synthetic construct
  source 1..75: mol_type = other DNA
aacctccagataaatgcgggaaacaacgccgatatcggtgtagtgaagaatatgtttatcggcgtggggcgggcg

SEQ ID NO: 622177 - DNA, 75 bp, synthetic construct
  source 1..75: mol_type = other DNA
cgccagtcgcgcccgtatgcgggagacacctacggcctgcatctgccgctgctggcgggaacggaagtcagcatc

SEQ ID NO: 622178 - DNA, 75 bp, synthetic construct
  source 1..75: mol_type = other DNA
cgatcaggggcatgaagtttatggcgaggtcaatatcgaccagttaactacgccaattcaggaattgctcttaac

SEQ ID NO: 622179 - DNA, 75 bp, synthetic construct
  source 1..75: mol_type = other DNA
gtatcaacccggaggttgttgagcagtttctggcccttatgaatacgcagtgtaaatcctcagaagaggcgctcg

SEQ ID NO: 622180 - DNA, 75 bp, synthetic construct
  source 1..75: mol_type = other DNA
acccgcgtccggtgaaagcaccgggaagaatatgtcatctctggccggaaagaatgacaaagcaggccggacaga

SEQ ID NO: 622181 - DNA, 75 bp, synthetic construct
  source 1..75: mol_type = other DNA
ccgaattctgatggcaggaatacgcgatgcgctgaacaggaaagttctgctgaatgaatctgttctggatgtcgc

SEQ ID NO: 622182 - DNA, 75 bp, synthetic construct
  source 1..75: mol_type = other DNA
aacgaaagccagttggcttcggttatggcgcacgaaatctcccacgtcacccaacgtcacctggcgcgagcgatg

SEQ ID NO: 622183 - DNA, 75 bp, synthetic construct
  source 1..75: mol_type = other DNA
ccaatgacgcgatcaatcggctgaaaaatgctcgagatttacgcaccaatccggtgttgcagctcaacctggcga

SEQ ID NO: 622184 - DNA, 75 bp, synthetic construct
  source 1..75: mol_type = other DNA
cgaagacgaaatcaacaaactgatccgctttcttggcggtgcaccgttttacattccccgttgcgatcatgcgtt

SEQ ID NO: 622185 - DNA, 75 bp, synthetic construct
  source 1..75: mol_type = other DNA
ttgcagctattatcgtattaagttggttaattacaaacagcacaactaagcaagaaaaatatttcatagctaatg

SEQ ID NO: 622186 - DNA, 75 bp, synthetic construct
  source 1..75: mol_type = other DNA
ccgaggaaagaagagagctatatagtttgtgtaggttcaagacccggatctcgtgccaagccaaaatattactgg

SEQ ID NO: 622187 - DNA, 75 bp, synthetic construct
  source 1..75: mol_type = other DNA
tactctcgtcggcttattcaccgggtataaatacaattaccacaatttaactgtggatttatttggtcgtgtcga

SEQ ID NO: 622188 - DNA, 75 bp, synthetic construct
  source 1..75: mol_type = other DNA
aacagcaactgggtctgaaaacagataaccgaattctgatggcaggaatacgcgatgcgctgaacaggaaagttc

SEQ ID NO: 622189 - DNA, 75 bp, synthetic construct
  source 1..75: mol_type = other DNA
ctgacgatatgcagcagacttatgccgccggtgtgatgctgggacgcgatatgctgaatctccaggccgcacaac

SEQ ID NO: 622190 - DNA, 75 bp, synthetic construct
  source 1..75: mol_type = other DNA
tatttttccatggagtgtcatataaaataaatgagtcttttttatatagaaataaaacacaggataaaaaaagtc

SEQ ID NO: 622191 - DNA, 75 bp, synthetic construct
  source 1..75: mol_type = other DNA
atatcgttccgcttagtcggcaggcgattattttgttagagcagcttaagcagattagtggtgataaagagctac

SEQ ID NO: 622192 - DNA, 75 bp, synthetic construct
  source 1..75: mol_type = other DNA
cgcaactcaccgttctggaaaaacagaagtgtatcagcgtcaggccgggtttatcaccgggccaggaaaggttct

SEQ ID NO: 622193 - DNA, 75 bp, synthetic construct
  source 1..75: mol_type = other DNA
ccgtaaatcaagcaaaacgtttctcatttaagaatttaataaactatattactgggcttattttttgcctttcaa

SEQ ID NO: 622194 - DNA, 75 bp, synthetic construct
  source 1..75: mol_type = other DNA
cagggtaaaaatgaccgcactgacgtaactgaagccaatggtgatggtttcggtttctccgctacttatgagtat

SEQ ID NO: 622195 - DNA, 75 bp, synthetic construct
  source 1..75: mol_type = other DNA
atggaattttctccccctctacagcgcgcaacgctaattcaacgttacaaacgctttttagccgatgtgatcaca

SEQ ID NO: 622196 - DNA, 75 bp, synthetic construct
  source 1..75: mol_type = other DNA
cgtgctgcattcagccattacacggttttcacccgcgcgccacatcgatgagaaatacgcgcaactattgtcaga

SEQ ID NO: 622197 - DNA, 75 bp, synthetic construct
  source 1..75: mol_type = other DNA
gaaattctggcttacaaagcggaaatttctgctgaaggcatggctcttaaaaaatcactgccggttacattgtag

SEQ ID NO: 622198 - DNA, 75 bp, synthetic construct
  source 1..75: mol_type = other DNA
ctgtttatctcttcgctggcggcgcgccatcccgaactctcctggtacgcaaattccaaacacgtcgccgaacaa

SEQ ID NO: 622199 - DNA, 75 bp, synthetic construct
  source 1..75: mol_type = other DNA
ttactaatttcaaacagcttcaaggcggggcagctaaaaaaggtacagtgtcattgacattttcaggtgtgcctg

SEQ ID NO: 622200 - DNA, 75 bp, synthetic construct
  source 1..75: mol_type = other DNA
gatcagtctattgattttggccagatatccaaagtatttctggataacgatggacaaaccacacctaaggctttt

SEQ ID NO: 622201 - DNA, 75 bp, synthetic construct
  source 1..75: mol_type = other DNA
ccgaacgtcctccggcaagcctgcccgtgcggaagcgaaaaaacgttatgctgcaagccttcatgtgcaggaatc

SEQ ID NO: 622202 - DNA, 75 bp, synthetic construct
  source 1..75: mol_type = other DNA
gcagggtttactggcaagttgccagcccgcagccattatcactggtgatgagtggttgccactggtcaatgctgc

SEQ ID NO: 622203 - DNA, 75 bp, synthetic construct
  source 1..75: mol_type = other DNA
aagccgtggggcagtggttaagcgccgaaactgtacagacgcaaacctatgaattatgcgatggcgtcgccggcg

SEQ ID NO: 622204 - DNA, 75 bp, synthetic construct
  source 1..75: mol_type = other DNA
ccttgagaatggctggctttcagaattttcaggctatagcgagttaaggagcgaagtaaaatacggggccgaacg

SEQ ID NO: 622205 - DNA, 75 bp, synthetic construct
  source 1..75: mol_type = other DNA
acctatgaccaggagtggctggaaacacaacaccccgacctgccggatgattttgattttaactactggaactgc

SEQ ID NO: 622206 - DNA, 75 bp, synthetic construct
  source 1..75: mol_type = other DNA
ttaacacgtattccgctggctacgcttaagaaaagtttccatatgggcgaggcgtttcatcagcatgagcgcggg

SEQ ID NO: 622207 - DNA, 75 bp, synthetic construct
  source 1..75: mol_type = other DNA
ctgtctaaaatcaaatctgagcctattgaacgttttgaaatttctttaatggcaatcactgaccctacattgcga

SEQ ID NO: 622208 - DNA, 75 bp, synthetic construct
  source 1..75: mol_type = other DNA
ggggctggtatgaaggtccggatgacgcggcatggcgggtgacggggcaccacacggacagcggtgaacagtacc

SEQ ID NO: 622209 - DNA, 75 bp, synthetic construct
  source 1..75: mol_type = other DNA
ctgatgtcccgggctctgcacgaccagctcagtacggaagaagggcgttctgaaatggtggatggcgtgacacat

SEQ ID NO: 622210 - DNA, 75 bp, synthetic construct
  source 1..75: mol_type = other DNA
ccccgtatcattgccgcggacagtccgtttaccctgaagcagttcaccgcctgtcttgagggcaacgctgactgg

SEQ ID NO: 622211 - DNA, 75 bp, synthetic construct
  source 1..75: mol_type = other DNA
ctatattttctcaactacatgagaaaggttattatatcgggcgtattgcatggtcttcaaagccgacaagtggaa

SEQ ID NO: 622212 - DNA, 75 bp, synthetic construct
  source 1..75: mol_type = other DNA
ttgcaggcagaaggtttttcacccagcgatacggtctttttcgacgataacgccgataatatagaaggagcgaat

SEQ ID NO: 622213 - DNA, 75 bp, synthetic construct
  source 1..75: mol_type = other DNA
ttgaagtgaaatcggttacgttagcggatcacgaacaaggctactttcccgatgctgtcacccaacgtgggcaga

SEQ ID NO: 622214 - DNA, 75 bp, synthetic construct
  source 1..75: mol_type = other DNA
aagtgctgctgaagcactaaaaaaaacatgctcccctagtaaaggtcaaagcctgaatattgtagctaaaaaaga

SEQ ID NO: 622215 - DNA, 75 bp, synthetic construct
  source 1..75: mol_type = other DNA
gtgaattaattgagtccgccgctgaaaatgcctataatataataataagatcagaggtgaacgaagatgaaaaag

SEQ ID NO: 622216 - DNA, 75 bp, synthetic construct
  source 1..75: mol_type = other DNA
ccgctctgcgtcaaatagataaacggaatgtcataatagaacttcgccctggtgttgacaaggttgaagtacgta

SEQ ID NO: 622217 - DNA, 75 bp, synthetic construct
  source 1..75: mol_type = other DNA
taagttggggatgaaaacaaccaggaaattacccgcattattaagaattttttttaaccaaacaattgaacctga

SEQ ID NO: 622218 - DNA, 75 bp, synthetic construct
  source 1..75: mol_type = other DNA
atgacgcaatactggctggggttagattgtggcggtagctggctaaaagccggactgtatgaccgcgaaggccgg

SEQ ID NO: 622219 - DNA, 75 bp, synthetic construct
  source 1..75: mol_type = other DNA
cggcgggattacccctgctgacctgccgctgtttaaagatattcgcgtgaaagcgtttattgccgggcgagcact

SEQ ID NO: 622220 - DNA, 75 bp, synthetic construct
  source 1..75: mol_type = other DNA
aagcgggcgtggaagtcatcaccgatctcgaccgcaaagcctttagcgatgcgctgggtacccaggtccgtgaca

SEQ ID NO: 622221 - DNA, 75 bp, synthetic construct
  source 1..75: mol_type = other DNA
acccaatttgatataccaaactcagagctagctaaattggatattaaaatatttgattctgcatctggggagtgg

SEQ ID NO: 622222 - DNA, 75 bp, synthetic construct
  source 1..75: mol_type = other DNA
atcgcgagtctttaccgcaattgctctttattcccagacgtcaaagaagactgcttattacttgccgacataatc

SEQ ID NO: 622223 - DNA, 75 bp, synthetic construct
  source 1..75: mol_type = other DNA
accgtttttgctttcctggcttcggcctggtacagcattgtgcagtacagaaaagaaaagcattttcgctcctga

SEQ ID NO: 622224 - DNA, 75 bp, synthetic construct
  source 1..75: mol_type = other DNA
catcccggaaaaactctacccgctgacccgacaaaccttgtggaccgggcatccggtgtcgctgttacgctggct

SEQ ID NO: 622225 - DNA, 75 bp, synthetic construct
  source 1..75: mol_type = other DNA
atgacgcacgactacctgcgctggtgtttaaccggcgtcaaaggctgtgaagagagcaatatttccgagtccaat

SEQ ID NO: 622226 - DNA, 75 bp, synthetic construct
  source 1..75: mol_type = other DNA
atcggtatctccgcacaagggaaaggtttgtttttactcgataaaaataacaaaccgctaggtaacgccattttg

SEQ ID NO: 622227 - DNA, 75 bp, synthetic construct
  source 1..75: mol_type = other DNA
cgcccatcagctttaccaacaaaaataccaacgctatcagcacctcattgccgcactacagggctttcatgcccg

SEQ ID NO: 622228 - DNA, 75 bp, synthetic construct
  source 1..75: mol_type = other DNA
acaacatgagtcgcgggaaatatgccccgtgtctcaccgactggctggggatcgctgaaatcaaccacgccctgc

SEQ ID NO: 622229 - DNA, 75 bp, synthetic construct
  source 1..75: mol_type = other DNA
gtggtgttcagccatatgacccatctcaaccggatgcgcgaacgttttactgatgtgcacaccctgcgcgtcact

SEQ ID NO: 622230 - DNA, 75 bp, synthetic construct
  source 1..75: mol_type = other DNA
ttgttggtacgcgtcccgagattatccgtctgtcacgcgttctcgctaagcttgatgaacactgcgagcatattc

SEQ ID NO: 622231 - DNA, 75 bp, synthetic construct
  source 1..75: mol_type = other DNA
atgacgccggtgcaggccgccgcgcttccggcgatccttgccggaaaagatgttcgcgtgcaggcgaaaaccggc

SEQ ID NO: 622232 - DNA, 75 bp, synthetic construct
  source 1..75: mol_type = other DNA
aagcagccagtgtggtcggtgtagaaggtgttccggcgctggtggaaaaaggccagcagaatgcgcgtcttaatg

SEQ ID NO: 622233 - DNA, 75 bp, synthetic construct
  source 1..75: mol_type = other DNA
cggtaagtaataatatcattttttctaagccattcggatttttagattatataaaactgcagcaaaatgctcgtg

SEQ ID NO: 622234 - DNA, 75 bp, synthetic construct
  source 1..75: mol_type = other DNA
ttaaataatattgaaatggagattttataccttttctattttcatggtaagagtgtaagagagatttcaaaaatg

SEQ ID NO: 622235 - DNA, 75 bp, synthetic construct
  source 1..75: mol_type = other DNA
atcggtaagtgaagcgataaattccttaaataatattgaaatggagattttataccttttctattttcatggtaa

SEQ ID NO: 622236 - DNA, 75 bp, synthetic construct
  source 1..75: mol_type = other DNA
gtcaaccgttcggtatgcagcgtgattcgttgcaacatgcgccgcatattatcgtggcaacgccgggccgtttgc

SEQ ID NO: 622237 - DNA, 75 bp, synthetic construct
  source 1..75: mol_type = other DNA
cagagttcagtcgctggagtcgcaggtttcagaccatgaaacgcgcatcgatgctctggagtatgccactactcg

SEQ ID NO: 622238 - DNA, 75 bp, synthetic construct
  source 1..75: mol_type = other DNA
gcagagaggaccggataatcgagatttgtatttggtcaatgattattcggttgacaatgtatcgctaaaagtcct

SEQ ID NO: 622239 - DNA, 75 bp, synthetic construct
  source 1..75: mol_type = other DNA
ggcgcattgtagaccataccgctgacatcaatatgacctacagcgatattgcacgtgaataccttcttgctgaag

SEQ ID NO: 622240 - DNA, 75 bp, synthetic construct
  source 1..75: mol_type = other DNA
ggtagccctatgcgagaggttctaaacttttataaggataaaatttcatcttcttctattcttgaaaaacttaac

SEQ ID NO: 622241 - DNA, 75 bp, synthetic construct
  source 1..75: mol_type = other DNA
caaaaatacgggttgttactgtagttggcactaggcctgaaatcattcgtttatcgagggtaattgctgttctcg

SEQ ID NO: 622242 - DNA, 75 bp, synthetic construct
  source 1..75: mol_type = other DNA
cgatacatcagtccttccacgcaatatcttctcgcagtcatatctgctgtacgttatcgcacagggtactgatgt

SEQ ID NO: 622243 - DNA, 75 bp, synthetic construct
  source 1..75: mol_type = other DNA
ttactgcttttgttgccatgttgtgtaccccttacaaaaaacaaatgcagtatgcaggaaaaaaaataagtgttc

SEQ ID NO: 622244 - DNA, 75 bp, synthetic construct
  source 1..75: mol_type = other DNA
tttgatctcacctttaacggcagtaactataaattgcgccttgctttcaccttcatctaaatttttttctaagtc

SEQ ID NO: 622245 - DNA, 75 bp, synthetic construct
  source 1..75: mol_type = other DNA
agacaaagcccgcaggtgctaccaacaccaacgggcttctaaccaccaacgatagcagaagtatcgaggcagcta

SEQ ID NO: 622246 - DNA, 75 bp, synthetic construct
  source 1..75: mol_type = other DNA
gcaggaagttgcggaatcaatcctcgcagggataaaagcgtattttgccgatggggcgacgctggcgagaagggg

SEQ ID NO: 622247 - DNA, 75 bp, synthetic construct
  source 1..75: mol_type = other DNA
ttaaagagcgtctggtgatggatctctatccggtcaatgctcaggatatgcaggatccgctgctggcgttgctgg

SEQ ID NO: 622248 - DNA, 75 bp, synthetic construct
  source 1..75: mol_type = other DNA
agaaagagggcaatatgaaggtttacatgacgcgtaatgaagacatcttcattccgttgcaagtgcgcgtagcaa

SEQ ID NO: 622249 - DNA, 75 bp, synthetic construct
  source 1..75: mol_type = other DNA
ccacactcaataaaaattggtgatgtgactgtccacctgattagctggcgtaacaatcatgcggagcttatcagc

SEQ ID NO: 622250 - DNA, 75 bp, synthetic construct
  source 1..75: mol_type = other DNA
gtccgggctttgaaaaagagtgcgccgcagaaattaccgataaagccggtcagcgggagatattcggttttgctc

SEQ ID NO: 622251 - DNA, 75 bp, synthetic construct
  source 1..75: mol_type = other DNA
gctggttaatggctggtgccgtgaaaccattttcaacctcaaactgccgatgaaaaaacgctacgaagaagtgtc

SEQ ID NO: 622252 - DNA, 75 bp, synthetic construct
  source 1..75: mol_type = other DNA
gtggttcgagaagagcgcgttgatgttgaggatgagccggttttgcctgaggaaactccggtagagcaagagcct

SEQ ID NO: 622253 - DNA, 75 bp, synthetic construct
  source 1..75: mol_type = other DNA
cagccagctgaagaatatcgactttactaaccatcccgccgccgcagacccggtcaccatgcgggcaatccaaaa

SEQ ID NO: 622254 - DNA, 75 bp, synthetic construct
  source 1..75: mol_type = other DNA
cgcatgaaaaggccggatggctcgcgtcgctggaaagccgtccggttgtccgaccgggttttcaatggccgggtg

SEQ ID NO: 622255 - DNA, 75 bp, synthetic construct
  source 1..75: mol_type = other DNA
aatataagcagtttgcgttgagtaaccctgaacgcgtggtagtggatatcgaagatgtaaacctgaactcggtgc

SEQ ID NO: 622256 - DNA, 75 bp, synthetic construct
  source 1..75: mol_type = other DNA
cccgttggcggctacaaacactccggcattggtcgcgagaacggcgtgatgacgctccagagttacacccaggtg

SEQ ID NO: 622257 - DNA, 75 bp, synthetic construct
  source 1..75: mol_type = other DNA
gcgttgagcgcattcgcgcgggcgacgttttcgatccgcaaactaacttcggcccgctggtcagcttcccgcatc

SEQ ID NO: 622258 - DNA, 75 bp, synthetic construct
  source 1..75: mol_type = other DNA
ggatatctggcaatacatctggctggaaaatattgacattgttccactgtatctcgctgcggaacgtccggttct

SEQ ID NO: 622259 - DNA, 75 bp, synthetic construct
  source 1..75: mol_type = other DNA
ggatggtcagcgcggggcgtgctgttgtatacagtggaacaaatcagtttacctactggcttagtgaggtacagc

SEQ ID NO: 622260 - DNA, 75 bp, synthetic construct
  source 1..75: mol_type = other DNA
gtggaggatgacatgctgcagtcggagcagcggatggtcagtacaggacctgctgttgtgtacggaggggcgaat

SEQ ID NO: 622261 - DNA, 75 bp, synthetic construct
  source 1..75: mol_type = other DNA
tggcggggcgtgacagcatgatggtgatgcagagtgccctgctgacgggagtggaggatggcgtgctgcagccgg

SEQ ID NO: 622262 - DNA, 75 bp, synthetic construct
  source 1..75: mol_type = other DNA
attttgaattcaggctggaacgcgcttacccgtcgcgtgaaattatcacccagtggcaggaaacggatttgcagt

SEQ ID NO: 622263 - DNA, 75 bp, synthetic construct
  source 1..75: mol_type = other DNA
acaattgcagcaactggaaatcgccgcagaacaggctcaggcgctgaaggcggatattgacagccagatacagat

SEQ ID NO: 622264 - DNA, 75 bp, synthetic construct
  source 1..75: mol_type = other DNA
gcagaacgggcacaggcgctgaaggctgatattgacagtcagatacagatgtttgagcagcggctgaaaccgctc

SEQ ID NO: 622265 - DNA, 75 bp, synthetic construct
  source 1..75: mol_type = other DNA
tgaagatgtgcagctggctgctggtcagaacctggctgtcaacgccggaggtgatatcagtaccggaacaatggg

SEQ ID NO: 622266 - DNA, 75 bp, synthetic construct
  source 1..75: mol_type = other DNA
ctgtgctggcatacgccgctcattgatggcaccgaagtggcgattgcgtacagcaatggcgatattgacctgccg

SEQ ID NO: 622267 - DNA, 75 bp, synthetic construct
  source 1..75: mol_type = other DNA
ggcaggtgctggagccgcagggggatgtcattacggacctgaaggaagggattgtcctcacactggtgacttacc

SEQ ID NO: 622268 - DNA, 75 bp, synthetic construct
  source 1..75: mol_type = other DNA
cgataccaacgaaagcaaagagttgctgaaattctgccgtaaattcaccgtgccgctacgcgctgccttgcgcga

SEQ ID NO: 622269 - DNA, 75 bp, synthetic construct
  source 1..75: mol_type = other DNA
tttcgaccaaaggcgcgacaagtactgcggcaaaatatctggcacaaacccagaacgcctcggacttgattggcg

SEQ ID NO: 622270 - DNA, 75 bp, synthetic construct
  source 1..75: mol_type = other DNA
ccgcacggtgaattaccagtcggacgcggcgggcaggctggtgaagtacaccagcccgatggggaggataacgcg

SEQ ID NO: 622271 - DNA, 75 bp, synthetic construct
  source 1..75: mol_type = other DNA
ggcggcgaagggtattattaccagtggggctggtatgaagggccggatgacgcggcatggcgggtgacggggcat

SEQ ID NO: 622272 - DNA, 75 bp, synthetic construct
  source 1..75: mol_type = other DNA
atgagcgaacaactggcaatttctgtggccgatttaacccgtatcctgcttgaggacacgctgcacaacatgttc

SEQ ID NO: 622273 - DNA, 75 bp, synthetic construct
  source 1..75: mol_type = other DNA
gtgctgacctttttgtttctatccatgctgatgcctttaccagtcgccagccgagcggttcttccgtgtttgcgc

SEQ ID NO: 622274 - DNA, 75 bp, synthetic construct
  source 1..75: mol_type = other DNA
aattcgtgcagacgacccgttcatcaagtcggcgcgcgtcgggcaatttgacccgcaaaccgtacgcatggtttt

SEQ ID NO: 622275 - DNA, 75 bp, synthetic construct
  source 1..75: mol_type = other DNA
taacggatccgatagggctggcggggggattaaacttatatgcttatgcgcctaatccgctggggtggatcgatc

SEQ ID NO: 622276 - DNA, 75 bp, synthetic construct
  source 1..75: mol_type = other DNA
gacagggtgatgccctgctgcatacgtcgtttatggcagatgtactgggggcggtgctggaggtggccgcaaatg

SEQ ID NO: 622277 - DNA, 75 bp, synthetic construct
  source 1..75: mol_type = other DNA
gcacaggtactatgatccggatgtcgggcggttcatggtaactgacccgatagggttgagaggcggtttaaatct

SEQ ID NO: 622278 - DNA, 75 bp, synthetic construct
  source 1..75: mol_type = other DNA
tccccggcgggtgacacagatttatcagcatttccctgatacgacgcctttactgctgcgtcgttaccgctatga

SEQ ID NO: 622279 - DNA, 75 bp, synthetic construct
  source 1..75: mol_type = other DNA
tggcttatcagcagcgatgatggacagttttttctgtttgaggccgacccgcaccacccgcagcgccagcggctg

SEQ ID NO: 622280 - DNA, 75 bp, synthetic construct
  source 1..75: mol_type = other DNA
cccgcctcagactgaaggttacatcctcaccggctctggtgacacatggattaacagcaaacctgccgcgcgggc

SEQ ID NO: 622281 - DNA, 75 bp, synthetic construct
  source 1..75: mol_type = other DNA
catgcaggcacatgatgtctgcgtaacaacgatgacaacgttactggctccctggaatatccgtcctgccgtctt

SEQ ID NO: 622282 - DNA, 75 bp, synthetic construct
  source 1..75: mol_type = other DNA
tactggcaacattgctgtcgccatggaatatccgctccacggttatacaggacccggccagacttgcagactatc

SEQ ID NO: 622283 - DNA, 75 bp, synthetic construct
  source 1..75: mol_type = other DNA
aatctatcaacgccgaagtgacaaactccgccatcgagctgaaagtgttgattgagcagatgcgcgagcagattc

SEQ ID NO: 622284 - DNA, 75 bp, synthetic construct
  source 1..75: mol_type = other DNA
aactcgtaacgccaattcttacttttcagccttcacaaatgccgcccactcaaacagagcggcatttttcttccc

SEQ ID NO: 622285 - DNA, 75 bp, synthetic construct
  source 1..75: mol_type = other DNA
cagcgggaaatcttcggttttgcccgcgttaaagacaatgcgggttatgtcatttatgaatgttatcaaccggat

SEQ ID NO: 622286 - DNA, 75 bp, synthetic construct
  source 1..75: mol_type = other DNA
tatacggacctgctgtgactatgggcatagaccaggttccaaccattcaggaatcagatattactgttacagtgt

SEQ ID NO: 622287 - DNA, 75 bp, synthetic construct
  source 1..75: mol_type = other DNA
tcgagccgtttcggggtgggatgctgtaaataatatcagccccggagtcgttggtgttgatgttgaatcacgtat

SEQ ID NO: 622288 - DNA, 75 bp, synthetic construct
  source 1..75: mol_type = other DNA
ccgtagccttgaacctgtcgttcgcgagcgtattcgttctcgcctgacgcgcggtaaagtggaatgtaccctgcg

SEQ ID NO: 622289 - DNA, 75 bp, synthetic construct
  source 1..75: mol_type = other DNA
gaagccgtactgccggggggcgggttttacagccccggcgaaggactggcggtacggcggggtgagcaggggcac

SEQ ID NO: 622290 - DNA, 75 bp, synthetic construct
  source 1..75: mol_type = other DNA
gcagaaaacagcgtggtgccgttcaaccggctgatgtcttaccgtggtgtgcactaccgttatgacgaatttggc

SEQ ID NO: 622291 - DNA, 75 bp, synthetic construct
  source 1..75: mol_type = other DNA
attgccgctgaaattctcgcggcgttggatggtacgctggacgactttatcgtcgcgcgcgaaaccgaaggtcag

SEQ ID NO: 622292 - DNA, 75 bp, synthetic construct
  source 1..75: mol_type = other DNA
ttctacgctggccgggcgtgatggcagcccaggagcaggatcttgacgccattgccgctgaaattctcgcggcgc

SEQ ID NO: 622293 - DNA, 75 bp, synthetic construct
  source 1..75: mol_type = other DNA
ggtgagctgatcctcaacgaaaaactggctaaacagctggtaactgccgcgaactgggtaaaaatgcagagtgac

SEQ ID NO: 622294 - DNA, 75 bp, synthetic construct
  source 1..75: mol_type = other DNA
tgatgttgcaatggtgggccgattttctagatgcgaaccgggagaagggtatcagcccgtttgaatatgcaaaga

SEQ ID NO: 622295 - DNA, 75 bp, synthetic construct
  source 1..75: mol_type = other DNA
ggcagattttctggatgcgaacagagataagggtatcagcccgtttgaatatgcaaagattaacaatccattaaa

SEQ ID NO: 622296 - DNA, 75 bp, synthetic construct
  source 1..75: mol_type = other DNA
tcaacaaagtcgaaccgatgaaccgggcgctgaaagagctgaatgcgcaaacctggtttgcaggattacgccgtg

SEQ ID NO: 622297 - DNA, 75 bp, synthetic construct
  source 1..75: mol_type = other DNA
cgctggtctgaaattgatattgacaatgccatgtggactattccagccgaacgcgaacctctgccaggcgtaaaa

SEQ ID NO: 622298 - DNA, 75 bp, synthetic construct
  source 1..75: mol_type = other DNA
tgcagtggaacgtcagatgagtcatcaggagcgtaatggtgtacgtgctgcttacattcataaagcagaacatct

SEQ ID NO: 622299 - DNA, 75 bp, synthetic construct
  source 1..75: mol_type = other DNA
ctcaccgataccggttatctgttcccggaaacctaccgctttattgacgagttaacggacaaactcaaactaaat

SEQ ID NO: 622300 - DNA, 75 bp, synthetic construct
  source 1..75: mol_type = other DNA
gctacagtggtgggcagattttctggatgcgaacagagataagggtatcagcccgtttgaatatgcaaagattaa

SEQ ID NO: 622301 - DNA, 75 bp, synthetic construct
  source 1..75: mol_type = other DNA
cgggagcacatgacccgcgtaaaccaatcagtgaaaatactgtaaataaagccctgagggtgatgggatatgaca

SEQ ID NO: 622302 - DNA, 75 bp, synthetic construct
  source 1..75: mol_type = other DNA
aatcagtgaaaatactgtaaataaagccctgagggtgatggggtatgacacaacccgggatgtctgtggtcatgg

SEQ ID NO: 622303 - DNA, 75 bp, synthetic construct
  source 1..75: mol_type = other DNA
ccatcaggagcgtaatggtgtacgtgctgcatatatccataaagcagaacatctggaagaacgtcgactgatgct

SEQ ID NO: 622304 - DNA, 75 bp, synthetic construct
  source 1..75: mol_type = other DNA
gatggggtatgacacaaccaaggaagtctgtggccatggattccgggcgatggcgtgcagtgcattgattgaatc

SEQ ID NO: 622305 - DNA, 75 bp, synthetic construct
  source 1..75: mol_type = other DNA
tcggagggggttgacccttgcgaacagaaaagagctaaaaaagtagtccctgatttacagctctcttttgaacat

SEQ ID NO: 622306 - DNA, 75 bp, synthetic construct
  source 1..75: mol_type = other DNA
cggggctccaagatgcgaacaccacaccttgtgccactcagcaaacaggctgtagccatactgacagagctacag

SEQ ID NO: 622307 - DNA, 75 bp, synthetic construct
  source 1..75: mol_type = other DNA
ctcgcggttatgctgaatttactggtttttattcgttccagtgaactcagataagcccgctggtctgaaattgat

SEQ ID NO: 622308 - DNA, 75 bp, synthetic construct
  source 1..75: mol_type = other DNA
ctagcggttatgctgaatttactggtttttattcgttccagtgaactcagataagcccgatggtctgaaattgat

SEQ ID NO: 622309 - DNA, 75 bp, synthetic construct
  source 1..75: mol_type = other DNA
actatcacgctataaagggcgactaatgacacggcttgccgttgaattaacgctactcacatttattcgttcaag

SEQ ID NO: 622310 - DNA, 75 bp, synthetic construct
  source 1..75: mol_type = other DNA
ctggcggttatgctgaatttactggtttttattcgttccagtgaactcagataagcccggtggtctgaaattgat

SEQ ID NO: 622311 - DNA, 75 bp, synthetic construct
  source 1..75: mol_type = other DNA
ctggccgttatgctgaatttactggtttttattcgttccagtgaactcagataagcccgctggtctgaaattgat

SEQ ID NO: 622312 - DNA, 75 bp, synthetic construct
  source 1..75: mol_type = other DNA
ctggcagttatgctgaatttactggtttttattcgttccagtgaactcagataagcccgatggtctgaaattgat

SEQ ID NO: 622313 - DNA, 75 bp, synthetic construct
  source 1..75: mol_type = other DNA
gggcagattttctggatgcgaacagagaacaatgtatcagcccgtttgaatatgcaaagattaacaatccattaa

SEQ ID NO: 622314 - DNA, 75 bp, synthetic construct
  source 1..75: mol_type = other DNA
tcatcagatataatcctgctctggatatggctggcgcattgaccactgtaaaacgccagcatcgccccgctcttg

SEQ ID NO: 622315 - DNA, 75 bp, synthetic construct
  source 1..75: mol_type = other DNA
gagtgtccgttaaactcaggctacctcacccgcgtaaaccaatcagtgaaaatactgtaaataaagccctgaggg

SEQ ID NO: 622316 - DNA, 75 bp, synthetic construct
  source 1..75: mol_type = other DNA
tatggctggtgcattgaccacggtaaaacgccagcatcgccccgctctgaatctttcacgcctgcctgaacttct

SEQ ID NO: 622317 - DNA, 75 bp, synthetic construct
  source 1..75: mol_type = other DNA
aacaaatttatgaaatcgccagtcgtctgcagcaaagaatatctgccgtaatgcgttatgccgtacagtctggca

SEQ ID NO: 622318 - DNA, 75 bp, synthetic construct
  source 1..75: mol_type = other DNA
gctgcagaagctaaacaaatttatgaaatcgccagtcgtctgcagcaaagaatgaaccgccccggaaatcctgga

SEQ ID NO: 622319 - DNA, 75 bp, synthetic construct
  source 1..75: mol_type = other DNA
gctgcagaagcaaaacaaatttatgaaatcgccagtcgtctgcagcaaagaatatctgctgtaatgcgttacgcc

SEQ ID NO: 622320 - DNA, 75 bp, synthetic construct
  source 1..75: mol_type = other DNA
tctctgggcacagataatgaagttggcatggtcattgataatggccggctgattgttgagccgtacagacgcccg

SEQ ID NO: 622321 - DNA, 75 bp, synthetic construct
  source 1..75: mol_type = other DNA
tacagtggtgggccgattttcttgatgcgaaccgggagaaggggatcagtccgtttgaatacgcaaatgttaaca

SEQ ID NO: 622322 - DNA, 75 bp, synthetic construct
  source 1..75: mol_type = other DNA
gagcgtaatggtgtacgtgctgcgtatatccataaagcagaacatctggaagaacggcgactgatgttgcaatgg

SEQ ID NO: 622323 - DNA, 75 bp, synthetic construct
  source 1..75: mol_type = other DNA
gatataatcctgctctggatatggctggcgcattgaccactgtaaaacgccagcatcgccccgctcttgatcttt

SEQ ID NO: 622324 - DNA, 75 bp, synthetic construct
  source 1..75: mol_type = other DNA
atgcataccacccgactgaagaaggttggcggctcagttatgctgaccgtcccaccggcactgctgaatgcgctg

SEQ ID NO: 622325 - DNA, 75 bp, synthetic construct
  source 1..75: mol_type = other DNA
ttgtcgcgtattggcagttacaaggggcaacctgtcacccagcttgccgttatgctgaatttactggtttttatt

SEQ ID NO: 622326 - DNA, 75 bp, synthetic construct
  source 1..75: mol_type = other DNA
gccctgagggtgatggggtatgacacaacccaggatgtctgtggtcatggattccgggcgatggcatgtagtgcg

SEQ ID NO: 622327 - DNA, 75 bp, synthetic construct
  source 1..75: mol_type = other DNA
gctgcttacattcataaagcagaacatctggaagaacggcgactgatgctacagtggtgggccgattttctggat

SEQ ID NO: 622328 - DNA, 75 bp, synthetic construct
  source 1..75: mol_type = other DNA
cgacactatccagctttaccctctaaccgtttccctgagtttcttgcacgtcttgctgcatatcgtggccgtgta

SEQ ID NO: 622329 - DNA, 75 bp, synthetic construct
  source 1..75: mol_type = other DNA
ttggcggctcagtaatgctgaccgttccaccggcactgctgaatgctctgtctctgggcacagataatgaagtag

SEQ ID NO: 622330 - DNA, 75 bp, synthetic construct
  source 1..75: mol_type = other DNA
ggcatcatcagatataatcctgctctggatatggctggcgcattgactacggtaaaacgccagcatcgccccgct

SEQ ID NO: 622331 - DNA, 75 bp, synthetic construct
  source 1..75: mol_type = other DNA
attccgtgcgatggcatgtagtgcgctgatcgaatcaggtttgtggtcccgcgatgctgttgaacgtcagatgag

SEQ ID NO: 622332 - DNA, 75 bp, synthetic construct
  source 1..75: mol_type = other DNA
agaaaagagttaaaaaagttgtccctgatttacagctctcttttgaacatattgcacgacgctggcatgccagta

SEQ ID NO: 622333 - DNA, 75 bp, synthetic construct
  source 1..75: mol_type = other DNA
ggtgaggaagttgtctgacatctttattcattccgcgcgatttgaatgcaatgtgttctaccactttatgatcca

SEQ ID NO: 622334 - DNA, 75 bp, synthetic construct
  source 1..75: mol_type = other DNA
catgaatgtggcgataaagtgttaagcgtgtttgcccggcatattcagaagattgtcggtgataaggggctggtg

SEQ ID NO: 622335 - DNA, 75 bp, synthetic construct
  source 1..75: mol_type = other DNA
atcgtgtcggtcattgcctcagtggcgattggcggtgcagggagtctggcatttccgctgccggcattaatctgg

SEQ ID NO: 622336 - DNA, 75 bp, synthetic construct
  source 1..75: mol_type = other DNA
gggcacaatcacacagcgataaagtactcaaaagcctcgagactcacgttttcccctttatcggcaaccgggata

SEQ ID NO: 622337 - DNA, 75 bp, synthetic construct
  source 1..75: mol_type = other DNA
atggcgctcactgacgctaaaatccgtgcagctaaaccggatgaaaaaccttataaacttgccgacagcggcaac

SEQ ID NO: 622338 - DNA, 75 bp, synthetic construct
  source 1..75: mol_type = other DNA
ctggcagttatgctgaatttactggtttttattcgttccagtgaactcagatacgcccgctggtctgaaattgat

SEQ ID NO: 622339 - DNA, 75 bp, synthetic construct
  source 1..75: mol_type = other DNA
tgacaccaatgagtgagaatacgcttaacaaggccttgcgagtgatgggctatgacacgaaaacggaagtgtgtg

SEQ ID NO: 622340 - DNA, 75 bp, synthetic construct
  source 1..75: mol_type = other DNA
aggcgtaaaattctcgcaccggggctccaagatgcgaacaccacatcttgttcctctcagcaaacaggctgtagc

SEQ ID NO: 622341 - DNA, 75 bp, synthetic construct
  source 1..75: mol_type = other DNA
catgacccgcgtaaaccaatcagtgaaaatactgtaaataaagccctgagggtgatggggtatgacacaacccag

SEQ ID NO: 622342 - DNA, 75 bp, synthetic construct
  source 1..75: mol_type = other DNA
gatatgggcagtgcgctgcttagtaccgagatggcgctggagctgctttctgaagagcaaagaagtgcaatttat

SEQ ID NO: 622343 - DNA, 75 bp, synthetic construct
  source 1..75: mol_type = other DNA
cccaggaaaaaatcattttgcagatccagtgtcggatcagcgacgaagaacgtcgcgggcagcttatccacgcgc

SEQ ID NO: 622344 - DNA, 75 bp, synthetic construct
  source 1..75: mol_type = other DNA
atggcatgtagtgcgttaatagaatcaggtttgtggtcccgcgatgcagttgaacgtcagatgagccatcaggaa

SEQ ID NO: 622345 - DNA, 75 bp, synthetic construct
  source 1..75: mol_type = other DNA
tcggttcactggacatactgctccagcgctgggctgacttctggccggtacaggtacattccagaatatcactgc

SEQ ID NO: 622346 - DNA, 75 bp, synthetic construct
  source 1..75: mol_type = other DNA
tgttaaggattctgagctgattcaggaactgcgccgtgtcatgaacaaaatctatgtggcgtgcatgatgaccta

SEQ ID NO: 622347 - DNA, 75 bp, synthetic construct
  source 1..75: mol_type = other DNA
gcgaagtaaaatacggcgccgaacgcagccgtattgactttatgttgcaggcggattcgcgtccagactgctata

SEQ ID NO: 622348 - DNA, 75 bp, synthetic construct
  source 1..75: mol_type = other DNA
cagaggcactgaatggctacgcacaggcgcagagtcagctacagcgcctgtcggcacaactggatgcactggatg

SEQ ID NO: 622349 - DNA, 75 bp, synthetic construct
  source 1..75: mol_type = other DNA
agcctgagttcacagataaaacactctccaggaaacccggggcggttcagcttggtacgctgtccaacctgtggg

SEQ ID NO: 622350 - DNA, 75 bp, synthetic construct
  source 1..75: mol_type = other DNA
cagcttgatgccctgtggccggataatcctcaggtcagagcgctgaacgcgcagtggcgtaaacagcgggagctg

SEQ ID NO: 622351 - DNA, 75 bp, synthetic construct
  source 1..75: mol_type = other DNA
aggtttatctcaagcacaacgtttttcttggaaaaaatgtactgacaaaactatcgatatttacaagaaactact

SEQ ID NO: 622352 - DNA, 75 bp, synthetic construct
  source 1..75: mol_type = other DNA
gaatttacagatgcaggcaaggaattacaaaaagccagagagttaaccaaatcattaataaaaactaataaagct

SEQ ID NO: 622353 - DNA, 75 bp, synthetic construct
  source 1..75: mol_type = other DNA
aggtcgcacggaacattaaccgtaccaaactgatcggtgccagcaaaggatatttgcgctgggccaaaatgcacc

SEQ ID NO: 622354 - DNA, 75 bp, synthetic construct
  source 1..75: mol_type = other DNA
ttcggaactgaaaacggcggtgtacggcatccggcagtcgttaaaggagccgccgctggaagaactgcttcggca

SEQ ID NO: 622355 - DNA, 75 bp, synthetic construct
  source 1..75: mol_type = other DNA
tcactccccctgagttaccccgccaggaaatgaagcaaccagaaaagtcagaagaaagtccacagccggtttttg

SEQ ID NO: 622356 - DNA, 75 bp, synthetic construct
  source 1..75: mol_type = other DNA
actgcaggcgcaaaaattttcatggtcaaaatgtgttaatgaaacgattaaagtttataatgagttgaatattta

SEQ ID NO: 622357 - DNA, 75 bp, synthetic construct
  source 1..75: mol_type = other DNA
gcaggcactgagaacgctggatattcagtatcaggatctgccgcagatctaccgttgtgtacagcatctttccac

SEQ ID NO: 622358 - DNA, 75 bp, synthetic construct
  source 1..75: mol_type = other DNA
atgtcataaatcagggagctgatgtcggcgcaattgccgggaaggcaaatcaggctggtcagggcgcttacgatg

SEQ ID NO: 622359 - DNA, 75 bp, synthetic construct
  source 1..75: mol_type = other DNA
atcctgttagctacgttcttcagcgtggataaagacggctttcttgccacaaatggcagcacgttaaccattcag

SEQ ID NO: 622360 - DNA, 75 bp, synthetic construct
  source 1..75: mol_type = other DNA
aaatggcagcacgttaaccattcagtcgaatggtgcggcgtttactgccacaaccatcaagataatcgcggagca

SEQ ID NO: 622361 - DNA, 75 bp, synthetic construct
  source 1..75: mol_type = other DNA
cgcacatcagcattaccaacaaaaatatcaacgctatcaacatttaattgccgcaattcagggctatcacgtccg

SEQ ID NO: 622362 - DNA, 75 bp, synthetic construct
  source 1..75: mol_type = other DNA
ccaggcagaatcaactcttcaggaccatgaaacacgaatagctcagaatgaaagcgatatttcgtcgcttgacac

SEQ ID NO: 622363 - DNA, 75 bp, synthetic construct
  source 1..75: mol_type = other DNA
ctgtcgcggttcaggctacgcgccttgatacttcaattttgccacgcaatatatttagccagtcttacctgctgt

SEQ ID NO: 622364 - DNA, 75 bp, synthetic construct
  source 1..75: mol_type = other DNA
gtagagctgaaaacgccgattcagccagaggcgccggtcagctttactacctggttcggcactttcccggaaacc

SEQ ID NO: 622365 - DNA, 75 bp, synthetic construct
  source 1..75: mol_type = other DNA
tgctggctctctgcgtttctcatggtgcagcggcagcaaactacgcgctcaataacgacaatattgccctcttgt

SEQ ID NO: 622366 - DNA, 75 bp, synthetic construct
  source 1..75: mol_type = other DNA
atggatcaggtcgttgtttttcaaaagatgtttgaaaaagtgagaaaagagcaaaacttctcctggttttattca

SEQ ID NO: 622367 - DNA, 75 bp, synthetic construct
  source 1..75: mol_type = other DNA
gatctggtcaattatgtcgatgttggtgctacgtattatttcaacaaaaatatgtcagcgtttgttgattataaa

SEQ ID NO: 622368 - DNA, 75 bp, synthetic construct
  source 1..75: mol_type = other DNA
ctggcgacgtatcggaacaccgacttcttcggcgttatcgatggcctgaacttaaccctgcaatatcaagggaaa

SEQ ID NO: 622369 - DNA, 75 bp, synthetic construct
  source 1..75: mol_type = other DNA
tattctctcttattaacgcgacgccagactcatccgcatggatgatttcgttagcgatttttattgccaaagatt

SEQ ID NO: 622370 - DNA, 75 bp, synthetic construct
  source 1..75: mol_type = other DNA
gtgagctactcgcggtggacgagtgccaaggcaatagttctgaaattcaacaggatggagaccaattcttttatc

SEQ ID NO: 622371 - DNA, 75 bp, synthetic construct
  source 1..75: mol_type = other DNA
gggaaattatccgcgaagcgataaaaataaacgcctcggcgctgatccttgcacataatcacccttcgggttgtg

SEQ ID NO: 622372 - DNA, 75 bp, synthetic construct
  source 1..75: mol_type = other DNA
gatccttgcgcataatcacccttcgggttgtgctgaacccagtaaagcggataaactcatcaccgaacggataat

SEQ ID NO: 622373 - DNA, 75 bp, synthetic construct
  source 1..75: mol_type = other DNA
taacctctgaatatgaacaatttagtggtgttcatggaattggcgtagcgaaatttgcccagttaaaggggattg

SEQ ID NO: 622374 - DNA, 75 bp, synthetic construct
  source 1..75: mol_type = other DNA
cccgtgaactcagcctgtatggatctcagctctatgcgtggtgcagcaaactgcagcaacagatgacctcgtctg

SEQ ID NO: 622375 - DNA, 75 bp, synthetic construct
  source 1..75: mol_type = other DNA
tgttgaaattacccgtcttaagcgacaactggcggaacgggacgaggaattggcctccctccaaaaggccgcgac

SEQ ID NO: 622376 - DNA, 75 bp, synthetic construct
  source 1..75: mol_type = other DNA
ccgaactggcccggcgttactacaacgtgcggatacgcgaagaaagcccgttacttagcccggagatgacgcgcg

SEQ ID NO: 622377 - DNA, 75 bp, synthetic construct
  source 1..75: mol_type = other DNA
ccatggattccgggcgatggcgtgcagtgcattgattgaatccggcttatggtcaagagatgcggttgaacgtca

SEQ ID NO: 622378 - DNA, 75 bp, synthetic construct
  source 1..75: mol_type = other DNA
gatgctacagtggtgggccgattttcttgatgcgaaccgggagaaggggatcagtccgtttgaatacgcaaatgt

SEQ ID NO: 622379 - DNA, 75 bp, synthetic construct
  source 1..75: mol_type = other DNA
ctggcacttggtgtgtatccagaagtttctctttctgaagctcgtacaaaacgggataaggcccgaaaactgatt

SEQ ID NO: 622380 - DNA, 75 bp, synthetic construct
  source 1..75: mol_type = other DNA
agatgacgagggaatttttacaaagccagctcacgggcgaggagcgggagatctttatggtgatctttctcgact

SEQ ID NO: 622381 - DNA, 75 bp, synthetic construct
  source 1..75: mol_type = other DNA
aaccctggcaaaagagatgctggagaatttcggctctctttatggcttgttaacctctgaatatgaacaatttag

SEQ ID NO: 622382 - DNA, 75 bp, synthetic construct
  source 1..75: mol_type = other DNA
ttggcggcgggctgattttcaacggtaaaccgattaccggtaaaagctacattaccggcgagtttggccatatgc

SEQ ID NO: 622383 - DNA, 75 bp, synthetic construct
  source 1..75: mol_type = other DNA
agcttggtgtcgatattgaacaaataagagatttagacaactcttatctgaatatcagtcagcatttttttactc

SEQ ID NO: 622384 - DNA, 75 bp, synthetic construct
  source 1..75: mol_type = other DNA
cttaaataaacggtccacttactacgaaccagagttttatgatgctcgtaccgtgctaaaagaattatttaagta

SEQ ID NO: 622385 - DNA, 75 bp, synthetic construct
  source 1..75: mol_type = other DNA
taatgtaccaggcggtacattacgagttagttgccagtgccctggcagtacagactggtaaatcgatcaatcctg

SEQ ID NO: 622386 - DNA, 75 bp, synthetic construct
  source 1..75: mol_type = other DNA
cctcgatatcacaccagaagataacgcgattcttgccagtggttgtgtcgactttatcggctttagctactacat

SEQ ID NO: 622387 - DNA, 75 bp, synthetic construct
  source 1..75: mol_type = other DNA
ccgtaggtaatggggacatgacactcatccaaacggaagatgataagaatatattgatagattgtcgcatcaggg

SEQ ID NO: 622388 - DNA, 75 bp, synthetic construct
  source 1..75: mol_type = other DNA
ccgttgggaatggggatatgaccctcatccaaacggaagatgataaaaatattttaatagattgtcgcatcaggg

SEQ ID NO: 622389 - DNA, 75 bp, synthetic construct
  source 1..75: mol_type = other DNA
atacaggtacagaattagggcgaataatatcttctatccaattcagccctctgttaattatcttgaagggcgtgg

SEQ ID NO: 622390 - DNA, 75 bp, synthetic construct
  source 1..75: mol_type = other DNA
cggcttcggtggtatcggtcatgcttacggggattatcctgaatattctttactggctcggtttgtttgttccgg

SEQ ID NO: 622391 - DNA, 75 bp, synthetic construct
  source 1..75: mol_type = other DNA
attgaggcgcagcaaaagcagtttgcgctggtggatagcatttgtcgccatttccccggcagcgagtttcttact

SEQ ID NO: 622392 - DNA, 75 bp, synthetic construct
  source 1..75: mol_type = other DNA
ccctgaaaaccgggctgctcaacgcatggttactctttcttcctaccgatatcctcggcgtactggcgataaaca

SEQ ID NO: 622393 - DNA, 75 bp, synthetic construct
  source 1..75: mol_type = other DNA
ttccggtgggttactgatgttaattataacaaacgcagttactacgccattgataatacgcttttatatattgaa

SEQ ID NO: 622394 - DNA, 75 bp, synthetic construct
  source 1..75: mol_type = other DNA
tcgtgggagcattgattgccgccgttgccagcatgaagattttgctggcagtgaagtgtcgatcttcacactgga

SEQ ID NO: 622395 - DNA, 75 bp, synthetic construct
  source 1..75: mol_type = other DNA
ccgtccggtacagaaaatggctgcaccggtcgtagcagtaatgatcaccggcatcctgctgaatgttctttactg

SEQ ID NO: 622396 - DNA, 75 bp, synthetic construct
  source 1..75: mol_type = other DNA
cttggtatttttggggctatacctgtacgcgataataataataatatttcactcaggaatgatttttttgatgtt

SEQ ID NO: 622397 - DNA, 75 bp, synthetic construct
  source 1..75: mol_type = other DNA
gccggaatgatggtcagggcctgtatacagatgtatcacacggtcggcatgcatgatgaactgctgtggctgtcg

SEQ ID NO: 622398 - DNA, 75 bp, synthetic construct
  source 1..75: mol_type = other DNA
gatatttatgaaattgagcttaatatcaaaagaaatgaaaatgaacttatgtattatgaactttatcttgatttt

SEQ ID NO: 622399 - DNA, 75 bp, synthetic construct
  source 1..75: mol_type = other DNA
tcgatgcaggacaatctctggagtttgagttttataatccaataacttccactactaagtggagcgcaccactta

SEQ ID NO: 622400 - DNA, 75 bp, synthetic construct
  source 1..75: mol_type = other DNA
cagcagccagtgggggaacatcagtggatctgaccggtacggacggtgtccgtaccctgaccggcgtccgggatg

SEQ ID NO: 622401 - DNA, 75 bp, synthetic construct
  source 1..75: mol_type = other DNA
tttgtgaagaatgcgcctcactggcaatagcgtatcgcgaccctaacggatttatgacggaggaagatgatgagt

SEQ ID NO: 622402 - DNA, 75 bp, synthetic construct
  source 1..75: mol_type = other DNA
gacagcaaaaaatcactcacttcgcatctggcttccggcacaccgggtacggtagcaggtttctcgctggcgctg

SEQ ID NO: 622403 - DNA, 75 bp, synthetic construct
  source 1..75: mol_type = other DNA
gctacctctgacagaaaaaatattgaatcggacggtagacaggctttcagaaattaaaaccatgctgccgcgtag

SEQ ID NO: 622404 - DNA, 75 bp, synthetic construct
  source 1..75: mol_type = other DNA
cgttgaatgaggaaacgctgttccgggggattatgctgaacgtcttccgttcacggtactgctggacgatgtggc

SEQ ID NO: 622405 - DNA, 75 bp, synthetic construct
  source 1..75: mol_type = other DNA
aagcacttaaagccctcgctttgtcaagactattgatgctctccgccatcgcgttatcatacaagacccctgtac

SEQ ID NO: 622406 - DNA, 75 bp, synthetic construct
  source 1..75: mol_type = other DNA
caggacggcatgagcgtcccgctctatattcatcttgccggtagccagggtcgccaggacgatcagcgaatcggc

SEQ ID NO: 622407 - DNA, 75 bp, synthetic construct
  source 1..75: mol_type = other DNA
cttattgagcaaatgttcatcacccatcctgaaaattcattcctcaatattttgctaatacaaacacgccgggcg

SEQ ID NO: 622408 - DNA, 75 bp, synthetic construct
  source 1..75: mol_type = other DNA
gccggtaaaaggcgttactacagagctggtagcgggcaacgatagcaaacgtcgaatcgtattaaatcgctacga

SEQ ID NO: 622409 - DNA, 75 bp, synthetic construct
  source 1..75: mol_type = other DNA
tgctgtgtggaaatccgcccaccttaccgggcgccggtgctgtgtggaaatccgcccatcttgccgggcgccggt

SEQ ID NO: 622410 - DNA, 75 bp, synthetic construct
  source 1..75: mol_type = other DNA
tgagtcaatgctggaagcaacagaagatgatcgccatcctggctgtccggtatttgccggtatgaaattaccgga

SEQ ID NO: 622411 - DNA, 75 bp, synthetic construct
  source 1..75: mol_type = other DNA
gtgaactctgcaatatattgaatttgcatgcttttgtaggccggataaggcgtttacgccgcatccggcatttca

SEQ ID NO: 622412 - DNA, 75 bp, synthetic construct
  source 1..75: mol_type = other DNA
atgaagctaaccgatgcagaaaatgccgctgacggcattttttttcccgcccttgaacaaaatatgatgggggcg

SEQ ID NO: 622413 - DNA, 75 bp, synthetic construct
  source 1..75: mol_type = other DNA
tctgatgcaatgcacgcctggggtattgacggccaccagctgacggtagaaatcacggaaagcatgatgatggaa

SEQ ID NO: 622414 - DNA, 75 bp, synthetic construct
  source 1..75: mol_type = other DNA
tcatgtgtgctgatttatgtcagacgggattttgcttatcaattattgagaacagaaattttcctgaatcatcaa

SEQ ID NO: 622415 - DNA, 75 bp, synthetic construct
  source 1..75: mol_type = other DNA
cagaaaattcacctgtgcgattaatgtgtggaaaaactttaggtctggtaagttttggtcgtattgcccgggcgt

SEQ ID NO: 622416 - DNA, 75 bp, synthetic construct
  source 1..75: mol_type = other DNA
tttcgctattactgccattctattctaatctattcaactcccggttagtatacagttcatcgttaatgtcagtaa

SEQ ID NO: 622417 - DNA, 75 bp, synthetic construct
  source 1..75: mol_type = other DNA
cagtctcgctttatcaggtttgatagcctgcggaattttttatttgcaaaaaactgtggtagcgaaaaattggct

SEQ ID NO: 622418 - DNA, 75 bp, synthetic construct
  source 1..75: mol_type = other DNA
tgatgcgctacgcttatcaggcctacgtggctcatgcaatatattgaatttgcacgatcttgtaggccggataag

SEQ ID NO: 622419 - DNA, 75 bp, synthetic construct
  source 1..75: mol_type = other DNA
ggttcctgatgtgctaaggaattatttatcagctataccggtggaaataaatgaaaaggcacgatataaacctgg

SEQ ID NO: 622420 - DNA, 75 bp, synthetic construct
  source 1..75: mol_type = other DNA
ttgcagaacgcggatttttttataaggttcctgctgtgctaagggattatttatcagctataccggtggaaataa

SEQ ID NO: 622421 - DNA, 75 bp, synthetic construct
  source 1..75: mol_type = other DNA
gtgctgacgaaggacggacaaatttttctcaacggcacaaaaattcatttgcagggtaaggagcaggttaatggt

SEQ ID NO: 622422 - DNA, 75 bp, synthetic construct
  source 1..75: mol_type = other DNA
atcaaactcgccagcaagctgcgcgccccgctgctgccggtgcatattcaggcgcataacagcctgctcttctat

SEQ ID NO: 622423 - DNA, 75 bp, synthetic construct
  source 1..75: mol_type = other DNA
atagcctgttccactacgacgacaaaatgcaggacgtactggagcacggcattgagctggggcgcagctttattc

SEQ ID NO: 622424 - DNA, 75 bp, synthetic construct
  source 1..75: mol_type = other DNA
tgtgaatataccatttatatatatgtatgggatgtgtggtgcagctgctgcgactttattgacagagttgttttc

SEQ ID NO: 622425 - DNA, 75 bp, synthetic construct
  source 1..75: mol_type = other DNA
aaatgtggtggagaaagttattgaaggggcttacgaggtggtgggtgtgtttgaccggatggaggataagcgtga

SEQ ID NO: 622426 - DNA, 75 bp, synthetic construct
  source 1..75: mol_type = other DNA
aaatgtggtggagaaagttatcgaaggggcttacgaggtggtgggtgtgtttgaccggatagaggagaagcgtga

SEQ ID NO: 622427 - DNA, 75 bp, synthetic construct
  source 1..75: mol_type = other DNA
gatgttccgccgccgccacagccagctgccgattaagatcggccagcagattgcctggcatcactggcacagcgc

SEQ ID NO: 622428 - DNA, 75 bp, synthetic construct
  source 1..75: mol_type = other DNA
tgcgtatccacgaaatctttgccagagacgataaagtcgcctgctatcttatctttgaaggcgtgcagacccgtg

SEQ ID NO: 622429 - DNA, 75 bp, synthetic construct
  source 1..75: mol_type = other DNA
atgagctatcacgcagaggcaacgccgcacggcgtcaatatcatgacccgcaacgatgccgggatgtatgagcat

SEQ ID NO: 622430 - DNA, 75 bp, synthetic construct
  source 1..75: mol_type = other DNA
cgaagccacaccgcacggcgtcaatatcatgacccgcaatgatgccgggggatatgagcaggttgctcttatcag

SEQ ID NO: 622431 - DNA, 75 bp, synthetic construct
  source 1..75: mol_type = other DNA
actggattaattccctttgtaataaggtttgttctatttagaattaatgaagactcttcatacataccatttaaa

SEQ ID NO: 622432 - DNA, 75 bp, synthetic construct
  source 1..75: mol_type = other DNA
ctatagtaataactgaggtgctatctctgacactttttaattatttatttaataaagggattgtatttaaattac

SEQ ID NO: 622433 - DNA, 75 bp, synthetic construct
  source 1..75: mol_type = other DNA
gggcgttacggcaggcctgacgctacccattttcgatagtggtcgtcttaacgccaatctcgatatcgcaaaagc

SEQ ID NO: 622434 - DNA, 75 bp, synthetic construct
  source 1..75: mol_type = other DNA
atgtcggcacatatgtatccatgttgttttgcttcataatgttagacaatttttccaaaacaagatcgttaattt

SEQ ID NO: 622435 - DNA, 75 bp, synthetic construct
  source 1..75: mol_type = other DNA
atgatactttggtctctgaaaaaagaaaccgatatccgtcgaggaaggcattgtgttttcctgaggcatgttcac

SEQ ID NO: 622436 - DNA, 75 bp, synthetic construct
  source 1..75: mol_type = other DNA
atgatactttggtctttgaaaaaagaaaccgatatccgccgcggaaggcattgtgttttcctgaggcatgttcac

SEQ ID NO: 622437 - DNA, 75 bp, synthetic construct
  source 1..75: mol_type = other DNA
atgatactttggtctatgaaaaaagaaaccgatatccggcgtggaaggcattgtgttttcctgaggcatgttcac

SEQ ID NO: 622438 - DNA, 75 bp, synthetic construct
  source 1..75: mol_type = other DNA
taactggaactgtggtgccacacaacctgtaccggatgcgcctgtgccgaaagatttaccccccggaatgccgga

SEQ ID NO: 622439 - DNA, 75 bp, synthetic construct
  source 1..75: mol_type = other DNA
aggcaaggctggtgctgacgaaggacggaagcatatttctcaacggtacgcacattcatctggaaggggagtcgg

SEQ ID NO: 622440 - DNA, 75 bp, synthetic construct
  source 1..75: mol_type = other DNA
accaggaaaaccgcacacccggcagcctgccgggaacaaagacgcagatgaccattcgttcgaaaacctataagg

SEQ ID NO: 622441 - DNA, 75 bp, synthetic construct
  source 1..75: mol_type = other DNA
acggggatgtgttattcaatcggcagtgctacgcgccaggggagcagttcgccgacccggtttatcggccagtcg

SEQ ID NO: 622442 - DNA, 75 bp, synthetic construct
  source 1..75: mol_type = other DNA
agtcaaacgggcgctgcataccgtactgtcgccaagagcggtcaatctgccgctgcatctgcgtgacggtatctg

SEQ ID NO: 622443 - DNA, 75 bp, synthetic construct
  source 1..75: mol_type = other DNA
tggacggaacgcgaagcgcgtagccgttgcccgtccggttgtgttgctgtattcgccgcccgtattcgtcagggg

SEQ ID NO: 622444 - DNA, 75 bp, synthetic construct
  source 1..75: mol_type = other DNA
aaatgtggtggagaaagttatagaaggggcttacgaggtggtgggtgtgtttgaccggattgaggataagcgtga

SEQ ID NO: 622445 - DNA, 75 bp, synthetic construct
  source 1..75: mol_type = other DNA
atgaaaatactaatcgtcatgttggtagtactgctcacaggctgcggcagcgtacatcactcattcatggataaa

SEQ ID NO: 622446 - DNA, 75 bp, synthetic construct
  source 1..75: mol_type = other DNA
gaaaataatgttttatttgctgaagccttcataacaacgccttacgtttttgtcatgcaaaaagcgcctgacagt

SEQ ID NO: 622447 - DNA, 75 bp, synthetic construct
  source 1..75: mol_type = other DNA
ctcatatattatcccttcgcgataagaaaggattctccttcaagttctcacctgatattaatatcattacaggtg

SEQ ID NO: 622448 - DNA, 75 bp, synthetic construct
  source 1..75: mol_type = other DNA
acgtccatatcggacatgggcgttccggcagctttcgtcagggcgtttttgaattacatggctgccgggtcatct

SEQ ID NO: 622449 - DNA, 75 bp, synthetic construct
  source 1..75: mol_type = other DNA
accgtttcatggtcccaaaaacacaggcgggaaccaatcgggtcattcatcttattaagccagcaatcgacgctc

SEQ ID NO: 622450 - DNA, 75 bp, synthetic construct
  source 1..75: mol_type = other DNA
ttgacattttttgtgtattttttgttatttgacaaatttaagtatttcggttttaaatttgattacaaaaaatca

SEQ ID NO: 622451 - DNA, 75 bp, synthetic construct
  source 1..75: mol_type = other DNA
ccgccggcagatggagctggatattctgaaaaaggcggaggaaatcataaaaaatctatggtcaccccccgtttt

SEQ ID NO: 622452 - DNA, 75 bp, synthetic construct
  source 1..75: mol_type = other DNA
actggtgtaaaaccaaaggagtactatactttacaaggaaagattaatttaattgatatcgatcttgttgaaatc

SEQ ID NO: 622453 - DNA, 75 bp, synthetic construct
  source 1..75: mol_type = other DNA
cgacccgggccgccggggatacacaaaacatatgctgcgtctgcggcgggccggagagataaacggagaacatgt

SEQ ID NO: 622454 - DNA, 75 bp, synthetic construct
  source 1..75: mol_type = other DNA
gcaatggggcgcatggcgttagacgttgaacttgagtctgaacgttttgaacatactgcgggtgaaatagttacg

SEQ ID NO: 622455 - DNA, 75 bp, synthetic construct
  source 1..75: mol_type = other DNA
gaaaacgtatccatacccgtgccattcacagcatcgacaccgacattaagctcaaccgcgcattgtgggtgatgg

SEQ ID NO: 622456 - DNA, 75 bp, synthetic construct
  source 1..75: mol_type = other DNA
gttgcatgaacgccgtctcgaccgcgaacactatatcgaagagtttgtcggccatctgcgcgctgagatgaaagc

SEQ ID NO: 622457 - DNA, 75 bp, synthetic construct
  source 1..75: mol_type = other DNA
tatttgcagccaaagctggtgatggattctttggaggattgccaacaagcagttctaatgttaataccagtgttg

SEQ ID NO: 622458 - DNA, 75 bp, synthetic construct
  source 1..75: mol_type = other DNA
cagtggctgcatctgcggcagtatctggatcagctatggcatggactgctaacggtactggtggtactgttgatt

SEQ ID NO: 622459 - DNA, 75 bp, synthetic construct
  source 1..75: mol_type = other DNA
gtacttttttttcaaaactttctagaaactgggttgttaataaaaaagaatattatgaacttttagctttcatta

SEQ ID NO: 622460 - DNA, 75 bp, synthetic construct
  source 1..75: mol_type = other DNA
atgcttatcaggcacctcagtaaaacgggtgccgggattggaaccccggataatgtcaaaggcgacacagacgcc

SEQ ID NO: 622461 - DNA, 75 bp, synthetic construct
  source 1..75: mol_type = other DNA
ttcagaactggctggaagtcggcaagaaaatagccattgcgaccgctggagtcattgcggcacgtaaagcattta

SEQ ID NO: 622462 - DNA, 75 bp, synthetic construct
  source 1..75: mol_type = other DNA
aactcgtgatgagatgcgcaatatctttgatggtattcaggataccgccatcaaattccgggtggatgactcgga

SEQ ID NO: 622463 - DNA, 75 bp, synthetic construct
  source 1..75: mol_type = other DNA
gtgaatatagtgcagaacaaatcagaaacggcgccacaccggttccttttgatatttcacttcaaaactgcgttc

SEQ ID NO: 622464 - DNA, 75 bp, synthetic construct
  source 1..75: mol_type = other DNA
caatggcttacgttatatagatgattatttcctagggttcaatacaattggggaagcagaatctgcattaacaat

SEQ ID NO: 622465 - DNA, 75 bp, synthetic construct
  source 1..75: mol_type = other DNA
tcctattgaattcaggtgtttttttctataatgaacatctctcattaactatcatggctgaaagtccaattgata

SEQ ID NO: 622466 - DNA, 75 bp, synthetic construct
  source 1..75: mol_type = other DNA
aaagagttagattctttgaagcatttgatagaagaatactgcggtggatataaaactaactcttttgataataca

SEQ ID NO: 622467 - DNA, 75 bp, synthetic construct
  source 1..75: mol_type = other DNA
aagaaagtcaatattcggtttttgaaaccaaggatggtaatttcaaagtgaacttttcttattccaagtggaaga

SEQ ID NO: 622468 - DNA, 75 bp, synthetic construct
  source 1..75: mol_type = other DNA
gttggtatgcgtggtcgcgacaaaccagtcagaacgaggcggagttgaaaattcgctggttgccattgccgaagg

SEQ ID NO: 622469 - DNA, 75 bp, synthetic construct
  source 1..75: mol_type = other DNA
gccacacgtggccttgatgtgctgggtaaccgctacacggcgatgattgccggttttgccggtagcgccatgatg

SEQ ID NO: 622470 - DNA, 75 bp, synthetic construct
  source 1..75: mol_type = other DNA
gaagccggttttaaccaggattcagtcatgcttttaagcagcgtaacgtcaggcaaaggtgcagaaaacctgcaa

SEQ ID NO: 622471 - DNA, 75 bp, synthetic construct
  source 1..75: mol_type = other DNA
caagagttagattctttgaagcatttgatagaagaatactgcggtggatctaaaactaactcttttgataataca

SEQ ID NO: 622472 - DNA, 75 bp, synthetic construct
  source 1..75: mol_type = other DNA
ggtgggcgtgtttgaccggatagaggaaaagcgtgatgccatgcagtctctggttctgccgccaccggcacgcca

SEQ ID NO: 622473 - DNA, 75 bp, synthetic construct
  source 1..75: mol_type = other DNA
gctgaccagcccgtccaggagaaactcgccacggtaattgcacgtctggatattcgccgtgcacaggtgctggtt

SEQ ID NO: 622474 - DNA, 75 bp, synthetic construct
  source 1..75: mol_type = other DNA
agggattatttatcagctataccgctggaaataaatgaaaaggcacgatacaaacccggcatcgctaactatcac

SEQ ID NO: 622475 - DNA, 75 bp, synthetic construct
  source 1..75: mol_type = other DNA
ggcattatttagttgaaaaaatgtgtgaaacacattctttggctatgaataattctgttttgacaaaccctgagg

SEQ ID NO: 622476 - DNA, 75 bp, synthetic construct
  source 1..75: mol_type = other DNA
tgctaaccggtgtttccgaaaagctgaaagatgaaaaagggaatgagcgtaagccctcctcttctggcgcgatgg

SEQ ID NO: 622477 - DNA, 75 bp, synthetic construct
  source 1..75: mol_type = other DNA
gatttttctaaagagcaagtgtcaaaggttcctctgcttggcgatattcctttagtggggcaactcttccgctat

SEQ ID NO: 622478 - DNA, 75 bp, synthetic construct
  source 1..75: mol_type = other DNA
gtcacccgaatcgtaccgcttgagaacgttcctgctcgtgacctggcccccctgctccgccagatgatggatgcg

SEQ ID NO: 622479 - DNA, 75 bp, synthetic construct
  source 1..75: mol_type = other DNA
gaaatccgcccaccttaccgggcgccggtgccgtgtggaaatccgcccaccttaccgggcgccggtgccgtgtgg

SEQ ID NO: 622480 - DNA, 75 bp, synthetic construct
  source 1..75: mol_type = other DNA
gaaggtgcacagtttgtcctcattagtctggaggatgaagtcagcaacattacccaaatcgctgatgagctacgc

SEQ ID NO: 622481 - DNA, 75 bp, synthetic construct
  source 1..75: mol_type = other DNA
aatattcacatcccggcgttatccgttaacttgtctgcgctgcattttcgcagtaatcaactacccaatcaggtt

SEQ ID NO: 622482 - DNA, 75 bp, synthetic construct
  source 1..75: mol_type = other DNA
ttttcaaaagtggggcatgaaaaaaatataagtttatattttttagaaaaaggaatgaatatggccctattagaa

SEQ ID NO: 622483 - DNA, 75 bp, synthetic construct
  source 1..75: mol_type = other DNA
tgcgggatcgctacgccaaaaccaacgccggtggtaacaatctcttcccgctgccagacatcttcttccagctca

SEQ ID NO: 622484 - DNA, 75 bp, synthetic construct
  source 1..75: mol_type = other DNA
tccgcccatcttcatgacaaaaatttgtcaaatgacaggctcatgtgtgctgatttatgtgtaagcgtgcagcaa

SEQ ID NO: 622485 - DNA, 75 bp, synthetic construct
  source 1..75: mol_type = other DNA
ggcgtctggctcagggaaggtcagagcattgataaagccgggaatatatcgggtgatgcccgtcgttcccgcatc

SEQ ID NO: 622486 - DNA, 75 bp, synthetic construct
  source 1..75: mol_type = other DNA
tatcataaagaaaatggtgaacgtgtaaaagataaagattcacctgggatgcagaattataattacattattggt

SEQ ID NO: 622487 - DNA, 75 bp, synthetic construct
  source 1..75: mol_type = other DNA
ttacatatccatgttgaagaggtacagcttcgaaaacgtttcgggttggaatgggaacgctatacccaacgggtt

SEQ ID NO: 622488 - DNA, 75 bp, synthetic construct
  source 1..75: mol_type = other DNA
ttaccttggaatgagcgggctccagttatccgttgctctctgctttggcagcctggtggggatacttgctgtacc

SEQ ID NO: 622489 - DNA, 75 bp, synthetic construct
  source 1..75: mol_type = other DNA
atgagtttattcacaagcaaacaaggccaacgcctttttaccaatcgagagcagaacggcggcgctgaccgctac

SEQ ID NO: 622490 - DNA, 75 bp, synthetic construct
  source 1..75: mol_type = other DNA
agggaaaggcacagatcagcattacttgagcaacattacatttaaagataaagtatctaaccaaaaatattactc

SEQ ID NO: 622491 - DNA, 75 bp, synthetic construct
  source 1..75: mol_type = other DNA
cctcatggccaaaaagttattggttaccaacaaaaattcagcgctccctatttaggtctttctggtaaatatatc

SEQ ID NO: 622492 - DNA, 75 bp, synthetic construct
  source 1..75: mol_type = other DNA
catataagttctggcgtaagtgccgccgggatgggcttggtaaaaagattttcctcttcaagggcgacagtgtcc

SEQ ID NO: 622493 - DNA, 75 bp, synthetic construct
  source 1..75: mol_type = other DNA
tttccggaggatatcgacggggaaggcgatggtttttcgctggcctcaaaacgaaccaccacatttatgtcggcg

SEQ ID NO: 622494 - DNA, 75 bp, synthetic construct
  source 1..75: mol_type = other DNA
attatcggttacggtgagaacggcgaacgctggctggtggatcgctataacattcgtcagtccctgcgctgtgat

SEQ ID NO: 622495 - DNA, 75 bp, synthetic construct
  source 1..75: mol_type = other DNA
ttgattatcgttcttctggatttggccccgtgttcaatactgttgaaggagttctggagtttttgcataatatta

SEQ ID NO: 622496 - DNA, 75 bp, synthetic construct
  source 1..75: mol_type = other DNA
ttacttaaacaatcgaatgtcatcaattccttttaaaggacaatcatggtgcgacagaagtattttttgtgatga

SEQ ID NO: 622497 - DNA, 75 bp, synthetic construct
  source 1..75: mol_type = other DNA
aaagtctgccggttgatccggcggcatatccggaggactgggatttgttgctgacggatgtgttccataaaacat

SEQ ID NO: 622498 - DNA, 75 bp, synthetic construct
  source 1..75: mol_type = other DNA
ttggcgcacgccttcaaagctatagtgatcccaatcaggttgaattctatacttcgggccgcacttccaatgaag

SEQ ID NO: 622499 - DNA, 75 bp, synthetic construct
  source 1..75: mol_type = other DNA
ttcggaagagccggatgagtgcggacgtcacgccactgcgatcaaaggtgtttatatgccggggtgtgatacacc

SEQ ID NO: 622500 - DNA, 75 bp, synthetic construct
  source 1..75: mol_type = other DNA
cgcatatttctcgcctgttgctgggagaagatcatcgcttttatttgcccggaagcatccttatcggtgggctgg

SEQ ID NO: 622501 - DNA, 75 bp, synthetic construct
  source 1..75: mol_type = other DNA
gggaaactgctggggaaaagcgggaagctgctgggcgcaaagctcggcgcgttgctggggaaaacaggtaagtcg

SEQ ID NO: 622502 - DNA, 75 bp, synthetic construct
  source 1..75: mol_type = other DNA
tgtggcgcgatgaccgccattgccagctgtcagtgcatggatcatatgcctgccgtctcccactggctgcgttat

SEQ ID NO: 622503 - DNA, 75 bp, synthetic construct
  source 1..75: mol_type = other DNA
cggccacagcaataccacaatgccgcagaccagagcgccatcagtcagtaccaacattatcctgctggtgaaatc

SEQ ID NO: 622504 - DNA, 75 bp, synthetic construct
  source 1..75: mol_type = other DNA
ctgatgctgccggggaaaggcgtaacgaaaaaacagcctccgttaccggagagcaagcaggctgaatgaagttta

SEQ ID NO: 622505 - DNA, 75 bp, synthetic construct
  source 1..75: mol_type = other DNA
ctgatgctgccggggaaaggcgtaacgaaaaaacagcctccgttaccggacagcaaggaggctgaatgaagttta

SEQ ID NO: 622506 - DNA, 75 bp, synthetic construct
  source 1..75: mol_type = other DNA
ctgatgctgccggggaaaggcgtaacgaaaaaacagcctccgttaccggatagcaagtaggctgaatggagttta

SEQ ID NO: 622507 - DNA, 75 bp, synthetic construct
  source 1..75: mol_type = other DNA
aactccctcgccagcccgtttacgcttggcgtttcgtcggcggcggcctttggcgcagcgctggcgattgttctg

SEQ ID NO: 622508 - DNA, 75 bp, synthetic construct
  source 1..75: mol_type = other DNA
atgaaggttattgggatattattgatgatgatcttttcgaagacatcttttatatggaatgtattgagaagttag

SEQ ID NO: 622509 - DNA, 75 bp, synthetic construct
  source 1..75: mol_type = other DNA
gttgccgaaatgcaaggtgtgttggatgaaattaacgagctggacatgcttgaccaaatttccgtttttgatttt

SEQ ID NO: 622510 - DNA, 75 bp, synthetic construct
  source 1..75: mol_type = other DNA
tagatgctttgaaagaaacgcagaatagatctctatgtaatgatatggaatactctggtattgtctgtaaagata

SEQ ID NO: 622511 - DNA, 75 bp, synthetic construct
  source 1..75: mol_type = other DNA
tttccgcggaatgttcggatcgcgtctgcgtatcctgaccaataatggcgaaatgctgggcgcctgtccggcccg

SEQ ID NO: 622512 - DNA, 75 bp, synthetic construct
  source 1..75: mol_type = other DNA
gtaatatagcttcagaagctttgtctggaaacagtagcactgataatgaaatgtatattgatgaggccagggatt

SEQ ID NO: 622513 - DNA, 75 bp, synthetic construct
  source 1..75: mol_type = other DNA
gattgccggtaaagggcatgccaagcaagtcgatgctgcatatgcaaaagaatgcgcgcgggaaggtatggcgag

SEQ ID NO: 622514 - DNA, 75 bp, synthetic construct
  source 1..75: mol_type = other DNA
acaacctgcaaatcgtaccggacggacgctatcgcgtgcgtctctaccaggcggggttattgcgtcataagcgct

SEQ ID NO: 622515 - DNA, 75 bp, synthetic construct
  source 1..75: mol_type = other DNA
tccgaagccggtggaggggctgcagacagacacccggtcgcacacacaccgtgttgatccgacagtgagcgtgac

SEQ ID NO: 622516 - DNA, 75 bp, synthetic construct
  source 1..75: mol_type = other DNA
gagcgaacggacacccttcctgccgggtttgtacgtttcgagcataacctcgcagaaatgccgctaatgctgtat

SEQ ID NO: 622517 - DNA, 75 bp, synthetic construct
  source 1..75: mol_type = other DNA
gaaccttacgtgaagctttctgccagtctgggaatgccctttgcggttattaccgactgggatccgctggacgga

SEQ ID NO: 622518 - DNA, 75 bp, synthetic construct
  source 1..75: mol_type = other DNA
gaaattttcgaaatttccaggacgttgatattcccttagctggtaacatagttttgctgggtgaaaaccgcgtcg

SEQ ID NO: 622519 - DNA, 75 bp, synthetic construct
  source 1..75: mol_type = other DNA
aagccaggaatgaaggctgagatccgtgctgatattctcaaaggggaagtgtttcacggtcacattgaaagcctt

SEQ ID NO: 622520 - DNA, 75 bp, synthetic construct
  source 1..75: mol_type = other DNA
tcgacgtgcagagtctgactgaagattacgacattggtttccgcctgaaagagaaaggtatgacggaaatttttg

SEQ ID NO: 622521 - DNA, 75 bp, synthetic construct
  source 1..75: mol_type = other DNA
acccaaacaatctgcagcggagaaggcagggacaaactggctgaagctggatgagttgcagcaactgatggggga

SEQ ID NO: 622522 - DNA, 75 bp, synthetic construct
  source 1..75: mol_type = other DNA
atgtatttatcaaaactcggaatccgcaactttagaaattttgaggcggctgatattcccctggcagataatgtt

SEQ ID NO: 622523 - DNA, 75 bp, synthetic construct
  source 1..75: mol_type = other DNA
ctgatgctgccggggaaaggcgtaacgaaaaaacagcctccgttaccggatagcaagaaggctgaatgtagttta

SEQ ID NO: 622524 - DNA, 75 bp, synthetic construct
  source 1..75: mol_type = other DNA
ctgggggaagtgcgtgttccacaccggggaaatgtggtgcagaaagtcattgaaggggcttacgaggtggtgggc

SEQ ID NO: 622525 - DNA, 75 bp, synthetic construct
  source 1..75: mol_type = other DNA
taagaattcattaagcttcatccgtatactccttatctgtcgcactgaatttgacgagaaaaaagcaataataag

SEQ ID NO: 622526 - DNA, 75 bp, synthetic construct
  source 1..75: mol_type = other DNA
ctggattattggcagtctgacaagcaaagcgtacaaagcagaagttcagcaacgccgtgaggcatttaatcgtgc

SEQ ID NO: 622527 - DNA, 75 bp, synthetic construct
  source 1..75: mol_type = other DNA
agcatcatttacgcaaaattcgtaaaccaatggttttactcgaccgtgattttaaatataccgataatgcattgg

SEQ ID NO: 622528 - DNA, 75 bp, synthetic construct
  source 1..75: mol_type = other DNA
cggcgcgctgggtattgggcaaaatatgctctggatgggggcgctgtcgtttgacgtgacctgggccgacagcca

SEQ ID NO: 622529 - DNA, 75 bp, synthetic construct
  source 1..75: mol_type = other DNA
ttctcgcaggcgatgactatcgttccggcgcgctgggtattgggcaaaatatgctctggatgggggcgctgtcgt

SEQ ID NO: 622530 - DNA, 75 bp, synthetic construct
  source 1..75: mol_type = other DNA
aaaaaaatatccagaaacaaacgatgggattaccattatagctttaatctttggtgtaacactatatagtgtatt

SEQ ID NO: 622531 - DNA, 75 bp, synthetic construct
  source 1..75: mol_type = other DNA
ctctcttattctcagacacgagaaaggagaacctgtgatcaataacctgacccattgctttgaagaaacagcctg

SEQ ID NO: 622532 - DNA, 75 bp, synthetic construct
  source 1..75: mol_type = other DNA
catacctgcaacgtgcgggggttttctctctccagcaaccaatgccaccagggataaagcccccgcaacattgcg

SEQ ID NO: 622533 - DNA, 75 bp, synthetic construct
  source 1..75: mol_type = other DNA
taacttgggatatctgtcaaaaaattgttaaggaaggtggtcatattgcaaatgttggtgtgcatggacaatctg

SEQ ID NO: 622534 - DNA, 75 bp, synthetic construct
  source 1..75: mol_type = other DNA
gatgctggaagatggtcactgtttgcgcgatcaggcaatgggtttctgttttgaagccggggcggatgaagatac

SEQ ID NO: 622535 - DNA, 75 bp, synthetic construct
  source 1..75: mol_type = other DNA
agcaggtaatgatatgttcttcgttcttaattattatgagtttatctgttcaggaataataaatggagactttga

SEQ ID NO: 622536 - DNA, 75 bp, synthetic construct
  source 1..75: mol_type = other DNA
gttccttcgacgctggaaaatcagcagcatcatttacgcaaaattcgtaagccaatggttttactcgatcgtgat

SEQ ID NO: 622537 - DNA, 75 bp, synthetic construct
  source 1..75: mol_type = other DNA
aatgacttttcctgcacaggctgcaggcggacacggtgcattttccgtgggatatgctcaggttcacccgggcgg

SEQ ID NO: 622538 - DNA, 75 bp, synthetic construct
  source 1..75: mol_type = other DNA
acgacgcgctggaaaaccagtgtgaggaatccgacctgctggaagcagaaatgaagctgatgcgctgtatagcga

SEQ ID NO: 622539 - DNA, 75 bp, synthetic construct
  source 1..75: mol_type = other DNA
acattggtaacgcagtagcccgccgtgcagcagcatttgaaatggaaattcactatttcgacccaaaaccgcata

SEQ ID NO: 622540 - DNA, 75 bp, synthetic construct
  source 1..75: mol_type = other DNA
ggtgcggagcattctggtctgggcggtattggcgtgatgattattatggcgctggtcattgccatttgtgccatt

SEQ ID NO: 622541 - DNA, 75 bp, synthetic construct
  source 1..75: mol_type = other DNA
gttttatgtgtattgccccggcgatgctgccgaaaattttcgatttcccgctgcgtttgaccatcggtactgata

SEQ ID NO: 622542 - DNA, 75 bp, synthetic construct
  source 1..75: mol_type = other DNA
ggcctgcgcgtcgtgcaatcgcataatcagcaggaactggagggcgtcccgctgcgcgcgttatcggagcgcttc

SEQ ID NO: 622543 - DNA, 75 bp, synthetic construct
  source 1..75: mol_type = other DNA
tgaagcagctcgctactccccggcccaacaatacggaggagaagaaacacacattaccaacaacggcatgcgaga

SEQ ID NO: 622544 - DNA, 75 bp, synthetic construct
  source 1..75: mol_type = other DNA
acgagccacagcaatatgttaaattgactgtagacgacatgcgaaaatgggcggctatggaccagcaggcgcgaa

SEQ ID NO: 622545 - DNA, 75 bp, synthetic construct
  source 1..75: mol_type = other DNA
cgccgtatgaatcgaacgtcgtgtgtaatgctaatgatgtgcttcatgcgctggcgctggtgccttcgccgcgcc

SEQ ID NO: 622546 - DNA, 75 bp, synthetic construct
  source 1..75: mol_type = other DNA
atggctgaggtaaatctttataaagtaatagcgccatatattaatttatttagagccgaccttagcttctctaaa

SEQ ID NO: 622547 - DNA, 75 bp, synthetic construct
  source 1..75: mol_type = other DNA
tgtctattttttcctgtgttgtattcatgttgtcgggatgttcatccaaccgatttgctgctagggatgcaaacg

SEQ ID NO: 622548 - DNA, 75 bp, synthetic construct
  source 1..75: mol_type = other DNA
aacaacaccaggcagaccaccgaggaccagccagaggcggacgagccacagcaatatgttaaattgactgtcgac

SEQ ID NO: 622549 - DNA, 75 bp, synthetic construct
  source 1..75: mol_type = other DNA
gctatcgaaggtaactctaccacgctggtggatagtaaaaatctacttgtccggtcgacgtcaggggagcagcag

SEQ ID NO: 622550 - DNA, 75 bp, synthetic construct
  source 1..75: mol_type = other DNA
caatttccggagatgaacagggccgatttgcgccttgtgaaaaatatctctgggaagacgggttatataccttcc

SEQ ID NO: 622551 - DNA, 75 bp, synthetic construct
  source 1..75: mol_type = other DNA
tggaggacattgcccgggataaagtcagaactctccattttgtggacgagatagaagtctacctggccttccaga

SEQ ID NO: 622552 - DNA, 75 bp, synthetic construct
  source 1..75: mol_type = other DNA
atttagacgacgcactgtactttgacctttttgaaggtgatttcggtacgccatgcgataccgaactatcgaaca

SEQ ID NO: 622553 - DNA, 75 bp, synthetic construct
  source 1..75: mol_type = other DNA
gtgacacagatggaactggccggttatctgaagaaaacccactggggccactatatgttaaccagagcgggtatt

SEQ ID NO: 622554 - DNA, 75 bp, synthetic construct
  source 1..75: mol_type = other DNA
ggtcacatcaaagagcaggcactggtgcgttttgccatccgttcagtccttctcatcattatcgctatctatctc

SEQ ID NO: 622555 - DNA, 75 bp, synthetic construct
  source 1..75: mol_type = other DNA
cggctggtatcagcgccgggttagctgcgcgctggtttccgcactttacagccgcgatgaaagagtttggcatca

SEQ ID NO: 622556 - DNA, 75 bp, synthetic construct
  source 1..75: mol_type = other DNA
tacaggttgccggtgcagtaactgcgcccatctccggcattgtgcagcgctggcttaaaacttccggcgaaaccg

SEQ ID NO: 622557 - DNA, 75 bp, synthetic construct
  source 1..75: mol_type = other DNA
ttatcaaaaaagtaattcaaaaataccagatgaattgctgacttctctgagcataaataaacccaaacgagtttg

SEQ ID NO: 622558 - DNA, 75 bp, synthetic construct
  source 1..75: mol_type = other DNA
tatgacccggtcgacaggctgacggagcagcgcggctttgacggccggacgcaacgttaccagtatgacctgacc

SEQ ID NO: 622559 - DNA, 75 bp, synthetic construct
  source 1..75: mol_type = other DNA
acgggtggttaaccaccctcagccatacctgtgaaggccaccgcgtgtcggtccactacggctatgacgataaag

SEQ ID NO: 622560 - DNA, 75 bp, synthetic construct
  source 1..75: mol_type = other DNA
gctcggccgaccagaatacagcacgtcaggaagaggcattgttaaaggcgggttttcagccagataaaatttatg

SEQ ID NO: 622561 - DNA, 75 bp, synthetic construct
  source 1..75: mol_type = other DNA
cagaaagatattgcagagaagatacaaaaacagggaggtgattatttattcgctgtaaaaggaaatcaggtggcg

SEQ ID NO: 622562 - DNA, 75 bp, synthetic construct
  source 1..75: mol_type = other DNA
atgagcaaaaaatcttggagacttaatgttttcaaatggagaagtaggtgtatacttttttttgtgataagcgga

SEQ ID NO: 622563 - DNA, 75 bp, synthetic construct
  source 1..75: mol_type = other DNA
caatgcgcaaacagcctgatgcccttcgctacgaccgccaaactatttttggccttgtccgtgaacgtccgatcg

SEQ ID NO: 622564 - DNA, 75 bp, synthetic construct
  source 1..75: mol_type = other DNA
caagcagacatggaaaacactggatgacgaactggcctacgctctctggcctggtgatgtggatgccggaaacat

SEQ ID NO: 622565 - DNA, 75 bp, synthetic construct
  source 1..75: mol_type = other DNA
agtgactatttattatgatcctgaaacaggtgattcaatgacttttgattgtagcaatagaattgatcgtcgttc

SEQ ID NO: 622566 - DNA, 75 bp, synthetic construct
  source 1..75: mol_type = other DNA
ggaaacaatgccgaaaatcactctacccactaccaaccctatccgcatgataaagtcagtatatgggggccattt

SEQ ID NO: 622567 - DNA, 75 bp, synthetic construct
  source 1..75: mol_type = other DNA
atatctaatacacccaataattatcgaattattaagccaaaatattttgttgttttttggcaggatggatttact

SEQ ID NO: 622568 - DNA, 75 bp, synthetic construct
  source 1..75: mol_type = other DNA
gagaacagcgcccggacggcctgataaggatgtttgcgctgaatgcggacgggtttccggtcatcatcccgacgc

SEQ ID NO: 622569 - DNA, 75 bp, synthetic construct
  source 1..75: mol_type = other DNA
tctttctcggcggcggtacgcagacggtactggaaatcagcccggaaatccctgactggctgcgtcaggtggtgg

SEQ ID NO: 622570 - DNA, 75 bp, synthetic construct
  source 1..75: mol_type = other DNA
atctggacccgttttgcgctatcgaaagtgagcgccgagggaaagtttattacctggcgctggtacgggatgcca

SEQ ID NO: 622571 - DNA, 75 bp, synthetic construct
  source 1..75: mol_type = other DNA
gaaagaggtgctggatacgatgattgggctggcgcagtcgggtatgacaatgttgtgtgtaacacatgagatggg

SEQ ID NO: 622572 - DNA, 75 bp, synthetic construct
  source 1..75: mol_type = other DNA
gatgttataaatacactgcataaaatggctgaatcgggagatatcgacgcgcagagcctgttaggctgggaatat

SEQ ID NO: 622573 - DNA, 75 bp, synthetic construct
  source 1..75: mol_type = other DNA
ggctgaaaatgggtttgatgcgctgcgccgtcaggttccggtacgttattcggtacgtggcggcaaggtgattgc

SEQ ID NO: 622574 - DNA, 75 bp, synthetic construct
  source 1..75: mol_type = other DNA
caccgctattatgacccgctgcgggggaggtatatcactcaggatccgattgggctgaaggggggatggaatttt

SEQ ID NO: 622575 - DNA, 75 bp, synthetic construct
  source 1..75: mol_type = other DNA
ataagccaaagcctgacccactggccgacccagaatcagaagccgaagagtccggtaataccacggtcgaaggtt

SEQ ID NO: 622576 - DNA, 75 bp, synthetic construct
  source 1..75: mol_type = other DNA
aacgcgtttggccgctcagccatcaccgaaaacgagatacgcgcggcaggcgagctgcaagccctgccagaactt

SEQ ID NO: 622577 - DNA, 75 bp, synthetic construct
  source 1..75: mol_type = other DNA
aactctggtacagattcggccctggtgacgcaggacggagaggctaaagtgctttccgttgccgctgccgatccg

SEQ ID NO: 622578 - DNA, 75 bp, synthetic construct
  source 1..75: mol_type = other DNA
aggtgggtggtaaggatgttcagttagcaaactttggtggtcgtgtaactgcatttgttgaagataatggttctg

SEQ ID NO: 622579 - DNA, 75 bp, synthetic construct
  source 1..75: mol_type = other DNA
taccactccagataaagtctatgtaggcgctgcttctggttcattagtaactaagagtggtaacgcggaaataaa

SEQ ID NO: 622580 - DNA, 75 bp, synthetic construct
  source 1..75: mol_type = other DNA
acaggtgataaagctgcaactgctgatcagttagttaaagattttggcgctacaggaactacaagttatagcctc

SEQ ID NO: 622581 - DNA, 75 bp, synthetic construct
  source 1..75: mol_type = other DNA
tctgctatagccttttattacttcatgccagaggtggcaccaattattttgagtcaaaacaaattaaacgtagaa

SEQ ID NO: 622582 - DNA, 75 bp, synthetic construct
  source 1..75: mol_type = other DNA
catgaaacgcggtatgaatacaacatcgccggtgacctgaccgccgtcattgccccggacggcagcagaaacggg

SEQ ID NO: 622583 - DNA, 75 bp, synthetic construct
  source 1..75: mol_type = other DNA
atatgcgggagaactggcgcgaatacctggaacgggtgcgcgggaaagagccggcggaagaaaaaaccaccagcg

SEQ ID NO: 622584 - DNA, 75 bp, synthetic construct
  source 1..75: mol_type = other DNA
gtgagcgaacaagataacggcctcaaactggctgtgaacaacctcgccactgaaatgaggcgagcgaattacctg

SEQ ID NO: 622585 - DNA, 75 bp, synthetic construct
  source 1..75: mol_type = other DNA
gtgcgctaggggcaagttacgcaatacttctcacagaaattattagttgtgctttactagcatattttacattca

SEQ ID NO: 622586 - DNA, 75 bp, synthetic construct
  source 1..75: mol_type = other DNA
tctttcggtgatattagctaactgcgtacttttgcctcaaaggaaaaataaacaatacgctttagtgcctattat

SEQ ID NO: 622587 - DNA, 75 bp, synthetic construct
  source 1..75: mol_type = other DNA
aacgggtgcgtctgtggccagtctctgggggaagtgcgtgttccacaccggggaaatgtggtggagaaagttatc

SEQ ID NO: 622588 - DNA, 75 bp, synthetic construct
  source 1..75: mol_type = other DNA
ttctaaccttgcagatccatcacttgaacaggacgctgtaaataatcgctcaatgcgtaattatgtcgatgctgc

SEQ ID NO: 622589 - DNA, 75 bp, synthetic construct
  source 1..75: mol_type = other DNA
tgctgctctgactgcagcagaaaaatacgacttcccaccgttatatcgtgattttcgcgcttatctggcaatgtt

SEQ ID NO: 622590 - DNA, 75 bp, synthetic construct
  source 1..75: mol_type = other DNA
tttggcattgatgacgccgccttgaagaataacactggtgatgctaccgctacttcaccgggaacatctgggaca

SEQ ID NO: 622591 - DNA, 75 bp, synthetic construct
  source 1..75: mol_type = other DNA
acattagttgtttttttaacttggggatttgaatggctaatttttaagttcaatgtaaaccttgaacctcatgat

SEQ ID NO: 622592 - DNA, 75 bp, synthetic construct
  source 1..75: mol_type = other DNA
cagccgcatttcgcaaatgctgcatgagcaccatgatgccatcaaagtcctgaagccggaaagcggtacgtctcc

SEQ ID NO: 622593 - DNA, 75 bp, synthetic construct
  source 1..75: mol_type = other DNA
attgccaacgttacatcttgggttgaacaaggtagtgcccatgaaattgaattcgactggcgaatgtttgacgat

SEQ ID NO: 622594 - DNA, 75 bp, synthetic construct
  source 1..75: mol_type = other DNA
gctgttgcaaatggtaaaaccacggatccgctgaaagcgctggacgatgctatcgcatccgtagataaattccgc

SEQ ID NO: 622595 - DNA, 75 bp, synthetic construct
  source 1..75: mol_type = other DNA
aaatgtggtggagaaagttatggaaggggcttacgaggtggtgggtgtgtttgaccggatagaggacaagcgtga

SEQ ID NO: 622596 - DNA, 75 bp, synthetic construct
  source 1..75: mol_type = other DNA
gatcatccagcaggcaggtaactccgtgctgtctaaagcgaaccaggtaccgcagcaagttctgtcactgttaca

SEQ ID NO: 622597 - DNA, 75 bp, synthetic construct
  source 1..75: mol_type = other DNA
gcttggcaaaactatgtatctgagcaaatcagaaggtggtagcccgattctggtaaaagaagatgcagcaaaatc

SEQ ID NO: 622598 - DNA, 75 bp, synthetic construct
  source 1..75: mol_type = other DNA
ttagttgtaaatggcgccacctacaatgtcagtgcagatggtaaaacggtaactgatactactcctggtgcccct

SEQ ID NO: 622599 - DNA, 75 bp, synthetic construct
  source 1..75: mol_type = other DNA
cagccactgatactggcggaactaacccagcttcaattgagggtgtttatactgataatggtaatgattactatg

SEQ ID NO: 622600 - DNA, 75 bp, synthetic construct
  source 1..75: mol_type = other DNA
tttcaacaaaggttggtactgaaaacgggcaactccttggtaatactctcacaggtaatgacgcagcaaaaggag

SEQ ID NO: 622601 - DNA, 75 bp, synthetic construct
  source 1..75: mol_type = other DNA
aaatattttgcctgatagaacgctttttatctcttttgacaaataaggttctatgtgtttctataaatgatcaat

SEQ ID NO: 622602 - DNA, 75 bp, synthetic construct
  source 1..75: mol_type = other DNA
ttcaagcgcacccaagcaaatgcatagccagaaactaagtcccgcagaacgcgttatatcgcttttaaatggcat

SEQ ID NO: 622603 - DNA, 75 bp, synthetic construct
  source 1..75: mol_type = other DNA
caactcgacggcgtaaaaatcacccacagcaaatttagccatcttcagggcgatgccattgaatggaacgtcgcg

SEQ ID NO: 622604 - DNA, 75 bp, synthetic construct
  source 1..75: mol_type = other DNA
tcgttaccattaacaaatatgccagtcagttggcagtagagccggtagtacctgatgacgttctggaacagacag

SEQ ID NO: 622605 - DNA, 75 bp, synthetic construct
  source 1..75: mol_type = other DNA
aaagatacaacacttgatgaagaacaaaaagaagagaccctgaaatattacgataaagaaaaagaaactacggaa

SEQ ID NO: 622606 - DNA, 75 bp, synthetic construct
  source 1..75: mol_type = other DNA
agttcggctggtgttcttgccgggtcaacagttggcgcagccggagctgcagcatctgttgtagcaaatttcaga

SEQ ID NO: 622607 - DNA, 75 bp, synthetic construct
  source 1..75: mol_type = other DNA
tgcgtgtccgcccggaattgctgattttgttgttaatggtgatgatcatctcaatgtttgtcatcccgttaccga

SEQ ID NO: 622608 - DNA, 75 bp, synthetic construct
  source 1..75: mol_type = other DNA
tctaactaatattgatgctaaaattaaaagtgctcaagatgaattttatcaccagttgtcacaagctttattaaa

SEQ ID NO: 622609 - DNA, 75 bp, synthetic construct
  source 1..75: mol_type = other DNA
atggagtctttggcgctttgggctcccagagaaaaagatgtcataacattagttgaacatgtccgtgcatcactt

SEQ ID NO: 622610 - DNA, 75 bp, synthetic construct
  source 1..75: mol_type = other DNA
tgtgataatttcgttatcgatggtatggatatggttaatagcgcgggtatgctaattggctatggtgttatcaaa

SEQ ID NO: 622611 - DNA, 75 bp, synthetic construct
  source 1..75: mol_type = other DNA
tggccgggggcgctttgtcctgcaggagggcagcaaagtcatcggtgagggcgaaggccgtaccgaaaacattac

SEQ ID NO: 622612 - DNA, 75 bp, synthetic construct
  source 1..75: mol_type = other DNA
cagcatcacatcactcacgcttgatatgaatgacattgccgaagtttctctgtcagagaataatatcatcacccg

SEQ ID NO: 622613 - DNA, 75 bp, synthetic construct
  source 1..75: mol_type = other DNA
acaagaaaataaatgtgtcgaaaatatagaggtgatagatgatggtactttagtgattaatactacacagggtga

SEQ ID NO: 622614 - DNA, 75 bp, synthetic construct
  source 1..75: mol_type = other DNA
atgcataatttgtttgagcagtggccattatttaaacctaacacaccaggcaattccaactatttccctgacaac

SEQ ID NO: 622615 - DNA, 75 bp, synthetic construct
  source 1..75: mol_type = other DNA
acatctttacatccacaaattcaaatcctgatggtttgctctttgatgctatactggatattgcacataactccg

SEQ ID NO: 622616 - DNA, 75 bp, synthetic construct
  source 1..75: mol_type = other DNA
gccagactggttgtcggaaatatcagtaagttcagagacaggtgtaagccatttcagcgatacgtctcttcgtca

SEQ ID NO: 622617 - DNA, 75 bp, synthetic construct
  source 1..75: mol_type = other DNA
tataaaccagtcattaccggaaaattggggatatctgtcgctcagcggtcaatggcgggattattgggaacgcag

SEQ ID NO: 622618 - DNA, 75 bp, synthetic construct
  source 1..75: mol_type = other DNA
aaaagtagctatctaaatctgaacagtgggttaaatctcctgggctggcagctgcattcaaatgccaattatacg

SEQ ID NO: 622619 - DNA, 75 bp, synthetic construct
  source 1..75: mol_type = other DNA
tagtgttgaagttacaacatgatgatttatcgaaatgtatcagcccacttattttcgctattgaatcgataaaaa

SEQ ID NO: 622620 - DNA, 75 bp, synthetic construct
  source 1..75: mol_type = other DNA
ttatggaaaagttactactatccaaaccttataggtttagaggtaaaatatctcctataactttccagttaagtg

SEQ ID NO: 622621 - DNA, 75 bp, synthetic construct
  source 1..75: mol_type = other DNA
gtgtgtttgctaccgggctgaatgagtggaaacaggttaaagccgcgcatgtatcaaaaatccgtacgctggtaa

SEQ ID NO: 622622 - DNA, 75 bp, synthetic construct
  source 1..75: mol_type = other DNA
ggcaaaagaggctgctcaaagtatcggggtggagctttacaagttgggtgatttattacgaagaatttcacggta

SEQ ID NO: 622623 - DNA, 75 bp, synthetic construct
  source 1..75: mol_type = other DNA
ttaaggcgtgaaattatgcaaaaaatttatcttccactcaggaaaaaagcaaacctgatgcctattcttgaacag

SEQ ID NO: 622624 - DNA, 75 bp, synthetic construct
  source 1..75: mol_type = other DNA
gatattgatgagctggtttctggcgatgagtccgacctggaaaagttttatgccattcagaaaaaacatttactt

SEQ ID NO: 622625 - DNA, 75 bp, synthetic construct
  source 1..75: mol_type = other DNA
taccagctaactggctggtggtggcggtcaatctgctattctgtgcgctggtgatatgcgcacgcggaaatgttt

SEQ ID NO: 622626 - DNA, 75 bp, synthetic construct
  source 1..75: mol_type = other DNA
agaaaaatataaacacttgctttaccagaaaaaatttctcgatggtgtttttacagcaattaaatataatgttat

SEQ ID NO: 622627 - DNA, 75 bp, synthetic construct
  source 1..75: mol_type = other DNA
aagatgcattagcccggaaggtgatacagcaactacgacagcaacaagcagtaaggcagcgaagcatgatgatag

SEQ ID NO: 622628 - DNA, 75 bp, synthetic construct
  source 1..75: mol_type = other DNA
agcagcaaccactgcctctggtgctgccctgccgtcacctgcactggccaaccgctctggtggcactacggtgca

SEQ ID NO: 622629 - DNA, 75 bp, synthetic construct
  source 1..75: mol_type = other DNA
atgcgtaaaatgtgtgtaccaaatagtgaccaaattatgcttacagataccaaattacgaaacattcacggcaag

SEQ ID NO: 622630 - DNA, 75 bp, synthetic construct
  source 1..75: mol_type = other DNA
acttagaaatctgttgattcaatgtgtgagccaaaatcatcctgagcatcatgagatatcggatgtgttagttaa

SEQ ID NO: 622631 - DNA, 75 bp, synthetic construct
  source 1..75: mol_type = other DNA
cgaccagtaccacatcagcgtgaaggcagaacctggtatgaatgaagatgcattagcccggaaggtgatacagca

SEQ ID NO: 622632 - DNA, 75 bp, synthetic construct
  source 1..75: mol_type = other DNA
ctaccgaccgtcaatgacgcagccaaaggcattggccgcatcacaactgttgtggcgaacttcgcggcggaacac

SEQ ID NO: 622633 - DNA, 75 bp, synthetic construct
  source 1..75: mol_type = other DNA
gtagttgatgtttttaacccatttcagactccggtatatctattgccatgttctgatggcagagtcagaacgtgg

SEQ ID NO: 622634 - DNA, 75 bp, synthetic construct
  source 1..75: mol_type = other DNA
acagttttcttctgcgttcacagataatgtataacttatccaattgcaggaacataatatcaaagcatggcgcac

SEQ ID NO: 622635 - DNA, 75 bp, synthetic construct
  source 1..75: mol_type = other DNA
gttttacaccagaaggcgataacaaagtacgtattgggattgcaatcacaacccataatcggcatgaagtgctta

SEQ ID NO: 622636 - DNA, 75 bp, synthetic construct
  source 1..75: mol_type = other DNA
cattaagggggatactggcggtgtacgataaatatgattatcttgatgaacaaaaggaggcactaaataagtttg

SEQ ID NO: 622637 - DNA, 75 bp, synthetic construct
  source 1..75: mol_type = other DNA
cagagtatatgacaatagctatcacgagaacccagaaaatgatgcacagtctcctacttctcagacaaacgatct

SEQ ID NO: 622638 - DNA, 75 bp, synthetic construct
  source 1..75: mol_type = other DNA
ccgggaattgcaccggaacagcgtaagcacctgttccagccatttgtccgcggcgacagtgcgcgcaccattagc

SEQ ID NO: 622639 - DNA, 75 bp, synthetic construct
  source 1..75: mol_type = other DNA
gatttgtatcctcatctggcgcatcttgccggcgggcaggtgtacccgtatgtggtccccctgctggatggcagg

SEQ ID NO: 622640 - DNA, 75 bp, synthetic construct
  source 1..75: mol_type = other DNA
tctgcccaccactgcatcatttctctgcgcttatcgagatactgagcatggttgtaaattcaactaacccagtgc

SEQ ID NO: 622641 - DNA, 75 bp, synthetic construct
  source 1..75: mol_type = other DNA
acccggacagcaccttcacggcgtggccggataaccgcatcacggaagatgcgcactatgtctaccgctacgatg

SEQ ID NO: 622642 - DNA, 75 bp, synthetic construct
  source 1..75: mol_type = other DNA
gagaagactaaatgtttacctacgacacctgaaaacatcaggatggttgtggccaactgtagtggtcaagtaata

SEQ ID NO: 622643 - DNA, 75 bp, synthetic construct
  source 1..75: mol_type = other DNA
taaccacgctgacccgtctgatatcacaaattcgtgaaaaatcagcagacaggctctggggcagactgtccggac

SEQ ID NO: 622644 - DNA, 75 bp, synthetic construct
  source 1..75: mol_type = other DNA
actccccccttaaaccagctggtccggataattcagaggatctcctgttcaaaaagctattctccccttcgaaat

SEQ ID NO: 622645 - DNA, 75 bp, synthetic construct
  source 1..75: mol_type = other DNA
atttttgtatataatcataaatctatcactctaattactagtcatgctgtatatatagtaatatctatgtggttt

SEQ ID NO: 622646 - DNA, 75 bp, synthetic construct
  source 1..75: mol_type = other DNA
actaacgatacagcttcgtatttacacacatttggcttaactgaaagtcttttatcagaaaatcctttctatggc

SEQ ID NO: 622647 - DNA, 75 bp, synthetic construct
  source 1..75: mol_type = other DNA
ttagtatcgtcattttcactatcgctatcgcctggggggcaatcgttctgaacctgccggttctgctgttcacct

SEQ ID NO: 622648 - DNA, 75 bp, synthetic construct
  source 1..75: mol_type = other DNA
aaatgccatcactaaacagcgacgatccgatggccgttcgccagcttttaggtgcaatggccgaccagctcgacg

SEQ ID NO: 622649 - DNA, 75 bp, synthetic construct
  source 1..75: mol_type = other DNA
gatatggatgggaatgtgattgttaatggtaatcacaggatggttgcgggtctgttatgtgataaacttcctcct

SEQ ID NO: 622650 - DNA, 75 bp, synthetic construct
  source 1..75: mol_type = other DNA
cacctgaaaacatcaggatggttgtggccaacagtcccttgttgacagtacaacaaaaagtctcagtacccgtag

SEQ ID NO: 622651 - DNA, 75 bp, synthetic construct
  source 1..75: mol_type = other DNA
ggggtgacgctaccggcggagctgtcggtgatgctggggaggctggagcgggaactgcgcgcgggtgcggtgagt

SEQ ID NO: 622652 - DNA, 75 bp, synthetic construct
  source 1..75: mol_type = other DNA
ggatccaccaacgcacgttaccggcttttatctgctcgatgcgctgcttgaaggcaacggtgaagtcttcttcaa

SEQ ID NO: 622653 - DNA, 75 bp, synthetic construct
  source 1..75: mol_type = other DNA
tggtcatctgcaaattcttcccggcggcggaaggcttgatgactggctggatccaccaacgcacgttaccggctt

SEQ ID NO: 622654 - DNA, 75 bp, synthetic construct
  source 1..75: mol_type = other DNA
aacgctggttcagcatgaaacagcgtgatgccctgcgttttcgtcgccagcgtggcgcggagcgcaagcgtgccg

SEQ ID NO: 622655 - DNA, 75 bp, synthetic construct
  source 1..75: mol_type = other DNA
ttatgttatgcgctacccaatgcgttgatcccatcgattaccgtattgggtttggcgctgggcgatttgttgtat

SEQ ID NO: 622656 - DNA, 75 bp, synthetic construct
  source 1..75: mol_type = other DNA
ctgcaacatctcatcttaccggcattaacgctggcgttcgttcacctggggattgtcgctcgccagatccgctca

SEQ ID NO: 622657 - DNA, 75 bp, synthetic construct
  source 1..75: mol_type = other DNA
gcgctgggcgatttgttgtatggcgcagtgctcaccgaaaccgtttttgcctggcccggaatgggtgcatgggta

SEQ ID NO: 622658 - DNA, 75 bp, synthetic construct
  source 1..75: mol_type = other DNA
tgccagtggtggcggcaatctggtttgtcgtttactacgtcatcttccgtttcgctatcacccgcttcaatctga

SEQ ID NO: 622659 - DNA, 75 bp, synthetic construct
  source 1..75: mol_type = other DNA
ggtctgtcaaccaagtggtacatggtgccagtggtggcggcaatctggtttgtcgtttactacgtcatcttccgt

SEQ ID NO: 622660 - DNA, 75 bp, synthetic construct
  source 1..75: mol_type = other DNA
gctgcgcggcgagcatcagttctgcaggcatattgccgtttttgtgaagacgtcatcgttcgctgtgaacgaacc

SEQ ID NO: 622661 - DNA, 75 bp, synthetic construct
  source 1..75: mol_type = other DNA
aaacgagctaaccgcctggccagatattctcgtgagcgccagattcacgaaatgtcgcttcatatcctgaagaca

SEQ ID NO: 622662 - DNA, 75 bp, synthetic construct
  source 1..75: mol_type = other DNA
attctccaggaaatgaatattacgctgatcccaccacaagagctatcgtactatctggatagctcttgttatgag

SEQ ID NO: 622663 - DNA, 75 bp, synthetic construct
  source 1..75: mol_type = other DNA
gcgagcggtaaaagctataacgttttcgctcaatacatcgaaagcgtaaatccagcaatcaaccctggcaatagt

SEQ ID NO: 622664 - DNA, 75 bp, synthetic construct
  source 1..75: mol_type = other DNA
ggtgggcgtgtttgaccggatagaggagatgcgtgatgccatgcagtcgctgattctgccgccaccggcacgcca

SEQ ID NO: 622665 - DNA, 75 bp, synthetic construct
  source 1..75: mol_type = other DNA
attaattttaaccactccagcgaagattttatcctggctgcagatatagttggcaaaggcgaagttaaccaggaa

SEQ ID NO: 622666 - DNA, 75 bp, synthetic construct
  source 1..75: mol_type = other DNA
gaaaataattcatcaacctgggatcaatttcgttttcttaatgttggagaaacaagtgaaggtacgttgaatata

SEQ ID NO: 622667 - DNA, 75 bp, synthetic construct
  source 1..75: mol_type = other DNA
caacgctggcaatagctatttcgaccgtgttatcaatacccgtttcactggcatgggcaccaccaacaagtatca

SEQ ID NO: 622668 - DNA, 75 bp, synthetic construct
  source 1..75: mol_type = other DNA
ggcgtggtgatgggtattttccatgttgggcagccactacgcgccatgaatatgctgttccgcgtcgggtcttcg

SEQ ID NO: 622669 - DNA, 75 bp, synthetic construct
  source 1..75: mol_type = other DNA
ccgggctgtttggtctgcgcctggggttgctggtgagcgtgctggcgattctggtcagcttctgcctgcgtccag

SEQ ID NO: 622670 - DNA, 75 bp, synthetic construct
  source 1..75: mol_type = other DNA
actgggatctctcggtttgctgttaaatcgcggtggtgcaatgctttgtaaagtactggtatggctggccgctgc

SEQ ID NO: 622671 - DNA, 75 bp, synthetic construct
  source 1..75: mol_type = other DNA
aagccacggagtgaaatgggtgtgacttgctcaggccgccagaagcaacgcggaaaatcaattccagcttattac

SEQ ID NO: 622672 - DNA, 75 bp, synthetic construct
  source 1..75: mol_type = other DNA
gcagcatcactcggaagccttcgctgcaagaaggtagtagaagtcgagcgtaaacagaaccgtatttactaccgg

SEQ ID NO: 622673 - DNA, 75 bp, synthetic construct
  source 1..75: mol_type = other DNA
gctggcaggatgagagtaatgacctgtggaccacctaccaacgtattcaggagaacctgataaaaggtgggctta

SEQ ID NO: 622674 - DNA, 75 bp, synthetic construct
  source 1..75: mol_type = other DNA
acggtatcaccgccgccattgaagcgggttataccttccgtcttggtgaaagcgcagatgcccgcaccagctact

SEQ ID NO: 622675 - DNA, 75 bp, synthetic construct
  source 1..75: mol_type = other DNA
aatcaatttatctggcttggaatggacgaaaccagcaccggtattctaaacattggtggagcgcagggagaagcc

SEQ ID NO: 622676 - DNA, 75 bp, synthetic construct
  source 1..75: mol_type = other DNA
acagacccatcctggaccaatacagccaatgctcttggcaacacgccactcgggagctctgtttcggaagcaatc

SEQ ID NO: 622677 - DNA, 75 bp, synthetic construct
  source 1..75: mol_type = other DNA
atcacgacgctggtttttgacgccgacgaggaggtgatcaccgccaccgctggttttccgcagggctggacgatc

SEQ ID NO: 622678 - DNA, 75 bp, synthetic construct
  source 1..75: mol_type = other DNA
gagagcgcagtacgacgactatgaagatcggtttggcgttgcgcccgacatgtcgctaagcacctgggacgccct

SEQ ID NO: 622679 - DNA, 75 bp, synthetic construct
  source 1..75: mol_type = other DNA
gctataattaatggcaaaaagtttaaaactagccgggctatctcttgtcgatcctttaatcgttatttttctgtt

SEQ ID NO: 622680 - DNA, 75 bp, synthetic construct
  source 1..75: mol_type = other DNA
tttgacgccacaaatcccgcaaaactagctgaacagacgcagttagcgtctgcggttgttacgccagaagaaaag

SEQ ID NO: 622681 - DNA, 75 bp, synthetic construct
  source 1..75: mol_type = other DNA
ctggggttgcattaacgattgctggggctggcggtaatgatgagcaggcaatgtataatgttacgcaagaagccg

SEQ ID NO: 622682 - DNA, 75 bp, synthetic construct
  source 1..75: mol_type = other DNA
gcacattatgcctgtctgcggcattttctggcgcaacctggtatgttgcacaacatgaaaaagaggcaagcctgc

SEQ ID NO: 622683 - DNA, 75 bp, synthetic construct
  source 1..75: mol_type = other DNA
cctgcgccgtcccctggcctcgctgaaatccaacctgacgctgggtgacttttatattcctggcgatctgtttga

SEQ ID NO: 622684 - DNA, 75 bp, synthetic construct
  source 1..75: mol_type = other DNA
tggctattctgtcagtattagcgacttcgcatacatgggctaagggtgaaacgtttaataccaattttatgattg

SEQ ID NO: 622685 - DNA, 75 bp, synthetic construct
  source 1..75: mol_type = other DNA
gtctcggttaataaacagcaggaacaattctgtactattacctttgataaagttatcgaagagaataaagtttat

SEQ ID NO: 622686 - DNA, 75 bp, synthetic construct
  source 1..75: mol_type = other DNA
ttctgacagtcaaagcgatgtggcactactgggcaaccgtaaaagcaccgctccttatcgtggggccgttgtgat

SEQ ID NO: 622687 - DNA, 75 bp, synthetic construct
  source 1..75: mol_type = other DNA
caaataaagcgttactggctactgtcgtggcgtctgttgtgtcatcaccggcgaaagccggtgtacctgttttag

SEQ ID NO: 622688 - DNA, 75 bp, synthetic construct
  source 1..75: mol_type = other DNA
tcaaacggcacatatgatataggccgtatgcagtttaatacggtttatttaaaggatctggaaaaatacggcatt

SEQ ID NO: 622689 - DNA, 75 bp, synthetic construct
  source 1..75: mol_type = other DNA
gttgatgcgctaaataaaaaagttagaaagttctttatcccgactctttgtagaaatatttctccggttgaggat

SEQ ID NO: 622690 - DNA, 75 bp, synthetic construct
  source 1..75: mol_type = other DNA
aatcggctatggggtaattaaaggcaaatatctctcgataccgcaaaatttccgagtgaataatattcaactgga

SEQ ID NO: 622691 - DNA, 75 bp, synthetic construct
  source 1..75: mol_type = other DNA
ccgcacactggcaagccatagctgagtggcagcagcggtatgttagcgggtaccaaatgaaaggccatatcacgc

SEQ ID NO: 622692 - DNA, 75 bp, synthetic construct
  source 1..75: mol_type = other DNA
gtggactggtataacaatcgacgcttactggaaaggctgggccatatccctccggcagaagcagaaaaagcgtat

SEQ ID NO: 622693 - DNA, 75 bp, synthetic construct
  source 1..75: mol_type = other DNA
atgctatctcctttgttgcactcaccaatgttgaaatgaaacatgcatcactggaactacataaccatccgcaac

SEQ ID NO: 622694 - DNA, 75 bp, synthetic construct
  source 1..75: mol_type = other DNA
ctgctggagtgtcgtcggcttacagacagtgaaaatgtcaggaaatcagaggatatactgaaccgactggagttt

SEQ ID NO: 622695 - DNA, 75 bp, synthetic construct
  source 1..75: mol_type = other DNA
tccctgctggaaagggtgagtgcttttgatgtggtcagagaatgggctgaaaatggtggagcatattatcctctg

SEQ ID NO: 622696 - DNA, 75 bp, synthetic construct
  source 1..75: mol_type = other DNA
tttgtcatggcccaaaaaaataaaattatctaaaaggggggtcctggctttgccttatcagttcttaaaaactat

SEQ ID NO: 622697 - DNA, 75 bp, synthetic construct
  source 1..75: mol_type = other DNA
gcattgagcatgaacttcgacatgcgcaaagacgttcgcggcgtctttatggcaaagcgtgaaacgctgctttca

SEQ ID NO: 622698 - DNA, 75 bp, synthetic construct
  source 1..75: mol_type = other DNA
gtaagttcagcgacttacagggcgacgccattgaatggaacgtggcaattaacgacagtgatattttgatatctg

SEQ ID NO: 622699 - DNA, 75 bp, synthetic construct
  source 1..75: mol_type = other DNA
cgacaatatcaacaccggcatcttcattcctgcaggtaaaacgttacatatccttggaagcctgcgcggcaacgg

SEQ ID NO: 622700 - DNA, 75 bp, synthetic construct
  source 1..75: mol_type = other DNA
cacgacagtgatattttgatatccgaccatctcattgagcgcattaactgtaccaacggcaaaatcaactggggc

SEQ ID NO: 622701 - DNA, 75 bp, synthetic construct
  source 1..75: mol_type = other DNA
tccttggaagcctgcgcggcaacggcagagggcgatttgttttacaggacggcagccaggtgacaggggaggagg

SEQ ID NO: 622702 - DNA, 75 bp, synthetic construct
  source 1..75: mol_type = other DNA
accatgtcatcgagcgcatcaactgtactaacggcaaaatcaactggggcatcggcataggtcttgcgggaagca

SEQ ID NO: 622703 - DNA, 75 bp, synthetic construct
  source 1..75: mol_type = other DNA
actatcgggcaactctccggtaactccggatggttggataagctgtagtgagcgaatgccggacgacaggcagga

SEQ ID NO: 622704 - DNA, 75 bp, synthetic construct
  source 1..75: mol_type = other DNA
aaaattatgatttatttgaaattgatagtgattatgttaccagttttgattttgaaaggtttaaaaaatcatggt

SEQ ID NO: 622705 - DNA, 75 bp, synthetic construct
  source 1..75: mol_type = other DNA
gtgcaatggcttcaggcgtgcgacggaaacagggttcaggaatacgttaagctggaacgattgcagaacgcactg

SEQ ID NO: 622706 - DNA, 75 bp, synthetic construct
  source 1..75: mol_type = other DNA
ttaaatgatataagatggtggagtgataaacatttaaattatgcagatagagaagttgtagatcttttaaatatc

SEQ ID NO: 622707 - DNA, 75 bp, synthetic construct
  source 1..75: mol_type = other DNA
aagaaacaaacaatgatgttcgtcaatatttaaacaaaattaacgagttacggaataaagcacccaaaaacgaag

SEQ ID NO: 622708 - DNA, 75 bp, synthetic construct
  source 1..75: mol_type = other DNA
gcgacctggcgcggaaatttacgctacctggatacattaaaccgccttgatgaagtattgcctcgcaaactgtac

SEQ ID NO: 622709 - DNA, 75 bp, synthetic construct
  source 1..75: mol_type = other DNA
tttcgtggtaaaggtaccagaataattcattcagggcatcttaccactgggagatattgttatataggtgatttc

SEQ ID NO: 622710 - DNA, 75 bp, synthetic construct
  source 1..75: mol_type = other DNA
tgggggaagtgcgtgttccgcaccggggaaatgtggtggacagagtcattgaaggggcttacgaggtggtgggcg

SEQ ID NO: 622711 - DNA, 75 bp, synthetic construct
  source 1..75: mol_type = other DNA
aggcctgcggatgatcctgatgggcttgtgatatctgatgatgtgaagctggcgctcctgctacttgtcagccat

SEQ ID NO: 622712 - DNA, 75 bp, synthetic construct
  source 1..75: mol_type = other DNA
taagcaaggccttaagtggcgaaaagatgaaaaagaaagatcgcgatgctgatttgcgcgtaagcgttaacggag

SEQ ID NO: 622713 - DNA, 75 bp, synthetic construct
  source 1..75: mol_type = other DNA
accttcgaagggtattacgattgttcgagaaacaaatggtgggcagttactgacaatggggaagaaccggcatcg

SEQ ID NO: 622714 - DNA, 75 bp, synthetic construct
  source 1..75: mol_type = other DNA
gctgacattctgacaccacgacgccgggaggattacggtaaggacctgtggagtgcttatcagaccattcaggag

SEQ ID NO: 622715 - DNA, 75 bp, synthetic construct
  source 1..75: mol_type = other DNA
taccagcaatatcgctttattcgcagaaacaatgaaaatcccattgcttacagtagcgtcgattttgccggaaca

SEQ ID NO: 622716 - DNA, 75 bp, synthetic construct
  source 1..75: mol_type = other DNA
tacagaactcaggtaatgcagaactaccgttttctgtcagggtgtggggttccagtactcgacaaaacgtttttg

SEQ ID NO: 622717 - DNA, 75 bp, synthetic construct
  source 1..75: mol_type = other DNA
aacacaacgctacgtcaaaatctggcaacagcaggcacccggatcagcactctggaaaatcaggtaagcgaactg

SEQ ID NO: 622718 - DNA, 75 bp, synthetic construct
  source 1..75: mol_type = other DNA
caagaccaataaaacggattataacgctctctattgatgtagtactgttaatgtgcgcattttggtttgcatttt

SEQ ID NO: 622719 - DNA, 75 bp, synthetic construct
  source 1..75: mol_type = other DNA
tttggctgcatgctgatttgctgccgctactcgagcgtgcgctggccggaaagctcactgcaacgcacagcgcgg

SEQ ID NO: 622720 - DNA, 75 bp, synthetic construct
  source 1..75: mol_type = other DNA
tcctgcgacgatctcacaatgttacaaaacgcctgccaaagtctgccagtccatcgccaggcgatacgcggtgtt

SEQ ID NO: 622721 - DNA, 75 bp, synthetic construct
  source 1..75: mol_type = other DNA
aagccggtggcgggagagcctggtgccgaacatgtcgctgctgctggccatcctgatttcgaacagggatggagc

SEQ ID NO: 622722 - DNA, 75 bp, synthetic construct
  source 1..75: mol_type = other DNA
cacaacacatgtagatggtgattttttgattggtggcactattggttatttaagttcatacaataataatttgat

SEQ ID NO: 622723 - DNA, 75 bp, synthetic construct
  source 1..75: mol_type = other DNA
ttgacctcttcactggggttaccatgacctatactgacagtcatgcaggcagtgatgccttcagtggtgaaacga

SEQ ID NO: 622724 - DNA, 75 bp, synthetic construct
  source 1..75: mol_type = other DNA
atagtgttgctactggtgggctaatcgcagtatctgaattagcaagaaaagtctctcagaaatcatgcgggaagt

SEQ ID NO: 622725 - DNA, 75 bp, synthetic construct
  source 1..75: mol_type = other DNA
gaaacgatgttgagtggaacagagagcgcatcagcaaactaaaagacgcggctaggaaaattgctgaaattgaga

SEQ ID NO: 622726 - DNA, 75 bp, synthetic construct
  source 1..75: mol_type = other DNA
tctagcagtacataaactggtcatcaaagatgttgtccagtacactgataaaaagctggtagcgtacaggcagat

SEQ ID NO: 622727 - DNA, 75 bp, synthetic construct
  source 1..75: mol_type = other DNA
tttctgaattgaaccctaacccagagctaaccacaaaaatgtttggtgactgttataatacatcctggacgggga

SEQ ID NO: 622728 - DNA, 75 bp, synthetic construct
  source 1..75: mol_type = other DNA
accgtcctggaaaatctgcagcaggaaggcttccagccgttcttcgcctgccagacccgtgtgcgcgaccagagc

SEQ ID NO: 622729 - DNA, 75 bp, synthetic construct
  source 1..75: mol_type = other DNA
tcagcgcggagcaacgccagggtaaacagggcgaaaatgacacccgttttgccgtcgattttacctggcaacctg

SEQ ID NO: 622730 - DNA, 75 bp, synthetic construct
  source 1..75: mol_type = other DNA
taacattcagctcagcctcttcaggactcaccctgaccccgggagtgagtaataccaatgagtctggcatcgcgc

SEQ ID NO: 622731 - DNA, 75 bp, synthetic construct
  source 1..75: mol_type = other DNA
tccttttgataacgtagtaaaagatttaccggtcaccttcagtaccaacccggcagatactcaacttagtcagag

SEQ ID NO: 622732 - DNA, 75 bp, synthetic construct
  source 1..75: mol_type = other DNA
attagcgcgggaaccagaccaatgaccggtacagtatcagtgaatggtgcaaacctacctgcagcttcattccct

SEQ ID NO: 622733 - DNA, 75 bp, synthetic construct
  source 1..75: mol_type = other DNA
accgaagtgaatagccacgacgggatcgccacagctaggctgaccagtttgaaaaacggtgattatacggttacg

SEQ ID NO: 622734 - DNA, 75 bp, synthetic construct
  source 1..75: mol_type = other DNA
atgaacgctattcactggccagaaggctttgttccgggatttactgataactttgtgtctaatgaaatgatcatc

SEQ ID NO: 622735 - DNA, 75 bp, synthetic construct
  source 1..75: mol_type = other DNA
atgatcatctccggtctgaacgtcaatgatgtttggccactccttagtcagccattgctatggccggaatactat

SEQ ID NO: 622736 - DNA, 75 bp, synthetic construct
  source 1..75: mol_type = other DNA
gcctctgtgagctctggttcccaggctaatcaacaggtgaattttatcggttcaaagtactgctgccctgaccct

SEQ ID NO: 622737 - DNA, 75 bp, synthetic construct
  source 1..75: mol_type = other DNA
cgccacaatgaccgctacagttcgggatgcaaaagcaacctgctcaatgacgtcaaggtcaccttcaatgttaat

SEQ ID NO: 622738 - DNA, 75 bp, synthetic construct
  source 1..75: mol_type = other DNA
aagtggtcgctgacggcaatgacagcgccacaatgaccgctacagttcgggatgcaaaagcaacctgctcaatga

SEQ ID NO: 622739 - DNA, 75 bp, synthetic construct
  source 1..75: mol_type = other DNA
actctctacattacggtgaatgataattacggcaatggtgtacccctgcatcaggtaaccctcagcgtttcgccg

SEQ ID NO: 622740 - DNA, 75 bp, synthetic construct
  source 1..75: mol_type = other DNA
caatttgaagatgataaggttgagttccgtacaaaactagcaattctcgacgtaaaagaaagcaatcaagaactt

SEQ ID NO: 622741 - DNA, 75 bp, synthetic construct
  source 1..75: mol_type = other DNA
gtctggagataccggaaggtcaggtaatggtcgcacaagacgtagcagttaaagctcacgttaacgaccagtttg

SEQ ID NO: 622742 - DNA, 75 bp, synthetic construct
  source 1..75: mol_type = other DNA
caagcgaacaatacgtagtttccctggcaacaggtgatcaaagcgtatttgaaaagcttgggtttgcttatgcga

SEQ ID NO: 622743 - DNA, 75 bp, synthetic construct
  source 1..75: mol_type = other DNA
cgtacaaggatgtgggaaaattcttttaaagaatggcggtaatgactcgaacttattgatagtgttttatgttca

SEQ ID NO: 622744 - DNA, 75 bp, synthetic construct
  source 1..75: mol_type = other DNA
gggggcatcgactgcaaccggagtcgggctgagaatatacaaaaacactgacagtacgcccctgaagtttggacc

SEQ ID NO: 622745 - DNA, 75 bp, synthetic construct
  source 1..75: mol_type = other DNA
aatgagtttaaattaagtagtggtgagattagctttctaaaaataatcaccaatatgacgatgcacatcgagaat

SEQ ID NO: 622746 - DNA, 75 bp, synthetic construct
  source 1..75: mol_type = other DNA
aatgctgtaataatcacggcgaccccaagatcaggtggcgctatttaccaaacgcaagtacgggtgaagggctgg

SEQ ID NO: 622747 - DNA, 75 bp, synthetic construct
  source 1..75: mol_type = other DNA
gagggcgaacttcacgctgagcgatggcggtaaagcgattactgatactgaaggcaaagcgaaagtcacgctgaa

SEQ ID NO: 622748 - DNA, 75 bp, synthetic construct
  source 1..75: mol_type = other DNA
acgtcaaggtcaccttcaatgttaattcagcagcagcgaaactgagccaaaccgaagtgaatagccacgacggga

SEQ ID NO: 622749 - DNA, 75 bp, synthetic construct
  source 1..75: mol_type = other DNA
acagtgactgatggaaacggcaacccgttagccaatgaggcggtgacattcacgctaccggcagatgtgagcgca

SEQ ID NO: 622750 - DNA, 75 bp, synthetic construct
  source 1..75: mol_type = other DNA
cacattaacgtcattaacagcggtgaccgatcaaaacggaatcgcgacaacaagcgtgaaaggagcgatgacagg

SEQ ID NO: 622751 - DNA, 75 bp, synthetic construct
  source 1..75: mol_type = other DNA
atgcggtggtggtctatgcggcaatgttgccttcgcttgagtatctttgccacctccacgttgagctggagaacg

SEQ ID NO: 622752 - DNA, 75 bp, synthetic construct
  source 1..75: mol_type = other DNA
tttcaccggaagaagcgcaggaactcctggataatctggtgcgcagccatatcagcaaggcgctgtcgggtgagc

SEQ ID NO: 622753 - DNA, 75 bp, synthetic construct
  source 1..75: mol_type = other DNA
gtaaccgcgccagctattactgaagtgcatattgcgactactaatattacctgggaaacattcattccccacatc

SEQ ID NO: 622754 - DNA, 75 bp, synthetic construct
  source 1..75: mol_type = other DNA
agtgctattaggtgatgctgacagcaaatatattccagccagtttatgtcgtaccaacgcttctggtacgcccgt

SEQ ID NO: 622755 - DNA, 75 bp, synthetic construct
  source 1..75: mol_type = other DNA
taacctttggcttttgggtttatatgttagatgccccatatagggatacgcaaaggccgtgctacatctggactc

SEQ ID NO: 622756 - DNA, 75 bp, synthetic construct
  source 1..75: mol_type = other DNA
atgacattatctttttttataacggtaattccagaccatgacaagccgcagccgccaggctgcctactcgggtgc

SEQ ID NO: 622757 - DNA, 75 bp, synthetic construct
  source 1..75: mol_type = other DNA
cctggataatctggtgcgcagccatatcagcaaggcgctgtcgggtgagcgaatggcagcccgtgacagatatgc

SEQ ID NO: 622758 - DNA, 75 bp, synthetic construct
  source 1..75: mol_type = other DNA
tgacaactttgcaccaggaaaaacggcggcagattatacgttttcaagcactgcctcctgggttgatgttgatac

SEQ ID NO: 622759 - DNA, 75 bp, synthetic construct
  source 1..75: mol_type = other DNA
cgaacaatacgtaatttctctggcaacaggtgagcaaagtgtatatgaaaagcttgggtttgctcatgcgacatg

SEQ ID NO: 622760 - DNA, 75 bp, synthetic construct
  source 1..75: mol_type = other DNA
gaacgcgcgtaatactaatgagaacggtattactgaagttacccttaagggcacggttttgggtgttcatacagc

SEQ ID NO: 622761 - DNA, 75 bp, synthetic construct
  source 1..75: mol_type = other DNA
ttatgcctgtttctatcacgcttccggcttgggaacatgccgttgaagtatttgatttctcccagtgggaacgtc

SEQ ID NO: 622762 - DNA, 75 bp, synthetic construct
  source 1..75: mol_type = other DNA
tctactttgaaggcaacgtgcttactgaaggtactgagttcgaaacgctggaacagcatggtcgcgagctcatca

SEQ ID NO: 622763 - DNA, 75 bp, synthetic construct
  source 1..75: mol_type = other DNA
gcaaactttaccctcgaaaataacggtattgccatcacccaggccaatggggaagcgcatgtcacgctcaaaggt

SEQ ID NO: 622764 - DNA, 75 bp, synthetic construct
  source 1..75: mol_type = other DNA
aaaccttctttatgggcgtttacggcagttacggtggcaatcagtacctgtcagttaataacggcggtgaagtta

SEQ ID NO: 622765 - DNA, 75 bp, synthetic construct
  source 1..75: mol_type = other DNA
tatattacctctggagtagggaagctgtggctaacgatgccactccttatcttatggtgctgctacttaataacg

SEQ ID NO: 622766 - DNA, 75 bp, synthetic construct
  source 1..75: mol_type = other DNA
ccaccggtcttattaactgtattgcgttttcagcacaggcagtggatacaacgattactgtgacgggtaatgttt

SEQ ID NO: 622767 - DNA, 75 bp, synthetic construct
  source 1..75: mol_type = other DNA
aagcgtatatttggcttaaaaaccgtaaaagaatttgttaaagcaattctttatattattttattttattttttt

SEQ ID NO: 622768 - DNA, 75 bp, synthetic construct
  source 1..75: mol_type = other DNA
ctgaacgggaaaagctggagcgatgggctgatgacaaactgctggccagtgaagaggcgttaagagacaccaaag

SEQ ID NO: 622769 - DNA, 75 bp, synthetic construct
  source 1..75: mol_type = other DNA
cgaaaccccttacagcaaggtgtgttgctggcagatgaagtcggtcttggtaaaaccattgaggccgctctcgtc

SEQ ID NO: 622770 - DNA, 75 bp, synthetic construct
  source 1..75: mol_type = other DNA
ctatgccttaccaaaacgacaccggcatctgacggggcttatactcagaaaactactttcctcaagtacgaaagc

SEQ ID NO: 622771 - DNA, 75 bp, synthetic construct
  source 1..75: mol_type = other DNA
ctcaggctgaacaggagaggcaatatctgaaaagtttgccttcacaagcacggatagcagaattaatcgcgcaaa

SEQ ID NO: 622772 - DNA, 75 bp, synthetic construct
  source 1..75: mol_type = other DNA
gactggccttgtctggcagttggcaccgaggaaagcttggcctctattgttactgtttatcagcaaaatggattt

SEQ ID NO: 622773 - DNA, 75 bp, synthetic construct
  source 1..75: mol_type = other DNA
tttaatgtctccaatggcggcaaaattcatgttaagggcaccagtcgtctgacttatacgcaggggaatgtaagc

SEQ ID NO: 622774 - DNA, 75 bp, synthetic construct
  source 1..75: mol_type = other DNA
caacctgttcaagatgaacagctctcttcagaagataaattcattgagggtgaagacacaaaaatcgagaataaa

SEQ ID NO: 622775 - DNA, 75 bp, synthetic construct
  source 1..75: mol_type = other DNA
cttaatttttgattttatcgctgaatattttttatttatgaaagatatgaaaatggataaacaagaagttaaaag

SEQ ID NO: 622776 - DNA, 75 bp, synthetic construct
  source 1..75: mol_type = other DNA
ttttggagtaatcataaatcactgctttttaaaactcttgatggagatatcatatctttattatcagattgggga

SEQ ID NO: 622777 - DNA, 75 bp, synthetic construct
  source 1..75: mol_type = other DNA
aagcaacccaatcaatgatcataccgtcacgtttgcggtattaagcggatcggcaacttcctttaacaatcaaaa

SEQ ID NO: 622778 - DNA, 75 bp, synthetic construct
  source 1..75: mol_type = other DNA
ttaatccgctgattgggcgtaccggtgttgatgtgggtaaatccttctccggtaaggactggaaagtcacagccc

SEQ ID NO: 622779 - DNA, 75 bp, synthetic construct
  source 1..75: mol_type = other DNA
gatatttcattttccaaaactacctgtacctgatttttctgctgtttccaacaaaggtgcaacaacatcaattgg

SEQ ID NO: 622780 - DNA, 75 bp, synthetic construct
  source 1..75: mol_type = other DNA
ggtgcctatatcgacctgattagtaagtatgttcaccatgataatgagtactcggcgacctttgctggactcgga

SEQ ID NO: 622781 - DNA, 75 bp, synthetic construct
  source 1..75: mol_type = other DNA
taatcctgttatcgggctggtgctctcgacgcgtcacgaaggtgttcaggacatcaccctttctgactggaaaga

SEQ ID NO: 622782 - DNA, 75 bp, synthetic construct
  source 1..75: mol_type = other DNA
aagccagaaatgttaaatggctctttcgttcacattgatgactggagtggatggctgatattaaccaacaaccag

SEQ ID NO: 622783 - DNA, 75 bp, synthetic construct
  source 1..75: mol_type = other DNA
gcagtttaataaagtcctcgcgtacgaagtgcgtatgttgatgaccgacaaactgcaactggaggacggcacgca

SEQ ID NO: 622784 - DNA, 75 bp, synthetic construct
  source 1..75: mol_type = other DNA
gggacaccatgcgttcctgcacaaacaaagatttggatgagataaaaagaggaccaaaaccagacgttgccgtcc

SEQ ID NO: 622785 - DNA, 75 bp, synthetic construct
  source 1..75: mol_type = other DNA
cactaaggttgcgtccgtgactttaagtaaacagaaggccttcgatttctatcagtccttgaaaagcatgttcga

SEQ ID NO: 622786 - DNA, 75 bp, synthetic construct
  source 1..75: mol_type = other DNA
ttatgcatcttaatgatgtaatcgaagcgaaaaatttcatcgagaccaatgctgacggtgtcgtaacaatcggca

SEQ ID NO: 622787 - DNA, 75 bp, synthetic construct
  source 1..75: mol_type = other DNA
ctgtctggtgagaacaatattttactcgttgatttccttcagaaaacaacgcctgaaaaacaactgaatattgaa

SEQ ID NO: 622788 - DNA, 75 bp, synthetic construct
  source 1..75: mol_type = other DNA
cttatctactgactgacgactccgccagactcgttgccaaaaataaagcatctgtggtgggagatatacactcca

SEQ ID NO: 622789 - DNA, 75 bp, synthetic construct
  source 1..75: mol_type = other DNA
ctatgaacaacacctggtggcaactaaccggagattctgcgctgaaaacactgaaaagtacaaacagcatggtct

SEQ ID NO: 622790 - DNA, 75 bp, synthetic construct
  source 1..75: mol_type = other DNA
gcagatgttgattctgcgacgatcaccagtctggaaatgcctgaaggtcaggtaataatcagagaacccatagcg

SEQ ID NO: 622791 - DNA, 75 bp, synthetic construct
  source 1..75: mol_type = other DNA
accaggaaaaacggcggctgattatgcgttttcaagctctgcctcctgggtaggcgttgatgctactggtaaagt

SEQ ID NO: 622792 - DNA, 75 bp, synthetic construct
  source 1..75: mol_type = other DNA
atttgtgcaatcaggtaccaatgtgccctatgtgcaaatcagcacaattgattacactcaaaatttatacggtga

SEQ ID NO: 622793 - DNA, 75 bp, synthetic construct
  source 1..75: mol_type = other DNA
gtcattagtcaggatacggtttctacgaataggcagggtatagctgaggtcaccatgacgcctggaagatacggt

SEQ ID NO: 622794 - DNA, 75 bp, synthetic construct
  source 1..75: mol_type = other DNA
tcgctgacggcaatgacagcgccacaatgaccgcgacagtccgggatgcaaaaggcaacctgctcaatgacgtca

SEQ ID NO: 622795 - DNA, 75 bp, synthetic construct
  source 1..75: mol_type = other DNA
gagcaggcagagcaggcagagcaggcagagcaggcagagcaggcagagcaggcagagcaggcagagcaggcaaaa

SEQ ID NO: 622796 - DNA, 75 bp, synthetic construct
  source 1..75: mol_type = other DNA
tgagacccgaggtgcgactgaaggcgcagatatttcgttatcaaaacagcaggcacttgaacgttacggggttaa

SEQ ID NO: 622797 - DNA, 75 bp, synthetic construct
  source 1..75: mol_type = other DNA
atttaaccccgccgccgggtaatagcagtgacaaccttgagcaacagatagccagtacttcacagcaaatcgggt

SEQ ID NO: 622798 - DNA, 75 bp, synthetic construct
  source 1..75: mol_type = other DNA
tcttgtgaccagcaccattgcaggaacgaaagtagttacagctaatctggcaaatgcacctaccgaagtcgccat

SEQ ID NO: 622799 - DNA, 75 bp, synthetic construct
  source 1..75: mol_type = other DNA
ccgagggcgcgaccctgacggcaagcgtcactgacgcttacggcaacccgctagaaggtatcaaggtcaatttcc

SEQ ID NO: 622800 - DNA, 75 bp, synthetic construct
  source 1..75: mol_type = other DNA
accggtcaccttcagtaccaacccggcagatactcaacttagtcagagcaaaagcaatactaacgacagtggtgt

SEQ ID NO: 622801 - DNA, 75 bp, synthetic construct
  source 1..75: mol_type = other DNA
aatggcaatccactaatagataaagaaatcaccttctctgtgccaaacgacgtcgcaagtcagttctcgattagc

SEQ ID NO: 622802 - DNA, 75 bp, synthetic construct
  source 1..75: mol_type = other DNA
aacagtgactgatggaaacggcaacccgttagccaatgaggcggtgacattcacgctaccggcagatgtgagcgc

SEQ ID NO: 622803 - DNA, 75 bp, synthetic construct
  source 1..75: mol_type = other DNA
cgatgttatcaacggtgatgacacgcaaaaaactgggagtggagccgctactacgcctggcgggccttaccgtcg

SEQ ID NO: 622804 - DNA, 75 bp, synthetic construct
  source 1..75: mol_type = other DNA
gatgacgatgaatttggcggcgatgacacacaaaaaaatgggagtggagtcgctattatgcctggcgggcgttac

SEQ ID NO: 622805 - DNA, 75 bp, synthetic construct
  source 1..75: mol_type = other DNA
ctgacaggcttgcagataattttgataaaaccatttcatcattacaaaatcagtcagataacatctacaacaaaa

SEQ ID NO: 622806 - DNA, 75 bp, synthetic construct
  source 1..75: mol_type = other DNA
tgaccctgatacttattctgtatttaaagcccatgaagaagaagacaaagagcagtgcagagcgctgaataagaa

SEQ ID NO: 622807 - DNA, 75 bp, synthetic construct
  source 1..75: mol_type = other DNA
tttttttgttagttatagatgtcttttttacaattatattgtgttgtgcatcatattatttccatgaaaattata

SEQ ID NO: 622808 - DNA, 75 bp, synthetic construct
  source 1..75: mol_type = other DNA
attattctactcaactctcacgatggaaccagttcgtatcagatgttgccgggactatttcgtgcggtttgtcag

SEQ ID NO: 622809 - DNA, 75 bp, synthetic construct
  source 1..75: mol_type = other DNA
aaggggtacggcaagcgagtttgccacgatgctggcagaagacatcgcatgcaggaatggtaagcagttcggatt

SEQ ID NO: 622810 - DNA, 75 bp, synthetic construct
  source 1..75: mol_type = other DNA
agggtgtcactactctggtgataatgtcactacattggtgacaaaaagtgtcaccaaaacggtgacagcgctgtc

SEQ ID NO: 622811 - DNA, 75 bp, synthetic construct
  source 1..75: mol_type = other DNA
acgaaattattaatcagagcatcgccaatggctggcaaggcttgtttgagccaaagggttccaagcctcaaccac

SEQ ID NO: 622812 - DNA, 75 bp, synthetic construct
  source 1..75: mol_type = other DNA
aaatcatctaaagcaacgttaaagaaagctgctggcgcaatggataataaatttattggtgggcaacgtgctatt

SEQ ID NO: 622813 - DNA, 75 bp, synthetic construct
  source 1..75: mol_type = other DNA
gcatccatcgccacggcaatctattcacccattgctggctatctgtatgacaccattggctttgctgaaacctat

SEQ ID NO: 622814 - DNA, 75 bp, synthetic construct
  source 1..75: mol_type = other DNA
gtcgttatcattttgaatatggtcgcgtaagaatgtggggctctctgggatgggccgccgccgcgtggattgtgg

SEQ ID NO: 622815 - DNA, 75 bp, synthetic construct
  source 1..75: mol_type = other DNA
ctgcgactcgaacaaaccaatgagttagttcaagaaattctaaatacacagatgtgtgtatttaaaaatggcgat

SEQ ID NO: 622816 - DNA, 75 bp, synthetic construct
  source 1..75: mol_type = other DNA
ggcgtaatgttaaaggcgaacgaacgcatactcgtgccgtgcgtggcattgacggggacgtgaagcttaaccgtg

SEQ ID NO: 622817 - DNA, 75 bp, synthetic construct
  source 1..75: mol_type = other DNA
atgataaatgtgcaaactgtggcagtgattgggagcggcaccatgggggcaggcattgctgaagttgccgccagt

SEQ ID NO: 622818 - DNA, 75 bp, synthetic construct
  source 1..75: mol_type = other DNA
tttatggcaaggttaccgctctacgttattttactgatgataagcgtgacgaaaacttatgcccgtctcggcttt

SEQ ID NO: 622819 - DNA, 75 bp, synthetic construct
  source 1..75: mol_type = other DNA
tacatagaagataatgacaatgaattatctcgtagattgagttctaaacttgatagaataacaagaatatacttt

SEQ ID NO: 622820 - DNA, 75 bp, synthetic construct
  source 1..75: mol_type = other DNA
tcatcccaaatttgttaatgcagtggataagtcgacttgaagatagagctattgtcggcatagcatatcgctcaa

SEQ ID NO: 622821 - DNA, 75 bp, synthetic construct
  source 1..75: mol_type = other DNA
tcccctttgttaaatataacccaagcatcagaattcttttcctctgatgaatataaagattctggggtcgaagag

SEQ ID NO: 622822 - DNA, 75 bp, synthetic construct
  source 1..75: mol_type = other DNA
atacttcaagaaatttaataaaataaaaccaagaaaaatatggggttgtgattcaccgatcgaacttttttactt

SEQ ID NO: 622823 - DNA, 75 bp, synthetic construct
  source 1..75: mol_type = other DNA
ccgcagcgtaacggcattatcgacctgaaagaacttgaagcagcgatgcgtgacgacaccatccttgtttccatc

SEQ ID NO: 622824 - DNA, 75 bp, synthetic construct
  source 1..75: mol_type = other DNA
tagttcaagaaattctaaatacacagatgtgtgtatttaaaaatggcgataactttaattcttcagaatcgcaga

SEQ ID NO: 622825 - DNA, 75 bp, synthetic construct
  source 1..75: mol_type = other DNA
tgttagcgccaatcttgatgttgctggtggcaggcttgtttcggttctatttggtgactaccgagatgatttctt

SEQ ID NO: 622826 - DNA, 75 bp, synthetic construct
  source 1..75: mol_type = other DNA
ctagaaaaggtaaagtcgaacaaacgcgccattttaataaggatgtgatccagcctgtaaatgaaacttcaaaca

SEQ ID NO: 622827 - DNA, 75 bp, synthetic construct
  source 1..75: mol_type = other DNA
gtcacgcttgatgtgcacagacagcaatgggtgtgttcagcaaacagtcctcgccgtgaacctgctgataaaaac

SEQ ID NO: 622828 - DNA, 75 bp, synthetic construct
  source 1..75: mol_type = other DNA
gacgatgggtttacgcgcatcgccaatgagctccttgaagctgtcatgcgtgcgggtctgtcgcagtatcagctt

SEQ ID NO: 622829 - DNA, 75 bp, synthetic construct
  source 1..75: mol_type = other DNA
atttagcgattaaagcaagagattatgcattgttaaataatgattggagaaagaaattacaaaaaatacaagagt

SEQ ID NO: 622830 - DNA, 75 bp, synthetic construct
  source 1..75: mol_type = other DNA
acagtagtgcctcaaaggaagatgaaaactatcgtatcttctcgttgctggaaaacgccgaagaagaaaaagaac

SEQ ID NO: 622831 - DNA, 75 bp, synthetic construct
  source 1..75: mol_type = other DNA
accggatcagtatctctgtcgtatcgaaggtacgcataaccgtcgtggcggaaggggtcgaaaccaaagagcaat

SEQ ID NO: 622832 - DNA, 75 bp, synthetic construct
  source 1..75: mol_type = other DNA
cgcgccattcgctggtacgccgaagcaattgataaagtgtatggcgaagtggccaccaccagtagccatgaactg

SEQ ID NO: 622833 - DNA, 75 bp, synthetic construct
  source 1..75: mol_type = other DNA
gtgtgcatcgccggaacgcgcctgttgctggaagagagcatcgccgatgaattcttagccctgttaaaacagcag

SEQ ID NO: 622834 - DNA, 75 bp, synthetic construct
  source 1..75: mol_type = other DNA
tatgggcaaggtctaatgacaaaaacgagaaattcaaatataattttcgtaggtaaatgtggcgatgttagaaaa

SEQ ID NO: 622835 - DNA, 75 bp, synthetic construct
  source 1..75: mol_type = other DNA
gctctctggcatcaggacttgcgaaaggaaaatcactggaatcagcactgtgttatgccagcgcctttgcatccc

SEQ ID NO: 622836 - DNA, 75 bp, synthetic construct
  source 1..75: mol_type = other DNA
gtgccctgtcgctgcagatgccgggattccgccgtcagatgaacgaaggctggtaccagacacgtattccgacag

SEQ ID NO: 622837 - DNA, 75 bp, synthetic construct
  source 1..75: mol_type = other DNA
cagcctggcggagaagttacagcaggaagggagcgaagacggtcacggtgtggtgttcccggctgaactggtggg

SEQ ID NO: 622838 - DNA, 75 bp, synthetic construct
  source 1..75: mol_type = other DNA
gctgcgcgactcgttggctcgtctcgataccagcggatgcaccggtgagttaccgatcagcgctggtaatagtgt

SEQ ID NO: 622839 - DNA, 75 bp, synthetic construct
  source 1..75: mol_type = other DNA
gttgcgcgactcgctggcccggctagataccagcggctgcaccggtgagttgccgatcagcgcaggtaatagcgt

SEQ ID NO: 622840 - DNA, 75 bp, synthetic construct
  source 1..75: mol_type = other DNA
cgcgggttatgacgagtgcaccgcgaagctgatcctgatgtatgcagccgcgctgatggctacgtcttccggcgc

SEQ ID NO: 622841 - DNA, 75 bp, synthetic construct
  source 1..75: mol_type = other DNA
gactcggtacacacctttattcgtgaaggcgaaagcaaagggcaactgctgctggatggtcgtaacgctgaactg

SEQ ID NO: 622842 - DNA, 75 bp, synthetic construct
  source 1..75: mol_type = other DNA
atatttgaaaaatatgacgagaagataaacagtgatgaagaagtagaatggtatgattttgaaaatgaattaaaa

SEQ ID NO: 622843 - DNA, 75 bp, synthetic construct
  source 1..75: mol_type = other DNA
ctgtatgaccggcgatccgcaacagcgtcatgatgctgtgtaccggtttgaagcctgtatctggaaaatgaacgg

SEQ ID NO: 622844 - DNA, 75 bp, synthetic construct
  source 1..75: mol_type = other DNA
gttatcgaatcaaccgtcgcggaactcaggtagtggattttgaccctacttgcgttcgtactttttacaatgttg

SEQ ID NO: 622845 - DNA, 75 bp, synthetic construct
  source 1..75: mol_type = other DNA
atgtgtgttattgtaggtggttctatatacttgcgcattaaatataaggtaagtaagagtaaaggattaattgat

SEQ ID NO: 622846 - DNA, 75 bp, synthetic construct
  source 1..75: mol_type = other DNA
tcatacagggcatggaagataccttatgataatctcacttgtttcattcttatttttaatgactctattggcaat

SEQ ID NO: 622847 - DNA, 75 bp, synthetic construct
  source 1..75: mol_type = other DNA
acccgtcacagcctgagctgaactggaaactggtggagtcgctggcgctggcgatttttaaagccaacggtgtgg

SEQ ID NO: 622848 - DNA, 75 bp, synthetic construct
  source 1..75: mol_type = other DNA
tgccaacgacagccagtacggcctcggtgcggcggtatggacgcgcgatctctcccgcgcgcaccgcatgagccg

SEQ ID NO: 622849 - DNA, 75 bp, synthetic construct
  source 1..75: mol_type = other DNA
gctgcggccatcggcccgaccatctttgtggatgtggacccgaatgcgtccttaagccgcgaagagattttcggt

SEQ ID NO: 622850 - DNA, 75 bp, synthetic construct
  source 1..75: mol_type = other DNA
gctgccgccatcggcccgacgatctttgtagacgtagacccgaatgcgtccttaagccgcgaagagattttcggc

SEQ ID NO: 622851 - DNA, 75 bp, synthetic construct
  source 1..75: mol_type = other DNA
tggtgctcgatgtgaaatcgtgagtgtgcatcatccggtggttgctaaaaatattggcactattgtaaaaatcgt

SEQ ID NO: 622852 - DNA, 75 bp, synthetic construct
  source 1..75: mol_type = other DNA
atctgagcctttgcctgattggttaaaatccctttcgcccccccctgatagaacgcctctaacgctccctgacgg

SEQ ID NO: 622853 - DNA, 75 bp, synthetic construct
  source 1..75: mol_type = other DNA
ccgaaccagcccatagcctgatgtatacacccggctcgctggcagcaggaaaaacattcgccgacaccaaccagt

SEQ ID NO: 622854 - DNA, 75 bp, synthetic construct
  source 1..75: mol_type = other DNA
ttgccgttttgcctcacatgttagtcccctgcttattcacggaatctgtgggtaactttgcatgtgtccgcagcg

SEQ ID NO: 622855 - DNA, 75 bp, synthetic construct
  source 1..75: mol_type = other DNA
tattctttcgcgctgtctggtacattgccacccgcatccagaaaagaaaaaaacgaacacttagggattacactg

SEQ ID NO: 622856 - DNA, 75 bp, synthetic construct
  source 1..75: mol_type = other DNA
ggcgcctcttgatctgatagtggataagaataatgtttccttaagtgttctgcaattatctcaaggtgaaaaaac

SEQ ID NO: 622857 - DNA, 75 bp, synthetic construct
  source 1..75: mol_type = other DNA
gtcgatatggtatatccgaaggcgcgattgctaacattcagaaagtacttgatgtaggctttgactctgtacatt

SEQ ID NO: 622858 - DNA, 75 bp, synthetic construct
  source 1..75: mol_type = other DNA
tccggatggttgggttatggtgccgaaggagccaactcaggccatgattaaagcgtggctatcagagattgctaa

SEQ ID NO: 622859 - DNA, 75 bp, synthetic construct
  source 1..75: mol_type = other DNA
taatcgaagagctgaaagcctcgacgcagaacgccagtggcatgtttgaaatcagcgaggatgccatctgcgcgt

SEQ ID NO: 622860 - DNA, 75 bp, synthetic construct
  source 1..75: mol_type = other DNA
caggcaggtacggtgtgggtaaacagccataccttaattgacgctaacttaccgtttggtgggatgaagcagtca

SEQ ID NO: 622861 - DNA, 75 bp, synthetic construct
  source 1..75: mol_type = other DNA
tggaaactgaatattatagccgatgagttcaatgtatcagaaataaccatcagaaaaaggctcgaaattgagaat

SEQ ID NO: 622862 - DNA, 75 bp, synthetic construct
  source 1..75: mol_type = other DNA
ctcgataatcttcgagatagctgggaaataaaagaacaaagagtcaggcttatgcaggagattatcgacactcag

SEQ ID NO: 622863 - DNA, 75 bp, synthetic construct
  source 1..75: mol_type = other DNA
ttacccactctgcactgaccgggcgcgatattaatgtcgagactattatgcgcgttgccttcggcgatagtcagc

SEQ ID NO: 622864 - DNA, 75 bp, synthetic construct
  source 1..75: mol_type = other DNA
tctcctcgaaagtgaacccggcaggggatttggtgcagttgccgaatatgtccgtgctggaactcgatccaggct

SEQ ID NO: 622865 - DNA, 75 bp, synthetic construct
  source 1..75: mol_type = other DNA
gccgggcgattacccgcagagcgtgaacgtatcctgctacgttttgccgatctggttgagcagcacagtgaggag

SEQ ID NO: 622866 - DNA, 75 bp, synthetic construct
  source 1..75: mol_type = other DNA
tacatcagaggaagatgctcgccgattcatgatcgcaagcaatgagctggattgggtttcacaaattgagtacgg

SEQ ID NO: 622867 - DNA, 75 bp, synthetic construct
  source 1..75: mol_type = other DNA
acagcaactcgtcggcagcctaccctacatgcgtctgtggtcagtctctgggggaagtgcgtgttccgcaccggg

SEQ ID NO: 622868 - DNA, 75 bp, synthetic construct
  source 1..75: mol_type = other DNA
cgagtcagcttgggaagaaatgacctgcttattcgcaccttccctaaagaaagaatcatggatcttaaaaataac

SEQ ID NO: 622869 - DNA, 75 bp, synthetic construct
  source 1..75: mol_type = other DNA
agggctgttccgttctgtttgttgtaacggactggtctgcggcgagtcgtttggtgaagtacgggtaccgcataa

SEQ ID NO: 622870 - DNA, 75 bp, synthetic construct
  source 1..75: mol_type = other DNA
gtacgaaatgaagccagtgacgggtgaccattaccgcggtggatgccgatacggcaaaggacgaggaggcgatga

SEQ ID NO: 622871 - DNA, 75 bp, synthetic construct
  source 1..75: mol_type = other DNA
gagcatgctgaaaagctcaaaaactctgctgtatatagaaaagacataatttttacacatgcaggtaatattggc

SEQ ID NO: 622872 - DNA, 75 bp, synthetic construct
  source 1..75: mol_type = other DNA
ctcaggtgggggttccttctatagctcgtccatcaacccatttaaaaaaaataactttcataaacccaccattat

SEQ ID NO: 622873 - DNA, 75 bp, synthetic construct
  source 1..75: mol_type = other DNA
aggtatccggcccctatcgtgagaagctaaaaattgccttgcggctttttcttggcagcctgtatctcgctacga

SEQ ID NO: 622874 - DNA, 75 bp, synthetic construct
  source 1..75: mol_type = other DNA
atgacccgtctggcttcgcgctttggcgcagcaaaccttatccgtcgcgaccgtccgttaacccgtgaagagctg

SEQ ID NO: 622875 - DNA, 75 bp, synthetic construct
  source 1..75: mol_type = other DNA
ggtcgtcgtgaacatacaaagcatatgctgcgtctgcggcgtgaggggcagattaccggtatacaggtgccggaa

SEQ ID NO: 622876 - DNA, 75 bp, synthetic construct
  source 1..75: mol_type = other DNA
ttcgccgccgttgccctggattcagatgcagtccgggcgttacatgcaggtcagtaattacccggcaccaggaga

SEQ ID NO: 622877 - DNA, 75 bp, synthetic construct
  source 1..75: mol_type = other DNA
gaacatgtggtccggtttgataccggaacggaacttcgctacgaccgcaagaaaaatgctctgaccatcacgttg

SEQ ID NO: 622878 - DNA, 75 bp, synthetic construct
  source 1..75: mol_type = other DNA
ggtagaaatcacagataccctgaccgtacagggtaaagcaaccatgaatgctgaggcggtggttaaggcggatct

SEQ ID NO: 622879 - DNA, 75 bp, synthetic construct
  source 1..75: mol_type = other DNA
ccgatcccgggcgtgatcttctgagcatggcgttaattaatgccgcactcgaaaggcgcatccccattttcgcca

SEQ ID NO: 622880 - DNA, 75 bp, synthetic construct
  source 1..75: mol_type = other DNA
ctacctataagtagtatattaactgagtctcaaaaggcattttgtggatcagatttaaagttttctctttctgat

SEQ ID NO: 622881 - DNA, 75 bp, synthetic construct
  source 1..75: mol_type = other DNA
tctatacaccgccagtttatggacagcaggctctataaggactctcaggcagtacatctttggcttcacttaatc

SEQ ID NO: 622882 - DNA, 75 bp, synthetic construct
  source 1..75: mol_type = other DNA
ggcagcctgagttcacagataaaacactctccaggaaaaccggggcggttcagtgggttgtcgctggaactgtct

SEQ ID NO: 622883 - DNA, 75 bp, synthetic construct
  source 1..75: mol_type = other DNA
agaaatcatcatccagtgggagagcggagagtatgaaccaactatcagtatgcttatcccgctggcaaatgttct

SEQ ID NO: 622884 - DNA, 75 bp, synthetic construct
  source 1..75: mol_type = other DNA
caccggcaaacaggtccccgaaatcatcctgcttaacagccacgacggctccagctcataccagatgctgccggg

SEQ ID NO: 622885 - DNA, 75 bp, synthetic construct
  source 1..75: mol_type = other DNA
aatttaattctgctaatacgcttatgatggtttcttttcagatgataaatacacttgtggcaattaaaagtagtt

SEQ ID NO: 622886 - DNA, 75 bp, synthetic construct
  source 1..75: mol_type = other DNA
tcgacgattgcaggaaaggctgggccacatccctccggcagaagcagaaaaagcttattatgcttccatcggaaa

SEQ ID NO: 622887 - DNA, 75 bp, synthetic construct
  source 1..75: mol_type = other DNA
gtgatgccgcacgttcctgcgaatgcctgccagacagcggtctggcccgtctctctgcaaaaccagcccggctgt

SEQ ID NO: 622888 - DNA, 75 bp, synthetic construct
  source 1..75: mol_type = other DNA
tgataatgacaaaatgtcatacatcacaaagatgtcttacatttgtttaatgccactaatttacgcttgtagttt

SEQ ID NO: 622889 - DNA, 75 bp, synthetic construct
  source 1..75: mol_type = other DNA
atgacgttttcactcagctatgaacaactgacccggtttgaggaaaaacgcatccgggaatgcaatctggacagc

SEQ ID NO: 622890 - DNA, 75 bp, synthetic construct
  source 1..75: mol_type = other DNA
ggattatcaacaagttgtttactggctaaatttatcagcagatcagaaatatagtaaggcagagtgtacgttggg

SEQ ID NO: 622891 - DNA, 75 bp, synthetic construct
  source 1..75: mol_type = other DNA
gtacatttgttgatccccgcgtagagggcgggaaaattaatgataaaacacaagaggatattgtgtccgtcacag

SEQ ID NO: 622892 - DNA, 75 bp, synthetic construct
  source 1..75: mol_type = other DNA
aagaaattattctgcaatgggagagtggagagtacgagccaaccatcagcatgcttacccccctggcaaacgtcc

SEQ ID NO: 622893 - DNA, 75 bp, synthetic construct
  source 1..75: mol_type = other DNA
ggggcttacgaagtgctcgggatttttgaccgggtagaagagaagcgcgatgccatgcagtcgcttttgttacca

SEQ ID NO: 622894 - DNA, 75 bp, synthetic construct
  source 1..75: mol_type = other DNA
cgaggcgtttatatctcgtgccagagctttatttgaggaagcaaacagggagttggcttattacaacataaggca

SEQ ID NO: 622895 - DNA, 75 bp, synthetic construct
  source 1..75: mol_type = other DNA
tctataaaaaggttgctgctgattgcgaggcgtttatatctcgtgccagagctttatttgaggaagcaaacaggg

SEQ ID NO: 622896 - DNA, 75 bp, synthetic construct
  source 1..75: mol_type = other DNA
gtcacagggagcgactggagttccgcccgggcgcttcagagaatgaggaccgtagcgttgcactcaggcgtttgg

SEQ ID NO: 622897 - DNA, 75 bp, synthetic construct
  source 1..75: mol_type = other DNA
aagccgcttaccttactcgtgcaatgactacaggcggtggattaattgagcttggagaattggctaagggattgg

SEQ ID NO: 622898 - DNA, 75 bp, synthetic construct
  source 1..75: mol_type = other DNA
tacatttcaatatgaatacggggagctgccctgctgtacagttccgcgtgaattacaggaacggtgtcagcgcca

SEQ ID NO: 622899 - DNA, 75 bp, synthetic construct
  source 1..75: mol_type = other DNA
tcgcactttgcagatattactatattgagctttcatcctgttaaaattatcacaactgcagaaggggggatggct

SEQ ID NO: 622900 - DNA, 75 bp, synthetic construct
  source 1..75: mol_type = other DNA
gttcctgctgatcagatagtgccactggccagtgcgcttaattgtgacctgatgtggttgttaacgggaaaatca

SEQ ID NO: 622901 - DNA, 75 bp, synthetic construct
  source 1..75: mol_type = other DNA
cggagagtatgaaccaactatcagtatgcttatcccactggcaaatattcttggctgcgatccgatgtggctatt

SEQ ID NO: 622902 - DNA, 75 bp, synthetic construct
  source 1..75: mol_type = other DNA
ggtacgtatcagcgcagacgtttatataaactccggtatgtctgaaagcgcggcagaagtgatgcattcaaaaat

SEQ ID NO: 622903 - DNA, 75 bp, synthetic construct
  source 1..75: mol_type = other DNA
cgctgtagatacaacaggtgcgggtgatgcgtttaatggcgcgctcgccgccgcactggcgaagggagaatcact

SEQ ID NO: 622904 - DNA, 75 bp, synthetic construct
  source 1..75: mol_type = other DNA
tgaagagtattgatgattttgtaacacgccgccatgaactggctgaacgttacaaaaaagctctcgaagatattc

SEQ ID NO: 622905 - DNA, 75 bp, synthetic construct
  source 1..75: mol_type = other DNA
ctactattcctggtatcggctacaaaacagcttcatggatagctcggaattggcttaatgcagatgatattgcaa

SEQ ID NO: 622906 - DNA, 75 bp, synthetic construct
  source 1..75: mol_type = other DNA
aaagagtttgtggcgtttctccgcttgttccttgaagtggcatttgtgctaccggaacgcattaaggaacaacag

SEQ ID NO: 622907 - DNA, 75 bp, synthetic construct
  source 1..75: mol_type = other DNA
gagagtttcgggatttcgtcgtcacccgcatcgaagcaccaacattgctcgacgaggagccacaagccaacgaac

SEQ ID NO: 622908 - DNA, 75 bp, synthetic construct
  source 1..75: mol_type = other DNA
gacatttatattactgatcccccatatggcgatgctgtcaagtatgaagaaatcacagagttctttattgcctgg

SEQ ID NO: 622909 - DNA, 75 bp, synthetic construct
  source 1..75: mol_type = other DNA
tgaaaaccgaaaaatgccacaatattggctgtttatacagtatttcaggttttctcatggcattaaccgcagcgc

SEQ ID NO: 622910 - DNA, 75 bp, synthetic construct
  source 1..75: mol_type = other DNA
atgtcacgccaatcctcggtggctttttggcggataaagttctcggcaatcgcatggcggtgatgctgggggcgt

SEQ ID NO: 622911 - DNA, 75 bp, synthetic construct
  source 1..75: mol_type = other DNA
catcatcctctggtctttatcggtaggaacgatcctcgcaagccaattagtaaggagagcattaaccaggtcatt

SEQ ID NO: 622912 - DNA, 75 bp, synthetic construct
  source 1..75: mol_type = other DNA
agactaaagccgatcgctggtcattacgctatcgtgatgaaatcatcgatacctttgagaaagacatttttccct

SEQ ID NO: 622913 - DNA, 75 bp, synthetic construct
  source 1..75: mol_type = other DNA
accgtactggaaagtctgcagcgggaaggttttcagccattcttcgcctgccagacccgtgtgcgcgacccgggc

SEQ ID NO: 622914 - DNA, 75 bp, synthetic construct
  source 1..75: mol_type = other DNA
tgttgaataaacatccgtttttgggtgtttttttaatctttttgggttttaaattcctatcgatcaagtatcaat

SEQ ID NO: 622915 - DNA, 75 bp, synthetic construct
  source 1..75: mol_type = other DNA
atatccgctggaatgaagcccatgccgccaaagtcctgcgctcgctggagctgcatgtttttccactgatcggca

SEQ ID NO: 622916 - DNA, 75 bp, synthetic construct
  source 1..75: mol_type = other DNA
gtgccactttcaggtgagttactaccacttgaacagctccttgccttacaaccaagagcaaccatgatccaactg

SEQ ID NO: 622917 - DNA, 75 bp, synthetic construct
  source 1..75: mol_type = other DNA
aaacctctcatcttaaacaaagcgtgcattctgggctcattgttaccagcaactgacaacccgcttgaagattta

SEQ ID NO: 622918 - DNA, 75 bp, synthetic construct
  source 1..75: mol_type = other DNA
ttagaagtttttcctagaccattccccttgccaattccatggcccaaaagccctgcacagcagcaagcagatgat

SEQ ID NO: 622919 - DNA, 75 bp, synthetic construct
  source 1..75: mol_type = other DNA
ccttccattttcagatcaatattgcggattatacagagcaggttctctgtagcgggatgaagattattcttccct

SEQ ID NO: 622920 - DNA, 75 bp, synthetic construct
  source 1..75: mol_type = other DNA
ggtggtctatttttggctcacgttcaacagaaaattcaaagacggatattgttgttatgcttcaggttcgtaagg

SEQ ID NO: 622921 - DNA, 75 bp, synthetic construct
  source 1..75: mol_type = other DNA
aagatggcggtccagggtttacagggcccgaagaatgagactgcgctcgccgggcgtcatctctccgggcagaaa

SEQ ID NO: 622922 - DNA, 75 bp, synthetic construct
  source 1..75: mol_type = other DNA
gcacccggatatccaccaggcccagtgcctgtaccagacgttcggtgataagccggtctgccttactgggtgtga

SEQ ID NO: 622923 - DNA, 75 bp, synthetic construct
  source 1..75: mol_type = other DNA
tgcctgtaccagacgttccgtgataaggcggtctgccttgctgggtgtgacttcaccggacgggtgattgtgcgc

SEQ ID NO: 622924 - DNA, 75 bp, synthetic construct
  source 1..75: mol_type = other DNA
aaaaaataatatttacatcggacatttttacgtttggtctaaaatttcagctggatatgatgagtcttttgagac

SEQ ID NO: 622925 - DNA, 75 bp, synthetic construct
  source 1..75: mol_type = other DNA
caaccgacttacgaaataagaatgccggaaacaacgataagtgagatgcaatctgctaataactcaaaatcaggt

SEQ ID NO: 622926 - DNA, 75 bp, synthetic construct
  source 1..75: mol_type = other DNA
taaacaactgaagttaacggcctcatatataccaccaactacatatggaagtgatcatggtgaagcggtagaggg

SEQ ID NO: 622927 - DNA, 75 bp, synthetic construct
  source 1..75: mol_type = other DNA
tgtccgggtgcagctccgggtcgggcaggcggttacctgccgggtctgtggcatacgggatatcaatgcccaggt

SEQ ID NO: 622928 - DNA, 75 bp, synthetic construct
  source 1..75: mol_type = other DNA
cgaaagcggcgctgacatatcgcttcggtgaggagcaccaaccggtgacagagacgcagatactttccccacgcc

SEQ ID NO: 622929 - DNA, 75 bp, synthetic construct
  source 1..75: mol_type = other DNA
acagcgcaagctttgtgtagatatataaatctcaaaataaaacgtttagaaattaaccaaggcatcgaaaatgca

SEQ ID NO: 622930 - DNA, 75 bp, synthetic construct
  source 1..75: mol_type = other DNA
aatatgctgaaaggcgggatttctggtcgcagcgctaaaggaaaacgtatccacacccgtgccattcacagcatc

SEQ ID NO: 622931 - DNA, 75 bp, synthetic construct
  source 1..75: mol_type = other DNA
aacgcaaagctttaagactcgcccaaaagctatcaacagaaaattctttcgaagcaatatgtcgagaatggcata

SEQ ID NO: 622932 - DNA, 75 bp, synthetic construct
  source 1..75: mol_type = other DNA
gaaaatgcgtaggcctcatatcgttcctttgtctactcaggtaatcgacctcttcaagcaactcaagcctattac

SEQ ID NO: 622933 - DNA, 75 bp, synthetic construct
  source 1..75: mol_type = other DNA
tggccattacccatttattttcattggcaggaataatcgtagcaaaccaatctcaaaagaaagtgtttcacaagt

SEQ ID NO: 622934 - DNA, 75 bp, synthetic construct
  source 1..75: mol_type = other DNA
gcaaacggcattgatccagtagaagaacgtaaggctcagaaaattgctcagaaattatcaactgaaaactctttt

SEQ ID NO: 622935 - DNA, 75 bp, synthetic construct
  source 1..75: mol_type = other DNA
ctatacatttggagatgggctagggttgtcattacttatagaacctaatggaagcaagagttggcggttccgcta

SEQ ID NO: 622936 - DNA, 75 bp, synthetic construct
  source 1..75: mol_type = other DNA
tcatgctcagtatcttgagcaaagacgaattatgattcaatcttatagtgattttctataccctggagatttatg

SEQ ID NO: 622937 - DNA, 75 bp, synthetic construct
  source 1..75: mol_type = other DNA
aattaaaccattagaactgcttgaagtattgcgaagaatagaaaagcgtggggcactagagaagaccagaaaagt

SEQ ID NO: 622938 - DNA, 75 bp, synthetic construct
  source 1..75: mol_type = other DNA
agaatagtattcgaggaacatataatcatgctcaataccttgaaagaagaagggaaatgcttcagtggtatagca

SEQ ID NO: 622939 - DNA, 75 bp, synthetic construct
  source 1..75: mol_type = other DNA
ttgtcggtggcaccgcagaaagatgaaggcaaacgtgatccgctgttatctgccgatgaggaacgtcgcctgcgt

SEQ ID NO: 622940 - DNA, 75 bp, synthetic construct
  source 1..75: mol_type = other DNA
gaaaatgcaaagaccacacatagtccctctatcttctcaagttattcaattatttctccaattaaaaccaataac

SEQ ID NO: 622941 - DNA, 75 bp, synthetic construct
  source 1..75: mol_type = other DNA
atcatcacaaaaaatgctactaagattattatgttaactggtgtaagaacgcaggaaatgcgctttgctacttgg

SEQ ID NO: 622942 - DNA, 75 bp, synthetic construct
  source 1..75: mol_type = other DNA
ggtaggaacaaccgtagcaaaccgatttcgaaagaaagtgtgtctcaagtgattgagttacttggttacaaagga

SEQ ID NO: 622943 - DNA, 75 bp, synthetic construct
  source 1..75: mol_type = other DNA
taagcctcgcggaagcacgtgagaaacgcgatacggcacgtaaacaggttgcaaacggcattgatccagcagaag

SEQ ID NO: 622944 - DNA, 75 bp, synthetic construct
  source 1..75: mol_type = other DNA
ctttgcgcatgctggaacagggcattgatcgtgatcaggtgctcgcggccactcagctaagcgaagccgatctgg

SEQ ID NO: 622945 - DNA, 75 bp, synthetic construct
  source 1..75: mol_type = other DNA
gtcgcagcgctaaaggaaaacgtatccatacccgtgccattcacagcatcgacaccggcattaagctcaatcgcg

SEQ ID NO: 622946 - DNA, 75 bp, synthetic construct
  source 1..75: mol_type = other DNA
cgatctggcgggttataccggcagtgttatcacgaagaccgccactcagatcattatgttaaccggtgtacgcac

SEQ ID NO: 622947 - DNA, 75 bp, synthetic construct
  source 1..75: mol_type = other DNA
ccgctctctgagcaggtcattgcgctatttaagcaacttgaaccaatctcaaaacaccatcctctggtatttatc

SEQ ID NO: 622948 - DNA, 75 bp, synthetic construct
  source 1..75: mol_type = other DNA
gctgctggaggcgatccaggggaggcaaaaaaggaagaaaaaatcgcgcagcaaatgagtctgaaaaatacgttc

SEQ ID NO: 622949 - DNA, 75 bp, synthetic construct
  source 1..75: mol_type = other DNA
tggcactgctagtgttacccttcatttcattaacagcacatgccatttctgcggagaatatagtcgtatatgcag

SEQ ID NO: 622950 - DNA, 75 bp, synthetic construct
  source 1..75: mol_type = other DNA
ccatacccgtgccattcacagcatcgacaccggcattaagctcaatcgcgcattgtgggtgatggcagaaacgct

SEQ ID NO: 622951 - DNA, 75 bp, synthetic construct
  source 1..75: mol_type = other DNA
tcatgctcaatacttagagaaaagattaaaaatgttacaatggtatagcgattttatttatccagccggttgtgt

SEQ ID NO: 622952 - DNA, 75 bp, synthetic construct
  source 1..75: mol_type = other DNA
atacacattgaacgatggacaaggtctgtcattgcttatcaatcccgatggctcgaaaggctggcgtttccgttt

SEQ ID NO: 622953 - DNA, 75 bp, synthetic construct
  source 1..75: mol_type = other DNA
agggagatgatgcagtggtatgggaactatcttgacaaccttattgttgatagagatagttcagtatactttcca

SEQ ID NO: 622954 - DNA, 75 bp, synthetic construct
  source 1..75: mol_type = other DNA
tctgggagataccagctgaagtaatgaagatgaaacgaccgcatatcgtacctatgtcggatcaggtagtagcac

SEQ ID NO: 622955 - DNA, 75 bp, synthetic construct
  source 1..75: mol_type = other DNA
ccatgcgcagtatttggaggggcgtagggagatgatgcagtggtacgcagattatattaccagtaacgcaaagca

SEQ ID NO: 622956 - DNA, 75 bp, synthetic construct
  source 1..75: mol_type = other DNA
gcactggaagctaacgagtcagaacccacacgaaatttacatgtgcttgccgatcatcacggcaaccgttcgcca

SEQ ID NO: 622957 - DNA, 75 bp, synthetic construct
  source 1..75: mol_type = other DNA
aactgacagcgacgttaaccgggctggattacgggcgcttcacccgttcgatgctgctttcgcaggggcaatttg

SEQ ID NO: 622958 - DNA, 75 bp, synthetic construct
  source 1..75: mol_type = other DNA
acgcttgcgcagcccgccagtgtggcaactgatggcgtttacatagttcagtcaatcagctacaccggcgatacg

SEQ ID NO: 622959 - DNA, 75 bp, synthetic construct
  source 1..75: mol_type = other DNA
ccgacaaaaaagcagcagaaaaagcggctgctgaaaaggcagcagctgataagaaagcagcggcagaaaaagccg

SEQ ID NO: 622960 - DNA, 75 bp, synthetic construct
  source 1..75: mol_type = other DNA
gtccgggtggttcaggatcaggaaatcgaagtggacagaaaccggacgctggtggtgaacagttcggaaagaaag

SEQ ID NO: 622961 - DNA, 75 bp, synthetic construct
  source 1..75: mol_type = other DNA
ccgttgatatcggcgattttgatacagaaacctttgccgtcgtaaactttcatcttacccagcattactccgcat

SEQ ID NO: 622962 - DNA, 75 bp, synthetic construct
  source 1..75: mol_type = other DNA
atcgcgccggaggtgtcggcaagcgacgtcgggacagtgcgggaagttgacgcggcggacgtgggccagagtgat

SEQ ID NO: 622963 - DNA, 75 bp, synthetic construct
  source 1..75: mol_type = other DNA
gcgctgataaacccgaacatccgggttaacggactcattcagctggatcaggcttcggtattccgcaccgcactg

SEQ ID NO: 622964 - DNA, 75 bp, synthetic construct
  source 1..75: mol_type = other DNA
aggggccaggcgtggtacatggatatgatgtgcgaagcgcgtggcgcggcggatctgtatacgcaatcggctttg

SEQ ID NO: 622965 - DNA, 75 bp, synthetic construct
  source 1..75: mol_type = other DNA
aggggccaggcttggtacatggatctgatgtgcgaagcgcgcggcgcggcggatctccgcactcatgtctcgctt

SEQ ID NO: 622966 - DNA, 75 bp, synthetic construct
  source 1..75: mol_type = other DNA
cgggattatgtacactggtgacacaaggggccaggcgtggtacatggacatgatgtgcgaagcgcgcggcgcggc

SEQ ID NO: 622967 - DNA, 75 bp, synthetic construct
  source 1..75: mol_type = other DNA
aggggccaggcgtggtatatggatatgatgtgcgaagcgcgcggcgctgcggatctccgcgctcaggtctcgctt

SEQ ID NO: 622968 - DNA, 75 bp, synthetic construct
  source 1..75: mol_type = other DNA
agatcgttatacctacatcccgaccatcaccatcctcgaaagcctgcagcgtgaaggctttgagccgttctttgc

SEQ ID NO: 622969 - DNA, 75 bp, synthetic construct
  source 1..75: mol_type = other DNA
tttttgcccgctaggcattaccggtcatgagtggtgcgccagtttaaaactggaggaccgtttggctggcgttgg

SEQ ID NO: 622970 - DNA, 75 bp, synthetic construct
  source 1..75: mol_type = other DNA
ccccgtcccctccgctggggccatacatcctattcacattattctttccctccctgaacgggatgggtggcagct

SEQ ID NO: 622971 - DNA, 75 bp, synthetic construct
  source 1..75: mol_type = other DNA
tggtgagtccctctaccatatcagcggcgaacattataacggacagggaaccggtacgctggcggccatgagttt

SEQ ID NO: 622972 - DNA, 75 bp, synthetic construct
  source 1..75: mol_type = other DNA
cagcttgtctgatgtagaccctattactggtcaggtacagcaaatgcctactttagaacagttaaagtcctgggt

SEQ ID NO: 622973 - DNA, 75 bp, synthetic construct
  source 1..75: mol_type = other DNA
gtcgaccaaattgtttcgctgctagttacagggaacactaatgacagacagctaaaagccctgtttaattacgta

SEQ ID NO: 622974 - DNA, 75 bp, synthetic construct
  source 1..75: mol_type = other DNA
gagaccagaagtttcaggacattcgccgtgcgattgagcgactggctgaccagtcgctgcaacaggagctactgg

SEQ ID NO: 622975 - DNA, 75 bp, synthetic construct
  source 1..75: mol_type = other DNA
ccgccattaccacattcttcggttctcagctacaggcccgcgttcagaatcatattcttcgtgaatatctcggcg

SEQ ID NO: 622976 - DNA, 75 bp, synthetic construct
  source 1..75: mol_type = other DNA
ggcctgatggatggcggtgttgatgccgccattaccacattcttcggttctcagctacaggcccgcgttcagaat

SEQ ID NO: 622977 - DNA, 75 bp, synthetic construct
  source 1..75: mol_type = other DNA
taatcgaagaagcaaaattaaaaatagcgattgcgaaataccaccccaattcagggatggcccgggtggagggcg

SEQ ID NO: 622978 - DNA, 75 bp, synthetic construct
  source 1..75: mol_type = other DNA
tagaaggaataaaaattctttttaccgataaagaaaatgagtttatgaagagaggtttttttaatgatctttatg

SEQ ID NO: 622979 - DNA, 75 bp, synthetic construct
  source 1..75: mol_type = other DNA
gtttcccgtaacgctaaaaaattccgttccggtgatacagcaatgcagcgagcaggtgatgttctgtatcgtccg

SEQ ID NO: 622980 - DNA, 75 bp, synthetic construct
  source 1..75: mol_type = other DNA
aggtaatattggcccggttaccgatgccttaatggatgctctcgacacgccgtttacggtcttctctccggccct

SEQ ID NO: 622981 - DNA, 75 bp, synthetic construct
  source 1..75: mol_type = other DNA
cttaacgtcacgtaccaagctaaaagccacagctacggttattacactcaagcagaaatgcgaaaattagtatgc

SEQ ID NO: 622982 - DNA, 75 bp, synthetic construct
  source 1..75: mol_type = other DNA
cggcaacaaccggatgtacgggccggaacagacgtccataccagcctgtagctggtgttcagatgtcgtttcatc

SEQ ID NO: 622983 - DNA, 75 bp, synthetic construct
  source 1..75: mol_type = other DNA
agttcctagccggtgcgggccgatacggcaacaaccggatgtacgggccggaacagccggaataccgcatctgtt

SEQ ID NO: 622984 - DNA, 75 bp, synthetic construct
  source 1..75: mol_type = other DNA
aaatttattttgctatagactgcttgattaaagtagaccgtcccttgatggcaatagattgtttatctaaaattt

SEQ ID NO: 622985 - DNA, 75 bp, synthetic construct
  source 1..75: mol_type = other DNA
gatttcgtattcatcttcaataaaagacaacggatttgcatttagaatacaaaattataaagaaaacatggaaat

SEQ ID NO: 622986 - DNA, 75 bp, synthetic construct
  source 1..75: mol_type = other DNA
caatgtgcgtggcccgttgcgtgtgggctgtctggataccctggcacccatgttgacgccagaacttgtttttgg

SEQ ID NO: 622987 - DNA, 75 bp, synthetic construct
  source 1..75: mol_type = other DNA
aattcaagcattccatcgtgcgcgtggcgctgcgtcgggacagcatcatccaggtcaagacggtgatcctcatcg

SEQ ID NO: 622988 - DNA, 75 bp, synthetic construct
  source 1..75: mol_type = other DNA
atcttggcgcgttattaactcgcgatcgttataaagacgttatttctcactatcagcgattaaaaaagacgggca

SEQ ID NO: 622989 - DNA, 75 bp, synthetic construct
  source 1..75: mol_type = other DNA
ctaatcctcgttgtggcgtcaaagagactattctgaccacgctggctaacccggacgccgccgggttgcgattta

SEQ ID NO: 622990 - DNA, 75 bp, synthetic construct
  source 1..75: mol_type = other DNA
agcgcattactgctggataacaatatgttgatccgtctacgcgctaaaaacatgcttaatgacgtcatggatgtt

SEQ ID NO: 622991 - DNA, 75 bp, synthetic construct
  source 1..75: mol_type = other DNA
gtaaatcatcattaagacttgttgatttagttgaaaatattggtagtttagcgccatttaaattcgatgatgcaa

SEQ ID NO: 622992 - DNA, 75 bp, synthetic construct
  source 1..75: mol_type = other DNA
ccatggcttcctcatactacagctgatatagatagacgtattgctgctttcaacgcattggcaagggagtggccc

SEQ ID NO: 622993 - DNA, 75 bp, synthetic construct
  source 1..75: mol_type = other DNA
tcaaaatataaagggcaatattgcgcctcaagtgtggttaaagaggttttttcggcttctagctggcaattatgg

SEQ ID NO: 622994 - DNA, 75 bp, synthetic construct
  source 1..75: mol_type = other DNA
gatgcagataaatcgctatgatgataagggatgttttttaaccgttgaagacccggttgaatatcagatttatgg

SEQ ID NO: 622995 - DNA, 75 bp, synthetic construct
  source 1..75: mol_type = other DNA
tcagcgcgcacgttcaccctcaccctaaccctctcccttaagggagaggggaccgatcgagcacaaattttgaga

SEQ ID NO: 622996 - DNA, 75 bp, synthetic construct
  source 1..75: mol_type = other DNA
gtgtgttgttccagtccctacggcgcattgccgacgaccaccaccacacgcacgacgaccactgcggcggatggc

SEQ ID NO: 622997 - DNA, 75 bp, synthetic construct
  source 1..75: mol_type = other DNA
cccgccggagcgaggtttcatcagccgcctgcggctggtaaccgcaaagcacactgtattatgtcaacactgaaa

SEQ ID NO: 622998 - DNA, 75 bp, synthetic construct
  source 1..75: mol_type = other DNA
acgcgaaggtgagacgttgttccgtttggcaaaacaacagcgttttgccgaggctatggcgctctatcgctggtt

SEQ ID NO: 622999 - DNA, 75 bp, synthetic construct
  source 1..75: mol_type = other DNA
ctgcgaccaccggggcctgccgctggcgctcatcagcgaagacggcaatacggcgtggcgcggggagtatgatga

SEQ ID NO: 623000 - DNA, 75 bp, synthetic construct
  source 1..75: mol_type = other DNA
ctacgacagccagcaccgtctggtgttctacacgcggatacagcacggtgagccgcaggtggagagccgctacct

SEQ ID NO: 623001 - DNA, 75 bp, synthetic construct
  source 1..75: mol_type = other DNA
tatagagcttctacgggggtacgatggtttagttttcttttgttagcttcggaactacttattggcattagaagt

SEQ ID NO: 623002 - DNA, 75 bp, synthetic construct
  source 1..75: mol_type = other DNA
ataaatattttgttgtaatatttgttattgtgggtatatgtcaattgattaaaacagggttatatttcatattta

SEQ ID NO: 623003 - DNA, 75 bp, synthetic construct
  source 1..75: mol_type = other DNA
ttgtaaacttgagcatgaggtaaatattctggggcgacggtttactttatgcaaagtaaatgaaagtggttgtga

SEQ ID NO: 623004 - DNA, 75 bp, synthetic construct
  source 1..75: mol_type = other DNA
gccgagcattgtttcatcatgatgatggaaccaagtatggaaagatttttaatattacaggaactgagaatacat

SEQ ID NO: 623005 - DNA, 75 bp, synthetic construct
  source 1..75: mol_type = other DNA
gcaggagaagaaatcttctgtgatgaacatggccgcgtgcgggtgaaatttaactgggaccgctataacccgtca

SEQ ID NO: 623006 - DNA, 75 bp, synthetic construct
  source 1..75: mol_type = other DNA
taaccactttgcggtaataccggcagacagaacatggcggccacagccgttgctgaaaccgctggtggacggccc

SEQ ID NO: 623007 - DNA, 75 bp, synthetic construct
  source 1..75: mol_type = other DNA
gtgaattagaggttatgccgaagctaaatggacaggatgcggcagcaaatgcggcaaaagtaaccgtggtggctg

SEQ ID NO: 623008 - DNA, 75 bp, synthetic construct
  source 1..75: mol_type = other DNA
ttcacttaaaataaccgactctatatattttgattcggaaaaatcaaaagcttactttctgaatagagattatgc

SEQ ID NO: 623009 - DNA, 75 bp, synthetic construct
  source 1..75: mol_type = other DNA
atattaacggcattatcttagatgataaaaagcttggtgatgaaaactatcttaatttaaatatatcatgcttat

SEQ ID NO: 623010 - DNA, 75 bp, synthetic construct
  source 1..75: mol_type = other DNA
caagtagtcggtattgataatctgaacgattactacgacgtcagccttaaacaagtgtcacgaacggtgcaatag

SEQ ID NO: 623011 - DNA, 75 bp, synthetic construct
  source 1..75: mol_type = other DNA
gagaggcattcaccaacaatggaacgctgactgccggtaaaggcaacagtgttttcagcgcacagcgtcttttcc

SEQ ID NO: 623012 - DNA, 75 bp, synthetic construct
  source 1..75: mol_type = other DNA
gttgcacaactgaccagaagcatactgtggtgggagtccgtcaccatcaacggacagacagtcatggttccgaaa

SEQ ID NO: 623013 - DNA, 75 bp, synthetic construct
  source 1..75: mol_type = other DNA
acggtgaacccgaaactggatggtctcggaaaggtggacagcagtctgtttgccggactgtatgacctgctcagg

SEQ ID NO: 623014 - DNA, 75 bp, synthetic construct
  source 1..75: mol_type = other DNA
cgaaattcagtagattgacgctgggtgttttgctggcactaagcggttcagcgtctggtgcgagtctggaagttg

SEQ ID NO: 623015 - DNA, 75 bp, synthetic construct
  source 1..75: mol_type = other DNA
aattatgtgaaaaattcaaccttacccctttgaagctttctatcctctcatccaaagctccaaaaaaatatcgcg

SEQ ID NO: 623016 - DNA, 75 bp, synthetic construct
  source 1..75: mol_type = other DNA
gctgaacgtcagcgaaaaacgaaaccgttgttgaaatccctggaaagctggttgcgtgaaaagatgaagaccctg

SEQ ID NO: 623017 - DNA, 75 bp, synthetic construct
  source 1..75: mol_type = other DNA
attcgtaaacgaatcgacatgaaagaaatcaacaaaattctgttgattttctgtcgggagcgtgttaacttaaaa

SEQ ID NO: 623018 - DNA, 75 bp, synthetic construct
  source 1..75: mol_type = other DNA
aacacgatgatagccatgtcggcgttcaactggtgaaggcgcaaacggttattgggtcgggtggctcattaacgt

SEQ ID NO: 623019 - DNA, 75 bp, synthetic construct
  source 1..75: mol_type = other DNA
ttcaatgcagggaatacttatagcggtaaaacgctggtcaatgacggcctcctgaccattgcgtctcatacggca

SEQ ID NO: 623020 - DNA, 75 bp, synthetic construct
  source 1..75: mol_type = other DNA
aatgatgatgcgcaggcgctaaaagtgttgtgtatggaatttgaagtttttttaaaagaaaaaatcacggaggtg

SEQ ID NO: 623021 - DNA, 75 bp, synthetic construct
  source 1..75: mol_type = other DNA
tggcggttggagagccgctggttcgtaggagacttatcaatattttagacgtgcttgagggagatgttgaccatg

SEQ ID NO: 623022 - DNA, 75 bp, synthetic construct
  source 1..75: mol_type = other DNA
ttaaaagattatgagtatgtgatcttcggtggcgctgatcctgacatgcatattggtggtgcgtttcgccgtatg

SEQ ID NO: 623023 - DNA, 75 bp, synthetic construct
  source 1..75: mol_type = other DNA
gcacactttttctatctataattaatggacttcaaaattttagacgatttgtattaataaattttgtttcagttc

SEQ ID NO: 623024 - DNA, 75 bp, synthetic construct
  source 1..75: mol_type = other DNA
catcaagctaccagatgctgccggggctgtttcgtggcgtctgtaccaacggcctggtctgcggtcagtcgttcg

SEQ ID NO: 623025 - DNA, 75 bp, synthetic construct
  source 1..75: mol_type = other DNA
tgatatatctattgtgagaaaaatatcgggtttgggaggttggttaattgtagatcaaataggtgtgatttttct

SEQ ID NO: 623026 - DNA, 75 bp, synthetic construct
  source 1..75: mol_type = other DNA
agctaatctgatttttcttgccctaaaaagcctcgaacttgatcgtcttgttaatgacggagaacgagaccatac

SEQ ID NO: 623027 - DNA, 75 bp, synthetic construct
  source 1..75: mol_type = other DNA
ggcgcagcagacgtttaataagttgatcccgcaggcaaaatctcagccgccgtcgatggaaagcgcgatggtgct

SEQ ID NO: 623028 - DNA, 75 bp, synthetic construct
  source 1..75: mol_type = other DNA
caggcgggcgagccaaagcaggcgctggaaacctacaaagacgcgatggtggcatccggtgtgacgccgacgcgt

SEQ ID NO: 623029 - DNA, 75 bp, synthetic construct
  source 1..75: mol_type = other DNA
tcacaatatcccttggtttggcggtaatgtcgatggcgaaagccacaccaaccgcacacaagctgttaatggcgc

SEQ ID NO: 623030 - DNA, 75 bp, synthetic construct
  source 1..75: mol_type = other DNA
ttccactttttcaattacatggggcgaattatgcctatcttctaagttatattctatatggtgtagtaattataa

SEQ ID NO: 623031 - DNA, 75 bp, synthetic construct
  source 1..75: mol_type = other DNA
agatattataaaaatattggcatggctttatgcgtttcccatgttatcaagatgtgcagttaaatggtatctttt

SEQ ID NO: 623032 - DNA, 75 bp, synthetic construct
  source 1..75: mol_type = other DNA
caacgtggtggatgtggtcggcgctgtcagttacagcgacagtatcggcccactcggctataccgttgacgcaca

SEQ ID NO: 623033 - DNA, 75 bp, synthetic construct
  source 1..75: mol_type = other DNA
cttacttccagtcactgggcgtttctaaggagcagcttgtagaaaggactgtatattggtacagtatgtggtctc

SEQ ID NO: 623034 - DNA, 75 bp, synthetic construct
  source 1..75: mol_type = other DNA
cgggattaaattctttgccaacagtcagatggatgccttcgtcagcgacatgcagaacaggctgaatgagggaga

SEQ ID NO: 623035 - DNA, 75 bp, synthetic construct
  source 1..75: mol_type = other DNA
tgggattaaattctttgccaatagccagatggacgtttttgtcagcgacatgcagaacaagctgaatgatggaga

SEQ ID NO: 623036 - DNA, 75 bp, synthetic construct
  source 1..75: mol_type = other DNA
cgtgagaacagcatcacctacgaggatttgaaggaaattccgcttgtgctgcttggtgacgaggcgcatcacttc

SEQ ID NO: 623037 - DNA, 75 bp, synthetic construct
  source 1..75: mol_type = other DNA
aggaaacacttttcagctccaaatctcatggtaaatatgcgcttttcccaatttttactgcgagttggcgagctc

SEQ ID NO: 623038 - DNA, 75 bp, synthetic construct
  source 1..75: mol_type = other DNA
atggatgagtttattaaagatttagaggaaaaactgaatgatggtcttcctctggaagagcgttcactgtcattg

SEQ ID NO: 623039 - DNA, 75 bp, synthetic construct
  source 1..75: mol_type = other DNA
tggaaatcgacggggaaaaaatcaccatcgcaccggtagatatattcccgtccgtaccggaacgcaacacgattt

SEQ ID NO: 623040 - DNA, 75 bp, synthetic construct
  source 1..75: mol_type = other DNA
ttcctgtcggagaagatccgttcgaggttccggctggtgcgcctttacaggaagtctggctggggaaagctccgg

SEQ ID NO: 623041 - DNA, 75 bp, synthetic construct
  source 1..75: mol_type = other DNA
gctatcgtgctatctcttaacctcattgcagaagtgattagctgcatgattttagtggttaaaaaaagtttcaaa

SEQ ID NO: 623042 - DNA, 75 bp, synthetic construct
  source 1..75: mol_type = other DNA
atgaggatacaaaaatttacactgataacaattgttttcgctatgatgtttttattggaacaattgatagggatt

SEQ ID NO: 623043 - DNA, 75 bp, synthetic construct
  source 1..75: mol_type = other DNA
acaggaaggccagcaccaggactaccagcgcacgcagtatgaagtgtatgactaccccggacgtttcaagagcgc

SEQ ID NO: 623044 - DNA, 75 bp, synthetic construct
  source 1..75: mol_type = other DNA
attctctttatgtggttaaccataatggcgaaccgtatgttccaatgaaaccgatcgttgaaggggtggggctgg

SEQ ID NO: 623045 - DNA, 75 bp, synthetic construct
  source 1..75: mol_type = other DNA
ggccggtggtaacacaagcctggatgccgcgaatgatattctgttgagtggcgccgcaaacacacaaaaaacaac

SEQ ID NO: 623046 - DNA, 75 bp, synthetic construct
  source 1..75: mol_type = other DNA
tcttactcaggaaacactttttagctccaaatctcatggtaaatatgcgcttttcccaatttttactgcgagttg

SEQ ID NO: 623047 - DNA, 75 bp, synthetic construct
  source 1..75: mol_type = other DNA
atgtatctacatctgcttttattgcaaaagggaaaataggtaatagtattattgtattggctgctattatcattg

SEQ ID NO: 623048 - DNA, 75 bp, synthetic construct
  source 1..75: mol_type = other DNA
gaaggaaaagagcccaaaagcagtcgagagaatgctcaacttcttctgcaaggaaaacatgatcaccaaggaagg

SEQ ID NO: 623049 - DNA, 75 bp, synthetic construct
  source 1..75: mol_type = other DNA
gtcgttctggcggtgatccgcaaaacttacgggttcgggaaaaagtttgaccgcattaccaatacccagattgca

SEQ ID NO: 623050 - DNA, 75 bp, synthetic construct
  source 1..75: mol_type = other DNA
atcttactcggtttcatcaaatttcgtaaagaaattaataaaactgggttaacggatggttttcaatggatcgat

SEQ ID NO: 623051 - DNA, 75 bp, synthetic construct
  source 1..75: mol_type = other DNA
catacattagcattaacatagagcagattctggcgcgttgcgcccgtagttcgctgatgctcacacgcgcagtac

SEQ ID NO: 623052 - DNA, 75 bp, synthetic construct
  source 1..75: mol_type = other DNA
tttgagtgtaaattcagattttaaagtaaatccatatagtattctttctattataaatttaatcatatttgttat

SEQ ID NO: 623053 - DNA, 75 bp, synthetic construct
  source 1..75: mol_type = other DNA
gtttttaccaaaataaatttaaaacgtaaggtaaaaacagataaagaacaattgctcgatgaggagtatatcgat

SEQ ID NO: 623054 - DNA, 75 bp, synthetic construct
  source 1..75: mol_type = other DNA
tcaggaaaaagattgatataaatgcagagttaaatctgaaagagtttctccgattttgcagatacgatcttaccg

SEQ ID NO: 623055 - DNA, 75 bp, synthetic construct
  source 1..75: mol_type = other DNA
aatgataaagacgtcattgcaattgatggaaaaacgctccggcactcttatgacaagagtcgccgcaagggagcg

SEQ ID NO: 623056 - DNA, 75 bp, synthetic construct
  source 1..75: mol_type = other DNA
aatggagttaacaagaataataaacccccccttaccccccagggggaaaaatcgctcgctcaggatgtgatggat

SEQ ID NO: 623057 - DNA, 75 bp, synthetic construct
  source 1..75: mol_type = other DNA
atcagggcatttcaggcgtcgaaggtaatgacgaaccacccgtcgagcctaaacccagtgctggcgcggtcttga

SEQ ID NO: 623058 - DNA, 75 bp, synthetic construct
  source 1..75: mol_type = other DNA
cacaactacctgaaagagctgcatatggaacagccgggcgactactgcattacttataacggcgcgctggtacag

SEQ ID NO: 623059 - DNA, 75 bp, synthetic construct
  source 1..75: mol_type = other DNA
atccgggaaaccggaccaggaaaaaacttgcaggccataacagtatctacgaaagctaatcatcacgcgctggta

SEQ ID NO: 623060 - DNA, 75 bp, synthetic construct
  source 1..75: mol_type = other DNA
aaaacctgattgttaatcgcctcgccatcccacattgctggagcgaacaggagcgacgttttcgtggatttttta

SEQ ID NO: 623061 - DNA, 75 bp, synthetic construct
  source 1..75: mol_type = other DNA
atcatcgcccgcgaaggcgaaggtgaaaacctgattgttaatcgcctcgccatcccacattgctggagcgaacag

SEQ ID NO: 623062 - DNA, 75 bp, synthetic construct
  source 1..75: mol_type = other DNA
tacaggctcggatacacgacgcccagcccaccagaaaggcagaaaaaacgcattccctcctcttcttgtaaaaaa

SEQ ID NO: 623063 - DNA, 75 bp, synthetic construct
  source 1..75: mol_type = other DNA
atgatgcacttaaagaatcttacggtacaaaaccctaaaacaattgagcaataccagctggcgcggcagcataaa

SEQ ID NO: 623064 - DNA, 75 bp, synthetic construct
  source 1..75: mol_type = other DNA
cgcgtgcgcaactggcacaacggatgaaaatatctggtaataagccggataaacgtcgtcgcagatgtgatgagg

SEQ ID NO: 623065 - DNA, 75 bp, synthetic construct
  source 1..75: mol_type = other DNA
atgaaaaacgaaaccttcggtgctcgcctcttatacaggcgtaaaaaattaaaactgtctcaggccgcattaggt

SEQ ID NO: 623066 - DNA, 75 bp, synthetic construct
  source 1..75: mol_type = other DNA
gcgctgcccatgttatccgtcaggaacgcccgttaaccaatgatgagctggcaaaatatgtacccagcgttttta

SEQ ID NO: 623067 - DNA, 75 bp, synthetic construct
  source 1..75: mol_type = other DNA
ctttgctggtaaagttactgaatagcttcctaaagaatgaagatataaagaggcgtctgtattccttcgtcagta

SEQ ID NO: 623068 - DNA, 75 bp, synthetic construct
  source 1..75: mol_type = other DNA
aaaaactgttgtaccatgtgttaccagagagcagatgtatagatggaaaataaatattaatgataagacatataa

SEQ ID NO: 623069 - DNA, 75 bp, synthetic construct
  source 1..75: mol_type = other DNA
tgtagcgacacctgcggcacagccgctcagcgatgcactggatactataagggaaatataccgtaagcagcttcg

SEQ ID NO: 623070 - DNA, 75 bp, synthetic construct
  source 1..75: mol_type = other DNA
tcaccaatatcagacgttacgctacgctggtttgtgtcattcaggaagccagagcaacattgactgatgaggtta

SEQ ID NO: 623071 - DNA, 75 bp, synthetic construct
  source 1..75: mol_type = other DNA
attcccgctgggagggaaaagatgaaatattctgggggatgatgaattcacaaatttgccttgaaagaaaacgtg

SEQ ID NO: 623072 - DNA, 75 bp, synthetic construct
  source 1..75: mol_type = other DNA
gtaaaacaatgatttttgaagaagattatccagcagtatacgctggttttttaataaagttgaacctaaatgaaa

SEQ ID NO: 623073 - DNA, 75 bp, synthetic construct
  source 1..75: mol_type = other DNA
ggtgcttacgaagtggtgggcgtgtttgacctgattgaggaaaagcgtgatgccatgcagtcgctgatcctgccg

SEQ ID NO: 623074 - DNA, 75 bp, synthetic construct
  source 1..75: mol_type = other DNA
aatgcagaagccgttgccgaagataaaaagcaggtggcacagctggcatcatctgccacacaggatgccgcccgc

SEQ ID NO: 623075 - DNA, 75 bp, synthetic construct
  source 1..75: mol_type = other DNA
ctcttctgtatcctgtggtctctatgaataaagatatagcacacacaggttgcagaagaagactgttaatcgatg

SEQ ID NO: 623076 - DNA, 75 bp, synthetic construct
  source 1..75: mol_type = other DNA
agcctgggcgttattggtttttctgctggcggacatgtagcttcatggcttgttagcaataactattcttacaat

SEQ ID NO: 623077 - DNA, 75 bp, synthetic construct
  source 1..75: mol_type = other DNA
ctgcgtcagtcaggtatggttatagtcacccgggaagttgaggtatccgactccctgaccggaaccaccagactg

SEQ ID NO: 623078 - DNA, 75 bp, synthetic construct
  source 1..75: mol_type = other DNA
ccataccacatggaccgatgcttttatcaggaattttctgtaattctattggtaaggagactttactgatagatg

SEQ ID NO: 623079 - DNA, 75 bp, synthetic construct
  source 1..75: mol_type = other DNA
aaatacagatatgatcatcgcgttaagtatttttatgttaaagaacatctatctgtgattgataattttgagtat

SEQ ID NO: 623080 - DNA, 75 bp, synthetic construct
  source 1..75: mol_type = other DNA
gagaagtccgggtgccacaccggggaaacgtggtggacagggtgattgaaggtgcttacgaggtggtgggggttt

SEQ ID NO: 623081 - DNA, 75 bp, synthetic construct
  source 1..75: mol_type = other DNA
ttttctgatgctggctcaagctatacaagcattaactgtattgccattttatttgtctcttagttatgcttatgt

SEQ ID NO: 623082 - DNA, 75 bp, synthetic construct
  source 1..75: mol_type = other DNA
atttagtcggtaggatttggggaattatatctttatttatatttatacctttttatatatcatatttaggcagta

SEQ ID NO: 623083 - DNA, 75 bp, synthetic construct
  source 1..75: mol_type = other DNA
attgcgggttgtggttctgcgggtccggtttttcgatgacatatttatttcctttactgattgccatatgacggg

SEQ ID NO: 623084 - DNA, 75 bp, synthetic construct
  source 1..75: mol_type = other DNA
agacactttagattcggttgctgtgcagacatataataatattgagtatattattgttgatggtgcttcttctga

SEQ ID NO: 623085 - DNA, 75 bp, synthetic construct
  source 1..75: mol_type = other DNA
acaaccttattgatagtgaatgccatgttgctgaactggaagaagcgctacgcgataagcaggcgttacttgaag

SEQ ID NO: 623086 - DNA, 75 bp, synthetic construct
  source 1..75: mol_type = other DNA
gatgatgaaggtaaaagcggagtctccgcttcaggtagaaaaaacttcaacagactaatagaagatgtcgttaca

SEQ ID NO: 623087 - DNA, 75 bp, synthetic construct
  source 1..75: mol_type = other DNA
tacggtctcagatagaatcgctaatatcacctttaatggagtgagcttgctggacgcagcttccggtgattcttt

SEQ ID NO: 623088 - DNA, 75 bp, synthetic construct
  source 1..75: mol_type = other DNA
atgtgcaggaaatatgcgcatgttgtggacgccctgcaagggaatttcccgtatgcaacagacccggcgggaaac

SEQ ID NO: 623089 - DNA, 75 bp, synthetic construct
  source 1..75: mol_type = other DNA
gtgttaacgggaaaatactgcgaatacctgccactgtatcgtcagagtgaaatctttgcctgccagggcatcgaa

SEQ ID NO: 623090 - DNA, 75 bp, synthetic construct
  source 1..75: mol_type = other DNA
gtaaccagataatgcgaccaccggggcctgccgctggcgctcatcagcgaagacggcaatactgtgtggagtgca

SEQ ID NO: 623091 - DNA, 75 bp, synthetic construct
  source 1..75: mol_type = other DNA
tatgtggcttcaagtaatggtgttagtctcgaagggcataaaggtaagcaatttacatcatcaatgggacgacag

SEQ ID NO: 623092 - DNA, 75 bp, synthetic construct
  source 1..75: mol_type = other DNA
caggaaaagcgatgaggcttttgaatctgtatatcaattaattgaagaaagttgtcagtgctgggctgataaact

SEQ ID NO: 623093 - DNA, 75 bp, synthetic construct
  source 1..75: mol_type = other DNA
gtatggcaaagagatgacgacatttatggcagatgaagatgccagatacggaaaattaatagccaaaatcaaagg

SEQ ID NO: 623094 - DNA, 75 bp, synthetic construct
  source 1..75: mol_type = other DNA
tatggcacccgcctgggggtggattacagccgtctggattatgaatacaactttatgcagcagtctttcagtggt

SEQ ID NO: 623095 - DNA, 75 bp, synthetic construct
  source 1..75: mol_type = other DNA
ctggattaaatgtattggttcagatgatattcttcttcccgaagcaatctctgagttcgtaaatagattagaaaa

SEQ ID NO: 623096 - DNA, 75 bp, synthetic construct
  source 1..75: mol_type = other DNA
gcgtggcgatatcgctacgtgaaaaaaggtgttatggactctcagggggagttgtgggttggtgactggaaatat

SEQ ID NO: 623097 - DNA, 75 bp, synthetic construct
  source 1..75: mol_type = other DNA
cgcgtatccagacggtataccagccggggagcttcacgccgctcctgagaatcgaaacagagaatggcgaacagg

SEQ ID NO: 623098 - DNA, 75 bp, synthetic construct
  source 1..75: mol_type = other DNA
cgcccggttgaagaaactgccaaatcagacagtcagtgcgggaaaagtgcgggcaacggcttatatattggtgaa

SEQ ID NO: 623099 - DNA, 75 bp, synthetic construct
  source 1..75: mol_type = other DNA
ggggttaagcgagcgattattgcttcccgtcatcatcaaaaaactagaatcagccgaaccagagagaccgaagct

SEQ ID NO: 623100 - DNA, 75 bp, synthetic construct
  source 1..75: mol_type = other DNA
accattagaaaagcattactgtcgtaaaatcttaaatatagatgctgataaaaaaattattctttttggtgcaat

SEQ ID NO: 623101 - DNA, 75 bp, synthetic construct
  source 1..75: mol_type = other DNA
tccgcgaggctgcacgtcaggattacaacctgacagaggttgcgaatatgctttttacctcacagtccggcgtca

SEQ ID NO: 623102 - DNA, 75 bp, synthetic construct
  source 1..75: mol_type = other DNA
ggcggtattgtactgtgtcatgcttcagcgccacatcctgcggaccgcgctggcagaacgtggctcgaactgaac

SEQ ID NO: 623103 - DNA, 75 bp, synthetic construct
  source 1..75: mol_type = other DNA
ctatattcagctttccggtaccagtggtattccatttgctcatgatgaagtgggcgaggacagtgcggatcacta

SEQ ID NO: 623104 - DNA, 75 bp, synthetic construct
  source 1..75: mol_type = other DNA
aataatagcggcagaacggaaggcagccgcaagggcggaacgaaaggcgcgggatcatgaactctacaaggccgc

SEQ ID NO: 623105 - DNA, 75 bp, synthetic construct
  source 1..75: mol_type = other DNA
taccatctgggcggcaattgttccggcgctgttagcccgtgcatcgcgtaaacgctttggcagcccgaaattccg

SEQ ID NO: 623106 - DNA, 75 bp, synthetic construct
  source 1..75: mol_type = other DNA
taaaggcgtcaggacaagctattgtattcaatgcatctatggtatcaccgatagcctctggtaatgtacatccat

SEQ ID NO: 623107 - DNA, 75 bp, synthetic construct
  source 1..75: mol_type = other DNA
ctgatatcttaggtggagcatcgatagcagcttataggttccacagagcattattgaataataatatcaattcta

SEQ ID NO: 623108 - DNA, 75 bp, synthetic construct
  source 1..75: mol_type = other DNA
ccaccaggtttcacaataagccagtatggaaataagcctgctgcggttgatccttctaatatggtgattttaaga

SEQ ID NO: 623109 - DNA, 75 bp, synthetic construct
  source 1..75: mol_type = other DNA
ggggcttacgaagtgctcggggtgtttgaccgggtagaggagaagcgcgatgcaatgcagtcactggcgttacca

SEQ ID NO: 623110 - DNA, 75 bp, synthetic construct
  source 1..75: mol_type = other DNA
ctgagcgattacttcgccaaagcgcgagatctggctggaataattccaccagcaggaaaaacaccgccaacattt

SEQ ID NO: 623111 - DNA, 75 bp, synthetic construct
  source 1..75: mol_type = other DNA
aatttcagtaaagcgagggatttagcaggcattgactggggtgaaggttcgcccgccacattccatgaacaaaga

SEQ ID NO: 623112 - DNA, 75 bp, synthetic construct
  source 1..75: mol_type = other DNA
ggagtttacgcgatgtagtagcccgctgccgtgactatgcagtcagcccataccttgtacatttttttcgtacta

SEQ ID NO: 623113 - DNA, 75 bp, synthetic construct
  source 1..75: mol_type = other DNA
ggatttataccccggtatacgcaaatttggtgaaggtgttgtctttgtcggaaaggtgatgctggccgtcgcaaa

SEQ ID NO: 623114 - DNA, 75 bp, synthetic construct
  source 1..75: mol_type = other DNA
tgattatcacttcgaaattaatgcagctcccgggcaggatgaaaaagccattgccgatgaactgaccacggtcac

SEQ ID NO: 623115 - DNA, 75 bp, synthetic construct
  source 1..75: mol_type = other DNA
gctgctgaaattaaacgcgcgaaactggcaggtgaaagtctgggaaacttgaaacgccgttatagcgaagtttcc

SEQ ID NO: 623116 - DNA, 75 bp, synthetic construct
  source 1..75: mol_type = other DNA
gtgctatatcttacgaaaatcttaattgttcagtatttggaaattgttttttttgaggactgtattttcgagaat

SEQ ID NO: 623117 - DNA, 75 bp, synthetic construct
  source 1..75: mol_type = other DNA
gagcaatatttacggtgggtaattgagaaaaataatgactataataaggaaaattatggcgatataaaagacaaa

SEQ ID NO: 623118 - DNA, 75 bp, synthetic construct
  source 1..75: mol_type = other DNA
tgcatatctgtttatgcaatcatttgtatatgaatgtactcttctgaatggagtgtgtaaaaatgcaagtattat

SEQ ID NO: 623119 - DNA, 75 bp, synthetic construct
  source 1..75: mol_type = other DNA
gggtaattgagaaaaataatagctataataaagaaaattatactgctaaaaaacaaaaagaagccgaccttttta

SEQ ID NO: 623120 - DNA, 75 bp, synthetic construct
  source 1..75: mol_type = other DNA
atttcaaaaaggatggaggtaaacttaatctggataaacgaatttcagaccttatctacaataatattttcccta

SEQ ID NO: 623121 - DNA, 75 bp, synthetic construct
  source 1..75: mol_type = other DNA
tcaaaaatatactctgtaaatcaagattccgatgtgggtaagccggttggtgcatatctgtttatgcaatcattt

SEQ ID NO: 623122 - DNA, 75 bp, synthetic construct
  source 1..75: mol_type = other DNA
tttatggggaagggaaaaagcctgcttgccggaaccggtaaatttgcctggaatgccggtctggcgatggggggc

SEQ ID NO: 623123 - DNA, 75 bp, synthetic construct
  source 1..75: mol_type = other DNA
ttgcagtctcctcgttggtattcagttcggcgtcgtttgctgctgatcttgaagacaatatggaaaccctcaacg

SEQ ID NO: 623124 - DNA, 75 bp, synthetic construct
  source 1..75: mol_type = other DNA
aacaaggttaataatcttgtgattaagaacactgctgagaactgcatgacaggtatccataaaaataatgtatca

SEQ ID NO: 623125 - DNA, 75 bp, synthetic construct
  source 1..75: mol_type = other DNA
atgaaccagctaagatcagtctggttggtaatgatttatctgtagacataaaactcgaaaataacaaattatgtg

SEQ ID NO: 623126 - DNA, 75 bp, synthetic construct
  source 1..75: mol_type = other DNA
taaggtggatattgttgctcataaattaatatcaggcgacaaaataaaaattcataatgattttattgaagggca

SEQ ID NO: 623127 - DNA, 75 bp, synthetic construct
  source 1..75: mol_type = other DNA
atgacatcaaaaataaactggctgttgcaaaatacctctccgggaagcctggttttgcaatcctggctaacccgg

SEQ ID NO: 623128 - DNA, 75 bp, synthetic construct
  source 1..75: mol_type = other DNA
caaaatggtttaaagaatttcccgccgttgagtggttgatggtatcggccctgaagctccctgacctggatgaaa

SEQ ID NO: 623129 - DNA, 75 bp, synthetic construct
  source 1..75: mol_type = other DNA
gcgaagcagtacgacatgaatgcggaaaacattggcgatctctttgaagagtatctgcacaaatccggggagtat

SEQ ID NO: 623130 - DNA, 75 bp, synthetic construct
  source 1..75: mol_type = other DNA
cgtcctgacctgccgcaagaggttaaacactcctgggaatccacccggggactgtttggctttgattctgatgat

SEQ ID NO: 623131 - DNA, 75 bp, synthetic construct
  source 1..75: mol_type = other DNA
tggtggcttcagcacttggcacactgatagcgccagctgccaccaatgctgaaacggcaacccgcactaatgtcg

SEQ ID NO: 623132 - DNA, 75 bp, synthetic construct
  source 1..75: mol_type = other DNA
tactcgcaggtctgccatttacgacacttgcacaatccagtggatttgtatcttctgacgtacaaccaggggcag

SEQ ID NO: 623133 - DNA, 75 bp, synthetic construct
  source 1..75: mol_type = other DNA
actctgatgtggccggaaattatgaagagtttccagtgtttgggaaatatgattctttgagccgaaaagagcgat

SEQ ID NO: 623134 - DNA, 75 bp, synthetic construct
  source 1..75: mol_type = other DNA
aaaatgattgcattgatcattttatctatgctgccttatgaagtcattcgtaacgatgaatcactgagtgagttt

SEQ ID NO: 623135 - DNA, 75 bp, synthetic construct
  source 1..75: mol_type = other DNA
ggacatgaaaggagctatagctgaaaatggcatttcagatttcatggaaaatttaatggaagttaattcatgggt

SEQ ID NO: 623136 - DNA, 75 bp, synthetic construct
  source 1..75: mol_type = other DNA
gggttttgcacgatgtggcatccgctccagttatccctcacttcaccgttaagccttgatgtatatactgaaatc

SEQ ID NO: 623137 - DNA, 75 bp, synthetic construct
  source 1..75: mol_type = other DNA
gatgtggcaaactccaccctgagcgctaacgagccgtcaggtgatgtggttgctgatggtcagcaagcctatacg

SEQ ID NO: 623138 - DNA, 75 bp, synthetic construct
  source 1..75: mol_type = other DNA
acgccctgacgtatggcgggtacgaaatgaagccagtgacggtgaccattaccgcggtggatgccgatacggcaa

SEQ ID NO: 623139 - DNA, 75 bp, synthetic construct
  source 1..75: mol_type = other DNA
cttttagtttactgcgtaaactattttattgcccgttccggtgatgccagctggctgaatactgacggctggcgt

SEQ ID NO: 623140 - DNA, 75 bp, synthetic construct
  source 1..75: mol_type = other DNA
ttattggcggtattggcgttggtttagcctcaatgctttcaccaatgtatattgcggaactggctccagctcata

SEQ ID NO: 623141 - DNA, 75 bp, synthetic construct
  source 1..75: mol_type = other DNA
agatggcgaccaaagccgtgactcactacgccatatccatccgtctggcttgccggatcttcaaggtcagtgaaa

SEQ ID NO: 623142 - DNA, 75 bp, synthetic construct
  source 1..75: mol_type = other DNA
ctggtgctgaatgttgcaggtgacgcatctaaggctgagattcgtgatatgacagtgaaggttaataaccaactg

SEQ ID NO: 623143 - DNA, 75 bp, synthetic construct
  source 1..75: mol_type = other DNA
agacgggtgagcttctcgtcatgccgctattcaacggccagccagcagccaccgaagccgcgcagttgacggtca

SEQ ID NO: 623144 - DNA, 75 bp, synthetic construct
  source 1..75: mol_type = other DNA
cgcaagtgagtcagaccaacggtcaggtatcaacgaaaactgccgaatctaaattcgttgcggatgataaaaacg

SEQ ID NO: 623145 - DNA, 75 bp, synthetic construct
  source 1..75: mol_type = other DNA
tgatgtggttgctgatggtcagcaagcctatacgttgacgttgactgcggtggactccgagggtaatccggtgac

SEQ ID NO: 623146 - DNA, 75 bp, synthetic construct
  source 1..75: mol_type = other DNA
ggctccggaaggagtgacggagaaggattatcaattcctgccgtcgaaggctgaccatttctcaggtgggaaaat

SEQ ID NO: 623147 - DNA, 75 bp, synthetic construct
  source 1..75: mol_type = other DNA
ctggtggcggatgggaaatcgactgcgaagctggaggtgacactgatgtcggcaaataaccccgttggcgggaat

SEQ ID NO: 623148 - DNA, 75 bp, synthetic construct
  source 1..75: mol_type = other DNA
tctggtatcgctaaaacagtgttgctttaaaaagatgacattcacaggtaatatatcttacgaaaatcttaatgg

SEQ ID NO: 623149 - DNA, 75 bp, synthetic construct
  source 1..75: mol_type = other DNA
gctgtattcacactggatgagatccatctggttcagccccttaaggagaccttccggcgtaacgacagtttgtgc

SEQ ID NO: 623150 - DNA, 75 bp, synthetic construct
  source 1..75: mol_type = other DNA
agcaagattatgaagccgcgttgcgtgctgttgaacccatgttcgacaatgagcccgaaattgacacgcctgagg

SEQ ID NO: 623151 - DNA, 75 bp, synthetic construct
  source 1..75: mol_type = other DNA
atgttcgggtaatgaatcatattgttggtgcaggcacgttcaggctcatcgagtcaccatatatatcatctacct

SEQ ID NO: 623152 - DNA, 75 bp, synthetic construct
  source 1..75: mol_type = other DNA
atggaagagaaaatccttcctgcgctggaggcggttcccggcctcagtgcgttactgctgaagatgaatcttcag

SEQ ID NO: 623153 - DNA, 75 bp, synthetic construct
  source 1..75: mol_type = other DNA
cacgctgcggcgtgattttcgtgagcgactgatgtatctggacctggagtatcagtccggatactgccgcttacg

SEQ ID NO: 623154 - DNA, 75 bp, synthetic construct
  source 1..75: mol_type = other DNA
gtataaaccagatacgccgtgaccgaccactaacccatgaagagctgttgagtcatgtccccagcgtgttcggaa

SEQ ID NO: 623155 - DNA, 75 bp, synthetic construct
  source 1..75: mol_type = other DNA
tatgcgggggctgctgcaggtgttgtcggagggccttttggtttaataatttcctactcaatagctgctggggtt

SEQ ID NO: 623156 - DNA, 75 bp, synthetic construct
  source 1..75: mol_type = other DNA
agtggattattatcttgcaagatagcaaagcttaatggtgatggaatggatttcatagaaacttcgttttataga

SEQ ID NO: 623157 - DNA, 75 bp, synthetic construct
  source 1..75: mol_type = other DNA
tatctgtttatgcagtcatttgtatatgaaagcaatcttcaagatggagtgtgtaaagaagcaagtgttattgca

SEQ ID NO: 623158 - DNA, 75 bp, synthetic construct
  source 1..75: mol_type = other DNA
acactaaggaaggttttggagttacaaggtgtagctgcaaaatgtactgaagtagttaatgaaggaatgctagta

SEQ ID NO: 623159 - DNA, 75 bp, synthetic construct
  source 1..75: mol_type = other DNA
cactgaagcatcaaaaagtgctgccgctgcagagtcctcaaaaagcgcggcagctaccagtgccggtgcggcgaa

SEQ ID NO: 623160 - DNA, 75 bp, synthetic construct
  source 1..75: mol_type = other DNA
aataataagacaacattgtcagtacgatgtgatgaagaacaaaaaaacttgcccaacacaattataatgcattat

SEQ ID NO: 623161 - DNA, 75 bp, synthetic construct
  source 1..75: mol_type = other DNA
gcaacgaactggaaacgctttacgaactggcactgaaaatggggattgctgacgcgccatatcgtcgcggtgctt

SEQ ID NO: 623162 - DNA, 75 bp, synthetic construct
  source 1..75: mol_type = other DNA
tgcgcagtgccattcgtgaacttatcgacagcaagacgatttccggtgcagcgctggcgcgtgagaccggtacat

SEQ ID NO: 623163 - DNA, 75 bp, synthetic construct
  source 1..75: mol_type = other DNA
tataacggacagattgccaaattcgttaccgtgcaaggccattctatggctgtttatgatgcgtacggtgtgcag

SEQ ID NO: 623164 - DNA, 75 bp, synthetic construct
  source 1..75: mol_type = other DNA
ggtgctgaaagcttgcggtgcagtagattatttttgtcagaacggacatggactgatttctcgtaagcgagtcga

SEQ ID NO: 623165 - DNA, 75 bp, synthetic construct
  source 1..75: mol_type = other DNA
gcgcagcgtggattttgcccgcctgttctcccgcgtgtccaagaagtacgtcatcaataccgtttccgctggtga

SEQ ID NO: 623166 - DNA, 75 bp, synthetic construct
  source 1..75: mol_type = other DNA
gtggatgaagccgactggctgagtctggatgcggtggaagagctgcgtattctccaggaggaatgtggcgtgggg

SEQ ID NO: 623167 - DNA, 75 bp, synthetic construct
  source 1..75: mol_type = other DNA
tgaaaaactaaaatcaaaacaagctgcattcaatctgtaccttcaagagatacttgaagccaagaaaacatatac

SEQ ID NO: 623168 - DNA, 75 bp, synthetic construct
  source 1..75: mol_type = other DNA
cgtgcacagaatgaagatgtagatgagttgtgtaagaaagtgacaagttggatgtattcgcatcctggagagaga

SEQ ID NO: 623169 - DNA, 75 bp, synthetic construct
  source 1..75: mol_type = other DNA
cagcatatggcacaacgaagatctatactacagatactagagcaagatggctacatggtgggggatcatcgttgc

SEQ ID NO: 623170 - DNA, 75 bp, synthetic construct
  source 1..75: mol_type = other DNA
gttgccaatggcaaaatttatatcggaaaaattgacactgacccggtaaatcctgaaaaccagattcaggtttat

SEQ ID NO: 623171 - DNA, 75 bp, synthetic construct
  source 1..75: mol_type = other DNA
gtcgaagaagctattactaaaattcatacaatttacgattacggctgtaaacatgttatcgccacgcgcggacat

SEQ ID NO: 623172 - DNA, 75 bp, synthetic construct
  source 1..75: mol_type = other DNA
gccggtgtcgtcgccggtccatttggattaatcatttcctattctattgctgcgggcgtagttgaagggaaactg

SEQ ID NO: 623173 - DNA, 75 bp, synthetic construct
  source 1..75: mol_type = other DNA
cagatttaaccgcacaacaagcagtgatgttgagtaaagataaatcactgaaagttcgtgaagcattagcccgga

SEQ ID NO: 623174 - DNA, 75 bp, synthetic construct
  source 1..75: mol_type = other DNA
gcgcaatgctcgccatgagtggcattcaggcatacacccagtaccaacaggtaaggtatgcctcgaaggttgcag

SEQ ID NO: 623175 - DNA, 75 bp, synthetic construct
  source 1..75: mol_type = other DNA
agcgtgaagcgtatggctttcaggttcaggctgaaaactacaaagctcaggccaactcagcacgcaagcagggga

SEQ ID NO: 623176 - DNA, 75 bp, synthetic construct
  source 1..75: mol_type = other DNA
tacggctcagtttggtgcactggatgcgctgacaacggtcaataacgctcagcgtgaagcgtatggctatcaggt

SEQ ID NO: 623177 - DNA, 75 bp, synthetic construct
  source 1..75: mol_type = other DNA
gtaacaatgatcttagaaatggggatagttggtactgttctttttttattatatgtattttatacgttaaagtta

SEQ ID NO: 623178 - DNA, 75 bp, synthetic construct
  source 1..75: mol_type = other DNA
cgactgaataggtctggtgttcgtttgagtgaccaggaaatacgtaattgcatggctagattagcagggaatgaa

SEQ ID NO: 623179 - DNA, 75 bp, synthetic construct
  source 1..75: mol_type = other DNA
tcacattaggtgatgtcgcgcaaattcgaaaagggttgactgttattcagggtgacaattctatatttatgcttg

SEQ ID NO: 623180 - DNA, 75 bp, synthetic construct
  source 1..75: mol_type = other DNA
cgtgatttagtgaaaaccggggcaacgcggaaaattcgcagtgaagcgcgtcaccggcttgaggaaaaacaatga

SEQ ID NO: 623181 - DNA, 75 bp, synthetic construct
  source 1..75: mol_type = other DNA
ttttcgagataaagccgctcctgaaattaatgagaaattaaaatggattgaaacggggaaactcgataatttccc

SEQ ID NO: 623182 - DNA, 75 bp, synthetic construct
  source 1..75: mol_type = other DNA
gcgttgccggagatgcgtcaactgtctctggcaaaagaagatgtgcacaatttgcgcgaaggtgcgcgttatctg

SEQ ID NO: 623183 - DNA, 75 bp, synthetic construct
  source 1..75: mol_type = other DNA
tctggtgggggagtgcctgctctgcgctgcaaaccgaaggggatagtctgaacggcggcaaaagccaaaccacct

SEQ ID NO: 623184 - DNA, 75 bp, synthetic construct
  source 1..75: mol_type = other DNA
tttttaccttcagttttggctttattctggcgttagcactggctaaaaaaatatacgtttcgcaaaagtctggcg

SEQ ID NO: 623185 - DNA, 75 bp, synthetic construct
  source 1..75: mol_type = other DNA
cggtcgaactaatagagattttaaaaacctacgatcagttgccagaatacgaaagtggagacctggaaatcatcc

SEQ ID NO: 623186 - DNA, 75 bp, synthetic construct
  source 1..75: mol_type = other DNA
cgggactgtattacaaccgtcaccggtactacgatccgttgcaggggcggtatatcacccaggatccgatagggt

SEQ ID NO: 623187 - DNA, 75 bp, synthetic construct
  source 1..75: mol_type = other DNA
caaccttgctccttcgcctgaaagacaatatagatgactggttaaatgaagaattaagttaccttgattgcgaat

SEQ ID NO: 623188 - DNA, 75 bp, synthetic construct
  source 1..75: mol_type = other DNA
atgccaatccgtgatcgaatagagcggaatacgcaatcagagtgcctcttactcctcccacaagaacacgatgca

SEQ ID NO: 623189 - DNA, 75 bp, synthetic construct
  source 1..75: mol_type = other DNA
atgcataacgatcaacataattatgatttatgcctgcaagccataaatgagcgggtaaaatcagagtgcctctta

SEQ ID NO: 623190 - DNA, 75 bp, synthetic construct
  source 1..75: mol_type = other DNA
cccggtacaataattagccggtcgcctgataaaaagctatcacctccgggagatacaaaatgggttaatatcgaa

SEQ ID NO: 623191 - DNA, 75 bp, synthetic construct
  source 1..75: mol_type = other DNA
tggcgctgaaaaaagcggggctttctgccagcgatatcggcgtgtttgaaatgaacgaagcctttgccgcgcaga

SEQ ID NO: 623192 - DNA, 75 bp, synthetic construct
  source 1..75: mol_type = other DNA
tggttgtgacccatcgattatgggttacggcccggttccggcctcgaagctggcgctgaaaaaagcggggctttc

SEQ ID NO: 623193 - DNA, 75 bp, synthetic construct
  source 1..75: mol_type = other DNA
ttaagtgtcacttttttaattgaaaataatgagatatgtactcagacgttgaagctgtgcaagggcctcggtagc

SEQ ID NO: 623194 - DNA, 75 bp, synthetic construct
  source 1..75: mol_type = other DNA
actaccccggacgtttcaagagcgcccacgggcagaactttgcccgctggcagatggacggctggcgaaacaacg

SEQ ID NO: 623195 - DNA, 75 bp, synthetic construct
  source 1..75: mol_type = other DNA
acccggcatgctaaaggaatacgcctgacggaaacgggagagcgtctattacgccatgccaaaaaggtattaaac

SEQ ID NO: 623196 - DNA, 75 bp, synthetic construct
  source 1..75: mol_type = other DNA
aaggatagcgatacgccgcgatcagtgcatatcgaaaggtaacggcctgcgccgtggtgaatacgcagggatcgg

SEQ ID NO: 623197 - DNA, 75 bp, synthetic construct
  source 1..75: mol_type = other DNA
agagagaaaagtttatcaatagcctggaattattcaataaactcaaaacatgcgcaaaaaatccggatgagatgg

SEQ ID NO: 623198 - DNA, 75 bp, synthetic construct
  source 1..75: mol_type = other DNA
ttgttaccttggtaaaaaaacaatgaaagatggcattgaaaacctttacaagaaacctgggtggaatgcttacct

SEQ ID NO: 623199 - DNA, 75 bp, synthetic construct
  source 1..75: mol_type = other DNA
gcttttgatggttatgcttcacgaaatgggcaatttgattttattggtgggaatcagtttgattactatcctaaa

SEQ ID NO: 623200 - DNA, 75 bp, synthetic construct
  source 1..75: mol_type = other DNA
ttatttttactttgtaggtgtttatatatactgctattcattaaatgacaagaccccgcgggtatttgctattaa

SEQ ID NO: 623201 - DNA, 75 bp, synthetic construct
  source 1..75: mol_type = other DNA
gtgcatttacatggagtttgggatggagatactatgcatactcaaactcagctttcttcattgaggaaaaaaatt

SEQ ID NO: 623202 - DNA, 75 bp, synthetic construct
  source 1..75: mol_type = other DNA
ccacctgaaaataaaatgttaccactcaatataaccttacctaccggcgactttatcagccattcaccaagagat

SEQ ID NO: 623203 - DNA, 75 bp, synthetic construct
  source 1..75: mol_type = other DNA
agtttatatgttgagtcagttgataccctaactttcaaatatcaatcaataataaaaggtctcgatagattattt

SEQ ID NO: 623204 - DNA, 75 bp, synthetic construct
  source 1..75: mol_type = other DNA
aatccctggctaccggagttggttttaaccttaactcgttgggctcattatcctttgatgtcacgcgatctgatg

SEQ ID NO: 623205 - DNA, 75 bp, synthetic construct
  source 1..75: mol_type = other DNA
gttgtatgttgtttccacacaaggtgcaagatttaatttgtttcattataaatcaataagtgggaaaacaactga

SEQ ID NO: 623206 - DNA, 75 bp, synthetic construct
  source 1..75: mol_type = other DNA
tttagttttcaattgctgaagacatcgaatcatattcatattcatattcatattgttttgaggggtaattcatgg

SEQ ID NO: 623207 - DNA, 75 bp, synthetic construct
  source 1..75: mol_type = other DNA
cagggcatttatatggtactgactgggggctaggtttatttaaaccacaagggtgtgagtggtgtgatgatattg

SEQ ID NO: 623208 - DNA, 75 bp, synthetic construct
  source 1..75: mol_type = other DNA
ttctttctgggcaacctgttcaagatgaacagctctcttcagaagataaattcattgagggtgaagacacaaaaa

SEQ ID NO: 623209 - DNA, 75 bp, synthetic construct
  source 1..75: mol_type = other DNA
gaaacagacgctgcataacgaaacggcggctatccgtaaaatactgacgcaggccgggcgcgaaaaactggcgca

SEQ ID NO: 623210 - DNA, 75 bp, synthetic construct
  source 1..75: mol_type = other DNA
gctaaacaacaaaaagcggcgggcggacgtccggcaaaattcaaagtagaacagcttgagcaatggcttaaggaa

SEQ ID NO: 623211 - DNA, 75 bp, synthetic construct
  source 1..75: mol_type = other DNA
atctgctatttgccgccgccgaccgcgcgggctatgtcaacagtagcggcaaactgaaacgcaaggagttagctg

SEQ ID NO: 623212 - DNA, 75 bp, synthetic construct
  source 1..75: mol_type = other DNA
aggctcatgtattaaatgttgcagcaacaaaccgctggtgtaacagccccgaaatgctcccggattacagagcct

SEQ ID NO: 623213 - DNA, 75 bp, synthetic construct
  source 1..75: mol_type = other DNA
catcagctactgcaacggcagcggcaacaggcgcatcaatcgcatcatcaatggccccagcagcagcggcgacag

SEQ ID NO: 623214 - DNA, 75 bp, synthetic construct
  source 1..75: mol_type = other DNA
tgatgtcgatctggcattgaaagaaggcaagctgacaaaagcgcatcatgaggaaatcgtaaaattacgcgaaca

SEQ ID NO: 623215 - DNA, 75 bp, synthetic construct
  source 1..75: mol_type = other DNA
aaccttcagtggcagcaatggcaggcgcaaagcgatactaacgcgcttgtaggtaacatgattgatggcctcgct

SEQ ID NO: 623216 - DNA, 75 bp, synthetic construct
  source 1..75: mol_type = other DNA
aatttcaatatcaggctggtgggcttcgatacatggaacgccacgcacctgaggacgcagctacagggggcagga

SEQ ID NO: 623217 - DNA, 75 bp, synthetic construct
  source 1..75: mol_type = other DNA
tgctgttgcgtcatgacctgcgacggacactgattaaccggagggcgaagcaactcagcgccgtgcacaaacccc

SEQ ID NO: 623218 - DNA, 75 bp, synthetic construct
  source 1..75: mol_type = other DNA
gcaaggcattgcagcagacgattgagaatacagcgatgcgcttgatgcaaagagagtcaaccaggcccggcggaa

SEQ ID NO: 623219 - DNA, 75 bp, synthetic construct
  source 1..75: mol_type = other DNA
aatacattgatgcgctactccgctacagcaacgaggtgctaacagcagaagagcgtcaaacggcgttaaacgagg

SEQ ID NO: 623220 - DNA, 75 bp, synthetic construct
  source 1..75: mol_type = other DNA
atgaccaaaacgtctgccgcagtaaaatcaaatttctcatttgcaatcaaaaacgcatcctaccagatagcagac

SEQ ID NO: 623221 - DNA, 75 bp, synthetic construct
  source 1..75: mol_type = other DNA
gacaaggaagaggaagcagcacgcgaacagaaacgccttgccaaagaagcggaaaacgccgcaaaacaggcagca

SEQ ID NO: 623222 - DNA, 75 bp, synthetic construct
  source 1..75: mol_type = other DNA
gcagcagggcgcgctgaactggaaaaatacattgatgcgctacttcgatacagcaacgaggcattaacagcagaa

SEQ ID NO: 623223 - DNA, 75 bp, synthetic construct
  source 1..75: mol_type = other DNA
agaaagaacgagcagccaaacaggcagaaagcgcggcgaaacaggcggcgaaacaggcgcaacgcgaacttgaac

SEQ ID NO: 623224 - DNA, 75 bp, synthetic construct
  source 1..75: mol_type = other DNA
aaagagcaggctgtgcgggcgttaaaaacactccaggaagaaacgcgggaagcaggcagagccataactgaattt

SEQ ID NO: 623225 - DNA, 75 bp, synthetic construct
  source 1..75: mol_type = other DNA
gatccgtcaggaaaagacgtggcgtatcagcggaaaatgcttgatagaggtgtctggctggaattcgacatgatt

SEQ ID NO: 623226 - DNA, 75 bp, synthetic construct
  source 1..75: mol_type = other DNA
atataattaacaattgtgaggatgatagtgttaagagtaaagcgcaggcatatgtcgaactcttaaccgataatt

SEQ ID NO: 623227 - DNA, 75 bp, synthetic construct
  source 1..75: mol_type = other DNA
agctatacctctgcacgatgacggaacgagccctgatgcgatatttggcgtaatcacatacatcattaacgatgc

SEQ ID NO: 623228 - DNA, 75 bp, synthetic construct
  source 1..75: mol_type = other DNA
aaatattacaaacaccgtaaataaagggttgaatttcaatgctgatagtggctcagtggtaaatcgacaattagg

SEQ ID NO: 623229 - DNA, 75 bp, synthetic construct
  source 1..75: mol_type = other DNA
acttcggtaaaacagataacgatatcaaactgcaaaccgccgctcgtgacagctaccgctttaaattgatggcaa

SEQ ID NO: 623230 - DNA, 75 bp, synthetic construct
  source 1..75: mol_type = other DNA
agcgaccgctcgtattgggacgatcagttacaactgaacgttaacgcgccgctgtatcagggcggcgcagtttca

SEQ ID NO: 623231 - DNA, 75 bp, synthetic construct
  source 1..75: mol_type = other DNA
gcgtgagttacgctttcccgttcgacagggagatccgcctgctgacccgtcattatctgccggaagcccagctac

SEQ ID NO: 623232 - DNA, 75 bp, synthetic construct
  source 1..75: mol_type = other DNA
tgctggcgttcactgactgctcgggctaccagacccgctatgaatacgaccgcttcggccagatgacggcggttc

SEQ ID NO: 623233 - DNA, 75 bp, synthetic construct
  source 1..75: mol_type = other DNA
gccgccggtggagtggctgacctacggcagcggttatctggcgggcatgaagctgggcgggacgccgctggtcga

SEQ ID NO: 623234 - DNA, 75 bp, synthetic construct
  source 1..75: mol_type = other DNA
aatacctgttgttacgccatcaggggctgctcagttttacatcggcacataccgacgcctggcgtcagcagggct

SEQ ID NO: 623235 - DNA, 75 bp, synthetic construct
  source 1..75: mol_type = other DNA
agttagattgccttatgcaaaaatatagctatatatttaatgatgtgcatcatatatttgaaccagcaagggttc

SEQ ID NO: 623236 - DNA, 75 bp, synthetic construct
  source 1..75: mol_type = other DNA
atggattacggcgaggtggggggagccggcagtgaatacctggtgggacgtcatctggccggtggtgttgtgggg

SEQ ID NO: 623237 - DNA, 75 bp, synthetic construct
  source 1..75: mol_type = other DNA
tcgcgtatctggaaagccgtaactgtgcgctactggatatggatatgccaacgccagaacgtaaagaacgtctca

SEQ ID NO: 623238 - DNA, 75 bp, synthetic construct
  source 1..75: mol_type = other DNA
gttggtggtgatattggcagtattggtcgctacgttatcgttggtggttttcagctgagaaccgttaaccgcatc

SEQ ID NO: 623239 - DNA, 75 bp, synthetic construct
  source 1..75: mol_type = other DNA
atggttttcgttctcgcgggtctatgacgatatcgtaaaaatcaaagagtatagtgctaacaatgaaatttataa

SEQ ID NO: 623240 - DNA, 75 bp, synthetic construct
  source 1..75: mol_type = other DNA
tatctggcctgcgatagttccggctcacagccagcgaccattatcttcactgacgtgaacggccaacaggtcagg

SEQ ID NO: 623241 - DNA, 75 bp, synthetic construct
  source 1..75: mol_type = other DNA
ccatggaacttggattggatgaagttacaagatttactcctgaggcagttctatctgccttccaatatattttca

SEQ ID NO: 623242 - DNA, 75 bp, synthetic construct
  source 1..75: mol_type = other DNA
gcctttcgggatgggtttatttttgttgcagctttgcacatcgataaagcgttgcctaatcaactatatcctcct

SEQ ID NO: 623243 - DNA, 75 bp, synthetic construct
  source 1..75: mol_type = other DNA
tcgaaacgcagcagcataaagatgattccacgctgaagtatcttcatttgctgtctgagaaacttgtttttcgta

SEQ ID NO: 623244 - DNA, 75 bp, synthetic construct
  source 1..75: mol_type = other DNA
catatggtgacggaaagaaatattctgaccatatttgctatccatacctttttctcttatagcatggaaaaaaaa

SEQ ID NO: 623245 - DNA, 75 bp, synthetic construct
  source 1..75: mol_type = other DNA
tacgggaacaaggttttgataccaccgctattgaacaacaggagcaggagatctcccgttcattacgtcagcaag

SEQ ID NO: 623246 - DNA, 75 bp, synthetic construct
  source 1..75: mol_type = other DNA
gaagatattcttagcaagaaaggatgggaaataggtgagtgtgtttacttatctattaatgtttttgatgacccg

SEQ ID NO: 623247 - DNA, 75 bp, synthetic construct
  source 1..75: mol_type = other DNA
taagattgctggaggattcattagcattattgacggaatttgagaataatctattttctgggggggggggatttc

SEQ ID NO: 623248 - DNA, 75 bp, synthetic construct
  source 1..75: mol_type = other DNA
atatggacggtattttgttggagatcctgccgccatcaacgcgtcgtttgtactggcgtgtagaggatgatttgg

SEQ ID NO: 623249 - DNA, 75 bp, synthetic construct
  source 1..75: mol_type = other DNA
gccgctttcagcctgattgggtggaaagatattgcctggtggcagacatgtcggaaactgaagccggggcgttgt

SEQ ID NO: 623250 - DNA, 75 bp, synthetic construct
  source 1..75: mol_type = other DNA
agtccaggttcaaacggaggtgatgaatgcggtattgcagccacggcgcaaaggggcagttaaaggccgcgatgc

SEQ ID NO: 623251 - DNA, 75 bp, synthetic construct
  source 1..75: mol_type = other DNA
cgaagcactcgagaagcggatgcatgagcttgctgagaaaaactacgacgtcattaagaagaaagtcagctggca

SEQ ID NO: 623252 - DNA, 75 bp, synthetic construct
  source 1..75: mol_type = other DNA
acctactgttctttattatcatgcgtacacgattagccagcgaactatggccgttaatagcattattatgtctgg

SEQ ID NO: 623253 - DNA, 75 bp, synthetic construct
  source 1..75: mol_type = other DNA
ttaatgtcctagcctcttcggctccggccgcagccgcatctcagccatcccgtaaacgctctctcgatcagcgta

SEQ ID NO: 623254 - DNA, 75 bp, synthetic construct
  source 1..75: mol_type = other DNA
gccagccttgcaaccaaaggcaacgcgcgggcgctctctcgatcagcgcatgcaggaaagccatgatgtccgtct

SEQ ID NO: 623255 - DNA, 75 bp, synthetic construct
  source 1..75: mol_type = other DNA
aaagctctatcagacaagccgattttgcggcgattgttggagtttctcagggatttgtcagtggggttattacag

SEQ ID NO: 623256 - DNA, 75 bp, synthetic construct
  source 1..75: mol_type = other DNA
tgacacgcgtaatatctcgcttgtcatgacggaagcagataaagccttacgcgaagcgaaaagcgaggggggcaa

SEQ ID NO: 623257 - DNA, 75 bp, synthetic construct
  source 1..75: mol_type = other DNA
cctgaccggctttagtaacagatatgatgttcctgaacaaatgaccatcagtattggcacggttttttcaacggg

SEQ ID NO: 623258 - DNA, 75 bp, synthetic construct
  source 1..75: mol_type = other DNA
aaaataatgaaattctgacccgaagtgaactgaatgatagccttacaggcatactggttaactgtcctcttttgg

SEQ ID NO: 623259 - DNA, 75 bp, synthetic construct
  source 1..75: mol_type = other DNA
acagaaaaaaagcacgctggaagcatcaattatagactgcattaaggcgtattctggcattgttgacgatgatac

SEQ ID NO: 623260 - DNA, 75 bp, synthetic construct
  source 1..75: mol_type = other DNA
gaccaccgtaaaatcggtaaacagctcgacctgtaccatatgcaggaagaagcgccgggtatggtattctggcac

SEQ ID NO: 623261 - DNA, 75 bp, synthetic construct
  source 1..75: mol_type = other DNA
accgaatctgacaacctggcgatcaaaggtgcagccaacttttatcagaaaaaaggcaagcacatcatcaccagc

SEQ ID NO: 623262 - DNA, 75 bp, synthetic construct
  source 1..75: mol_type = other DNA
taaacgaggaatgtttacagagtatcagcgcattaaaaaacatcgttttcaacttcaatgataaaaccattatct

SEQ ID NO: 623263 - DNA, 75 bp, synthetic construct
  source 1..75: mol_type = other DNA
ggaaggcatttatcctgagtctgtttacgggcttcttgataaagttgacactatcctgggtaagatactcaacat

SEQ ID NO: 623264 - DNA, 75 bp, synthetic construct
  source 1..75: mol_type = other DNA
cacagtcaggtaagacgacagttgagaataatttccttggaacaacatcttcagacaagctcgacaaagccgttg

SEQ ID NO: 623265 - DNA, 75 bp, synthetic construct
  source 1..75: mol_type = other DNA
tgatactgcttctgtggagtcagttatagaagatgtggtaaaatttaatccacaggcagtgataatcattaaatc

SEQ ID NO: 623266 - DNA, 75 bp, synthetic construct
  source 1..75: mol_type = other DNA
tcgcgtcagctaccgaaaacagtgggcgcgctggcgggtgatgattctgccgatattgctgattctggttgcgct

SEQ ID NO: 623267 - DNA, 75 bp, synthetic construct
  source 1..75: mol_type = other DNA
tggatctcactgccatgcttcgtcagaccaccacagcgaatccgatcaccactggacaattccaggccaaagtga

SEQ ID NO: 623268 - DNA, 75 bp, synthetic construct
  source 1..75: mol_type = other DNA
agcggtgactcggcgtcagaaaactactttctggatatacccgcaatgggggtttctgatatcaccaataaaacg

SEQ ID NO: 623269 - DNA, 75 bp, synthetic construct
  source 1..75: mol_type = other DNA
atgatattagtagtgatttagtccgtcgaaaaatgaatgacattcctgaaagcccaacaggaaataacctcgaag

SEQ ID NO: 623270 - DNA, 75 bp, synthetic construct
  source 1..75: mol_type = other DNA
ggtcatgttccgcgcacagctcaatgagcagaatttaccgctttcgctaaccgtagtcgggatcgcgccggaaga

SEQ ID NO: 623271 - DNA, 75 bp, synthetic construct
  source 1..75: mol_type = other DNA
cgcgctgggcaactgagcggtaattctggagtttgctctggctccggcggcggaggtgcatacgataatagctat

SEQ ID NO: 623272 - DNA, 75 bp, synthetic construct
  source 1..75: mol_type = other DNA
aacaacctaagccatttggagttaatggacagagaggggcaatattgccaaccacccctgcaggtgataactcag

SEQ ID NO: 623273 - DNA, 75 bp, synthetic construct
  source 1..75: mol_type = other DNA
attgcaccggaaaagctatcagcatgggctggcgcagacgctgaacgcctgaccgttacagctctgcccgccatt

SEQ ID NO: 623274 - DNA, 75 bp, synthetic construct
  source 1..75: mol_type = other DNA
ggatgtccattccttgtggctatatggctggcgatgcgcaacgggttatctgccgcatcaatgagtgccggggat

SEQ ID NO: 623275 - DNA, 75 bp, synthetic construct
  source 1..75: mol_type = other DNA
ctgtcctctaccagcgatatcaccagcgtgagctacgctttcccgttcgacagggagatcaggctcctgacccgt

SEQ ID NO: 623276 - DNA, 75 bp, synthetic construct
  source 1..75: mol_type = other DNA
cacctacgtccgtttactttccgttaaaaacgctgacgcccgcagctttatgaaaaagagacgctccgctgtggc

SEQ ID NO: 623277 - DNA, 75 bp, synthetic construct
  source 1..75: mol_type = other DNA
gactcgttatcaattttatgaaacgcaccaatggtgaaccgttgctgattgtttttcctgaatatgataatggag

SEQ ID NO: 623278 - DNA, 75 bp, synthetic construct
  source 1..75: mol_type = other DNA
agatttcaaaccacttccgacggaaatccgctcgcttttcccaagtgaatttgaagaaacggagttaggttgggt

SEQ ID NO: 623279 - DNA, 75 bp, synthetic construct
  source 1..75: mol_type = other DNA
ttactttcactatgccaaacaaccatctaattatggacttgtttattaaaaactgtctttcgccaaattataata

SEQ ID NO: 623280 - DNA, 75 bp, synthetic construct
  source 1..75: mol_type = other DNA
tggtttgcattgggcaaattatcgccccggcaaaagatgacgttgaatttcgacatcgcataatgaatccgctca

SEQ ID NO: 623281 - DNA, 75 bp, synthetic construct
  source 1..75: mol_type = other DNA
aatacggcaatgtgataaacgaaatagtgactgttggtttgggatataaaacagccttacgcaaggcgttatata

SEQ ID NO: 623282 - DNA, 75 bp, synthetic construct
  source 1..75: mol_type = other DNA
atccatatcccgccggccactggttttattctttacaggatttacttgctccactactggaaaatcctcttttct

SEQ ID NO: 623283 - DNA, 75 bp, synthetic construct
  source 1..75: mol_type = other DNA
aaacgttaaatcagagttacttcttcagatggcggacaataacgaagtaacgagcagcattcttgcagaccctta

SEQ ID NO: 623284 - DNA, 75 bp, synthetic construct
  source 1..75: mol_type = other DNA
tccgaattgcacgaaacttctcccatccttatcaggccgcgaaccttaagttgttctggcgaaactggcatatga

SEQ ID NO: 623285 - DNA, 75 bp, synthetic construct
  source 1..75: mol_type = other DNA
ggcgcgtgggatgcctgtgcactcgactataacgaagaagagctggtcggaatggagtgttatgccgggtttgac

SEQ ID NO: 623286 - DNA, 75 bp, synthetic construct
  source 1..75: mol_type = other DNA
ccgtcctaaaaaaaatattaattctaattatattctatcagtattaatggatcaaaaattcatcgaacatactgt

SEQ ID NO: 623287 - DNA, 75 bp, synthetic construct
  source 1..75: mol_type = other DNA
aattatattctatcagtattaatggatcaaaaattcatcgaatatactgttttaacatccaaaggcaccaaaatg

SEQ ID NO: 623288 - DNA, 75 bp, synthetic construct
  source 1..75: mol_type = other DNA
aaacaggtgaaaatgttctgtttgcagcccttcatcgtattgatagttatttgatacatacccttctgttttcct

SEQ ID NO: 623289 - DNA, 75 bp, synthetic construct
  source 1..75: mol_type = other DNA
atgaatatcgtaaaattctcatcgccggaggcatgaaaccggaagatgcagaaaaaatcgtttcttttatggata

SEQ ID NO: 623290 - DNA, 75 bp, synthetic construct
  source 1..75: mol_type = other DNA
caaattgggtaatttttaatgaccagggacgagcaaatcttaccatcgactttatgtataacaaaaaaaataaaa

SEQ ID NO: 623291 - DNA, 75 bp, synthetic construct
  source 1..75: mol_type = other DNA
taacccttgtctgaacattaaaataggaaccgagattttatataaccatttttcacgttgtggagtaacgtggca

SEQ ID NO: 623292 - DNA, 75 bp, synthetic construct
  source 1..75: mol_type = other DNA
attactggccaaagggaaataccgctgactgataatgacgggagcatcattgttgatgaggatgataatccagtg

SEQ ID NO: 623293 - DNA, 75 bp, synthetic construct
  source 1..75: mol_type = other DNA
cggcacagatggcggagcggtgcatttaactggcaccggcatacccacggtggtgatggggccagcgacgcgcca

SEQ ID NO: 623294 - DNA, 75 bp, synthetic construct
  source 1..75: mol_type = other DNA
caaagaaagttaataagtttgagattatggatcaagttgatgatgatagacttgtacaacttattcctgattttt

SEQ ID NO: 623295 - DNA, 75 bp, synthetic construct
  source 1..75: mol_type = other DNA
aactatgacacagcccatttaacatcaaagaaagttaataagtttgagattatggatcaagtcgatgatgataga

SEQ ID NO: 623296 - DNA, 75 bp, synthetic construct
  source 1..75: mol_type = other DNA
ccagaacagagaaaaagtattaaatattattaatcatctactaggtaaagagcagatcatcgaattgcaagagta

SEQ ID NO: 623297 - DNA, 75 bp, synthetic construct
  source 1..75: mol_type = other DNA
cgattaatacagcttaataatcagttcttgtctaatggtaactatattagcaacggtattgagttcgataagtac

SEQ ID NO: 623298 - DNA, 75 bp, synthetic construct
  source 1..75: mol_type = other DNA
aatgaaatgctaaaaattgaaaatgatgatttaggtttatcattttcaaaccgcgatgatatatatgatggtgtg

SEQ ID NO: 623299 - DNA, 75 bp, synthetic construct
  source 1..75: mol_type = other DNA
cgttctgcgacgcgctttcttccacgtcctttgctcgtatcgcttaaggagtttaacgatgccaaaatccgtaat

SEQ ID NO: 623300 - DNA, 75 bp, synthetic construct
  source 1..75: mol_type = other DNA
atggaaattatgttttaatatccatactcatgaataaaatagaagtttcctctgtggagaatcacatcttctctt

SEQ ID NO: 623301 - DNA, 75 bp, synthetic construct
  source 1..75: mol_type = other DNA
cggtttggatataataaataaagtaaatgcttatagattagcaaatgatatattgcaagaaagtatagttaaact

SEQ ID NO: 623302 - DNA, 75 bp, synthetic construct
  source 1..75: mol_type = other DNA
ctggtgcagggcaacggcgccgacagcgtgaaactgcaaatgaacctcaaccttgaacgcgcgtcaggctcgcag

SEQ ID NO: 623303 - DNA, 75 bp, synthetic construct
  source 1..75: mol_type = other DNA
accgcaaaaaaccgctggcagagaacactctgaagcggatcgcacgcggcatacagcgctttgttatcgaaagtg

SEQ ID NO: 623304 - DNA, 75 bp, synthetic construct
  source 1..75: mol_type = other DNA
accctaccttgtcctggcaaccattggcttactattctgcatgcccggaaacgcttaaggatatgagcgacctat

SEQ ID NO: 623305 - DNA, 75 bp, synthetic construct
  source 1..75: mol_type = other DNA
ggcgttatcaccgaatactccacgcgtgaaatcgacggttcactgattgctacgggcgataaaaaattggcggcc

SEQ ID NO: 623306 - DNA, 75 bp, synthetic construct
  source 1..75: mol_type = other DNA
atcagccgtggcaacgccacaataatcttcagcgtggcggctggcgcggcgctggacgaacatttcacccttccg

SEQ ID NO: 623307 - DNA, 75 bp, synthetic construct
  source 1..75: mol_type = other DNA
ttgcaatatctgagtagtgagaatgcagtctataagcagcatgataaagatggatggttttgtgagcagggagaa

SEQ ID NO: 623308 - DNA, 75 bp, synthetic construct
  source 1..75: mol_type = other DNA
ggcatgcgcttggcgtagttgaggccgccctgacaccgttcctggctggcaatggcggcagtgagtaccaggcaa

SEQ ID NO: 623309 - DNA, 75 bp, synthetic construct
  source 1..75: mol_type = other DNA
tcatacaaatttccctaaaataaaccataattcatcaggaataaaaacggaattgaagtcagaaaaatacgaaca

SEQ ID NO: 623310 - DNA, 75 bp, synthetic construct
  source 1..75: mol_type = other DNA
ccagaccgcgcttgagaaaacccgcgaagcggagcgcgcaggcattctgccgccggtcgagggcctggagtacca

SEQ ID NO: 623311 - DNA, 75 bp, synthetic construct
  source 1..75: mol_type = other DNA
tcgtcagcctgcgtccgtccacctctgaagagcgcgagcacctgctggccgacgccaccttctcctgggacgtgc

SEQ ID NO: 623312 - DNA, 75 bp, synthetic construct
  source 1..75: mol_type = other DNA
gcgctacggcaacgcggctactgacggagaacggcaaagcctaccaactgactcgcggcggaaccaccacccgcg

SEQ ID NO: 623313 - DNA, 75 bp, synthetic construct
  source 1..75: mol_type = other DNA
cgtggtggactttgcgaactttgattcgtgctggcccgcagaccaacttaaggccaaaggtcttgtcgccagtat

SEQ ID NO: 623314 - DNA, 75 bp, synthetic construct
  source 1..75: mol_type = other DNA
attctttctttttatctcttttttatttattttattttcttttttttctttgtcttttcagttctttttttcatt

SEQ ID NO: 623315 - DNA, 75 bp, synthetic construct
  source 1..75: mol_type = other DNA
cgagttgcgttttgctcgctggtcagaagttgattttgatactgccatgtggacgattccgggagaacgtgagcc

SEQ ID NO: 623316 - DNA, 75 bp, synthetic construct
  source 1..75: mol_type = other DNA
tgcctataaagggaaaggtatcactcaaatagcagttcaattaactctactgactttcatccgttcaagtgaact

SEQ ID NO: 623317 - DNA, 75 bp, synthetic construct
  source 1..75: mol_type = other DNA
cagcaaagcacgaaaatttcaacacattgctcttggatggcacaccagttgtttaaatctttggtcagatgtata

SEQ ID NO: 623318 - DNA, 75 bp, synthetic construct
  source 1..75: mol_type = other DNA
aaagcggtggaatcatccgggcgactcgaagtcgccgcccgtttacagcagcgaactactgcgattatgcgcttt

SEQ ID NO: 623319 - DNA, 75 bp, synthetic construct
  source 1..75: mol_type = other DNA
ccgggatgaagctcgtaagctgttagctaatggcgtcgatcccagtgagaacaagaaagccgttaaggtagagca

SEQ ID NO: 623320 - DNA, 75 bp, synthetic construct
  source 1..75: mol_type = other DNA
atcttgtacccttatctcgacaagctctcaccattctggaaaaaatcaaaagcatgagtggaaaccgtgagctga

SEQ ID NO: 623321 - DNA, 75 bp, synthetic construct
  source 1..75: mol_type = other DNA
atggagccaatcagcttgaatatcaaacgtaataacccacaaccgcgtcttgccgccagtgtggaatatggcaat

SEQ ID NO: 623322 - DNA, 75 bp, synthetic construct
  source 1..75: mol_type = other DNA
agaaggacatagcccggctcgcgctgccgtgcaggctgagatggcccgcccggagattctggttgaagtgatgat

SEQ ID NO: 623323 - DNA, 75 bp, synthetic construct
  source 1..75: mol_type = other DNA
agaaggatatagcccagcccgtgctgccgtacaagctgagatggctcgcccggagattctggttgaagtgatggt

SEQ ID NO: 623324 - DNA, 75 bp, synthetic construct
  source 1..75: mol_type = other DNA
gagcaactataaaaaaggccgggaactaacccggctggcgctggagttaaatctgcatgtatttctgcgctccag

SEQ ID NO: 623325 - DNA, 75 bp, synthetic construct
  source 1..75: mol_type = other DNA
aatgatggtggtggtcgatactgtttctattctgttgcgataaccaaagaatacgcagaagaaatgattaagaat

SEQ ID NO: 623326 - DNA, 75 bp, synthetic construct
  source 1..75: mol_type = other DNA
tgcttggtaaagttaatgaagtaaaatataaagaaccagcaaggatgcagccacctgtgtttcctttaggaatga

SEQ ID NO: 623327 - DNA, 75 bp, synthetic construct
  source 1..75: mol_type = other DNA
cccgaaaagcaacagcctgttaaagccgctggcagcaaaagcggcaaccatcgagggtacaaaccccagcctttc

SEQ ID NO: 623328 - DNA, 75 bp, synthetic construct
  source 1..75: mol_type = other DNA
atgtccctgaaatctggccgacagaggccaaactccgtggctccggtctggcgaatgcggtagggcgaatcagtg

SEQ ID NO: 623329 - DNA, 75 bp, synthetic construct
  source 1..75: mol_type = other DNA
cgaccctccttataatactggaagtgcttttacacattacgatgatggacttgaacactctctatggctttgctt

SEQ ID NO: 623330 - DNA, 75 bp, synthetic construct
  source 1..75: mol_type = other DNA
gccttaaaggcaatggataccctgaacctgctgggaaaagaaggtgcctatgaactgaaagacatcgcagaaaaa

SEQ ID NO: 623331 - DNA, 75 bp, synthetic construct
  source 1..75: mol_type = other DNA
atgatctggcagcctgagttcacagataaaacactctccaggaaacccggggcggttcaagtccctgatttacag

SEQ ID NO: 623332 - DNA, 75 bp, synthetic construct
  source 1..75: mol_type = other DNA
aagaccggcacacgtcccgaagccagaactatacgtacatccccaccatcaccgtactggaaagcctgcagcggg

SEQ ID NO: 623333 - DNA, 75 bp, synthetic construct
  source 1..75: mol_type = other DNA
acgggagtctttattcttctgggggctgtttcaattgttgtcgcaattgctatcgccaccattggaattgaaacc

SEQ ID NO: 623334 - DNA, 75 bp, synthetic construct
  source 1..75: mol_type = other DNA
atgaaaattacaaagataacagaattgaataaagaagcacctcagcttttaaaaaactcaggggaggataagcaa

SEQ ID NO: 623335 - DNA, 75 bp, synthetic construct
  source 1..75: mol_type = other DNA
atcaccgtgctggaaagcctgcagcgggaaggttttcagccattcttcgcctgccagacccgtgtgcgcgaccca

SEQ ID NO: 623336 - DNA, 75 bp, synthetic construct
  source 1..75: mol_type = other DNA
ggcacattccaggcagagcatgaagattttgcttttgatataagcgacagccaccgcgaaaaactggaagaattt

SEQ ID NO: 623337 - DNA, 75 bp, synthetic construct
  source 1..75: mol_type = other DNA
tcaaatttaaggttgatgacagtgaactgataagcgcagtggaaaaagtcggcaccgtgacgggcgagattgagt

SEQ ID NO: 623338 - DNA, 75 bp, synthetic construct
  source 1..75: mol_type = other DNA
tgcagggggaaatccgcgtggtggtggaaggtgacgcccgcgtgaaaagtgtcagagtggatcaacccggcgtca

SEQ ID NO: 623339 - DNA, 75 bp, synthetic construct
  source 1..75: mol_type = other DNA
aaatattagtactcaagatgcttatatatattgcactactttcccatgccacaactgcgctaagcatattatagc

SEQ ID NO: 623340 - DNA, 75 bp, synthetic construct
  source 1..75: mol_type = other DNA
gcactaggacgtttatctagggaggaacacgttctaaatgaaatattaaaaagtaaaaatttattcaatgaagcg

SEQ ID NO: 623341 - DNA, 75 bp, synthetic construct
  source 1..75: mol_type = other DNA
gcaattctttcgcctggtgcatttgaagttcactctgacggagtagatgtggataacgaattgtttcactatact

SEQ ID NO: 623342 - DNA, 75 bp, synthetic construct
  source 1..75: mol_type = other DNA
ataaactaacaagtttacataataccttatttcccaacttgaatacgttacttatcaacaacaacttgctttctg

SEQ ID NO: 623343 - DNA, 75 bp, synthetic construct
  source 1..75: mol_type = other DNA
gggctgggttatgacgtcaaagtcggaaataacgttaccttcaccgttggtaaaacgaaaaaggatgataccggg

SEQ ID NO: 623344 - DNA, 75 bp, synthetic construct
  source 1..75: mol_type = other DNA
caaagtcatcgggcattatctgaacataaaacactatcagtaagttggagtcattacccacaaatgcagtactgg

SEQ ID NO: 623345 - DNA, 75 bp, synthetic construct
  source 1..75: mol_type = other DNA
cataatcaactagagtttgtgcaattagaatcttgcgaatggctgcaatacctgaatctcagccataatcaatta

SEQ ID NO: 623346 - DNA, 75 bp, synthetic construct
  source 1..75: mol_type = other DNA
ataattggatttgcccctatatttccagatacctgttatcacttaacccattactggcctgctgccgcagatatt

SEQ ID NO: 623347 - DNA, 75 bp, synthetic construct
  source 1..75: mol_type = other DNA
cgctatgttctgcaactgggaggcgatgtcgcgcagtggagccaaaacggcagcgacagctggcatgttggggtc

SEQ ID NO: 623348 - DNA, 75 bp, synthetic construct
  source 1..75: mol_type = other DNA
cagaaggtgtatgacgctgcggtgtcgtttgccttcaacgtgggaacgggcaatgcctgcagttccacgctggtg

SEQ ID NO: 623349 - DNA, 75 bp, synthetic construct
  source 1..75: mol_type = other DNA
cggcaatacgtccggtgtggtgccggggaaagctatcacggaacggcaggcggcgcaggggttaataaacaatgt

SEQ ID NO: 623350 - DNA, 75 bp, synthetic construct
  source 1..75: mol_type = other DNA
accataaaatggacgacggtaaatctcgcgaattccagccatttgctgaagtgaactggttgcataatagtaagg

SEQ ID NO: 623351 - DNA, 75 bp, synthetic construct
  source 1..75: mol_type = other DNA
cgagtgtgaacggatacagcacgggtctgtatgccacctggtatgccaatgacgagtcgcgtaatggagcgtatc

SEQ ID NO: 623352 - DNA, 75 bp, synthetic construct
  source 1..75: mol_type = other DNA
ggaacaggtcccgtagctgttggtgtgtctgttctgaactgggaggcagaataaaaggaaagaaggcaaaggcag

SEQ ID NO: 623353 - DNA, 75 bp, synthetic construct
  source 1..75: mol_type = other DNA
ctcaacggcgatccggaccagccgattattatggggcgtacctaccaccaggaaaaccgcacacccggcagcctg

SEQ ID NO: 623354 - DNA, 75 bp, synthetic construct
  source 1..75: mol_type = other DNA
tcaatactcggtactgcactgatcatcttcgtcacctggtttttggtggaagtcggggtcgccgtcaacgcctag

SEQ ID NO: 623355 - DNA, 75 bp, synthetic construct
  source 1..75: mol_type = other DNA
atgtttaagtcttttttcccaaagccgggaacgttttttctctcggcctttgtttgggcattgattgccgttatc

SEQ ID NO: 623356 - DNA, 75 bp, synthetic construct
  source 1..75: mol_type = other DNA
ttatctgaaataaatttaacaaaaataggaatatcaattgttttatctgagctgttttatctaatctatgtcatt

SEQ ID NO: 623357 - DNA, 75 bp, synthetic construct
  source 1..75: mol_type = other DNA
tgggtagatgcaaaacaaaaagaaacgtttacaaatatatttatcaaggaagttgaaagaattattggggtaata

SEQ ID NO: 623358 - DNA, 75 bp, synthetic construct
  source 1..75: mol_type = other DNA
acaggaggaaataattatgtttatttccatcgcccaatcaatgcggatgatgacataataagttgtgatttattt

SEQ ID NO: 623359 - DNA, 75 bp, synthetic construct
  source 1..75: mol_type = other DNA
cttcgttaaacacaaagtggatcacgatgaaaccgcagcattcatcgctcgcctcagcgactggttaaacgctgg

SEQ ID NO: 623360 - DNA, 75 bp, synthetic construct
  source 1..75: mol_type = other DNA
ctatggttacaccatcgaagttatgatccatgatggtccgtacaacaacatcaagaactgggattatgccggtct

SEQ ID NO: 623361 - DNA, 75 bp, synthetic construct
  source 1..75: mol_type = other DNA
tccgggtcaccattggcgaatacggtgcaacggggtttattaatggcacggtctgtacctgtacggtttacggcg

SEQ ID NO: 623362 - DNA, 75 bp, synthetic construct
  source 1..75: mol_type = other DNA
ttcggtggctctgatgcagtcctcgcagatcggtttgcataaatcgttgagggtcgggctgggttatgacgtcaa

SEQ ID NO: 623363 - DNA, 75 bp, synthetic construct
  source 1..75: mol_type = other DNA
atatctatctgttattagtattggatttatttatccaatattgcatataagtgatttttttaacataccacctgg

SEQ ID NO: 623364 - DNA, 75 bp, synthetic construct
  source 1..75: mol_type = other DNA
ccgaacgaactaaaacctatgtcagagcagataatgctaccacttttcggcagggaacatcaggcaccgaaattc

SEQ ID NO: 623365 - DNA, 75 bp, synthetic construct
  source 1..75: mol_type = other DNA
gcctgaaggctaaaaccggtggcgaactggcagaagctatcaaggttgctctggcaaacaccgacggcccaaccc

SEQ ID NO: 623366 - DNA, 75 bp, synthetic construct
  source 1..75: mol_type = other DNA
gttagatcgtctggaagcactgactggttatctttatgagatacagtactctgccgacggctggcaaatgtcggt

SEQ ID NO: 623367 - DNA, 75 bp, synthetic construct
  source 1..75: mol_type = other DNA
gtgatgcaggcccagccggaccccggggtcaaaaaggtgatacaggacctgcaggtccgcagggaccagctggcc

SEQ ID NO: 623368 - DNA, 75 bp, synthetic construct
  source 1..75: mol_type = other DNA
tgacaggggcgagcaaggatcggcaggtcccacaggtccgaaaggtgagcagggcctccgtgggcctgcgggagc

SEQ ID NO: 623369 - DNA, 75 bp, synthetic construct
  source 1..75: mol_type = other DNA
aggggcgttcagggaccgaaaggtgatcccggcccccagggaccaaagggggatactggcgctgctggggcaaag

SEQ ID NO: 623370 - DNA, 75 bp, synthetic construct
  source 1..75: mol_type = other DNA
aagcgtgatgccatgcagtcgctggtcctgccgccaccggcacgccaggcgctggcacaggcggcactgacttac

SEQ ID NO: 623371 - DNA, 75 bp, synthetic construct
  source 1..75: mol_type = other DNA
tggtgacgaacatcagcctgtcaccaccgctgacattctgaccccacgacgccgggaggattacggtgaggacct

SEQ ID NO: 623372 - DNA, 75 bp, synthetic construct
  source 1..75: mol_type = other DNA
agggaccgaaaggggatacgggagccgcaggcccggcaggcgcacaggggccaaaaggggacaaaggcgatccgg

SEQ ID NO: 623373 - DNA, 75 bp, synthetic construct
  source 1..75: mol_type = other DNA
ccatacttttgcggcgcacttcatgatgtcgggtggaaacatcctggccttacaaaaaattctcggacaccacga

SEQ ID NO: 623374 - DNA, 75 bp, synthetic construct
  source 1..75: mol_type = other DNA
ctttacgaagagatcatggcgtttgatgggttcaatttcttcacagactgctattttcaatttttatccgtgatg

SEQ ID NO: 623375 - DNA, 75 bp, synthetic construct
  source 1..75: mol_type = other DNA
gaagacgcagacgttatatctggtgaaaaacgtctgcgtcttaactacaacggcataattgcattgttagtcgag

SEQ ID NO: 623376 - DNA, 75 bp, synthetic construct
  source 1..75: mol_type = other DNA
tcaggcacaaacttttaatggtggtattaatggcaatttgacggtgaccggaaacggctcatttaacgatgttca

SEQ ID NO: 623377 - DNA, 75 bp, synthetic construct
  source 1..75: mol_type = other DNA
tcagatccgttcggataaacgcaacaagcgaaatgcaatacgaatagataattgtctggagaagcttgacttgct

SEQ ID NO: 623378 - DNA, 75 bp, synthetic construct
  source 1..75: mol_type = other DNA
gggttacttcaggttcgtctgccagaacgggtgcgtctgtggccagtctctgggggaagtgcgtgttccacaccg

SEQ ID NO: 623379 - DNA, 75 bp, synthetic construct
  source 1..75: mol_type = other DNA
cccaaaagagtgttaataatcaaggctggttgtcattgttacctgttactatttatgatgaatccccatccaatt

SEQ ID NO: 623380 - DNA, 75 bp, synthetic construct
  source 1..75: mol_type = other DNA
gcaagccattgccgaagccggatttaccgccactgtaagggtatgtgaggctcatccgctgctcctcgcactgga

SEQ ID NO: 623381 - DNA, 75 bp, synthetic construct
  source 1..75: mol_type = other DNA
taaatcagtatggatagttctgagggccatcaaaaatattgaagaagttgggaggtatggtttcctcggatataa

SEQ ID NO: 623382 - DNA, 75 bp, synthetic construct
  source 1..75: mol_type = other DNA
ggaactagattaaaattacattgcgggtctgatactcaggttttggatagtctgaattttgctgagtctgcttct

SEQ ID NO: 623383 - DNA, 75 bp, synthetic construct
  source 1..75: mol_type = other DNA
ggggtataagaataagttagatgatatgagaatgcttttgaatgagtttattcaacatgataacgacttcttatg

SEQ ID NO: 623384 - DNA, 75 bp, synthetic construct
  source 1..75: mol_type = other DNA
cgggagccgcaggcccggcaggcgcacaggggccaaaaggtgacaaaggcgatccgggggtggctggaccagcag

SEQ ID NO: 623385 - DNA, 75 bp, synthetic construct
  source 1..75: mol_type = other DNA
gccgcagggaccgaaaggagatgccggtgcgacaggtccggcaggtccgaaaggtgaacgaggcgaagctgggcc

SEQ ID NO: 623386 - DNA, 75 bp, synthetic construct
  source 1..75: mol_type = other DNA
gttatttgtatgaaatacagaatgctgatggcagttggcaacaatctgtgggattatttgcacaggatgcgttaa

SEQ ID NO: 623387 - DNA, 75 bp, synthetic construct
  source 1..75: mol_type = other DNA
atgcgtgatctgatccttcaactcagcaaaagttcgatttattcaacaaagccattgcaaagtgatctcttttac

SEQ ID NO: 623388 - DNA, 75 bp, synthetic construct
  source 1..75: mol_type = other DNA
tactggtgttttttatatgaaaaagtcaaaagaaattgcagttgttaatattgatgctatttataatcagtctgc

SEQ ID NO: 623389 - DNA, 75 bp, synthetic construct
  source 1..75: mol_type = other DNA
tctgattatggagaacggtcagcaggatatttacaccgcagcggtgagccgtgaccaggcgcggatcgtctttga

SEQ ID NO: 623390 - DNA, 75 bp, synthetic construct
  source 1..75: mol_type = other DNA
taattaatgaatctatatggaatggacaacccgaagggctggcttgctcaatatcacattttatgaaatttatcg

SEQ ID NO: 623391 - DNA, 75 bp, synthetic construct
  source 1..75: mol_type = other DNA
cttcagattatgctatttcaaagctagaagccgaggaaagtcttcttaaagcgtttactggtagcaatatgggga

SEQ ID NO: 623392 - DNA, 75 bp, synthetic construct
  source 1..75: mol_type = other DNA
ggctgggagaattattaccgttaattgagaaaggattactgaaaccagaagaaattgttacccactatatgccgt

SEQ ID NO: 623393 - DNA, 75 bp, synthetic construct
  source 1..75: mol_type = other DNA
ggtacgaatgaaaccggaggtattttaataggctcttacagtgaagacggttctaccgcttttattgtggaagcc

SEQ ID NO: 623394 - DNA, 75 bp, synthetic construct
  source 1..75: mol_type = other DNA
gtagcactgaatggctggtcggaatcacgtaaaggaactgccggaaatttatataaatacaataacccgtacaca

SEQ ID NO: 623395 - DNA, 75 bp, synthetic construct
  source 1..75: mol_type = other DNA
atgacccaatccgtgttgctgccaccggggcctttcacccggagacaagcgcaagcggtcactaccacgtacagc

SEQ ID NO: 623396 - DNA, 75 bp, synthetic construct
  source 1..75: mol_type = other DNA
ggaagcactagtcaggggggccagagccggttcttattttatggagacgctgtacggaatagccaccatcaaaat

SEQ ID NO: 623397 - DNA, 75 bp, synthetic construct
  source 1..75: mol_type = other DNA
cgcaccttcagcaaaacctgacgctgtgcaataacgcaacgctggagtggttgccacaggattcgattttttttc

SEQ ID NO: 623398 - DNA, 75 bp, synthetic construct
  source 1..75: mol_type = other DNA
attcaggaactgggggagaatgtactggcgcaaagcaggtattacacattcaacatggcgcaggtgtcaacgacg

SEQ ID NO: 623399 - DNA, 75 bp, synthetic construct
  source 1..75: mol_type = other DNA
cactcaccggcgtggatatgaaactctataaaagccctgttctcagaatggcgcgggctaaagagctggcacaga

SEQ ID NO: 623400 - DNA, 75 bp, synthetic construct
  source 1..75: mol_type = other DNA
tggcactattgagcgacaaccctatgaatattaagtatgtgacattttcctgcgtaagcgcagagtatacagcca

SEQ ID NO: 623401 - DNA, 75 bp, synthetic construct
  source 1..75: mol_type = other DNA
tggtgacgaacatcagccggtcaccaccgctgacattctgaccccgcgacgctgggaggattacggtgaggacct

SEQ ID NO: 623402 - DNA, 75 bp, synthetic construct
  source 1..75: mol_type = other DNA
ttccagcgaactgcgtttcgcccgctggagcgagatcgatttcaggcacaaaatctggaccatccccgccacccg

SEQ ID NO: 623403 - DNA, 75 bp, synthetic construct
  source 1..75: mol_type = other DNA
ggctttactgtttacacccctgatacgcaggtgcaggagaaaaacaacagggtttactggcaactgaaaaataac

SEQ ID NO: 623404 - DNA, 75 bp, synthetic construct
  source 1..75: mol_type = other DNA
ccgtcgtcagccgatgtgacaacgatgcgcgaaatggcagaacgggccggatttcaggttaccgtgggaggttaa

SEQ ID NO: 623405 - DNA, 75 bp, synthetic construct
  source 1..75: mol_type = other DNA
tttaataacccagcatagtgaatccagtgatactttgaaggatttctctgttataaccgcattttcatgtatctc

SEQ ID NO: 623406 - DNA, 75 bp, synthetic construct
  source 1..75: mol_type = other DNA
tggtgacgaacatcagccggtcaccaccgctgacattctgacccctcgacgcagggaggattacggtgaggacct

SEQ ID NO: 623407 - DNA, 75 bp, synthetic construct
  source 1..75: mol_type = other DNA
gagatcatggcgcttgatggattcaatttcttcacagactgctattttcaatttttatccgtaatggaaaaaacg

SEQ ID NO: 623408 - DNA, 75 bp, synthetic construct
  source 1..75: mol_type = other DNA
gaactttacgaagagatcaccgcgcttgagggatttaaattttttgatgattactattttcaatttgcatcagta

SEQ ID NO: 623409 - DNA, 75 bp, synthetic construct
  source 1..75: mol_type = other DNA
tttgcctcagtacaggagcgcgatggagagaagctgttaacctaacaagatcgcaggtaacgaagtaccgcatca

SEQ ID NO: 623410 - DNA, 75 bp, synthetic construct
  source 1..75: mol_type = other DNA
ccgaccgaatgggtacatactctgctgaaaccatggaacttctttgacgaaacgccaacgctaggggcgctgaag

SEQ ID NO: 623411 - DNA, 75 bp, synthetic construct
  source 1..75: mol_type = other DNA
atcgcccgcgcgattggtgtggatgcagccattatctggccggagcgttattacgatgatagtggcaggcgactg

SEQ ID NO: 623412 - DNA, 75 bp, synthetic construct
  source 1..75: mol_type = other DNA
ccagtcaccctgaactggtcaatctgctcaatcgcgttcgcacaccgtttaatattaaccgttcggcacaagcgg

SEQ ID NO: 623413 - DNA, 75 bp, synthetic construct
  source 1..75: mol_type = other DNA
cggcgcaaggctgagcgtgtgctggcgcaactgtcgtcgctgccggagggcggtgcaggcgtgaaatacctgcga

SEQ ID NO: 623414 - DNA, 75 bp, synthetic construct
  source 1..75: mol_type = other DNA
ctcgccaaacagcgttcagggctatgactacgaagcggatggtaatggcatcgtactgttaccggagcgcgtgat

SEQ ID NO: 623415 - DNA, 75 bp, synthetic construct
  source 1..75: mol_type = other DNA
atgtgtgttacgtctaatgttttagtgatgtttagtagttttgagatatttgacgttatttcttatgaggttgtt

SEQ ID NO: 623416 - DNA, 75 bp, synthetic construct
  source 1..75: mol_type = other DNA
agattcagccttatttatggtttacaagaatatatatgcatcgcttaaagtaaaagatcacgttctgaggagata

SEQ ID NO: 623417 - DNA, 75 bp, synthetic construct
  source 1..75: mol_type = other DNA
gaaaactatatttgtgatttcactcatttgattaataaacaaaaatcacaaaaagaatcaactaactttggtaat

SEQ ID NO: 623418 - DNA, 75 bp, synthetic construct
  source 1..75: mol_type = other DNA
atgatcgatgaatttcatgtgatgtatatgtataaaaaatccaagcggaagccgcaactactgacatcaaaacac

SEQ ID NO: 623419 - DNA, 75 bp, synthetic construct
  source 1..75: mol_type = other DNA
gagacggtgggcagtaaccagataattaaagtgggttctgttcaggtggaaacgattggacttgttcgtgcgctg

SEQ ID NO: 623420 - DNA, 75 bp, synthetic construct
  source 1..75: mol_type = other DNA
agcttccaccgccgcggtgaaatccgcgaccgttccgccgaaggccagcattaccgcatcgccggcatgaatctg

SEQ ID NO: 623421 - DNA, 75 bp, synthetic construct
  source 1..75: mol_type = other DNA
tgaaacctgatataccacccaatcaggcaacccacatcctgcggcatacattcgcaagccatttcatgatgaatg

SEQ ID NO: 623422 - DNA, 75 bp, synthetic construct
  source 1..75: mol_type = other DNA
gtggtaatgctgaaatagctaagccaaatatattaaaatgcgcaaaatttggagattatgacgattttgcttata

SEQ ID NO: 623423 - DNA, 75 bp, synthetic construct
  source 1..75: mol_type = other DNA
gtgccgtatatcgttgcaaccatcaccagtaactctgcaggtggtcagccggtttcactggcaaacttaaaagcg

SEQ ID NO: 623424 - DNA, 75 bp, synthetic construct
  source 1..75: mol_type = other DNA
atatgcagccagttttggtaaggctgttgaacgtagggttgcacagttagttagtgacaattcccgattaagcaa

SEQ ID NO: 623425 - DNA, 75 bp, synthetic construct
  source 1..75: mol_type = other DNA
caggtgatgaccgcaaggcaggagcaatcacaccaacttcagcagcctgaagccgattccgccattcagcgggaa

SEQ ID NO: 623426 - DNA, 75 bp, synthetic construct
  source 1..75: mol_type = other DNA
gtgacggtgtgctcgccagttttgcagggcaggtggcacgcctggccaacgagctgccgatgattaaacaggagg

SEQ ID NO: 623427 - DNA, 75 bp, synthetic construct
  source 1..75: mol_type = other DNA
tcgacgcgggtcaggcatgtgacggagtactcgccagttttgcagggcaagtggctcgtctggccaacgaattac

SEQ ID NO: 623428 - DNA, 75 bp, synthetic construct
  source 1..75: mol_type = other DNA
attgtcgaacagtctgaagttaccgagcgcgtaacagatctgacaactccacctggtttgctggaattggtggtc

SEQ ID NO: 623429 - DNA, 75 bp, synthetic construct
  source 1..75: mol_type = other DNA
tgaagatgcgccgtgcgtcagcgtctgtcctaccggtgcttcatttcgtgacgaaaatggcattgtacaagtgga

SEQ ID NO: 623430 - DNA, 75 bp, synthetic construct
  source 1..75: mol_type = other DNA
taaaggtgccaccgctgctggcgaaggtgagttattcattggctggagtggcacgagcggtgcccatgcgcgcgt

SEQ ID NO: 623431 - DNA, 75 bp, synthetic construct
  source 1..75: mol_type = other DNA
cccgcgcaagcgatatagttacagttccaattaataataatctttataatcttccttttacggttctttgtgagg

SEQ ID NO: 623432 - DNA, 75 bp, synthetic construct
  source 1..75: mol_type = other DNA
tactttaacagcctcggatatcgaagcattgtcactggaggatgcccggaagattattcaaccgctacctgatgt

SEQ ID NO: 623433 - DNA, 75 bp, synthetic construct
  source 1..75: mol_type = other DNA
ctaccaggtgaataccgcgtcacatattcatgcggctgaatttgttgccagaacctataccgattcatatcagtt

SEQ ID NO: 623434 - DNA, 75 bp, synthetic construct
  source 1..75: mol_type = other DNA
gttggctctggtggccgatgtgcaataccacgaaccatatctgtcagccgcgctaaaccgaaaattcagggggat

SEQ ID NO: 623435 - DNA, 75 bp, synthetic construct
  source 1..75: mol_type = other DNA
ttgcagaaaaaccagaatggcgcagatattccaaacaaagataaatttacgcaaacaataggtgcttgccgctct

SEQ ID NO: 623436 - DNA, 75 bp, synthetic construct
  source 1..75: mol_type = other DNA
acacttaccgccgcgattgccagcggtatgggcgttgcagtattgccggaatcggccgcgcgttcgttatgtgac

SEQ ID NO: 623437 - DNA, 75 bp, synthetic construct
  source 1..75: mol_type = other DNA
tcgaatggattgttgtcgatggcggttccaacgacggtacccgtgagtatctggaaaatctcaatggtatctata

SEQ ID NO: 623438 - DNA, 75 bp, synthetic construct
  source 1..75: mol_type = other DNA
ttgtcagctatcggacacactatccagccattgatggactgattaatgcaggtgcgcatcgaccaacgacggtgt

SEQ ID NO: 623439 - DNA, 75 bp, synthetic construct
  source 1..75: mol_type = other DNA
atgaaaggggcgagtgctgctggtgagggagagttgcttattgggtggagtggtacaagtggcgcacatgcaccg

SEQ ID NO: 623440 - DNA, 75 bp, synthetic construct
  source 1..75: mol_type = other DNA
tctccgacctggcccctgttgatttgctgattcagcgagcaggacgattacagcggcatatccgcgatattaatg

SEQ ID NO: 623441 - DNA, 75 bp, synthetic construct
  source 1..75: mol_type = other DNA
ccaaaaaggccgatgtgctggctattgcccgtgcatggggtatcagtggtgaggccgagctggctgtcatgcagg

SEQ ID NO: 623442 - DNA, 75 bp, synthetic construct
  source 1..75: mol_type = other DNA
tcggtgaagtacgtaccggggttgaggcgaaagtaaataacaaccttagcctgtgggggaatgtcggtgtgcaac

SEQ ID NO: 623443 - DNA, 75 bp, synthetic construct
  source 1..75: mol_type = other DNA
aaacagtttttacctgaaaaagcttttactggcgagcttatttatatgcatggaaacatgattgccagaaagaaa

SEQ ID NO: 623444 - DNA, 75 bp, synthetic construct
  source 1..75: mol_type = other DNA
caaaacaaaaaaaaggatggataaaagatcttactgagtatgaaaagtccattttcgttaacatgctaaatgaag

SEQ ID NO: 623445 - DNA, 75 bp, synthetic construct
  source 1..75: mol_type = other DNA
accggaatgtttgccggtgacggcggcttcgacattacagtgggcagacatacccaactggatggcgcggttatc

SEQ ID NO: 623446 - DNA, 75 bp, synthetic construct
  source 1..75: mol_type = other DNA
gatgatccaaataatggtgagcataattttggattactaaatagagatctttctgaaaagccgctgatgaaaagt

SEQ ID NO: 623447 - DNA, 75 bp, synthetic construct
  source 1..75: mol_type = other DNA
cctatcccggaagcgatggcgtatgttttattgcgcccgctgctggatgacgtaccggacgatgaactgtgcggg

SEQ ID NO: 623448 - DNA, 75 bp, synthetic construct
  source 1..75: mol_type = other DNA
cacaccggaccgatgtcgaagagtacacggtagataacactacaaaatgttcggtgttccgcacgtttcagggct

SEQ ID NO: 623449 - DNA, 75 bp, synthetic construct
  source 1..75: mol_type = other DNA
tgatttacaactctcttttgaacatattgctcgacgctggcatgccagtaataaacaatgggcacaatcacacag

SEQ ID NO: 623450 - DNA, 75 bp, synthetic construct
  source 1..75: mol_type = other DNA
tctctcttggtgaggcccgcaggaagcgagatgaagccaaaaagttggtatctgatggtatcgacccttctgaga

SEQ ID NO: 623451 - DNA, 75 bp, synthetic construct
  source 1..75: mol_type = other DNA
tcattggcgaccatgatttcagaaagcctatgagtgaaaatacggtaaacaaggctttgaggtctatgggctatg

SEQ ID NO: 623452 - DNA, 75 bp, synthetic construct
  source 1..75: mol_type = other DNA
accacccacaccatcagtgagaacagtgcctcccgtgaagcaggctccctgctgtcggggaaccgcgtgaccgtt

SEQ ID NO: 623453 - DNA, 75 bp, synthetic construct
  source 1..75: mol_type = other DNA
caggaaaagttcggtactggtagtgatatccagcgtggcattcaggcggcaacggccgcgcttcagggcctggcg

SEQ ID NO: 623454 - DNA, 75 bp, synthetic construct
  source 1..75: mol_type = other DNA
acggcaataaaattgtcgccgacgtgggtcatgacctgctgataagcagccagcaggatagcaacaaatacgaca

SEQ ID NO: 623455 - DNA, 75 bp, synthetic construct
  source 1..75: mol_type = other DNA
atggctgatgatagaaagatgactgactggcatcgcaaggtgctgtgcaactttgataatgcctggtcagcaacg

SEQ ID NO: 623456 - DNA, 75 bp, synthetic construct
  source 1..75: mol_type = other DNA
tttactcagttaagcagtgcaacaaacagcaccagtgagtcactggcggcaacgccaaaagcggtcaaggctgcg

SEQ ID NO: 623457 - DNA, 75 bp, synthetic construct
  source 1..75: mol_type = other DNA
aatgtagtgtcccatccgtaatttatttaccggaacaaagggtcggtgtctgtctctggtataaatgtgaataca

SEQ ID NO: 623458 - DNA, 75 bp, synthetic construct
  source 1..75: mol_type = other DNA
cggcgcagaaaaagctgccggtgattattcgcgacattccggtgtttaaagagattgctcaggaacatgcctggt

SEQ ID NO: 623459 - DNA, 75 bp, synthetic construct
  source 1..75: mol_type = other DNA
aaatgaaaatttgctggggatccttgaagtcataaggcgactggatggcagaacctttgtgcagcgttacaccac

SEQ ID NO: 623460 - DNA, 75 bp, synthetic construct
  source 1..75: mol_type = other DNA
tgaacctaacagagatcgagtataaagaaatattgaagtcacaccgtaatataaatggaatcgataattctggtt

SEQ ID NO: 623461 - DNA, 75 bp, synthetic construct
  source 1..75: mol_type = other DNA
gcggtagtccagaacaagtttgtgtggcagcagaaattggtatggagcacaatctcggcctgacctgtgatcccg

SEQ ID NO: 623462 - DNA, 75 bp, synthetic construct
  source 1..75: mol_type = other DNA
gcttgcgtcaatatttgcaatatcttattcaaaaggtgttgttgaattaaataagtaccatgcaacatacttcgg

SEQ ID NO: 623463 - DNA, 75 bp, synthetic construct
  source 1..75: mol_type = other DNA
cctttattgtataaattgaaaggtcatattgattcaattgatagctatgagtatataagttcatatagttatatt

SEQ ID NO: 623464 - DNA, 75 bp, synthetic construct
  source 1..75: mol_type = other DNA
tttttattggttagcaaaccaagcaccatcttcaaacttccatttgatgatggtgtgatgtctcagtataaagaa

SEQ ID NO: 623465 - DNA, 75 bp, synthetic construct
  source 1..75: mol_type = other DNA
ataactgagttaacacctaatgagcaattaagagcagcttgggccattgccagaaataatttcactcagcataaa

SEQ ID NO: 623466 - DNA, 75 bp, synthetic construct
  source 1..75: mol_type = other DNA
gtgctgcgctgccgtaaatctggcgtactgaccggtttaccagatggttatggacgtgggcgcattatcggtgac

SEQ ID NO: 623467 - DNA, 75 bp, synthetic construct
  source 1..75: mol_type = other DNA
ttcgctcgtacaggattaggtgttgacgaaagtacatatttagaatcttatcattattatgttcaaggaggtgaa

SEQ ID NO: 623468 - DNA, 75 bp, synthetic construct
  source 1..75: mol_type = other DNA
gcgaagaaagagcgcgcagcctggcgcaagcgcaaagccgcggtgaagcctctccgacactgggaagacatgacc

SEQ ID NO: 623469 - DNA, 75 bp, synthetic construct
  source 1..75: mol_type = other DNA
gcaaaatctgccgggcaaaattcaccccagcattcgaaaaccaccgttggtgctgccctgagcatggagctgaat

SEQ ID NO: 623470 - DNA, 75 bp, synthetic construct
  source 1..75: mol_type = other DNA
ctcggcgaccgtcgtcggcatggtcggcgcaggcgggatcggcgtcaccctgtgggaagcgattcgcggtttcca

SEQ ID NO: 623471 - DNA, 75 bp, synthetic construct
  source 1..75: mol_type = other DNA
tttatagtaaaaataaaatccaccactcaaaaattaggatgcattttttttattctttctttgcttttattcaat

SEQ ID NO: 623472 - DNA, 75 bp, synthetic construct
  source 1..75: mol_type = other DNA
gcagcacgagccgcctatctccgagccaaacggcactatcacccatcaacgccagccgatttgttgcaggctgcc

SEQ ID NO: 623473 - DNA, 75 bp, synthetic construct
  source 1..75: mol_type = other DNA
agcgccgggtatcggcgcgtgtctgtccgcatcgacggcaggacgcactcgatttatgcgcatcgcgtggccttc

SEQ ID NO: 623474 - DNA, 75 bp, synthetic construct
  source 1..75: mol_type = other DNA
agtaactttgcatttttcttagatttaaatgcaattgaattaaatagcttaaatacaattgtaagcgcattatgt

SEQ ID NO: 623475 - DNA, 75 bp, synthetic construct
  source 1..75: mol_type = other DNA
aatacccacgtgtgttcgaatggaatattctgaatcatagcattattggcaatagttgcttagatatagacggtg

SEQ ID NO: 623476 - DNA, 75 bp, synthetic construct
  source 1..75: mol_type = other DNA
gcagttgtcgttctgcaaacatcgaaagcggaaatcattgggaatggcgtggatgagacgacgctgacagcaaca

SEQ ID NO: 623477 - DNA, 75 bp, synthetic construct
  source 1..75: mol_type = other DNA
aggtaatgcaatcgactgacccactcacctggtcgaagaccgcgctgacgctgtatcagagcggcaacaactacg

SEQ ID NO: 623478 - DNA, 75 bp, synthetic construct
  source 1..75: mol_type = other DNA
taacgacactctgaccggcagcagcggcgataaccaactggaaggacgcggcggcaacgacacccttaacatcgg

SEQ ID NO: 623479 - DNA, 75 bp, synthetic construct
  source 1..75: mol_type = other DNA
ctggctataataattcagatctggtagttaaaatattatcagatgaaagcaaagctaaatttcatgcaattgcta

SEQ ID NO: 623480 - DNA, 75 bp, synthetic construct
  source 1..75: mol_type = other DNA
aagaatttttgtttttattttatctggtgtggcttcgttatcattgcttttttttgttagcgtagtagttttata

SEQ ID NO: 623481 - DNA, 75 bp, synthetic construct
  source 1..75: mol_type = other DNA
aaagaagcactatgtgccaaattgagattgatttagaaaaggttaaagtaattgcgggtaatcctgagtttgact

SEQ ID NO: 623482 - DNA, 75 bp, synthetic construct
  source 1..75: mol_type = other DNA
aaatttcaaaaataaagggagtgagcaaggcaaactgatcgagatgttgagtgaagaatcaactcaaattaaagt

SEQ ID NO: 623483 - DNA, 75 bp, synthetic construct
  source 1..75: mol_type = other DNA
tgatgataatcaattagctttctctaaggaagaaaatcatgctgatgtcaaaaactattatttccggttttatat

SEQ ID NO: 623484 - DNA, 75 bp, synthetic construct
  source 1..75: mol_type = other DNA
aatcatactgttccagcttcagagacctcaacgccacgtggttccaaatctgctgtcaggtatgcagctttaccc

SEQ ID NO: 623485 - DNA, 75 bp, synthetic construct
  source 1..75: mol_type = other DNA
agcgcaaagcacgacgcgagcgcttgcgcgagctcaaggtgcggattgccgcaaaacccgcatcagccgcccatg

SEQ ID NO: 623486 - DNA, 75 bp, synthetic construct
  source 1..75: mol_type = other DNA
atgggtgctggtatcgggtatctgctctatgaacagatcaaggagtaccttgatactggtcgtttagaatgtgta

SEQ ID NO: 623487 - DNA, 75 bp, synthetic construct
  source 1..75: mol_type = other DNA
agttggcgttccgttcgggtgtaattttcacgacataaaagccaaggggatctcagattacgaaggcagcagtcg

SEQ ID NO: 623488 - DNA, 75 bp, synthetic construct
  source 1..75: mol_type = other DNA
caagactcggtgatgtgcttgagttgaaatggcaggatattatggataaagggatctacattgagcaaaacaaaa

SEQ ID NO: 623489 - DNA, 75 bp, synthetic construct
  source 1..75: mol_type = other DNA
tgtggttggcaattcggggcgtgtcacggaaatagacaatgccgttgaggagctggcgaatggaaatgagccgct

SEQ ID NO: 623490 - DNA, 75 bp, synthetic construct
  source 1..75: mol_type = other DNA
atcggaaaatactggtggtacaacgaacccatatggtacttcaaaatatataatggaattgatcctttccgatgt

SEQ ID NO: 623491 - DNA, 75 bp, synthetic construct
  source 1..75: mol_type = other DNA
caaggctcggtgatgtgctcgagctgaaatggcaggatattatggacaaagggatttacattgagcaaaacaaga

SEQ ID NO: 623492 - DNA, 75 bp, synthetic construct
  source 1..75: mol_type = other DNA
atggtatataacatattaatattaattatttttataattattgtattgatttcaaataaaagattacgcattttt

SEQ ID NO: 623493 - DNA, 75 bp, synthetic construct
  source 1..75: mol_type = other DNA
tgtcacgctcaaaggtaaaaaagcgggcacgcatacggttaccgcaacgctgggtaacaataatgccagcgatgc

SEQ ID NO: 623494 - DNA, 75 bp, synthetic construct
  source 1..75: mol_type = other DNA
tgaactggctgcataacagtaaggatttcagcaccagtatggatggcgtgtccgtcactcaggatggagcccgaa

SEQ ID NO: 623495 - DNA, 75 bp, synthetic construct
  source 1..75: mol_type = other DNA
tgcgctcaatggcacgacttacttaaccggtgataactctgcctttagcggcaaagtaacgattgagaaaaatgg

SEQ ID NO: 623496 - DNA, 75 bp, synthetic construct
  source 1..75: mol_type = other DNA
aggcggtttatggctgaaagaggattaatgctttctccggaaaagacgaaaatcacacatatcgaggaaggattt

SEQ ID NO: 623497 - DNA, 75 bp, synthetic construct
  source 1..75: mol_type = other DNA
aaatttctgcaccgaaaattagtttaagcaccaattcggagttggcgttaggtgcacaggaagggagtgatgcga

SEQ ID NO: 623498 - DNA, 75 bp, synthetic construct
  source 1..75: mol_type = other DNA
acccgacttggcgtaaaaacctggctgaagagccaccataaaatggatgacgataaatcccgcgagttccagccg

SEQ ID NO: 623499 - DNA, 75 bp, synthetic construct
  source 1..75: mol_type = other DNA
tggatacaaacacaaattagctgaatttaatggcagccagggaacgcgtaatgaatggtatgttcagccgcaagc

SEQ ID NO: 623500 - DNA, 75 bp, synthetic construct
  source 1..75: mol_type = other DNA
tttatttggtcatatcagaaatttcagaatatggcataaagcattaacagaccaacaaatggctgaggttattta

SEQ ID NO: 623501 - DNA, 75 bp, synthetic construct
  source 1..75: mol_type = other DNA
atgattgcgggcttttctccatcatataaaaagattgttattggcgacgacgaaataacaatgcctggcgacaag

SEQ ID NO: 623502 - DNA, 75 bp, synthetic construct
  source 1..75: mol_type = other DNA
atcggcattgatatttcagactctgtaaccagtagcagaagtgatgttgctgcaagttcgctggcagctaaaaaa

SEQ ID NO: 623503 - DNA, 75 bp, synthetic construct
  source 1..75: mol_type = other DNA
catagttatggctttcgcccaatgagaagcactgcagatgcgattgaacaggttttcaatgcctgtggtaaaaaa

SEQ ID NO: 623504 - DNA, 75 bp, synthetic construct
  source 1..75: mol_type = other DNA
cgacgcgtgaagaagctgcagttacgtattgcgaaggcaacacaggaacaacaatggcgtaaagttaaagcttta

SEQ ID NO: 623505 - DNA, 75 bp, synthetic construct
  source 1..75: mol_type = other DNA
tggcggtattgttaatggtgagcttttaaaacaatatacattagcaattattatatatttaattggcgggggaat

SEQ ID NO: 623506 - DNA, 75 bp, synthetic construct
  source 1..75: mol_type = other DNA
cagaaacaaaccaccatgtggatgcgtcatgaagggggtcacaacaaatggcgtgatgcaagtggccagttgaaa

SEQ ID NO: 623507 - DNA, 75 bp, synthetic construct
  source 1..75: mol_type = other DNA
gtaacaccagcgtcgaaacggatgctcagggtaaggcagaagttcttgtgaccagcaccattgcaggaacgaaag

SEQ ID NO: 623508 - DNA, 75 bp, synthetic construct
  source 1..75: mol_type = other DNA
gggtaggcgttgatgctactggtaaagtgacattcaaaaatgacggtgatagcaatactgtaataatcacagcgc

SEQ ID NO: 623509 - DNA, 75 bp, synthetic construct
  source 1..75: mol_type = other DNA
ccagaagatatgaaagagttttttctgtggtctaacggtggagcaggtaaatttcacaatatttacatttccttg

SEQ ID NO: 623510 - DNA, 75 bp, synthetic construct
  source 1..75: mol_type = other DNA
aaactcactgcgtgccggtagccgtggtccaactctgctggaagattttattctgcgcgagaaaatcactcactt

SEQ ID NO: 623511 - DNA, 75 bp, synthetic construct
  source 1..75: mol_type = other DNA
ggtaatggcgtcgataacgcaacgctaactgcaacggttaaagatcagttcgacaatgaggtgaacaatcttccg

SEQ ID NO: 623512 - DNA, 75 bp, synthetic construct
  source 1..75: mol_type = other DNA
ctgactgtcaaagcagatattgattctgcgacgatcaccagtctggagatgcctgaaggtcaggtaataatcaga

SEQ ID NO: 623513 - DNA, 75 bp, synthetic construct
  source 1..75: mol_type = other DNA
cttcatgataattcattgcttaacagagcgctgcttctttcagaaaaaattcgctgcttgatgaggcaaactcta

SEQ ID NO: 623514 - DNA, 75 bp, synthetic construct
  source 1..75: mol_type = other DNA
cagcatattactttttaccattctatatcgatcagataaaaagctggagttcaccttgggattcatttgaaaact

SEQ ID NO: 623515 - DNA, 75 bp, synthetic construct
  source 1..75: mol_type = other DNA
gggcgtgaaaacctggcttaagagccaccataaaatggatgaaggcaaatcccgcgagttccagccatttatgga

SEQ ID NO: 623516 - DNA, 75 bp, synthetic construct
  source 1..75: mol_type = other DNA
tagagactatcaaccagtctgcttccgatctgggtattgaaaatgtgaccagttttaaaggtgacgacttctcac

SEQ ID NO: 623517 - DNA, 75 bp, synthetic construct
  source 1..75: mol_type = other DNA
gagcgttctcaagatatggctcgtgtattagagcaagcaggtatagtgaatactgccagttataacagcatgata

SEQ ID NO: 623518 - DNA, 75 bp, synthetic construct
  source 1..75: mol_type = other DNA
atgcaacattttgaacaattacgactttttttcgagttaatgttagtcagatatgcttcggtttatgcaaacaag

SEQ ID NO: 623519 - DNA, 75 bp, synthetic construct
  source 1..75: mol_type = other DNA
agaaataaacttcagaactattcgcattggatgcaatatggctcttgatacagggaattacacgtttacttttga

SEQ ID NO: 623520 - DNA, 75 bp, synthetic construct
  source 1..75: mol_type = other DNA
ggcgtggccgcacgtattgcccgcgttcatcagttcggtgagcgcgatcaggttgcgccgggcattttcaccgat

SEQ ID NO: 623521 - DNA, 75 bp, synthetic construct
  source 1..75: mol_type = other DNA
atgttcgtaaaactgcgcaccgcccgctacctgaaagcccgtgcagatgcttccggtgtgacggtgggttacagc

SEQ ID NO: 623522 - DNA, 75 bp, synthetic construct
  source 1..75: mol_type = other DNA
agcataccgcaccagcctggcattctggtaccctccccaaactcattactcccgtgccaccacttacccgcaacg

SEQ ID NO: 623523 - DNA, 75 bp, synthetic construct
  source 1..75: mol_type = other DNA
agaaaattggtgttatgaaagccgatttttttgctggcgcagtatattctatgaatgatcgtggttataagggcg

SEQ ID NO: 623524 - DNA, 75 bp, synthetic construct
  source 1..75: mol_type = other DNA
gaccagtttgacctagggattactcgtttaattctgaatggcgataagattgcagatgaagtctgtatcagtatc

SEQ ID NO: 623525 - DNA, 75 bp, synthetic construct
  source 1..75: mol_type = other DNA
ctgagcatgtcatgagagttgcaccagaccaagaaaaagttttacccggatatatttttgcctatctttcaagca

SEQ ID NO: 623526 - DNA, 75 bp, synthetic construct
  source 1..75: mol_type = other DNA
cagggcagcagcaacgtttttatcaacaatcagcccgccgcgcgcaagggggacaaactggagtgcagtgcggcg

SEQ ID NO: 623527 - DNA, 75 bp, synthetic construct
  source 1..75: mol_type = other DNA
atgtccacttcctatgactttgactttgactttggtttaagtctgggcgctgcttactctaactctgaccgtacc

SEQ ID NO: 623528 - DNA, 75 bp, synthetic construct
  source 1..75: mol_type = other DNA
caggaagaggtcacacagagcgaggcggcgtcaccggagccggttcacccgctcccggcagaacgccccctgccg

SEQ ID NO: 623529 - DNA, 75 bp, synthetic construct
  source 1..75: mol_type = other DNA
actcactacgcgatgcggccagttatctgactgcaaactccaataagtgcagtgttgatgatttgcttcattttg

SEQ ID NO: 623530 - DNA, 75 bp, synthetic construct
  source 1..75: mol_type = other DNA
acaacaatggtcatcaagagtatgttgatcaggatctggtcaactatgttgaaattggagcgacctactatttca

SEQ ID NO: 623531 - DNA, 75 bp, synthetic construct
  source 1..75: mol_type = other DNA
atctcggggtgttctattcgttaaaagcgcgtgccattgccaactttggcgtttttgagcgagttcgtgcttttg

SEQ ID NO: 623532 - DNA, 75 bp, synthetic construct
  source 1..75: mol_type = other DNA
atgaaaaaactcacgcttattttactgtgcgcctgctggggcaaggctctggccgccgacgaggacatcactttc

SEQ ID NO: 623533 - DNA, 75 bp, synthetic construct
  source 1..75: mol_type = other DNA
tgtggggcattagctctatggcgctctcgaatatttcttttcatggttatttagtgcagccaccgaattgcacaa

SEQ ID NO: 623534 - DNA, 75 bp, synthetic construct
  source 1..75: mol_type = other DNA
actgattttacgcaaaagccgaagctggaggccgtaccggtaaaagcgaatgacgcagtgttaagcgatacgaat

SEQ ID NO: 623535 - DNA, 75 bp, synthetic construct
  source 1..75: mol_type = other DNA
cttcgactattgccgcggctggataagccgtgttccggtgctcgttcgcgacagtaagaaccctgatgacgtaga

SEQ ID NO: 623536 - DNA, 75 bp, synthetic construct
  source 1..75: mol_type = other DNA
tccaacctctggtgggcgcgggctgacggtactgccgctgagctgcctgatggtcgccagttctgcccgcctgcc

SEQ ID NO: 623537 - DNA, 75 bp, synthetic construct
  source 1..75: mol_type = other DNA
atgtgaccagtggcggacgatttgaccacctgtggaatgaagcgctgcacgtcattaagccgttccgcataccgg

SEQ ID NO: 623538 - DNA, 75 bp, synthetic construct
  source 1..75: mol_type = other DNA
taacgatgcagcgatcgaaacagatgttcctggttttggcatcgagcttcagcgcgatggtcaacgtttcaaact

SEQ ID NO: 623539 - DNA, 75 bp, synthetic construct
  source 1..75: mol_type = other DNA
tttgtgtcagttgtgtaaccgcccaggctgccgatgaagatattactttccacggtacactactcgcgcctcctg

SEQ ID NO: 623540 - DNA, 75 bp, synthetic construct
  source 1..75: mol_type = other DNA
ataaagataacttcagtgaagttatgtcatcaatgaaaccatcagtggattttcttgttgaaagtgcgttgccgg

SEQ ID NO: 623541 - DNA, 75 bp, synthetic construct
  source 1..75: mol_type = other DNA
cgcggttagcaccgatatctctggcctggcgattcggcttaaacaggcagggcagagctttaagctcaatacggc

SEQ ID NO: 623542 - DNA, 75 bp, synthetic construct
  source 1..75: mol_type = other DNA
atgaaaaaaatcacgttctttatactctgcgcgtatggtggcatggctctggcagcaaatgaagacatcaccttc

SEQ ID NO: 623543 - DNA, 75 bp, synthetic construct
  source 1..75: mol_type = other DNA
gtgcaatgaatcaacttatcactaatgaaatctatactttaaaaaccggttcaacctctcatgatttagaaattc

SEQ ID NO: 623544 - DNA, 75 bp, synthetic construct
  source 1..75: mol_type = other DNA
ctgaacaaaccattgagatacaatttaaagttggtaaacatgccagtcaaaatatataatattatgattccacgt

SEQ ID NO: 623545 - DNA, 75 bp, synthetic construct
  source 1..75: mol_type = other DNA
acgggactgacattcacagatgcgacacttaatttaaacgcatccgatgcctttagtaaaaatacgatgtcctct

SEQ ID NO: 623546 - DNA, 75 bp, synthetic construct
  source 1..75: mol_type = other DNA
gaaaagaaattttgaggaggagttggcctggtgttgcggaattcctgtaaaaaaactaattgctgggttctgtgc

SEQ ID NO: 623547 - DNA, 75 bp, synthetic construct
  source 1..75: mol_type = other DNA
actcaaatctttttgcgctggatgcgggtggcgctacaggcgttgggctgaaaatcaaaaccgctgctggagtac

SEQ ID NO: 623548 - DNA, 75 bp, synthetic construct
  source 1..75: mol_type = other DNA
tgaatggcaacagtaaaggggcgatttccggtaacagcaaacaaatatttagtaacaatgctatatttaacgcca

SEQ ID NO: 623549 - DNA, 75 bp, synthetic construct
  source 1..75: mol_type = other DNA
taatgctaacggtaaatcaacaattaccggggggatacaaaattttaacgataatagtatattaaatgccaatgg

SEQ ID NO: 623550 - DNA, 75 bp, synthetic construct
  source 1..75: mol_type = other DNA
ctaatgctatcgcgggagaaacgaataatacgaataaacagatatttcaatctggtacgacaatgaatgtgaatg

SEQ ID NO: 623551 - DNA, 75 bp, synthetic construct
  source 1..75: mol_type = other DNA
gctggacaatggttttctgaaagtgtttcgctcagctaatgtaaaaacatcgccagggatgattgctgacagttc

SEQ ID NO: 623552 - DNA, 75 bp, synthetic construct
  source 1..75: mol_type = other DNA
atgtcgaagagagcgagggtaatgactccaacttattgatagtgttttatgttcagataatgcccgatgactttg

SEQ ID NO: 623553 - DNA, 75 bp, synthetic construct
  source 1..75: mol_type = other DNA
tggcaatccatccccagcgatcgccttcgctcaaccggtgtattaaccggcccggactggctgcggatggggctt

SEQ ID NO: 623554 - DNA, 75 bp, synthetic construct
  source 1..75: mol_type = other DNA
aaaagagagtcagggcagataagtgtggtgtggtgcgttgtactggattcgaaccagtgaccgattgcttagaag

SEQ ID NO: 623555 - DNA, 75 bp, synthetic construct
  source 1..75: mol_type = other DNA
gggttaacagtgaaaggtatggcgactaatgcagcaattggtttgagagtcaatacaggcgttcaacatgatgca

SEQ ID NO: 623556 - DNA, 75 bp, synthetic construct
  source 1..75: mol_type = other DNA
cctgaaagccgatgccccggtggcgctgtacggtaatggcaaagatgttgacgccgtcaaaacgcgactgcaaaa

SEQ ID NO: 623557 - DNA, 75 bp, synthetic construct
  source 1..75: mol_type = other DNA
aaacgtatgacactacaacaggcagtatactagatgttaacggacactccctaaccattggtagtatcagtggta

SEQ ID NO: 623558 - DNA, 75 bp, synthetic construct
  source 1..75: mol_type = other DNA
acaaactattactgtttaccgctgcactgctggcagagcgtcgtctggcccgcggcctgaaacttaactatcccg

SEQ ID NO: 623559 - DNA, 75 bp, synthetic construct
  source 1..75: mol_type = other DNA
tccattcaatagcccttgccctaatggtactgagaaagtatcagcttatcatactcatggtgcagatagtcatgg

SEQ ID NO: 623560 - DNA, 75 bp, synthetic construct
  source 1..75: mol_type = other DNA
gtggagtgcttatcagaccatacaggagaatatgctgaaaggcaggatttccggccgcagtgcaaaaggaaaacg

SEQ ID NO: 623561 - DNA, 75 bp, synthetic construct
  source 1..75: mol_type = other DNA
gccaaccagattgaaggtgatattgtcaaaacggtcagcaagtctttcccccgcacgaacagttatgccagtggc

SEQ ID NO: 623562 - DNA, 75 bp, synthetic construct
  source 1..75: mol_type = other DNA
ttatttgtggcgcaggggaatcagttgttcatgaacgatgtgttcctgaagcggctgtttgcggtgagtatcacg

SEQ ID NO: 623563 - DNA, 75 bp, synthetic construct
  source 1..75: mol_type = other DNA
gttcagcgttgggacagcttgttcgcctcgttctttgcggtactggttattctgacggcggtgattacaggtctg

SEQ ID NO: 623564 - DNA, 75 bp, synthetic construct
  source 1..75: mol_type = other DNA
tttataataaggaaatggtgaatagttcaactttgtcgagtttatgtgcacagagcaataaatgtgtttatgggc

SEQ ID NO: 623565 - DNA, 75 bp, synthetic construct
  source 1..75: mol_type = other DNA
gaaactggctacagggcgaattatttgtcaggatactcattcggggtttcgagtttggattaatgcccgtcaaga

SEQ ID NO: 623566 - DNA, 75 bp, synthetic construct
  source 1..75: mol_type = other DNA
acttacatcctataatggttctgctgcaaaaataagcggcggcgtgaccgtaaagctgaatgattatacaaatta

SEQ ID NO: 623567 - DNA, 75 bp, synthetic construct
  source 1..75: mol_type = other DNA
cgatgcccgccagatgtgtctgctgtcaaaaccgctgaaaaagcgcgtcaatattcaggcgcacaaggtcatttt

SEQ ID NO: 623568 - DNA, 75 bp, synthetic construct
  source 1..75: mol_type = other DNA
actcgatttttatctgttcagcacgctgaatgaagtgcaggaaatcacggaaaaaaggttgtcagaatctaactc

SEQ ID NO: 623569 - DNA, 75 bp, synthetic construct
  source 1..75: mol_type = other DNA
ttaaccggacatatcgtacggaaatactcgatttttatctgttcagcacgctgaatgaagtgcaggaaatcacgg

SEQ ID NO: 623570 - DNA, 75 bp, synthetic construct
  source 1..75: mol_type = other DNA
gcacagtgatgacgtcgagaaaggtgaaatcaaaatcatcatgaccggctcagcctccgataataaattccttca

SEQ ID NO: 623571 - DNA, 75 bp, synthetic construct
  source 1..75: mol_type = other DNA
atcgcatatctacaacaaacagaccaaaaaacgcctggaagcccgctttaaagatctgaacgacccgctgaaact

SEQ ID NO: 623572 - DNA, 75 bp, synthetic construct
  source 1..75: mol_type = other DNA
gagatctgcgtgaaactgtacgatgccatcgtggcgatacgccctgaatggcacagtgaagacgttgaacaaggg

SEQ ID NO: 623573 - DNA, 75 bp, synthetic construct
  source 1..75: mol_type = other DNA
aaaatgtgttttctgaaaataacaaattatcgagagaaaataatattgatcagtatgttcaatccgctaaaaaaa

SEQ ID NO: 623574 - DNA, 75 bp, synthetic construct
  source 1..75: mol_type = other DNA
aggtaaaagatcatgctgataaattatcgattaacttgttagaggtcttaataaaggatgctcattttatccatg

SEQ ID NO: 623575 - DNA, 75 bp, synthetic construct
  source 1..75: mol_type = other DNA
ggaaccaaattttgcccacctatttaacacacccctacattatgaacaaggaatttaggatttttatcatttatt

SEQ ID NO: 623576 - DNA, 75 bp, synthetic construct
  source 1..75: mol_type = other DNA
catatggtaacggagactgtttcggtttgtactggcctattggtcaggagcataaactacctatagtgtgcgaaa

SEQ ID NO: 623577 - DNA, 75 bp, synthetic construct
  source 1..75: mol_type = other DNA
agtatcacaacaggtatttacatattctggcatttcagattatgctgttatgggagttgcgattgctttatttga

SEQ ID NO: 623578 - DNA, 75 bp, synthetic construct
  source 1..75: mol_type = other DNA
gcgcgatgcgctaccgaatgcgtcgtttatgggctttaccggtacaccgattgcgtctgaagataaagatacccg

SEQ ID NO: 623579 - DNA, 75 bp, synthetic construct
  source 1..75: mol_type = other DNA
ctggcacctgagctgatggggtataacgaacagcttcccgcagtaaaacagagcgccatgcagcactcggttgat

SEQ ID NO: 623580 - DNA, 75 bp, synthetic construct
  source 1..75: mol_type = other DNA
ttgtcggcttattaatttcatgccctgctttagcaagaaagcacaatcataccgatggactaaatcaggtaggtg

SEQ ID NO: 623581 - DNA, 75 bp, synthetic construct
  source 1..75: mol_type = other DNA
caccgctattatgacccgctgcaggggcggtatatcactcaggatccgattgggctgaagggggatggaacctgt

SEQ ID NO: 623582 - DNA, 75 bp, synthetic construct
  source 1..75: mol_type = other DNA
gttgctaaatatcatcctccaagacctggctatggttccgaacgcatcgccgcagagtacttccagatcaaatac

SEQ ID NO: 623583 - DNA, 75 bp, synthetic construct
  source 1..75: mol_type = other DNA
caaaaattaggattctctcatgttcagggatacttataccagaaaccgttaccgttttcagaatggcatatagac

SEQ ID NO: 623584 - DNA, 75 bp, synthetic construct
  source 1..75: mol_type = other DNA
tatggattagagtttgttgaggcgatatatggaagtcagaaattttatgaaattgttaatgatataaaatcgaag

SEQ ID NO: 623585 - DNA, 75 bp, synthetic construct
  source 1..75: mol_type = other DNA
ggtctccacgcccaaagtacggcatcacccggcgttggatctgaatcttatccctgatttcctggaaagaatcga

SEQ ID NO: 623586 - DNA, 75 bp, synthetic construct
  source 1..75: mol_type = other DNA
atcgcagcgaaaatatattgttacgaattccgctgattatgataaatattctgacatagtcaaaaggggcgtaat

SEQ ID NO: 623587 - DNA, 75 bp, synthetic construct
  source 1..75: mol_type = other DNA
gacctttatgagatcctccggggatttcgaattgaggcgcctgcgtcttcactcgagcgtctgcgtacaaatgcc

SEQ ID NO: 623588 - DNA, 75 bp, synthetic construct
  source 1..75: mol_type = other DNA
cagatgcaggctttgaggttcgagccaaagcaaaaaacaagaagcaggaggatatcgataaagagcggaacaatc

SEQ ID NO: 623589 - DNA, 75 bp, synthetic construct
  source 1..75: mol_type = other DNA
cagtctctcgaagaaccaactcgcataccgcacggcgacactcaaatccgcaggggcggtgccagagatgctcca

SEQ ID NO: 623590 - DNA, 75 bp, synthetic construct
  source 1..75: mol_type = other DNA
tcgacctggcgcttactcgttggttgatcacggtattaaagccatgaacggcgcactgcgcgataaaaaatatgg

SEQ ID NO: 623591 - DNA, 75 bp, synthetic construct
  source 1..75: mol_type = other DNA
cagaatcagcggcgagttacgctttaggtcaagcaaagcattttcaatcgaaagcagatcacaacaaagctgaaa

SEQ ID NO: 623592 - DNA, 75 bp, synthetic construct
  source 1..75: mol_type = other DNA
ttattgagctggtgttgcatctggcctatgaaaaaggcgaaggcgagggcaatttcgagcaactggaggaactgt

SEQ ID NO: 623593 - DNA, 75 bp, synthetic construct
  source 1..75: mol_type = other DNA
gaccactttattgaatcggttagcccggacatctatacccgttactttatggcagcgggcgcgattggtgcactg

SEQ ID NO: 623594 - DNA, 75 bp, synthetic construct
  source 1..75: mol_type = other DNA
aattagtgaatattgatgtcagtgatggcagtgtgaaggtctgtggaagtgtggatagtgcccgatttcacgcca

SEQ ID NO: 623595 - DNA, 75 bp, synthetic construct
  source 1..75: mol_type = other DNA
cagacacgccagaatctttgtatcttatcgaaatgctatccgcgacgctggctgagattactggcgatagcggaa

SEQ ID NO: 623596 - DNA, 75 bp, synthetic construct
  source 1..75: mol_type = other DNA
actggtttttattatgtaaataagtttgttgaaaagcctaatcgtgaaaccgcagaattgtatgtgacttctggt

SEQ ID NO: 623597 - DNA, 75 bp, synthetic construct
  source 1..75: mol_type = other DNA
gtctaaaaagagtgatgtacagcatgtaaaaaaaatagtcgaaatgcttaaattgcagcaacgtacagagtatat

SEQ ID NO: 623598 - DNA, 75 bp, synthetic construct
  source 1..75: mol_type = other DNA
ctcggatacggcaacagcgttcgcatacctgctgaaaacagtgagatgcactgaacgtgtattgaggcggttggg

SEQ ID NO: 623599 - DNA, 75 bp, synthetic construct
  source 1..75: mol_type = other DNA
cggagagacagcgccgaaaacatcagactctcccgtctgcaaaggtatccacccgcagcaacatctggcggacta

SEQ ID NO: 623600 - DNA, 75 bp, synthetic construct
  source 1..75: mol_type = other DNA
gagacaatgtacgaaaccggtaaggatatgaacgccaagtaccgtgaaacctctcgcggtggtctggcaataaaa

SEQ ID NO: 623601 - DNA, 75 bp, synthetic construct
  source 1..75: mol_type = other DNA
ataaaaataaaatgttctgaaatggaacatttgggattcactccaatcccgcaaggagtaacgctaatccatgaa

SEQ ID NO: 623602 - DNA, 75 bp, synthetic construct
  source 1..75: mol_type = other DNA
aaatttatccttcacgcgccatttctgttaacggatagtcgtgaaggtatcaaagcaggagaaaagcataaccag

SEQ ID NO: 623603 - DNA, 75 bp, synthetic construct
  source 1..75: mol_type = other DNA
tttccgtttgaccataaagaaaaaacgcccctggagagctacaacgaaatttttgaaaaattgaaagcgcttgaa

SEQ ID NO: 623604 - DNA, 75 bp, synthetic construct
  source 1..75: mol_type = other DNA
tcgtaatggctggtggtacgggtagccgcctttggcctctgtctagagaacactatcctaagcaatttttgcaac

SEQ ID NO: 623605 - DNA, 75 bp, synthetic construct
  source 1..75: mol_type = other DNA
tcccctgggggatcatgaaattaccctcccaggcagcaacacgtgaggacactttccacgatacgtttttacgtg

SEQ ID NO: 623606 - DNA, 75 bp, synthetic construct
  source 1..75: mol_type = other DNA
tggctatgacgttaagcaacgcatgaaggtaattaaacgcgttaaagagttggaggaggcgcaacacaaactagc

SEQ ID NO: 623607 - DNA, 75 bp, synthetic construct
  source 1..75: mol_type = other DNA
gctggggccgcggcgtcatacttgcgatcggattcgcaaccttgggcttatgaattatcatacattgcattttta

SEQ ID NO: 623608 - DNA, 75 bp, synthetic construct
  source 1..75: mol_type = other DNA
tgaagccacttactacaactgcaagtccagatacggcggtatggaatcttctgatattaaaaaatcaaggatctt

SEQ ID NO: 623609 - DNA, 75 bp, synthetic construct
  source 1..75: mol_type = other DNA
gcttaatattttggctggcggtaatgcctccttaaccactattactaccagcgtcattggtggtaatgaggactc

SEQ ID NO: 623610 - DNA, 75 bp, synthetic construct
  source 1..75: mol_type = other DNA
gtgatactggttgtctggagattcagggggccagtctacattaacgcacgtattgatgatgatataaagaaccaa

SEQ ID NO: 623611 - DNA, 75 bp, synthetic construct
  source 1..75: mol_type = other DNA
aatctcgtccgggaatggtcgaagatgccccaggttcagcgggaaaagatcaagggtgttaaggggttttgtact

SEQ ID NO: 623612 - DNA, 75 bp, synthetic construct
  source 1..75: mol_type = other DNA
ggtgtgagagccacaacatccggccgtgcacagcacgtcattacctgaatttgagcaaggacggattaacctggg

SEQ ID NO: 623613 - DNA, 75 bp, synthetic construct
  source 1..75: mol_type = other DNA
agtatggttgaaaccaaacttgctttgctggagggggggaagaggcgcggtgctttgcatcaggcatgggggcaa

SEQ ID NO: 623614 - DNA, 75 bp, synthetic construct
  source 1..75: mol_type = other DNA
aaaacatctcttacctgcgggaaattagcgtctgtactttcccggccaacgagctcgctggcgtaacggctatga

SEQ ID NO: 623615 - DNA, 75 bp, synthetic construct
  source 1..75: mol_type = other DNA
gcgctggcgaaccagacccgaaaagtggcgatgttttttaaccacaggacgtgggaactgccggttggcaaatgg

SEQ ID NO: 623616 - DNA, 75 bp, synthetic construct
  source 1..75: mol_type = other DNA
gagggcgacggaaacgaagcacaaataaacgctctgcttcagagcatcaaatctttcccttctaacttaggtaaa

SEQ ID NO: 623617 - DNA, 75 bp, synthetic construct
  source 1..75: mol_type = other DNA
gctggcgttttttttatcaattcttactttttaatcccactgtcctttccaccagaaacatacctcgtttctact

SEQ ID NO: 623618 - DNA, 75 bp, synthetic construct
  source 1..75: mol_type = other DNA
acggcaagccggtaagcagccgtaactcggtgcgtcagggctggcgtggcgagcgcgatacccgtggtgatacct

SEQ ID NO: 623619 - DNA, 75 bp, synthetic construct
  source 1..75: mol_type = other DNA
catgaagaagatgtggtcaccgcactgaaacgcggcgcggatggctatctgttaaaagatatggaaccggaagat

SEQ ID NO: 623620 - DNA, 75 bp, synthetic construct
  source 1..75: mol_type = other DNA
agtatcagacaactataacgatcctctttcattatatgctggacttgttggtggtaatcgccaggcaagctctgt

SEQ ID NO: 623621 - DNA, 75 bp, synthetic construct
  source 1..75: mol_type = other DNA
tgttagaaattaaaactaagggggcttatactgtcgccgagtattctaaaggggttatgccaagtattgttttta

SEQ ID NO: 623622 - DNA, 75 bp, synthetic construct
  source 1..75: mol_type = other DNA
gaacaaaatagctttattttcatggctaaaaacacaaaagtgtccgcaaacataaaaaagattgatcatagaact

SEQ ID NO: 623623 - DNA, 75 bp, synthetic construct
  source 1..75: mol_type = other DNA
tattttaaaaaatgttaatgatgtttggtttgaatatcgacaaataaatacaaatatgccagaagcttttggtgt

SEQ ID NO: 623624 - DNA, 75 bp, synthetic construct
  source 1..75: mol_type = other DNA
ctggcggagtggaaaggtatcctgcaggcagatgcgtttgccggttacgatgcgctttatgagtcagggcggatc

SEQ ID NO: 623625 - DNA, 75 bp, synthetic construct
  source 1..75: mol_type = other DNA
ggaattcgcccagcgtcttctgagtaaaggaatgtctcgggaagacgttgcagagatggcaaatttaccccttgc

SEQ ID NO: 623626 - DNA, 75 bp, synthetic construct
  source 1..75: mol_type = other DNA
tgcgaccggggtgaatcgtggtttcgtcacttatgacaatagcaacgacgggttggcggcaatggccaggcagct

SEQ ID NO: 623627 - DNA, 75 bp, synthetic construct
  source 1..75: mol_type = other DNA
aatccaacgttgcacgcggcaatgttccttacggggaaacaaggaataacgcaattggcttcagaaataataatc

SEQ ID NO: 623628 - DNA, 75 bp, synthetic construct
  source 1..75: mol_type = other DNA
ttcgggaggcatcccgtcaggcctataatcttgatgtctcggcaaaaaatgcgggaatgcgcgttgacgatttta

SEQ ID NO: 623629 - DNA, 75 bp, synthetic construct
  source 1..75: mol_type = other DNA
ttcctttctgtgatttttacactggttcagacaagctaaatgtcgttgctaacgacgggcgtgttgatttcatgc

SEQ ID NO: 623630 - DNA, 75 bp, synthetic construct
  source 1..75: mol_type = other DNA
cgctgtataacaccctttcccggcgcgagcgcggagcggtggatgccggctttatgactgatgccgtccgtaaac

SEQ ID NO: 623631 - DNA, 75 bp, synthetic construct
  source 1..75: mol_type = other DNA
cctatgcgccgcggtcagaaaatgacactcagtcctatatcaattcagtctcagccgcgacgggatttcagcccc

SEQ ID NO: 623632 - DNA, 75 bp, synthetic construct
  source 1..75: mol_type = other DNA
ttaatctccacatttcaaagaaagttaatgatatctggcaggagtatcgacagctcaaaccaatggattctgagg

SEQ ID NO: 623633 - DNA, 75 bp, synthetic construct
  source 1..75: mol_type = other DNA
caaaacgtttttgaggttggcacgtctgctgcgtatctgttttatgcgcaaaaaacaacagacgggcaaaacctt

SEQ ID NO: 623634 - DNA, 75 bp, synthetic construct
  source 1..75: mol_type = other DNA
caaccttttctgaccttgctacattcaacgcaggtatatctggagcaattgaacctgaaagcatttctgcagtga

SEQ ID NO: 623635 - DNA, 75 bp, synthetic construct
  source 1..75: mol_type = other DNA
gcgcacaggcggcagcagactcacaaactgcatcggcaaattccgcgacagcagccaaaaaatcagaaaccaacg

SEQ ID NO: 623636 - DNA, 75 bp, synthetic construct
  source 1..75: mol_type = other DNA
acagctcaaattcaacaatgtctggaggacgccattgcttttgccgggccaagatatacttcaatgctggatgtg

SEQ ID NO: 623637 - DNA, 75 bp, synthetic construct
  source 1..75: mol_type = other DNA
ttcgtagctactggatgccggaggacgcagaccccgaagtgatcagggtgatgaaagatcggtgttacacgtatg

SEQ ID NO: 623638 - DNA, 75 bp, synthetic construct
  source 1..75: mol_type = other DNA
gcggggtgacggtaggcggtaaaacaaccttttctgaccttgccacatttaacgcaggtatggcgggatctatcg

SEQ ID NO: 623639 - DNA, 75 bp, synthetic construct
  source 1..75: mol_type = other DNA
ctaaagcgtcagagaacaaggcgaaagaatatctcgacaaggtcgggggactcgtcagcccgatgacgcaatacg

SEQ ID NO: 623640 - DNA, 75 bp, synthetic construct
  source 1..75: mol_type = other DNA
agtacgcaggagataagtcatggaagaaaagaaacacgtttgcatattgtcagtaacgtaacgcctgaacttttg

SEQ ID NO: 623641 - DNA, 75 bp, synthetic construct
  source 1..75: mol_type = other DNA
ttggttgaaattacagtgccgcagaaaaaggacctatgcacaagaatgagttttactctcagggatcccgagcat

SEQ ID NO: 623642 - DNA, 75 bp, synthetic construct
  source 1..75: mol_type = other DNA
tccggatctgcgtcgtgaactgatgcgccagcgcggctatttcgcttacgccactaaccactaccagacgcatca

SEQ ID NO: 623643 - DNA, 75 bp, synthetic construct
  source 1..75: mol_type = other DNA
gttcgtcacgacgggagggttgaagtccgtgatctcacagtagcgtataaaattaaaagcagaacgattgagatt

SEQ ID NO: 623644 - DNA, 75 bp, synthetic construct
  source 1..75: mol_type = other DNA
tgccggtaactacggctccccttacggaaacattgactttatcgagatctcggcgcgcggtctgccttctttgct

SEQ ID NO: 623645 - DNA, 75 bp, synthetic construct
  source 1..75: mol_type = other DNA
tgcaatctggttctagagatgaaagcaagacttgatcaatctaaactacaagaattgatgagcaacgttcaaaaa

SEQ ID NO: 623646 - DNA, 75 bp, synthetic construct
  source 1..75: mol_type = other DNA
tatggttttaaagagagtagaagatatattcgtctcaagttgtattttattgttaatttctcctttgttaatatt

SEQ ID NO: 623647 - DNA, 75 bp, synthetic construct
  source 1..75: mol_type = other DNA
gacaaattgtagaaagtctaaaatgggccttaaaaaggaaagaaccaaaatatatagccaaatatttgattcagt

SEQ ID NO: 623648 - DNA, 75 bp, synthetic construct
  source 1..75: mol_type = other DNA
aaattcagcgactgacggtcgttatccataacgtcggcggccagtggaaaaccacaccccttgaggtggcattta

SEQ ID NO: 623649 - DNA, 75 bp, synthetic construct
  source 1..75: mol_type = other DNA
gcgatcgcgaaattcgctatggcgaaggttcgccgtggtttgacatcgttctgccctgcggcggtgggatcacgc

SEQ ID NO: 623650 - DNA, 75 bp, synthetic construct
  source 1..75: mol_type = other DNA
cgataccgatacggcggtcattttgctgtgccatgatctcaaccgggagctgccagtgttgcaggccgcgcgaga

SEQ ID NO: 623651 - DNA, 75 bp, synthetic construct
  source 1..75: mol_type = other DNA
accgcagcagtatatggtatggggagttccgagactgcgctgggagcattagtccgtcagtttccccgcgagaac

SEQ ID NO: 623652 - DNA, 75 bp, synthetic construct
  source 1..75: mol_type = other DNA
gtggatcaggaacacgtcacgcttaaggtgctggataccggtagtggtattcctgactacgcgctgtcacgtatt

SEQ ID NO: 623653 - DNA, 75 bp, synthetic construct
  source 1..75: mol_type = other DNA
gtgggcgggtatcaggcacgatattggtctgtcgggagattcaccgctgctttcgcgtcacttccctgccgctga

SEQ ID NO: 623654 - DNA, 75 bp, synthetic construct
  source 1..75: mol_type = other DNA
cctatgagcagatgtacctgctaaatcagcagctgatctgcaacgctgatcagttcaaacatgccgttatcacag

SEQ ID NO: 623655 - DNA, 75 bp, synthetic construct
  source 1..75: mol_type = other DNA
ccgtttctccgtcggtctgcgtaaagcggccgttattaccggctatgttctggccgccgtggtgggctattcgcg

SEQ ID NO: 623656 - DNA, 75 bp, synthetic construct
  source 1..75: mol_type = other DNA
tgctggggcaaatcgccactgcaattggaccgctggataaaccctttactcgaactgatctacataagcaggtct

SEQ ID NO: 623657 - DNA, 75 bp, synthetic construct
  source 1..75: mol_type = other DNA
gctggggactgggtattcgcgagctggattacaccggcttcagcggccactcagcgctctccgcggccttctggc

SEQ ID NO: 623658 - DNA, 75 bp, synthetic construct
  source 1..75: mol_type = other DNA
actggccctctctgtgctggcagaagttgcctctgtacgtctccatctggaggaggattcatgcctgcccccgtc

SEQ ID NO: 623659 - DNA, 75 bp, synthetic construct
  source 1..75: mol_type = other DNA
caaacaccttgaaagtattgcccgaagtcgtggtctcctcccaaaaaaactgctgaatgaaatgattgagcaggc

SEQ ID NO: 623660 - DNA, 75 bp, synthetic construct
  source 1..75: mol_type = other DNA
caaacatcttgaaagtattgcccgaagtcgtggtctccccccaaaaaaactgctgaatgaaatgattgagcaggc

SEQ ID NO: 623661 - DNA, 75 bp, synthetic construct
  source 1..75: mol_type = other DNA
caaacaacttgaaagtattgcccgtagtcgtggtctccacccaaaaaaactgctgaatgaaatgattgagcaggc

SEQ ID NO: 623662 - DNA, 75 bp, synthetic construct
  source 1..75: mol_type = other DNA
gttcatgatgatacatcagctctatcagaattactttctgttgcaacaggtggtgaaaagatagatagactggcc

SEQ ID NO: 623663 - DNA, 75 bp, synthetic construct
  source 1..75: mol_type = other DNA
cactatggcgcgttcttttaaagccgtagccaatggcaaaatttatatcggtaaaattgacactgatcctgtaaa

SEQ ID NO: 623664 - DNA, 75 bp, synthetic construct
  source 1..75: mol_type = other DNA
agtcgtggtctccgcccaaaaaaactgctgaatgaaatgattgagcaggcgtaccaggactttgtggcaaatgag

SEQ ID NO: 623665 - DNA, 75 bp, synthetic construct
  source 1..75: mol_type = other DNA
atgtcggtactggctgatggtgtactggtggcgatggcgctggtcgtgctccggcctttattccggaacaaaaac

SEQ ID NO: 623666 - DNA, 75 bp, synthetic construct
  source 1..75: mol_type = other DNA
ggcgggctgaagcgggtggtgaaaaaggaacacgcggacggcagcgtcacgcagagtcagtttgatgcggtgggc

SEQ ID NO: 623667 - DNA, 75 bp, synthetic construct
  source 1..75: mol_type = other DNA
cggatggtgccgggcgtcacttccggctggtactgaccacgcaggcgcagcgggcagaagaagcccggcagcagg

SEQ ID NO: 623668 - DNA, 75 bp, synthetic construct
  source 1..75: mol_type = other DNA
atgatgaaacatcgttggctgagtttataggtgcgttggcaacagatgttggtaaaattgcgatagcttcagcag

SEQ ID NO: 623669 - DNA, 75 bp, synthetic construct
  source 1..75: mol_type = other DNA
gcaaggaaattcctccaaagcgcaggaatatcgcgcgattgttcatcaaaaaaatccactgcagcagatgtaccg

SEQ ID NO: 623670 - DNA, 75 bp, synthetic construct
  source 1..75: mol_type = other DNA
gcaaggggattcccaacaagcgcagaaataccgtgaaattattcgagaagacaatccattactggagatgtacag

SEQ ID NO: 623671 - DNA, 75 bp, synthetic construct
  source 1..75: mol_type = other DNA
atgagaagcattagcaagcaaagcttagaatatgctaatggcgagcgttcagaggttgaaatagcaacttactta

SEQ ID NO: 623672 - DNA, 75 bp, synthetic construct
  source 1..75: mol_type = other DNA
actatggaccaccggaaagttcagtgatgatacccgcgcaaggctgagcaagtttaaggaacaaaatgccattaa

SEQ ID NO: 623673 - DNA, 75 bp, synthetic construct
  source 1..75: mol_type = other DNA
cgtccaaattaaatgaagatatagttctggtcataaaaaatgatttgattacgccaattagcgagttagctgcaa

SEQ ID NO: 623674 - DNA, 75 bp, synthetic construct
  source 1..75: mol_type = other DNA
cgccttacagctcgacaccaacgccggggtaagaaaggacattgagaccctcactcgtgagctgaacccgaaacc

SEQ ID NO: 623675 - DNA, 75 bp, synthetic construct
  source 1..75: mol_type = other DNA
gttttgacctgtctatgccggaaaatcattcccgccccgcgccttatatgctggccgaagaggtcgcgctcgcgg

SEQ ID NO: 623676 - DNA, 75 bp, synthetic construct
  source 1..75: mol_type = other DNA
gcgaattactcccgctgtacctgccgtgggtcgctggcgtactggaaagcggcaccggcgcacaggatgacattc

SEQ ID NO: 623677 - DNA, 75 bp, synthetic construct
  source 1..75: mol_type = other DNA
ttgaccggattgaggaaaagcgtgatgccatgcagtcgctgattctgccgccaccggcacaccaggcgctggcac

SEQ ID NO: 623678 - DNA, 75 bp, synthetic construct
  source 1..75: mol_type = other DNA
atgagaaaagtaaaaacagacaacagtgatttaatcgaatacgtaaatacagtcaaagaactaaaaaatcatatt

SEQ ID NO: 623679 - DNA, 75 bp, synthetic construct
  source 1..75: mol_type = other DNA
ggcaagttacaacaattggggcgatgaagaaacgggccgttaccagacaaccgcggtgggttatctgtttaatcc

SEQ ID NO: 623680 - DNA, 75 bp, synthetic construct
  source 1..75: mol_type = other DNA
gcccgcgccagacccggagttacagctacagcaccaccggcaggctgaccggcgttcacaccaccgcagcgaacc

SEQ ID NO: 623681 - DNA, 75 bp, synthetic construct
  source 1..75: mol_type = other DNA
tagatgtagcgcaacaaatgctcaacacccctgcggtagagtcagctatagagaagttcgaacacgactggaatg

SEQ ID NO: 623682 - DNA, 75 bp, synthetic construct
  source 1..75: mol_type = other DNA
tataggtctgcacataccacattgcgcagactggataagaaaagacaatctcttttggatagctttattggtgag

SEQ ID NO: 623683 - DNA, 75 bp, synthetic construct
  source 1..75: mol_type = other DNA
ttatcaggacgtgtgcgaaaacccggccagcaccagctttggctggatgttgggcggagcagtggactggatctg

SEQ ID NO: 623684 - DNA, 75 bp, synthetic construct
  source 1..75: mol_type = other DNA
cattgaagcgttccatgaggctgaaaccgtccaggtgcattccgctttccgtcgtcatcaacgggaggtgcacct

SEQ ID NO: 623685 - DNA, 75 bp, synthetic construct
  source 1..75: mol_type = other DNA
tccgcacgttttaccgggatgacatcgaccgttttctggaaatacgcacccggcgcatcaaccaggacagcacaa

SEQ ID NO: 623686 - DNA, 75 bp, synthetic construct
  source 1..75: mol_type = other DNA
tccgcgagctgaaatcgcaaggccgcggtattgtctatatctcccaccgcatgaaagaaatcttcgagatttgcg

SEQ ID NO: 623687 - DNA, 75 bp, synthetic construct
  source 1..75: mol_type = other DNA
ttctaaagctatggatgcttctggcgacgttggtgaaatagaacaagaaaaaataagagcctacaatatgggatg

SEQ ID NO: 623688 - DNA, 75 bp, synthetic construct
  source 1..75: mol_type = other DNA
ggaaccagtgaggatgttgttagtttccaccatctgaatcaagcgataattcatagtggtcttgcctctggtatg

SEQ ID NO: 623689 - DNA, 75 bp, synthetic construct
  source 1..75: mol_type = other DNA
ccaacagcagcgcattctggaggtttctctcgacagaactcgcctggaacagatgccggtcaatgagtatctcga

SEQ ID NO: 623690 - DNA, 75 bp, synthetic construct
  source 1..75: mol_type = other DNA
ataaaagtaatttttaacagggtaaatataaaaaaagatataaaagaacaattctcaacaatattaaaaagcgaa

SEQ ID NO: 623691 - DNA, 75 bp, synthetic construct
  source 1..75: mol_type = other DNA
atgagaattgcagtattaaattatagtggtaatgtaggtaaaaccaccatcagccagcatatgctattaccacgc

SEQ ID NO: 623692 - DNA, 75 bp, synthetic construct
  source 1..75: mol_type = other DNA
ggatgtgtgcgaaaaccctgccagcacaacgctctggctggatgtcggacgcagtagcggactggatctgacgta

SEQ ID NO: 623693 - DNA, 75 bp, synthetic construct
  source 1..75: mol_type = other DNA
cctgtcactatcggcgcaggtggggccggcggcgttggtgcgacgaacggcctcaagggcggtgatagctcgttc

SEQ ID NO: 623694 - DNA, 75 bp, synthetic construct
  source 1..75: mol_type = other DNA
attgctcctggtggcgcaggcggcggaaagtcaggagtcacaaacacaaacggtggtaacggaggtgtgccgagt

SEQ ID NO: 623695 - DNA, 75 bp, synthetic construct
  source 1..75: mol_type = other DNA
atgagaattgcagtattaaattatagcggtaatgtaggtaaaaccaccattagccagcatatgctattaccacgc

SEQ ID NO: 623696 - DNA, 75 bp, synthetic construct
  source 1..75: mol_type = other DNA
gacattacaggcgcgggatatgggaaatatcaagctggggctaaattataagcaacagttacccggcgcgttctg

SEQ ID NO: 623697 - DNA, 75 bp, synthetic construct
  source 1..75: mol_type = other DNA
tggtatcctgatgacggcatccacatacgttaccagacccccggggggcagatggaagacattgcctttgcttct

SEQ ID NO: 623698 - DNA, 75 bp, synthetic construct
  source 1..75: mol_type = other DNA
cctccggaggaacctgcgtcatatttgcgcagcctgaaattcagaacccgccactgccatcctgtgggtcaggat

SEQ ID NO: 623699 - DNA, 75 bp, synthetic construct
  source 1..75: mol_type = other DNA
ggagacgctccctatcatgtgagcttacgccgaacagactcaagccctgtatctacaggtacaattgaagataac

SEQ ID NO: 623700 - DNA, 75 bp, synthetic construct
  source 1..75: mol_type = other DNA
cgagggggttcttcatatagctgttaggaaaagaagacaattagatgtcagatgttttattcaacatggtgccga

SEQ ID NO: 623701 - DNA, 75 bp, synthetic construct
  source 1..75: mol_type = other DNA
acaatgtattattgaacgaattagtttaggggaggttagttatgataataagcaaacatatcacataacatcctt

SEQ ID NO: 623702 - DNA, 75 bp, synthetic construct
  source 1..75: mol_type = other DNA
gaaggcactgatatgccgtcaaatggaggggggagaaaaagcgtttcgttcgcgctatgagcgtattcttagctg

SEQ ID NO: 623703 - DNA, 75 bp, synthetic construct
  source 1..75: mol_type = other DNA
tgcatcggctatgctatttcgcgaggccgagacgctttacttacgtcgacttgccaatactccggaaattcgaac

SEQ ID NO: 623704 - DNA, 75 bp, synthetic construct
  source 1..75: mol_type = other DNA
gtattagagcgtattagccttgctatctacagtgcatgcttattgtcataccaacgcagaaatgcgtttatgcca

SEQ ID NO: 623705 - DNA, 75 bp, synthetic construct
  source 1..75: mol_type = other DNA
ttgcgagtggtacgaaacatcattaacaccaatcgttcgagagttccattcactgaatggatacggacgcaaatc

SEQ ID NO: 623706 - DNA, 75 bp, synthetic construct
  source 1..75: mol_type = other DNA
taatggtcagcttaatatccgcaccgtattaggtgatgataaatcggctacggacagacttattgttgagggtaa

SEQ ID NO: 623707 - DNA, 75 bp, synthetic construct
  source 1..75: mol_type = other DNA
gtggcacttgaaactgtggctgatggaagttatgcagttgctattcgacaaggtaacattgatataaaaaatagt

SEQ ID NO: 623708 - DNA, 75 bp, synthetic construct
  source 1..75: mol_type = other DNA
cgaagtattatcacacctggtaataatattctggttaataatactggaggtgacttaaacataatttcgtccgac

SEQ ID NO: 623709 - DNA, 75 bp, synthetic construct
  source 1..75: mol_type = other DNA
tttgaaatgccggtcgaatccaccgccgatattactgacaattgcgacagtggcggactcagcatgcagcaaatg

SEQ ID NO: 623710 - DNA, 75 bp, synthetic construct
  source 1..75: mol_type = other DNA
tattcgccatgtgaatggcgtgactatcttgctgaactaaatgagcaaggtcaggcttatgcgcaatttgtcgcc

SEQ ID NO: 623711 - DNA, 75 bp, synthetic construct
  source 1..75: mol_type = other DNA
tttttataatcgcatttggcttcattactgttggttcattttttattgtgcttatccgttttcttgaacgtgcag

SEQ ID NO: 623712 - DNA, 75 bp, synthetic construct
  source 1..75: mol_type = other DNA
atggctacggtgaatttttttgtgataaaacaactttttaggaagttattttgttcgctttttgcactacacttt

SEQ ID NO: 623713 - DNA, 75 bp, synthetic construct
  source 1..75: mol_type = other DNA
gatatatcccatgacatgctggagaaactcatcttcccgcccaaagacacctctgcatcagagcttgtaatgcct

SEQ ID NO: 623714 - DNA, 75 bp, synthetic construct
  source 1..75: mol_type = other DNA
atgcccccacacaaaatccgccaggagtggctgacgctggacgaggccgcagaagtcatccggcagcacaacatc

SEQ ID NO: 623715 - DNA, 75 bp, synthetic construct
  source 1..75: mol_type = other DNA
catattacgcgaccttaccctggcaaccactggctgactaccccacatgcccggaaacgcttaaggatatgagcg

SEQ ID NO: 623716 - DNA, 75 bp, synthetic construct
  source 1..75: mol_type = other DNA
gacaccgatattaagctcaaccgcgcattgtgggtaatggcagaaacgctgctggagagctcagtctgtgcagac

SEQ ID NO: 623717 - DNA, 75 bp, synthetic construct
  source 1..75: mol_type = other DNA
gatgaagctttttttatgaatttatctgaagctgatgcagcttttctcaaggtatttgatgaaaccgtacctccc

SEQ ID NO: 623718 - DNA, 75 bp, synthetic construct
  source 1..75: mol_type = other DNA
tgaacaaaaaaacgaaaattcgccaccgaaacgagctaaatcacaccctggctcaacttcctttgcccgcaaagc

SEQ ID NO: 623719 - DNA, 75 bp, synthetic construct
  source 1..75: mol_type = other DNA
tacaaccgccaccgctattatgacccgctgcaggggcgatatatcactcaggatccgattggactgaagggggga

SEQ ID NO: 623720 - DNA, 75 bp, synthetic construct
  source 1..75: mol_type = other DNA
ttaaagttagagtatcgagaaagaatatctatagatatcttacaaaatttcacatgtaaaaatccaacgggagaa

SEQ ID NO: 623721 - DNA, 75 bp, synthetic construct
  source 1..75: mol_type = other DNA
ttaggatcccgccgggaggcggaggtaattgggacttaaaagaaatagagaggataagtaagagtataggtgttg

SEQ ID NO: 623722 - DNA, 75 bp, synthetic construct
  source 1..75: mol_type = other DNA
cactgagcaaggcaaagtgctgcgcattgcgggcaacccttatcatccgttgtcgcacgagcaccatatagacgc

SEQ ID NO: 623723 - DNA, 75 bp, synthetic construct
  source 1..75: mol_type = other DNA
cggcagagcagtggcagtatgatgaccacggctggctgagagaaatcagccacctgagcgaaggccaccgtgtcg

SEQ ID NO: 623724 - DNA, 75 bp, synthetic construct
  source 1..75: mol_type = other DNA
gttggggggcattttgcgtatacttatgtagtggatgttgataatccagaatcatcgacagaatctgttggtatc

SEQ ID NO: 623725 - DNA, 75 bp, synthetic construct
  source 1..75: mol_type = other DNA
tttgaatttacattggcacaaaatacaaacggtttgggaagcctccacgatatatatatccagaatgacaagtcg

SEQ ID NO: 623726 - DNA, 75 bp, synthetic construct
  source 1..75: mol_type = other DNA
tggttaatctgagtaatagaagcacgacttctgatcagtttgtccctgatccagtaacagtaaacggctttttgg

SEQ ID NO: 623727 - DNA, 75 bp, synthetic construct
  source 1..75: mol_type = other DNA
attaagaagcctcgagttaacgctcgaggttttttttcgtctgtatatctattattgccagaatcgcaaaaatcc

SEQ ID NO: 623728 - DNA, 75 bp, synthetic construct
  source 1..75: mol_type = other DNA
gtgaatatttatcgactctcttttatatcctgtctggtcatggcgatgccttgcgcattggcggtcgaattcaat

SEQ ID NO: 623729 - DNA, 75 bp, synthetic construct
  source 1..75: mol_type = other DNA
ggcgtttacgcagtgattaccaattgaatcagaccgatagcgatgataaccatgaacagtcaggcgaaatatcac

SEQ ID NO: 623730 - DNA, 75 bp, synthetic construct
  source 1..75: mol_type = other DNA
ggcaaaaaaagggtgacaaaaccattccatgcatcaatgattcactggtcgataaatttggtttaaaaccagata

SEQ ID NO: 623731 - DNA, 75 bp, synthetic construct
  source 1..75: mol_type = other DNA
ctggtacctatgccgccaatgattacagttccgtcagcagcagctggagcggttctttcacagcaacccaatatg

SEQ ID NO: 623732 - DNA, 75 bp, synthetic construct
  source 1..75: mol_type = other DNA
tcaaactgaaaatgaaaccttttttagcaatgaagtttcctgggggatgctgtcaaacacctcgctgtacggcgg

SEQ ID NO: 623733 - DNA, 75 bp, synthetic construct
  source 1..75: mol_type = other DNA
tcccgttccggtaaagacgttaacgtcatcattcgcaacgccagcggtcagttccctcccctcggtgcggatatc

SEQ ID NO: 623734 - DNA, 75 bp, synthetic construct
  source 1..75: mol_type = other DNA
aagcgccctggtacaggtatgtctccttatttgtattggaacttaataaataaagtttctgaaaatgattattta

SEQ ID NO: 623735 - DNA, 75 bp, synthetic construct
  source 1..75: mol_type = other DNA
tgcacgggaagaaagcctgacgtgtgtctggatagaactcgatggaaagcgtgttgccctggggctgccggattc

SEQ ID NO: 623736 - DNA, 75 bp, synthetic construct
  source 1..75: mol_type = other DNA
gacgatgatgatattgctctcgttgcagaaaattgtggtgctactgttattcgtagaccggcggagcttgccgga

SEQ ID NO: 623737 - DNA, 75 bp, synthetic construct
  source 1..75: mol_type = other DNA
cgacgacagccgcgtctgggatggtcgggtgacaaaactttggggagagaaggggcagatcattattggggagtg

SEQ ID NO: 623738 - DNA, 75 bp, synthetic construct
  source 1..75: mol_type = other DNA
cacatctatctgcggccgtccaatagtctcaaggactactgggtttgcgagcttgccgaccgcagtcgacgcttc

SEQ ID NO: 623739 - DNA, 75 bp, synthetic construct
  source 1..75: mol_type = other DNA
accaataaagccgatctctatacccgcgcgacgctgatcaacgacgatacagatgtactgctggtggctaaggag

SEQ ID NO: 623740 - DNA, 75 bp, synthetic construct
  source 1..75: mol_type = other DNA
ctattctctgttgacgaaaaaatcgcgttactgaacaagcagtacaacttgctgtcccagtacaaaaaaggcatg

SEQ ID NO: 623741 - DNA, 75 bp, synthetic construct
  source 1..75: mol_type = other DNA
atgggaaattcattgttatattcagaggctaaagccagtgaatcagaaagtactctggatgattataaaatattt

SEQ ID NO: 623742 - DNA, 75 bp, synthetic construct
  source 1..75: mol_type = other DNA
gtgttaatcacaacggcgacgaaaaactggcttttgaacttgttgatgctgcttataaggccggggctgatattg

SEQ ID NO: 623743 - DNA, 75 bp, synthetic construct
  source 1..75: mol_type = other DNA
caggcggactatcaggttgcgaacactaagaagcaagaatcacagttagaaatgctaagtcggttggagctttca

SEQ ID NO: 623744 - DNA, 75 bp, synthetic construct
  source 1..75: mol_type = other DNA
gcccgtcaccggagtttgaacgctggctggaaagcatgggcattatggcaaacggtcgcctgaccaaacgggcgg

SEQ ID NO: 623745 - DNA, 75 bp, synthetic construct
  source 1..75: mol_type = other DNA
gtcgcacgaaaagaactacaccctgaatgtgatcgtctgcgattttgttggcgaccctgacctgatttttgtgcc

SEQ ID NO: 623746 - DNA, 75 bp, synthetic construct
  source 1..75: mol_type = other DNA
gcgccaacaaggaatgccgccagtggttcaatccagtacgcgacacgcagaccgtctgcggttatgagtgcgcca

SEQ ID NO: 623747 - DNA, 75 bp, synthetic construct
  source 1..75: mol_type = other DNA
actaacctgaatgcctacggtaccaccggaattaacgccggggcatggcgcttacgcagtgattaccagcttaat

SEQ ID NO: 623748 - DNA, 75 bp, synthetic construct
  source 1..75: mol_type = other DNA
tgttcacgatgtttgtcgatggtgacaactacatcgggaaaatccccagcgtcacgctccccaaaattacccgta

SEQ ID NO: 623749 - DNA, 75 bp, synthetic construct
  source 1..75: mol_type = other DNA
ggaaatcgacctgttgaaccacatctaccggaaggacggcaaggacattgttcctgaccgtatccgttccgcgct

SEQ ID NO: 623750 - DNA, 75 bp, synthetic construct
  source 1..75: mol_type = other DNA
ttatatgaccctaaaaaacggttaaagttaaaacattatattatagcaggttatgatagttatgttgagatttta

SEQ ID NO: 623751 - DNA, 75 bp, synthetic construct
  source 1..75: mol_type = other DNA
actattagtggtagtggctggtggagtctatgagctgcaaatgaagggcaaaagcggtgtcatgctagtagcggc

SEQ ID NO: 623752 - DNA, 75 bp, synthetic construct
  source 1..75: mol_type = other DNA
accttatttttgattgccgccattgtaattcgtccgtttgctggtcaatgggtggggaaatattctaataaagct

SEQ ID NO: 623753 - DNA, 75 bp, synthetic construct
  source 1..75: mol_type = other DNA
ttacggttcaggtcttgggatggccgaagagaaatttcactattatctcgatctcaatgaccgctatgtctattt

SEQ ID NO: 623754 - DNA, 75 bp, synthetic construct
  source 1..75: mol_type = other DNA
atccggatgtgttcgaacaggtctggcgggagtacccgttgcgtgctggggcaaacccgaagaaatccgctttca

SEQ ID NO: 623755 - DNA, 75 bp, synthetic construct
  source 1..75: mol_type = other DNA
gatattaaaaattacgatttcacatctcttaagaatatcgatgtcgtggctggcggaccgccttgccaacctttt

SEQ ID NO: 623756 - DNA, 75 bp, synthetic construct
  source 1..75: mol_type = other DNA
gtgcgttacgcgctggctgattgtgagctgggtcgttgcctggtggcagaaagcgagcgggggatttgcgcgata

SEQ ID NO: 623757 - DNA, 75 bp, synthetic construct
  source 1..75: mol_type = other DNA
ctcaaacgggtgaagttcataccacagggaatacagcagcaggttcccgcgaaacgtcaaaaccgcggctcccga

SEQ ID NO: 623758 - DNA, 75 bp, synthetic construct
  source 1..75: mol_type = other DNA
cacggacacccatcggaaaggctactctccgttaccgtggtctgcctacccgtcacctcctgtcaatgctgggga

SEQ ID NO: 623759 - DNA, 75 bp, synthetic construct
  source 1..75: mol_type = other DNA
atggctatgattgacccacgcactcccgaaggccgtttgaccctgcgttaccgtggtcttcccacttctattctg

SEQ ID NO: 623760 - DNA, 75 bp, synthetic construct
  source 1..75: mol_type = other DNA
actaacattgatgttattaaactggtagatccgctacaccttgcacatatgacttctgatgcggttgcgattccg

SEQ ID NO: 623761 - DNA, 75 bp, synthetic construct
  source 1..75: mol_type = other DNA
ttgggaacaccaaataacacctatctaaaatataatcccaaagctaaagggaatggagttacaattatcaggcaa

SEQ ID NO: 623762 - DNA, 75 bp, synthetic construct
  source 1..75: mol_type = other DNA
cgcgcagccctcctgcgcaatactatcggcgatgataaaacccaattactcatcaagaatttcggcggagaagtt

SEQ ID NO: 623763 - DNA, 75 bp, synthetic construct
  source 1..75: mol_type = other DNA
gttcctcactgagtttgaagctatgcgagataccggagtgccatctccccgagcgatgaccgagctttgccctaa

SEQ ID NO: 623764 - DNA, 75 bp, synthetic construct
  source 1..75: mol_type = other DNA
gcaaacaagtggatgccaccaacagcacgatttccctcgccgcttatcgtttctccgatcgtcattttcacagct

SEQ ID NO: 623765 - DNA, 75 bp, synthetic construct
  source 1..75: mol_type = other DNA
actatcaacacctgagttcagccggtgaatgggatttgtctggcacttatgccgccaatgattacagctccgtca

SEQ ID NO: 623766 - DNA, 75 bp, synthetic construct
  source 1..75: mol_type = other DNA
accaacagcgcacaggggctgtggtggatactggggtggtcagagcgggtgccgggtgctgaggacgtactgcca

SEQ ID NO: 623767 - DNA, 75 bp, synthetic construct
  source 1..75: mol_type = other DNA
attattcggggactttatctgcgggatattacccttcaggtaagtccttttctcgccagcatattggagcgtgat

SEQ ID NO: 623768 - DNA, 75 bp, synthetic construct
  source 1..75: mol_type = other DNA
ctcagcattgagaccgtctatgaccagcagacgatcaccttcccggtcaacggagcgttgaagaatggcactaca

SEQ ID NO: 623769 - DNA, 75 bp, synthetic construct
  source 1..75: mol_type = other DNA
tgaacgttatacctatattccgaccatctccctgctggacagcctgcagcgcgaaggctttcagccattctttgc

SEQ ID NO: 623770 - DNA, 75 bp, synthetic construct
  source 1..75: mol_type = other DNA
ggatatgttttgcactaaatgaatctggaatgatcgcttttatgggggggagttggtttgtgacggtcataattt

SEQ ID NO: 623771 - DNA, 75 bp, synthetic construct
  source 1..75: mol_type = other DNA
cgacgcggagcgacgctgattgatgggcaaacggtagcagaaaaagctcaaaagctatggcaggactatttacgc

SEQ ID NO: 623772 - DNA, 75 bp, synthetic construct
  source 1..75: mol_type = other DNA
aacgcgtatcgtcccgcagccagtagtaattatcgatgcgcgtatcgccatgaagcgtcatggcgtggggaatgc

SEQ ID NO: 623773 - DNA, 75 bp, synthetic construct
  source 1..75: mol_type = other DNA
ttgtccggtggacttacttttgaaaacgactcaatccttgcctggattcggaatactgactgggcaaagattgga

SEQ ID NO: 623774 - DNA, 75 bp, synthetic construct
  source 1..75: mol_type = other DNA
tatcttccattgctgactggattgaagcaaagaaatactgttcgctattactctaatagtgacaagaatacagtt

SEQ ID NO: 623775 - DNA, 75 bp, synthetic construct
  source 1..75: mol_type = other DNA
tgtctgttcttgttaaagcccttttcagcagtgaagtaaaaatatcgacagtcaatgcactgaggatatttaatt

SEQ ID NO: 623776 - DNA, 75 bp, synthetic construct
  source 1..75: mol_type = other DNA
cctcacaattttataggaatgggtggggattatcactggtatcgtcaggatgcaaatggcgaatggtctgacaaa

SEQ ID NO: 623777 - DNA, 75 bp, synthetic construct
  source 1..75: mol_type = other DNA
ctggaaaagagttttctaaactcacttgtagtagtatttttgaagcgtcaaaaaatgatggtgccaaggatttag

SEQ ID NO: 623778 - DNA, 75 bp, synthetic construct
  source 1..75: mol_type = other DNA
gaataatccccctctaccactgcgactatcgcggcctgccgctgacgcttatcagccctgacggggcaacagaat

SEQ ID NO: 623779 - DNA, 75 bp, synthetic construct
  source 1..75: mol_type = other DNA
gcgctgacgcttgtttggatgaagcggccgcattggtggcaaaatcaatgaccgatctcggaggtgccgcctgcg

SEQ ID NO: 623780 - DNA, 75 bp, synthetic construct
  source 1..75: mol_type = other DNA
cgtactattggctcgatgagagaggcccccactttatccttggcggaaattcatgctgcgatggcacgtgcggcg

SEQ ID NO: 623781 - DNA, 75 bp, synthetic construct
  source 1..75: mol_type = other DNA
aaagcggcggcaccctgtttggccgcaagaacacctactggagtgagcaacttgtcagccatcgctcacgcaaaa

SEQ ID NO: 623782 - DNA, 75 bp, synthetic construct
  source 1..75: mol_type = other DNA
cgagggagaaaatggtgatatagggccactacgcccctttacgcttaatctcagaactggtcggataagcatggg

SEQ ID NO: 623783 - DNA, 75 bp, synthetic construct
  source 1..75: mol_type = other DNA
aaatactgactgggcgaagattggttttaaaaatgatgccgacagcgacactgattcatacatgtggtttgaaac

SEQ ID NO: 623784 - DNA, 75 bp, synthetic construct
  source 1..75: mol_type = other DNA
gctaatcccttctatagtcgcaagctggacggtcgaggacagcctgtatttgacatctcgtcaggtggctggatg

SEQ ID NO: 623785 - DNA, 75 bp, synthetic construct
  source 1..75: mol_type = other DNA
caaggcgtgggtgcaattagatttagaggaaaagatcccctccccccaatagattatcctgaaaagtgtggaacg

SEQ ID NO: 623786 - DNA, 75 bp, synthetic construct
  source 1..75: mol_type = other DNA
aactggctgcaaaaataaagaaagtcaacgattattataaggatattcttgacggggcttctcctgagaaagttg

SEQ ID NO: 623787 - DNA, 75 bp, synthetic construct
  source 1..75: mol_type = other DNA
tctgcacgttcgtctctgattggtatttttctgtcgatcataattcttatgtttaatatgaattcattaagattt

SEQ ID NO: 623788 - DNA, 75 bp, synthetic construct
  source 1..75: mol_type = other DNA
ccctgacgcaggcattattatgggcacaaaagatgtccgtcacgcctatgagatgttgccgcaggcaaaaatcat

SEQ ID NO: 623789 - DNA, 75 bp, synthetic construct
  source 1..75: mol_type = other DNA
aaatgtagtggagaaagttatcgaaggggcttacgaggtggtgggggtttttgaccggatagaggagaagcgtga

SEQ ID NO: 623790 - DNA, 75 bp, synthetic construct
  source 1..75: mol_type = other DNA
taaaaaagcgggcatgcatacggttaccgcaacgttgggtaacaataatgccagcgatgcgcaaccagtcacatt

SEQ ID NO: 623791 - DNA, 75 bp, synthetic construct
  source 1..75: mol_type = other DNA
tcaatcggacgttattcctgtttatgccgcccctccagtgccagtagtacctgaagaaaaaccaatgcctaaccc

SEQ ID NO: 623792 - DNA, 75 bp, synthetic construct
  source 1..75: mol_type = other DNA
cccagggcggtcagattgcgtccatgcgtatccgcatgttcagccagatcgccaatatcatgctttacgtaagcg

SEQ ID NO: 623793 - DNA, 75 bp, synthetic construct
  source 1..75: mol_type = other DNA
gccaatatcatgctttactgcctgtttatttttttctggatactcgttggtctggttttatgggtaaaaataagc

SEQ ID NO: 623794 - DNA, 75 bp, synthetic construct
  source 1..75: mol_type = other DNA
gctcgctctgcttaccatgatggtgagcgctcctccgttcgcaagaaacgtccgcgcctttcccgtttactccag

SEQ ID NO: 623795 - DNA, 75 bp, synthetic construct
  source 1..75: mol_type = other DNA
tagtagggcagttacctgatttgttttttataataaacaattgtcaatggttttattatggggggggcttttctc

SEQ ID NO: 623796 - DNA, 75 bp, synthetic construct
  source 1..75: mol_type = other DNA
attaccttattggatagcctgcaaaaagaaggcttttatccgttctttgcctgccaaactcgtgtgcgagatgac

SEQ ID NO: 623797 - DNA, 75 bp, synthetic construct
  source 1..75: mol_type = other DNA
tgcagcggcgaacaaatggttgtctggtggcgttcctaaccgctatcggttcaaagtccgtgaagatgacccgat

SEQ ID NO: 623798 - DNA, 75 bp, synthetic construct
  source 1..75: mol_type = other DNA
gtcgacactaacaaattcaagaagagaaataataatgaaatagataaattatctacatattttaacatagataga

SEQ ID NO: 623799 - DNA, 75 bp, synthetic construct
  source 1..75: mol_type = other DNA
tgaagattcaagattaagaactatccttggcaaaaactcgcgtcttgatgtgatgattaatcataatatttcaag

SEQ ID NO: 623800 - DNA, 75 bp, synthetic construct
  source 1..75: mol_type = other DNA
ctgaacgtcgccctcaacgccgtggccgcgcatcgttcgtggcggtactggatgaggtgcggaaggagcacgaac

SEQ ID NO: 623801 - DNA, 75 bp, synthetic construct
  source 1..75: mol_type = other DNA
atatcatgtgttctacgaagtaaaaaagtagatacttatataaatgaaaacaaaaaaacttatctaaggaggatg

SEQ ID NO: 623802 - DNA, 75 bp, synthetic construct
  source 1..75: mol_type = other DNA
agatattaatttattattaacatcgtctaatattgatgttaaacctttaataaaactggatcgtgaattatatgc

SEQ ID NO: 623803 - DNA, 75 bp, synthetic construct
  source 1..75: mol_type = other DNA
atataatgtctcaaaaatttggggatagatttcaactgagagatattaacacattggagtcatttaaaaaaccac

SEQ ID NO: 623804 - DNA, 75 bp, synthetic construct
  source 1..75: mol_type = other DNA
aatgaagatataaatgtgacaggtcaggtgagtcgtagtggttgtttaatgcctcaagggcagtccattaatatg

SEQ ID NO: 623805 - DNA, 75 bp, synthetic construct
  source 1..75: mol_type = other DNA
actacagacaagaacaaatttacaattatgattgccacccccattatttatttaagcattctatttatatttatg

SEQ ID NO: 623806 - DNA, 75 bp, synthetic construct
  source 1..75: mol_type = other DNA
atatcacaccagatgtatgtgttgacaagtcacagcttgataagatcacttcaatccaacaagccacaaaagatt

SEQ ID NO: 623807 - DNA, 75 bp, synthetic construct
  source 1..75: mol_type = other DNA
ggctagtcgtgattgattcaccgctgacaagttataagaagaaagccgctgctacggtatcgggcttcgatgaac

SEQ ID NO: 623808 - DNA, 75 bp, synthetic construct
  source 1..75: mol_type = other DNA
atatcggtctggggctggcggattgtctctggtcgtctggcctggtgggagctggatgtcagcaaatggttgctg

SEQ ID NO: 623809 - DNA, 75 bp, synthetic construct
  source 1..75: mol_type = other DNA
ctggcaagtatcggtggctatctggcaccgctgttgctttccaccggcggcggtagtcatgtggcgctcttctct

SEQ ID NO: 623810 - DNA, 75 bp, synthetic construct
  source 1..75: mol_type = other DNA
atcagtcacataaagtagacatagagccatttatacatgcagtatgggttgctggcgcacctcctgataatacat

SEQ ID NO: 623811 - DNA, 75 bp, synthetic construct
  source 1..75: mol_type = other DNA
atgcccctttgagtacaatcaaagatgttgggctggagttaacgaaggcctatttaaagaagaaatttggcctcg

SEQ ID NO: 623812 - DNA, 75 bp, synthetic construct
  source 1..75: mol_type = other DNA
cggctcgcaaaaacgcacagatttgtaggcatgataagacgcgtcagcgtcgcatcaggcatccgtgcacaaccg

SEQ ID NO: 623813 - DNA, 75 bp, synthetic construct
  source 1..75: mol_type = other DNA
atggcccccgtgatgttgtcaggtgcatacctgcaacgtgcgggggttttctctctccagcaaccaatgccacca

SEQ ID NO: 623814 - DNA, 75 bp, synthetic construct
  source 1..75: mol_type = other DNA
ggtaaagagcataccgttaaccagcatccagccggggaatataacaacattgttgtggctgaaacggtagcaaaa

SEQ ID NO: 623815 - DNA, 75 bp, synthetic construct
  source 1..75: mol_type = other DNA
acggcacagcgattcacaactacgcaggggataaccttgctaatgggctgaaggtaggtagtggaaccggagacg

SEQ ID NO: 623816 - DNA, 75 bp, synthetic construct
  source 1..75: mol_type = other DNA
atgctgaaaggcgggatttccggccgcagtgcaaaaggaaaacgtatccatacccgtgccattcacagcatcgac

SEQ ID NO: 623817 - DNA, 75 bp, synthetic construct
  source 1..75: mol_type = other DNA
ggcattcacgctgtttatggtggctgatatggcggtgatctcgccattctatgggcaagaggcagcttggcactt

SEQ ID NO: 623818 - DNA, 75 bp, synthetic construct
  source 1..75: mol_type = other DNA
gaagagggagtatccggtatttactacttcgacccgcgacagagctgtcttatgccggtagcaccagaagtcgag

SEQ ID NO: 623819 - DNA, 75 bp, synthetic construct
  source 1..75: mol_type = other DNA
ttgagtagtcattcatggcttgaatacagcgtgcggcccgacaatgaatttgaactgatcgcaccggaagggatc

SEQ ID NO: 623820 - DNA, 75 bp, synthetic construct
  source 1..75: mol_type = other DNA
cttggtgcgatatattgtataagccctcattattcctattcaataaagaagttaaatcagcagaatatataagag

SEQ ID NO: 623821 - DNA, 75 bp, synthetic construct
  source 1..75: mol_type = other DNA
attctgcgtgaagaatgggaatacagtgccgggaataaaaaacaacccggttacacgcaggctatcgaacatatc

SEQ ID NO: 623822 - DNA, 75 bp, synthetic construct
  source 1..75: mol_type = other DNA
gtaaatagttctctggcgctgcccaccgttagtgcaccggtcacgcaggctcctgcacctacggccttgttgcac

SEQ ID NO: 623823 - DNA, 75 bp, synthetic construct
  source 1..75: mol_type = other DNA
attctgacccgcatggggatcaccgccgccgtgctgggccagaaacttgttcatcgcctgcgcggcacccgcatc

SEQ ID NO: 623824 - DNA, 75 bp, synthetic construct
  source 1..75: mol_type = other DNA
aagcgtcgctgatatagcacaacatagctttggcttcgagttttgcaatcacattcaggataaacctggatatta

SEQ ID NO: 623825 - DNA, 75 bp, synthetic construct
  source 1..75: mol_type = other DNA
gaaacagaaggattacatgcttatggtgcacacagatattatttagaacaatttgtgagcaaacaattccctgac

SEQ ID NO: 623826 - DNA, 75 bp, synthetic construct
  source 1..75: mol_type = other DNA
tatgaacaagatcatcgagcgtgaaattctccgtgctcctgagcaatacctgtggatgcatcgcaggttcaaaac

SEQ ID NO: 623827 - DNA, 75 bp, synthetic construct
  source 1..75: mol_type = other DNA
agtgcttaatcgtaaacgcaacctgacccttccgatgattagaaaattacatacaatgtttggtatcccgttaaa

SEQ ID NO: 623828 - DNA, 75 bp, synthetic construct
  source 1..75: mol_type = other DNA
aacaatgtcgttctatccttgggcaggttgggaataactgggaatacgttaaggtaggcacttccgcttctggta

SEQ ID NO: 623829 - DNA, 75 bp, synthetic construct
  source 1..75: mol_type = other DNA
ttacgatatgcgtagtgtgtatggtgcattgtttggcggcagcgcgcattaccaatattcggtaaaagatacgtt

SEQ ID NO: 623830 - DNA, 75 bp, synthetic construct
  source 1..75: mol_type = other DNA
ggtaagcaattaaaacttctcgtgttcggtagttcaaatgggcgtccttctggagatcaaagaccagactggtgg

SEQ ID NO: 623831 - DNA, 75 bp, synthetic construct
  source 1..75: mol_type = other DNA
atatggcctatagattcaagacgcctctaatctatagaccacaatcattaataaataagaaatcacaacctcatt

SEQ ID NO: 623832 - DNA, 75 bp, synthetic construct
  source 1..75: mol_type = other DNA
ccaatttcattctatgctgggtttttgggaaaagaataagaacttgttcacaagtaaaaaaacttgcgccaatga

SEQ ID NO: 623833 - DNA, 75 bp, synthetic construct
  source 1..75: mol_type = other DNA
ttagcatgattcgacgtagcgataaaaaaggttatcacatgtatatcagcaatccgttgtcaggctatccagggg

SEQ ID NO: 623834 - DNA, 75 bp, synthetic construct
  source 1..75: mol_type = other DNA
tatcttaacaacaaacatcttatttcaatgcaagtggtggatgttgagagtgtcacgtccttcggagaaagaaat

SEQ ID NO: 623835 - DNA, 75 bp, synthetic construct
  source 1..75: mol_type = other DNA
cgatgaatggcgaattagcaataaaacacattgcacaagagtgtaataatgcagattcgtttaagagaatgtcag

SEQ ID NO: 623836 - DNA, 75 bp, synthetic construct
  source 1..75: mol_type = other DNA
gcgatcactcacgctaaaaatgatttggaaacttcatgaagggctaggtatcccagcagagtcgctgatcaagcc

SEQ ID NO: 623837 - DNA, 75 bp, synthetic construct
  source 1..75: mol_type = other DNA
gtcaacgattcaatttttgtactgatttacgagctggacgacgaaaacgaggttgatgatccggcgatgtggata

SEQ ID NO: 623838 - DNA, 75 bp, synthetic construct
  source 1..75: mol_type = other DNA
ctgtaattgttttttcacattctgtttctgcaggtagcactaactggcaaccatcagtaggcccgggacaatgta

SEQ ID NO: 623839 - DNA, 75 bp, synthetic construct
  source 1..75: mol_type = other DNA
aatatttttctctatgggaaattctgccacaatttccgctccagaacactccctggctgatgccgtgacagcatg

SEQ ID NO: 623840 - DNA, 75 bp, synthetic construct
  source 1..75: mol_type = other DNA
ttttcaggccgctgtgatcattgaatcccttatcagtgcaaatgaaaaagcactggaaggtattgcccggctgga

SEQ ID NO: 623841 - DNA, 75 bp, synthetic construct
  source 1..75: mol_type = other DNA
gcccgacaaatgggcaaaaaaatttgtgttttatttatcgactgggaagctcagttctcttgcaccattaactat

SEQ ID NO: 623842 - DNA, 75 bp, synthetic construct
  source 1..75: mol_type = other DNA
cactgaatattctggaagctgcaaaagaacgtattacctggacacttaacaccctaccccgcgtctgcgtttctt

SEQ ID NO: 623843 - DNA, 75 bp, synthetic construct
  source 1..75: mol_type = other DNA
aaaaatattttttgcatggcatggctcacctgctcagtgggttgactcctcgcaatattcaacttttgatggatg

SEQ ID NO: 623844 - DNA, 75 bp, synthetic construct
  source 1..75: mol_type = other DNA
gggttcgcagacggggagaaatgttcggagatcacgtgctggcaacagcgatactggatcggttgctacatcact

SEQ ID NO: 623845 - DNA, 75 bp, synthetic construct
  source 1..75: mol_type = other DNA
gcataaaaaaaatttgcttggcgggaatttatatattattcgcatttccgtctatttcctgggcgggaggaattg

SEQ ID NO: 623846 - DNA, 75 bp, synthetic construct
  source 1..75: mol_type = other DNA
tcaaccacgttgaatatcaaaggagaaagctatcggttgaaggaaaaaacgcagagctggagtgctggccaaaag

SEQ ID NO: 623847 - DNA, 75 bp, synthetic construct
  source 1..75: mol_type = other DNA
agataaattaaaaaaatctggatatacatttgattatattgagtttgatagttctaagggcaagaccgatcgtga

SEQ ID NO: 623848 - DNA, 75 bp, synthetic construct
  source 1..75: mol_type = other DNA
ttgtttgccgcaatgttcagttggtataaaaatccatttcctcagttactagcgattggttcattaaaagggtgt

SEQ ID NO: 623849 - DNA, 75 bp, synthetic construct
  source 1..75: mol_type = other DNA
ctgaagatgtcgaaaaaatcgttaatgccccagagattcgtaaggctgttgacgcgtttgtcagacagcctctgt

SEQ ID NO: 623850 - DNA, 75 bp, synthetic construct
  source 1..75: mol_type = other DNA
aatgcttaaagaagaaaacgaaaatgtgggagtttatggaattatggattcagtatttccaccagcactaaaaat

SEQ ID NO: 623851 - DNA, 75 bp, synthetic construct
  source 1..75: mol_type = other DNA
cgaatggggcggggactggaaaacgctgaaagacggacctcactttcagctgaagcgataagtaaaacaaaaccc

SEQ ID NO: 623852 - DNA, 75 bp, synthetic construct
  source 1..75: mol_type = other DNA
ctttccgcagttgataagtcaaaacattttctttggtctgatttcgaaaacagcttagcgggtctggatacagag

SEQ ID NO: 623853 - DNA, 75 bp, synthetic construct
  source 1..75: mol_type = other DNA
atgcgtagtaattatcttttacaagaatccaaaatgaaacaacaaaatgtagtggacgaaattaggcgtaattac

SEQ ID NO: 623854 - DNA, 75 bp, synthetic construct
  source 1..75: mol_type = other DNA
atttcttcgctgtttggcgtaacaatactgaataatgtacttgataacttccggatgaaatatccgaaaaagcgt

SEQ ID NO: 623855 - DNA, 75 bp, synthetic construct
  source 1..75: mol_type = other DNA
tcgggctacttgcccgagctaaccgagattatctggaaaatatctgggctacttacaatccgggtgtgcctatac

SEQ ID NO: 623856 - DNA, 75 bp, synthetic construct
  source 1..75: mol_type = other DNA
agggctaaaggaagttggtatcattagttttaaatgttgctatttgggtgccaaatcttacttagaagatataaa

SEQ ID NO: 623857 - DNA, 75 bp, synthetic construct
  source 1..75: mol_type = other DNA
caagaacaggaggagcatcatttattgagtttgcaaattcactagcttgtagatacgggctaaaacgaccaaatg

SEQ ID NO: 623858 - DNA, 75 bp, synthetic construct
  source 1..75: mol_type = other DNA
cgtgaactggagatgtctaccgagattgcacgtctcaaacgccagctggcagaacgggatgaagagctggctatc

SEQ ID NO: 623859 - DNA, 75 bp, synthetic construct
  source 1..75: mol_type = other DNA
tgaattggcgcgcaggcaaatgatgatcgttaaatttttgctgatgacaggatgccgaagtgcagagataagaac

SEQ ID NO: 623860 - DNA, 75 bp, synthetic construct
  source 1..75: mol_type = other DNA
acccggacgggcttcgcagcagccgggagtatgatgagaagggaaggctgacggcggagacctcgcgcagcggtg

SEQ ID NO: 623861 - DNA, 75 bp, synthetic construct
  source 1..75: mol_type = other DNA
aaaggtccactgcgggaagaaccccctgtgaagtggacggcagaaggagcttcgctcctccgggaaatgaccagg

SEQ ID NO: 623862 - DNA, 75 bp, synthetic construct
  source 1..75: mol_type = other DNA
ggatggggggccacatttatcgtactgatactgtctgctgtttttgccatcattttcacactgatgagtcgtgaa

SEQ ID NO: 623863 - DNA, 75 bp, synthetic construct
  source 1..75: mol_type = other DNA
tgtctattccctgcgacatcttcagggataacgaacatgcatggtgtgctgtcgcggagttcatgggacaacctc

SEQ ID NO: 623864 - DNA, 75 bp, synthetic construct
  source 1..75: mol_type = other DNA
aataaataatactgcgattgcaagttttattctaaatcaaactgaattgcttccctgtacccaattgcgttcata

SEQ ID NO: 623865 - DNA, 75 bp, synthetic construct
  source 1..75: mol_type = other DNA
tacattcaagtggatatccaatcctttcgatgttgatggcgatggaaaaaacacggtaatcgactcatacaaata

SEQ ID NO: 623866 - DNA, 75 bp, synthetic construct
  source 1..75: mol_type = other DNA
cgggatgatttgacccggctacaaataattgctgcgtctgcgaccgcactggcccggtgggagacgcggctgaag

SEQ ID NO: 623867 - DNA, 75 bp, synthetic construct
  source 1..75: mol_type = other DNA
caggatgatttcacgcgggtgagaattgttcgtgaaacggcaacagccctggaacgctgggagccccgtctgacg

SEQ ID NO: 623868 - DNA, 75 bp, synthetic construct
  source 1..75: mol_type = other DNA
gcttgtcggggtgaataacgaaacacaggaaacgattcgacttgaggagataaaaattggcaacgtctcaggcaa

SEQ ID NO: 623869 - DNA, 75 bp, synthetic construct
  source 1..75: mol_type = other DNA
ataaccattacgccgggtatggtatcagactgggattatcgtgaaggtgagcgacagggcgctgcgggtggtgcg

SEQ ID NO: 623870 - DNA, 75 bp, synthetic construct
  source 1..75: mol_type = other DNA
agtgaaacgctggcattgccaccgaaaggcgcagtattaacgctggggctggggtttaacggacgtctggtgaat

SEQ ID NO: 623871 - DNA, 75 bp, synthetic construct
  source 1..75: mol_type = other DNA
gcaccggggcagggattttcgctgaatctgtcgctgaccacggatatttccgcgaaaggacaggcatcagggaag

SEQ ID NO: 623872 - DNA, 75 bp, synthetic construct
  source 1..75: mol_type = other DNA
tgaagcttgctgaacgcattggtattgctgccgcagtccgtgaactcagcctgtatgaatctcagctctatgcgt

SEQ ID NO: 623873 - DNA, 75 bp, synthetic construct
  source 1..75: mol_type = other DNA
atgggagtgaatgagtatcagccggatttcagtctgacagcggaaggtcaggatatcacgaaggaaataaaacga

SEQ ID NO: 623874 - DNA, 75 bp, synthetic construct
  source 1..75: mol_type = other DNA
agcgagacgctggcattaccaccgaaaggcgcggtgttaacgctgggactggggttcaacggaaatctggtaaat

SEQ ID NO: 623875 - DNA, 75 bp, synthetic construct
  source 1..75: mol_type = other DNA
atatgcaattgctgaatcgtcagcaagagttaagtattgcaaaatctagtgcaataggtaacgtccggatcatag

SEQ ID NO: 623876 - DNA, 75 bp, synthetic construct
  source 1..75: mol_type = other DNA
gatttaacaatggaagcaaaaacagtactagatcagatagtaaatgttgataaccaattaaatgaattaactttt

SEQ ID NO: 623877 - DNA, 75 bp, synthetic construct
  source 1..75: mol_type = other DNA
ctaaagaatatgacttgattttagtagataccccgccaatattggctgttactgatgctgcgattatcggccaat

SEQ ID NO: 623878 - DNA, 75 bp, synthetic construct
  source 1..75: mol_type = other DNA
agaacgaattccaagtgcggaatttgattatataggaagaggccaggtcccaccaaatcctgcggaattattaat

SEQ ID NO: 623879 - DNA, 75 bp, synthetic construct
  source 1..75: mol_type = other DNA
gatttaacaatggaggctaaatctgttttggatcagatagtaaacgttgataatcaacttaatgagcttactttc

SEQ ID NO: 623880 - DNA, 75 bp, synthetic construct
  source 1..75: mol_type = other DNA
cggtatatttacaattattgaaccgtcaacaagaactaagtattgcaaaatcaagtgcaattggtaatgttagga

SEQ ID NO: 623881 - DNA, 75 bp, synthetic construct
  source 1..75: mol_type = other DNA
gattacaaaagctataaaaaaacttccagttgccggatttgattttatctcaaggggaaatatcccaccgaatcc

SEQ ID NO: 623882 - DNA, 75 bp, synthetic construct
  source 1..75: mol_type = other DNA
ctgtatcctaaatggcgtggtaaaaaaagtaagcagttattacggttatggctatcaacattatggctattcata

SEQ ID NO: 623883 - DNA, 75 bp, synthetic construct
  source 1..75: mol_type = other DNA
attgaagtgagtattaagagatttgaacaaagtggcgttattgtaaaaggctgtatcctaaatggcgtggtaaaa

SEQ ID NO: 623884 - DNA, 75 bp, synthetic construct
  source 1..75: mol_type = other DNA
ggtttggaggcgaacttgtagctcacggtatgcgttcgattgcaagaacagcggcagaggagtctggtaagttca

SEQ ID NO: 623885 - DNA, 75 bp, synthetic construct
  source 1..75: mol_type = other DNA
agctttgcgcatccttgaattaatgaaatcaataagtgggcatagagaatgggttttccccagcattaaagcgcc

SEQ ID NO: 623886 - DNA, 75 bp, synthetic construct
  source 1..75: mol_type = other DNA
gaactcgtcgatgcgaaagatatttcgataaaagttgatagcataaccgcacctaaaggaacaattttttcggta

SEQ ID NO: 623887 - DNA, 75 bp, synthetic construct
  source 1..75: mol_type = other DNA
gacaggcagctcaggatgccaaaagcttagaatttttaaatgaacaattaccaaaagtccgaagtgatttagatg

SEQ ID NO: 623888 - DNA, 75 bp, synthetic construct
  source 1..75: mol_type = other DNA
aatgtaaaagaaatagtttctactttattcgataacgaagttaacactgaccattctcaaaatatatatgtgcac

SEQ ID NO: 623889 - DNA, 75 bp, synthetic construct
  source 1..75: mol_type = other DNA
ttgatgttaaggcagcacaaagttctattaatcatgtgataatggggaatgcttcttttggcaagaaaatagatg

SEQ ID NO: 623890 - DNA, 75 bp, synthetic construct
  source 1..75: mol_type = other DNA
atagcaaacttgcttgcggacaagttttaccagaaacatatcgattcggatattgatattgtaaaactacgaaat

SEQ ID NO: 623891 - DNA, 75 bp, synthetic construct
  source 1..75: mol_type = other DNA
gttcaggctgacgtgcgaattgtaaaccaggatgctcagaaaaaacaaaacccgccgaagcgggttatgcctagt

SEQ ID NO: 623892 - DNA, 75 bp, synthetic construct
  source 1..75: mol_type = other DNA
agccacgcaagcaccttaaaatcaccatcatacactaaatcagtaagttggcagcattaccgtcgagcaataaga

SEQ ID NO: 623893 - DNA, 75 bp, synthetic construct
  source 1..75: mol_type = other DNA
gctcggttttgagggccagcaggtgagttgggaaaccgcgcaccttgctggtgaatggcgaaggggtgagcgccg

SEQ ID NO: 623894 - DNA, 75 bp, synthetic construct
  source 1..75: mol_type = other DNA
ttggggcgaatgtatccagtattctgacatatcttaactgctttgatctacataaggagttgctttttaatgtct

SEQ ID NO: 623895 - DNA, 75 bp, synthetic construct
  source 1..75: mol_type = other DNA
tcaatcccggatgatattaggaaagacggttgatgacctcaatttgcaggctagggtaaaacaaaaatacttccc

SEQ ID NO: 623896 - DNA, 75 bp, synthetic construct
  source 1..75: mol_type = other DNA
catctaaagatgcagatgaaattgattttggtcgccttatcggtgaatttatagatcatcgaaagcttattattt

SEQ ID NO: 623897 - DNA, 75 bp, synthetic construct
  source 1..75: mol_type = other DNA
gcgacgtggagggactgctgaagcatttacgggagatgaccgtcgataatgacgactctacgcttatatttttcg

SEQ ID NO: 623898 - DNA, 75 bp, synthetic construct
  source 1..75: mol_type = other DNA
tttcagcaatatattcagtctcttttccacgtctggcatgcgctgatagactggaaaacggggtatggagaaaat

SEQ ID NO: 623899 - DNA, 75 bp, synthetic construct
  source 1..75: mol_type = other DNA
ataaattagaagaagaggtaaaagcacagccacagccacagccacagccacagccacagccacagccacagccac

SEQ ID NO: 623900 - DNA, 75 bp, synthetic construct
  source 1..75: mol_type = other DNA
aggcagctcaagatgcaaaaagcttagattttttgaatttacaattaccaaaggtgcgcagcgatttagatattg

SEQ ID NO: 623901 - DNA, 75 bp, synthetic construct
  source 1..75: mol_type = other DNA
catcttaaacggcgtggtgaagaaagctagtagttattatggttatggctataataattatggttactcatataa

SEQ ID NO: 623902 - DNA, 75 bp, synthetic construct
  source 1..75: mol_type = other DNA
gtcatagttggttttgttcttggcttactgatatcaattggtgttgtcttattacgtgtatttttgcgaagagga

SEQ ID NO: 623903 - DNA, 75 bp, synthetic construct
  source 1..75: mol_type = other DNA
tccttagaagccaaatctgtacttgaccaaatagtaaatgtagacaaccaattaaatcaactgacttttagagag

SEQ ID NO: 623904 - DNA, 75 bp, synthetic construct
  source 1..75: mol_type = other DNA
ggcaggcagctcaagacgcaaaaagcctagagttcttagatgcggaattacctaaagttcgaagtgaacttgata

SEQ ID NO: 623905 - DNA, 75 bp, synthetic construct
  source 1..75: mol_type = other DNA
cgataaggggattgagaacaagtttacatttcgcgatgatggaggctcgcaataatgtattgatgatttctgggg

SEQ ID NO: 623906 - DNA, 75 bp, synthetic construct
  source 1..75: mol_type = other DNA
atatctcaaagtggaaaaaaagtgcttctaattgatactgacctacgaaaaggatatctgcacagggtatttaac

SEQ ID NO: 623907 - DNA, 75 bp, synthetic construct
  source 1..75: mol_type = other DNA
gggttttccccagcatcaaagctcccctcagtcatatgcatgaacaaacagctaatgcagccataattcgtatgg

SEQ ID NO: 623908 - DNA, 75 bp, synthetic construct
  source 1..75: mol_type = other DNA
gtgaataagagtcgaaataatgatgtaagtgataatttaaatgcaggaaattttattgtaaatggtaatgtttgg

SEQ ID NO: 623909 - DNA, 75 bp, synthetic construct
  source 1..75: mol_type = other DNA
tgttaatgacctgccgccagcaggcggaacagttgcgccgcctgtcaggtctggcggagcgtcgggagtccggtg

SEQ ID NO: 623910 - DNA, 75 bp, synthetic construct
  source 1..75: mol_type = other DNA
agagttcttaaatgctcagttacctaagatcagaagtgatttagacttagcagaagacaagctgaatcaatatcg

SEQ ID NO: 623911 - DNA, 75 bp, synthetic construct
  source 1..75: mol_type = other DNA
tcagtgccagtgaccaaaaaacgcacaaaaatgagtcttggaacctaccctcaccttaccttggctaaggcacga

SEQ ID NO: 623912 - DNA, 75 bp, synthetic construct
  source 1..75: mol_type = other DNA
agaattgcctaagctgatgcgttcgctaatcatgtcaaatctatctgtaccgactcgctgtcttattgagtggca

SEQ ID NO: 623913 - DNA, 75 bp, synthetic construct
  source 1..75: mol_type = other DNA
cgcaagtatacctgtttcagattggctttctaaacaattaagccgtaaaggaaaagttaaacaaaatgagtctga

SEQ ID NO: 623914 - DNA, 75 bp, synthetic construct
  source 1..75: mol_type = other DNA
ctcctaccacagattctgatgcaattgaaataggaagattaatcggggagttaattgatcaccgcaaattaataa

SEQ ID NO: 623915 - DNA, 75 bp, synthetic construct
  source 1..75: mol_type = other DNA
tttacatgcagcttcttaatcgtcaacaggaactcaatattgcaaaatctagcgctattggcaatgttagaatta

SEQ ID NO: 623916 - DNA, 75 bp, synthetic construct
  source 1..75: mol_type = other DNA
aagtaaagcaattaaaaaagtatcttctgcaggctttgattatatttcacgaggtatggtcccacctaatccagc

SEQ ID NO: 623917 - DNA, 75 bp, synthetic construct
  source 1..75: mol_type = other DNA
catattgaatggagtggtgaaaaaagccagtagttattacagttatggctatagtaattatggttatacttatga

SEQ ID NO: 623918 - DNA, 75 bp, synthetic construct
  source 1..75: mol_type = other DNA
attagagaagagaaaaactcttcaggatgaaaagatgaaacttaataaacgagtttcatctatgccagaaacgca

SEQ ID NO: 623919 - DNA, 75 bp, synthetic construct
  source 1..75: mol_type = other DNA
ctgtttatatgcaattgctcaataggcagcaggaattaagtattgcaaaatctagcgctattggtaacgtacgaa

SEQ ID NO: 623920 - DNA, 75 bp, synthetic construct
  source 1..75: mol_type = other DNA
tctctatttcaaggctctacataaaaaatagtgaaggtgatgaggttccagaaataaaattaaccgtattagatg

SEQ ID NO: 623921 - DNA, 75 bp, synthetic construct
  source 1..75: mol_type = other DNA
cgtgcaaaaagttgaaaactgtacatttgattacataggttgtgggccaataccgccaaatccagcagaattgtt

SEQ ID NO: 623922 - DNA, 75 bp, synthetic construct
  source 1..75: mol_type = other DNA
cgctagtgtacctgtttctgaatggctaagtaaaaacttagcgaaaaataaaattaacagaaaagagtctgatat

SEQ ID NO: 623923 - DNA, 75 bp, synthetic construct
  source 1..75: mol_type = other DNA
tacttaatcgccagcaagagctcaatatagcaaaatcaagtgcgatcggaaatgtacgtattattgataatgctg

SEQ ID NO: 623924 - DNA, 75 bp, synthetic construct
  source 1..75: mol_type = other DNA
agctttaatggagaaaaaacaaacacttcaagaagaaaaatcaaagttaggtaagcgggtcagtagtatgccggc

SEQ ID NO: 623925 - DNA, 75 bp, synthetic construct
  source 1..75: mol_type = other DNA
gcgggtaaaagagtactgtttatagatgccgatttacgaaaaggctatgtgcataaaattttcaaaaataatcat

SEQ ID NO: 623926 - DNA, 75 bp, synthetic construct
  source 1..75: mol_type = other DNA
gtgagcgcatctatcgcgaatgatttaggcggttcagaaaaaatcgaacttgatgggaaagctgtgataagcgta

SEQ ID NO: 623927 - DNA, 75 bp, synthetic construct
  source 1..75: mol_type = other DNA
cctcgaaggtttaaatgtcggagaaaatgtcgtgctgtcgctgccggataagaagaaaggattatgctgtgaaaa

SEQ ID NO: 623928 - DNA, 75 bp, synthetic construct
  source 1..75: mol_type = other DNA
ccgcatcacccgtaccttcgaaaatggccaggatgataaaagttctggtttgagggttgtaacattggccattga

SEQ ID NO: 623929 - DNA, 75 bp, synthetic construct
  source 1..75: mol_type = other DNA
gatggttgcgccttttagtacggtcaacacaaacaccggaaattatagcggcagccagttttatctcggttatat

SEQ ID NO: 623930 - DNA, 75 bp, synthetic construct
  source 1..75: mol_type = other DNA
catcgccggaagctacgcaacgtctgcgcgcaatctgggatgcaaaaaaaagagagctcaaactgactcaggagc

SEQ ID NO: 623931 - DNA, 75 bp, synthetic construct
  source 1..75: mol_type = other DNA
gaaacagccaactggataacggttacaactatcaaagcacaaaacgtgaaagttaataatgaaagtatcttactg

SEQ ID NO: 623932 - DNA, 75 bp, synthetic construct
  source 1..75: mol_type = other DNA
aaagttactttggcgtccaagcggaatagctccggtagataaaaaaagcctttctcaattaaatatcaaaaagaa

SEQ ID NO: 623933 - DNA, 75 bp, synthetic construct
  source 1..75: mol_type = other DNA
tggatatccctccaaacaacccacaaaatgcaggaaaaaacaaaattaaacttgcattgcaaaaccgtataaagt

SEQ ID NO: 623934 - DNA, 75 bp, synthetic construct
  source 1..75: mol_type = other DNA
taaggtttttttttcacagagctctaattaagtgtagctttatcggagctcatagtgaatttatgaaagaaaaat

SEQ ID NO: 623935 - DNA, 75 bp, synthetic construct
  source 1..75: mol_type = other DNA
agaaagcagttagattaattgcaaagagagcatttgatctaaaagcttatgaagaaaatttcattatagaaccaa

SEQ ID NO: 623936 - DNA, 75 bp, synthetic construct
  source 1..75: mol_type = other DNA
agctgcactaaatgcaatagtacttataaaaaatcactcgatccgatcatgagcccattttcaaatccttttctt

SEQ ID NO: 623937 - DNA, 75 bp, synthetic construct
  source 1..75: mol_type = other DNA
cgtatccatacccgggccattcacagcattgataccgacattaagctcaatcgcgcattgtgggtgatggcagaa

SEQ ID NO: 623938 - DNA, 75 bp, synthetic construct
  source 1..75: mol_type = other DNA
tataataccaagtgaatctttgaaggttaattataataaagttgcgattcatggccccaaagcaaggaaggaggt

SEQ ID NO: 623939 - DNA, 75 bp, synthetic construct
  source 1..75: mol_type = other DNA
tattcgttgccaaaaagagatggcaagagatcccgcatcatttcacagccatcacgtgagctgaaggcattgcaa

SEQ ID NO: 623940 - DNA, 75 bp, synthetic construct
  source 1..75: mol_type = other DNA
ctgatgtgataaacaaccatgccgaaaaaataggtaacaaccaggcgatcaccgttaccaataaccagatccaga

SEQ ID NO: 623941 - DNA, 75 bp, synthetic construct
  source 1..75: mol_type = other DNA
atggctttgaattacacccaaaaccaatacagggaagatattttagagtaaggaaacagaaggaatggggaaaag

SEQ ID NO: 623942 - DNA, 75 bp, synthetic construct
  source 1..75: mol_type = other DNA
cgcagcgtaatgccgggataacacttataaaaacaggcaacctgacagcacggttcagggacgggcagagagtaa

SEQ ID NO: 623943 - DNA, 75 bp, synthetic construct
  source 1..75: mol_type = other DNA
atacatgggcgctctggcaggacagctatccggaagataagccgctggaaagtctgctggatattctgaagctcg

SEQ ID NO: 623944 - DNA, 75 bp, synthetic construct
  source 1..75: mol_type = other DNA
gaaaactacgccctggtcagttaaggtggggaatacaagtgatttagatgcgaaaattaaagaaggtcaaagcgt

SEQ ID NO: 623945 - DNA, 75 bp, synthetic construct
  source 1..75: mol_type = other DNA
ggtgactggcactaccaagggtactatggtggcggtattaaaaagggagaaaacataaaaattactttaaacaca

SEQ ID NO: 623946 - DNA, 75 bp, synthetic construct
  source 1..75: mol_type = other DNA
atattaggactgatattgcaatcatcgaatattaatgcggaggctaaagcaagaattaaattacgagggaaaaga

SEQ ID NO: 623947 - DNA, 75 bp, synthetic construct
  source 1..75: mol_type = other DNA
ggaatgggctacagcgtcaatgtagggaataacgtcaccttctcggtgggcaagacgatgaaggaaaacaccgga

SEQ ID NO: 623948 - DNA, 75 bp, synthetic construct
  source 1..75: mol_type = other DNA
gagtgttccattctcttggttataatcgactaatatcttcagttttgacaaaaatatgttgttataaaaatctgc

SEQ ID NO: 623949 - DNA, 75 bp, synthetic construct
  source 1..75: mol_type = other DNA
tacactgtagaaaagaaaggcccagagaagagaatgagaaccatttaccaaccttctcgagaacttaaagcctta

SEQ ID NO: 623950 - DNA, 75 bp, synthetic construct
  source 1..75: mol_type = other DNA
gtttactcctaatccaccatcaattctctacataaaaggggataaaagtatactaaaagaattgccgggtgtcgc

SEQ ID NO: 623951 - DNA, 75 bp, synthetic construct
  source 1..75: mol_type = other DNA
ttgaccggattgaggaaaagcgtgatgccatgcagtcgctgattctgccgccaccagcacgccaggcgctggcac

SEQ ID NO: 623952 - DNA, 75 bp, synthetic construct
  source 1..75: mol_type = other DNA
cagttttcgcaggcactggcgaacgagggtgggattttaaaagtgttctgggcaggcaaaacccgcagcgaccag

SEQ ID NO: 623953 - DNA, 75 bp, synthetic construct
  source 1..75: mol_type = other DNA
tgacctgctcaatcatcaccgccgccagcagcgaccaacagaatttatccgtatccgctgggcgctgggcgctgg

SEQ ID NO: 623954 - DNA, 75 bp, synthetic construct
  source 1..75: mol_type = other DNA
acggttattacggactgcattccggtgaacctgactttattaatgcatccgttttatacggacttcccggcggtg

SEQ ID NO: 623955 - DNA, 75 bp, synthetic construct
  source 1..75: mol_type = other DNA
gtgcgttggcgctggcaaccgaatgatattgcgatttgggataaccgcgtgactcagcactatgccaatgccgat

SEQ ID NO: 623956 - DNA, 75 bp, synthetic construct
  source 1..75: mol_type = other DNA
aaatggagaaattaatgaagctaaagatgtagagacttatggctattcagcaacaattaataacgttagtgctgg

SEQ ID NO: 623957 - DNA, 75 bp, synthetic construct
  source 1..75: mol_type = other DNA
tcgtcagaactaccggtaaaaaaatctggcgcttccgctacaaacgtcccggctccaccacccgcaccaccatca

SEQ ID NO: 623958 - DNA, 75 bp, synthetic construct
  source 1..75: mol_type = other DNA
gaatcaattaaaggtacagaggtatatacttttcacactagaaaaggtcagtatgtcaaggttactgttccagat

SEQ ID NO: 623959 - DNA, 75 bp, synthetic construct
  source 1..75: mol_type = other DNA
cctgctggaggttgaatcatggatcatcgggggcgttgttgctggagttgctattagtttgtttggggctgtgtt

SEQ ID NO: 623960 - DNA, 75 bp, synthetic construct
  source 1..75: mol_type = other DNA
tcttccgttggtgccaggagagcgacgacctgctcaatcatcaccgccgccagcagcggccaaccgaatttatcc

SEQ ID NO: 623961 - DNA, 75 bp, synthetic construct
  source 1..75: mol_type = other DNA
aactggccggaaacagcacatatgatggctcttctcggcattcatccagacacatggcttgtgcgtatcacttta

SEQ ID NO: 623962 - DNA, 75 bp, synthetic construct
  source 1..75: mol_type = other DNA
cgtgaccgtccactgacacatgaagagctgatgcaccatgtgccggggattttcggggaagagaaacacacgtcc

SEQ ID NO: 623963 - DNA, 75 bp, synthetic construct
  source 1..75: mol_type = other DNA
aattgccagagacaagtaaagcaacgtatccgaccaaaggcgccattgtttctgttgaatataaggttcactcag

SEQ ID NO: 623964 - DNA, 75 bp, synthetic construct
  source 1..75: mol_type = other DNA
tggtggcgggggcatttgactgcgctgacatcatcgcccgtgtgcgtgacataaaagtaagcgactcgtcagaac

SEQ ID NO: 623965 - DNA, 75 bp, synthetic construct
  source 1..75: mol_type = other DNA
tcgaaaagcgttaccgctcttacctgataaccggcgtcagcaagtgcgaaacggtgatgatcggcatggatgatg

SEQ ID NO: 623966 - DNA, 75 bp, synthetic construct
  source 1..75: mol_type = other DNA
attcgacggaaatgtacatcttattgattgttgcctttattctgttgacgaaattgttaataaaatccagaaaat

SEQ ID NO: 623967 - DNA, 75 bp, synthetic construct
  source 1..75: mol_type = other DNA
gcctacctggggcaaaatgaaaaaggggtactccccggtttcaaaaccactatggtcgcacctttcggctcggta

SEQ ID NO: 623968 - DNA, 75 bp, synthetic construct
  source 1..75: mol_type = other DNA
acctggctgggcgaagaagccgcacgcaacactcgtattctggaacgccagccgcgcgtgataagccatgaacag

SEQ ID NO: 623969 - DNA, 75 bp, synthetic construct
  source 1..75: mol_type = other DNA
tgatttatcagggcttaatttaactactcaaccaccagggctgcaaaacttcacctctatcaatcttgatgagaa

SEQ ID NO: 623970 - DNA, 75 bp, synthetic construct
  source 1..75: mol_type = other DNA
tttttaatgccggacgcaaccaggccaatctggatatcgccgaaattcgccagcagcagtcggtggtgaattatg

SEQ ID NO: 623971 - DNA, 75 bp, synthetic construct
  source 1..75: mol_type = other DNA
ggagcttttgtgacgattggtgaccaggtcttcattgtgggacattccggccaagtatatgtatccggggtacca

SEQ ID NO: 623972 - DNA, 75 bp, synthetic construct
  source 1..75: mol_type = other DNA
aaaaataaccacgcatcagaatatgaactaacggtagttgatgattacgggaataacatccatagtaacatcgcc

SEQ ID NO: 623973 - DNA, 75 bp, synthetic construct
  source 1..75: mol_type = other DNA
gaaaataataatgacattaactttaatgagtggctaaataaaattgatgttgaattattaccaaaaaaaattgat

SEQ ID NO: 623974 - DNA, 75 bp, synthetic construct
  source 1..75: mol_type = other DNA
gaagccgctaaaaggataaattgtgcttttttgtcgaaacagaataatattgatttatcagggcttaatttaact

SEQ ID NO: 623975 - DNA, 75 bp, synthetic construct
  source 1..75: mol_type = other DNA
agtggtatgcgcgaagactttcctgaaatttatatttccggtgctgaaaaattatgcgtgagtcttcgtaaacaa

SEQ ID NO: 623976 - DNA, 75 bp, synthetic construct
  source 1..75: mol_type = other DNA
atgaacgatattgagaactatggtaatcgctatcatgtgttgcaatcctttcctatgccacaattggcaagtagt

SEQ ID NO: 623977 - DNA, 75 bp, synthetic construct
  source 1..75: mol_type = other DNA
gattgatactaaagaagcacttcgaattattagaaatgaatcgaaggtaatatactccggaacgagagaagaggc

SEQ ID NO: 623978 - DNA, 75 bp, synthetic construct
  source 1..75: mol_type = other DNA
acctctttctcagggagtttagtctccaggatttccggggcggttcatttcagcaatggctttcccaaatcaatc

SEQ ID NO: 623979 - DNA, 75 bp, synthetic construct
  source 1..75: mol_type = other DNA
gatgcctcacgcccctgttcgctttactggcaggagtcttctaaacagatttcattacttttgccacgcactctg

SEQ ID NO: 623980 - DNA, 75 bp, synthetic construct
  source 1..75: mol_type = other DNA
gacgttttttcaaaagttggcgttttttcgccggcactatggttcaatgacagcgcaatgctgaattttatttag

SEQ ID NO: 623981 - DNA, 75 bp, synthetic construct
  source 1..75: mol_type = other DNA
ggcgtaatgatggcgctaaaacttacctgctgcttaccaatcaaggtgatgtttatggtggatggaatacattaa

SEQ ID NO: 623982 - DNA, 75 bp, synthetic construct
  source 1..75: mol_type = other DNA
tctgcggggctgaacattggttggctcgctcatttcatgatcggcacggtactctgggggctgctttttgcgctg

SEQ ID NO: 623983 - DNA, 75 bp, synthetic construct
  source 1..75: mol_type = other DNA
ctccgtactggcctggttgttgatgatgttaataccgatgcccatggccggtgccggattcttcggcataacact

SEQ ID NO: 623984 - DNA, 75 bp, synthetic construct
  source 1..75: mol_type = other DNA
gattggcgcgaaaggcgttgaaaccgcagataaagtgctgaaaggcgagaaagttcaggctaagtatccggttga

SEQ ID NO: 623985 - DNA, 75 bp, synthetic construct
  source 1..75: mol_type = other DNA
acaacagttcctcgagaaataggcacaagaggtggtatttcgcataatattataaaaatgagaaagggagaattt

SEQ ID NO: 623986 - DNA, 75 bp, synthetic construct
  source 1..75: mol_type = other DNA
ttggtggtggcggccatgccagtgtcctactggacattctgaattcaaacatgcgggaagttatcgctgttgtga

SEQ ID NO: 623987 - DNA, 75 bp, synthetic construct
  source 1..75: mol_type = other DNA
cttcgtgaggtcgaactggtttaccgtggaatatgtagtgacacggaagagcttatcaagtctatagaaacgagt

SEQ ID NO: 623988 - DNA, 75 bp, synthetic construct
  source 1..75: mol_type = other DNA
ctgggggaagtgcgtgttccacaccggggaaatgtggtggacagagtcattgaaggggcttacgaggtggtggag

SEQ ID NO: 623989 - DNA, 75 bp, synthetic construct
  source 1..75: mol_type = other DNA
atacccgttcagtggctccggctatcatggattggttgggcgttggtaatcagcaagcagggacagcgactaatc

SEQ ID NO: 623990 - DNA, 75 bp, synthetic construct
  source 1..75: mol_type = other DNA
actatatcgactggtctgcaaaagcgagtgcggattcattcactcgtagccttacgctatcagccttgagcggtc

SEQ ID NO: 623991 - DNA, 75 bp, synthetic construct
  source 1..75: mol_type = other DNA
cagctggcagaacgggatgaagagctggccatcctccaaaaggccgcgacatacttcgcgaagcgcctgaaatga

SEQ ID NO: 623992 - DNA, 75 bp, synthetic construct
  source 1..75: mol_type = other DNA
tctgaaagcgaagcagcagctacagaagcaccaagagacagccgagcttaaacttcgccatgcagggctacaagt

SEQ ID NO: 623993 - DNA, 75 bp, synthetic construct
  source 1..75: mol_type = other DNA
cattgatttccaggcgagagcctcacaagccagttttacacagtcgctcaccttgtcagccttgagcggtcagag

SEQ ID NO: 623994 - DNA, 75 bp, synthetic construct
  source 1..75: mol_type = other DNA
gaaaacaccaatattcgtgcatcgtcttcatggaataatactgatggagcagtaatcggagggggtattgctgta

SEQ ID NO: 623995 - DNA, 75 bp, synthetic construct
  source 1..75: mol_type = other DNA
gtgttattaataaaaacatacaatcagcaaaacaagaatcattcgcatatactgatacaaaatttaaccaaatta

SEQ ID NO: 623996 - DNA, 75 bp, synthetic construct
  source 1..75: mol_type = other DNA
tcagacgcagaataacgattcagatgcgatttacccggaagctgacggtataacgtatccacttcatttccaggc

SEQ ID NO: 623997 - DNA, 75 bp, synthetic construct
  source 1..75: mol_type = other DNA
cggtgaaaaatggtcaggcagagacctttactgtctggcgtacggtgcatggcaacattctccaaactgaccaga

SEQ ID NO: 623998 - DNA, 75 bp, synthetic construct
  source 1..75: mol_type = other DNA
attctttaaagaagaaaaaaatgtcataaaaattattttgtttttattcttttcaatcctcatcttagtgttgat

SEQ ID NO: 623999 - DNA, 75 bp, synthetic construct
  source 1..75: mol_type = other DNA
tatattgagcaaaaaaaaatctatcttagtgtgttatttatcaatatgataagctcaatattattgtatggcaga

SEQ ID NO: 624000 - DNA, 75 bp, synthetic construct
  source 1..75: mol_type = other DNA
ctgtggctcctatggaccgcacaaatatccggtaatcaggacaccgccatcgtccgctaccgtaagtcagacgac

SEQ ID NO: 624001 - DNA, 75 bp, synthetic construct
  source 1..75: mol_type = other DNA
ccaacacgaattcgaacctataacttgtagagaacattctctcaatttttcaacagagcggttcaatagacagat

SEQ ID NO: 624002 - DNA, 75 bp, synthetic construct
  source 1..75: mol_type = other DNA
tttcaaggaaaaaaagctaccactagcttcgtccaaaatttaccctttgcaaaaaagaaatatcaaaaatattta

SEQ ID NO: 624003 - DNA, 75 bp, synthetic construct
  source 1..75: mol_type = other DNA
cgtatcaaaaaagtatacggtcgtgatgctgatgttatttatcctcctgttgatgtaaatagatttgaattaaat

SEQ ID NO: 624004 - DNA, 75 bp, synthetic construct
  source 1..75: mol_type = other DNA
ataaaggcagcatcagcggaacagtgccaactcagagagagctggagaagaaatttgccacggctgcggtgagca

SEQ ID NO: 624005 - DNA, 75 bp, synthetic construct
  source 1..75: mol_type = other DNA
cataaccgtgtggtggatgctgtgctgttaacctgtccggggatatcggcgagtcgtgcaggtgtgtttattatg

SEQ ID NO: 624006 - DNA, 75 bp, synthetic construct
  source 1..75: mol_type = other DNA
gttttcaggcagagataaatgattatattaataaaaaatgggatggttttaatgaagcaaaaagaattgaatatt

SEQ ID NO: 624007 - DNA, 75 bp, synthetic construct
  source 1..75: mol_type = other DNA
ccggctagcgggctatcatggcgtcagcgtggaaacgacctccccttccgaccgcattgccagcgcctttgagaa

SEQ ID NO: 624008 - DNA, 75 bp, synthetic construct
  source 1..75: mol_type = other DNA
aggtcttgactggctctggtttcatagcggttccaatgagcaggtacaaaatgagcttacccgacttgagcaact

SEQ ID NO: 624009 - DNA, 75 bp, synthetic construct
  source 1..75: mol_type = other DNA
atagtgctccacattgcgccggaaatgcacgaaaactggcgcaggcgtttcgttaagtatggtgaaaagggtgag

SEQ ID NO: 624010 - DNA, 75 bp, synthetic construct
  source 1..75: mol_type = other DNA
acattgatctgatggtcattacggttatcgatccccaggtcaaagccttcgtgttcgacatggatgagccagaaa

SEQ ID NO: 624011 - DNA, 75 bp, synthetic construct
  source 1..75: mol_type = other DNA
agtgatattgcgtggcatattgaaaatgaactggcgaatggcggtgaatacgcgagctggagagcacatatgccg

SEQ ID NO: 624012 - DNA, 75 bp, synthetic construct
  source 1..75: mol_type = other DNA
ctgattaaccagttcaaagccgatggcttgagcatcattctggtgtcatcggagatgccagaagtattaggcatg

SEQ ID NO: 624013 - DNA, 75 bp, synthetic construct
  source 1..75: mol_type = other DNA
agcggacgtttttccattcgccgggtgcaaacagacttttggatcttccggcgttcgatcagctcgataacacca

SEQ ID NO: 624014 - DNA, 75 bp, synthetic construct
  source 1..75: mol_type = other DNA
ggcagtatgagcgggatccgcaacatctttaacgagcacaaccaccccggcgacagtggcgggagtacggataaa

SEQ ID NO: 624015 - DNA, 75 bp, synthetic construct
  source 1..75: mol_type = other DNA
atggctacagtcccaacttccccattcctcaaaattgaagttgtcaacggcaaggccgttattttctccctgcat

SEQ ID NO: 624016 - DNA, 75 bp, synthetic construct
  source 1..75: mol_type = other DNA
tttccacccctgtacgtctcaccacctataaggtcgtggaaagccttggtggtgagttttctaacaaactgacta

SEQ ID NO: 624017 - DNA, 75 bp, synthetic construct
  source 1..75: mol_type = other DNA
gcggtttgcgccgctgccgatgtcggatgctttgctacttacatcatccgccagggtggtgttttgatcccgcga

SEQ ID NO: 624018 - DNA, 75 bp, synthetic construct
  source 1..75: mol_type = other DNA
gaaaaaaagagctgatgatcctaatagctcaataaccggtgaaactacgataccagtagaaacttacacacctga

SEQ ID NO: 624019 - DNA, 75 bp, synthetic construct
  source 1..75: mol_type = other DNA
caggctggtgatcctgattctctgctggggcttccggttgaatatctggaatttatgccggacggtgtgattgca

SEQ ID NO: 624020 - DNA, 75 bp, synthetic construct
  source 1..75: mol_type = other DNA
ccacaacactgctgtcttatcgtgtcagtgagtcagaaggaaatctgaaagcccagggctgggagccggctggcg

SEQ ID NO: 624021 - DNA, 75 bp, synthetic construct
  source 1..75: mol_type = other DNA
tagtctataaaatctgtgctttcctgccactattggggatgttgaccatattcctgcctgataaccggcataaag

SEQ ID NO: 624022 - DNA, 75 bp, synthetic construct
  source 1..75: mol_type = other DNA
ccggacgatgtttacggcacccgtagcgcacgcctgctggcgcaaatgcgtgatactggctttgaaacctcactc

SEQ ID NO: 624023 - DNA, 75 bp, synthetic construct
  source 1..75: mol_type = other DNA
ctatgttgaccggttacgccaaccctgtacgtctcaccacctctgtgattggcgtcccatgtggtgagttctttg

SEQ ID NO: 624024 - DNA, 75 bp, synthetic construct
  source 1..75: mol_type = other DNA
ttttgtgtcgcaatcaacgccacagagcgccagattatggtgtggcgtgtggtttgccgtgcaggtatgatcctg

SEQ ID NO: 624025 - DNA, 75 bp, synthetic construct
  source 1..75: mol_type = other DNA
ttttgtgtcgcaatcaatgccacagagcgccagattatggtgtggtgtgtggtcagtcgtgcagatggcattccg

SEQ ID NO: 624026 - DNA, 75 bp, synthetic construct
  source 1..75: mol_type = other DNA
ctctcattgaagacactctggctgccggaacctcacgtctttcccgcgaaaacaacagcgacttcactatgaaca

SEQ ID NO: 624027 - DNA, 75 bp, synthetic construct
  source 1..75: mol_type = other DNA
ttaaccaaagatgtgatctcggatgacgggaaaacggtattaatccgtgctggcgcacaactccagggagaacag

SEQ ID NO: 624028 - DNA, 75 bp, synthetic construct
  source 1..75: mol_type = other DNA
ttgttaaggacaagaataacagagtacgtattgattccctcggtgctgacagcctaggcgcgtcagggcttccgg

SEQ ID NO: 624029 - DNA, 75 bp, synthetic construct
  source 1..75: mol_type = other DNA
taatagcatatggtttgtatctctacaatgacagggaaaacattgagggtgctgctaaaggatcgtttgattact

SEQ ID NO: 624030 - DNA, 75 bp, synthetic construct
  source 1..75: mol_type = other DNA
aatgttaaccatgcgctgatggcttacaactgggggatgggcaatgtagacaaaaagttaaaatacatatccagt

SEQ ID NO: 624031 - DNA, 75 bp, synthetic construct
  source 1..75: mol_type = other DNA
acaatattgtatttgaaaacctcgatgaaattgattcacaggagattgataccgacgcgcaaaaccggaacttca

SEQ ID NO: 624032 - DNA, 75 bp, synthetic construct
  source 1..75: mol_type = other DNA
atcggcaatgaacaggatgccgcacagaaatttgatccgggcacgattcgtctgttgagtaacccgaacaaagag

SEQ ID NO: 624033 - DNA, 75 bp, synthetic construct
  source 1..75: mol_type = other DNA
agcaaaggaatgttcatacgctcaatcagaatgatataaataattctgttaatagtgccaatgtacccgaaaatg

SEQ ID NO: 624034 - DNA, 75 bp, synthetic construct
  source 1..75: mol_type = other DNA
ctcaatatgacttctcgagatcagggtattagttctgaactatctaataaaacgatacaaattaatgaaaaaatc

SEQ ID NO: 624035 - DNA, 75 bp, synthetic construct
  source 1..75: mol_type = other DNA
ggcaaaaaatcttgatgacctgaaagaaagcgtcgccagaagcatagaggaagtcaaaaacaacgttaattcaga

SEQ ID NO: 624036 - DNA, 75 bp, synthetic construct
  source 1..75: mol_type = other DNA
gcaggaggcggataccgacgctcaaaaccggaatttcatccactccggtaaaaaacagggaaacaaaaaggcaaa

SEQ ID NO: 624037 - DNA, 75 bp, synthetic construct
  source 1..75: mol_type = other DNA
ttttccagtccgggcttctggcgcggcaaaaaaaccttctcgccagaaagcgaagattatctgaaaaatcctgtg

SEQ ID NO: 624038 - DNA, 75 bp, synthetic construct
  source 1..75: mol_type = other DNA
atgattaatagttttgaagagttgcctgtaaaaattgagtttgttcttggtaagaaaataatgaatctatatgaa

SEQ ID NO: 624039 - DNA, 75 bp, synthetic construct
  source 1..75: mol_type = other DNA
agttctcgaaattttgtgtgcttttgcatatcaggattatgcccgcagcgcggcaagtgtcagacgctgtgattg

SEQ ID NO: 624040 - DNA, 75 bp, synthetic construct
  source 1..75: mol_type = other DNA
tgagcagtggattgcggtgattcataacgacgatgcgcattctcgcgatcattttgtcgccgcctgtgttaacgc

SEQ ID NO: 624041 - DNA, 75 bp, synthetic construct
  source 1..75: mol_type = other DNA
tggtatgccgcgaaagagaccgcgctgcattacaccggctcagtgaaaaattttgccttctggctgcgcgagtta

SEQ ID NO: 624042 - DNA, 75 bp, synthetic construct
  source 1..75: mol_type = other DNA
ccgaccagcttcggacaccagttctactcccggtcgcctcgcttcgctcgacgtgcagggcaccgcttcgaacaa

SEQ ID NO: 624043 - DNA, 75 bp, synthetic construct
  source 1..75: mol_type = other DNA
acgaggcatcaactttcgtagtctgacggattcaattgataccagtaccccaatggggcgctttttctttcatgt

SEQ ID NO: 624044 - DNA, 75 bp, synthetic construct
  source 1..75: mol_type = other DNA
gcttaagttctcaacggtaattgagggcgttaatactgttgcggagataaagaaaacggcggcatatgagcaact

SEQ ID NO: 624045 - DNA, 75 bp, synthetic construct
  source 1..75: mol_type = other DNA
tcactaacgtgtatgatccagatgtctctcccggcgacaaggtacattcgcatagcgtaaatctaacgaagtacc

SEQ ID NO: 624046 - DNA, 75 bp, synthetic construct
  source 1..75: mol_type = other DNA
aacatttagaattgatcaatccttctggcagattaagccaaaatacccgttcggcaatgcttcagttacgcgaag

SEQ ID NO: 624047 - DNA, 75 bp, synthetic construct
  source 1..75: mol_type = other DNA
gtcgcatactcgtgccgtgcgtagcattgacggggacgtgaaacttaaccgggcactgtgggtgatggcggaagc

SEQ ID NO: 624048 - DNA, 75 bp, synthetic construct
  source 1..75: mol_type = other DNA
cgggtgatctatatccacgatctctccctgcccgccctgctgacccatacccggggggtgatcaccgttaacagc

SEQ ID NO: 624049 - DNA, 75 bp, synthetic construct
  source 1..75: mol_type = other DNA
cggcatcatcgaagaacgcggcgaaaacctcagaaacgaatgcagctaacagcgcacaggcggcagcctcttcaa

SEQ ID NO: 624050 - DNA, 75 bp, synthetic construct
  source 1..75: mol_type = other DNA
ctattaatatggcatcaattgctgcaacaaagtcagttgatgtctcaggcgataacaagtacgtgacaacctcat

SEQ ID NO: 624051 - DNA, 75 bp, synthetic construct
  source 1..75: mol_type = other DNA
atggacgaagtcaagaaaattgaacattataaaattttaaaaacggacacacccgataattctgcttcggattta

SEQ ID NO: 624052 - DNA, 75 bp, synthetic construct
  source 1..75: mol_type = other DNA
tgaactggaggggttatctcaagctaaagttaccagggcgctgcaggcggcggccgtaccgcaagacttgatttc

SEQ ID NO: 624053 - DNA, 75 bp, synthetic construct
  source 1..75: mol_type = other DNA
gtacatcagcgtcacagattgttatttatcctactccttggtacgatataactccaaaaaatacttatatcccca

SEQ ID NO: 624054 - DNA, 75 bp, synthetic construct
  source 1..75: mol_type = other DNA
gagcagatgcctgtaactaaggtattgcttgagcaagaaattcagactttattcagtggttcagcagatatagct

SEQ ID NO: 624055 - DNA, 75 bp, synthetic construct
  source 1..75: mol_type = other DNA
aggagatgtcgtgagtcaggtgattgagggggcgtatgaagtgctgggtatttttgaccgtgtggaagagaagcg

SEQ ID NO: 624056 - DNA, 75 bp, synthetic construct
  source 1..75: mol_type = other DNA
tgatgtcggcaatcaagcgtgatatcggcgtcaaagacagtggtacgctgctacccggccatggaggcatccttg

SEQ ID NO: 624057 - DNA, 75 bp, synthetic construct
  source 1..75: mol_type = other DNA
tcgttattttttccctgctgttgattgccaccgtaatcaacgggttgctggtgtggctgcgtccaggtaaagact

SEQ ID NO: 624058 - DNA, 75 bp, synthetic construct
  source 1..75: mol_type = other DNA
ggcagtgatatagtattgcttaacaacgatgctttgctgacgcgaacagcactggtggctatgcagcagcaggct

SEQ ID NO: 624059 - DNA, 75 bp, synthetic construct
  source 1..75: mol_type = other DNA
agtcaattacatacgcttttaacacaactgagaaatattacggtcagctttatatacaaacttataaagcgtcga

SEQ ID NO: 624060 - DNA, 75 bp, synthetic construct
  source 1..75: mol_type = other DNA
gcatgggccgaggcctacgaagctgcattgcggcagcaagggctgatagactacgacgatatggtgatatttggt

SEQ ID NO: 624061 - DNA, 75 bp, synthetic construct
  source 1..75: mol_type = other DNA
tcccggttccccgaaaaaaaacgtccaggtaccggagaaaacaatcacaggcaaaaatccgggagccgcagctgc

SEQ ID NO: 624062 - DNA, 75 bp, synthetic construct
  source 1..75: mol_type = other DNA
aaaatatgaaagaaaatgcaagaatgaaatatgaaaaaaattatgatgcaaaatcaatgggagaaaaagttaggc

SEQ ID NO: 624063 - DNA, 75 bp, synthetic construct
  source 1..75: mol_type = other DNA
ttggattccgataatacttggaaacctgaatacctcagtgccatggtcgctgccttgcataagagtcctaatgct

SEQ ID NO: 624064 - DNA, 75 bp, synthetic construct
  source 1..75: mol_type = other DNA
ttctgagcaaatggtaagaaataaagatattaaagatgaattgctacaaaaatgggtaaaaacatatcttaatcg

SEQ ID NO: 624065 - DNA, 75 bp, synthetic construct
  source 1..75: mol_type = other DNA
ccgggcgttgtaacagaagcaaatgcttggggtcgtacgattgatgatcaatattccagagcggtgtgtttaacg

SEQ ID NO: 624066 - DNA, 75 bp, synthetic construct
  source 1..75: mol_type = other DNA
caggatcacagactccgctggaagaaagtgatggcttcttcggtaaatctgctgaaccaagtgattacgctggta

SEQ ID NO: 624067 - DNA, 75 bp, synthetic construct
  source 1..75: mol_type = other DNA
cggcgtccttgataccaacggcggttgggtagatgacgctcagaacgttgacgaactgaatattactctgaataa

SEQ ID NO: 624068 - DNA, 75 bp, synthetic construct
  source 1..75: mol_type = other DNA
atatccctgctggacagcctgcagcgcgaaggcttccagccgttctttgcctgtcagacccgggtacgcgacccg

SEQ ID NO: 624069 - DNA, 75 bp, synthetic construct
  source 1..75: mol_type = other DNA
tggtgaagaccaccagccggtgacggagtcgcaaatactctccccacgccgctggcaggatgagagcaatgacct

SEQ ID NO: 624070 - DNA, 75 bp, synthetic construct
  source 1..75: mol_type = other DNA
tctgctgggtgatgttgttttcgcaagtactgaaccgccccggaaatcctggagactaaactccctgagaaagag

SEQ ID NO: 624071 - DNA, 75 bp, synthetic construct
  source 1..75: mol_type = other DNA
tataactgataagaaagatccgttttatggtgaaaagaaatgtttcaaagatcgcctcttcgctaatgaagatga

SEQ ID NO: 624072 - DNA, 75 bp, synthetic construct
  source 1..75: mol_type = other DNA
ctgtatagccttaatgctattcttcagggtaccagttttccgccgatggcaaaaattatggcctcgtggttctct

SEQ ID NO: 624073 - DNA, 75 bp, synthetic construct
  source 1..75: mol_type = other DNA
attatggtactattaatatccaatctctaattgcaaaaaaagaagaaaaaataatttcttcaatcatattagaaa

SEQ ID NO: 624074 - DNA, 75 bp, synthetic construct
  source 1..75: mol_type = other DNA
cggaggtaatacaccgtaagagctggaaaaaccgtgcagaagtggagctggccacactcacgtgggtggactggt

SEQ ID NO: 624075 - DNA, 75 bp, synthetic construct
  source 1..75: mol_type = other DNA
cgactcgtatgacaacgcgatggcggagagcatcaatggtctttacaaagcggaggtaatacaccgtaagagctg

SEQ ID NO: 624076 - DNA, 75 bp, synthetic construct
  source 1..75: mol_type = other DNA
gcccgtcgtccgtctggctccatccatcacagcgataaaggcactcagtatgtgtcactggcctatacggagcga

SEQ ID NO: 624077 - DNA, 75 bp, synthetic construct
  source 1..75: mol_type = other DNA
acaagccggtttaaaaattccttctgaagaaaaaaatggctgttacgactatatattgtcctacccgggtaccac

SEQ ID NO: 624078 - DNA, 69 bp, synthetic construct
  source 1..69: mol_type = other DNA
atgccactgctggataagctgcgtgagcagtacggggtcggaccggtatgcagcgaactgcatattgcc

SEQ ID NO: 624079 - DNA, 75 bp, synthetic construct
  source 1..75: mol_type = other DNA
ttctcagcattccattattcctcgacaataccatagctgatgaaataaatataaatataaccggtcaaatttatg

SEQ ID NO: 624080 - DNA, 75 bp, synthetic construct
  source 1..75: mol_type = other DNA
tagcatttttctgtataattggtgcattagtcgccttcggcttaccaatatttaaatttttagatgatgacattc

SEQ ID NO: 624081 - DNA, 75 bp, synthetic construct
  source 1..75: mol_type = other DNA
tgctattaatctaaacttattacaggtaaaaggacgaactgatttatttttgaagttagaaataataaaaaaaac

SEQ ID NO: 624082 - DNA, 75 bp, synthetic construct
  source 1..75: mol_type = other DNA
gatattgaaatgaaagcacaggcactcaagatgtgtgaaccggagcagaaggagaaagtattgaagccatggaaa

SEQ ID NO: 624083 - DNA, 75 bp, synthetic construct
  source 1..75: mol_type = other DNA
cgcaatataatatatatcaagaatattacaaggttaggttttggaaagaataataacatagctttcaataagtta

SEQ ID NO: 624084 - DNA, 75 bp, synthetic construct
  source 1..75: mol_type = other DNA
ctcatggtcattttaatattattgacacattaggctgcattgaaaaactatccaaaaaagactgggtgaaaattt

SEQ ID NO: 624085 - DNA, 75 bp, synthetic construct
  source 1..75: mol_type = other DNA
accgtcttcctggcattgatacacagccgaagcagcgcctttttattcgtgatctgatcgcgcctgggcgcactg

SEQ ID NO: 624086 - DNA, 75 bp, synthetic construct
  source 1..75: mol_type = other DNA
gaataattcgggagttccctatataagttttacatcaagttccggtgtgcaaggtgataatatattaacgactac

SEQ ID NO: 624087 - DNA, 75 bp, synthetic construct
  source 1..75: mol_type = other DNA
tgcggtgaactttctcgtggaaaaatacgcgctggtgctaccgaccagccgggattcagcgcctgtacccgctct

SEQ ID NO: 624088 - DNA, 75 bp, synthetic construct
  source 1..75: mol_type = other DNA
ggaactatcctgggttatgggattttgtctcgtcatttgtattttcaataaataaaactatagttaataaggatt

SEQ ID NO: 624089 - DNA, 75 bp, synthetic construct
  source 1..75: mol_type = other DNA
ttcgtaatacttcatcatatggattgctcctattcatattttaaaaccggggaatggaccccaatatcccagtgg

SEQ ID NO: 624090 - DNA, 75 bp, synthetic construct
  source 1..75: mol_type = other DNA
gtccagcgctgttccttgccagcgatgcggcgtcgttctgcacgggtgtggatctggtggtcgatggtggctttg

SEQ ID NO: 624091 - DNA, 75 bp, synthetic construct
  source 1..75: mol_type = other DNA
gtgccaggccacgaaaaaatccgtgatgccgtccgcgcctggtcggctgaagataatcaggatgtcgttgccgca

SEQ ID NO: 624092 - DNA, 75 bp, synthetic construct
  source 1..75: mol_type = other DNA
cttaacccactgtatatgaaggacttcaaccgtgtgcgagtggagttcgttggccattatcgacaagtttgtgag

SEQ ID NO: 624093 - DNA, 75 bp, synthetic construct
  source 1..75: mol_type = other DNA
cgagaacgttagagaactgaccccggcaatcatggctgttcttcctgttgagtttcgtacacgcctggcgccgca

SEQ ID NO: 624094 - DNA, 75 bp, synthetic construct
  source 1..75: mol_type = other DNA
ggtttaatgaaaaacgatataccatacaaattaatatcagaaggaaattgtacgggatatcatctaccagccaaa

SEQ ID NO: 624095 - DNA, 75 bp, synthetic construct
  source 1..75: mol_type = other DNA
tccagagcatcagaagctgaaagaggtaagcgagggtatagcgtcgctcttccgcctcatgccggagcaggcagg

SEQ ID NO: 624096 - DNA, 75 bp, synthetic construct
  source 1..75: mol_type = other DNA
attgagcgtaccggcgacaggcaacacggatttgcctacagcaatgaatgctcgttcctgaatagccttgtgctg

SEQ ID NO: 624097 - DNA, 75 bp, synthetic construct
  source 1..75: mol_type = other DNA
atggatgtcattgataagaaagcgactcatcgccatgatgacatcccttcaggggtatggcccatttctgtaacg

SEQ ID NO: 624098 - DNA, 75 bp, synthetic construct
  source 1..75: mol_type = other DNA
ggaacctgtggatcgtcttcccgcccactgtaacgatcgctgtcctgttcgcgttgtttcagcagggcctcagcc

SEQ ID NO: 624099 - DNA, 75 bp, synthetic construct
  source 1..75: mol_type = other DNA
agatctctttttattgcgcaacactggtatcgacatgcaccttaaatatcgttacaccgctccgccggtggtcga

SEQ ID NO: 624100 - DNA, 75 bp, synthetic construct
  source 1..75: mol_type = other DNA
actcgcttttgcgcaaatctctccattgggacaaatgaaactcaatggggtaaatccgcatggcaccattgagtt

SEQ ID NO: 624101 - DNA, 75 bp, synthetic construct
  source 1..75: mol_type = other DNA
aaccactggagcatctttggcctgttgacgtaagtcacgctcagcccctcggcgcagccccacagctcgcggctg

SEQ ID NO: 624102 - DNA, 75 bp, synthetic construct
  source 1..75: mol_type = other DNA
acagcagatacagcaggtccagtcagacacgaatgatgagctggctgcgctgtacatgctgaaggtgcagaaaac

SEQ ID NO: 624103 - DNA, 75 bp, synthetic construct
  source 1..75: mol_type = other DNA
tggcatcgtgcgtcattgcttttcacttaacggctcgcatacctgcacttggcaactttgcagtgaattgcttct

SEQ ID NO: 624104 - DNA, 75 bp, synthetic construct
  source 1..75: mol_type = other DNA
tgaaccacataatacatcacaatttattatagataatatccttcaaacggtacataaaccagaacgatctgtaag

SEQ ID NO: 624105 - DNA, 75 bp, synthetic construct
  source 1..75: mol_type = other DNA
gaccgtcaatttatcttcaaatggtgtagatagagttacagaggatgtactacgagaattagttggcttggttga

SEQ ID NO: 624106 - DNA, 75 bp, synthetic construct
  source 1..75: mol_type = other DNA
atggtaagcaagtatgcagttctgaaagaaggcgtcgtggataacattattgttgctgatgataattactctcct

SEQ ID NO: 624107 - DNA, 75 bp, synthetic construct
  source 1..75: mol_type = other DNA
gttacgattgagtgtaaggatggttattattttattagtttctccggagataaatcagacataatttataaagtt

SEQ ID NO: 624108 - DNA, 75 bp, synthetic construct
  source 1..75: mol_type = other DNA
agctatgtatctttctccacacaaagcttttttaataacatttatttgcatcgggatttttattaccaattggta

SEQ ID NO: 624109 - DNA, 75 bp, synthetic construct
  source 1..75: mol_type = other DNA
actgccggaaggtgtgaatattgacggtaactggcagttttctgatggcctgatatcaaaggtgccggtaaactg

SEQ ID NO: 624110 - DNA, 75 bp, synthetic construct
  source 1..75: mol_type = other DNA
acgcctgacgacggcgcagagccgactacacaagcggaatccaacattattcgtccgacatcggacacagctagg

SEQ ID NO: 624111 - DNA, 75 bp, synthetic construct
  source 1..75: mol_type = other DNA
ggtgcgaccgcaaaggccgcaggttctcgcgtcgggggtggtgccgcgtcaggatcggcgaatccagtgtcggcg

SEQ ID NO: 624112 - DNA, 75 bp, synthetic construct
  source 1..75: mol_type = other DNA
atgatattttcccactcggcatttaatgattcgttaacaaatgcgctttactgtacaatcctttcgttaacataa

SEQ ID NO: 624113 - DNA, 75 bp, synthetic construct
  source 1..75: mol_type = other DNA
ttgctgaaaccgcaacggacagacggcggtcatcgactgttcaacgatgccgatattgaccggatccgcgagatc

SEQ ID NO: 624114 - DNA, 75 bp, synthetic construct
  source 1..75: mol_type = other DNA
acggcgtgcaggtcagcaaagttaaaatgctgctcagtaatgaaaatgttgatgtgcagaacggctggcgcgatc

SEQ ID NO: 624115 - DNA, 75 bp, synthetic construct
  source 1..75: mol_type = other DNA
tcacgaacgggccgaacgcggtaatccttacgccatgatgagccttttcgatatggcacaggcatcattaaccca

SEQ ID NO: 624116 - DNA, 75 bp, synthetic construct
  source 1..75: mol_type = other DNA
gtcatcctgtttacctctttctcaggaagtttagtctccaggattcccggggcggttcactcagcatccgcagcc

SEQ ID NO: 624117 - DNA, 75 bp, synthetic construct
  source 1..75: mol_type = other DNA
tggctctgactgcccgccagtattatgaaaaacaactcggtagccttgagaaaacaatcaatcaggcaaacgcac

SEQ ID NO: 624118 - DNA, 75 bp, synthetic construct
  source 1..75: mol_type = other DNA
gacatactgagtacccagacagccacgggtaccgctatcaatcagaactctgaaaagctggcaagtgtcattgcc

SEQ ID NO: 624119 - DNA, 75 bp, synthetic construct
  source 1..75: mol_type = other DNA
atgacccgtctggcttcgcgctttagcgccgcaaatcttatccgtcgtgaccgtccgttaacccgtgaggagctg

SEQ ID NO: 624120 - DNA, 75 bp, synthetic construct
  source 1..75: mol_type = other DNA
ccatccgtcagagcaatggcgcgaattgaatcgaaacgcacaggagattttttacatatgccggaaaccattaaa

SEQ ID NO: 624121 - DNA, 75 bp, synthetic construct
  source 1..75: mol_type = other DNA
atggcgcgtgccggatttgaaaaaaccgaacgtgataatgtctacaacgggatgaccctgcgtgaatatgcccgt

SEQ ID NO: 624122 - DNA, 75 bp, synthetic construct
  source 1..75: mol_type = other DNA
atgcaaagacaatctgcaaccacactgcttgcactccttgtaggctgtgcggttatccctgccacccatgcctac

SEQ ID NO: 624123 - DNA, 75 bp, synthetic construct
  source 1..75: mol_type = other DNA
cgtgcagcagtgatggctcgcgcagggtacagcgaagccgaaaaagacaatgcctataacggctttacgctacgc

SEQ ID NO: 624124 - DNA, 75 bp, synthetic construct
  source 1..75: mol_type = other DNA
gggactatttcgtgcggtttgtcagaacgggctcgtctgcggtgagtcgtttggcgaggtgcgggtgccacacaa

SEQ ID NO: 624125 - DNA, 75 bp, synthetic construct
  source 1..75: mol_type = other DNA
agcagaaagccgccgggcagctgcttctgcggctacacgtctgagtcagggtgaaggggtcagcagtaaacccat

SEQ ID NO: 624126 - DNA, 75 bp, synthetic construct
  source 1..75: mol_type = other DNA
ccaccggcacagccatcaaccagagttcagagaagctggcctctgtcatcgcacaggatgggcaggccacccgtc

SEQ ID NO: 624127 - DNA, 75 bp, synthetic construct
  source 1..75: mol_type = other DNA
tgactgaagccctgcagtcaccatccgctgcggcatattttgaccggaccgcatcatcagaggcccgcacccgtg

SEQ ID NO: 624128 - DNA, 75 bp, synthetic construct
  source 1..75: mol_type = other DNA
cgaaagcggcggcaatgatttccgctgccagactgttagatctacgccagccaccgcaacagatacaggagaatg

SEQ ID NO: 624129 - DNA, 75 bp, synthetic construct
  source 1..75: mol_type = other DNA
ttgccaaagcacgagcggcaacgctactcggcgctgccaggttaatggaattgcgtaaaccaccacgccagatac

SEQ ID NO: 624130 - DNA, 75 bp, synthetic construct
  source 1..75: mol_type = other DNA
gaggattttccggcacagttggcacttgccaaagcacgagcggcaacgctactcggcgctgccaggttaatggaa

SEQ ID NO: 624131 - DNA, 75 bp, synthetic construct
  source 1..75: mol_type = other DNA
gctaataaatggctgctgagaggcgttgaggcaatgatattagtcaatcagagagtgaaaagcaattgttttaaa

SEQ ID NO: 624132 - DNA, 75 bp, synthetic construct
  source 1..75: mol_type = other DNA
ccagcctgtcggcagagctggaaaccgcaaaaggcacaccaactggcggcactattgatctgacgaaatatgtgc

SEQ ID NO: 624133 - DNA, 75 bp, synthetic construct
  source 1..75: mol_type = other DNA
gcattagacacacgctaggcacttcctttttctcaattgaaagtgcatttcattcagctaaaaaagaaattgaca

SEQ ID NO: 624134 - DNA, 75 bp, synthetic construct
  source 1..75: mol_type = other DNA
taatcgccctgacctgcgcgattaccgcgccgctggcgctgactgctgatctacaccaaaccgcccgcgtctggc

SEQ ID NO: 624135 - DNA, 75 bp, synthetic construct
  source 1..75: mol_type = other DNA
gactgagggcaaaagcttcctggaatttcagtccggtctgttaccgcgcacacagccagcctgtgtcagaaaatc

SEQ ID NO: 624136 - DNA, 75 bp, synthetic construct
  source 1..75: mol_type = other DNA
catataaatgacaacggagagttgtccagaacggtactcatgttcgagggggttgctgaaagcaactttaaagat

SEQ ID NO: 624137 - DNA, 75 bp, synthetic construct
  source 1..75: mol_type = other DNA
cagcccggaatgccccattgggacacgctaaagatctggatgcttcaacaccccgaactgcgacagacgattgag

SEQ ID NO: 624138 - DNA, 75 bp, synthetic construct
  source 1..75: mol_type = other DNA
caccgaaggagacaccgtattctgccgccattgcacagcaccaggaggcccagcttaacgtcgcctttacccggc

SEQ ID NO: 624139 - DNA, 75 bp, synthetic construct
  source 1..75: mol_type = other DNA
tccttactgaaaacaaagtgaattcgatagcagagaaatattgtaaaaagtataatcttaatggctcgttggcat

SEQ ID NO: 624140 - DNA, 75 bp, synthetic construct
  source 1..75: mol_type = other DNA
caacgataaaacttcccaaaacccctcgggtttatttaaggtcatgtcacatgggaaggtaaatatgctgaagtt

SEQ ID NO: 624141 - DNA, 75 bp, synthetic construct
  source 1..75: mol_type = other DNA
aatgcattttgcctgttcgcccggagaagtgaggtgtactgacaatagcggacactaccatttgttcttttttta

SEQ ID NO: 624142 - DNA, 75 bp, synthetic construct
  source 1..75: mol_type = other DNA
atggcggaactgactgattttttgccttatgtccgtcgtcatatcagcggtccactgagcattatgatgacggat

SEQ ID NO: 624143 - DNA, 75 bp, synthetic construct
  source 1..75: mol_type = other DNA
caaggaaaataagtttgttattaatttctatgatcccaatcagaccgcgacgcataaacgagtattttttgcact

SEQ ID NO: 624144 - DNA, 75 bp, synthetic construct
  source 1..75: mol_type = other DNA
tgataaccaggaagctagaatcacattgaaaacgtccctgatggtagatgggcaaaagactgcactgaatgccag

SEQ ID NO: 624145 - DNA, 75 bp, synthetic construct
  source 1..75: mol_type = other DNA
gtgaggtacgtgtgccgcataaaggcaatgtggtagagaaagtcattgaaggggcttacgaagtgctggggatat

SEQ ID NO: 624146 - DNA, 75 bp, synthetic construct
  source 1..75: mol_type = other DNA
aaacaaactgccttatttcaccggtaaggatacggtagcgcagactgatttaacgtcagtcggtcgcgatattct

SEQ ID NO: 624147 - DNA, 75 bp, synthetic construct
  source 1..75: mol_type = other DNA
gcaatgacccgaactttgcgacaacaatgacaaatgctctggcaggcaaacagcctctggatgcaactttaaccg

SEQ ID NO: 624148 - DNA, 75 bp, synthetic construct
  source 1..75: mol_type = other DNA
atgctgcaaaccagatacgccgtgaccgtccgctgacacacgaagaactgatgcactatgttcccagtattttcg

SEQ ID NO: 624149 - DNA, 75 bp, synthetic construct
  source 1..75: mol_type = other DNA
tactgttgtaccagtagcaggaaaagaaatcgtgcttccgtatgacaaagatgatgaggagtgcgttcatatcat

SEQ ID NO: 624150 - DNA, 75 bp, synthetic construct
  source 1..75: mol_type = other DNA
atggctgccgtggcattcagccgccagtcgttggtgtgccgtcgggaggttactgttgtaccagtagcaggaaaa

SEQ ID NO: 624151 - DNA, 75 bp, synthetic construct
  source 1..75: mol_type = other DNA
tgatgatttagacgagtctgtaaaagatgacattagaaactgtgagttctataatcaacgccattatgggctaga

SEQ ID NO: 624152 - DNA, 75 bp, synthetic construct
  source 1..75: mol_type = other DNA
aggcggcactgatttaccgttatggtgacgaacatcagcccgtcaccaccgccgacattctgacaccacgacgcc

SEQ ID NO: 624153 - DNA, 75 bp, synthetic construct
  source 1..75: mol_type = other DNA
gctgtgtgtgatttttatctcgactttactctgtgggacggtatcccgtactgggataccggcgcgccaggtctg

SEQ ID NO: 624154 - DNA, 75 bp, synthetic construct
  source 1..75: mol_type = other DNA
aagtctgccaacaatctacggcttgccaacgacaaagctgaagacctgacggtcaagcggctcacccgcggcaac

SEQ ID NO: 624155 - DNA, 75 bp, synthetic construct
  source 1..75: mol_type = other DNA
cattctgacaccacgacgccgggaggattacggtaaggacctgtggagcgcatatcagaccatccaggagaatat

SEQ ID NO: 624156 - DNA, 75 bp, synthetic construct
  source 1..75: mol_type = other DNA
atctgcgcgagctggcgctttatgttcagcgtctggccaacaacgaaccctatgtcgcttttttcagcgcggcag

SEQ ID NO: 624157 - DNA, 75 bp, synthetic construct
  source 1..75: mol_type = other DNA
gaagcgactatgtggggagattaccatctgcgcgagctggcgctttatgttcagcgtctggccaacaacgaaccc

SEQ ID NO: 624158 - DNA, 75 bp, synthetic construct
  source 1..75: mol_type = other DNA
cgaacccgtagacagctccgcagcggcgattgcggcgcaaggcttacttcggtttgcggcctggcttcgcgccag

SEQ ID NO: 624159 - DNA, 75 bp, synthetic construct
  source 1..75: mol_type = other DNA
tggcaaataaagtacgttcaacaccggtcgcggtaagtaccgcgcgtgaaatcagcctggcacctgtcaataaac

SEQ ID NO: 624160 - DNA, 75 bp, synthetic construct
  source 1..75: mol_type = other DNA
cggctgtgaagctggcgatgaacatgagcgacgacgaagtcgcggatctggacggtaaggcgctcgacgccatgt

SEQ ID NO: 624161 - DNA, 75 bp, synthetic construct
  source 1..75: mol_type = other DNA
gatgaaccggaagttgtacccggcagcagaaatcgaaaaggcctacaacacgctcgagcgtaacccgatgccgct

SEQ ID NO: 624162 - DNA, 75 bp, synthetic construct
  source 1..75: mol_type = other DNA
atggtcgatacagcccaggaacccagactttctcgactcttttctaaccgggtcattgcacgttatccggcattt

SEQ ID NO: 624163 - DNA, 75 bp, synthetic construct
  source 1..75: mol_type = other DNA
gtgacgcgcactatctttaccggtatgaccgtcacggcagactgacagagaaaaccgacctcatcccggaagggg

SEQ ID NO: 624164 - DNA, 75 bp, synthetic construct
  source 1..75: mol_type = other DNA
ggagagcctgggcctttcagtgaatgtgtatacaacattgaggaaattatgcgctggatcgaaaaccagaaacaa

SEQ ID NO: 624165 - DNA, 75 bp, synthetic construct
  source 1..75: mol_type = other DNA
cctgatactcgtgacaatccatcttctcgaagtggaaatgtttgccttaaagtctctggaagaaagaatgacgga

SEQ ID NO: 624166 - DNA, 75 bp, synthetic construct
  source 1..75: mol_type = other DNA
taaaggttgctctacctatcagcagctctacaatgaattccacgcattatatatagataaagcaggaatatggag

SEQ ID NO: 624167 - DNA, 75 bp, synthetic construct
  source 1..75: mol_type = other DNA
gatgcaggctggcacgcatcccgattactacaccctggctcccgaaaaagggaaaatatgctgggcattgatgcg

SEQ ID NO: 624168 - DNA, 75 bp, synthetic construct
  source 1..75: mol_type = other DNA
cagaccatccaggagaatatgctgaaaggcggaatttccggccgcagtgcaaaaggaaaacgtatccacacccgt

SEQ ID NO: 624169 - DNA, 75 bp, synthetic construct
  source 1..75: mol_type = other DNA
gtttgtgatattgatggaaataatgatgaaattatagactctataattgattctgattttaacatgagatttttc

SEQ ID NO: 624170 - DNA, 75 bp, synthetic construct
  source 1..75: mol_type = other DNA
gaccgatgatatgtcagtggtgagaaaaatgggattatctggttttaaagaatatgtaaataaaaaattcggcat

SEQ ID NO: 624171 - DNA, 75 bp, synthetic construct
  source 1..75: mol_type = other DNA
gtccgctggacggcatcatctggccgctgacagaagaacagagccgccagacagcgcaactcgacaaaggctggc

SEQ ID NO: 624172 - DNA, 75 bp, synthetic construct
  source 1..75: mol_type = other DNA
aagcatcctcggcacgattttgcaggaaaacggggtgaccgaatggaggccgctgttcagcgagccacatccttc

SEQ ID NO: 624173 - DNA, 75 bp, synthetic construct
  source 1..75: mol_type = other DNA
acgacaaaaaccagatgctgtacagcatgaaggtgcaccgccgctgtggcgcacagggctgcgccagaacttccg

SEQ ID NO: 624174 - DNA, 75 bp, synthetic construct
  source 1..75: mol_type = other DNA
atgtcaaccggattacgtttcacactggaagtggacggcctgccaccggacgcttttgcggtggtttcctttcat

SEQ ID NO: 624175 - DNA, 75 bp, synthetic construct
  source 1..75: mol_type = other DNA
aagcatcctcggcacgattttgcaggaaaacggggtgaccgagtggagcccgctgttcagcgagccgcatccttc

SEQ ID NO: 624176 - DNA, 75 bp, synthetic construct
  source 1..75: mol_type = other DNA
aagcatcctcggcacgattttgcaggaaaacggggtgaccgactggagtccgctgttcagcgagcctcatccttc

SEQ ID NO: 624177 - DNA, 75 bp, synthetic construct
  source 1..75: mol_type = other DNA
aagcatcctcggcacgattttgcaggaaaacggggtgaccgattggagtccgctgttcagcgagccccatccttc

SEQ ID NO: 624178 - DNA, 75 bp, synthetic construct
  source 1..75: mol_type = other DNA
aatccggatgcgcttcgtgagcaggtcgcggccggggttatcggcctcaaaattcacgaagactggggagctaca

SEQ ID NO: 624179 - DNA, 75 bp, synthetic construct
  source 1..75: mol_type = other DNA
ttatcaaacggcatgcgcgcggatgtgggaaatacccggatattacgcgctgaagcgggaacggcggtaagctat

SEQ ID NO: 624180 - DNA, 75 bp, synthetic construct
  source 1..75: mol_type = other DNA
cagaaggtgacctgcctgagttctacagcgatcgtgaagggatgaaaggctggaacctgttccagttgatgcacc

SEQ ID NO: 624181 - DNA, 75 bp, synthetic construct
  source 1..75: mol_type = other DNA
gtgtatgggtattttgttttatttgtagctcctttttatttcttaacctaccttaggttttacgacttcccaaag

SEQ ID NO: 624182 - DNA, 75 bp, synthetic construct
  source 1..75: mol_type = other DNA
tcgcgcgaagtttggcacgtcagaccttcaggcgccctacgagcacatcaaaacgttcgacactgcaatcctgag

SEQ ID NO: 624183 - DNA, 75 bp, synthetic construct
  source 1..75: mol_type = other DNA
accgacatacgttcggactgttttggtgagccgctgacgtatcaacttgatgtcgggacgaagcaactcaggttt

SEQ ID NO: 624184 - DNA, 75 bp, synthetic construct
  source 1..75: mol_type = other DNA
atttcctacgcagaagagtcagggctaattgtgcctttaggccgttgggtgattctcgatgtcgtacgccaggtg

SEQ ID NO: 624185 - DNA, 75 bp, synthetic construct
  source 1..75: mol_type = other DNA
tctttctcagggagtttagtctccaggatttccggggcggttcagacttcatttcctacgcagaagagtcagggc

SEQ ID NO: 624186 - DNA, 75 bp, synthetic construct
  source 1..75: mol_type = other DNA
gaagatgcttttttaaccaagaatgggatcaatgagcggcaaggatttttgtttgccaaaccgatgcccgccgtc

SEQ ID NO: 624187 - DNA, 75 bp, synthetic construct
  source 1..75: mol_type = other DNA
acgaaaacctatgatctgaaagccaatgataaggtgaccttcaaggtgccttacggtggtctgatttatatcaag

SEQ ID NO: 624188 - DNA, 75 bp, synthetic construct
  source 1..75: mol_type = other DNA
tcataaaattctgttatacatctccatagtgtggtcagtatataatataataacttttttctctttaactattta

SEQ ID NO: 624189 - DNA, 75 bp, synthetic construct
  source 1..75: mol_type = other DNA
ttatttcaggggttgcaggtgattccttttgcactacagatggctcaagaacgactaaaatttacagttttcatg

SEQ ID NO: 624190 - DNA, 75 bp, synthetic construct
  source 1..75: mol_type = other DNA
ttacctcatattcgactgtatcagtacaaaccgtacagttacatttaatgaggagtttcagggtatagtctgggc

SEQ ID NO: 624191 - DNA, 75 bp, synthetic construct
  source 1..75: mol_type = other DNA
gagaacctgattaagggcgggctcagtggtcggagtgcgaaaggcgggcgaacgcatacccgcgccgtgcgtggt

SEQ ID NO: 624192 - DNA, 75 bp, synthetic construct
  source 1..75: mol_type = other DNA
tttggtttatctgtggttttgtattcctttggtgggtttataactggttctcttaacctggaggattacaatcca

SEQ ID NO: 624193 - DNA, 75 bp, synthetic construct
  source 1..75: mol_type = other DNA
ctgacagcatattctacatcctcccttcgctcctgatactggtacctgtctgctggtttggttggtccctttcat

SEQ ID NO: 624194 - DNA, 75 bp, synthetic construct
  source 1..75: mol_type = other DNA
cctatttggctcaggctgccgagctggccgggaatccgggccagttagccgcgtatgaatcccgtgggcattgcg

SEQ ID NO: 624195 - DNA, 75 bp, synthetic construct
  source 1..75: mol_type = other DNA
gatataatgttaaatacagccttttaaattgtgctgattatggtgttccacaaacccgaatgagagtcattatct

SEQ ID NO: 624196 - DNA, 75 bp, synthetic construct
  source 1..75: mol_type = other DNA
ggatgccatgcagtcgctgatgctgccgccacctgcacaacaggctctggcacaggctgcactgacgtaccgttt

SEQ ID NO: 624197 - DNA, 75 bp, synthetic construct
  source 1..75: mol_type = other DNA
ctctgtatatatggttaatggcgaacccgttaatatccatcattttatacgtaataccgttagtaattgctctaa

SEQ ID NO: 624198 - DNA, 75 bp, synthetic construct
  source 1..75: mol_type = other DNA
agggcgcaattacttcagtcaccaagaaaatctcaccaaaaagcttcagggatatgccgacaaagcacctcaaaa

SEQ ID NO: 624199 - DNA, 75 bp, synthetic construct
  source 1..75: mol_type = other DNA
tctgtttctgttgaggacaataacattcctgacgaacaggaagagagtacagacccccacaaattctggaaatct

SEQ ID NO: 624200 - DNA, 75 bp, synthetic construct
  source 1..75: mol_type = other DNA
cttttgatttaatatctatgattttcatgacagcgtatgcgcttttagctacgcaagcatcaagaaaccctaaat

SEQ ID NO: 624201 - DNA, 75 bp, synthetic construct
  source 1..75: mol_type = other DNA
ggatggatatttttgatgtggatcattctgttgctgtggtccgctctcggtgataaaaaaccgaaagaagttcaa

SEQ ID NO: 624202 - DNA, 75 bp, synthetic construct
  source 1..75: mol_type = other DNA
agttcgacaagaaggacgtcctgaaagaaattacgaagaagtggatttcaggaaccccatttcatcagcttttca

SEQ ID NO: 624203 - DNA, 75 bp, synthetic construct
  source 1..75: mol_type = other DNA
ccattcccgctatattgatgcgaaacgcaatgcgcttgatatgtgggtggagcggttggagatactggcgggaac

SEQ ID NO: 624204 - DNA, 75 bp, synthetic construct
  source 1..75: mol_type = other DNA
cgctagattatgctaaatttataacagaaacactgttattagttgtttcaacacctgttgctttagctgggcttg

SEQ ID NO: 624205 - DNA, 75 bp, synthetic construct
  source 1..75: mol_type = other DNA
aaacccttattgctaagggggcaaatcagtgtgcgcgggcgggggataaattaccggatttactcgatgaatata

SEQ ID NO: 624206 - DNA, 75 bp, synthetic construct
  source 1..75: mol_type = other DNA
aataaatctggtgaggtaagtggtaatgactccaacttactgatagtgttttatgttcagataatgcccgatgac

SEQ ID NO: 624207 - DNA, 75 bp, synthetic construct
  source 1..75: mol_type = other DNA
accatcgcggcctgccgctggtgcttatcagcacggaagggacaacagcgtggtacgcagaatacgatgaatggg

SEQ ID NO: 624208 - DNA, 75 bp, synthetic construct
  source 1..75: mol_type = other DNA
aattaccggtaaacaggttccggaaattatcctgcttaactctcacgatggcaccagttcgtaccagatgctgcc

SEQ ID NO: 624209 - DNA, 75 bp, synthetic construct
  source 1..75: mol_type = other DNA
agtcgcttgcgatgctgaagccgctgcaacttttcaatgtcgcccagtgtgatggactgccggatgctgttgccg

SEQ ID NO: 624210 - DNA, 75 bp, synthetic construct
  source 1..75: mol_type = other DNA
ttatggttgatgtaccggtgctgaaagcgaatcctctctttaacgttgaacagtgtgatggattgtcgctgccgg

SEQ ID NO: 624211 - DNA, 75 bp, synthetic construct
  source 1..75: mol_type = other DNA
cagggttgttaggtctggcattatttttattgaaaggaagtatgagtcctgatgaatatgaacctgtctatccgc

SEQ ID NO: 624212 - DNA, 75 bp, synthetic construct
  source 1..75: mol_type = other DNA
ctgcatgtggagatgcgaccggaaaccacgctccggctgctgccggagtgggagcaatatctggcgctgccggaa

SEQ ID NO: 624213 - DNA, 75 bp, synthetic construct
  source 1..75: mol_type = other DNA
aaagcaattcctattattcttgttcctattttgtggggggccttacaaggagcaagcgtaaatcttagtctttat

SEQ ID NO: 624214 - DNA, 75 bp, synthetic construct
  source 1..75: mol_type = other DNA
taattctgaagctgattactggtccacgctactgcatgaactggttcatgcaaccggccacagccgccgccttag

SEQ ID NO: 624215 - DNA, 75 bp, synthetic construct
  source 1..75: mol_type = other DNA
aatcatatacatccagattttaaggatgcaatatttttttcattgctctcagtatttagtgatgtagcaaactta

SEQ ID NO: 624216 - DNA, 75 bp, synthetic construct
  source 1..75: mol_type = other DNA
ccaccacctgcgatggtcacggcctccatcctggagcgccgtggcgacacagcagcccttactcggctacaggat

SEQ ID NO: 624217 - DNA, 75 bp, synthetic construct
  source 1..75: mol_type = other DNA
ttgctggggtacgaagcggcaacactggaagatgtaggtcgtgaaattggcctcacccgtgaacgtgttcgccag

SEQ ID NO: 624218 - DNA, 75 bp, synthetic construct
  source 1..75: mol_type = other DNA
gcaaggcaagcgagcattaccattcaagaagcatataggatgcaccgatatgctcgttttgtaatcctagctttc

SEQ ID NO: 624219 - DNA, 75 bp, synthetic construct
  source 1..75: mol_type = other DNA
gaagatagcatcgatggtctgaaagatttcgataaatataaaaaccatatattagagacaggaattgactgcaaa

SEQ ID NO: 624220 - DNA, 75 bp, synthetic construct
  source 1..75: mol_type = other DNA
aatagatgttcaaaagcacaactctcccctcagtttgaacgttacagatggggttaaagagataaattctgctcc

SEQ ID NO: 624221 - DNA, 75 bp, synthetic construct
  source 1..75: mol_type = other DNA
atgaaactctaatgccggtatcaaaagtatctgcttttatatttacagccccatatagatataaagtatatccca

SEQ ID NO: 624222 - DNA, 75 bp, synthetic construct
  source 1..75: mol_type = other DNA
ctcgcggtgggccggtgttaacggttttggcgacctgacgctgcagttcaccgcatatgctgttcgtctggccag

SEQ ID NO: 624223 - DNA, 75 bp, synthetic construct
  source 1..75: mol_type = other DNA
gcacgccagccggaacatctgccggaaggtttttatatgcccgggactgcagaggagctgacgtccacaccacgc

SEQ ID NO: 624224 - DNA, 75 bp, synthetic construct
  source 1..75: mol_type = other DNA
aacgcatacccgcgccgtgcgtggtatcgacggagatgtgaagctcaaccgggctctctgggtgatggcagaagc

SEQ ID NO: 624225 - DNA, 75 bp, synthetic construct
  source 1..75: mol_type = other DNA
tgctttaatgggatcaaaatttataggtattgtaaaatatgactcaactaaacctcaatggaaagatgaaataaa

SEQ ID NO: 624226 - DNA, 75 bp, synthetic construct
  source 1..75: mol_type = other DNA
gagcccaaagggaaatatccattgattagcatggttagagctggttcgtggtgtgaagcttgtgagccctacgat

SEQ ID NO: 624227 - DNA, 75 bp, synthetic construct
  source 1..75: mol_type = other DNA
gcatcagctgcagcagcttatccggctgccggggcagcagtatgatgaggagtccggcctgtattacaaccgcca

SEQ ID NO: 624228 - DNA, 75 bp, synthetic construct
  source 1..75: mol_type = other DNA
cctccaacaccgttacttgggcaacgcgcctcttctggcctgcgccagcaagccggtgtcgatatcggaaacacc

SEQ ID NO: 624229 - DNA, 75 bp, synthetic construct
  source 1..75: mol_type = other DNA
caataaagctaaaaatccccctatgtctatccatttctgctgggattcagtgattgataaaaaagtgtatgaaac

SEQ ID NO: 624230 - DNA, 75 bp, synthetic construct
  source 1..75: mol_type = other DNA
atccccctatgtctatccatttatgctgggactcagtgattgataaaaaagtgtatgaaacctggataacgctgg

SEQ ID NO: 624231 - DNA, 75 bp, synthetic construct
  source 1..75: mol_type = other DNA
aatggtatttcaattttttttaccctaattccctaccagcagaagttacctatgtggagttattagataccgatg

SEQ ID NO: 624232 - DNA, 75 bp, synthetic construct
  source 1..75: mol_type = other DNA
tggggtggcggcaggattcttcctggtctggttactcgtgctgggaaagaagaggcgctctgcctggatggtgtg

SEQ ID NO: 624233 - DNA, 75 bp, synthetic construct
  source 1..75: mol_type = other DNA
aatggcagaaagctatctgacgatactttctcagcggctgtatcggtaacgtttcgtgctggctgcgggaacatg

SEQ ID NO: 624234 - DNA, 75 bp, synthetic construct
  source 1..75: mol_type = other DNA
gcggcttggaaccccaaaatgatatgttccggctgacctacgccatggaactcctgatgggtcatgcctgggtct

SEQ ID NO: 624235 - DNA, 75 bp, synthetic construct
  source 1..75: mol_type = other DNA
ttgataaaaaagtgtatgaaacctggataacgctggcgggagacgtctggaaattgatgctcacaccttatccac

SEQ ID NO: 624236 - DNA, 75 bp, synthetic construct
  source 1..75: mol_type = other DNA
ggcgagtactaatgccagtccaggaagtgttggacaatggagcgagaaagtatcagggatgtcgtcagtttttaa

SEQ ID NO: 624237 - DNA, 75 bp, synthetic construct
  source 1..75: mol_type = other DNA
taagacaataccacgcaaggtgaaactaccttcatttattaatatcgagaatatacgaatcaggaatgcatacaa

SEQ ID NO: 624238 - DNA, 75 bp, synthetic construct
  source 1..75: mol_type = other DNA
tttaatgtggggaagtatgtactggacattccctcctttactggcaccccgttctcgcgtagctaccgtcggagg

SEQ ID NO: 624239 - DNA, 75 bp, synthetic construct
  source 1..75: mol_type = other DNA
ataccgatggcatctattatcagttcagaacgctggcgagtactaatgccagtccaggaagtgttggacaatgga

SEQ ID NO: 624240 - DNA, 75 bp, synthetic construct
  source 1..75: mol_type = other DNA
ttgataaaaaagtgtatgaaacctggataacgctggcgggagacgtctggacattgatgctcacaccttatacac

SEQ ID NO: 624241 - DNA, 75 bp, synthetic construct
  source 1..75: mol_type = other DNA
gatccatatgtctgcccggcaggtgtgctgactgacggtatgggtaatacgcatggcgtaaaactaggcaccgtt

SEQ ID NO: 624242 - DNA, 75 bp, synthetic construct
  source 1..75: mol_type = other DNA
atagcgttctgctgctgattctgttttttgtgttttatcagcttctgttttattcacgagatgtcaaatttgcat

SEQ ID NO: 624243 - DNA, 75 bp, synthetic construct
  source 1..75: mol_type = other DNA
aatgaggctgcaatcctttatgttgcaaacaaagattacctgcgctgcttgtcagttgatgacgctatccctgcg

SEQ ID NO: 624244 - DNA, 75 bp, synthetic construct
  source 1..75: mol_type = other DNA
gtgcgcgagatgcgcgccgacgtgtcggagctggtagagatgctgcttgctacgccgaatatggaacaacgcact

SEQ ID NO: 624245 - DNA, 75 bp, synthetic construct
  source 1..75: mol_type = other DNA
taattgcagaccatgacaagccgcagccgtcaggctgcctactcgagcttcagctcaataaaggcgagtatcgac

SEQ ID NO: 624246 - DNA, 75 bp, synthetic construct
  source 1..75: mol_type = other DNA
agaacacggcggtgcggagttcagagagtaacggaatagcggagagcttcgtgaaaacgataaagcgtgactata

SEQ ID NO: 624247 - DNA, 75 bp, synthetic construct
  source 1..75: mol_type = other DNA
aacaagtggaagaaatacttagcaagcaaaaagttagcgagcaaggaaaaatgattcaatcattaaagaacaggg

SEQ ID NO: 624248 - DNA, 75 bp, synthetic construct
  source 1..75: mol_type = other DNA
tttaacggttcggggcgcataagggcagcgcaggacggcggcgacacgtcgcgcgattcatggcggctcccggtc

SEQ ID NO: 624249 - DNA, 75 bp, synthetic construct
  source 1..75: mol_type = other DNA
cgtaagcgcctggcggctacagagcgacgcgatggcagtgatggctggctcagccgggaacctggaagccgtcgc

SEQ ID NO: 624250 - DNA, 75 bp, synthetic construct
  source 1..75: mol_type = other DNA
atagcacagccgcagcaggcgcaaccacatcgccagccggtaccgcgaccgccgtgcatcccacatcgccagccc

SEQ ID NO: 624251 - DNA, 75 bp, synthetic construct
  source 1..75: mol_type = other DNA
tgcgcgctgcaggtcaaaaccgtcaaacactgtcaggatgaactcgatgcagaagcacaaaagcctgcgcaaagc

SEQ ID NO: 624252 - DNA, 75 bp, synthetic construct
  source 1..75: mol_type = other DNA
tgcgcgataaaggtcgaaaccatcaaagactgccaggataaaatcgatgcagaaaatgaaaagcctgcgccaggc

SEQ ID NO: 624253 - DNA, 75 bp, synthetic construct
  source 1..75: mol_type = other DNA
ttgcaggtacgtctgcgtatcggcgggagtcaacagtatttttacaaagtgaaactcactgacgggggagaataa

SEQ ID NO: 624254 - DNA, 75 bp, synthetic construct
  source 1..75: mol_type = other DNA
cttacagagattaccttgcgacctaagcagactgagtttagaaagaaactgatggaagcatattctggtaaatgt

SEQ ID NO: 624255 - DNA, 75 bp, synthetic construct
  source 1..75: mol_type = other DNA
gccagttaaatgatttggctgaatttgcaaaaattgacaacggatctgtagagataaaaaacacctataatagct

SEQ ID NO: 624256 - DNA, 75 bp, synthetic construct
  source 1..75: mol_type = other DNA
cctatcaagttgggagatagcagccttgcaacagctgaggtatctgcttcagctcccggagatgtcttcggcgtt

SEQ ID NO: 624257 - DNA, 75 bp, synthetic construct
  source 1..75: mol_type = other DNA
aaaaaggatgtcacagttaaaataaaaaacaataatgatgcagtgatttttacagatgctctacgccttaatcaa

SEQ ID NO: 624258 - DNA, 75 bp, synthetic construct
  source 1..75: mol_type = other DNA
gctgctaatacaggatgcgccagaactggcggcaatgtaccagggcgaatttaaccgtttgtggaatgagtccag

SEQ ID NO: 624259 - DNA, 75 bp, synthetic construct
  source 1..75: mol_type = other DNA
ttcccggggcggttcaaagaacgctttgacggtgaaatttttgacctggatgtcgccatggaccgtgttgaagga

SEQ ID NO: 624260 - DNA, 75 bp, synthetic construct
  source 1..75: mol_type = other DNA
gcatcaacatcccatttttcaaatgagataaaaacacgactaggcttttctgcaagagaattatcgaatattact

SEQ ID NO: 624261 - DNA, 75 bp, synthetic construct
  source 1..75: mol_type = other DNA
gataccgcgtgtgggtcaggaggtcattgtggacttcctcaacggcgatccggaccagccgatcattatggggcg

SEQ ID NO: 624262 - DNA, 75 bp, synthetic construct
  source 1..75: mol_type = other DNA
tgattatcatttattgctacgctggttaatgaaaatttcttacaactcggcaagcgcggtcaatgatccatccac

SEQ ID NO: 624263 - DNA, 75 bp, synthetic construct
  source 1..75: mol_type = other DNA
gcgcgattggtcagcaacagcttgctgccgcgctggcggatgactttgaagggctgactcacgagcaactgcgtc

SEQ ID NO: 624264 - DNA, 75 bp, synthetic construct
  source 1..75: mol_type = other DNA
atattgattatctttccgccagattagaggctaccacgcttgttcttgaagaacttgttaaacttcttacgccag

SEQ ID NO: 624265 - DNA, 75 bp, synthetic construct
  source 1..75: mol_type = other DNA
acctcaacctgtttaacgagggcgatatctatctggcgcaggtggagtccttcactccggcaaagctgacgcgca

SEQ ID NO: 624266 - DNA, 75 bp, synthetic construct
  source 1..75: mol_type = other DNA
tcttgccgattatgaacccgatttggggattttgtttggaccgtatctgactgacgatccgcaaaaactgttcaa

SEQ ID NO: 624267 - DNA, 75 bp, synthetic construct
  source 1..75: mol_type = other DNA
aacactctataaccccaagacgcataaagtcgttggttactattacaacatcgaccctggttacctgatttggtt

SEQ ID NO: 624268 - DNA, 75 bp, synthetic construct
  source 1..75: mol_type = other DNA
atcaaaattgagttaattgatccagtacgtttaactcagttaaataaccagtggttagagaacggaaattacatc

SEQ ID NO: 624269 - DNA, 75 bp, synthetic construct
  source 1..75: mol_type = other DNA
atggagagattgtagaactacgaagcgatactccagcagaattacagattccggcaaattacaaaggaaatatta

SEQ ID NO: 624270 - DNA, 75 bp, synthetic construct
  source 1..75: mol_type = other DNA
acagcaagagacccagttgatagtttatctttcacagttgaagaaccaaagcagattatggagttaataagatta

SEQ ID NO: 624271 - DNA, 75 bp, synthetic construct
  source 1..75: mol_type = other DNA
gatgttctgttccgtggacgtactaatgccgaaattggacaagcggtgcagacgcccatagtaggccacagtgga

SEQ ID NO: 624272 - DNA, 75 bp, synthetic construct
  source 1..75: mol_type = other DNA
gaccaacgttttggctgtaaaggttctgtcggcatcggtattccgggaatgccggaaacagaagatggtacgctg

SEQ ID NO: 624273 - DNA, 75 bp, synthetic construct
  source 1..75: mol_type = other DNA
tagtaaataataccaaatatattaatgagaaatcattcattaatatgggccccattaaggctgtcactcaacaat

SEQ ID NO: 624274 - DNA, 75 bp, synthetic construct
  source 1..75: mol_type = other DNA
ataaagacgtcattgcaattgatggaaaaatgctccggcactcttatgacaagagtcgccgcaggggagcgattc

SEQ ID NO: 624275 - DNA, 75 bp, synthetic construct
  source 1..75: mol_type = other DNA
cagttctgctgatttaaccgcaaagaagttcgccacagcgatcctaaatcactggctcgtggagaataagttgca

SEQ ID NO: 624276 - DNA, 75 bp, synthetic construct
  source 1..75: mol_type = other DNA
ggatggaacctgtatgcgtatccgctgaacccggtgcagcggggggatcctcttgggttgtctggtgagacactg

SEQ ID NO: 624277 - DNA, 75 bp, synthetic construct
  source 1..75: mol_type = other DNA
gaaccaatgttagatttaattcgaataatatgacgatatattggaatagtagagcatctttattttgttcaactg

SEQ ID NO: 624278 - DNA, 75 bp, synthetic construct
  source 1..75: mol_type = other DNA
gaaggggttatccggatgcacgacgagcgcacccaccactatcactacgacagccagcaccgcctggtgttctac

SEQ ID NO: 624279 - DNA, 75 bp, synthetic construct
  source 1..75: mol_type = other DNA
gggccgcctgacgggcgaacggcagacggtggagaacccggagacgggggagatgctgtgggagcatgagacggg

SEQ ID NO: 624280 - DNA, 75 bp, synthetic construct
  source 1..75: mol_type = other DNA
ccgggaatggcaggtggtggcaaatgaactgcacggcgaacagccacaggcggtgccaggacggcagggagcggg

SEQ ID NO: 624281 - DNA, 75 bp, synthetic construct
  source 1..75: mol_type = other DNA
ccgccgctgtggcgtgccggtctgcgccagaacttccgtatcttccagaacgaggacatcaaaagcatcctcggc

SEQ ID NO: 624282 - DNA, 75 bp, synthetic construct
  source 1..75: mol_type = other DNA
taaaaagccagatgtgggaaaacgggtgctgacatggacagaactggctaagatttggaaagcgatggaggattc

SEQ ID NO: 624283 - DNA, 75 bp, synthetic construct
  source 1..75: mol_type = other DNA
cagcagtttctctcccttgaatttgcgcaggtgctggacaaaatggcctacctgacgatatggcagggcgatgac

SEQ ID NO: 624284 - DNA, 75 bp, synthetic construct
  source 1..75: mol_type = other DNA
agcaaaattgcgctgacgccggatggcattcagctacaggtcggggaatcgacggtaatcaggctgtcgaaggat

SEQ ID NO: 624285 - DNA, 75 bp, synthetic construct
  source 1..75: mol_type = other DNA
agcacccgggccggatggtggcgcaccgttacgcgggaaggccggagatgcgctaccgctacgacgatacggggc

SEQ ID NO: 624286 - DNA, 75 bp, synthetic construct
  source 1..75: mol_type = other DNA
gagcaatctctaactgcaattagcgaccgcagcgaggtcgccatgtcggcttccagcccatcaacatgtaatctc

SEQ ID NO: 624287 - DNA, 75 bp, synthetic construct
  source 1..75: mol_type = other DNA
acagagaaaccgacctgctgcgaacgttcggcgtaaagctggatgaatggtgccgtgatcgtgtaggcacaatcc

SEQ ID NO: 624288 - DNA, 75 bp, synthetic construct
  source 1..75: mol_type = other DNA
taacgtgcttgcggcatcgactgatgtcggcgacgtcagttggaaactgcctgttgcccagtgtttcagcccctg

SEQ ID NO: 624289 - DNA, 75 bp, synthetic construct
  source 1..75: mol_type = other DNA
ctggcgaaatcatcgatcgcgtaatgcccagcgtggtagtcaatgagcggcccagcaccaacgaagcggatgctg

SEQ ID NO: 624290 - DNA, 75 bp, synthetic construct
  source 1..75: mol_type = other DNA
aaatcatcgatcgcgtgatgcccagcgtggtcgtcaatgagcggcccagcaccaacgaagcggacgctttagcgg

SEQ ID NO: 624291 - DNA, 75 bp, synthetic construct
  source 1..75: mol_type = other DNA
gccaagcaaaacctgtatgtggtcggctcggctgctgcatgggcaggggcgggaactagtcttcaggtcctgcat

SEQ ID NO: 624292 - DNA, 75 bp, synthetic construct
  source 1..75: mol_type = other DNA
tgaaaaatataaaacagctaacaatgtatatttcaatatcattggtacgttaagcgacagtgaattaaataaaat

SEQ ID NO: 624293 - DNA, 75 bp, synthetic construct
  source 1..75: mol_type = other DNA
taaacctgcgaatcgtattgaagatatccacggtatggctgatttcatcagccagtatcctggtgttgatagcac

SEQ ID NO: 624294 - DNA, 75 bp, synthetic construct
  source 1..75: mol_type = other DNA
aagctgaaaaaattaagagatgggactcttttcaccctcacttggtatggcgactccaactctgtacgagagaac

SEQ ID NO: 624295 - DNA, 75 bp, synthetic construct
  source 1..75: mol_type = other DNA
gctctggtggtctcatttttgatgcagggcatcattatactgtcactggtaataataaaacattcaagggtgccg

SEQ ID NO: 624296 - DNA, 75 bp, synthetic construct
  source 1..75: mol_type = other DNA
gtcagtatgccgggcgtaaaatgactctcggcattcgcccggaacatatagcgctaagctcgcaggcagaaggtg

SEQ ID NO: 624297 - DNA, 75 bp, synthetic construct
  source 1..75: mol_type = other DNA
gaagtagcagttcttctcgtgcccaacaaactattggagaggagttggcgactcagataagtaaacaaacagcta

SEQ ID NO: 624298 - DNA, 75 bp, synthetic construct
  source 1..75: mol_type = other DNA
atgggggcatcagctcaagtcagcggcggagcctctgcattaaaggcagcgttcgagtctgcgcaagctgccatg

SEQ ID NO: 624299 - DNA, 75 bp, synthetic construct
  source 1..75: mol_type = other DNA
agaacagagtcagagggatgtttcaagcaccctgacggtactatccattccattcttatcggcgatatggcggaa

SEQ ID NO: 624300 - DNA, 75 bp, synthetic construct
  source 1..75: mol_type = other DNA
tcactagggagcgcgtcgtttagatggacacagctgtacgcagatacagcaacaatcagtacatctgatataaga

SEQ ID NO: 624301 - DNA, 75 bp, synthetic construct
  source 1..75: mol_type = other DNA
atggagcagcgctataaaacggcactcgcgaatctcggctggaatccggttggaacattccagggcggtgcaact

SEQ ID NO: 624302 - DNA, 75 bp, synthetic construct
  source 1..75: mol_type = other DNA
catgacattctcaggttgcgaagctggtgatggttactctttgagatatgatgagatgttatgtttcattatttc

SEQ ID NO: 624303 - DNA, 75 bp, synthetic construct
  source 1..75: mol_type = other DNA
aaccagaatatgatgaaaatggaatcatgacattctcaggttgcgaagctggtgatggttactctttgagatatg

SEQ ID NO: 624304 - DNA, 75 bp, synthetic construct
  source 1..75: mol_type = other DNA
ttataatgagggagttttcacgggatggatttaacatgctggatgccgcttccggatattgtcctctcccaacgt

SEQ ID NO: 624305 - DNA, 75 bp, synthetic construct
  source 1..75: mol_type = other DNA
gcggtaaaatatttgacattctggagtttgatggtttttcatggggaggcggttctattggttggaactcaggtt

SEQ ID NO: 624306 - DNA, 75 bp, synthetic construct
  source 1..75: mol_type = other DNA
ggcgacatctggaagcaccggacggagcttgggctaacggacatcgacaaggcgtttggtggtttcaataacacg

SEQ ID NO: 624307 - DNA, 75 bp, synthetic construct
  source 1..75: mol_type = other DNA
tgcaggacatcatcggcaatatccagaccagtattggagcgattgaggcatttagcgaatcaggaacgcgacaca

SEQ ID NO: 624308 - DNA, 75 bp, synthetic construct
  source 1..75: mol_type = other DNA
aaaaagcaaactgatacctttttttgaaaaaagaaatatattcaattcatttgaggggttagattctccattttt

SEQ ID NO: 624309 - DNA, 75 bp, synthetic construct
  source 1..75: mol_type = other DNA
ttagcgctggaaacacagcttaacggaggaagaacttttctgcaggcagtctctgcttatatagcagaggcccgt

SEQ ID NO: 624310 - DNA, 75 bp, synthetic construct
  source 1..75: mol_type = other DNA
tagaaatgttgacaaagttaaagaggtatagagttcttcttaatagagttgacacttctgttgatgcagatatct

SEQ ID NO: 624311 - DNA, 75 bp, synthetic construct
  source 1..75: mol_type = other DNA
atcaacgcttcaggatgctgttgatatggatattgccactgatgaggaaatagaaatgttgacaaagttaaagag

SEQ ID NO: 624312 - DNA, 75 bp, synthetic construct
  source 1..75: mol_type = other DNA
agttgaaagtgacggacgcacaggtttcccagaacacccagagcattactaacctgaatactcaggtaacgaatc

SEQ ID NO: 624313 - DNA, 75 bp, synthetic construct
  source 1..75: mol_type = other DNA
gataccgatgccgttaacgttggtcagttgaaagtgacggacgcacaggtttcccagaacacccagagcattact

SEQ ID NO: 624314 - DNA, 75 bp, synthetic construct
  source 1..75: mol_type = other DNA
cacggcgaacagttcctgaaagcgattgatatcgtgctggtggcagtcagcgaacacattgaacgttttgcagcc

SEQ ID NO: 624315 - DNA, 75 bp, synthetic construct
  source 1..75: mol_type = other DNA
caacccggcgtgtcgaaatatgattttgcggcgggtcgtagccatattgaaggggcgagcaaacaaagtgatttt

SEQ ID NO: 624316 - DNA, 75 bp, synthetic construct
  source 1..75: mol_type = other DNA
tgtttttaaagatgaaacgcagaaaattaccctgacgcacagaacaacgtcctgtaccgaaattgagcagttatg

SEQ ID NO: 624317 - DNA, 75 bp, synthetic construct
  source 1..75: mol_type = other DNA
tgaaacgttaatcggctacgggcgcaagtctcaacgcacgcaaaaggagatcattttatgtatcgaccagagtgg

SEQ ID NO: 624318 - DNA, 75 bp, synthetic construct
  source 1..75: mol_type = other DNA
gcctctcagttaacgatgaccgaatttcagatgctgttggcggcgaaatatcccgatcagaaaggatttacaaga

SEQ ID NO: 624319 - DNA, 75 bp, synthetic construct
  source 1..75: mol_type = other DNA
gctggcgggttcggtactgctatgaccgggatcgcgggtgctgcggctattggtattggtggcctggcagcatta

SEQ ID NO: 624320 - DNA, 75 bp, synthetic construct
  source 1..75: mol_type = other DNA
cgatcagctacggaaacaggcagaacaagcccaaaagcaggctgatgcaaaaaggctacaggcacagcgtaatct

SEQ ID NO: 624321 - DNA, 75 bp, synthetic construct
  source 1..75: mol_type = other DNA
tactgctggagatatcaccgtcaacgcccccttgatcattcagggagacgttgcaggtgatgataagaaattcaa

SEQ ID NO: 624322 - DNA, 75 bp, synthetic construct
  source 1..75: mol_type = other DNA
aaaacatccaacaccattactctggtatcaaatccatttcaggctaatggtggaaatataattacatggcctttg

SEQ ID NO: 624323 - DNA, 75 bp, synthetic construct
  source 1..75: mol_type = other DNA
ttttggtagccagacaattggagtgtataacggggcaactttggtatcaacaatatcaactcctggtgtttatga

SEQ ID NO: 624324 - DNA, 75 bp, synthetic construct
  source 1..75: mol_type = other DNA
tatcagatttcgatatccagagagttaccggttacccaggagaccgatctcagaaatcagggtaagtttttcgca

SEQ ID NO: 624325 - DNA, 75 bp, synthetic construct
  source 1..75: mol_type = other DNA
tgggatcacgatagctcagacagtactaagcattcaatccgcacttgcacaggcacttgctacgccgtggcctca

SEQ ID NO: 624326 - DNA, 75 bp, synthetic construct
  source 1..75: mol_type = other DNA
atggtgattgatgcaatgttaagcgttcagatgactccgacagcaaaagttagcttcgaggagcaatgttttttt

SEQ ID NO: 624327 - DNA, 75 bp, synthetic construct
  source 1..75: mol_type = other DNA
tcccgatcagaaaggatttacaagagaagagtacgacgctgtagcggatgcttatcttgcccgaagagccaagag

SEQ ID NO: 624328 - DNA, 75 bp, synthetic construct
  source 1..75: mol_type = other DNA
ataacaaaagttttatactgaaagccggtgagcgtgtagtacagccagaagctaacaagaagctgactaagttcc

SEQ ID NO: 624329 - DNA, 75 bp, synthetic construct
  source 1..75: mol_type = other DNA
attgagtaagggcattactattgctcagacagtactctcaatacaatcagcattagcacaggctcttgctacgcc

SEQ ID NO: 624330 - DNA, 75 bp, synthetic construct
  source 1..75: mol_type = other DNA
tgattcaagccacatgatcagtactctacagcagttcaatactgaagccgatgcaatgacgtacatacagggcca

SEQ ID NO: 624331 - DNA, 75 bp, synthetic construct
  source 1..75: mol_type = other DNA
ggcagcgggtttaatgaactgcgtattccgctctattcgatcacggattggcatcgaagtccgatcagcgattcg

SEQ ID NO: 624332 - DNA, 75 bp, synthetic construct
  source 1..75: mol_type = other DNA
cgaattgtgctgacggggcatccgcaggagaacctgaaccgggaatggcaggtggtggcgagtgaactgcacggt

SEQ ID NO: 624333 - DNA, 75 bp, synthetic construct
  source 1..75: mol_type = other DNA
attaaagtgggttctgttcaggtggaaacgattggacttgttcgtgcgctgaccgtgggcgtggcgtaccagacg

SEQ ID NO: 624334 - DNA, 75 bp, synthetic construct
  source 1..75: mol_type = other DNA
gggctcacagacgcaggccaaaacactggaaatcgaatttaaaggagaaacggtcagcaagtggtcgttctcgga

SEQ ID NO: 624335 - DNA, 75 bp, synthetic construct
  source 1..75: mol_type = other DNA
atctggcgctggttatcgcggcctgtgtgacgttcaccggggcgctgtgttacttctttattgtcaaagatcgga

SEQ ID NO: 624336 - DNA, 75 bp, synthetic construct
  source 1..75: mol_type = other DNA
cctggcgttggttacaataaaaatatggtatgtcggtccctgagcatcctgcaaaccggatttttatgtcagaaa

SEQ ID NO: 624337 - DNA, 75 bp, synthetic construct
  source 1..75: mol_type = other DNA
ttgtgctcaccgttatttccaacaataaaatcagcagcatctcaattagcgtcagtgctgcatttctcactggct

SEQ ID NO: 624338 - DNA, 75 bp, synthetic construct
  source 1..75: mol_type = other DNA
tcgcactctcacctttgctactcatggtatttttgattttaaaattgaaaatgcccattcattattcagtcctga

SEQ ID NO: 624339 - DNA, 75 bp, synthetic construct
  source 1..75: mol_type = other DNA
atacagaatctgaaagcctcagtgggttatggcgcactcaaaggattatggccgatcgtgattgtgatcctcggt

SEQ ID NO: 624340 - DNA, 75 bp, synthetic construct
  source 1..75: mol_type = other DNA
atatggcacaacaagaaaaaaattacttgcacatcagatgattgaatctggcttatcaataaatgatattgcaga

SEQ ID NO: 624341 - DNA, 75 bp, synthetic construct
  source 1..75: mol_type = other DNA
gagtatttcttaagagataagttgtattatgacacaaggccgtcaagtaaaagacaaatggattacgtaatagca

SEQ ID NO: 624342 - DNA, 75 bp, synthetic construct
  source 1..75: mol_type = other DNA
caaagttgactgttggaaacagtgaatttttaatcgaaatacctaaatcattatatgaagtgatttcaagtcaaa

SEQ ID NO: 624343 - DNA, 75 bp, synthetic construct
  source 1..75: mol_type = other DNA
accgcattcggtcagcccgaaaccaaaactacacttgatagtggcaatgaagaatggacttactcgatggacaac

SEQ ID NO: 624344 - DNA, 75 bp, synthetic construct
  source 1..75: mol_type = other DNA
ttgtgttacgaagatttcttggaagttcatcggatattattcgaagaattctatccgtgggcaggtcaagatcgt

SEQ ID NO: 624345 - DNA, 75 bp, synthetic construct
  source 1..75: mol_type = other DNA
ataactaacgctcatcagtcacaaccgaagagcacgatgaacattgtgcaagttggcaaaaatggatcatatggt

SEQ ID NO: 624346 - DNA, 75 bp, synthetic construct
  source 1..75: mol_type = other DNA
atctgtgctgactgtgctgcgacgattaacgacatccagaatgaagtggtcaacaaaaactggccaccgagttag

SEQ ID NO: 624347 - DNA, 75 bp, synthetic construct
  source 1..75: mol_type = other DNA
tggcgttgacactggcacatcaactgagttcaccaccacaggccggacagcattcctcttccggccggatgaccc

SEQ ID NO: 624348 - DNA, 75 bp, synthetic construct
  source 1..75: mol_type = other DNA
acagatgatataaatcaccgataccatgagtatgaccgcttattcaagcgaggtaatatttttgaaatctatcaa

SEQ ID NO: 624349 - DNA, 75 bp, synthetic construct
  source 1..75: mol_type = other DNA
catcccggagcggaggctgcatctttaccactgtgaccaccgtggactgccgcaggcgctcatcaccccggaagg

SEQ ID NO: 624350 - DNA, 75 bp, synthetic construct
  source 1..75: mol_type = other DNA
cctgtgccggatggcggcggaggaaggcatcttcttttatgaggagcatgcttacaaaagtaccgaccagagcct

SEQ ID NO: 624351 - DNA, 75 bp, synthetic construct
  source 1..75: mol_type = other DNA
ctgccggtgagcatcttgaactctgctgtggtaaggcaaggctggtgctgacgaaggacggaagcatatttctca

SEQ ID NO: 624352 - DNA, 75 bp, synthetic construct
  source 1..75: mol_type = other DNA
ttaaaattcatctccatggctgtattttcagctctgaccctgggtgttgcgacaaatgcgtctgctgtcaccacg

SEQ ID NO: 624353 - DNA, 75 bp, synthetic construct
  source 1..75: mol_type = other DNA
atatatactgtctctttttcgtgattacttatatattcctgtgatcggtatcaaccgattagagaaacacaataa

SEQ ID NO: 624354 - DNA, 75 bp, synthetic construct
  source 1..75: mol_type = other DNA
cgttggggggcagtgatggtatggcgcgatgataagcccgaactcgcggcgttgccgttgaatgcggctgctgag

SEQ ID NO: 624355 - DNA, 75 bp, synthetic construct
  source 1..75: mol_type = other DNA
cacgcgcaaaaaagtaccgaccagagcctggtcctgtgcgataccgtgcgttatctgccggagtcctttgagatc

SEQ ID NO: 624356 - DNA, 75 bp, synthetic construct
  source 1..75: mol_type = other DNA
gcgacaccctgtgggatcacttgttcgaagatgaaagccagcaaactgcattaccctctgcacttgcgcactatt

SEQ ID NO: 624357 - DNA, 75 bp, synthetic construct
  source 1..75: mol_type = other DNA
attttgcggtaataccggcagacagaacatggcgaccacagccgttgctgaaaccgctggtggacggcccgcaga

SEQ ID NO: 624358 - DNA, 75 bp, synthetic construct
  source 1..75: mol_type = other DNA
gcaggagaagaaatcttctgtgatgaacatggccgtgtgcgggtgaaatttaactgggaccgttataacccgtca

SEQ ID NO: 624359 - DNA, 75 bp, synthetic construct
  source 1..75: mol_type = other DNA
gtggcaccatgagaccggacatgcgtacaacgaacaggggctggcaaaccgcgtcacgccggacagtctgccgcc

SEQ ID NO: 624360 - DNA, 75 bp, synthetic construct
  source 1..75: mol_type = other DNA
tcttgctgggtattattcagaccttcggtacggtgtgggctattccgttaaccgggcttgctgaaaatggcgtcg

SEQ ID NO: 624361 - DNA, 75 bp, synthetic construct
  source 1..75: mol_type = other DNA
tacaacttacgcagtgcagcgtatccgtggcgctatgctggatgaacttcgcagccgtgactggcgtgccgcgca

SEQ ID NO: 624362 - DNA, 75 bp, synthetic construct
  source 1..75: mol_type = other DNA
gaacggtgatgcgccagtgattaactggaactgtggtgccacacaacctgtaccggatgcgcctgtgccgaaaga

SEQ ID NO: 624363 - DNA, 75 bp, synthetic construct
  source 1..75: mol_type = other DNA
ttcctccgtggtgaccaaagactacacctttaaacgccccggctgggccgggcgttttgaccaggaaggccagca

SEQ ID NO: 624364 - DNA, 75 bp, synthetic construct
  source 1..75: mol_type = other DNA
gtattacagttactcaaggctgtgaacttgccgctggcaccgtactggatattccattcggagaatatcaggccc

SEQ ID NO: 624365 - DNA, 75 bp, synthetic construct
  source 1..75: mol_type = other DNA
tattgttcttttttatgataatgagtattttttcaacctgtatatcctactctctgctcagaaaatataaattaa

SEQ ID NO: 624366 - DNA, 75 bp, synthetic construct
  source 1..75: mol_type = other DNA
ggcatcattaaagcggaaggcaatatgacctccggcgatgcgcacctggcggtgaatttcccgctgctgctggaa

SEQ ID NO: 624367 - DNA, 75 bp, synthetic construct
  source 1..75: mol_type = other DNA
aaacgattggacttgttcgtgcgctgaccgtgggcgtggcgtatcagacgacggtaggtggcattatgaacacct

SEQ ID NO: 624368 - DNA, 75 bp, synthetic construct
  source 1..75: mol_type = other DNA
cccggcagcctgccgggaacaaagacgcagatgaccatccgctccaaaacgtacatgggcagcggatttaatgag

SEQ ID NO: 624369 - DNA, 75 bp, synthetic construct
  source 1..75: mol_type = other DNA
gttcatggttatttaatggattcctacgccatgaaagccgcaacgcaaattgcgttgggggataattttggttac

SEQ ID NO: 624370 - DNA, 75 bp, synthetic construct
  source 1..75: mol_type = other DNA
aaaacggcgagtatctgccagataacacagaggaggggcggattgttgccatgactctggcggttgctctgcgtc

SEQ ID NO: 624371 - DNA, 75 bp, synthetic construct
  source 1..75: mol_type = other DNA
gtcgtggatcgaaaaagagattgatgatctggccgatcgtcccggcgcgggttttgcggtgagcgaagagaacaa

SEQ ID NO: 624372 - DNA, 75 bp, synthetic construct
  source 1..75: mol_type = other DNA
tgtcgtttggtcgtatggatcagtatctctacccatactatcgccgcgacgttgaactgaaccagacgctggatc

SEQ ID NO: 624373 - DNA, 75 bp, synthetic construct
  source 1..75: mol_type = other DNA
tattcaggcacaaacttacttcatcgatttgccttgctgggcgcagagtgaagaagtggacgattcgcctgatac

SEQ ID NO: 624374 - DNA, 75 bp, synthetic construct
  source 1..75: mol_type = other DNA
ggcgccatttacccaaactgattctggagtcggttgttaccacttcgattgtattactgttgatcggtttttccg

SEQ ID NO: 624375 - DNA, 75 bp, synthetic construct
  source 1..75: mol_type = other DNA
ggtgaaacagttaggctgccgccattgtgagactgcatgtagtgaatgcctgcttgattcccagactcgccacga

SEQ ID NO: 624376 - DNA, 75 bp, synthetic construct
  source 1..75: mol_type = other DNA
gatctggaaagaatgctacacctgttcagcggcaaaccgatccccgacaaccgggaaaacatcactattcgtctg

SEQ ID NO: 624377 - DNA, 75 bp, synthetic construct
  source 1..75: mol_type = other DNA
agcgtctgattaacggcgcgccgaagtatggcaacgacgatgatagcgtcgatacgctgctggctcgcgcctatc

SEQ ID NO: 624378 - DNA, 75 bp, synthetic construct
  source 1..75: mol_type = other DNA
ttggcaccattttctcgatgggtatcttattgctgatccacagccccattatggtattgccaggctttgtacctt

SEQ ID NO: 624379 - DNA, 75 bp, synthetic construct
  source 1..75: mol_type = other DNA
aagccatcacacacaatctcgatcgtgaaatctggcgtgacttgatgcaacgttccgggatgctttccttaatgg

SEQ ID NO: 624380 - DNA, 75 bp, synthetic construct
  source 1..75: mol_type = other DNA
ggctatcgctgcaccggcatgagctttatcaacttcgcccgcgtgatgctggcggcgctggaaggcggtcgtgat

SEQ ID NO: 624381 - DNA, 75 bp, synthetic construct
  source 1..75: mol_type = other DNA
cagatcgaatctaacggtcactcggtatcgtttggtcgtatggaccagtatctctacccgtactatcgccgtgac

SEQ ID NO: 624382 - DNA, 75 bp, synthetic construct
  source 1..75: mol_type = other DNA
tggccggggacggcatcaacccggtaacacctcagtggagcgtgagctttaccggcgatgaggcttacattcagg

SEQ ID NO: 624383 - DNA, 75 bp, synthetic construct
  source 1..75: mol_type = other DNA
ggaagggaaagtgcacctgacgccagctcagttatccatgctactggaggggatcgcgtggcaacatcccaaacg

SEQ ID NO: 624384 - DNA, 75 bp, synthetic construct
  source 1..75: mol_type = other DNA
ctgcgggccagacgtttgattcgggttctcagggtcagattgttacgctcaatgtgctgagtaaaaatcttacca

SEQ ID NO: 624385 - DNA, 75 bp, synthetic construct
  source 1..75: mol_type = other DNA
ctcaagctgtcgctgatactcgcagtggcgtatctaagagtactggtaaaccgtatactatatctgagcagtccg

SEQ ID NO: 624386 - DNA, 75 bp, synthetic construct
  source 1..75: mol_type = other DNA
ctggtttgtatcagttgcatccttccagtatttttgttggtgactttcaaaaattacgtattggtaagattgttt

SEQ ID NO: 624387 - DNA, 75 bp, synthetic construct
  source 1..75: mol_type = other DNA
atggataacgccacacatgtggcggtgtactcaggctcttacctgaaaaagccgccggtaccgatgagccggctg

SEQ ID NO: 624388 - DNA, 75 bp, synthetic construct
  source 1..75: mol_type = other DNA
tgacggggatgatatcgcagcacctgatagaattgaaaaacaattgcattatctcgaggcgaatgatttagatat

SEQ ID NO: 624389 - DNA, 75 bp, synthetic construct
  source 1..75: mol_type = other DNA
ttacagtattgttatcaatttataatatgcaatatctgtatagaagactaatagttcgtaatattatgagaaaca

SEQ ID NO: 624390 - DNA, 75 bp, synthetic construct
  source 1..75: mol_type = other DNA
aatactatgcttttgcaagttgtaaaagcattgaagggtctgagatagagcgcttaataaaggcatcaaagctga

SEQ ID NO: 624391 - DNA, 75 bp, synthetic construct
  source 1..75: mol_type = other DNA
tttaatagaattcatggagaaagtaataacaccgataattgaggagcagggtgctgatgagcctgtaggtattag

SEQ ID NO: 624392 - DNA, 75 bp, synthetic construct
  source 1..75: mol_type = other DNA
tcttaactttcatttttagctcttccgcatttcctcaagaaaatagcattgaacgagtgcaacgtgtctctacag

SEQ ID NO: 624393 - DNA, 75 bp, synthetic construct
  source 1..75: mol_type = other DNA
aaaagtttatgcacgattacgacaaaacatccccggaaatgagaaaataccttcagagcatcaacgagtctatgt

SEQ ID NO: 624394 - DNA, 75 bp, synthetic construct
  source 1..75: mol_type = other DNA
ttagatacctggtatgtgggaatgaatgatttttcccgaattgccggggggcagaatagcagaagcaatattctt

SEQ ID NO: 624395 - DNA, 75 bp, synthetic construct
  source 1..75: mol_type = other DNA
aaatttacgggacggtcttatttaaatatctgtatgctttgtatgcctatggttatgcataaaaatcccagtgat

SEQ ID NO: 624396 - DNA, 75 bp, synthetic construct
  source 1..75: mol_type = other DNA
aagccgcccttgcccactcgaaaaaagatgaaataattgcagcctacaatcgtgcagagtatctcacagaacgtg

SEQ ID NO: 624397 - DNA, 75 bp, synthetic construct
  source 1..75: mol_type = other DNA
catagagagtgggtttttcccagtatcaaagctccactcaatcacatgcatgaacaaacagctaatgcggctata

SEQ ID NO: 624398 - DNA, 75 bp, synthetic construct
  source 1..75: mol_type = other DNA
gatgcttttacaacaatcatcgcaaataatggaggatatttaaatttaggttcatatattcacatcggtggatat

SEQ ID NO: 624399 - DNA, 75 bp, synthetic construct
  source 1..75: mol_type = other DNA
tattcgccggatggttgggagtgaaaatacatcatcgccatggcagcaaattgcccgggaagtgaaagcgccccg

SEQ ID NO: 624400 - DNA, 75 bp, synthetic construct
  source 1..75: mol_type = other DNA
cggattggttttcccaacgatttcccgtctgaatcccctagccttcaggttgaaccttcaccgtggttagtctgg

SEQ ID NO: 624401 - DNA, 75 bp, synthetic construct
  source 1..75: mol_type = other DNA
cgggacctgtacttcctgaaggagttgtccatagtgtttttgaacgtaactggccgaaacccgggcaaaacgcat

SEQ ID NO: 624402 - DNA, 75 bp, synthetic construct
  source 1..75: mol_type = other DNA
ggcagccaggcgaaagtaaacccgttttcagaacgcgatattgatgtggcgcggcaaaattatctggcgcaggaa

SEQ ID NO: 624403 - DNA, 75 bp, synthetic construct
  source 1..75: mol_type = other DNA
tgtcattgatctgacagattatgaagaaacaatcaggcaggttgtcggtacattatttggaaatgattttattga

SEQ ID NO: 624404 - DNA, 75 bp, synthetic construct
  source 1..75: mol_type = other DNA
tggtttgaacacgatacgcagaccgtggcccgggatgtgctgatgaactgtgcccatcttgacccggaagtgaaa

SEQ ID NO: 624405 - DNA, 75 bp, synthetic construct
  source 1..75: mol_type = other DNA
actgggaatcagagtctgccctctgggaaaagaaagcctccggagcgaaatgggggctgatacaggcctggagtg

SEQ ID NO: 624406 - DNA, 75 bp, synthetic construct
  source 1..75: mol_type = other DNA
tttctggcctgcaggttggcattgccaacctcggcaacagcctggcggcagtgaagaaactggtgtttgaacagg

SEQ ID NO: 624407 - DNA, 75 bp, synthetic construct
  source 1..75: mol_type = other DNA
taatttcattttcagccattgcttcatatgctgatacaccttacgcagatgagaaagaaatgtcagaagatgtat

SEQ ID NO: 624408 - DNA, 75 bp, synthetic construct
  source 1..75: mol_type = other DNA
ggtgtggcaagtgaactgcacggcgaacagccacaggcggtgccaggacggcagggagcggggacggcgctggag

SEQ ID NO: 624409 - DNA, 75 bp, synthetic construct
  source 1..75: mol_type = other DNA
ctgctactggagtggttgttcctcaataatgactccggcagtctggtcaatgcagcgacaaacctttccccctag

SEQ ID NO: 624410 - DNA, 75 bp, synthetic construct
  source 1..75: mol_type = other DNA
tgcttcgctgttaatttccctttcatattctagtgtctactcagattttgcaggaagagtgaatattaatgaata

SEQ ID NO: 624411 - DNA, 75 bp, synthetic construct
  source 1..75: mol_type = other DNA
aatctcaaagtgtgggtcaataagtatattgacgattgcactgatgaggatttaaacgatcgtgactttattgca

SEQ ID NO: 624412 - DNA, 75 bp, synthetic construct
  source 1..75: mol_type = other DNA
acgtttgttaatgcatgtcaggaatatgatgacaacagcttaaaattattcgcttcgctgttgatttcactttca

SEQ ID NO: 624413 - DNA, 75 bp, synthetic construct
  source 1..75: mol_type = other DNA
cgatgttcatgttcaagcagccataaaaacagtatctttatatttcgaaaaacatccaaataagggaacgcttga

SEQ ID NO: 624414 - DNA, 75 bp, synthetic construct
  source 1..75: mol_type = other DNA
gcaggctttgttacggcaggtgtgacgctaccatttgttaattatgtcggcagtgtcagcgccagtgatataaga

SEQ ID NO: 624415 - DNA, 75 bp, synthetic construct
  source 1..75: mol_type = other DNA
atatgagcctgtcatcaacgacagttatcaggcactggctgagcactatggcacggttatcatcccggcccgacc

SEQ ID NO: 624416 - DNA, 75 bp, synthetic construct
  source 1..75: mol_type = other DNA
tttatgtcgaagatggtgcactttcagccaatgctacaaaagatgtaacctactttgaacaaaaaaatggggcta

SEQ ID NO: 624417 - DNA, 75 bp, synthetic construct
  source 1..75: mol_type = other DNA
tgtacatgatgaccaaaaacgtcaagttcctggccggttttgccatcatctctgtatttattgctgtgggtatgg

SEQ ID NO: 624418 - DNA, 75 bp, synthetic construct
  source 1..75: mol_type = other DNA
ttcatttatccgaaattgaggtaacttatgaatgctgttttaagtgttcagggtgcttctggcccgtcaaaaaga

SEQ ID NO: 624419 - DNA, 75 bp, synthetic construct
  source 1..75: mol_type = other DNA
ttgacccaaactcaaaggaaaagattaaaatacttacagatacttctaatttaatttatgatttattcggggtta

SEQ ID NO: 624420 - DNA, 75 bp, synthetic construct
  source 1..75: mol_type = other DNA
agaaataatattgttcaatggaaggtagtaactgattatggcggggtaagtaaaaaatttgagggaaaaaacaac

SEQ ID NO: 624421 - DNA, 75 bp, synthetic construct
  source 1..75: mol_type = other DNA
tatcctttgggttctatgccgcgttgctgtaattctttgcggagaacgcgtttaatccaagtggctaaagatgtg

SEQ ID NO: 624422 - DNA, 75 bp, synthetic construct
  source 1..75: mol_type = other DNA
ttggcgcgtcagaacatcaaatcatccacgtaaccgcctggacggaacgcgaagcgcgtagccgttgcccgtccg

SEQ ID NO: 624423 - DNA, 75 bp, synthetic construct
  source 1..75: mol_type = other DNA
gctggaggcgaaaaaacatccggatcaataccgggatctggtggtgcgtgtcgcggggtattccgccttcttcac

SEQ ID NO: 624424 - DNA, 75 bp, synthetic construct
  source 1..75: mol_type = other DNA
catgcttgcatcttcaaagcgtcacttaggcgatgaactgcacgatcaattcagcatcaccctggcggatatgaa

SEQ ID NO: 624425 - DNA, 75 bp, synthetic construct
  source 1..75: mol_type = other DNA
catcttcgcggcaacccagctgactgcatggccatcatcatgcaggctatgcagtggggcatgaacccgtacgcg

SEQ ID NO: 624426 - DNA, 75 bp, synthetic construct
  source 1..75: mol_type = other DNA
attacatctggtaattttgtcatgatttattccctttttactattgtgacgttttatggtgttgttttaatttca

SEQ ID NO: 624427 - DNA, 75 bp, synthetic construct
  source 1..75: mol_type = other DNA
gaaggaaacgggaaacgtgatagggaagggggtgaacagggatgcggcggagatagtcaggaagggtagtaaagc

SEQ ID NO: 624428 - DNA, 75 bp, synthetic construct
  source 1..75: mol_type = other DNA
cccagaccgtcgaccgtaaacttgctcgcacggcatcggtcgcattaaatcaagctgaggtgacaatggacttct

SEQ ID NO: 624429 - DNA, 75 bp, synthetic construct
  source 1..75: mol_type = other DNA
agcgatttagttgcgttggttgatcttggcattcgttcgttgttattgatgagcatcaacatcgaaatctcaatc

SEQ ID NO: 624430 - DNA, 75 bp, synthetic construct
  source 1..75: mol_type = other DNA
attagcatcccaaaaagaatattacagcgatttagttgcgttggttgatcttgggacattcgttcgttgttattg

SEQ ID NO: 624431 - DNA, 75 bp, synthetic construct
  source 1..75: mol_type = other DNA
aagggcgggactcgcacaacctgaataaacccgatgtaaaaaacctgttgctcgccactgccagccaaggctatg

SEQ ID NO: 624432 - DNA, 75 bp, synthetic construct
  source 1..75: mol_type = other DNA
accggctgaccacgatacagaacgacagaacccgcatccagacggtttatcagccggggagcttcacgccactca

SEQ ID NO: 624433 - DNA, 75 bp, synthetic construct
  source 1..75: mol_type = other DNA
atgaaccaaaacaccaaaacaattgccgaagcaaaagcgcaatgcctcaataagaaagatagtaaacaaacatat

SEQ ID NO: 624434 - DNA, 75 bp, synthetic construct
  source 1..75: mol_type = other DNA
ctaacgcagtgctcctgaatgaaaccatcgccgactacactggcgtgccgatggagatccctcgcgctatcgcgg

SEQ ID NO: 624435 - DNA, 75 bp, synthetic construct
  source 1..75: mol_type = other DNA
gatcctgtctgtatgtcattccttgaccgggtcaaaaaggaacacgtctatgcaaaaatggttacggcactgaat

SEQ ID NO: 624436 - DNA, 75 bp, synthetic construct
  source 1..75: mol_type = other DNA
cctctttaaatttattctcctggttattacttgctactttttatatctcagtctgcctgaatatcgcctttttta

SEQ ID NO: 624437 - DNA, 75 bp, synthetic construct
  source 1..75: mol_type = other DNA
gtatgcaacgagttttaggcatcttctccagacgggagaatgatgtagttgagttaataaagcaggacccttcga

SEQ ID NO: 624438 - DNA, 75 bp, synthetic construct
  source 1..75: mol_type = other DNA
gtttccagaaggttaagaagccccgctatcagcgtcaacggatacccgagggggctatgggcaggatgccgtttt

SEQ ID NO: 624439 - DNA, 75 bp, synthetic construct
  source 1..75: mol_type = other DNA
tttcagtcgcccaactcgatgccatactttatgccaacagaaagaaggaattacctgatgatcctcaaatcagcg

SEQ ID NO: 624440 - DNA, 75 bp, synthetic construct
  source 1..75: mol_type = other DNA
aaagaaatatataaaagctcatcgaaaatcatcaattgcttgaacagaattaaattaccagagatgaaagaattc

SEQ ID NO: 624441 - DNA, 75 bp, synthetic construct
  source 1..75: mol_type = other DNA
ttcgatgatatgtttgccgtcgagcataatgacgtcggctttgcgcggctggtcaaccggtttgttttccagcgc

SEQ ID NO: 624442 - DNA, 75 bp, synthetic construct
  source 1..75: mol_type = other DNA
aacagcctggtggcgatggacccagtggtaaaaccgaatactgccggtggcccacgcaccagtaccatgcaagtt

SEQ ID NO: 624443 - DNA, 75 bp, synthetic construct
  source 1..75: mol_type = other DNA
ttgaatttactcgcctggctattgttggccgctttttatatctctatctgcctgaatattgccttttttaaacag

SEQ ID NO: 624444 - DNA, 66 bp, synthetic construct
  source 1..66: mol_type = other DNA
atgactacttctcctttcattctcgaatatcacgataatgatagagataatcattatcaattgatt

SEQ ID NO: 624445 - DNA, 75 bp, synthetic construct
  source 1..75: mol_type = other DNA
aagattatatgaactattatagatactcagcctggccagcagttcccaaaaacgccctcttaaaatataaaagca

SEQ ID NO: 624446 - DNA, 75 bp, synthetic construct
  source 1..75: mol_type = other DNA
ttttaagaatttgttatacattgacaacctcattagaaataaaaattatttaaacgcagagtcaaaactgaatga

SEQ ID NO: 624447 - DNA, 75 bp, synthetic construct
  source 1..75: mol_type = other DNA
tgctgcaccacaattaattagcttcgcgaagtcgtttgacccaacctcaaaggaagagattaaaatacttacaga

SEQ ID NO: 624448 - DNA, 75 bp, synthetic construct
  source 1..75: mol_type = other DNA
ccaaacttatcagctaacgacaaatgatatccatagtgtaggttttgatgagtttgaaacgatgttacctcagag

SEQ ID NO: 624449 - DNA, 75 bp, synthetic construct
  source 1..75: mol_type = other DNA
aagattatatgaactattatagattcttagcttggccagcagttccccaaaacgctctcttaaaatataaaagca

SEQ ID NO: 624450 - DNA, 75 bp, synthetic construct
  source 1..75: mol_type = other DNA
gcaggaaactataaagaaacaattaatatagtcaatgaaaaccttgacaaaattaaagactacagagagagagat

SEQ ID NO: 624451 - DNA, 75 bp, synthetic construct
  source 1..75: mol_type = other DNA
cagtaaccatactgtcaggctgaataacgagcaacggtcagcagtacgcgaacgtctctctgagcgcggagcaag

SEQ ID NO: 624452 - DNA, 75 bp, synthetic construct
  source 1..75: mol_type = other DNA
agagccgcccacaacgtctaaacgacagtaaccatactgtcaggctgaataacgagcaacggtcagcagtacgcg

SEQ ID NO: 624453 - DNA, 75 bp, synthetic construct
  source 1..75: mol_type = other DNA
tgctgctgtggctgtctgaggattatcaaaaacggtatcaggttgaccaaagttgcctacagaaacaggcgcaaa

SEQ ID NO: 624454 - DNA, 75 bp, synthetic construct
  source 1..75: mol_type = other DNA
ctgtagctacaccaacatatcctgcattaatggacgtacagacaattgcggctaacatatctgatgtcaggtata

SEQ ID NO: 624455 - DNA, 75 bp, synthetic construct
  source 1..75: mol_type = other DNA
actggtcaagagcttgtagaggaatggagagctgaaatatatacaagattatcaaataaaaaatactccgattca

SEQ ID NO: 624456 - DNA, 75 bp, synthetic construct
  source 1..75: mol_type = other DNA
gacgggcaattatccgtttgaaccgccccggttttcctggagagtgttttatctgtgaactcaggctgccagatc

SEQ ID NO: 624457 - DNA, 75 bp, synthetic construct
  source 1..75: mol_type = other DNA
cacatatgaagcatataactcagagaatctatattttaccagagaggaatatacgtatgattacgaccttttaaa

SEQ ID NO: 624458 - DNA, 75 bp, synthetic construct
  source 1..75: mol_type = other DNA
gaaaaaatattacgtattgtccatactaaaggtttgtcattaccagaggatcgagagtctgtcttctggctaaat

SEQ ID NO: 624459 - DNA, 75 bp, synthetic construct
  source 1..75: mol_type = other DNA
cgcgtcttttcaaccttaatttatggctaacattatccggcttttgcttcggagctaaccgtgattcagaccttt

SEQ ID NO: 624460 - DNA, 75 bp, synthetic construct
  source 1..75: mol_type = other DNA
cccgcgctggagatcacgctcggtcagttaacagttgagttcgaaactgatgggtggtttgccctgacgggtgca

SEQ ID NO: 624461 - DNA, 75 bp, synthetic construct
  source 1..75: mol_type = other DNA
ttggtattgctgccggtctggaaattccgatgatgttaatcgcaggctattacatgaaacgtattggcaagcgac

SEQ ID NO: 624462 - DNA, 75 bp, synthetic construct
  source 1..75: mol_type = other DNA
aaaggtgaagtggcatcgggaaggccgaaatcttattgctgagaaccctaacccgattcatatcagcgtgatgga

SEQ ID NO: 624463 - DNA, 75 bp, synthetic construct
  source 1..75: mol_type = other DNA
atgtccagaaaaagttgtttaattaggctctttaaaacaaccatttggaacaaattatttatcgctgttatatta

SEQ ID NO: 624464 - DNA, 75 bp, synthetic construct
  source 1..75: mol_type = other DNA
caattacttgttcttttatatcccggagtcattatatctcagttattactatgggtataatttttttaatctata

SEQ ID NO: 624465 - DNA, 75 bp, synthetic construct
  source 1..75: mol_type = other DNA
aatatcaatacgacaaatgatataagcataaaaaatgctcacttagtaatgcaagggcatgctacaaatcatgct

SEQ ID NO: 624466 - DNA, 75 bp, synthetic construct
  source 1..75: mol_type = other DNA
cagggttctcctaaaagaccaattatcattggggatggggcagttataggaatgggagccgtcgttacaaaaagt

SEQ ID NO: 624467 - DNA, 75 bp, synthetic construct
  source 1..75: mol_type = other DNA
atctttccgagagtgagaggcaggattcacttgataatataaataaattggaccccatagttgacattcttaaaa

SEQ ID NO: 624468 - DNA, 75 bp, synthetic construct
  source 1..75: mol_type = other DNA
gttattaagcgagctggcggcaggtattagcctgatgagtcaatcaacgcctacggagtcggtgggattgaaggt

SEQ ID NO: 624469 - DNA, 75 bp, synthetic construct
  source 1..75: mol_type = other DNA
aaataacagtgattgcttttgttatcaattacttgttcttttatatcccggagtcattatatctcagttattact

SEQ ID NO: 624470 - DNA, 75 bp, synthetic construct
  source 1..75: mol_type = other DNA
aacaggtcgcgcaggatttgcagcagaagtttgacgattttaaggcaaaaaacgacaaacgcatcgacgcgatcg

SEQ ID NO: 624471 - DNA, 75 bp, synthetic construct
  source 1..75: mol_type = other DNA
ttccacctggtgaatttgaaattaacagcaatcaattcagtaactttggaagtggcttatttgatgtcaccatta

SEQ ID NO: 624472 - DNA, 75 bp, synthetic construct
  source 1..75: mol_type = other DNA
ggcgtgacgatttgccgcgccgaaacggtgcaaaaacctgatgaggtgcactatgcactggcatggaaaccgccg

SEQ ID NO: 624473 - DNA, 75 bp, synthetic construct
  source 1..75: mol_type = other DNA
tcaaaaagtttatcataacgtcgcaaatctctaattatattttaaaggaatctgtctttatggcagatttcttta

SEQ ID NO: 624474 - DNA, 75 bp, synthetic construct
  source 1..75: mol_type = other DNA
ggaattcctttcagataatacactcgagaaagacgaaaattctcctgacaattgctttgaggttgtaaaatataa

SEQ ID NO: 624475 - DNA, 75 bp, synthetic construct
  source 1..75: mol_type = other DNA
tcctgacatccaccattaatgccggagattcttttgcaaaagaatataaatttaattatagctacttaggaatgg

SEQ ID NO: 624476 - DNA, 75 bp, synthetic construct
  source 1..75: mol_type = other DNA
aagaggtgattcatattttggtcaaatagaaccgggactcaacgtaggtccatggcgcattagaaatttatccac

SEQ ID NO: 624477 - DNA, 75 bp, synthetic construct
  source 1..75: mol_type = other DNA
ttatgatggaactcacaagactcccaaatatacggcttccggagttcctttcgttagcgtgcagaatatcaaaaa

SEQ ID NO: 624478 - DNA, 75 bp, synthetic construct
  source 1..75: mol_type = other DNA
gttgatttacgcgtcgactggaccgacgccgaccccatcgatgaactcaacaaactctggcaagcctatcagccg

SEQ ID NO: 624479 - DNA, 75 bp, synthetic construct
  source 1..75: mol_type = other DNA
actaccaccgtttgcaacccttgccggcatacgctgcagtaccgcacatatcacggaaaaggataacgcctggct

SEQ ID NO: 624480 - DNA, 75 bp, synthetic construct
  source 1..75: mol_type = other DNA
gattgatgccgtactttattgctatcccggcccggagcaggaacccattcggcaggccgccgagcagcggctaca

SEQ ID NO: 624481 - DNA, 75 bp, synthetic construct
  source 1..75: mol_type = other DNA
tgcaggaaaatacttacttagagatggcgctgcgggtacgcattaatgaagccgccgttgctaatatgctggccc

SEQ ID NO: 624482 - DNA, 75 bp, synthetic construct
  source 1..75: mol_type = other DNA
atgagtctaataaaataaggagagatgatgcgtttgcaaagagtggcatacaattcaatttttacggaatgccgg

SEQ ID NO: 624483 - DNA, 75 bp, synthetic construct
  source 1..75: mol_type = other DNA
tcccaggagacatcattatcgatgcttctactggagaatttaccttcaatggcattgattatattttccatccgc

SEQ ID NO: 624484 - DNA, 75 bp, synthetic construct
  source 1..75: mol_type = other DNA
ttcctgtttcgcaaccaatcatcattaatgctgctggatatccggtatataacggacagattgccaagtttgtaa

SEQ ID NO: 624485 - DNA, 75 bp, synthetic construct
  source 1..75: mol_type = other DNA
tatggtgatgcaaatatcaatgattattatagagacttagaaataaaacactcaccaccccaaaatagagcatca

SEQ ID NO: 624486 - DNA, 75 bp, synthetic construct
  source 1..75: mol_type = other DNA
tcagggcatacaataattcaaaaaagcggtagccattcaaaaaataatcagacggtcgtttttggaaataatgaa

SEQ ID NO: 624487 - DNA, 75 bp, synthetic construct
  source 1..75: mol_type = other DNA
agtgggctaattgttttgcaggcaaggggtaattattattcatcaggaaatccaccgacatctatagaatattct

SEQ ID NO: 624488 - DNA, 75 bp, synthetic construct
  source 1..75: mol_type = other DNA
ctgccaggacccaacaagcatccacgttacggttgataacaactactgtaagactgatgacaacactgaccagta

SEQ ID NO: 624489 - DNA, 75 bp, synthetic construct
  source 1..75: mol_type = other DNA
ctcaagtcaattatcctactgatttctacctccccaattccaacagcacttacctggaagtcgctctcaatgata

SEQ ID NO: 624490 - DNA, 75 bp, synthetic construct
  source 1..75: mol_type = other DNA
ttgcgttaggttatgataaatttgggaaagaagctgaagatattctttaccatattgttagaaccccaacaaatg

SEQ ID NO: 624491 - DNA, 75 bp, synthetic construct
  source 1..75: mol_type = other DNA
gcaaatatcaatcattattatagaaacttagaaataaaacactcacaacccaaaaatagagcatccggcaaaaga

SEQ ID NO: 624492 - DNA, 75 bp, synthetic construct
  source 1..75: mol_type = other DNA
aaatactggcggacactggatattagtttcgctacagaaaatagtaaatgaaaaaaataatacacaacaaataaa

SEQ ID NO: 624493 - DNA, 75 bp, synthetic construct
  source 1..75: mol_type = other DNA
atattaagagcgatccatcatggccgaaagaagtccagttattccccataaatactggcggacactggatattag

SEQ ID NO: 624494 - DNA, 75 bp, synthetic construct
  source 1..75: mol_type = other DNA
agtaaatgaaaaaaataacacacaacaaataaaatgcgtcatattcaactcattacgtgcactaggccatgataa

SEQ ID NO: 624495 - DNA, 75 bp, synthetic construct
  source 1..75: mol_type = other DNA
aactcggcgctggcgggagcggcgctgccgttgcgtttgctctgctggcggcgggtgcggcgtctgtcactctgt

SEQ ID NO: 624496 - DNA, 75 bp, synthetic construct
  source 1..75: mol_type = other DNA
tcaatttctggcaaggcactccgataaacaaggcgaccgtaaattactgattctgctatgttgcttatttggagt

SEQ ID NO: 624497 - DNA, 75 bp, synthetic construct
  source 1..75: mol_type = other DNA
ggttcgtctgccagaacggctgcgtctgcggtcagtctctgggggaagtgcgtgttccacaccggggaaatgtgg

SEQ ID NO: 624498 - DNA, 75 bp, synthetic construct
  source 1..75: mol_type = other DNA
caatagaaaacgagaaaagtattaaaagtaataaaagtgtgttaggtgtaaaccttgccgtagaaaactgcatta

SEQ ID NO: 624499 - DNA, 75 bp, synthetic construct
  source 1..75: mol_type = other DNA
tattaatgctcattgctatcgtgagtggaatgtgtttttacgccagcgtactcatggcgacgactccggcggttg

SEQ ID NO: 624500 - DNA, 75 bp, synthetic construct
  source 1..75: mol_type = other DNA
tacatgaaacgtattggcaagcgactattaatgctcattgctatcgtgagtggaatgtgtttttacgccagcgta

SEQ ID NO: 624501 - DNA, 75 bp, synthetic construct
  source 1..75: mol_type = other DNA
ttgatgaactgcatctaaccgataaactggctggagaaatgattggtatcgctgccggtctggaaattccgatga

SEQ ID NO: 624502 - DNA, 75 bp, synthetic construct
  source 1..75: mol_type = other DNA
gtttgagcctgatattgtataccttgattcaagccttctggggtgtatagcttcttattgcaagaaaaaacataa

SEQ ID NO: 624503 - DNA, 75 bp, synthetic construct
  source 1..75: mol_type = other DNA
agcgtgactgtcacgctaactaaacaggaagaagctatgctgcatgagctttgccgtgtgcgtcgtcccggacga

SEQ ID NO: 624504 - DNA, 75 bp, synthetic construct
  source 1..75: mol_type = other DNA
cttcaatccatcgttgcaggtcgtggatatcattatgcaccctgctgagacccctctgcttgcccatgcccgacg

SEQ ID NO: 624505 - DNA, 75 bp, synthetic construct
  source 1..75: mol_type = other DNA
agtgctgtaagtacacatatcagtagtggtggtgaccagcgtgtctcttctggtggtaatgccagtgggacagtt

SEQ ID NO: 624506 - DNA, 75 bp, synthetic construct
  source 1..75: mol_type = other DNA
cacacccgttacggtgcattagggacaatggcaatcggtgagggcggcggtgagttggtaaaacagctgcttaat

SEQ ID NO: 624507 - DNA, 75 bp, synthetic construct
  source 1..75: mol_type = other DNA
tttgaaaacattctcattaaagattgcactgctcttaattgtgtaagtggcccagcttttttaaaagatgtaact

SEQ ID NO: 624508 - DNA, 75 bp, synthetic construct
  source 1..75: mol_type = other DNA
cactaggccatgaaaaagaaaattcacttaagcgtatcattaatagttttaattctgaactcatgggagaaatgt

SEQ ID NO: 624509 - DNA, 75 bp, synthetic construct
  source 1..75: mol_type = other DNA
attttccaacagccatagatctatatggacgagctaaacatatgggagaggtttgttatggagggcatattactc

SEQ ID NO: 624510 - DNA, 75 bp, synthetic construct
  source 1..75: mol_type = other DNA
tggtttatttcatttaagtgtagagccaattagtaaatatgatttgttaaatattattaaaatagtatatggagt

SEQ ID NO: 624511 - DNA, 75 bp, synthetic construct
  source 1..75: mol_type = other DNA
tattaaaattaatgccttattacctcatcaattagctgaagtatgcaataaatataatgccaagctaattcaatt

SEQ ID NO: 624512 - DNA, 75 bp, synthetic construct
  source 1..75: mol_type = other DNA
gtcactctgagtcataacagcagacgtattgatgtggatatcaaccttgataaccaggctgacgatcatcgcctt

SEQ ID NO: 624513 - DNA, 75 bp, synthetic construct
  source 1..75: mol_type = other DNA
accccacagcaacaatttataacagtatttgttccccataataaaaataggatcgagtatcgtcttccaaaaaat

SEQ ID NO: 624514 - DNA, 75 bp, synthetic construct
  source 1..75: mol_type = other DNA
gaattatttaaataccatttttcttacccaatattttatggcatgtagtatgaaagctaatttgaaaatgacaaa

SEQ ID NO: 624515 - DNA, 75 bp, synthetic construct
  source 1..75: mol_type = other DNA
tattatggttttgctgatgagaatgctactgaaccggagataaaagtagtcattaatgctggcgcttttgcaaca

SEQ ID NO: 624516 - DNA, 75 bp, synthetic construct
  source 1..75: mol_type = other DNA
tagttacacaaattgaaaatgaaacacatactagaaaaatctggcctatacgagctggacggttatcatggcttt

SEQ ID NO: 624517 - DNA, 75 bp, synthetic construct
  source 1..75: mol_type = other DNA
aaatggcgttagtatattaattacttttgaacattctgcatatacagaccctgaatactatcttttctgttcttt

SEQ ID NO: 624518 - DNA, 75 bp, synthetic construct
  source 1..75: mol_type = other DNA
aacccgttaatgcagaacgagacacgtaaaaatttgaccatcctgattgtcggcgaaacctcgcgggcggagaac

SEQ ID NO: 624519 - DNA, 75 bp, synthetic construct
  source 1..75: mol_type = other DNA
ccacaatgcacttgatgacgcccgttaccaggcaaaatacgtttcagctatctggcaaaaactgatcccgagtca

SEQ ID NO: 624520 - DNA, 75 bp, synthetic construct
  source 1..75: mol_type = other DNA
aaaaaccttggtttgggagaagcggctaaaaggaatgtagggacaggggcgaatcagatacctgatatgggtagc

SEQ ID NO: 624521 - DNA, 75 bp, synthetic construct
  source 1..75: mol_type = other DNA
tatgaaaaacaatttttggcttgatatatggggagaaaaactacttaatttagattcacgtaaagatcattttga

SEQ ID NO: 624522 - DNA, 75 bp, synthetic construct
  source 1..75: mol_type = other DNA
aattatggtaaggcaatcaataccgatatcgtctctggcctacaacaaattatggcaaacgggacagcggaaggt

SEQ ID NO: 624523 - DNA, 75 bp, synthetic construct
  source 1..75: mol_type = other DNA
cgcgaccaataccataatcaatggtggtacacagaatattaataatcatggtattgccacgggtaccaatatcaa

SEQ ID NO: 624524 - DNA, 75 bp, synthetic construct
  source 1..75: mol_type = other DNA
attacaaatttacacccacacgaaaagaccccagacgccattcaatgtggttttgaacacactgtatttataact

SEQ ID NO: 624525 - DNA, 75 bp, synthetic construct
  source 1..75: mol_type = other DNA
attttcaacatcgactggtaaacagaaattgttatttagataaatatggcgatgcaaatatcaatcattattata

SEQ ID NO: 624526 - DNA, 75 bp, synthetic construct
  source 1..75: mol_type = other DNA
tggagtttgtcactgaaaatttcacagctttgataaaatcggttcaattgctggaaatgtaccaaaatgctatca

SEQ ID NO: 624527 - DNA, 75 bp, synthetic construct
  source 1..75: mol_type = other DNA
gcgcggatggcgtcgcgttcagcatcgagcagggtgcggcgaacaatatcctgctggcaaatggcggcgtgttaa

SEQ ID NO: 624528 - DNA, 75 bp, synthetic construct
  source 1..75: mol_type = other DNA
ccgtgccattcacagcatcgacaccgatattaagctcaaccgcgcattgtgggtgatggcagaaacgctgctgga

SEQ ID NO: 624529 - DNA, 75 bp, synthetic construct
  source 1..75: mol_type = other DNA
tcaaaaacggtatcaggttgaccagaactgcctgcaaaaacaggcgcaaacgcaacactattcacaagacaattt

SEQ ID NO: 624530 - DNA, 75 bp, synthetic construct
  source 1..75: mol_type = other DNA
atatgtctacatcttcgtatactggtggtaatcccgtgtattcaatatataacagcgatatcatctgtgctggca

SEQ ID NO: 624531 - DNA, 75 bp, synthetic construct
  source 1..75: mol_type = other DNA
tcagttgcgtgaggcttttggctccgctgcggcaaagcttgaatgcgaaattattgagatggacggggagccaga

SEQ ID NO: 624532 - DNA, 75 bp, synthetic construct
  source 1..75: mol_type = other DNA
atgaacaataacaaacgcgtaatttgcgaattgaatgaactcacacaaagcgcaatatcttacaacaatgccgta

SEQ ID NO: 624533 - DNA, 75 bp, synthetic construct
  source 1..75: mol_type = other DNA
aaatcagcggtactcaccagtacggcaccttttccattgccggaaatttagcgaccaatgtgctgctggaaaatg

SEQ ID NO: 624534 - DNA, 75 bp, synthetic construct
  source 1..75: mol_type = other DNA
cacgcccggcacaggaaccgattggctggctgctgtcgctgtccgggtggctcatcggtctggttattggtgcgc

SEQ ID NO: 624535 - DNA, 75 bp, synthetic construct
  source 1..75: mol_type = other DNA
ttgaatttgtaagaacaaaaaaccaagatgttctccttggagaaaaaaactcttttatgtcattcactttgaaaa

SEQ ID NO: 624536 - DNA, 75 bp, synthetic construct
  source 1..75: mol_type = other DNA
catgtcgtatggtgaaggtcttccgctgccggagacatatgaccgtccggacccgcgtattaagcaactggcgcg

SEQ ID NO: 624537 - DNA, 75 bp, synthetic construct
  source 1..75: mol_type = other DNA
taagttaatgttttataaagagtttttctcaccaatccttttcgggggcaaatttcaggggcaaaaattagattt

SEQ ID NO: 624538 - DNA, 75 bp, synthetic construct
  source 1..75: mol_type = other DNA
ggttaaccgaagggctggttcaacgggacttgaggcgctttggctccgggctggaatcggtttttttccaccgtt

SEQ ID NO: 624539 - DNA, 75 bp, synthetic construct
  source 1..75: mol_type = other DNA
caggaggggagcagacatgtttttcaggtgatgagacaagagcgggcggaactggttattgcgttacaaccgcat

SEQ ID NO: 624540 - DNA, 75 bp, synthetic construct
  source 1..75: mol_type = other DNA
gcgtgccgcgcagaccgtcagtggcgacatcgcttttcaggcaggcataaggagtctcgctcatgcagtggcaaa

SEQ ID NO: 624541 - DNA, 75 bp, synthetic construct
  source 1..75: mol_type = other DNA
gctgctattgttatgatgagaccagattattccagtcgttatccaaataggttaactggtgacttacttaatgag

SEQ ID NO: 624542 - DNA, 75 bp, synthetic construct
  source 1..75: mol_type = other DNA
cagaagcagatgtaagaacagcattgctcactctacagtggttatcgaaccttaataagaaccatctgcatagtg

SEQ ID NO: 624543 - DNA, 75 bp, synthetic construct
  source 1..75: mol_type = other DNA
caagcgtccggcaggtggcacgcaaaataaagttgccggtgaacataaagaagcgtttatcggatttatgcgcaa

SEQ ID NO: 624544 - DNA, 75 bp, synthetic construct
  source 1..75: mol_type = other DNA
atcaacaggcctttgccctgttggggcgtgccgcgcagaccgtcagtggcgacatcgcttttcaggcaggcataa

SEQ ID NO: 624545 - DNA, 75 bp, synthetic construct
  source 1..75: mol_type = other DNA
ccgtgcgcaggtcagtgaatttctttccggtctgctgattggcgctgaggtggcgagtatgactcgcgacgatag

SEQ ID NO: 624546 - DNA, 75 bp, synthetic construct
  source 1..75: mol_type = other DNA
tcagtgctgtaaccgggctgacagaaggcctggtgcaccgggatttaagacggtttggctccgggctggaatcca

SEQ ID NO: 624547 - DNA, 75 bp, synthetic construct
  source 1..75: mol_type = other DNA
gtgtactacccttataataatccgggaattacttatagacgaatatatgaaggaggaagcggtacctggtctgaa

SEQ ID NO: 624548 - DNA, 75 bp, synthetic construct
  source 1..75: mol_type = other DNA
aacatcgtcaggtcagctgtttgatgtaaacggtgctattaactgtacaacactgaatcagttatcagaccgcga

SEQ ID NO: 624549 - DNA, 75 bp, synthetic construct
  source 1..75: mol_type = other DNA
cgccacgacttcaggtgtcaacatctggattgtggggttgccataacggatcgtcatgggttccattacctattg

SEQ ID NO: 624550 - DNA, 75 bp, synthetic construct
  source 1..75: mol_type = other DNA
tgcttgtgggtactttatatctcggatatgtttttgatgtgcatcacattatgtcgattcttgaatatatccttg

SEQ ID NO: 624551 - DNA, 75 bp, synthetic construct
  source 1..75: mol_type = other DNA
gtagcgttgcagatttttctgcaatgtcatgctatgttcgcggccttaacagtacaggtagttccgctgcgtggg

SEQ ID NO: 624552 - DNA, 75 bp, synthetic construct
  source 1..75: mol_type = other DNA
gaagagttgcaaggtccgaccgttgacggcaacgagctacgcgaagaaacgcgctatcttaatgttgactacgcc

SEQ ID NO: 624553 - DNA, 75 bp, synthetic construct
  source 1..75: mol_type = other DNA
ccttggtagaaaaggtacttcagcaaatgataccgctgcaattttgtgtgccgcaccactgttgaaatctccatt

SEQ ID NO: 624554 - DNA, 75 bp, synthetic construct
  source 1..75: mol_type = other DNA
ccgacttaatgcaagcctttgcacagaaaatgggatactgtctggctcctgacccctatcaccaccacgtaaagg

SEQ ID NO: 624555 - DNA, 75 bp, synthetic construct
  source 1..75: mol_type = other DNA
atggagttatggatatttatagtagctatttatttgatttatattctttttttcaaaaagaagaaaactaagtcc

SEQ ID NO: 624556 - DNA, 75 bp, synthetic construct
  source 1..75: mol_type = other DNA
cgcggcgaaatctgcggcggacgcacttaattatcgcaaccaggcgcaattaattgttggcgataatatcggtct

SEQ ID NO: 624557 - DNA, 75 bp, synthetic construct
  source 1..75: mol_type = other DNA
agttggcagcatcaccgtattggcgttggtttagcctcaatgctctcgccaatgtatattgcggaactggctcca

SEQ ID NO: 624558 - DNA, 75 bp, synthetic construct
  source 1..75: mol_type = other DNA
ttacctctataaacccggacaacacagtacctatttatctggcaggttatgtcccggaatttgttatttatcgta

SEQ ID NO: 624559 - DNA, 75 bp, synthetic construct
  source 1..75: mol_type = other DNA
catcaaagtattagagccttgcaaaccattatgcgtctcagtttgtctcatctatcttacgcaaaaaaaaataga

SEQ ID NO: 624560 - DNA, 75 bp, synthetic construct
  source 1..75: mol_type = other DNA
tttttttccgaaaacagtaatgagtagtaatggtatagagattccaattagtattggccagaaaggatcaaatgt

SEQ ID NO: 624561 - DNA, 75 bp, synthetic construct
  source 1..75: mol_type = other DNA
acgaccggccaggacttcacatccagtacccaggatcgtgttggtactgtgaaggtgcctttgctggagccggca

SEQ ID NO: 624562 - DNA, 75 bp, synthetic construct
  source 1..75: mol_type = other DNA
tttggtgttctggcagcggtccgttttcgccagggaatgaaggttatccgctaccgtcgcaatctgcggcgtctg

SEQ ID NO: 624563 - DNA, 75 bp, synthetic construct
  source 1..75: mol_type = other DNA
gccactgccgatgtggaactgaagcagagttctttcaccagtaatggcgatatgattatcgggcagggaacaggc

SEQ ID NO: 624564 - DNA, 75 bp, synthetic construct
  source 1..75: mol_type = other DNA
gccgccagtcttggatacaaggccaaagcagcaggtatgtatagcctggcatttggttcagaggcaaatgcgagt

SEQ ID NO: 624565 - DNA, 75 bp, synthetic construct
  source 1..75: mol_type = other DNA
atgccatcaacggctcacagctttatacgatcagtgattcagtcgccaaacggctcgggggaggcgctactgtac

SEQ ID NO: 624566 - DNA, 75 bp, synthetic construct
  source 1..75: mol_type = other DNA
cgacaggcatgggacaacgtggtgcggattgccggtggcatcaccgagaaaaacacgccgcgtaaccttcaggga

SEQ ID NO: 624567 - DNA, 75 bp, synthetic construct
  source 1..75: mol_type = other DNA
accgacagcgccgacgctcagggcaatatcggtttttccagcaacacccaggatcgggtgagcagcgtacaggtg

SEQ ID NO: 624568 - DNA, 75 bp, synthetic construct
  source 1..75: mol_type = other DNA
ttgcgggattggcggaacatacaaagaaggtgtgtttaacgttcctcctgagccggaggtaccaaaagaggattt

SEQ ID NO: 624569 - DNA, 75 bp, synthetic construct
  source 1..75: mol_type = other DNA
atctgcccgctacaacgccgtcggacgctttggccgcatctcagaagttgccagccgcatcgccgggcagctctc

SEQ ID NO: 624570 - DNA, 75 bp, synthetic construct
  source 1..75: mol_type = other DNA
tggccccggactacggcgatctcaacgacccacgcccggtattcgactggcagcaggccattcgccagcgggcga

SEQ ID NO: 624571 - DNA, 75 bp, synthetic construct
  source 1..75: mol_type = other DNA
tgccctgctggaaggcggccagctctggaagttacgcatcccattaccggatacttcacacgatccgctgatgcc

SEQ ID NO: 624572 - DNA, 75 bp, synthetic construct
  source 1..75: mol_type = other DNA
tgtaaaaaatgatgtggttgtatctatgggggtagatggcattcctaatgaaaaaccttcggagataaatataaa

SEQ ID NO: 624573 - DNA, 75 bp, synthetic construct
  source 1..75: mol_type = other DNA
agagcgtaactcggttcgggcagcatatatccacaaagcggaacatctcgaagagagaaaactcatgttacaatg

SEQ ID NO: 624574 - DNA, 75 bp, synthetic construct
  source 1..75: mol_type = other DNA
cagagactagtcatcgctcagaacttataaaaagtatgaggaagttaatagcccgccaaaaacttatcaatcaca

SEQ ID NO: 624575 - DNA, 75 bp, synthetic construct
  source 1..75: mol_type = other DNA
tgtcgtggcgcctatcttgactggctggcaagcgatcgcagcgatgcgagctgccccgttggttatgtgtttatc

SEQ ID NO: 624576 - DNA, 75 bp, synthetic construct
  source 1..75: mol_type = other DNA
aacgtgacaaatatgcattctcaggaatccgatgatgacgaactggtaacctttagctttgttaatggacaggcg

SEQ ID NO: 624577 - DNA, 75 bp, synthetic construct
  source 1..75: mol_type = other DNA
tggatacactattttcctgattacacattacgcacgcctgcccgtcgatgtcatgctgaattttccgcgttattc

SEQ ID NO: 624578 - DNA, 75 bp, synthetic construct
  source 1..75: mol_type = other DNA
tagtggttatatcggagagggtgagtctgctaagacccagctggagctgaataattcagcactgactgccagtgg

SEQ ID NO: 624579 - DNA, 75 bp, synthetic construct
  source 1..75: mol_type = other DNA
catcagtgatatgactttggctaaaggtaaaggtacacaggctaatataaatatatcctcttcggagttaaatac

SEQ ID NO: 624580 - DNA, 75 bp, synthetic construct
  source 1..75: mol_type = other DNA
gtgagcggcgagatgtcagtggccctgggaagttctgcttcggtagatgtgacagtcactaatgcagtgctgtct

SEQ ID NO: 624581 - DNA, 75 bp, synthetic construct
  source 1..75: mol_type = other DNA
gtgcatggcgcagcttgtcttacaacactacgatgcgcgacgacatgaccgcagcgcgggggtgagtgtcgaaat

SEQ ID NO: 624582 - DNA, 75 bp, synthetic construct
  source 1..75: mol_type = other DNA
cggcacgtacctcacataccacacgttccccgcaaagggcacatatatggacttcctcgagcggggggatatggt

SEQ ID NO: 624583 - DNA, 75 bp, synthetic construct
  source 1..75: mol_type = other DNA
attaatggtggtggaagttatatccggattgagggtagcggcattgagccgggaacgccgggggattataacgtc

SEQ ID NO: 624584 - DNA, 75 bp, synthetic construct
  source 1..75: mol_type = other DNA
gctggacgaaatcgagaaagcgcacccggacgtgttcaatattctgttgcaggtgatggataacggtacgctgac

SEQ ID NO: 624585 - DNA, 75 bp, synthetic construct
  source 1..75: mol_type = other DNA
aagtcaatcttcctgttgatgaattatcagagttacttgttggagaatgtcaaataaatttatccgattatagta

SEQ ID NO: 624586 - DNA, 75 bp, synthetic construct
  source 1..75: mol_type = other DNA
tgccgggctggacagcgaatcgaatctgatggctcgtgtacgagcatcgctggctgaagtgcgtgatcaggtgac

SEQ ID NO: 624587 - DNA, 75 bp, synthetic construct
  source 1..75: mol_type = other DNA
taactgaagatggtcgtcaggttgaggaagtgcatgtcctggggggatatgtatcgtatggagttttacccgcgt

SEQ ID NO: 624588 - DNA, 75 bp, synthetic construct
  source 1..75: mol_type = other DNA
ccaaatctattaaacgttccaggtaaagcagagaatattagagattcacatagacgacgtattatcaatgcaaaa

SEQ ID NO: 624589 - DNA, 75 bp, synthetic construct
  source 1..75: mol_type = other DNA
gtcaggtcaccgtcgcgctggataaagagaaaaatgagctgacttacggattccagagtgcacaaaagcacaagg

SEQ ID NO: 624590 - DNA, 75 bp, synthetic construct
  source 1..75: mol_type = other DNA
cagggcagcagcatgatgaggaatcagggctgtactataaccgtcaccggtactacgatccgttgcaggggcggt

SEQ ID NO: 624591 - DNA, 75 bp, synthetic construct
  source 1..75: mol_type = other DNA
ggtgttctacacgcggatacagcatggcgagccactggtcgagagccgctacctctacgacccgctgggacggcg

SEQ ID NO: 624592 - DNA, 75 bp, synthetic construct
  source 1..75: mol_type = other DNA
gcgcagcaccttcaacagtcactccgtctgccggggcagcagtatgatgaggagtcggggctgtactataaccgg

SEQ ID NO: 624593 - DNA, 75 bp, synthetic construct
  source 1..75: mol_type = other DNA
atgatctggcagcctgagttcacagataaaacactctccaggattcccggggcggttcagtggaacaatattcgt

SEQ ID NO: 624594 - DNA, 75 bp, synthetic construct
  source 1..75: mol_type = other DNA
cataatggggccgccgatgcaatgagacattgttacttgatgtgtcgaatgactaagacatttggatcaacaata

SEQ ID NO: 624595 - DNA, 75 bp, synthetic construct
  source 1..75: mol_type = other DNA
ggggagtatgatgaatggggcaaccagcttaatgaggagaacccgcatcacctgcaccagccgtaccgtctgcca

SEQ ID NO: 624596 - DNA, 75 bp, synthetic construct
  source 1..75: mol_type = other DNA
gggaactgcacaaaatagtatctccatacagtgtccggttggtactgcgtattcggtagggctgggagatggtct

SEQ ID NO: 624597 - DNA, 75 bp, synthetic construct
  source 1..75: mol_type = other DNA
aggtggtgatgcgccaggaagccaccgtgatcaccctcggtggctcggattataaaaaactggtgaatctgggcg

SEQ ID NO: 624598 - DNA, 75 bp, synthetic construct
  source 1..75: mol_type = other DNA
tttgatgagcgttatgctctctacggagtcgattacagtttttttcgtaggattcaaaggataaaaaaacagtat

SEQ ID NO: 624599 - DNA, 75 bp, synthetic construct
  source 1..75: mol_type = other DNA
cgtggcgtgtttttaacggcagaaggagagaagctggcgcaggaaagccgcgagcgacatcagatagtcgaaaat

SEQ ID NO: 624600 - DNA, 75 bp, synthetic construct
  source 1..75: mol_type = other DNA
cctggatcaacagcgagctggcaaccgaatttgccgaacaggaagaaattgcctttacctcaggcaatggcacca

SEQ ID NO: 624601 - DNA, 75 bp, synthetic construct
  source 1..75: mol_type = other DNA
acggagtgcagagcgaaatgctgtccattgaaagtggtatggatgcagccagcagctggcaattgcgattctgga

SEQ ID NO: 624602 - DNA, 75 bp, synthetic construct
  source 1..75: mol_type = other DNA
caattggttgggggatgttattattatcatatagggtattggcaatggatattcctgttgaaattacaggggaaa

SEQ ID NO: 624603 - DNA, 75 bp, synthetic construct
  source 1..75: mol_type = other DNA
agattattcttctcttcacctaatttatctaatcctgaaatatttaatattttgtttgatagaaaagacgcttcg

SEQ ID NO: 624604 - DNA, 75 bp, synthetic construct
  source 1..75: mol_type = other DNA
ttgttcaagagatgataacagttgtatttctataatagatctatctctagttccaagcgaaattactcacattgt

SEQ ID NO: 624605 - DNA, 75 bp, synthetic construct
  source 1..75: mol_type = other DNA
tctttaccggtatgaccgtcacggcaggctgacagagaaaaccgacctcatcccggaagggggtatccgcacgga

SEQ ID NO: 624606 - DNA, 75 bp, synthetic construct
  source 1..75: mol_type = other DNA
ttaccaattccggctggcgtggcaggaaaatcgctcgtttggcgctttattaatgattacggtgcaattagttaa

SEQ ID NO: 624607 - DNA, 75 bp, synthetic construct
  source 1..75: mol_type = other DNA
ctgggcgattatctatggaattgtcaggggatattttttgtattagggatgataataagctttggaataaaaaag

SEQ ID NO: 624608 - DNA, 75 bp, synthetic construct
  source 1..75: mol_type = other DNA
tttgttcatgataactatgaacttgcagaagccatcaactatggtgttgctttccactttggaaacttgcctcaa

SEQ ID NO: 624609 - DNA, 75 bp, synthetic construct
  source 1..75: mol_type = other DNA
ccgtccttaggttatgtgtactctaaaggtaaagatatcaaaggggtacccggacatagatatgttgacgctgac

SEQ ID NO: 624610 - DNA, 75 bp, synthetic construct
  source 1..75: mol_type = other DNA
gtagtgtccgctattgccagtacacctcattcatcgaaaaaatggacgaggcactggctgaaattggttttgtat

SEQ ID NO: 624611 - DNA, 75 bp, synthetic construct
  source 1..75: mol_type = other DNA
accgctggagatcctgcgtactctgcacagctttgacccgtgcctcgcctgttcaacacacgtgctgggcgacga

SEQ ID NO: 624612 - DNA, 75 bp, synthetic construct
  source 1..75: mol_type = other DNA
ctctatgtaatgatatggaatactctggtattgtctgtaaagatactaatggaaaatattttgcatctaaggcag

SEQ ID NO: 624613 - DNA, 75 bp, synthetic construct
  source 1..75: mol_type = other DNA
gctcgattacgacaaaacatccccagaaatgagaaaataccttcagagcatcaacgagtgtatgctccttatgaa

SEQ ID NO: 624614 - DNA, 75 bp, synthetic construct
  source 1..75: mol_type = other DNA
gttattttaataaggaaatcaaaaatctaattaaaaagaatatttatcctgagctatacaatgaacaatgcttga

SEQ ID NO: 624615 - DNA, 75 bp, synthetic construct
  source 1..75: mol_type = other DNA
tgttttgcgagtataaaacagagttcttaattttgtttgatgacttttttagaagccaggatttgcctaaaccat

SEQ ID NO: 624616 - DNA, 75 bp, synthetic construct
  source 1..75: mol_type = other DNA
aattgcatcccaggctgaaaccgcacacgtcgcggtcattagcatggacagcgatccggcgaaaatctttcaatt

SEQ ID NO: 624617 - DNA, 75 bp, synthetic construct
  source 1..75: mol_type = other DNA
ccattctttcaacccagaattgactctggtgctatatctcgttttaccagcgcgttaaaagcaaaacttgggcac

SEQ ID NO: 624618 - DNA, 75 bp, synthetic construct
  source 1..75: mol_type = other DNA
agcgccatcaggaaattctttctgagcaattgaaatctgatgtcagtaatagccgtttgatgattgccaacccta

SEQ ID NO: 624619 - DNA, 75 bp, synthetic construct
  source 1..75: mol_type = other DNA
tcggttaatagagaaatcagcttactgctcaaatgaaaacatgatcaccaataaatttgatgttgtcttttctta

SEQ ID NO: 624620 - DNA, 75 bp, synthetic construct
  source 1..75: mol_type = other DNA
gacaagaaaaaaagtcatcttaaccaggaaatcaaaaagctaattaaaaaaaatattttccctgagctatataat

SEQ ID NO: 624621 - DNA, 75 bp, synthetic construct
  source 1..75: mol_type = other DNA
gtgaagtggttctgaacgagcgtcagtgcgtcgttaaagcctggcagacgcggacaaaagaagcgccccacagtc

SEQ ID NO: 624622 - DNA, 75 bp, synthetic construct
  source 1..75: mol_type = other DNA
gcacgattacgacaaaacatccccagaaatgagaaaataccttaaaagcatcaacgagtgtatgttccttatgaa

SEQ ID NO: 624623 - DNA, 75 bp, synthetic construct
  source 1..75: mol_type = other DNA
tatgggcagctctgtgcggaatagataagtatgatgttgccttaaactttcatcgacctttaattacaggacctg

SEQ ID NO: 624624 - DNA, 75 bp, synthetic construct
  source 1..75: mol_type = other DNA
tatgggctgccctgtgcggaatagataagtatgatgttgcattaaactttcatcgacctttaattacaggccctg

SEQ ID NO: 624625 - DNA, 75 bp, synthetic construct
  source 1..75: mol_type = other DNA
acagacatgacgatgagttacatcggcagacgcgtacttatcggcgactactgcatgcctttggttacccaatgc

SEQ ID NO: 624626 - DNA, 75 bp, synthetic construct
  source 1..75: mol_type = other DNA
attatccagattaccgcaagaactattggcactggatgtttccaataacctactaacttcattacccgaaaatat

SEQ ID NO: 624627 - DNA, 75 bp, synthetic construct
  source 1..75: mol_type = other DNA
taaagacgcatttggagagcgtggtaaaaacgattttgtcaaaattaataaagaacgcgaaggcaacgaaaaaag

SEQ ID NO: 624628 - DNA, 75 bp, synthetic construct
  source 1..75: mol_type = other DNA
atgagcaaagtaccaatatatctggcaccattaaaaatagtgcaagtattgaatatattggttttctcacttccg

SEQ ID NO: 624629 - DNA, 75 bp, synthetic construct
  source 1..75: mol_type = other DNA
tcacggctgataagacaaccggacagtatgggccgattaatgccgatatgacggtgctggagcaatctgttgtat

SEQ ID NO: 624630 - DNA, 75 bp, synthetic construct
  source 1..75: mol_type = other DNA
gatctggagcgcaaggcattgcaggtgggcaccgatgaagacggcggctatgccgtgccggaagcactggatcgc

SEQ ID NO: 624631 - DNA, 75 bp, synthetic construct
  source 1..75: mol_type = other DNA
cagatgataaccagcaaataacatggcagaattttaaaactagcaattcggcatattcaaaactatgtggaaaat

SEQ ID NO: 624632 - DNA, 75 bp, synthetic construct
  source 1..75: mol_type = other DNA
gcaggacggccagcgcacggagtaccgttacgacgaagccggaaggctggcgggcaccacaacgccggacgggga

SEQ ID NO: 624633 - DNA, 75 bp, synthetic construct
  source 1..75: mol_type = other DNA
gaccgccatgaccggatggtgagcgcacaggtgtatgagcgcagcgacggcagtgaagcaggctatacgctcacc

SEQ ID NO: 624634 - DNA, 75 bp, synthetic construct
  source 1..75: mol_type = other DNA
aaaacaccgcccggacggtagcgtatggcgctatgcgcgggatgaatatggccgggtgacgaccatcagcggcga

SEQ ID NO: 624635 - DNA, 75 bp, synthetic construct
  source 1..75: mol_type = other DNA
gaaggggcttacgaggtggtgggggtttttgaccggatagaggacaagcgtgatgccatgcagtcgctgctactg

SEQ ID NO: 624636 - DNA, 75 bp, synthetic construct
  source 1..75: mol_type = other DNA
cgaaaccgcttacctgaccaccggccagatagcgataagcgacccggacgacgccaacagcagcaacgggctgga

SEQ ID NO: 624637 - DNA, 75 bp, synthetic construct
  source 1..75: mol_type = other DNA
ggctctatctttacccagcaggatttgatcgacggcaaggtgaagtatgtccacaccgccacgggcgcagaccag

SEQ ID NO: 624638 - DNA, 75 bp, synthetic construct
  source 1..75: mol_type = other DNA
gttatgccagtcgcaggggagacggcccggttcacgtactatcaaatcggtattcgagtctgtcgatgatgaaac

SEQ ID NO: 624639 - DNA, 75 bp, synthetic construct
  source 1..75: mol_type = other DNA
acgatgccgtcaccggcgtcgcggcggtgccgaccacggctatcgacccttacggcgcgctgccttccggcctga

SEQ ID NO: 624640 - DNA, 75 bp, synthetic construct
  source 1..75: mol_type = other DNA
ccggttgtctctgcaacgggcggtacggtttacctcaacagcgatccggcggtagtcgacggcaccaaagtcggc

SEQ ID NO: 624641 - DNA, 75 bp, synthetic construct
  source 1..75: mol_type = other DNA
ataacaacgacgcgaccgacgccaacgccctgaagttcaccatcaaaacgctgccggacggcggcacgctgcaat

SEQ ID NO: 624642 - DNA, 75 bp, synthetic construct
  source 1..75: mol_type = other DNA
gcagagatcttataaagagagcaggggttaatcatctcttgactttgttctcagcccagctggatgaagttataa

SEQ ID NO: 624643 - DNA, 75 bp, synthetic construct
  source 1..75: mol_type = other DNA
gaacggttacggtgagcaggtgagtaaatggtttaatcggacgttgttgcctaaagtcctcgcagaccgtagcgg

SEQ ID NO: 624644 - DNA, 75 bp, synthetic construct
  source 1..75: mol_type = other DNA
attaacggcggtctgaacggtattgaggatcgtaaggttcgatacaacaaggcgcgggcggcgctgctggtatga

SEQ ID NO: 624645 - DNA, 75 bp, synthetic construct
  source 1..75: mol_type = other DNA
tggtgattgtgtgcgatggcactgaagatgccgatgcccgactggcgcgtgtgctgtggaacgaccctgccaccg

SEQ ID NO: 624646 - DNA, 75 bp, synthetic construct
  source 1..75: mol_type = other DNA
tttggcatcacccttgaatctggcaacattgagttaggccaaactataaccttacatataaccccccccaaatta

SEQ ID NO: 624647 - DNA, 75 bp, synthetic construct
  source 1..75: mol_type = other DNA
acgatatgggatgcctcggtattgaagccctgctggctgccggttacgaaattagcgccatttttacccataccg

SEQ ID NO: 624648 - DNA, 75 bp, synthetic construct
  source 1..75: mol_type = other DNA
gccaaacgcgggctacgtcggccaggacaccttcacctataccgtcaccagcggcggcgtcaccgaaaccgccgc

SEQ ID NO: 624649 - DNA, 75 bp, synthetic construct
  source 1..75: mol_type = other DNA
tacattgccgatggtatttgccggtactcctgacaaagggttgcagcaggcatcagcaattgtcgcttcgtggtt

SEQ ID NO: 624650 - DNA, 75 bp, synthetic construct
  source 1..75: mol_type = other DNA
gtgtcgatagtttacgggttggagatacctattatgtggggcatcttccctggattgagcgcgcgcaatatatgt

SEQ ID NO: 624651 - DNA, 75 bp, synthetic construct
  source 1..75: mol_type = other DNA
tgccgtagctaaatactacattatggcaactcccgcgttggccttgatccgtgctaaagcgcttgggtcgaatcc

SEQ ID NO: 624652 - DNA, 75 bp, synthetic construct
  source 1..75: mol_type = other DNA
atgcggaacactgattacgcaaaaattatggcagataaaaacgatcaaaaacctgaaatacaaacaactataaat

SEQ ID NO: 624653 - DNA, 75 bp, synthetic construct
  source 1..75: mol_type = other DNA
tgaatggtgtcaacccactggggtatattgaatttggtatgcgcagtgatgagatagtttcagatgcaaaactaa

SEQ ID NO: 624654 - DNA, 75 bp, synthetic construct
  source 1..75: mol_type = other DNA
ttaatttgccaccagatctctttctgctacgtaaccgcggtgttgatatgaagattaactatcgctataccacac

SEQ ID NO: 624655 - DNA, 75 bp, synthetic construct
  source 1..75: mol_type = other DNA
acaaagcgattatcgatgtggatcagggccagcacggctcggtgaccattgaaaacggccagctggtttatcgtc

SEQ ID NO: 624656 - DNA, 75 bp, synthetic construct
  source 1..75: mol_type = other DNA
ccgccccggtcacccagggtgaaaacgtcagcacgccggaagatacgacgctgaccagctccgccgcgcaaaacc

SEQ ID NO: 624657 - DNA, 75 bp, synthetic construct
  source 1..75: mol_type = other DNA
agcaataacccgaacgcgaacccgggcgacatcagctacgccgatgacacctccgccgcgctggtcaccacccgt

SEQ ID NO: 624658 - DNA, 75 bp, synthetic construct
  source 1..75: mol_type = other DNA
aaccattaccccgaccgacttgcgccacaacgtggggcattcactggctatgcaaggggtcagcgccgaggaaat

SEQ ID NO: 624659 - DNA, 75 bp, synthetic construct
  source 1..75: mol_type = other DNA
atatgacgaccgccgccgccagtttgaagatcgtcgcaggcaactggacgatcgccagcgccagcttgatcagga

SEQ ID NO: 624660 - DNA, 75 bp, synthetic construct
  source 1..75: mol_type = other DNA
gcaagaacagaaattgatttatactgtgccgaaataaacgacataaaaaaaacaaattacacagacaagcaatat

SEQ ID NO: 624661 - DNA, 75 bp, synthetic construct
  source 1..75: mol_type = other DNA
ccgatgggccggcaacagcagggatagatgatttgggtgaaattttagctaagatgaaacagagaacatcgagag

SEQ ID NO: 624662 - DNA, 75 bp, synthetic construct
  source 1..75: mol_type = other DNA
tttcatgcccgagaaaacggactacacgattatctccacttgcctgagttggtagaggatgtctgtaacgcctac

SEQ ID NO: 624663 - DNA, 75 bp, synthetic construct
  source 1..75: mol_type = other DNA
tccctgcattatctggttcgaggcggatatatcttatgaaaaaggagcgattgaaacggccctggcatatgcata

SEQ ID NO: 624664 - DNA, 75 bp, synthetic construct
  source 1..75: mol_type = other DNA
cgctgttcagtgagccgcatccttcccgtgagttttgtgtccagtacggtgagactgattacgatttcctgtgcc

SEQ ID NO: 624665 - DNA, 75 bp, synthetic construct
  source 1..75: mol_type = other DNA
aatgggtgcctgcgactatattctcaaaacgactcctcctgcagttctgctggctcggctacgtttacatttgcg

SEQ ID NO: 624666 - DNA, 75 bp, synthetic construct
  source 1..75: mol_type = other DNA
gtttttgaccggattgaagagaaacgtgatgccatgcagtcgctggtcctgccaccaccggcacgccaggcgctg

SEQ ID NO: 624667 - DNA, 75 bp, synthetic construct
  source 1..75: mol_type = other DNA
accgattaaaatcggttgcgctgctgattgcttatctggataaagccaatttctatgttatggaagattccggag

SEQ ID NO: 624668 - DNA, 75 bp, synthetic construct
  source 1..75: mol_type = other DNA
atgatgcagtggtggtcagattatcttgatgcaaacagtgacgggtatgtctcggcttaccagtatgcccgccgc

SEQ ID NO: 624669 - DNA, 75 bp, synthetic construct
  source 1..75: mol_type = other DNA
gctccaactggtgcagatcaggcaatcaacaccaccttcctgggctacgacgttgacgctagcacgggtgttatg

SEQ ID NO: 624670 - DNA, 75 bp, synthetic construct
  source 1..75: mol_type = other DNA
caaatccagctgcaacagtttccgccgtccattcgactcaatagccgccacgtcgcctggctggaaagcgaggtg

SEQ ID NO: 624671 - DNA, 75 bp, synthetic construct
  source 1..75: mol_type = other DNA
agaaaggacactgtttgtatggatggttattggttcagtaattggtgcagcaattggtggacttatggtcggctt

SEQ ID NO: 624672 - DNA, 75 bp, synthetic construct
  source 1..75: mol_type = other DNA
catgatcagtttaccgacgatgattgtggggttctctcgctacactaatgcagatgctttccagatcctgagaaa

SEQ ID NO: 624673 - DNA, 75 bp, synthetic construct
  source 1..75: mol_type = other DNA
gtcccgaagccagaactatacgtacatccccaccatcaccgtactggaaagcctgcagcgggaaggctttcagcc

SEQ ID NO: 624674 - DNA, 75 bp, synthetic construct
  source 1..75: mol_type = other DNA
gcgacgacaacggatgcgacgggcagcacccggcagatgacgtggagccgctacgggcagttgctggcgttcact

SEQ ID NO: 624675 - DNA, 75 bp, synthetic construct
  source 1..75: mol_type = other DNA
atgaagataatacaaaaaaaatcattcaaattttcacaatacagaatacagaatacaggaggatggtgctacggg

SEQ ID NO: 624676 - DNA, 75 bp, synthetic construct
  source 1..75: mol_type = other DNA
ccgattgggctgaaggggggatggaatttttatcagtatccgctgaatccggttcagtatatagattcaatggga

SEQ ID NO: 624677 - DNA, 75 bp, synthetic construct
  source 1..75: mol_type = other DNA
tcttgaacaggcgcgaatggtcgggcatgacatcagggaatggctggatacacctgttaagcaacatgaactggt

SEQ ID NO: 624678 - DNA, 75 bp, synthetic construct
  source 1..75: mol_type = other DNA
caaccgccaccgctattatgacccgctgcaggggaggtatatcactcaggatccgattgggctgaaggggggatg

SEQ ID NO: 624679 - DNA, 75 bp, synthetic construct
  source 1..75: mol_type = other DNA
cgatcctatcaaccgcgtagtcaccctggctaacactgaaatctcgctctcgacagctgatttcgaattattgtg

SEQ ID NO: 624680 - DNA, 75 bp, synthetic construct
  source 1..75: mol_type = other DNA
ttcttgtaaaagttgataatttaccttatgggtatggtgaaaattttcaggggcgtttttcattttttggacaaa

SEQ ID NO: 624681 - DNA, 75 bp, synthetic construct
  source 1..75: mol_type = other DNA
taaaattttaccaaatattactcatgataagttttatcatgtccaacaatttattgaaaaacctaaccattcgac

SEQ ID NO: 624682 - DNA, 75 bp, synthetic construct
  source 1..75: mol_type = other DNA
cgacgatgggatttatttgatctactgacgcttggcttggatgaagagcaaatggaccacctgattggtgatgtc

SEQ ID NO: 624683 - DNA, 75 bp, synthetic construct
  source 1..75: mol_type = other DNA
aagtgacgtgagaagcccggcgtttgtggtttcgccatttttaaaaaaatcacaacctttttctgaggatgtact

SEQ ID NO: 624684 - DNA, 75 bp, synthetic construct
  source 1..75: mol_type = other DNA
cgggaattgcgaaaacgctgggaggtgaagcacaacgaacatatgagaaagcatggctttgaaaggggcttcatt

SEQ ID NO: 624685 - DNA, 75 bp, synthetic construct
  source 1..75: mol_type = other DNA
gccttccacaaaaacaagaaaatatcatccttgaagtgtcaaatcctgtattattatcttctactgttactacag

SEQ ID NO: 624686 - DNA, 75 bp, synthetic construct
  source 1..75: mol_type = other DNA
gattgtcgactcgccgtggaaaaacggccgcaacttcctcgtcaccgcgccctccatcgaggggccatggagcga

SEQ ID NO: 624687 - DNA, 75 bp, synthetic construct
  source 1..75: mol_type = other DNA
tattcacaatgcaggtcttgcaaccggaaccatcatcagtggcggggagcagctagtctccagcggtggtagtgc

SEQ ID NO: 624688 - DNA, 75 bp, synthetic construct
  source 1..75: mol_type = other DNA
gcaggattttactattcggcatggtgtttctgctgttatctggttgtgataataaaccggaagaattaaaactgg

SEQ ID NO: 624689 - DNA, 75 bp, synthetic construct
  source 1..75: mol_type = other DNA
aagccagtacgccagagtgggttatttccgcaaggtgaatccgctgcttaaatgggtggataaacacgttgggct

SEQ ID NO: 624690 - DNA, 75 bp, synthetic construct
  source 1..75: mol_type = other DNA
aaatcgacaacaacatcgcagagaacgccttacggggagtggccgtaggccggaaaaactggatgttcgcgggtt

SEQ ID NO: 624691 - DNA, 75 bp, synthetic construct
  source 1..75: mol_type = other DNA
aacatcgcagagaacgccttacggggagtggccgtaggccggaaaaactggatgttcgcgggttccgacagcggt

SEQ ID NO: 624692 - DNA, 75 bp, synthetic construct
  source 1..75: mol_type = other DNA
tgccgtctgaataatgtggagctggaaaaatggctgtgttacggcattgaacatatccaggactggtcggcaaac

SEQ ID NO: 624693 - DNA, 75 bp, synthetic construct
  source 1..75: mol_type = other DNA
ttcaattgctacttacattagaaaaaaaatttcatccagatcaaattgcatttgatcaaaaacactctataattt

SEQ ID NO: 624694 - DNA, 75 bp, synthetic construct
  source 1..75: mol_type = other DNA
gaacgagattacggggcttccaggggtgacactgaatgatgctcaggcagccgcctgggcagaatacaatgctct

SEQ ID NO: 624695 - DNA, 75 bp, synthetic construct
  source 1..75: mol_type = other DNA
gttgagcgggaagaagaaaaagaggatatgcaaaccatgaataaatttatggcaaaagctggaatgctaacagat

SEQ ID NO: 624696 - DNA, 75 bp, synthetic construct
  source 1..75: mol_type = other DNA
aataaaaagggcaagcgaattaagcggacaggtatatacagtatcaagggtgttaacataaaagaatacaacgtc

SEQ ID NO: 624697 - DNA, 75 bp, synthetic construct
  source 1..75: mol_type = other DNA
gcggtatcgatacttcaatttacaaggacgaatggcacggtacgagcgttgtgtgtgaggtggttactgttgaat

SEQ ID NO: 624698 - DNA, 75 bp, synthetic construct
  source 1..75: mol_type = other DNA
aatttgcgtgataaaggggctctgccgtttctggagggacatctgcatgaagtggctgagcgaggtggtcccgga

SEQ ID NO: 624699 - DNA, 75 bp, synthetic construct
  source 1..75: mol_type = other DNA
cgggatttttggcttttgtattttgtttgggagcggccaatggcgcttcgcagcttgaattttcgttctgggatc

SEQ ID NO: 624700 - DNA, 75 bp, synthetic construct
  source 1..75: mol_type = other DNA
atgaaaaatcctactgatcctgaggaattagccaatatttttaataaaaaacataaagaacacatggatgatcgt

SEQ ID NO: 624701 - DNA, 75 bp, synthetic construct
  source 1..75: mol_type = other DNA
tcagaatgagcaagccacactgagcaaaggtcttcaggaaacgacgctgactccctacaaagccctgcatttcgg

SEQ ID NO: 624702 - DNA, 75 bp, synthetic construct
  source 1..75: mol_type = other DNA
agatcgtcgatggtacctacgatggttcacagactagcgctgacagcatttcgaaaacgctggtggactattccg

SEQ ID NO: 624703 - DNA, 75 bp, synthetic construct
  source 1..75: mol_type = other DNA
cccaactgcaggcgaacgctgagagcgacctgaaaaccaaacgtgacgcggttaaagcgaaattctcgttcatga

SEQ ID NO: 624704 - DNA, 75 bp, synthetic construct
  source 1..75: mol_type = other DNA
agacggatgccgcaggccggacaacagagtacagcccggatgtggtgacgggcctcatcacgcgcataaccacgc

SEQ ID NO: 624705 - DNA, 75 bp, synthetic construct
  source 1..75: mol_type = other DNA
atcaatgattgactggaatgaagaattgcgctcacgtattggtgtgatgaattatatccatcaacgtacacgcat

SEQ ID NO: 624706 - DNA, 75 bp, synthetic construct
  source 1..75: mol_type = other DNA
gcgggcggaagtgatggcattagcggttgaggccgaatcggctatcgccgtccagctgtccagtgtttttgagac

SEQ ID NO: 624707 - DNA, 75 bp, synthetic construct
  source 1..75: mol_type = other DNA
ctggccatcgagcgtgattccatctgcaacatcatcgattcgatcttcggcacagacagtgaggaacctgttcag

SEQ ID NO: 624708 - DNA, 75 bp, synthetic construct
  source 1..75: mol_type = other DNA
gtcagctattggcgaggaagttgctgtagtcacggggttgacgtttatcgctggaaggggaaagaggttgaattg

SEQ ID NO: 624709 - DNA, 75 bp, synthetic construct
  source 1..75: mol_type = other DNA
tttgacctgccggaggagccaacaggccatgccgcgccttcatggctgactgagccgacgccacagattaacggg

SEQ ID NO: 624710 - DNA, 75 bp, synthetic construct
  source 1..75: mol_type = other DNA
tttgacctgccggacgagccaacaggcaatgacgcgccttcatggctgactgagccgacgccacagattaacggg

SEQ ID NO: 624711 - DNA, 75 bp, synthetic construct
  source 1..75: mol_type = other DNA
atattaccaaaaccttcggcagtgtgaaggcgattgataacgtcagcttgcggttgaatgctggcgaaatcgtct

SEQ ID NO: 624712 - DNA, 75 bp, synthetic construct
  source 1..75: mol_type = other DNA
cgcgaaggcctcactctcgccaaaagatacgttaagagtcagtttttttattggcgatgaggcgatacttactct

SEQ ID NO: 624713 - DNA, 75 bp, synthetic construct
  source 1..75: mol_type = other DNA
tgtttgccccgcagtccagccagaccatcgccctctcttcagcggtgagcaaaggcgagaccctgaccgttaaca

SEQ ID NO: 624714 - DNA, 75 bp, synthetic construct
  source 1..75: mol_type = other DNA
ctgaatgttgcaacgccgtttgtgttggtaggattaggactgatattcccgctgctggcgcgtaaagcgaatggt

SEQ ID NO: 624715 - DNA, 75 bp, synthetic construct
  source 1..75: mol_type = other DNA
tgcagagtggacattccaattggcactgaacattactacgccatttgtcctcgttggactggggctgatattccc

SEQ ID NO: 624716 - DNA, 75 bp, synthetic construct
  source 1..75: mol_type = other DNA
gaaatggaggtctgttctaccgttcctcaagagatggctatggttttgaggaaggctgggcagaagtttatacct

SEQ ID NO: 624717 - DNA, 75 bp, synthetic construct
  source 1..75: mol_type = other DNA
tagaagtgcgagggactcgctttatgattttgcagcaaacaatgataactggcaggtgatggctacaacacactc

SEQ ID NO: 624718 - DNA, 75 bp, synthetic construct
  source 1..75: mol_type = other DNA
aaaatgatagacatgtatcatgtattttatgccagtaataaaaaccaaattgaaacgctaaaaaatcctgaaatc

SEQ ID NO: 624719 - DNA, 75 bp, synthetic construct
  source 1..75: mol_type = other DNA
cagcggagcgcgctgccctgccgggtgaaatcctggcagctatcgaaggtgtggccatgtatgtgcgccacggtg

SEQ ID NO: 624720 - DNA, 75 bp, synthetic construct
  source 1..75: mol_type = other DNA
ggcttatgtaacgggtgcacgcccagtacaactcgctaggctggcggtcaaagatgttcgtatcgatacacgaaa

SEQ ID NO: 624721 - DNA, 75 bp, synthetic construct
  source 1..75: mol_type = other DNA
ggcaactctcagtgtggtgctattggcgtgggtagtatggcgtctgctacgtatcattagtcgccgtcgtttgaa

SEQ ID NO: 624722 - DNA, 75 bp, synthetic construct
  source 1..75: mol_type = other DNA
ggatacgcatagcaatgacttccacttccttttgcttgaaatcattgatcccggcgctcacgagagatatgagga

SEQ ID NO: 624723 - DNA, 75 bp, synthetic construct
  source 1..75: mol_type = other DNA
gtatgcttatgtattaaagaatgaaattaggggggcgaaagttgaaagtattacgtacttgcagggagtggaaca

SEQ ID NO: 624724 - DNA, 75 bp, synthetic construct
  source 1..75: mol_type = other DNA
tttactgttagtaattgctaaaatgttttttgattcaattagtagtattcctggacagtgcgatattttattctt

SEQ ID NO: 624725 - DNA, 75 bp, synthetic construct
  source 1..75: mol_type = other DNA
cctgctgttttgttagcgcgtttacgtttgcatttgcgtcagaatgagcaagccacgctgaccaaaggtcttcag

SEQ ID NO: 624726 - DNA, 75 bp, synthetic construct
  source 1..75: mol_type = other DNA
ggttatttactgctcccctgacggtacgggcggaccgatttcactggagaaccattttattaaaagtccgtacat

SEQ ID NO: 624727 - DNA, 75 bp, synthetic construct
  source 1..75: mol_type = other DNA
aatcgcaacgtcgttgaacggtgctttggccgcctgaaagaataccgccgcatcgctacgcgttacgacaaaacg

SEQ ID NO: 624728 - DNA, 75 bp, synthetic construct
  source 1..75: mol_type = other DNA
ctggcgcgccagtggtcttacacgtcagcaatactgtgaactcaacgatattcccttcacatcacttcgcggcga

SEQ ID NO: 624729 - DNA, 75 bp, synthetic construct
  source 1..75: mol_type = other DNA
cgcgaaggcctcactctcgccaaaagatacgttatgcgtcagtttttttattggcgatgaggcgatatttactct

SEQ ID NO: 624730 - DNA, 75 bp, synthetic construct
  source 1..75: mol_type = other DNA
ctaccatgatgaatgcctacatgacagatgccacctgaattctgctcgtgtggcatgggtcgaaaaacactgcat

SEQ ID NO: 624731 - DNA, 75 bp, synthetic construct
  source 1..75: mol_type = other DNA
ataagatccattattgatattttggatgaagtagttattgtagataatgcatcttctgataatacaaaaaaaatt

SEQ ID NO: 624732 - DNA, 75 bp, synthetic construct
  source 1..75: mol_type = other DNA
atggggcattatggcgtaaatgatggcgctaaaaacttcctgctgcttaccaatcaaggtgatgtttatggtggc

SEQ ID NO: 624733 - DNA, 75 bp, synthetic construct
  source 1..75: mol_type = other DNA
atgagattttattgggaaactacagaaaatgagaatacaggtgttatagccgatttatcaaactcattttataaa

SEQ ID NO: 624734 - DNA, 75 bp, synthetic construct
  source 1..75: mol_type = other DNA
cacatgctgaccgtacgaaagagcatgctgctgcaaatcgagacaatcatccggcatcaagtgagcgatatcagt

SEQ ID NO: 624735 - DNA, 75 bp, synthetic construct
  source 1..75: mol_type = other DNA
accgatagttctgctgacatccctcgatagtgatatgaatcatattctggcgctggaaatgggcgcctgcgatta

SEQ ID NO: 624736 - DNA, 75 bp, synthetic construct
  source 1..75: mol_type = other DNA
acggaaccaaatccacgaataacaccggggcgcatacccatagtattagcgggaccgcaaatagtgccggtgcgc

SEQ ID NO: 624737 - DNA, 75 bp, synthetic construct
  source 1..75: mol_type = other DNA
atggctcggcggatattaacctcacgccggaaaatattggtgcatttgcccgacgttcgacgggggcttatgcgg

SEQ ID NO: 624738 - DNA, 75 bp, synthetic construct
  source 1..75: mol_type = other DNA
gttttcagggtaaaaaactcagtgttagcaccagaacaatatttaaaaacccctctcttctgatagatggtatag

SEQ ID NO: 624739 - DNA, 75 bp, synthetic construct
  source 1..75: mol_type = other DNA
cgggagctccatattataaagatagtttaaagtcacttatgtttaaaccaatgtacgatattaaaatggttcacg

SEQ ID NO: 624740 - DNA, 75 bp, synthetic construct
  source 1..75: mol_type = other DNA
aacggctgcgtctgtgggcagtctctgggggaagtgcgtgttccgcaccggggaaatgtcgtggagacagtaatt

SEQ ID NO: 624741 - DNA, 75 bp, synthetic construct
  source 1..75: mol_type = other DNA
atgcaatgagacattgttacttgatgtgtcgaatgactaagacatttggatcaacaatagctgacgtgataggta

SEQ ID NO: 624742 - DNA, 75 bp, synthetic construct
  source 1..75: mol_type = other DNA
taagtcaggaggtggaacgtctgttactgttttcccggaactcccacagcaaattgccgccttgtatgagtggtt

SEQ ID NO: 624743 - DNA, 75 bp, synthetic construct
  source 1..75: mol_type = other DNA
acatgacacccttggtaagtatctcgatgcgagaaacttcaccggaggcaatccgacagccgatccgacccagga

SEQ ID NO: 624744 - DNA, 75 bp, synthetic construct
  source 1..75: mol_type = other DNA
ccgctgtttaagaatgacctaatcaattcagagtttaacctcagtgataaacgctactggttcgtaacacatgat

SEQ ID NO: 624745 - DNA, 75 bp, synthetic construct
  source 1..75: mol_type = other DNA
tgaatggtcaggaacagaaaactacaattcgtaaattactaaaccatatgttaggtgatatgatcttacccagca

SEQ ID NO: 624746 - DNA, 75 bp, synthetic construct
  source 1..75: mol_type = other DNA
ggcaacccaatcaaattagctgaagggcgtacatctacttttggtgaggatgcattaacagtagtagccagtaca

SEQ ID NO: 624747 - DNA, 75 bp, synthetic construct
  source 1..75: mol_type = other DNA
cgtagaccagcaattagatcgtcttgaggctacggtacttggcttcgatgagaagaacatttatgtacttggtca

SEQ ID NO: 624748 - DNA, 75 bp, synthetic construct
  source 1..75: mol_type = other DNA
acaactcgtttaatttgcccacattgtcagggagaggtagatgagcatacacgccatcagatgatcgataaaggt

SEQ ID NO: 624749 - DNA, 75 bp, synthetic construct
  source 1..75: mol_type = other DNA
cttggattaccatttgaagatgaatatcagaaagaactagatatacttcaattggaatcattacgtgaagatgaa

SEQ ID NO: 624750 - DNA, 75 bp, synthetic construct
  source 1..75: mol_type = other DNA
ctgtaccggagccagacagggtatggtgcggagatattacgtatagtgtgcccggagttcagggcgggcatggat

SEQ ID NO: 624751 - DNA, 75 bp, synthetic construct
  source 1..75: mol_type = other DNA
agaaggtgatccgctgattgccggtagattctatcgagatctggagcctgcattaggaaaggcacagcgtgcaaa

SEQ ID NO: 624752 - DNA, 75 bp, synthetic construct
  source 1..75: mol_type = other DNA
gtccttaaagaggctggcgtaaccccggatccgaaaaaacagaatcaactggttgaggcgctggccttatatgtc

SEQ ID NO: 624753 - DNA, 75 bp, synthetic construct
  source 1..75: mol_type = other DNA
cgtctgattcagtgccatccggctatgccttaatgcagggacaaagttttgataaaggttcttaccctaaactgg

SEQ ID NO: 624754 - DNA, 75 bp, synthetic construct
  source 1..75: mol_type = other DNA
gtggcggatgagttcgacaaccccaccacggatatccgcaaggacagatgcagtaaatgcatgcgcgggtgtgag

SEQ ID NO: 624755 - DNA, 75 bp, synthetic construct
  source 1..75: mol_type = other DNA
caaggcgacgttgctgattgaaacgctgcccgccgtgttccagatggacgaaatccttcacgcgctgcgcgacca

SEQ ID NO: 624756 - DNA, 75 bp, synthetic construct
  source 1..75: mol_type = other DNA
ttatggtgtagaaagatgtttaattgctttagtggctggtgtcatttgttatgctataataaaaagcggattagt

SEQ ID NO: 624757 - DNA, 75 bp, synthetic construct
  source 1..75: mol_type = other DNA
gcccaacggttcgtttttatctcctgccacgtatgaaaacgggctggtgatacgcagccgtaaagagaaccgacg

SEQ ID NO: 624758 - DNA, 75 bp, synthetic construct
  source 1..75: mol_type = other DNA
tgtcacacatagacaaaaacgaggttcgccgcgcgtacaaccgctcaacctatctcgagcagcgacgcccgttaa

SEQ ID NO: 624759 - DNA, 75 bp, synthetic construct
  source 1..75: mol_type = other DNA
tcaaatatgactcatgcacctggtagtgcctggagccgtggagctgttgacggtggtccaatcactcatacggac

SEQ ID NO: 624760 - DNA, 75 bp, synthetic construct
  source 1..75: mol_type = other DNA
gaactattctggaaagcaatagacgaatttaactttccgcaagaggagcttaatcggctaaagcaatatcgttct

SEQ ID NO: 624761 - DNA, 75 bp, synthetic construct
  source 1..75: mol_type = other DNA
attttttgacataactcgtagagtaatagtagtctgtgataatgagtatgacattgatatttacaccaccaccta

SEQ ID NO: 624762 - DNA, 75 bp, synthetic construct
  source 1..75: mol_type = other DNA
aagaaagcgatggcggatctgaaagacgggctggccccacgcagtatggatctggtccggcgccgtctgctgtct

SEQ ID NO: 624763 - DNA, 75 bp, synthetic construct
  source 1..75: mol_type = other DNA
aaactgaattaaaaaacggcacgtttatctactggcttaatatgaatactccaaaagatctacgtggtattacat

SEQ ID NO: 624764 - DNA, 75 bp, synthetic construct
  source 1..75: mol_type = other DNA
cctgattgtatcccgataaatcagcgattctttagcatccgcgcctacactcctttttataatcccggagcaacc

SEQ ID NO: 624765 - DNA, 75 bp, synthetic construct
  source 1..75: mol_type = other DNA
ttaacaaagacgcctattaccacctgggagactatgagcgctctgacaccctgagagggttaattaccggagcct

SEQ ID NO: 624766 - DNA, 75 bp, synthetic construct
  source 1..75: mol_type = other DNA
gaaggggcttacgaggtggtgggggtatttgaccggattgaggacaagcgtgatgccatgcagtcgctgctactg

SEQ ID NO: 624767 - DNA, 75 bp, synthetic construct
  source 1..75: mol_type = other DNA
gccttataaatgaagttattgctgaaactcctgtcgctgaataccctattacggaatttgaagattacaagcgca

SEQ ID NO: 624768 - DNA, 75 bp, synthetic construct
  source 1..75: mol_type = other DNA
accagatgatgattattataaatatccagaggagttaagtgaaatatgtgataaatcaatatcacaagctaaaga

SEQ ID NO: 624769 - DNA, 75 bp, synthetic construct
  source 1..75: mol_type = other DNA
tcccaccgacgctcttacctgtcgaggaaaaaccagaaataccgcctgaacgagaaattatcctcaccattggcg

SEQ ID NO: 624770 - DNA, 75 bp, synthetic construct
  source 1..75: mol_type = other DNA
gcaaaagtgatcgccagcgcctactccgatctcggttttgatgtcgatttaagccctatgttctcaacaccggaa

SEQ ID NO: 624771 - DNA, 75 bp, synthetic construct
  source 1..75: mol_type = other DNA
cgaagccggtggcatggcgaaagcgatcgaagcaggtctgccaaaacgaatgatcgaagaggcctccgcgcgcga

SEQ ID NO: 624772 - DNA, 75 bp, synthetic construct
  source 1..75: mol_type = other DNA
gcgatttatggtccgggtactcccatgctcgacagcgtacgtgatgtactgaatcggattagccagcgtcatgat

SEQ ID NO: 624773 - DNA, 75 bp, synthetic construct
  source 1..75: mol_type = other DNA
cgcacgttatctctggagcgaagcggtaagcggatttggagccaaagatccgaaatcactggcgctgcgtaccca

SEQ ID NO: 624774 - DNA, 75 bp, synthetic construct
  source 1..75: mol_type = other DNA
ctgatcccggaactggtagaagccctcaaaaaatggggacgcgaagatatctgcgtagtcgctggcggcgttatt

SEQ ID NO: 624775 - DNA, 75 bp, synthetic construct
  source 1..75: mol_type = other DNA
cgatcaaatcccgctggataaaatgtcggtttcgatgaccatgaatggtgcggtgttgccggtactggcgtttta

SEQ ID NO: 624776 - DNA, 75 bp, synthetic construct
  source 1..75: mol_type = other DNA
aaaaatatctcaaagtagatacgggttatcaacctcagcagacagcatagctaatttattggcttttttcacgaa

SEQ ID NO: 624777 - DNA, 75 bp, synthetic construct
  source 1..75: mol_type = other DNA
atggcctatcgttccgcaccgctctatgaagatatcatctggcgaacgcatctccagccacaggatgctgggctt

SEQ ID NO: 624778 - DNA, 75 bp, synthetic construct
  source 1..75: mol_type = other DNA
aggcgttacagaaagcatattctaagttaacacaacttacacaacgtcagcctgactaccagaccagactggccg

SEQ ID NO: 624779 - DNA, 75 bp, synthetic construct
  source 1..75: mol_type = other DNA
agacaatttctaataaaaatgttataaaaatctttgagctccttcatcagggaagacatcccgagtccctgaaag

SEQ ID NO: 624780 - DNA, 75 bp, synthetic construct
  source 1..75: mol_type = other DNA
ccgggtattgcaaattgaagaaagctctgatgatggtgatgaatatgactattcacccgcaaaagaagagtgggt

SEQ ID NO: 624781 - DNA, 75 bp, synthetic construct
  source 1..75: mol_type = other DNA
gatgctctgccgatctacgcccctcagaaactacccgacgaatttttaacggagaagggcaaacgtgagtttaac

SEQ ID NO: 624782 - DNA, 75 bp, synthetic construct
  source 1..75: mol_type = other DNA
aaaactgaaacctgagtttcgcaaggaactagacaggcgaattttcgccagtgccaacctgataaaactcaaccg

SEQ ID NO: 624783 - DNA, 75 bp, synthetic construct
  source 1..75: mol_type = other DNA
ttaaaaacacctacaagcaaattgtactagcgcaaaaaaaattgaaccaaatgaaatacatcaataaattaggtg

SEQ ID NO: 624784 - DNA, 75 bp, synthetic construct
  source 1..75: mol_type = other DNA
tgtcctgaaggtgtgcaaacagcattcacccaagaacaatatgataaattaataagatacattaatattttcttt

SEQ ID NO: 624785 - DNA, 75 bp, synthetic construct
  source 1..75: mol_type = other DNA
aaagttagcaccattaataaatgatagtttcagctatacacgagatttctttgcttactcaaaacaggaaaataa

SEQ ID NO: 624786 - DNA, 75 bp, synthetic construct
  source 1..75: mol_type = other DNA
gaaggggcttacgaggtggtgggtgtatttgaccggatagaggacaagcgtgatgccatgcagtcgctgctactg

SEQ ID NO: 624787 - DNA, 75 bp, synthetic construct
  source 1..75: mol_type = other DNA
atggacggtgaaactattggtcagcaaatttatgaagtggttcagcaacattttccgcatttaattaatcaataa

SEQ ID NO: 624788 - DNA, 75 bp, synthetic construct
  source 1..75: mol_type = other DNA
cttccctcgcacgttctgacaccaaattcgggcaagcctggaagcgcacagcagaacgctggggaattgagttcg

SEQ ID NO: 624789 - DNA, 75 bp, synthetic construct
  source 1..75: mol_type = other DNA
ggcgtcctgcctgaccgcttcaagtctatcgacggtgataaccccgaggtagaaatgtcagaggataacagcgag

SEQ ID NO: 624790 - DNA, 75 bp, synthetic construct
  source 1..75: mol_type = other DNA
tggcggcacgattgacggcacgctgctgcgttttgcgggtgaatactacaccgatgcagaaagcgacctgtatga

SEQ ID NO: 624791 - DNA, 75 bp, synthetic construct
  source 1..75: mol_type = other DNA
ataccccgacctgtgttgcccgtagtgtgactcccgttgtactgttaccgccgataactatcaaccagctggaat

SEQ ID NO: 624792 - DNA, 75 bp, synthetic construct
  source 1..75: mol_type = other DNA
attggtgctcatacgcactccgttgcgattggctcacatggacataccatcaccgttaacgctgcgggtaacgcg

SEQ ID NO: 624793 - DNA, 75 bp, synthetic construct
  source 1..75: mol_type = other DNA
aacggctgcgtctgtggacagtctctgggggaagtgcgtgttccgcaccggggaaatgtcgtggacacagtgatt

SEQ ID NO: 624794 - DNA, 75 bp, synthetic construct
  source 1..75: mol_type = other DNA
aagaagatatgttcattaataatattcattcaaggaatcaggacagaatccatgtaaaaagagtctttgatgata

SEQ ID NO: 624795 - DNA, 75 bp, synthetic construct
  source 1..75: mol_type = other DNA
ttacacactgatttttgataacccgaagcgctatcaacccttagcggacacgtgttttttacggtgtcgcttgcg

SEQ ID NO: 624796 - DNA, 75 bp, synthetic construct
  source 1..75: mol_type = other DNA
tatttgattgggtcaaaatcacccgtgtccccgttccccacgacactgatttaacccattactttgaggcgatga

SEQ ID NO: 624797 - DNA, 75 bp, synthetic construct
  source 1..75: mol_type = other DNA
cagcatgttggctgaaaaagaagggacaacgtctgttaataaagttgacatgagttggtatcaaacgcctaattt

SEQ ID NO: 624798 - DNA, 75 bp, synthetic construct
  source 1..75: mol_type = other DNA
ggcctttccacaccggaggtctgtgcccggcgacggctgattggcctgtttgtccgccaggggcgcaacaatgct

SEQ ID NO: 624799 - DNA, 75 bp, synthetic construct
  source 1..75: mol_type = other DNA
tgtaaaagatactttagaaagtatatgtcatcaattaactattgatacggaggtaataattattgatgatggctc

SEQ ID NO: 624800 - DNA, 75 bp, synthetic construct
  source 1..75: mol_type = other DNA
atgacgcgaacaacatctacctggcagcgaacgaactacggtgaaacccgtaacgctacgccaattgaaggcggc

SEQ ID NO: 624801 - DNA, 75 bp, synthetic construct
  source 1..75: mol_type = other DNA
agagcccggtcatatcagcatttgatttgctgtacagtgagtatgacaaatcactggaacgactgaatagtagat

SEQ ID NO: 624802 - DNA, 75 bp, synthetic construct
  source 1..75: mol_type = other DNA
accgccgacattctgacaccacgacgccgggaggattacggtaaggacctgtggagtgcttatcagaccatccag

SEQ ID NO: 624803 - DNA, 75 bp, synthetic construct
  source 1..75: mol_type = other DNA
tcttttgatattcagaaagccagcttcagagataaatgaagtagacctaaacggtcttaagaacgctgctgattt

SEQ ID NO: 624804 - DNA, 75 bp, synthetic construct
  source 1..75: mol_type = other DNA
agtgggaaaagagatgctcaaagagatgatgcgccgcatgtggccaaataatgtgcgagagctggccaatgcagc

SEQ ID NO: 624805 - DNA, 75 bp, synthetic construct
  source 1..75: mol_type = other DNA
aagcgagaaaaaaggtagagagatctggtggtgggccgatgctttatttatggcggcaccaacattagctgcatt

SEQ ID NO: 624806 - DNA, 75 bp, synthetic construct
  source 1..75: mol_type = other DNA
atttaaaatcaaccgactgggaacgcggtgttttctggagtggcgttgccgcagcatggcgagaaacgcaggatg

SEQ ID NO: 624807 - DNA, 75 bp, synthetic construct
  source 1..75: mol_type = other DNA
gcttacttgacatcacatcaaatccattaattgcactttattttgcatgcagtagtataaattccgacaaaaacg

SEQ ID NO: 624808 - DNA, 75 bp, synthetic construct
  source 1..75: mol_type = other DNA
tcgaattcgttcgatctgatatgggcatcacccccgaccaggttcccgacgactcgccgtctttttctctcgcct

SEQ ID NO: 624809 - DNA, 75 bp, synthetic construct
  source 1..75: mol_type = other DNA
aagacagggcgggcatagagagccaccgcaccggctgctactgcgtggagcttccaaacatagatatcttgaatt

SEQ ID NO: 624810 - DNA, 75 bp, synthetic construct
  source 1..75: mol_type = other DNA
caaacggtggatagagcatcggcataagaagattgctgagacgacaggctataagcccggtgcgggacgtattat

SEQ ID NO: 624811 - DNA, 75 bp, synthetic construct
  source 1..75: mol_type = other DNA
acttgggcgattactgacattaatgattgtttattccttggggcatatattaattctaatatgggtttttgcggt

SEQ ID NO: 624812 - DNA, 75 bp, synthetic construct
  source 1..75: mol_type = other DNA
gatccattagggcttagtactatgataataggtaacggccccgttcctgataatccttttgggcatgctgcggcg

SEQ ID NO: 624813 - DNA, 75 bp, synthetic construct
  source 1..75: mol_type = other DNA
ggctgtattataaccgtcaccggtactacgatccgttgcaggggcggtatatcatccaggacccgattgggctga

SEQ ID NO: 624814 - DNA, 75 bp, synthetic construct
  source 1..75: mol_type = other DNA
gataaacaggcagaaacagataaaaatcaaccatcgcctgaacgctttaacagcgtgattaatttttctaacttt

SEQ ID NO: 624815 - DNA, 75 bp, synthetic construct
  source 1..75: mol_type = other DNA
atgaataaatttatcggtattttgctattaatcttggcattgctggcgggatgtgtcgaccgggaagggtactat

SEQ ID NO: 624816 - DNA, 75 bp, synthetic construct
  source 1..75: mol_type = other DNA
agcaggtcaaagacatttttagcggtaaagtgagtcgctggaataaagtgggcggtagtgacgaacgtataaaag

SEQ ID NO: 624817 - DNA, 75 bp, synthetic construct
  source 1..75: mol_type = other DNA
acctgaattacgttacagcgaagattggtcaagatggccaagagtgtacggtgctacggccttatacccgctgta

SEQ ID NO: 624818 - DNA, 75 bp, synthetic construct
  source 1..75: mol_type = other DNA
gggaacaaggtttaccgctgccggaacagtatcggattggctaccgtcgcaacctgggtgcatggccattgcgat

SEQ ID NO: 624819 - DNA, 75 bp, synthetic construct
  source 1..75: mol_type = other DNA
ctttggggatcgattatatgcagggttatcttattggtaagccgcaaccgttaattgatacgctgaatgaaatcg

SEQ ID NO: 624820 - DNA, 75 bp, synthetic construct
  source 1..75: mol_type = other DNA
gcgaactggtgaataatgactcggcagaccaggttgtcacactcggtcaatatcgtaccgatattttcaatgctg

SEQ ID NO: 624821 - DNA, 75 bp, synthetic construct
  source 1..75: mol_type = other DNA
atgtgtcgaccgggaagggtactataacagcgtcagggaagaagagagccatggactgacgtctctgcgggggca

SEQ ID NO: 624822 - DNA, 75 bp, synthetic construct
  source 1..75: mol_type = other DNA
ctggcgctcggcgctctgaaatcgcaaaactgaatgtttctgatgtgcggttggacgaagacagtcagagacatt

SEQ ID NO: 624823 - DNA, 75 bp, synthetic construct
  source 1..75: mol_type = other DNA
ccaccacggatatccgtaaggacagatgcagcaagtgcatgcgcgggtgtgagatgcgcggcatggtggctaatt

SEQ ID NO: 624824 - DNA, 75 bp, synthetic construct
  source 1..75: mol_type = other DNA
cttctattggatacaccttccactattacgtcacacgtatgaatgacaatatgctcaaaatgcgcaaacagatca

SEQ ID NO: 624825 - DNA, 75 bp, synthetic construct
  source 1..75: mol_type = other DNA
aacccggttaattcacttagcgaacagcaggtcaaagacatttttagcggtaaagtgagtcgctggaataaagtg

SEQ ID NO: 624826 - DNA, 75 bp, synthetic construct
  source 1..75: mol_type = other DNA
ttggcagcatcacccgatagtctgattaaaggttccgcgacggttatttttgttgcacaaccgtcggaaggacag

SEQ ID NO: 624827 - DNA, 75 bp, synthetic construct
  source 1..75: mol_type = other DNA
tatcacttaagcgaggtgcaggactttcgcgataacctccgtttcttcgttgaggatggggagttaatcatcgaa

SEQ ID NO: 624828 - DNA, 75 bp, synthetic construct
  source 1..75: mol_type = other DNA
gcgaagcggctctggcccggctggtggcagtgattaaagatttaacaacagaacaaaaagcccgacgacccacgc

SEQ ID NO: 624829 - DNA, 75 bp, synthetic construct
  source 1..75: mol_type = other DNA
atggaaaaaaatggagtgaaacaagattgctgcctgaagaaataaacatggctattgttgttgaaaaccttaaaa

SEQ ID NO: 624830 - DNA, 75 bp, synthetic construct
  source 1..75: mol_type = other DNA
tgagcggattcatgatcgtactctcaaaactaacaataaatggttttggccaagaagctggcatccatattggtt

SEQ ID NO: 624831 - DNA, 75 bp, synthetic construct
  source 1..75: mol_type = other DNA
gcgggcgtgagcccaacaggcggcttccgttatccggccatcccggtacagctcgttgaacccggcgtatgcatc

SEQ ID NO: 624832 - DNA, 75 bp, synthetic construct
  source 1..75: mol_type = other DNA
cgactccgcccgccacacgctggcgctgctggcaaaagccgattacgtgctgaccgataacagcgggtttatttt

SEQ ID NO: 624833 - DNA, 75 bp, synthetic construct
  source 1..75: mol_type = other DNA
acggcatcattattgggcatagctcaacactaacagccactcaattcaccattgaaaactcgaacggtataaggc

SEQ ID NO: 624834 - DNA, 75 bp, synthetic construct
  source 1..75: mol_type = other DNA
tagaagtgctatttttgtacgctgtggtggtagatatttagggttactatatatcttcatattctgggtgaaaaa

SEQ ID NO: 624835 - DNA, 75 bp, synthetic construct
  source 1..75: mol_type = other DNA
aacggctgcgtctgtggccagtctctgggggaagtgcgtgttccgcaccggggaaatgtcgtggaaacagtgatt

SEQ ID NO: 624836 - DNA, 75 bp, synthetic construct
  source 1..75: mol_type = other DNA
gtaatactaaaaacaatggcgcatcaggggccgatatcaataactatgccgggcagattaaatctgctatcgaaa

SEQ ID NO: 624837 - DNA, 75 bp, synthetic construct
  source 1..75: mol_type = other DNA
tacaggtggcgatttggacgtgaagtggtcaacaaaaactggccaccgagttagagtttttccagtatcgatttt

SEQ ID NO: 624838 - DNA, 75 bp, synthetic construct
  source 1..75: mol_type = other DNA
agcagtatgatgaggagtccggcctgtattacaaccgccaccgctattatgacccgctgcaggggcggtatatca

SEQ ID NO: 624839 - DNA, 75 bp, synthetic construct
  source 1..75: mol_type = other DNA
tgacgaacccggccacaggtcgtctctcaacgtcagataccatcgtttttctggccttcctggtcagttccttcg

SEQ ID NO: 624840 - DNA, 75 bp, synthetic construct
  source 1..75: mol_type = other DNA
atcgacgaagctaaagttattgagttcagtaaaaatgccccggactggcgtaatccgctctggcgtcatgaagat

SEQ ID NO: 624841 - DNA, 75 bp, synthetic construct
  source 1..75: mol_type = other DNA
tgctttcacagtgggtgctacgcaactttcgcagcgatgacacagccctgtctgcaaaagaaaagcagcgagtat

SEQ ID NO: 624842 - DNA, 75 bp, synthetic construct
  source 1..75: mol_type = other DNA
atggacaagaaaattaaatcattgaagccaggaattgttatcagagacataagcggttattacgatacagataca

SEQ ID NO: 624843 - DNA, 75 bp, synthetic construct
  source 1..75: mol_type = other DNA
tcattaaattgtgcttctttgctggcagagcgtttgaactggcattcgtttaatgacagcgaaggaatagatgag

SEQ ID NO: 624844 - DNA, 75 bp, synthetic construct
  source 1..75: mol_type = other DNA
accaatgttagatttaattcgaataatatggcgatatattggaatagtagagcatctttattttgttcaactgaa

SEQ ID NO: 624845 - DNA, 75 bp, synthetic construct
  source 1..75: mol_type = other DNA
accagttcggttatgatatggatgctattgttggcggagctcataatggggccgccgatgcaatgagacattgtt

SEQ ID NO: 624846 - DNA, 75 bp, synthetic construct
  source 1..75: mol_type = other DNA
gccaaactgcgatcgattcagatgccattttgcaatggcccaaacaaaatgggttggctaaagctctgagagaga

SEQ ID NO: 624847 - DNA, 75 bp, synthetic construct
  source 1..75: mol_type = other DNA
aggttcgctctgctgtgatgcaggggcgtgcttttactatcagtcgcaaatttggtgggcaatccatcgtaacgg

SEQ ID NO: 624848 - DNA, 75 bp, synthetic construct
  source 1..75: mol_type = other DNA
taaatcgactttgctggaggccattcgttttgccctgggtaaacagccttttggcgattcagcacaaaagcaaca

SEQ ID NO: 624849 - DNA, 75 bp, synthetic construct
  source 1..75: mol_type = other DNA
ggacttttttgttgatatctggataaaagataatgttataacgtctgtaactgttaactcaaaaggtggatatat

SEQ ID NO: 624850 - DNA, 75 bp, synthetic construct
  source 1..75: mol_type = other DNA
gggtgttgagtgtagaagatgggaaagggcgtattcttcctgagcagcagggggcgattgatctgcctgaaatcc

SEQ ID NO: 624851 - DNA, 75 bp, synthetic construct
  source 1..75: mol_type = other DNA
tcagcggtcatttgcggaacttgctcctttacaacttgagttatcagatctaatcggtgcagaagaagctcagct

SEQ ID NO: 624852 - DNA, 75 bp, synthetic construct
  source 1..75: mol_type = other DNA
aggttcgctctgctatgatgcaaggccgtacctttaccataagtcgcaaatttggcgggaaatccattgtaacag

SEQ ID NO: 624853 - DNA, 75 bp, synthetic construct
  source 1..75: mol_type = other DNA
atgaagatggtaaaaatatattcaacaggaggttgtgatgctgcaacacgtgaaggttcggcggaggttgtgttg

SEQ ID NO: 624854 - DNA, 75 bp, synthetic construct
  source 1..75: mol_type = other DNA
agcatcgacaccgatattaagctcaatcgcgcattgtgggtgatggcagaaacactgctggagagcatgcgctga

SEQ ID NO: 624855 - DNA, 75 bp, synthetic construct
  source 1..75: mol_type = other DNA
ctgcctgtgggctgttcaccgcgtccggtaacgggtcaggccgaccgtggaataccgcagccgtcgtctttttga

SEQ ID NO: 624856 - DNA, 75 bp, synthetic construct
  source 1..75: mol_type = other DNA
tcggcgaaagggctgggttatgaaaaagagattagagattacgggttaaatctgttcggtatgtacggcagaaaa

SEQ ID NO: 624857 - DNA, 75 bp, synthetic construct
  source 1..75: mol_type = other DNA
gggaaatcggttaattatgatgccagcgaattgtttgcgataaatacaaaattattaaaagttaacggcccatct

SEQ ID NO: 624858 - DNA, 75 bp, synthetic construct
  source 1..75: mol_type = other DNA
gagagggttgcatagtactggagttgacccaatcaaccttcacaggcatcgataaaaatgaacgctactataaaa

SEQ ID NO: 624859 - DNA, 75 bp, synthetic construct
  source 1..75: mol_type = other DNA
aagatgagtggaccggacttgtcgaacaggcagatcctctcattcgtgctaaagccgcggaaattgccgttgcgc

SEQ ID NO: 624860 - DNA, 75 bp, synthetic construct
  source 1..75: mol_type = other DNA
ctctgcagttactggggttacttcaggaaaatatgtcagaaggtaatatgaagggtgatgaggtcaatatgttcc

SEQ ID NO: 624861 - DNA, 75 bp, synthetic construct
  source 1..75: mol_type = other DNA
gagattagaaaactgggtaaaggcgatcatctggtgaagctgaaaaccagcccgcaggcacgaaaaaagtggccg

SEQ ID NO: 624862 - DNA, 75 bp, synthetic construct
  source 1..75: mol_type = other DNA
atgaagatggtaaaaatatattcaacaggaggttgtgatgctgcaacacgtgaaggttcggctgaagttgtgctg

SEQ ID NO: 624863 - DNA, 75 bp, synthetic construct
  source 1..75: mol_type = other DNA
gaagagaccccgcatcacctgcaccagccgtaccggctgccggggcagcagtatgataaggagtcggggctgtac

SEQ ID NO: 624864 - DNA, 75 bp, synthetic construct
  source 1..75: mol_type = other DNA
ggggtctttgaccgggtggaggagaagcgcgatgcgatgcagtcactggcgctgccagccccggcccgtaacgcc

SEQ ID NO: 624865 - DNA, 75 bp, synthetic construct
  source 1..75: mol_type = other DNA
tgtggctgccgcacgggatgcagttaaatcccacattgcgcaggcatcacgtccggcattgcgtgtagtcaacgg

SEQ ID NO: 624866 - DNA, 75 bp, synthetic construct
  source 1..75: mol_type = other DNA
tcgactctcctgcgaaaactcaacgccggagattacgctggtgcagccgatgagttcctgcgctggaataaagct

SEQ ID NO: 624867 - DNA, 75 bp, synthetic construct
  source 1..75: mol_type = other DNA
tcgccaactgatggcgtagtggctgcaccatcgaaagcgagatttggtgcatacagcacagctgagatgaaaaag

SEQ ID NO: 624868 - DNA, 75 bp, synthetic construct
  source 1..75: mol_type = other DNA
acaagcatctgaagatttacaaatcgcttttcaaaaccttcctgaccgacaacaaagatattctggagaagtcac

SEQ ID NO: 624869 - DNA, 75 bp, synthetic construct
  source 1..75: mol_type = other DNA
gttgttattggcatacacgggagcgagaagaggcgagataggaaagctggagaagtcacagattaaattcgacga

SEQ ID NO: 624870 - DNA, 75 bp, synthetic construct
  source 1..75: mol_type = other DNA
ataatcatctcacatatgacttggttttggggaagacgccacacaacgacgttccgcggttcctggcaggaagct

SEQ ID NO: 624871 - DNA, 75 bp, synthetic construct
  source 1..75: mol_type = other DNA
ggcgatttgcgtaacggtcgggtgtatccgggggccaatattgacgccattcctgtccctgagggcagtgaatac

SEQ ID NO: 624872 - DNA, 75 bp, synthetic construct
  source 1..75: mol_type = other DNA
ggatcactaaacgatatttacatacgtttccgctctctacagtctcctatgtagtcgatgggctttgctgggtct

SEQ ID NO: 624873 - DNA, 75 bp, synthetic construct
  source 1..75: mol_type = other DNA
cttgagctttatattttcccttatatcggttcgtccgacattcgccaactcaaaaccagtcacctgttagccccg

SEQ ID NO: 624874 - DNA, 75 bp, synthetic construct
  source 1..75: mol_type = other DNA
ctcttagtgcagggtatagaccccaaagccgaacagaaagaagctcaggccgagaattcgggggcatatactttc

SEQ ID NO: 624875 - DNA, 75 bp, synthetic construct
  source 1..75: mol_type = other DNA
atgaagacaattgcctccgttacgctcccgcatcatatacacgctccacgctacgatcgccagcagttgcaatca

SEQ ID NO: 624876 - DNA, 75 bp, synthetic construct
  source 1..75: mol_type = other DNA
tgatgcaatcgttgagccagcaccacgagtcgaaccggaaaaggtgttagccctttctgatgcttgggctttgta

SEQ ID NO: 624877 - DNA, 75 bp, synthetic construct
  source 1..75: mol_type = other DNA
attccttttgtcaaatcattagctacaccgctctcgatgttcgatgcgtttatttcaaacctgattgtgtcagaa

SEQ ID NO: 624878 - DNA, 75 bp, synthetic construct
  source 1..75: mol_type = other DNA
cagaagaggggagatcgccaagctggagaaatcacagatcaaatttgatgaagatagccagcggtactatctcct

SEQ ID NO: 624879 - DNA, 75 bp, synthetic construct
  source 1..75: mol_type = other DNA
gttatggttcacatcaggcctgataataggcacattatctttaattgcaggtgtcttctctctgatatcagcctt

SEQ ID NO: 624880 - DNA, 75 bp, synthetic construct
  source 1..75: mol_type = other DNA
tgaagtcgtacagggcgacaacgttcgcactattggcgatgtgttccgcaataagcgagcgcaattctattacgc

SEQ ID NO: 624881 - DNA, 75 bp, synthetic construct
  source 1..75: mol_type = other DNA
gcagtccaggcagtttaccggaaagcgtatttcagcgacggcgggtcatccggcgagtctgttgtggtgcattga

SEQ ID NO: 624882 - DNA, 75 bp, synthetic construct
  source 1..75: mol_type = other DNA
accatccaggagaacatgctgaaaggcgggatttccggtcgcagtgcaaaaggaaaacgtatccacacccgtgcc

SEQ ID NO: 624883 - DNA, 75 bp, synthetic construct
  source 1..75: mol_type = other DNA
taccgggcggtagagcatggtgaatacgccgaccctgatgaaatgcttagctttgacaaagaggctattggagag

SEQ ID NO: 624884 - DNA, 75 bp, synthetic construct
  source 1..75: mol_type = other DNA
acggttcggtagttaagcgcattgccgaaggtctgctgatggacatcaatgaaggtgctgactgggcaacttcgc

SEQ ID NO: 624885 - DNA, 75 bp, synthetic construct
  source 1..75: mol_type = other DNA
ggaagaagcggaagcggtaacgaaggaatcatgggatatcctgataccgaccatccgtaagccgttctctgaaat

SEQ ID NO: 624886 - DNA, 75 bp, synthetic construct
  source 1..75: mol_type = other DNA
gcagtccaggccgtttaccgtaaagcacatttcagcggcggcggttctcctggcgattctgtcgtagtgcattga

SEQ ID NO: 624887 - DNA, 75 bp, synthetic construct
  source 1..75: mol_type = other DNA
tacctgaaaaatatgttccgtcctgtacgtgagtttgcaagatacagtacgcgtctgatcagggcatttacagct

SEQ ID NO: 624888 - DNA, 75 bp, synthetic construct
  source 1..75: mol_type = other DNA
tcagtgcaggttttgtcaaactgaagaacaggaaatcactggccgatgtcgtgatgtactacaacggcaggccag

SEQ ID NO: 624889 - DNA, 75 bp, synthetic construct
  source 1..75: mol_type = other DNA
cggtaattgatgcgcatgatgatgcagttcaggccgtttaccggaaagcacatttcagcggtggtggttcgtccg

SEQ ID NO: 624890 - DNA, 75 bp, synthetic construct
  source 1..75: mol_type = other DNA
gataaccggagaacatgtccctgaaatcattctgctcaactcccatgacggcacctccagctaccagatgctgcc

SEQ ID NO: 624891 - DNA, 75 bp, synthetic construct
  source 1..75: mol_type = other DNA
gagggtattggattgaatatacaaaatatttttcgctggcttgaaaaggatacgcctgatgctgttgaaaaaatt

SEQ ID NO: 624892 - DNA, 75 bp, synthetic construct
  source 1..75: mol_type = other DNA
aaaaaggaaataaatctttctgaaggaaatcctgttgatatatctgaaaatattactggtactgatggtgccagg

SEQ ID NO: 624893 - DNA, 75 bp, synthetic construct
  source 1..75: mol_type = other DNA
attgaactgattcatgtcgacggtaacgccgacagtgctgaattcgttcaggccggtcgtatagctgccggtgct

SEQ ID NO: 624894 - DNA, 75 bp, synthetic construct
  source 1..75: mol_type = other DNA
ctccattctgatcgctcgtcacttcgagaaaccgattctgagaaactcattgtcaactatacagaaatacaggta

SEQ ID NO: 624895 - DNA, 75 bp, synthetic construct
  source 1..75: mol_type = other DNA
cccgtgttgagagcaccggtgacggtaacgtccgtacccgtctgggtgtgaaaacctggattaagggacacaaca

SEQ ID NO: 624896 - DNA, 75 bp, synthetic construct
  source 1..75: mol_type = other DNA
ggtacaggaactgttaacactgcaggtacactgattctgggtaatgcaggtgcccctgtcatgcttgccagcagc

SEQ ID NO: 624897 - DNA, 75 bp, synthetic construct
  source 1..75: mol_type = other DNA
gacagtctgggtacaggaactgttaacactgcaggtacactgattctgggtaatgcaggtgcccctgtcatgctt

SEQ ID NO: 624898 - DNA, 75 bp, synthetic construct
  source 1..75: mol_type = other DNA
gctgagcagatgaccatgcttgaggaaacatttggcattcaggagtttaagattttctcttatcttgaatgctat

SEQ ID NO: 624899 - DNA, 75 bp, synthetic construct
  source 1..75: mol_type = other DNA
gaacaccagcactggggcctgtgagactccagcggagctgctgctccagacctctcaggcggtttattcccgcca

SEQ ID NO: 624900 - DNA, 75 bp, synthetic construct
  source 1..75: mol_type = other DNA
tttgcacaagctatccacgcgaaatatccgggcaaactgctggcttataactgctcgccgtcgttcaactggcag

SEQ ID NO: 624901 - DNA, 75 bp, synthetic construct
  source 1..75: mol_type = other DNA
cactcaattttcagactcagctgaaagtaatttttcaaacctcaataaatatgacatcaatgtaataacttatga

SEQ ID NO: 624902 - DNA, 75 bp, synthetic construct
  source 1..75: mol_type = other DNA
tattcatggaattcatttcggtaaatactgcatctgctgctgaggagattcatcatgcagatagcaaagtcgacg

SEQ ID NO: 624903 - DNA, 75 bp, synthetic construct
  source 1..75: mol_type = other DNA
gaaggaaaacaccggacaaacagcagtttattctgccggtgagcatcttgaactctgctgtggtaaggcaaggct

SEQ ID NO: 624904 - DNA, 75 bp, synthetic construct
  source 1..75: mol_type = other DNA
caccttggaatggctgctcttggtccaattgattacttcaatgttcaggacaagatggctggtcgtgagattgat

SEQ ID NO: 624905 - DNA, 75 bp, synthetic construct
  source 1..75: mol_type = other DNA
gggaactcacaaatgatgcgccaaaaccaagacttttacacggtttatccccgctggcgcggggaactctttccc

SEQ ID NO: 624906 - DNA, 75 bp, synthetic construct
  source 1..75: mol_type = other DNA
caaacagattgttcgttttcccgtaaccggctcatttaaaccgtctggtctgtttcctccggctctacaaaaata

SEQ ID NO: 624907 - DNA, 75 bp, synthetic construct
  source 1..75: mol_type = other DNA
tttatccccgctggcgcggggaactcaaacagattgttcgttttcccgtaaccggctcatttaaaccgtctggtc

SEQ ID NO: 624908 - DNA, 75 bp, synthetic construct
  source 1..75: mol_type = other DNA
tccaattcatatactgataaatcatcaaaacaaacggtttatccccgctggcgcgggaaactccccctgcgcttg

SEQ ID NO: 624909 - DNA, 75 bp, synthetic construct
  source 1..75: mol_type = other DNA
gtcagtcacaatctaccaacttaacagaaacacacaaacaacacatccattatgttaaagagcacttaattcatt

SEQ ID NO: 624910 - DNA, 75 bp, synthetic construct
  source 1..75: mol_type = other DNA
tatccccgctggcgcggggaacacgggaattcagcaagaataccgcgtttataactcggtttatccccgctggcg

SEQ ID NO: 624911 - DNA, 75 bp, synthetic construct
  source 1..75: mol_type = other DNA
taccgtagatattcccatgataagctttatcctgaggagtttaaagttgaagctgtcaaacaggttgttgaacgt

SEQ ID NO: 624912 - DNA, 75 bp, synthetic construct
  source 1..75: mol_type = other DNA
tttataattctattgaaatgtttaaaaaaacatatttttgcttatctcaacaaacctgtcagaattttacatgga

SEQ ID NO: 624913 - DNA, 75 bp, synthetic construct
  source 1..75: mol_type = other DNA
tattgtttctttatctgtttttatcctccgatctatacctcgattattacctattatgttgattcgtagaattta

SEQ ID NO: 624914 - DNA, 75 bp, synthetic construct
  source 1..75: mol_type = other DNA
agctctgccagacgctgagaaaaaacggtttatccccgctggcgcggggaactcggaggtaaaaccagaaacagc

SEQ ID NO: 624915 - DNA, 75 bp, synthetic construct
  source 1..75: mol_type = other DNA
cgctggcgcggggaactcggcgattagctctgccagacgctgagaaaaaacggtttatccccgctggcgcgggga

SEQ ID NO: 624916 - DNA, 75 bp, synthetic construct
  source 1..75: mol_type = other DNA
tgccaactgccggtgggctttaccactgggagttcgagcgagaagggaaaccgcttcgcgttaaggttgatgggc

SEQ ID NO: 624917 - DNA, 75 bp, synthetic construct
  source 1..75: mol_type = other DNA
ataaatttataaaggttatttcgaatgaaccttatgctcctgagtcgataaaagccctacacgatcagataggta

SEQ ID NO: 624918 - DNA, 75 bp, synthetic construct
  source 1..75: mol_type = other DNA
actctgccggagggagtgagcagtaagacggggaataaggtaacaacgaatgctgcaggtaaagccgatattgag

SEQ ID NO: 624919 - DNA, 75 bp, synthetic construct
  source 1..75: mol_type = other DNA
ctcaacgttgacggtaaaagatagcgttcttgctgttgaaagcgcaacggaactgactttctccgccagagatca

SEQ ID NO: 624920 - DNA, 75 bp, synthetic construct
  source 1..75: mol_type = other DNA
atgccgcgcgttgatggcgctgatgctctgaagcaggcggtttctgtcaccatcgccgccggggagatgtcgtta

SEQ ID NO: 624921 - DNA, 75 bp, synthetic construct
  source 1..75: mol_type = other DNA
cctatactctgaagagcagccatggtaactcagtcaatatccagctccccatagaaactaactctggtaacacca

SEQ ID NO: 624922 - DNA, 75 bp, synthetic construct
  source 1..75: mol_type = other DNA
cttaattacacaaaatgaacttgatgaaatattaggcgaaaaattcactgataactacaactttcttaactatct

SEQ ID NO: 624923 - DNA, 75 bp, synthetic construct
  source 1..75: mol_type = other DNA
gcgccgcagtacatgaaggattacgattacgacgatcaccagcgttttaatccgtttttcgatctcggagcctag

SEQ ID NO: 624924 - DNA, 75 bp, synthetic construct
  source 1..75: mol_type = other DNA
aattgtagaacaaggtctaataaagccacgtttggcgaaatttttcgtagtttgctattatatattttagattct

SEQ ID NO: 624925 - DNA, 75 bp, synthetic construct
  source 1..75: mol_type = other DNA
aggccgcagtaagtcatcaaatcaagtctctggaggattttctggggcttaagctgttccgtcgacgcaaccgtt

SEQ ID NO: 624926 - DNA, 75 bp, synthetic construct
  source 1..75: mol_type = other DNA
aaattctggcacatgcccctaatagctcagtagataattcctggccacatgaagcaattcggcacatcattgaaa

SEQ ID NO: 624927 - DNA, 75 bp, synthetic construct
  source 1..75: mol_type = other DNA
acgttaaagcggggactattgcggttgaccactcggaaatgaccgtatcaaaaacgtcgattaccgcaggcgaaa

SEQ ID NO: 624928 - DNA, 75 bp, synthetic construct
  source 1..75: mol_type = other DNA
tgaatgagccgtcaggtgacgtggttgccaatggtcagcaatcctacacgttgacgcttactgccgtggataccg

SEQ ID NO: 624929 - DNA, 75 bp, synthetic construct
  source 1..75: mol_type = other DNA
atgggaagcgccgtccttgctggctgcaggcggtaaaattaccggtcagggtaaccagtggcaagtgacgctccc

SEQ ID NO: 624930 - DNA, 75 bp, synthetic construct
  source 1..75: mol_type = other DNA
atagaaaccaaccttggtaacaccaacgtgactgccggtcattacgaactgccagtgaccgttagtttcaacacc

SEQ ID NO: 624931 - DNA, 75 bp, synthetic construct
  source 1..75: mol_type = other DNA
agcagcttatccggctgccggggcagcagtatgatgaggagtccggcctgtattacaaccgccaccgctattatg

SEQ ID NO: 624932 - DNA, 75 bp, synthetic construct
  source 1..75: mol_type = other DNA
ctgccaccggtgaactggccagaacgcagcgccgcagcctggcggatgcgcttcagcagtccggcggcgaagacg

SEQ ID NO: 624933 - DNA, 75 bp, synthetic construct
  source 1..75: mol_type = other DNA
tgatgttgtttagtatttcttgtttttctgccactgagctagaaataaaaaaacttgctttgcctgaagctattt

SEQ ID NO: 624934 - DNA, 75 bp, synthetic construct
  source 1..75: mol_type = other DNA
attggctaaaaatctacaatctcccgggtaagcctgatattcaaatatcgcagatgttccctgcagatgcactcg

SEQ ID NO: 624935 - DNA, 75 bp, synthetic construct
  source 1..75: mol_type = other DNA
tcttcgagagtacatgttagttacgatgttgataatggcgatagtggtaaaactgctttaccaattcatatttct

SEQ ID NO: 624936 - DNA, 75 bp, synthetic construct
  source 1..75: mol_type = other DNA
atggcgatagtggtaaaactgctttaccaattcatatttcgtacttgcagtatatgaaaaagatatcaacccaga

SEQ ID NO: 624937 - DNA, 75 bp, synthetic construct
  source 1..75: mol_type = other DNA
gcgatgcgatagtttttgatgtcaatgcattccaaaaagccttgatgcatttttattatatcgataaatatccta

SEQ ID NO: 624938 - DNA, 75 bp, synthetic construct
  source 1..75: mol_type = other DNA
gcaaggtagcggtctgtatgttattattcccaaccctcagattattgacagtatgagtcagtcttcagactcaat

SEQ ID NO: 624939 - DNA, 75 bp, synthetic construct
  source 1..75: mol_type = other DNA
aactgggaaacagcgaaagcgagggtaattttcataacagcgccagtaaggataataatattggcgctatgctca

SEQ ID NO: 624940 - DNA, 75 bp, synthetic construct
  source 1..75: mol_type = other DNA
ctggtcttcctggctgtcatgcgcaaaacatatggctttaataaaaaaatggattgggtgagcaacgagcaactt

SEQ ID NO: 624941 - DNA, 75 bp, synthetic construct
  source 1..75: mol_type = other DNA
ccagacccgtgtgcgcgaccagagccgccgggaatataccaaacatatgttgcgtctgcggcgggccggacagat

SEQ ID NO: 624942 - DNA, 75 bp, synthetic construct
  source 1..75: mol_type = other DNA
tgacttttcactgcatacatttacacaaactcattatattgtaaaagccgaaataaatgaagctggtaacgattt

SEQ ID NO: 624943 - DNA, 75 bp, synthetic construct
  source 1..75: mol_type = other DNA
aaaacgtttttgaggttggaacgtctgctgcgtatctgttttatgcgcaaaaaacgtcagcaggccagttgtttg

SEQ ID NO: 624944 - DNA, 75 bp, synthetic construct
  source 1..75: mol_type = other DNA
ccggcacatcagcccgtgaggcggcaacccatgcgactgatgctacaggctcagcacgcgcagccagcacgtcag

SEQ ID NO: 624945 - DNA, 75 bp, synthetic construct
  source 1..75: mol_type = other DNA
agcatcgacaccgatattaagctcaatcgcgcattatgggtgatggcggaaacactgctggagagcatgcgctga

SEQ ID NO: 624946 - DNA, 75 bp, synthetic construct
  source 1..75: mol_type = other DNA
atggcaggcaacggtgcaacggttgccccgacggtgattacagagccggacggtacggtggagatccctgtcacc

SEQ ID NO: 624947 - DNA, 75 bp, synthetic construct
  source 1..75: mol_type = other DNA
cgcggatctggaggtgacgcaggataacgccgtggcagacggttcgacggcgaacacgctgcaggtgagggtcac

SEQ ID NO: 624948 - DNA, 75 bp, synthetic construct
  source 1..75: mol_type = other DNA
gaatcgccaccaacggtcgcggcacgctttggtatcaccgttgatgaattacgtcgcctgaatcagttccgtacc

SEQ ID NO: 624949 - DNA, 75 bp, synthetic construct
  source 1..75: mol_type = other DNA
ccaggctactacttgcataatggtaagtgggtgaaaatgttaagccgtgaggaaaccattacggtgaaaaatggt

SEQ ID NO: 624950 - DNA, 75 bp, synthetic construct
  source 1..75: mol_type = other DNA
ttcacaacatcgacaccgatattaagctcaaccgcgcattgtgggtaatggcagaaacgctgctggagagcctgc

SEQ ID NO: 624951 - DNA, 75 bp, synthetic construct
  source 1..75: mol_type = other DNA
tcgttccgatggtatgggcaaagcctgtcagtggtgcatagaatatttaagaaacccacaattaatgacacaatt

SEQ ID NO: 624952 - DNA, 75 bp, synthetic construct
  source 1..75: mol_type = other DNA
gttgactctgttactcgagtattactcattggttcggcaatgatggtaattattgttgaaataattaacagtgca

SEQ ID NO: 624953 - DNA, 75 bp, synthetic construct
  source 1..75: mol_type = other DNA
cctctcttcgtatggatttttttggttataacgcccgaattattcaacgatcagacaatacctgtgaacttacaa

SEQ ID NO: 624954 - DNA, 75 bp, synthetic construct
  source 1..75: mol_type = other DNA
aactgaccagacgacacaaacggcttacgctaaatcccgcgcatgggatggtaaagaggtggcgtctttgctggc

SEQ ID NO: 624955 - DNA, 75 bp, synthetic construct
  source 1..75: mol_type = other DNA
cgtcagcatcaacaacagcaccctgagccagaacgtgacatttatcgctgatgtcaggacggcgaagatagcgga

SEQ ID NO: 624956 - DNA, 75 bp, synthetic construct
  source 1..75: mol_type = other DNA
actgccagcatcaacagcagcagccagagccggaacgtcacgtttatcgccgatgtcaggacggcgcagatcgcg

SEQ ID NO: 624957 - DNA, 75 bp, synthetic construct
  source 1..75: mol_type = other DNA
gacggcacggtggagatctctgtcaccagccagacggcggggatcagtacagtcactgcaaccatcaacaacagc

SEQ ID NO: 624958 - DNA, 75 bp, synthetic construct
  source 1..75: mol_type = other DNA
ggaacgtgacgtttgtcgcggatgtcaggacggcgcagatcgcggtgctggaagtgacgcaggattacgccgtgg

SEQ ID NO: 624959 - DNA, 75 bp, synthetic construct
  source 1..75: mol_type = other DNA
tcaggacggcgaagatcgctgatctggtggtcattaaggatggttcagaggcggacggttcgacggcgaacacgc

SEQ ID NO: 624960 - DNA, 75 bp, synthetic construct
  source 1..75: mol_type = other DNA
ggacggttcgacggcgaacacgctgcaggtgagggtgaccgatgcgttcgggaatgcgctgaatgggcagacggt

SEQ ID NO: 624961 - DNA, 75 bp, synthetic construct
  source 1..75: mol_type = other DNA
atcaacagcagcagtcagagccgggatgtgacatttatcgccgatgtcaggacggcgcagatcgcggatctggtg

SEQ ID NO: 624962 - DNA, 75 bp, synthetic construct
  source 1..75: mol_type = other DNA
gtcaggacggcgaagatcgctgatctggtggtcacccgggataactcagtggctgacggcgcaatggcgaacacg

SEQ ID NO: 624963 - DNA, 75 bp, synthetic construct
  source 1..75: mol_type = other DNA
gcatgggttgccgaggaaaatctggttgccagtctgaaattaaaaacatgggcagcggagattaagtcctcatta

SEQ ID NO: 624964 - DNA, 75 bp, synthetic construct
  source 1..75: mol_type = other DNA
agcagccagagccggaacgtgacgtttatcgccgatgtcaggacggcgcagatcgcggatctggtggtcattaag

SEQ ID NO: 624965 - DNA, 75 bp, synthetic construct
  source 1..75: mol_type = other DNA
catgcgcattcggatactgccacgtccctgatcctgccgaacgttaaaactattccatacaccctgggggcattg

SEQ ID NO: 624966 - DNA, 75 bp, synthetic construct
  source 1..75: mol_type = other DNA
aatacgcttgccgggcagacggtcagcgtgttggcggacaacggcgcaacggtcgctccgactgtcatcacaggg

SEQ ID NO: 624967 - DNA, 75 bp, synthetic construct
  source 1..75: mol_type = other DNA
taaagggaatgatgttgtatttaaattcaagattaaaaaatggtttactagtttaggtgctagcagtagtaatac

SEQ ID NO: 624968 - DNA, 75 bp, synthetic construct
  source 1..75: mol_type = other DNA
aattgcgtcattatcctgcggtttgtatccgggatacctccgttaacttccccccaatgcaagcctggttgttgg

SEQ ID NO: 624969 - DNA, 75 bp, synthetic construct
  source 1..75: mol_type = other DNA
aaggtcgactgcccaattgacggtgacttggatgagctgtgcctgagcttcttcaacgaagtagacaagatcctg

SEQ ID NO: 624970 - DNA, 75 bp, synthetic construct
  source 1..75: mol_type = other DNA
gatcattcaggtcggcacccaccgggccagcaagttcttccagcgcacgttccgggctgctcggcgggtctccgg

SEQ ID NO: 624971 - DNA, 75 bp, synthetic construct
  source 1..75: mol_type = other DNA
cggccgcatctgggagaattatatgaggcgtataaaatgacacttgcagatatgaaaccggaatatatctgctcc

SEQ ID NO: 624972 - DNA, 75 bp, synthetic construct
  source 1..75: mol_type = other DNA
cttattaataataaaaaaatacaagtgcgttatctttgggataagacaaattatggtgttgcaaaaggtcgacgg

SEQ ID NO: 624973 - DNA, 75 bp, synthetic construct
  source 1..75: mol_type = other DNA
tattgattgcgctggctgtggtgggttatttcctgcatctgaaacgttattgtcgggcgttccgccaggacagag

SEQ ID NO: 624974 - DNA, 75 bp, synthetic construct
  source 1..75: mol_type = other DNA
accttaagctcaatctgtatggaataaacgaatatgcgcttaaacccgcagggaaattcgaaacggatgatagcc

SEQ ID NO: 624975 - DNA, 75 bp, synthetic construct
  source 1..75: mol_type = other DNA
acctttcctggtgcaaacagaagttatctacaatcaagtaacaccgatgttgctgccgcagcagctataagtatt

SEQ ID NO: 624976 - DNA, 75 bp, synthetic construct
  source 1..75: mol_type = other DNA
attccattcttgatgcacatgaccaggcattccagcgtcagagcaggatagcgacagctctgctcattctgattg

SEQ ID NO: 624977 - DNA, 75 bp, synthetic construct
  source 1..75: mol_type = other DNA
atgaacaatgtattaattgttgatgacgatatattagtagctgatgtgattcgtcgcattgtagaacaaaccccg

SEQ ID NO: 624978 - DNA, 75 bp, synthetic construct
  source 1..75: mol_type = other DNA
cgaccacatctgggagaattatatgaggcgtataaaacgacactgacagatatgaaaccagaatatatcgaaccc

SEQ ID NO: 624979 - DNA, 75 bp, synthetic construct
  source 1..75: mol_type = other DNA
ccaggcaacactacgcggagagagcaaaccacgcgtactggagttacttctggcgcaggccagaacacgtaactc

SEQ ID NO: 624980 - DNA, 75 bp, synthetic construct
  source 1..75: mol_type = other DNA
aactttcaagtgctttggatagtattgatgttaacaaaactacaacggatgtaagcatccttaatcgaagtatta

SEQ ID NO: 624981 - DNA, 75 bp, synthetic construct
  source 1..75: mol_type = other DNA
aaattccacataaaaataaaaagataaatctagacttagaatttgatacttatttgtttatcggggctggaatgg

SEQ ID NO: 624982 - DNA, 75 bp, synthetic construct
  source 1..75: mol_type = other DNA
agtcatcctgtttacctctttctcaggaagtttagtctccaggattcccggggcggttcactacgactatttttt

SEQ ID NO: 624983 - DNA, 75 bp, synthetic construct
  source 1..75: mol_type = other DNA
tctcctacagcggttcctttcgaaaacgtggggactggggcagatacccggtggcatatttgtgaccccggcggt

SEQ ID NO: 624984 - DNA, 75 bp, synthetic construct
  source 1..75: mol_type = other DNA
gtcagcacgacaggtgtaccaccagaaaccgggcgatttgaagccacggcaacggtgagaataaattttgattaa

SEQ ID NO: 624985 - DNA, 75 bp, synthetic construct
  source 1..75: mol_type = other DNA
aaaagtatgatcttgttggtaaccagcacaatgaagttctggaaatggctaggcaagaatctgccctttttaata

SEQ ID NO: 624986 - DNA, 75 bp, synthetic construct
  source 1..75: mol_type = other DNA
cttatagcgggcagtgtcataccactcaggggaatccgtatattggcgtcaattttggcgttaaaaccctggagg

SEQ ID NO: 624987 - DNA, 75 bp, synthetic construct
  source 1..75: mol_type = other DNA
aaattaatgactatcttgccgccagggttttattacaggttaaaggtaattctcctacggcggttccattcgaaa

SEQ ID NO: 624988 - DNA, 75 bp, synthetic construct
  source 1..75: mol_type = other DNA
gaaaattaacagggattcgttctgaatacgttaatcaaggtatagctttgtcagcgttgaaggaggcgtgctgct

SEQ ID NO: 624989 - DNA, 75 bp, synthetic construct
  source 1..75: mol_type = other DNA
gagctctggagagtatttactccttaatatactagattatatttattacagaataacctatccatccaagcagag

SEQ ID NO: 624990 - DNA, 75 bp, synthetic construct
  source 1..75: mol_type = other DNA
ttattggaatggatgtcacttctgtgtttcgcccagaaaaaatgacgaatttgatcaatataaaaacaggttggt

SEQ ID NO: 624991 - DNA, 75 bp, synthetic construct
  source 1..75: mol_type = other DNA
ctggtacaaaattaatgactatcttgccgccaaagttttattgcaggttaaaggcagttctcctactgcggttcc

SEQ ID NO: 624992 - DNA, 75 bp, synthetic construct
  source 1..75: mol_type = other DNA
gcttataccggacagtgccatgttacgcaggggaacccttatattggcgttaattttggcgttaaaactctcgac

SEQ ID NO: 624993 - DNA, 75 bp, synthetic construct
  source 1..75: mol_type = other DNA
tctcctactgcggttcctttcgaaaacgtgggcacaggggcagatacacgatggcatatttgcgatcccggcggt

SEQ ID NO: 624994 - DNA, 75 bp, synthetic construct
  source 1..75: mol_type = other DNA
gtttgccgtagctaaaggttttgctattgcacaatcaatcatttcgatacagcaaggtattgccgaatgtatgaa

SEQ ID NO: 624995 - DNA, 75 bp, synthetic construct
  source 1..75: mol_type = other DNA
atttaggtttagatattaatgagtatgcacagtttcttaataaaccagatggtggtattcaggcaactttacacc

SEQ ID NO: 624996 - DNA, 75 bp, synthetic construct
  source 1..75: mol_type = other DNA
tgagtgagttgtcatcaagtgaaggtgaactacgtctaaaaacttttgaccgtcagcaattagaattacaaaaga

SEQ ID NO: 624997 - DNA, 75 bp, synthetic construct
  source 1..75: mol_type = other DNA
gcaacccctctatgaatacaaatgcgcctataagcctacaagtgctcggtgagttatatggatatcaaagatatt

SEQ ID NO: 624998 - DNA, 75 bp, synthetic construct
  source 1..75: mol_type = other DNA
cgatatggattaatgagttcgggaactggggatgagatgggagcctctgtctctgattattttaaaaagatgcag

SEQ ID NO: 624999 - DNA, 75 bp, synthetic construct
  source 1..75: mol_type = other DNA
taaaatgattgctgagaaaaagaaacgtgaacggaaagcaaatcagtggttgcagcagcagattcttgcagaaca

SEQ ID NO: 625000 - DNA, 75 bp, synthetic construct
  source 1..75: mol_type = other DNA
cgccaaaaatccgcgcactgaatgacaagcgtaaaaaccagatccgaacgttctggcgcaaagccggagtgataa

SEQ ID NO: 625001 - DNA, 75 bp, synthetic construct
  source 1..75: mol_type = other DNA
gccgcacgatttaagtttgacccgtcgcgatctgattaaagtgagcgccgcaacggcggcgaccgccgtggttta

SEQ ID NO: 625002 - DNA, 75 bp, synthetic construct
  source 1..75: mol_type = other DNA
gtgaacggcaaaaccgagcagcttgaggtggatacccgaaccacgctactggacgctttgcgtgaaaatctgcat

SEQ ID NO: 625003 - DNA, 75 bp, synthetic construct
  source 1..75: mol_type = other DNA
gattgaagaagtaccaggatcattaggtaaagatcggaacctggattttacaagctggcgagcgtgtggtgtcca

SEQ ID NO: 625004 - DNA, 75 bp, synthetic construct
  source 1..75: mol_type = other DNA
gttatgatatggatgctattgttggcggagctcataatggggccgccgatgcaatgagacattgttacttgatgt

SEQ ID NO: 625005 - DNA, 75 bp, synthetic construct
  source 1..75: mol_type = other DNA
gaatcagggctgtactataaccgtcaccggtactacgatccgttgcaggggcggtatatcaccccggacccgatt

SEQ ID NO: 625006 - DNA, 75 bp, synthetic construct
  source 1..75: mol_type = other DNA
aaaacgcgatggtaatgcaactgtgaaacccggcggatttaaggctacctgtagtggtcaagtaatactggccac

SEQ ID NO: 625007 - DNA, 75 bp, synthetic construct
  source 1..75: mol_type = other DNA
tgcccgtcaggatcaataactgtctcatttatcaggttcgccatgccctgcagaattattccctgctggtcaaca

SEQ ID NO: 625008 - DNA, 75 bp, synthetic construct
  source 1..75: mol_type = other DNA
gtggcctgactgaaccccgcctgccgcgttcggcgctggcggtacgcgttaccgctgtgatgctgctctgttttc

SEQ ID NO: 625009 - DNA, 75 bp, synthetic construct
  source 1..75: mol_type = other DNA
tctgctggataaatatcgtaaagtgccccccgtacctgttcatgctgatattccggtcggtgcagtgagcgatgt

SEQ ID NO: 625010 - DNA, 75 bp, synthetic construct
  source 1..75: mol_type = other DNA
cgcgtggatattggcaacctgcattatattgataccggtgctgtctttgggggcgaactgactcttgtgcaattg

SEQ ID NO: 625011 - DNA, 75 bp, synthetic construct
  source 1..75: mol_type = other DNA
gtgtgcggctacgaccatgaaaaatcaatggtgattaccgctcacggttttgccatgccggttaaacaggcgttt

SEQ ID NO: 625012 - DNA, 75 bp, synthetic construct
  source 1..75: mol_type = other DNA
gcgttgctgttccgccggatggcgctggttgaactggcggtgctggtggtgattattgtttcacgaggagcctga

SEQ ID NO: 625013 - DNA, 75 bp, synthetic construct
  source 1..75: mol_type = other DNA
agcgatcatctggttgagctggtcacggagctacgcgacatacacaacatgacgttctgcatgatcgctgaacac

SEQ ID NO: 625014 - DNA, 75 bp, synthetic construct
  source 1..75: mol_type = other DNA
gacaccctgaatatcatcagcgccggggtacaggatatgcagcaggtgctggcgcaactccgcgtggaaaatcag

SEQ ID NO: 625015 - DNA, 75 bp, synthetic construct
  source 1..75: mol_type = other DNA
ggtatgccaattactgtccggcataacatggttgactcaggaaaaatggcagatgggcacagattatatgaaact

SEQ ID NO: 625016 - DNA, 75 bp, synthetic construct
  source 1..75: mol_type = other DNA
ttcccctattatctgtcgtatgcgggagctgctaacctggtgacgttagtattcttcccacgcttagttaaatca

SEQ ID NO: 625017 - DNA, 75 bp, synthetic construct
  source 1..75: mol_type = other DNA
ctgtaatcttatttctctttagtgcgcatctgtttgaaggtactactcagattgtctttgtttgcgtgacctaca

SEQ ID NO: 625018 - DNA, 75 bp, synthetic construct
  source 1..75: mol_type = other DNA
ctggtgtggctccggcacatgtaaagccatggacacagcaggaggatgaacttttagccacgttataccactccc

SEQ ID NO: 625019 - DNA, 75 bp, synthetic construct
  source 1..75: mol_type = other DNA
gagcgtcaaaaatctgtgcttggtgtggccccgtcgattcatgttattgccaggcaactgatggacaaggcactt

SEQ ID NO: 625020 - DNA, 75 bp, synthetic construct
  source 1..75: mol_type = other DNA
cagagccggacggcacggtggaaatcagtgtcaccagccagacggcggggatcagtactgtcactgccagcatca

SEQ ID NO: 625021 - DNA, 75 bp, synthetic construct
  source 1..75: mol_type = other DNA
ttaacccacaatatgaaaaacacggattataattggaccagcggtatacagggtattcaggtcgatagtaatggc

SEQ ID NO: 625022 - DNA, 75 bp, synthetic construct
  source 1..75: mol_type = other DNA
aacacgctgcgggtgaaggtcaccgatgcgttcggtaatacgcttgccgggcagacggtcagcgtgttggcaggc

SEQ ID NO: 625023 - DNA, 75 bp, synthetic construct
  source 1..75: mol_type = other DNA
cagtcagcgtgttggcggataacggcgcaacggtcgcttcgacggtcaccacagggcaggacggcacggtggaga

SEQ ID NO: 625024 - DNA, 75 bp, synthetic construct
  source 1..75: mol_type = other DNA
cgcttgccgggcagacggtcagcgtgatggcggacaacggtgctacggtcactccgactgtcatcacagggccgg

SEQ ID NO: 625025 - DNA, 75 bp, synthetic construct
  source 1..75: mol_type = other DNA
tattggctcgacagcggtatgatattttatccaggagatggtcatctctcgatagcgtcacgttcatccgcattg

SEQ ID NO: 625026 - DNA, 75 bp, synthetic construct
  source 1..75: mol_type = other DNA
gacgtttgttgcagatgtcaggacggcgaagatcgctgatctggtagtcacccgggataactcagtggcagacgg

SEQ ID NO: 625027 - DNA, 75 bp, synthetic construct
  source 1..75: mol_type = other DNA
ggtgagggtgacggatgcgttcggtaatgcgctgggcgggcagacggtcagcgtgttggcggacaacggcgcaac

SEQ ID NO: 625028 - DNA, 75 bp, synthetic construct
  source 1..75: mol_type = other DNA
aacacgctgcgggtgagggtgacggatgcgttcggtaatacgcttgccggacagacggtcagcgtgttggcggac

SEQ ID NO: 625029 - DNA, 75 bp, synthetic construct
  source 1..75: mol_type = other DNA
taaatttacactgatattaacccacaatatgaaaaacacggattataattggaccagtggcatacagggtattca

SEQ ID NO: 625030 - DNA, 75 bp, synthetic construct
  source 1..75: mol_type = other DNA
caaagacagtatatggcgcattttgcggaagcgaacttgaatgcgcaactgaagatggctggttggagcgatgcc

SEQ ID NO: 625031 - DNA, 75 bp, synthetic construct
  source 1..75: mol_type = other DNA
aatggcgaacacgctgcgggtgagggtcacagatgcgttcgggaatacgcttgccgggcagacggtcagcgtgac

SEQ ID NO: 625032 - DNA, 75 bp, synthetic construct
  source 1..75: mol_type = other DNA
ggtaacattattaatgtacaaactgccgtgcgtaattactcagattatatatactatgaattacaagctgtatat

SEQ ID NO: 625033 - DNA, 75 bp, synthetic construct
  source 1..75: mol_type = other DNA
cagtcaatgtacgtggtatgcgtctttatagtgatagccgtatgctaccatccgcactggccagctatgcgccaa

SEQ ID NO: 625034 - DNA, 75 bp, synthetic construct
  source 1..75: mol_type = other DNA
tgctggaggtgttgtgcaaattggcctgacgttaatggctgaatgtttcccttacgctaaaggtaaagctacagg

SEQ ID NO: 625035 - DNA, 75 bp, synthetic construct
  source 1..75: mol_type = other DNA
aagatttttaggtgtgcctgcaaagcaagaaagcaacaaagagaattcatctttaacttttacagtaggtcaaag

SEQ ID NO: 625036 - DNA, 75 bp, synthetic construct
  source 1..75: mol_type = other DNA
tgctttacagcgtgatgccttgattgctgccggggtgctccccggaatttacatcaggattatttatcattttat

SEQ ID NO: 625037 - DNA, 75 bp, synthetic construct
  source 1..75: mol_type = other DNA
tctgccagaatggctgcgtctgcggtcagtctctgggggaagtgcgtgttccacaccggggaaatgtggtggaga

SEQ ID NO: 625038 - DNA, 75 bp, synthetic construct
  source 1..75: mol_type = other DNA
aggctataacacggttgcaaacaaggaagcaacccggaatgccgccgccctgttctctgttgactataaagcgtt

SEQ ID NO: 625039 - DNA, 75 bp, synthetic construct
  source 1..75: mol_type = other DNA
gttcatctaatgacatgcaaaaattaaatgagttaatattttcagagccagatagcacattaacagttacggact

SEQ ID NO: 625040 - DNA, 75 bp, synthetic construct
  source 1..75: mol_type = other DNA
ttacagctacagcaccaccggcaggctgaccggcgttcacaccaccgcagcgaatctggatatccgcatcccgta

SEQ ID NO: 625041 - DNA, 75 bp, synthetic construct
  source 1..75: mol_type = other DNA
aaagacacgcagggccatgaaatgcggtatgaatacaacgccgccggtgacctgaccgccgtcattgccccggac

SEQ ID NO: 625042 - DNA, 75 bp, synthetic construct
  source 1..75: mol_type = other DNA
gaagctgaaaatgttctagtattatcttcaccatcaatagttaaaatagaaccaggagagtctcaaatagtaaga

SEQ ID NO: 625043 - DNA, 75 bp, synthetic construct
  source 1..75: mol_type = other DNA
tgacagagttgtttggatcgaaaaccataaactccgcgaaattggctcagcagagagaatcattgaactttacaa

SEQ ID NO: 625044 - DNA, 75 bp, synthetic construct
  source 1..75: mol_type = other DNA
gaacaaggtaaaaccatcaagatcactcttgacacccctgcaagtgcggatgcaatcgtctggaaagcttctctg

SEQ ID NO: 625045 - DNA, 75 bp, synthetic construct
  source 1..75: mol_type = other DNA
ctggcgcggggaactctataagcttgttggtgaagacattgatatgaccggtttatccccgctggcgcggggaac

SEQ ID NO: 625046 - DNA, 75 bp, synthetic construct
  source 1..75: mol_type = other DNA
tgcaaccaatatttttgcccctgctccgaaagtctagataaagaaatgtctctgacatttcatattacctacact

SEQ ID NO: 625047 - DNA, 75 bp, synthetic construct
  source 1..75: mol_type = other DNA
cagtgctatcgacgccattaatgcaggcatttatatactggaatttatggaacaggttgtcaggccagcgctggg

SEQ ID NO: 625048 - DNA, 75 bp, synthetic construct
  source 1..75: mol_type = other DNA
gaaggtgatgatgtgagaaccgcacagaaagattcgataaggaaatcgataacggcagtgaaaaaaaaacgggag

SEQ ID NO: 625049 - DNA, 75 bp, synthetic construct
  source 1..75: mol_type = other DNA
gtacagtggcacgtctcatggcggttatgggacttgccggtgttctccggggtaaatgggcccgtcgtccgtctg

SEQ ID NO: 625050 - DNA, 75 bp, synthetic construct
  source 1..75: mol_type = other DNA
cttgattattataactggaatgtaatatttattgtaatgggtgcatttagcattctaaccatactcctgtcacct

SEQ ID NO: 625051 - DNA, 75 bp, synthetic construct
  source 1..75: mol_type = other DNA
ccttgatatgtgtgagataaagaattgcaattttaacaattcagagatgaatttcatttcgtgcgtcgggacaaa

SEQ ID NO: 625052 - DNA, 75 bp, synthetic construct
  source 1..75: mol_type = other DNA
tctactctatgttgcgcgcaatattgcttcatcttttgctacggttcacgagcacgggcacgtcgtgggtgacgt

SEQ ID NO: 625053 - DNA, 75 bp, synthetic construct
  source 1..75: mol_type = other DNA
gtgtgagaaatgccgctcaatggttgcccatggcattaacccggcacaaaagaagcaggaagaaaaacttaaaca

SEQ ID NO: 625054 - DNA, 75 bp, synthetic construct
  source 1..75: mol_type = other DNA
aacttcgcggatttaaagcctggctaattctgctttacggcattttgctatgcttgtcgccactgttgaagctga

SEQ ID NO: 625055 - DNA, 75 bp, synthetic construct
  source 1..75: mol_type = other DNA
agattgaagagggtacgcatgcgctgcccaaaaaaaagccagaagatgattttattaactggcttaaagaaaaat

SEQ ID NO: 625056 - DNA, 75 bp, synthetic construct
  source 1..75: mol_type = other DNA
cacgataattttggccttgcgttgctgatttttcacgtcttgtttggtggccggcatccttattctggtgtgccg

SEQ ID NO: 625057 - DNA, 75 bp, synthetic construct
  source 1..75: mol_type = other DNA
atagcgactcctttcagattaacgccaatggcacactgcatttatgcgaagtcggcgtgtcgcattttacgccgc

SEQ ID NO: 625058 - DNA, 75 bp, synthetic construct
  source 1..75: mol_type = other DNA
acaccgtaagagctggaaaaaccgtgcagaagtggaactggccacactcacgtgggtggactggtataacaatcg

SEQ ID NO: 625059 - DNA, 75 bp, synthetic construct
  source 1..75: mol_type = other DNA
tcgatttttcattattcaaacccatacttgattcaattattgaaatcaaaaaacattttatcaatctacacccat

SEQ ID NO: 625060 - DNA, 75 bp, synthetic construct
  source 1..75: mol_type = other DNA
atagtaagggaaaatagaaaaactatcgatttttcattattcaaacccatacttgattcaattattgaaatcaaa

SEQ ID NO: 625061 - DNA, 75 bp, synthetic construct
  source 1..75: mol_type = other DNA
cagcggctgccgcacgtcgcccagcgcgcagcacgcgatcatgtgcggaccgtgaaaaagaatctccacgatatc

SEQ ID NO: 625062 - DNA, 75 bp, synthetic construct
  source 1..75: mol_type = other DNA
aactgatcgtgactcagaacttttaatggtcgggaaaagtattgctgattctgaattacctgtaatattagcggg

SEQ ID NO: 625063 - DNA, 75 bp, synthetic construct
  source 1..75: mol_type = other DNA
ttctaatgagaaagaaaacgaaccaggtaagatattggtagaagaaattcatcgtgcaggcttcactttaaacca

SEQ ID NO: 625064 - DNA, 75 bp, synthetic construct
  source 1..75: mol_type = other DNA
acccttagtgaattagaagggcgatttgcatttatcgatatgcttgataaatataataatgtggaagcaaagaaa

SEQ ID NO: 625065 - DNA, 75 bp, synthetic construct
  source 1..75: mol_type = other DNA
cccgctgcgcccgctgggttacaaagaaggcatcgtgacgctgatggaatttacctggacgcacggctgtgtgat

SEQ ID NO: 625066 - DNA, 75 bp, synthetic construct
  source 1..75: mol_type = other DNA
aagaggcggggctggtacagcttgcgcagcagcagtaccggatgttgttcaggatgggattgcagatgatggtgg

SEQ ID NO: 625067 - DNA, 75 bp, synthetic construct
  source 1..75: mol_type = other DNA
cggcgaatattaaaggattaacctttacctacgaaccaaaagtattgcgtcacttcaccgcaaaactgaaagaag

SEQ ID NO: 625068 - DNA, 75 bp, synthetic construct
  source 1..75: mol_type = other DNA
ctggcagagaatgtccggaatgacgaggttatctttgcggagattaaggcaatggtatacgggccgacgttccat

SEQ ID NO: 625069 - DNA, 75 bp, synthetic construct
  source 1..75: mol_type = other DNA
aaaaggggtaagctgaaatcgtttatggattacatcgacatatgcctggcagagaatgtccggaatgacgaggtt

SEQ ID NO: 625070 - DNA, 75 bp, synthetic construct
  source 1..75: mol_type = other DNA
tgctcattgtaaacaacataacattgttagtgagtttattcgatttcatccatttaataaattagcagagaacag

SEQ ID NO: 625071 - DNA, 75 bp, synthetic construct
  source 1..75: mol_type = other DNA
gttacctgctgcaggtgaagcagcgtgacggtgagtttgtgccagggggaacctgggcacgtgacagtaagaaca

SEQ ID NO: 625072 - DNA, 75 bp, synthetic construct
  source 1..75: mol_type = other DNA
gccaggaagccagccgggatgatcgtgctgtgctggccgccttactgacggcacagagccactgccagcttaagg

SEQ ID NO: 625073 - DNA, 75 bp, synthetic construct
  source 1..75: mol_type = other DNA
caggtgactgaaatgcgcaataagccacagaacgctccccgcagaaatcacaacgcaccacgccccggcgtataa

SEQ ID NO: 625074 - DNA, 75 bp, synthetic construct
  source 1..75: mol_type = other DNA
ggaacgcattctgacgcaggtcaccgccccggaaaagcgtccggcggcactgcaacaggaactcggcttcagtcg

SEQ ID NO: 625075 - DNA, 75 bp, synthetic construct
  source 1..75: mol_type = other DNA
cacgggtccaagcggagtttacccggaggacgggataaagactgcgaaaaaattcactggcaaactgtcttatgg

SEQ ID NO: 625076 - DNA, 75 bp, synthetic construct
  source 1..75: mol_type = other DNA
aactggtgatatagttctcgtagcgacgcgtacagaacatactaaccttcgtgggttggatattactgttagttg

SEQ ID NO: 625077 - DNA, 75 bp, synthetic construct
  source 1..75: mol_type = other DNA
ttatccaccaggcgaattgccttcaccaccgactcctttgttgccacgccgctgattttcggcaacggtgatatt

SEQ ID NO: 625078 - DNA, 75 bp, synthetic construct
  source 1..75: mol_type = other DNA
acgcaactgtactaccagtacaggaaaatttataccaagtatataacatcgaagatgatctatcgggaatggtaa

SEQ ID NO: 625079 - DNA, 75 bp, synthetic construct
  source 1..75: mol_type = other DNA
caatgatttttttgaatgctttcggtcaaagtataattacatccggtggggtggtgttcaaaggtatcatagaac

SEQ ID NO: 625080 - DNA, 75 bp, synthetic construct
  source 1..75: mol_type = other DNA
ccagccgcgggcaatacgccggatggatatcccgaagccggatggcggcgtgagaaccttaggcatccctagcag

SEQ ID NO: 625081 - DNA, 75 bp, synthetic construct
  source 1..75: mol_type = other DNA
gtgtgtggtaaggctacaacgatgagttcagccattcagtatctgatacagcaatatgggattttagatagtaag

SEQ ID NO: 625082 - DNA, 75 bp, synthetic construct
  source 1..75: mol_type = other DNA
aggactggatacctccggccagctggaggccggtcaggcgctctattggctacgccagttgctggcccggcactg

SEQ ID NO: 625083 - DNA, 75 bp, synthetic construct
  source 1..75: mol_type = other DNA
ctcgcggtcaggtgccacctaacccgtctgaactgctgatgcgcgatcggatgcgtcaattactggaatgggcga

SEQ ID NO: 625084 - DNA, 75 bp, synthetic construct
  source 1..75: mol_type = other DNA
cgtggtgaaaagggagacaagggggaccggggggataccgggcctcagggagaaaaaggtgagaaaggcgatacc

SEQ ID NO: 625085 - DNA, 75 bp, synthetic construct
  source 1..75: mol_type = other DNA
atttaaagctccgtccacgggtgttggtgcatcgccgagtatttctttcagtgacgctgacgggaatgaagttgc

SEQ ID NO: 625086 - DNA, 75 bp, synthetic construct
  source 1..75: mol_type = other DNA
ctgtataaggccagcagggagccccgtgcagccatggcgctgagaaaaatcgcgggtctttatcgcattgagaag

SEQ ID NO: 625087 - DNA, 75 bp, synthetic construct
  source 1..75: mol_type = other DNA
tttattgtttctacgcattcacctttcgtaatccaatcagtatctgatgcgattatatttaatctctcaacattg

SEQ ID NO: 625088 - DNA, 75 bp, synthetic construct
  source 1..75: mol_type = other DNA
ttctgaaattttctcatatcttaagattggtgttgccatatggtgttgtttgatcatgcaacaggtcactatgaa

SEQ ID NO: 625089 - DNA, 75 bp, synthetic construct
  source 1..75: mol_type = other DNA
cggccgcacacagcgttatcaccacgacctgaccggcaaacttatccgcagcgaggatgaggggctggtcaccca

SEQ ID NO: 625090 - DNA, 75 bp, synthetic construct
  source 1..75: mol_type = other DNA
atgaagaaagagaaggggatgactcttcttgaagtgtcgttggccctaatagtaactacatcagtaatggttaca

SEQ ID NO: 625091 - DNA, 75 bp, synthetic construct
  source 1..75: mol_type = other DNA
agtggcagtatgacggccacggctggctgagagaaatcagccacctgagcgaaggccaccgtgtcgctgtccact

SEQ ID NO: 625092 - DNA, 75 bp, synthetic construct
  source 1..75: mol_type = other DNA
aagatgagttcatcgatatgaagtttatcacacgccttactggcctgagtgataaatggttctataagttgatac

SEQ ID NO: 625093 - DNA, 75 bp, synthetic construct
  source 1..75: mol_type = other DNA
gccgtaaccgtcgtcgctacagcacatattgcagagaaatcggaccggctgctgataattttatcgccagagatt

SEQ ID NO: 625094 - DNA, 75 bp, synthetic construct
  source 1..75: mol_type = other DNA
tctttaaaaggaacgatgagccttacacattaaatcttgatggtaagaatctaataatatcaggagataatggct

SEQ ID NO: 625095 - DNA, 75 bp, synthetic construct
  source 1..75: mol_type = other DNA
gacacgctgcccgccggtacagagtacggtgccgatatccactggcaccaatacgttacactgatccactggggt

SEQ ID NO: 625096 - DNA, 75 bp, synthetic construct
  source 1..75: mol_type = other DNA
cgttatcttcccctgacagtccccgccctctctcagctccttccttccccgacacgctgcccgccggtacagagt

SEQ ID NO: 625097 - DNA, 75 bp, synthetic construct
  source 1..75: mol_type = other DNA
atcaacagggctggttgcatcgtaaaggtgccacgccggatgacaacggtctggtgattattcccggttcactcg

SEQ ID NO: 625098 - DNA, 75 bp, synthetic construct
  source 1..75: mol_type = other DNA
agtgaagctactaaagagacttctaaagcatctgacttagaggaagataaaaactctgatgtgattaacattagt

SEQ ID NO: 625099 - DNA, 75 bp, synthetic construct
  source 1..75: mol_type = other DNA
aaggctttcagcccttcttcgcctgccagacccgcgtgcgcgaccagagccgccgggaatacaccaaacacatgc

SEQ ID NO: 625100 - DNA, 75 bp, synthetic construct
  source 1..75: mol_type = other DNA
tggcaacggaaatacttccacgcagacttcacccggccttgagcaatttggtgctgatgtcggtaaatatattga

SEQ ID NO: 625101 - DNA, 75 bp, synthetic construct
  source 1..75: mol_type = other DNA
tcagggtggatcaccacaggcagccagtcagggaaccgccggagcagcaggcaggcagcttaaggatgccatcac

SEQ ID NO: 625102 - DNA, 75 bp, synthetic construct
  source 1..75: mol_type = other DNA
tcgcgtgaaactcagcgtgccttggctgaggtaactagtcaaataaacaccgcgaaggcctcagcactgggaatg

SEQ ID NO: 625103 - DNA, 75 bp, synthetic construct
  source 1..75: mol_type = other DNA
aggggtatgaagccggacaaaatgcccgtcttcatcagggtgtcagcggccggggtccggcagccattggttacc

SEQ ID NO: 625104 - DNA, 75 bp, synthetic construct
  source 1..75: mol_type = other DNA
ggtattttcacctccttcggtatctggctgttttatgcttttgacgaatgttctattacaaaagttgaatggctt

SEQ ID NO: 625105 - DNA, 75 bp, synthetic construct
  source 1..75: mol_type = other DNA
caggtaaatggatattttatgggaagtcttaaccaggatggtttatcgaatgataatatccagattggccttcaa

SEQ ID NO: 625106 - DNA, 75 bp, synthetic construct
  source 1..75: mol_type = other DNA
gtataggagtgtcaacaaaaactatcctaagtacggtcagtcaaagacttcctgattatattatccaaacggaat

SEQ ID NO: 625107 - DNA, 75 bp, synthetic construct
  source 1..75: mol_type = other DNA
tggcagccaaagtgcaaaacagaagctgaggcaggtctccggtaaagagatgagacgggtaaaacagaccaacca

SEQ ID NO: 625108 - DNA, 75 bp, synthetic construct
  source 1..75: mol_type = other DNA
gtcggaataatggttaaatatgttaaccctgcttacagcagtcagagttgctcgtgctgcggctgtctgggtaaa

SEQ ID NO: 625109 - DNA, 75 bp, synthetic construct
  source 1..75: mol_type = other DNA
catctggggctaaggttcttggcggtattagaattggcgacaatgttattgtcgctgctaatgctgttgtaatgc

SEQ ID NO: 625110 - DNA, 75 bp, synthetic construct
  source 1..75: mol_type = other DNA
aaggctcggcgctacccgttggtgtgcctgttccgtggcccaccgccacaccgccagcaggctggttacagtgca

SEQ ID NO: 625111 - DNA, 75 bp, synthetic construct
  source 1..75: mol_type = other DNA
cctggaaaaagatatccagctggtttgtagggccgccaataatacgaaaatcaatcctggcggagaacagcatat

SEQ ID NO: 625112 - DNA, 75 bp, synthetic construct
  source 1..75: mol_type = other DNA
ctgcaaacgcgtcaggccgaacgtcaggctcgtctggatgctgctgcacagttggaaaaagtcgcagacggtcgc

SEQ ID NO: 625113 - DNA, 75 bp, synthetic construct
  source 1..75: mol_type = other DNA
gcagtgtggcggaggctgaatcggtggcgaaagcggaagaccccattacgctgcctccggatgagcagcagaagc

SEQ ID NO: 625114 - DNA, 75 bp, synthetic construct
  source 1..75: mol_type = other DNA
acttactgaatgaaaaagacggtatacttaaaaaaattaatgatattgaatatcatggtatctcagagggaacca

SEQ ID NO: 625115 - DNA, 75 bp, synthetic construct
  source 1..75: mol_type = other DNA
tttaaatgatttttttatcaataattctaatatgttttcctggtattttcctcagttgcttgagcagtataaact

SEQ ID NO: 625116 - DNA, 75 bp, synthetic construct
  source 1..75: mol_type = other DNA
gccttttatgccgaatcggatgtgcagcgtgcggactggcagaaagggctgcaggagggattcagtaactgggtg

SEQ ID NO: 625117 - DNA, 75 bp, synthetic construct
  source 1..75: mol_type = other DNA
gaacgggtgcgtctgtggccagtctctgggggaagtgcgtgttccacaccggggaaatgtggtggagaaagttat

SEQ ID NO: 625118 - DNA, 75 bp, synthetic construct
  source 1..75: mol_type = other DNA
cactatgtgccggggattttcggggaagagaaacacacgtcccgaagccagaactatacgtacatccccaccatc

SEQ ID NO: 625119 - DNA, 75 bp, synthetic construct
  source 1..75: mol_type = other DNA
gcaagcgcgaactggctctgtcccgccttaagggggaagcgcgtgagcgtgcccgactgggttatgctgcggatg

SEQ ID NO: 625120 - DNA, 75 bp, synthetic construct
  source 1..75: mol_type = other DNA
aaagaggcaaagatctaattaatgagattaagaacaagttgattgattacaatatatacacatatttcatctgct

SEQ ID NO: 625121 - DNA, 75 bp, synthetic construct
  source 1..75: mol_type = other DNA
ctgggggaagtgcgtgttccacaccggggagacgtagtggagaaagttattgaaggggcttacgaggtggtgggc

SEQ ID NO: 625122 - DNA, 75 bp, synthetic construct
  source 1..75: mol_type = other DNA
cacgatctgtatgtcagtttcgacgtcaaagacctacaaaaagcgatgttccgccagcagagtttcccgtcagtg

SEQ ID NO: 625123 - DNA, 75 bp, synthetic construct
  source 1..75: mol_type = other DNA
agcaaatagcagagaacacgaaacctgaccattctgctatttggattgctgtaatatcttcaatatcagctattg

SEQ ID NO: 625124 - DNA, 75 bp, synthetic construct
  source 1..75: mol_type = other DNA
atcataatcctgttacattagggcaaccaaatccagatatcccgctgaatgcggcatccagcgccatggatttag

SEQ ID NO: 625125 - DNA, 75 bp, synthetic construct
  source 1..75: mol_type = other DNA
atgaatggttcagcgcgtatgcgatggcaggcgtggcttacagccgtgtgtcgactttttccggggattatctcc

SEQ ID NO: 625126 - DNA, 75 bp, synthetic construct
  source 1..75: mol_type = other DNA
gatttgaattggctgcctctcagatgcaggatcactacccggaaatcgatcagatttgcaatgaagtcgccaagc

SEQ ID NO: 625127 - DNA, 75 bp, synthetic construct
  source 1..75: mol_type = other DNA
cttgaaactccgttgcgtttaaattttactgaaaatataaacagggtttatgatagtttttctatggatgcttgg

SEQ ID NO: 625128 - DNA, 75 bp, synthetic construct
  source 1..75: mol_type = other DNA
acggcagccagctgttgttgctgattcgttttttaatgcacgcgagaaattcgggtgtcctgaagtggaaagcat

SEQ ID NO: 625129 - DNA, 75 bp, synthetic construct
  source 1..75: mol_type = other DNA
tgcacggaattaatattcgctcagagaatgcagcaaaacctcatacgatgccctctagatatctttgcgagtata

SEQ ID NO: 625130 - DNA, 75 bp, synthetic construct
  source 1..75: mol_type = other DNA
gattgctagtgaattttataaattcacttcatctgatatttcaactgctggaataattaaacagttacgtttact

SEQ ID NO: 625131 - DNA, 75 bp, synthetic construct
  source 1..75: mol_type = other DNA
tatggctgtagaatttcataaacttgttaatggtgatgcggctaacgttatcaaacaaatacgtttactttacgg

SEQ ID NO: 625132 - DNA, 75 bp, synthetic construct
  source 1..75: mol_type = other DNA
caatcaacgcttactggaaaggctgggccatatccctccgtcagaagcagaaaaagcgtattatgcttccatcag

SEQ ID NO: 625133 - DNA, 75 bp, synthetic construct
  source 1..75: mol_type = other DNA
agtctggcgtcagttgttacgggaaggaatcagggtggccagatgtacagtggcacgtctcatggcggttatggg

SEQ ID NO: 625134 - DNA, 75 bp, synthetic construct
  source 1..75: mol_type = other DNA
actaccgtcagctggaaaaccgttgccgcaggtgaccgcgtaaaccgtcagtgcgtggcagaacgtcctgaccag

SEQ ID NO: 625135 - DNA, 75 bp, synthetic construct
  source 1..75: mol_type = other DNA
ctcggcaaactgggaaacctgctggggaacagcgggaagctgctgggggcaaagctcggcgcgttgctggggaaa

SEQ ID NO: 625136 - DNA, 75 bp, synthetic construct
  source 1..75: mol_type = other DNA
gttatgttgacaaacacccagataaggcgattgcatttgcttcactgggacaattacgttatttatctgcactca

SEQ ID NO: 625137 - DNA, 75 bp, synthetic construct
  source 1..75: mol_type = other DNA
tgcctgaactgcgtttacctggttcggtataaatatctggggttcagtggcgatctggttttcgttgactcaaaa

SEQ ID NO: 625138 - DNA, 75 bp, synthetic construct
  source 1..75: mol_type = other DNA
gcaatggtctcgtttccggaattgtcgatacaaaaacaacaacgcaaaacgaaattctgcgtcttgcgtctttgc

SEQ ID NO: 625139 - DNA, 75 bp, synthetic construct
  source 1..75: mol_type = other DNA
ttcccaacctgagccgggtggtaaaatataacgaaccgcgaatgccgtggccggaggtggttgctttgctgcaaa

SEQ ID NO: 625140 - DNA, 75 bp, synthetic construct
  source 1..75: mol_type = other DNA
ctacattgctcgcgatcgtccttgccacaacaatgccggttgcgcacgccgccctaccgaaagatatgctggtga

SEQ ID NO: 625141 - DNA, 75 bp, synthetic construct
  source 1..75: mol_type = other DNA
cggagggtgcctacgacgatgcgatcagacacgcgattactaaactgagttatttacatggaacttcaacagagg

SEQ ID NO: 625142 - DNA, 75 bp, synthetic construct
  source 1..75: mol_type = other DNA
acttaagatatgaaggtgcaggtcttgaaatgatctataacccgaaaacgggacaagttggtcatattcaaccag

SEQ ID NO: 625143 - DNA, 75 bp, synthetic construct
  source 1..75: mol_type = other DNA
aaaaccaagtgtatgagtggttaaaaaaacaaataatcattggtgaactctcatttggtacgaagatatctgaaa

SEQ ID NO: 625144 - DNA, 75 bp, synthetic construct
  source 1..75: mol_type = other DNA
agatcctgtcgatccggtaaccggcgcatactgcgacgaacgtaccgactttacgctgggccagacactccccct

SEQ ID NO: 625145 - DNA, 75 bp, synthetic construct
  source 1..75: mol_type = other DNA
ggcatgacggatagttatttaatgcgccttcacgatgagctaaaatcactgtatgaatgtggtctcaaacaccca

SEQ ID NO: 625146 - DNA, 75 bp, synthetic construct
  source 1..75: mol_type = other DNA
agctgtagaggccaaaaatgacgcctggaaagagcaaagaaatgcactttcaccggcagaaattaatgaactcag

SEQ ID NO: 625147 - DNA, 75 bp, synthetic construct
  source 1..75: mol_type = other DNA
aatgggcaaaaaacgttgctcttggtcgcatctctgaacctgatgatgttgctgcctgtgtgtcttatctggcca

SEQ ID NO: 625148 - DNA, 75 bp, synthetic construct
  source 1..75: mol_type = other DNA
ctttttcaaagatgatccctcaatggtggccgatttgtctcgtttcgaaaaaggacaaaaaataacgccaggggt

SEQ ID NO: 625149 - DNA, 75 bp, synthetic construct
  source 1..75: mol_type = other DNA
cccgtggttatgtcccccctgaacgttgggatgaagggatcaacgcgctattactgggatattcgtttagcgggg

SEQ ID NO: 625150 - DNA, 75 bp, synthetic construct
  source 1..75: mol_type = other DNA
gataaaaatccgggacaggaaagcatgccggtacgtctggccaaaccctacagtggtgatgcttatggttttcat

SEQ ID NO: 625151 - DNA, 75 bp, synthetic construct
  source 1..75: mol_type = other DNA
catacggatcaacaggatcggctattacagtttggctacaacacgcaaattaaagatctttcgctggggatttcc

SEQ ID NO: 625152 - DNA, 75 bp, synthetic construct
  source 1..75: mol_type = other DNA
gtggccgatttgtcccgtttcgaaaaagggcaaaaaataacgccaggggtttaccgtgtcgatatcgctttgaat

SEQ ID NO: 625153 - DNA, 75 bp, synthetic construct
  source 1..75: mol_type = other DNA
gggtatgccgctgagatttggtgcaatggcaacactggatggcgcacaaacaattagcggtatcattgatgatga

SEQ ID NO: 625154 - DNA, 75 bp, synthetic construct
  source 1..75: mol_type = other DNA
cattaatagcacggcttcgtcgctggttaaatgaatgtggcttctctggaatggtgattggtgggttcgaaatgg

SEQ ID NO: 625155 - DNA, 75 bp, synthetic construct
  source 1..75: mol_type = other DNA
acacatcctttgctatggaaaagttgatgttaacagcggtagaaaactggtatttaaggaaagagccaaattcat

SEQ ID NO: 625156 - DNA, 75 bp, synthetic construct
  source 1..75: mol_type = other DNA
ctgaaaaggatgagacacaaggaattcaaacaatatcgcgttcaatatatccttaacaaagttgggaaaccttat

SEQ ID NO: 625157 - DNA, 75 bp, synthetic construct
  source 1..75: mol_type = other DNA
aaaaagcggctccaataatcaaaattggtgagttcgcaatgtctggcaataacgtttctgatgggttatttgcca

SEQ ID NO: 625158 - DNA, 75 bp, synthetic construct
  source 1..75: mol_type = other DNA
ttcctgtatcgcaaatatccgcagggactaccttcacaaagtcacaacggccgtcagcaaaaaccacgcaatgat

SEQ ID NO: 625159 - DNA, 75 bp, synthetic construct
  source 1..75: mol_type = other DNA
gtgactcgtctgcgcaggcagggtgaacggtattatgccgacggcatgcgcgatctcccggaggacaggcggctt

SEQ ID NO: 625160 - DNA, 75 bp, synthetic construct
  source 1..75: mol_type = other DNA
gatcaggtgtttgcacttaatttttccctgccgctcaatctgttgctccccagaagtaatgatagctataccagg

SEQ ID NO: 625161 - DNA, 75 bp, synthetic construct
  source 1..75: mol_type = other DNA
tcatgtgcttttactggaccaagacagcatactgccggatactatggtcgataaattatttcaagcagagtataa

SEQ ID NO: 625162 - DNA, 75 bp, synthetic construct
  source 1..75: mol_type = other DNA
agtcattgagaaattttctgctaaaaaaatcgtatctcaatgggaagatatatacctgtgcatacagaaaaacag

SEQ ID NO: 625163 - DNA, 75 bp, synthetic construct
  source 1..75: mol_type = other DNA
tacgggttcaaaggctttggaatttcatatatcagttctaccagcggcagcacgtgctgagttgttattaaaatc

SEQ ID NO: 625164 - DNA, 75 bp, synthetic construct
  source 1..75: mol_type = other DNA
ccagatttcgtagcggttgggcaagctgggttccaaggctacgtgatatttgggttcacaggccaaaacatttac

SEQ ID NO: 625165 - DNA, 75 bp, synthetic construct
  source 1..75: mol_type = other DNA
tcctgcctcagggtcaacagccttggagtactatcggctcaaaaatcctttcagctattaagatcaggggaaagg

SEQ ID NO: 625166 - DNA, 75 bp, synthetic construct
  source 1..75: mol_type = other DNA
tccgttccccttcccaattccattgccaaaaagtcctgtacagcaggaagcagatgcaaatgcagcaaaaacatt

SEQ ID NO: 625167 - DNA, 75 bp, synthetic construct
  source 1..75: mol_type = other DNA
atgaaaatggtaaaacagcgccagtcaacacctccattccgtcagtagtaaaagttgagtttgggaaggtaaaaa

SEQ ID NO: 625168 - DNA, 75 bp, synthetic construct
  source 1..75: mol_type = other DNA
tgttatccgtacgccggcaaataacaagttgcggatggaggacaaacgcggtgaggagcatatcaagatcagtac

SEQ ID NO: 625169 - DNA, 75 bp, synthetic construct
  source 1..75: mol_type = other DNA
agcgtgccattgctccagcgtcaggggcgaatcaaatacgcggtgacactggcgaaatacagagccaatagcaat

SEQ ID NO: 625170 - DNA, 75 bp, synthetic construct
  source 1..75: mol_type = other DNA
ataacgtggatgcctcccgtgaactgcgcggggaaggtgcagagctgcgcacggacaggcatatatccattcgtg

SEQ ID NO: 625171 - DNA, 75 bp, synthetic construct
  source 1..75: mol_type = other DNA
gtccggcagctaaaaaacgaccggtggtgagcgggacaatgacggcgcgggtgaccagtgccagggacaacgata

SEQ ID NO: 625172 - DNA, 75 bp, synthetic construct
  source 1..75: mol_type = other DNA
gccgaccctgccgtcagaaacggacaacggtattgtgattatccgcacggtctacagtgcgagccgtaaggatgc

SEQ ID NO: 625173 - DNA, 75 bp, synthetic construct
  source 1..75: mol_type = other DNA
gcgtattgattactcccccataaatcgtaacacaggcggaatacgtttagattttcgtccacaacatatgacacc

SEQ ID NO: 625174 - DNA, 75 bp, synthetic construct
  source 1..75: mol_type = other DNA
acagtactgtcacacagggccaactgacgattgatatgacggggccgcagttaagtcaacaactggatatttcca

SEQ ID NO: 625175 - DNA, 75 bp, synthetic construct
  source 1..75: mol_type = other DNA
acaggataatccggttttcactggaaaagtcgatgatattactgcaacggtgtctatctgcttcggagaaggaaa

SEQ ID NO: 625176 - DNA, 75 bp, synthetic construct
  source 1..75: mol_type = other DNA
gtccaggataatgcggggaatacgaaaaatatcacaggcgatattgtacttgatacaacaaaacctacattgacg

SEQ ID NO: 625177 - DNA, 75 bp, synthetic construct
  source 1..75: mol_type = other DNA
gggagtgggctgagaaatgtacaggtgttcattctgagccatactttattgaggagagaattaaacagtattttt

SEQ ID NO: 625178 - DNA, 75 bp, synthetic construct
  source 1..75: mol_type = other DNA
acaattactgatatgcagatacgccagcgtgatgtcgctgcacttgatgccagatactcgagggaattagccgat

SEQ ID NO: 625179 - DNA, 75 bp, synthetic construct
  source 1..75: mol_type = other DNA
agtaacacaacaggtgaactcatactggatactacagggccgagcttatcaggaattaagttctccgatggttac

SEQ ID NO: 625180 - DNA, 75 bp, synthetic construct
  source 1..75: mol_type = other DNA
cttcgggcgcgcgttttcgcagaccagcgatcggtttatccccgctggcgcggggaacacgttacgctgcctgaa

SEQ ID NO: 625181 - DNA, 75 bp, synthetic construct
  source 1..75: mol_type = other DNA
ggcggccttaaaaacgctcgacgtttttaacggccttaccaccgacacggcgcaaaaaagtgcggcgtttgacag

SEQ ID NO: 625182 - DNA, 75 bp, synthetic construct
  source 1..75: mol_type = other DNA
gcgcggggaactcagccacaaaacggcgttttttccccgcctgcacggtttatccccgctggcgcggggaactcg

SEQ ID NO: 625183 - DNA, 75 bp, synthetic construct
  source 1..75: mol_type = other DNA
tcttattggggcatctttgattcctaaagttgttatgacatcttatgatggaactgaaatcacccctgagtttac

SEQ ID NO: 625184 - DNA, 75 bp, synthetic construct
  source 1..75: mol_type = other DNA
atggccgatttatccccgctggcgcggggaacacatgagattaaaatactcagtactcttactcgccgatttatc

SEQ ID NO: 625185 - DNA, 75 bp, synthetic construct
  source 1..75: mol_type = other DNA
ccctgatatttttgccaccgtggttactccggtttatccccgctggcgcggggaacacagaaatcaaactcagcg

SEQ ID NO: 625186 - DNA, 75 bp, synthetic construct
  source 1..75: mol_type = other DNA
ttcatataaagatactggatagaacgtttattaatcaaaaaaaatgcaaaaaagccctactcaatctggaaaaaa

SEQ ID NO: 625187 - DNA, 75 bp, synthetic construct
  source 1..75: mol_type = other DNA
tcaggaacgccccctgcgccagtccggtacctttgtgctggtaaaatcagtgtacaagccagacgagcaggatga

SEQ ID NO: 625188 - DNA, 75 bp, synthetic construct
  source 1..75: mol_type = other DNA
aggacggtaagcccgcaggcgatctgttctgggtctcaatgcgcccggaatatctggagcctgacggagaatgtt

SEQ ID NO: 625189 - DNA, 75 bp, synthetic construct
  source 1..75: mol_type = other DNA
gtgaaaaaggaccgcagttcgcgcaggcaaaaatgttttatgacagcctgatccacaacgctgaaaacagaagac

SEQ ID NO: 625190 - DNA, 75 bp, synthetic construct
  source 1..75: mol_type = other DNA
taatatcaatctggatgagcataagcgcttcttgcgtatcgaagctcgatacaagccaggcgctaaaccaaccag

SEQ ID NO: 625191 - DNA, 75 bp, synthetic construct
  source 1..75: mol_type = other DNA
actgaaaatggattacctggggttagaataggcagcaatcgctctcttctacatattcattgttatgaaaaagtt

SEQ ID NO: 625192 - DNA, 75 bp, synthetic construct
  source 1..75: mol_type = other DNA
cggtatgtaagtccagggatgaaagcccggttgtgaagatggctaacgggggatttctggatgcaacacactgga

SEQ ID NO: 625193 - DNA, 75 bp, synthetic construct
  source 1..75: mol_type = other DNA
gcaaagggttcctcgccaatacgttaacgccatcggtgggtgatgcgaactcgcaaacaccggagtataaagcat

SEQ ID NO: 625194 - DNA, 75 bp, synthetic construct
  source 1..75: mol_type = other DNA
ctcagcggcaagcaatgaaaccgggatccttgacggtaaatttgctcgtggactaggtatggtcgctatcgactg

SEQ ID NO: 625195 - DNA, 75 bp, synthetic construct
  source 1..75: mol_type = other DNA
ccttaacagaggttcgcggtgcggaagcctgggacttccttaaaataacaggttccggccatgaagggagtatga

SEQ ID NO: 625196 - DNA, 75 bp, synthetic construct
  source 1..75: mol_type = other DNA
aaaagcatcagatcgcactttgatggtgaaaaaggaccgcagttcgcgcaggcaaaaatgttttatgacagcctg

SEQ ID NO: 625197 - DNA, 75 bp, synthetic construct
  source 1..75: mol_type = other DNA
attacgcggctatcgagtgttatcaggaacgccctttgcgccagtccggcacctttgtgttggttaaatcagttt

SEQ ID NO: 625198 - DNA, 75 bp, synthetic construct
  source 1..75: mol_type = other DNA
agatagctgatgagcattgtggagcttcttattttgatgctgtgaaaaaattgttttattttgcgtctgaattat

SEQ ID NO: 625199 - DNA, 75 bp, synthetic construct
  source 1..75: mol_type = other DNA
tggttcaaagggaatgttgtagaccgatataatttcagccagacggcgagtaaggtttcgcgtggactgctggat

SEQ ID NO: 625200 - DNA, 75 bp, synthetic construct
  source 1..75: mol_type = other DNA
accatccaggagaatatgctgaaaggcgggatttccggccgcagtgcaaaaggaaaacgtatccacacccgtgcc

SEQ ID NO: 625201 - DNA, 75 bp, synthetic construct
  source 1..75: mol_type = other DNA
gttgcgattgtatcgcgcacttccaaaatcagagcagcaagcacagatcagcgaactccgtgcccgcgttgagaa

SEQ ID NO: 625202 - DNA, 75 bp, synthetic construct
  source 1..75: mol_type = other DNA
gaagaagcaggcgttcattgatgcgcttgtcatggctggaacgccacaagaacaggctgagaagatgtttataga

SEQ ID NO: 625203 - DNA, 75 bp, synthetic construct
  source 1..75: mol_type = other DNA
cgcgcgaaaaatatgacagcaagacggctggcatcacatacgcccagctggtggcatccagccaggcaatcgata

SEQ ID NO: 625204 - DNA, 75 bp, synthetic construct
  source 1..75: mol_type = other DNA
cccgtaagcgccgacaagctcaccggacgctgacgccaggtagactgaggaacaaatccgccgaagatattctca

SEQ ID NO: 625205 - DNA, 75 bp, synthetic construct
  source 1..75: mol_type = other DNA
atgagcctggcaaggcggatattcgtgaggtcgcctttgcggaatatggccgactgaaacaagtggtacgcgaag

SEQ ID NO: 625206 - DNA, 75 bp, synthetic construct
  source 1..75: mol_type = other DNA
tgattccattgctatcggcgtactgcgggcaattcatgaacgaggcctgaacatcccacaggatatttcgcttat

SEQ ID NO: 625207 - DNA, 75 bp, synthetic construct
  source 1..75: mol_type = other DNA
acggtaaacatattcatgtgcgcggagcaaaactgctcttcccgccgattcaacagccttatcctccgctttact

SEQ ID NO: 625208 - DNA, 75 bp, synthetic construct
  source 1..75: mol_type = other DNA
cgggttatgtcgttaagatttttgaagaaaagatggttaatgaattaaaaattagaacaagaatgatgaaaatcc

SEQ ID NO: 625209 - DNA, 75 bp, synthetic construct
  source 1..75: mol_type = other DNA
gtgctgaatggcgacaatacagacgaaaacaaacagccgaatctgggcgaggacgtggcgagcgctacggacaag

SEQ ID NO: 625210 - DNA, 75 bp, synthetic construct
  source 1..75: mol_type = other DNA
tagacgacggttccggcattaagcgcgccgtgccttcatcattgaaacataacgtcgtcacagtcagcgtggagg

SEQ ID NO: 625211 - DNA, 75 bp, synthetic construct
  source 1..75: mol_type = other DNA
gcagcagcaaaacttgcagagaatattggcaaaataataggtaaaaccctcacagaccttataccaaagtttctc

SEQ ID NO: 625212 - DNA, 75 bp, synthetic construct
  source 1..75: mol_type = other DNA
gtcgagctgcggatgccgtcgctgttgccggatgatttcattcctgacgtgaatacgcgtttgtcgttctataaa

SEQ ID NO: 625213 - DNA, 75 bp, synthetic construct
  source 1..75: mol_type = other DNA
gaagcacggattgccatcggtcacgggcagatgcgcgagcgcgaactggaacgggtgatgaatgatttccatcat

SEQ ID NO: 625214 - DNA, 75 bp, synthetic construct
  source 1..75: mol_type = other DNA
ctaaacgtattgttttatttatatatttatttgtaatccagttttgggaaaacgccagttttcaaacggaagtca

SEQ ID NO: 625215 - DNA, 75 bp, synthetic construct
  source 1..75: mol_type = other DNA
cgaaaaagaaatagactctttttctgcattttcaaacacagcatctgctgaacagctatcaacccagcagaaatc

SEQ ID NO: 625216 - DNA, 75 bp, synthetic construct
  source 1..75: mol_type = other DNA
tctgccacacaagcgggaggaaatgtcgcttctgctgttttccaaaacaacgcgtcgaaaaatctagcagacctg

SEQ ID NO: 625217 - DNA, 75 bp, synthetic construct
  source 1..75: mol_type = other DNA
cgaaagggagtgtcagaggctatagcgcagggctgtatgccacctggtttgccgatgacatcagtaaaaaaggcg

SEQ ID NO: 625218 - DNA, 75 bp, synthetic construct
  source 1..75: mol_type = other DNA
ggcacccgcaatcacaaatggcagcgactgacgccgtcagtgtcgcgttcctgtgccgttttcccggatggtgaa

SEQ ID NO: 625219 - DNA, 75 bp, synthetic construct
  source 1..75: mol_type = other DNA
ccacacccgtgccattcacagcattgacactgacattaagctcaaccgcgcattgtgggtgatggcggaaaccct

SEQ ID NO: 625220 - DNA, 75 bp, synthetic construct
  source 1..75: mol_type = other DNA
ccaagttgatcagtgagatatcagaatttgttgctaacgataatgagttccccgttcatgaaaaacaggtcctta

SEQ ID NO: 625221 - DNA, 75 bp, synthetic construct
  source 1..75: mol_type = other DNA
gtgaaaggggatgaattagcctatgaatcctatagcgcgaaaggtgcaaccgtctcgctggaagcgggctacggc

SEQ ID NO: 625222 - DNA, 75 bp, synthetic construct
  source 1..75: mol_type = other DNA
gggcgtcgatcatcatgcgcacaccgaagccaatggctcacgtattgagaatgacgcaaataacaacatccagac

SEQ ID NO: 625223 - DNA, 75 bp, synthetic construct
  source 1..75: mol_type = other DNA
acatcccacaggatatttcgcttatcagcgttaacgacatccccaccgcacgttttacttttccaccgctctcca

SEQ ID NO: 625224 - DNA, 75 bp, synthetic construct
  source 1..75: mol_type = other DNA
cagacagtgtacactttcatgtaaggaactttaaaagtctatttgacttaatcgataggcataagattcatcata

SEQ ID NO: 625225 - DNA, 75 bp, synthetic construct
  source 1..75: mol_type = other DNA
ggattgaattttggaaagaaaaacttaataaaataagaaatcatacttatgcatgtgttttttctggagcacaga

SEQ ID NO: 625226 - DNA, 75 bp, synthetic construct
  source 1..75: mol_type = other DNA
acgataaaacaacacgagttagtatctgatgatgcaatgataaatgaattatcaagtgagttattaagttgtctt

SEQ ID NO: 625227 - DNA, 75 bp, synthetic construct
  source 1..75: mol_type = other DNA
tggggcgttgcgggggtgtcacagacttgtggttatgtttcttcggtcagctttattgaagttgagcccaaaaaa

SEQ ID NO: 625228 - DNA, 75 bp, synthetic construct
  source 1..75: mol_type = other DNA
agagaactttatcaggacagtggcttcagagtggaacctctttttgccagacgttctgtgtcttgtaagggagac

SEQ ID NO: 625229 - DNA, 75 bp, synthetic construct
  source 1..75: mol_type = other DNA
cttcagagtggaacctctttttgccagacgttctgtgtcttgtaagggggacactcgaggtgttgctcatgacgt

SEQ ID NO: 625230 - DNA, 75 bp, synthetic construct
  source 1..75: mol_type = other DNA
cacagtaatgaacttgacttatcatacctttttttgggttctgtgccgactcttccagcgtggattgaaatgctt

SEQ ID NO: 625231 - DNA, 75 bp, synthetic construct
  source 1..75: mol_type = other DNA
ggcttatgataagacggggtctatcacgatagaaaaacgtcagggggagggtgctttacccattcggcatagatt

SEQ ID NO: 625232 - DNA, 75 bp, synthetic construct
  source 1..75: mol_type = other DNA
catgggcggcggtttgatcggtgtggcttcgccggggagtttgatcgccatcgccatgatgacgcctaaaagtgc

SEQ ID NO: 625233 - DNA, 75 bp, synthetic construct
  source 1..75: mol_type = other DNA
cgatgattatgataaatattccgacatggttaaaaagtatgtaatagatggtgaggagctcataattaaatatta

SEQ ID NO: 625234 - DNA, 75 bp, synthetic construct
  source 1..75: mol_type = other DNA
aatatcgcagagaaaatatattgttacgaatcccgatgattatgataaatattcttacatggttaaaaagatagt

SEQ ID NO: 625235 - DNA, 75 bp, synthetic construct
  source 1..75: mol_type = other DNA
taataaatcttctgaggggaatgttaaaactattattgagaaaaaagaaaatgatgaaataaaaaagagtatttt

SEQ ID NO: 625236 - DNA, 75 bp, synthetic construct
  source 1..75: mol_type = other DNA
aagaaaatgtagatagagcgttggtgagaatgtttaaatgtgttaagcttcacagtaatgaacttgacttatcat

SEQ ID NO: 625237 - DNA, 75 bp, synthetic construct
  source 1..75: mol_type = other DNA
tttccccgaagaagagcagtgctggagtaatgttcactacgatggctctatgcgtcaggccatggagagcgaatt

SEQ ID NO: 625238 - DNA, 75 bp, synthetic construct
  source 1..75: mol_type = other DNA
tctccactccagcacattggccgtggtcgcctgattggtggaagcaatcaggagcacgctgcgacttggtaaaag

SEQ ID NO: 625239 - DNA, 75 bp, synthetic construct
  source 1..75: mol_type = other DNA
ctaacaaaacaaaaactattcaaacaatcaataagaatacctgttatttcatctttatattttggtgtcttcgca

SEQ ID NO: 625240 - DNA, 75 bp, synthetic construct
  source 1..75: mol_type = other DNA
acgttattgagcatctccaggactggccggcaaaccgggtacgcgatctgttgccctggaaagttgatctgacct

SEQ ID NO: 625241 - DNA, 75 bp, synthetic construct
  source 1..75: mol_type = other DNA
ctaagcaaaaaagttccctatcatttatttcatcttgttcaccgtttgttccccgttttttatctggcaattgct

SEQ ID NO: 625242 - DNA, 75 bp, synthetic construct
  source 1..75: mol_type = other DNA
tttcgctgctgaaattaaacggtagtaaaaacaagcatcaggctaccattaaaaacattgttaaccatccgggac

SEQ ID NO: 625243 - DNA, 75 bp, synthetic construct
  source 1..75: mol_type = other DNA
atcgagtaagaagtttgatgccagtatttataaaggtccaattgctgaattttataccactttgggcgtgcagga

SEQ ID NO: 625244 - DNA, 75 bp, synthetic construct
  source 1..75: mol_type = other DNA
tagttatctcgctatttttctcttattattcttcttttagtctggccgcagagccgcttcccgatgccgcatcac

SEQ ID NO: 625245 - DNA, 75 bp, synthetic construct
  source 1..75: mol_type = other DNA
tagttatctcgttattattcattaattattcctctttaacgctggccgcagaatcaccgcccgatgcctcatcgc

SEQ ID NO: 625246 - DNA, 75 bp, synthetic construct
  source 1..75: mol_type = other DNA
tctggcaatagtcctctaagcacagtatatacagctagcgcagtcgtaagtgaatatggcggtgcagttattttg

SEQ ID NO: 625247 - DNA, 75 bp, synthetic construct
  source 1..75: mol_type = other DNA
tgcttcttccaacaaaagattgagtgggtaagattaaaagagcgtcacccagaggcatttgaagaagctaaacga

SEQ ID NO: 625248 - DNA, 75 bp, synthetic construct
  source 1..75: mol_type = other DNA
tgcttttgagtgtgggagcgtcatcggtcttcgcggcaggaaccgtcaaggtgttcagcaatggcagcagtgagg

SEQ ID NO: 625249 - DNA, 75 bp, synthetic construct
  source 1..75: mol_type = other DNA
gtggtcagctacctggtacctaccgcgtaacggtcttcgttaacggtgaaaagcagggcgacgcacaggatattg

SEQ ID NO: 625250 - DNA, 75 bp, synthetic construct
  source 1..75: mol_type = other DNA
ccagcgaccagcgaccagcgaccagcgaccagcgaccagcgaccagcgaccagcgaccagcgaccagcgaccagc

SEQ ID NO: 625251 - DNA, 75 bp, synthetic construct
  source 1..75: mol_type = other DNA
attgtagtgagtaagcatgctcctatcagtcaataccatcaatcagctattgaagctttgtctgaaaatatgagt

SEQ ID NO: 625252 - DNA, 75 bp, synthetic construct
  source 1..75: mol_type = other DNA
agtgcctaaccagttctacccctcgcttcggcgatcagtgcttgcgctgctccgggagggtaatatcaatgaagc

SEQ ID NO: 625253 - DNA, 75 bp, synthetic construct
  source 1..75: mol_type = other DNA
ctgaagaaacggcttaaacgcttctctgtcccctcacagaactatgttgtgacaaccattgacgggtgggcgcta

SEQ ID NO: 625254 - DNA, 75 bp, synthetic construct
  source 1..75: mol_type = other DNA
gacgaagtggatattgacaccgccgtgcagaccgtgacacccacgcagggggccgtggtgatgtgtactgacccc

SEQ ID NO: 625255 - DNA, 75 bp, synthetic construct
  source 1..75: mol_type = other DNA
cgtttccgcaagcctacgctcacgcccgaggagcaagccgagcaggacgccattgccgattcgattattgatgaa

SEQ ID NO: 625256 - DNA, 75 bp, synthetic construct
  source 1..75: mol_type = other DNA
tggtgtggcccagatgctggccccgaaggcaaaacaccggattaccgcgcaacggataacggcagacagaacacg

SEQ ID NO: 625257 - DNA, 75 bp, synthetic construct
  source 1..75: mol_type = other DNA
cggtgtggcccagatgctggccccgaaggctaaaaccggatacgcgcaacggataacggcagacagaacacgtac

SEQ ID NO: 625258 - DNA, 75 bp, synthetic construct
  source 1..75: mol_type = other DNA
gccgacatcattcggaagatgaaatatctacaacagatacataaccacacaaataaggagatccctgcggacagg

SEQ ID NO: 625259 - DNA, 75 bp, synthetic construct
  source 1..75: mol_type = other DNA
atcgtggagaagaccccaactataaagaagcggttgtctggtatcagatagccgcggagagcggaatgtcttatg

SEQ ID NO: 625260 - DNA, 75 bp, synthetic construct
  source 1..75: mol_type = other DNA
cactcaccacgcccttagtgacgttatggggcagataaaaaatgtggctgccgtatttgcagcactgcgtggcgt

SEQ ID NO: 625261 - DNA, 75 bp, synthetic construct
  source 1..75: mol_type = other DNA
taccacgaattacacagaacattcgctggtctgatggcattaaaatcaaagcttcagaatggcgaagatttaaaa

SEQ ID NO: 625262 - DNA, 75 bp, synthetic construct
  source 1..75: mol_type = other DNA
gtgtctccatttcaggtagtaaaacgcacggcaatacctatgggtgtcgcagccattgtaaatctaataatgaca

SEQ ID NO: 625263 - DNA, 75 bp, synthetic construct
  source 1..75: mol_type = other DNA
attttctctggctggagctccccgagccgttagatgccggcgaattaagcctggcggcactgacgcatcatatca

SEQ ID NO: 625264 - DNA, 75 bp, synthetic construct
  source 1..75: mol_type = other DNA
gaaactcggcgacacaccgctggtggagtacacccgcgaccgcctgcaccgggaaacgctgcgccgcttcggccg

SEQ ID NO: 625265 - DNA, 75 bp, synthetic construct
  source 1..75: mol_type = other DNA
cggaacggcaacccgacttcagacggcccgcaggattaacaatgtgctgtttgatggcaccagggatatcaccat

SEQ ID NO: 625266 - DNA, 75 bp, synthetic construct
  source 1..75: mol_type = other DNA
aaacgccagactggcaaaagaccgtaacggcgcagacatcccgaataaacaattgtttctggataacatcagcgg

SEQ ID NO: 625267 - DNA, 75 bp, synthetic construct
  source 1..75: mol_type = other DNA
ggccagaaagtcccggatgcatcgctgacgcaaaaaggcgtagtgcggcttaacagtgctgttaacagtgaatca

SEQ ID NO: 625268 - DNA, 75 bp, synthetic construct
  source 1..75: mol_type = other DNA
aagatgcgataaatctgtccatcagttcacctgacaaaagcattagagagtcagcatcagttattcgtgaacaac

SEQ ID NO: 625269 - DNA, 75 bp, synthetic construct
  source 1..75: mol_type = other DNA
attacacagaacgttcgctggtctgatggcattaaaatcaaagcttcagaatggcgaagatttgaaagatgtcat

SEQ ID NO: 625270 - DNA, 75 bp, synthetic construct
  source 1..75: mol_type = other DNA
tgcaggaactattggaatgattttagaacctgcatgcggtgtcatgctccgtttccctgcagaagaagcctttga

SEQ ID NO: 625271 - DNA, 75 bp, synthetic construct
  source 1..75: mol_type = other DNA
acccatctgtgaacacgtctcaggtgctggttcagcccctcacacagccaggcttgtggtttgccagtgtgaacg

SEQ ID NO: 625272 - DNA, 75 bp, synthetic construct
  source 1..75: mol_type = other DNA
gcagattagccaagccagtaatcgggtcgctggcactgcatctgatgatgtccgggaaagtgcgcgtaaggcaaa

SEQ ID NO: 625273 - DNA, 75 bp, synthetic construct
  source 1..75: mol_type = other DNA
gagcatgccaacaccttttccgcgttccttgaccgcctttccgataccgtctctgcacgcaatacctccggattc

SEQ ID NO: 625274 - DNA, 75 bp, synthetic construct
  source 1..75: mol_type = other DNA
ggctcaaaattttttggttttgatatggataacgaattcatcagtggttttgatgtaggggcatggggagtatta

SEQ ID NO: 625275 - DNA, 75 bp, synthetic construct
  source 1..75: mol_type = other DNA
gggaaggcttacagccattcttcgcctgccagacctgtgtgcgcgacccgggccgccggggatacacaaaacaca

SEQ ID NO: 625276 - DNA, 75 bp, synthetic construct
  source 1..75: mol_type = other DNA
gaatggcaagaaaaaaatgtcctagatatattcacattagttggaggtggaacgccaaaaacttcagttgctgaa

SEQ ID NO: 625277 - DNA, 75 bp, synthetic construct
  source 1..75: mol_type = other DNA
aaactctccgcgacaccctgcttcccaaactgatgagcggtgaagtacgggttcagtatgcagaagaagcaatcg

SEQ ID NO: 625278 - DNA, 75 bp, synthetic construct
  source 1..75: mol_type = other DNA
attggtgaaaattcatcaataggggcaaattcgaccattctgcctggagtaaagattgggcgcaattgtatgatt

SEQ ID NO: 625279 - DNA, 75 bp, synthetic construct
  source 1..75: mol_type = other DNA
agattattatccaacgatacatattaaaaagaatgcttctattggtgcgaacgcaacaattttgccgggtattat

SEQ ID NO: 625280 - DNA, 75 bp, synthetic construct
  source 1..75: mol_type = other DNA
tcacataaagtaacagaaaccataccattagcatgtgatggtaatctacaaaccattcctttaaaaaactttagc

SEQ ID NO: 625281 - DNA, 75 bp, synthetic construct
  source 1..75: mol_type = other DNA
gagaatcttattaccgctgaagaacaagtattgtcgaatctggaagtttcccgcgatggcgtggaaaaagcggtt

SEQ ID NO: 625282 - DNA, 75 bp, synthetic construct
  source 1..75: mol_type = other DNA
gccgtcaacgttcagcagagcgttctcgaatcaatatgggctctccccaaccaaataccgcgagctggctaaaaa

SEQ ID NO: 625283 - DNA, 75 bp, synthetic construct
  source 1..75: mol_type = other DNA
caattcatgaagtggcacagcgttgcggttttccggatagcgactatttttgtcgcgttttccggcgtcagtttg

SEQ ID NO: 625284 - DNA, 75 bp, synthetic construct
  source 1..75: mol_type = other DNA
aatttgagcaacagatggaagtcgttaaggccactgaagccatgcagcgtgcgcaacaggcagtaacgacctcta

SEQ ID NO: 625285 - DNA, 75 bp, synthetic construct
  source 1..75: mol_type = other DNA
tcgaatcctgccctgcaggttttgtctgtaaattttgaacatatcagtaattcagcgtggcgtgtggcaaccagt

SEQ ID NO: 625286 - DNA, 75 bp, synthetic construct
  source 1..75: mol_type = other DNA
cctgtgcaggttttagtcccgacccgattaaatttatatccagagccagtactcctggcctcggcgcttcatttt

SEQ ID NO: 625287 - DNA, 75 bp, synthetic construct
  source 1..75: mol_type = other DNA
ttcagtcctcgaatataggaaagggtactaggatttggcaattctctgtgatattccccggggcgattataggag

SEQ ID NO: 625288 - DNA, 75 bp, synthetic construct
  source 1..75: mol_type = other DNA
gccgcctccgcagggggaagatgactttggcaacctgcaactgccgctcctgaacccggtacgcgatgccacact

SEQ ID NO: 625289 - DNA, 75 bp, synthetic construct
  source 1..75: mol_type = other DNA
agagactaccccgaagtcaaaggtctggctcaaagctggactgagctggcgaatctggaatcaaagatgagagga

SEQ ID NO: 625290 - DNA, 75 bp, synthetic construct
  source 1..75: mol_type = other DNA
tgctgacaatcaagcagtggcgcgaaacatacggacctggtagcaacgttgtactagcggaagaactggcacgaa

SEQ ID NO: 625291 - DNA, 75 bp, synthetic construct
  source 1..75: mol_type = other DNA
catgtccctgaaattattctgctcaactctcatgacggtacctccagctaccagatgctgccgggttacttcagg

SEQ ID NO: 625292 - DNA, 75 bp, synthetic construct
  source 1..75: mol_type = other DNA
ctcagtaaacagcaaaatcagcaggcctcctctgaacgtaagttggagatatctaccgagattgcacgtatcaaa

SEQ ID NO: 625293 - DNA, 75 bp, synthetic construct
  source 1..75: mol_type = other DNA
aatggcaggcaaagtttttgccttcagttgtaatgtcgatggcggggcaagtattggagcagggacaacctctgt

SEQ ID NO: 625294 - DNA, 75 bp, synthetic construct
  source 1..75: mol_type = other DNA
agtcgaattaacgtaactgcatttagaggggttaatcatcatgatggaggagttgaagctgtatctctggaatcg

SEQ ID NO: 625295 - DNA, 75 bp, synthetic construct
  source 1..75: mol_type = other DNA
aatccttgtgattacgggatatatagcgctatcagttacaatgtgcgccttcaggacctgtatattcatagggtg

SEQ ID NO: 625296 - DNA, 75 bp, synthetic construct
  source 1..75: mol_type = other DNA
tgcaaaccactaatattggagaggatactaccatctggcaattcgttgttattttggctggtgcagtgattggca

SEQ ID NO: 625297 - DNA, 75 bp, synthetic construct
  source 1..75: mol_type = other DNA
tatgccacttccaatctatctggtgcatacaatatgttttctgagttctggaatgttgctgtctcagctgcgcct

SEQ ID NO: 625298 - DNA, 75 bp, synthetic construct
  source 1..75: mol_type = other DNA
tgctatacgataaagaattgatagactccaaaacattaacatcgttggttaactttgactttaattttaattcat

SEQ ID NO: 625299 - DNA, 75 bp, synthetic construct
  source 1..75: mol_type = other DNA
tctagaatttgtattaatggttttaggggggtaaatccaaagaaaggagatgcagaatcttttatacttgattca

SEQ ID NO: 625300 - DNA, 75 bp, synthetic construct
  source 1..75: mol_type = other DNA
tttgacgctacccgatcgagtagtaagttaaataatgatataacacacgaaggtacgagctatcaggttgcctat

SEQ ID NO: 625301 - DNA, 75 bp, synthetic construct
  source 1..75: mol_type = other DNA
tcgaggcaaattatatatatggcctcaacaatcttttgacactttatggcggtacgattttatccgataactata

SEQ ID NO: 625302 - DNA, 75 bp, synthetic construct
  source 1..75: mol_type = other DNA
agagtacaaaaaacgcacgctgggcgcaaacgcgctggagccgaagcgtatcaagtacaagcgtattgcgaagta

SEQ ID NO: 625303 - DNA, 75 bp, synthetic construct
  source 1..75: mol_type = other DNA
caccggtaagcaggtgccggaaatcattctgctcaacagccatgatggttccagcgcataccaaatgttgccggg

SEQ ID NO: 625304 - DNA, 75 bp, synthetic construct
  source 1..75: mol_type = other DNA
gggaaggcttccagccctttttcgcctgccagacccgtgtgcgcgacccgggccgccggggatacacaaaacaca

SEQ ID NO: 625305 - DNA, 75 bp, synthetic construct
  source 1..75: mol_type = other DNA
gcgaccggttcgagtatcgccgaatggctcatcactgaacgcttacgccgtagccaggaactgttgggatccagt

SEQ ID NO: 625306 - DNA, 75 bp, synthetic construct
  source 1..75: mol_type = other DNA
ttagtgaggccgaaaaagacagggagctaccggaaaaaattgcggctgaaatccccgtcattatccgccgcttgc

SEQ ID NO: 625307 - DNA, 75 bp, synthetic construct
  source 1..75: mol_type = other DNA
gtacacgaccagaaacagcctttaccgcgtctatctggcgtttatggcatacgcaggcaggagcaaaccgctaaa

SEQ ID NO: 625308 - DNA, 75 bp, synthetic construct
  source 1..75: mol_type = other DNA
cagggaaacagaacacggtaagcgctgaaatgacatcgcttgatgatgctggtggacgtgcgcaggttgtcggga

SEQ ID NO: 625309 - DNA, 75 bp, synthetic construct
  source 1..75: mol_type = other DNA
atcttccgacgaagcaaaaggcgcaactttcacagatggcagacagtgaacgtgcacaactacttgccgatcgct

SEQ ID NO: 625310 - DNA, 75 bp, synthetic construct
  source 1..75: mol_type = other DNA
gatattcccgtttaataacccggtatcagacgcagacaaagacccggatttaaccgcaaaaatcaggcgagaaat

SEQ ID NO: 625311 - DNA, 75 bp, synthetic construct
  source 1..75: mol_type = other DNA
tgcgccggaaacacccgcagtcgcaaattatcattgccgcagataacgaccaccaacaggacgaacaggcgaaca

SEQ ID NO: 625312 - DNA, 75 bp, synthetic construct
  source 1..75: mol_type = other DNA
gaggattacggtaaggacctgtggagtgcttatcagaccatccaggagaatatgctgaaaggcgggatttccggt

SEQ ID NO: 625313 - DNA, 75 bp, synthetic construct
  source 1..75: mol_type = other DNA
ttgatacttcgctgttaagtcagtacgccggttccacctgcgaactggatagccaggcagggttgtataacccag

SEQ ID NO: 625314 - DNA, 75 bp, synthetic construct
  source 1..75: mol_type = other DNA
ccccttaactcgtgaagaactgatgcaggtcgtccccagcgtattcggggaagataagcacacatccagaagcga

SEQ ID NO: 625315 - DNA, 75 bp, synthetic construct
  source 1..75: mol_type = other DNA
attctactcaactcccatgacggttcatccagctaccagatgttacccggatatttccgtgccatttgtaccaat

SEQ ID NO: 625316 - DNA, 75 bp, synthetic construct
  source 1..75: mol_type = other DNA
aagcgtggatattgacctagacgaaatgatctccgacctggcccctgttgatttgctgattcagcgagcaggacg

SEQ ID NO: 625317 - DNA, 75 bp, synthetic construct
  source 1..75: mol_type = other DNA
gttctctggcggcagctttctatgaacccattaatggcacccgtcagttagaggtggcggtgcagcgtattacaa

SEQ ID NO: 625318 - DNA, 75 bp, synthetic construct
  source 1..75: mol_type = other DNA
cagaaaactttaattcaggctcaaaacgccttaaccgtctttcctctaaaagcaaaagtcgcgcctttcaacgga

SEQ ID NO: 625319 - DNA, 75 bp, synthetic construct
  source 1..75: mol_type = other DNA
atgcgaaccagatacgccgtgaccgtccgctgacatatgaagagctgatgcaccatgtgccgggaattttcgggg

SEQ ID NO: 625320 - DNA, 75 bp, synthetic construct
  source 1..75: mol_type = other DNA
gcgtacattcccaccattaccgtcctggaaaatctgcagcgggaaggctttcagccgttcttcgcctgccagacc

SEQ ID NO: 625321 - DNA, 75 bp, synthetic construct
  source 1..75: mol_type = other DNA
caccatgtaccgggtattttcggtgaagaccggcatacctcctgcagtgaacgctatacgtacatccccaccatc

SEQ ID NO: 625322 - DNA, 75 bp, synthetic construct
  source 1..75: mol_type = other DNA
aagacgcggaggaccggaacggcgagcgctgcatcatgccgaccagcgagcatctggaagatatggtggtgctcg

SEQ ID NO: 625323 - DNA, 75 bp, synthetic construct
  source 1..75: mol_type = other DNA
caggaagcggtaagaacgggcgcaacgcaaaacatgttttacccgaaaaactggattgaggacggcgatccggcg

SEQ ID NO: 625324 - DNA, 75 bp, synthetic construct
  source 1..75: mol_type = other DNA
atgctgaaatggacgtcataacaacaatggcaaggaaatcatcagaaggaacaaaaggcaagactctgtatacaa

SEQ ID NO: 625325 - DNA, 75 bp, synthetic construct
  source 1..75: mol_type = other DNA
gtggtgaggtctgagctgcaaagcactgaaccgttcactgagccgttcaggttcagtttcttttttccagccaca

SEQ ID NO: 625326 - DNA, 75 bp, synthetic construct
  source 1..75: mol_type = other DNA
caatcaccactgctgacattctgacaccacgacgtcgggaggattacgggcaggacctgtggagtgcttatcaga

SEQ ID NO: 625327 - DNA, 75 bp, synthetic construct
  source 1..75: mol_type = other DNA
gattcgtggtaggaaagcattactttaaaattgaaaaaaacgaattacgcgagtttaagaacagacccgaaacaa

SEQ ID NO: 625328 - DNA, 75 bp, synthetic construct
  source 1..75: mol_type = other DNA
ctggtgcgcctagtggggcgggtggtgcatacgttgagggattatatgacgtaagcaccattaatggggcgaata

SEQ ID NO: 625329 - DNA, 75 bp, synthetic construct
  source 1..75: mol_type = other DNA
attcacagcatcgataccgacattaagctcaaccgggcgttgtgggtgatggcagaaacgctgctggagagcatg

SEQ ID NO: 625330 - DNA, 75 bp, synthetic construct
  source 1..75: mol_type = other DNA
cgttgctggttggttgcattatgtcattgatgctgttgagaaaagccagtctgtcgctgatccaatgaatgacca

SEQ ID NO: 625331 - DNA, 75 bp, synthetic construct
  source 1..75: mol_type = other DNA
ggtaaggacctgtggagtgcttatcagaccattcaggagaatatgctgaaaggcggaatttcaggtcgcagcgct

SEQ ID NO: 625332 - DNA, 75 bp, synthetic construct
  source 1..75: mol_type = other DNA
acgcaggatgctggtactacacggtggtgatatcaggttgactgattcaacgactggagcctgctttcgtttttt

SEQ ID NO: 625333 - DNA, 75 bp, synthetic construct
  source 1..75: mol_type = other DNA
ctgaagtggctgacgcgcttggtattgagtctgtcgcaattgtggaaaaagatcactatatcgttgagcttttgc

SEQ ID NO: 625334 - DNA, 75 bp, synthetic construct
  source 1..75: mol_type = other DNA
cgtaattttcagtacaccaatgaggtgtttcacaacccgggtggtaacgaaatcacctggacgttccgcgcgcct

SEQ ID NO: 625335 - DNA, 75 bp, synthetic construct
  source 1..75: mol_type = other DNA
gccacattactaaatattctcaagtctgcacttaataatcaggcagaaggacgcctgctccgcattcaggttttt

SEQ ID NO: 625336 - DNA, 75 bp, synthetic construct
  source 1..75: mol_type = other DNA
ctcatactctggacagaacgaggcgcagcccgtcacgcaaaaatgctcgaaactgatcaggcgtgggatgtgttc

SEQ ID NO: 625337 - DNA, 75 bp, synthetic construct
  source 1..75: mol_type = other DNA
ccattaggattatatgaatttaaatcaaaaaatatagatgatattggaatatttgcattggcaatgtgtaatgga

SEQ ID NO: 625338 - DNA, 75 bp, synthetic construct
  source 1..75: mol_type = other DNA
agttagagagcaatctggcagagctgcgtggcggcagcgattacgcgcaacgtaaaatcaagatagccgctgcac

SEQ ID NO: 625339 - DNA, 75 bp, synthetic construct
  source 1..75: mol_type = other DNA
cgccgggcgctcaccgttcgccatatcaaggcgttaagcgagcgttttaatctcccggctgaagcgtttattgat

SEQ ID NO: 625340 - DNA, 75 bp, synthetic construct
  source 1..75: mol_type = other DNA
tgggttatgacgtcaaagtcggaaataacgttaccttcaccgttggtaaaacgaaaaaggatgataccgggcaga

SEQ ID NO: 625341 - DNA, 75 bp, synthetic construct
  source 1..75: mol_type = other DNA
tggacttgttcgtgcgctgaccgtgggcgtggcgtaccagacgacggtaggtggcattatgaacacttcggtggc

SEQ ID NO: 625342 - DNA, 75 bp, synthetic construct
  source 1..75: mol_type = other DNA
tgggcagaggcgcttaactggctcagaacggtgttcagcaaaaaacagacgcttttgcagcggccacttgaggag

SEQ ID NO: 625343 - DNA, 75 bp, synthetic construct
  source 1..75: mol_type = other DNA
tgggttaaggcgctgaactggctcagagtggtgttcagcaaaaagcagactctttctcagcgtcctctggaggag

SEQ ID NO: 625344 - DNA, 75 bp, synthetic construct
  source 1..75: mol_type = other DNA
cagcaggctaccagcatatccacgacggtattattcatctggtcgatagcgcccggacggaaacggtacgtagcg

SEQ ID NO: 625345 - DNA, 75 bp, synthetic construct
  source 1..75: mol_type = other DNA
atggtatttattcaaaaaatctatattcagaaaacaagaccggaagtgcattcagagtaagatataacaagttga

SEQ ID NO: 625346 - DNA, 75 bp, synthetic construct
  source 1..75: mol_type = other DNA
agttagagagcaatctggcggagctgcgtggcggcagcgattacgcgcaacgtaaaatcaagatagccgctgcgc

SEQ ID NO: 625347 - DNA, 75 bp, synthetic construct
  source 1..75: mol_type = other DNA
agttagagagcaatctggccgagctgcgtggcggcagcgattacgcgcaacgtaaaatcaagatagccgctgccc

SEQ ID NO: 625348 - DNA, 75 bp, synthetic construct
  source 1..75: mol_type = other DNA
tgtcattatccgtggtaattactggcctgaacgccaacttacaaaagactttgaccttgtggtaaagatctttaa

SEQ ID NO: 625349 - DNA, 75 bp, synthetic construct
  source 1..75: mol_type = other DNA
tttagagttagatataataaacttcttacaaagacacatacatcatttaatgtttcaagctatcaatatgcatca

SEQ ID NO: 625350 - DNA, 75 bp, synthetic construct
  source 1..75: mol_type = other DNA
ggctaagtatgagtttactgttggtaaatatagaccatattctagcgtagctaaagatgatgagtttgggcagat

SEQ ID NO: 625351 - DNA, 75 bp, synthetic construct
  source 1..75: mol_type = other DNA
tccatactgctattagtctactggttttactaaccgcttttgttatatttaatggttttatacactggacaataa

SEQ ID NO: 625352 - DNA, 75 bp, synthetic construct
  source 1..75: mol_type = other DNA
cattatttccattagacatagttaagagtatatatactcaccgtagtattattttgcaaatgactaagcgagatg

SEQ ID NO: 625353 - DNA, 75 bp, synthetic construct
  source 1..75: mol_type = other DNA
tcgcctgctggaaggcaataaaccggggaatgagcagtactgggtgaccctggatccggatctgatggagtcaga

SEQ ID NO: 625354 - DNA, 75 bp, synthetic construct
  source 1..75: mol_type = other DNA
ccatttttaagatttagtcataacaggagattcatttatctaaaagatgactttggtagcttcaaattttggcgg

SEQ ID NO: 625355 - DNA, 75 bp, synthetic construct
  source 1..75: mol_type = other DNA
atgcttgtggtatacacctttgtatttagtgtcgtattccaggcaaaatggagtgaggggagcacgtcgcgtaca

SEQ ID NO: 625356 - DNA, 75 bp, synthetic construct
  source 1..75: mol_type = other DNA
cgaatgtctcaataaagcgccacagttaatactctcaaatgtcaattatgtaaaaaaagttgtatatccattaga

SEQ ID NO: 625357 - DNA, 75 bp, synthetic construct
  source 1..75: mol_type = other DNA
cacccgacgagatgaaatctgcctggatcgagacgaagttagcacacttatttctcagcgagagtatcgttgtga

SEQ ID NO: 625358 - DNA, 75 bp, synthetic construct
  source 1..75: mol_type = other DNA
atgcaccattagcatcctggggagtcgaagctccgggagaaattaggcattctgctaaggtgccaacgcgttcag

SEQ ID NO: 625359 - DNA, 75 bp, synthetic construct
  source 1..75: mol_type = other DNA
tataccatgttctacaattgggcctatgacagcttacgtttacgtgttgtgaaacagcatcaacaacgtatgctt

SEQ ID NO: 625360 - DNA, 75 bp, synthetic construct
  source 1..75: mol_type = other DNA
caaagggcagcaactccgttacagcagcacatttgttctggtgaaatcgcagtgccagccagacccgcaaaaaaa

SEQ ID NO: 625361 - DNA, 75 bp, synthetic construct
  source 1..75: mol_type = other DNA
agagaggctctgcttgcccttgaagctgagctcaggacgctggaaaaacacagcggtgcgaatgagaaaatcagc

SEQ ID NO: 625362 - DNA, 75 bp, synthetic construct
  source 1..75: mol_type = other DNA
tcgttttgaaattggtgatgattgtttatttggtcaaaatgtttgtttttatgattcagatcatgaatttaatga

SEQ ID NO: 625363 - DNA, 75 bp, synthetic construct
  source 1..75: mol_type = other DNA
acctaataatgataattctgctgattatgatgttgggttgatacttgacaatactgatttgtcagggccggtgaa

SEQ ID NO: 625364 - DNA, 75 bp, synthetic construct
  source 1..75: mol_type = other DNA
tctgccggtggtggtttcagtgacaactacacacatgttcaggtcggtgtcgacaaaaaacatgagctggatgga

SEQ ID NO: 625365 - DNA, 75 bp, synthetic construct
  source 1..75: mol_type = other DNA
ccctgatgtccggtagctataaagcgtttttaagcgaagtgaacaatctgaataaacgtatgggtgacctgcgtg

SEQ ID NO: 625366 - DNA, 75 bp, synthetic construct
  source 1..75: mol_type = other DNA
attaccagatgtaccattccctgatttttcatctgtatcgaataaggggtcaactactgcaattggtggttcata

SEQ ID NO: 625367 - DNA, 75 bp, synthetic construct
  source 1..75: mol_type = other DNA
ttggggccaagtggactgcttccgtatgtctatcatcccaagcatgggtttgcctacaaccagcaagtaacagaa

SEQ ID NO: 625368 - DNA, 75 bp, synthetic construct
  source 1..75: mol_type = other DNA
gaagccctgctggcagagaaagaagagtggctacgcggtaactacgcgattgcggagcttgagaactatccagca

SEQ ID NO: 625369 - DNA, 75 bp, synthetic construct
  source 1..75: mol_type = other DNA
ggttaatttcccgctgctgctggaaaaagggcttgatggtctgcgcgaaaaagtggcggagcgccgctcgcgtat

SEQ ID NO: 625370 - DNA, 75 bp, synthetic construct
  source 1..75: mol_type = other DNA
ggtgtacgtaacaccagtccggatgttccttatctgattcagtcatgggtgatgaccccagataataaaaaatca

SEQ ID NO: 625371 - DNA, 75 bp, synthetic construct
  source 1..75: mol_type = other DNA
ttgcagcaacacgtcttgtttattcagaaggtgaagagcaaatttcactgggtgtacgtaacaccagtccggatg

SEQ ID NO: 625372 - DNA, 75 bp, synthetic construct
  source 1..75: mol_type = other DNA
ggctggtttattcagtatggttctggggcagtataccgaacgttccaggataagatgcgggataccgtcagtgtt

SEQ ID NO: 625373 - DNA, 75 bp, synthetic construct
  source 1..75: mol_type = other DNA
accccgtatgcggcacgaaagcgccagccggtgaggagcaagaaaggtcggattaaacatgaaatgttcgccaaa

SEQ ID NO: 625374 - DNA, 75 bp, synthetic construct
  source 1..75: mol_type = other DNA
accggctgaccggactgattgaatcgctgtcaccgtcagggcgtcggcgactgagcgccgaactggcgaaacgtc

SEQ ID NO: 625375 - DNA, 75 bp, synthetic construct
  source 1..75: mol_type = other DNA
tttcttatcttattcagtcttgggtgatgacaccagttaataaaaaatcagcggattttattataacaccaccgc

SEQ ID NO: 625376 - DNA, 75 bp, synthetic construct
  source 1..75: mol_type = other DNA
atcgtgatgagatctgctgttttaatgatgatatccagggtaccgcagcggtgactttgggatgcctgatggcgg

SEQ ID NO: 625377 - DNA, 75 bp, synthetic construct
  source 1..75: mol_type = other DNA
atccccgctggcgcggggaactcagtatgcgttcaatcactgtcaggcctacttccggtttatccccgctggcgc

SEQ ID NO: 625378 - DNA, 75 bp, synthetic construct
  source 1..75: mol_type = other DNA
gcggtttatccccgctggcgcggggaacacactactgtcggtagctgggaggatgaggagatcggtttatccccg

SEQ ID NO: 625379 - DNA, 75 bp, synthetic construct
  source 1..75: mol_type = other DNA
gcggggaactcagcattaacccccaccagctcgacgtgtgtggcggtttatccccgctggcgcggggaactctga

SEQ ID NO: 625380 - DNA, 75 bp, synthetic construct
  source 1..75: mol_type = other DNA
caggcatcggcacacggtgtcggatgcggcgcgagcgccttatccgacctacggttcaggcctgtaggcatgata

SEQ ID NO: 625381 - DNA, 75 bp, synthetic construct
  source 1..75: mol_type = other DNA
ctggcgcggggaacacatcaacatgcagcgcgaacggctgcccctcgccggtttatccccgctggcgcggggaac

SEQ ID NO: 625382 - DNA, 75 bp, synthetic construct
  source 1..75: mol_type = other DNA
ccgctggcgcggggagctcggcatagccaggctgatccggcgacggccttacggtttatccccgctggcgcgggg

SEQ ID NO: 625383 - DNA, 75 bp, synthetic construct
  source 1..75: mol_type = other DNA
ggtttatccccgctggcgcggggaactcctcaagatagagcctccgggtcgagccgcgatcggtttatccccgct

SEQ ID NO: 625384 - DNA, 75 bp, synthetic construct
  source 1..75: mol_type = other DNA
atcggtttatccccgctggcgcggggaactcaataaaccgggtatcgcgttgcccgtcgggatcggtttatcccc

SEQ ID NO: 625385 - DNA, 75 bp, synthetic construct
  source 1..75: mol_type = other DNA
tcaggtgatatcgccaaaaccggtttatccccgctggcgcggggaacacactgtcatctctctcccactgggaga

SEQ ID NO: 625386 - DNA, 75 bp, synthetic construct
  source 1..75: mol_type = other DNA
cccttgatgaggacgggccgggcgagcttgttcggtttatccccgctggcgcggggaactcggcaatccgttgga

SEQ ID NO: 625387 - DNA, 75 bp, synthetic construct
  source 1..75: mol_type = other DNA
gtgccctggcgttttgctggctctcgcgcggtttatccccgctggcgcggggaacaccgttcctcgcattatttc

SEQ ID NO: 625388 - DNA, 75 bp, synthetic construct
  source 1..75: mol_type = other DNA
tccccgctggcgcggggaactcagcagcaacaatatttcccgcagtgctgccagcggtttatccccgctggcgcg

SEQ ID NO: 625389 - DNA, 75 bp, synthetic construct
  source 1..75: mol_type = other DNA
ctgttgccggatgcggcgtaaacgccttatccggcctacggagggtgcgggaatttgtaggcctgataagacgcg

SEQ ID NO: 625390 - DNA, 75 bp, synthetic construct
  source 1..75: mol_type = other DNA
ccaaagccatggtgcacgtactgaacaatatctggcgtgccgcagaagtcgaaaaagagttgcaacgcaaagctc

SEQ ID NO: 625391 - DNA, 75 bp, synthetic construct
  source 1..75: mol_type = other DNA
cttagcgccgttgtgctgaacgtcttctttaatggctatcagcatcatgctgacctggtgaaggaatccgtctct

SEQ ID NO: 625392 - DNA, 75 bp, synthetic construct
  source 1..75: mol_type = other DNA
gtatatgtgatttttacaggaccacagataaaataaatgaaacgctggttattaataaatataaggtcagtctat

SEQ ID NO: 625393 - DNA, 75 bp, synthetic construct
  source 1..75: mol_type = other DNA
caagcacctggtggaaatgatgccgattatttataccccggtagtcggacatgcgtgtgaacacttttccgacat

SEQ ID NO: 625394 - DNA, 75 bp, synthetic construct
  source 1..75: mol_type = other DNA
taccggcgcggagtattttgagttcgtcgatatgttcatcagtgcggttaagcgccgctggccgaatgtgttatt

SEQ ID NO: 625395 - DNA, 75 bp, synthetic construct
  source 1..75: mol_type = other DNA
ggattcgaattctgtcgcgctgtaactacaccaccaaccgttacaacctctatattgtggcgatcagtctcggcg

SEQ ID NO: 625396 - DNA, 75 bp, synthetic construct
  source 1..75: mol_type = other DNA
acgccgttgttacgccgtgctaaacagcaggtgaaataccagctcgactggcagttgtatgacttcgactgggta

SEQ ID NO: 625397 - DNA, 75 bp, synthetic construct
  source 1..75: mol_type = other DNA
agggaaagcgcggattaagggggtcgaggcgaccgccaattttgataccggaccactgacgcatactgtgagtta

SEQ ID NO: 625398 - DNA, 75 bp, synthetic construct
  source 1..75: mol_type = other DNA
cggcactgttgccggatgcggcgtaaacgccttatccggcctacggagggtgcgggaatttgtaggcctgataag

SEQ ID NO: 625399 - DNA, 75 bp, synthetic construct
  source 1..75: mol_type = other DNA
gcgaaaagtggatccgactctctctcacctggctggtggtcatcctggtctcggtggtgattatctatccgctgg

SEQ ID NO: 625400 - DNA, 75 bp, synthetic construct
  source 1..75: mol_type = other DNA
caccaggtcttgaaactattcttcccatactaaaagaaaaaggattcaagacggcaattatatctggaggtttgg

SEQ ID NO: 625401 - DNA, 75 bp, synthetic construct
  source 1..75: mol_type = other DNA
atcgcaattccttgaaaaggatttcatctgccagagtattacagttaagaggggggcaagacgctgttagattgg

SEQ ID NO: 625402 - DNA, 75 bp, synthetic construct
  source 1..75: mol_type = other DNA
agatattaatcaaatacaggcatcagaaataataaagcttacaaaggaattaaatgagaggaatgggataactca

SEQ ID NO: 625403 - DNA, 75 bp, synthetic construct
  source 1..75: mol_type = other DNA
aacgccagccagcttaaacaagactttgctgatgaaactcactggcggcggctcgcctcacgctttggcgtgcgt

SEQ ID NO: 625404 - DNA, 75 bp, synthetic construct
  source 1..75: mol_type = other DNA
atgaccttactgacacctgaaaacgtggcagcggctagggctgcccgtagagcaaagattgaacactggaaagcc

SEQ ID NO: 625405 - DNA, 75 bp, synthetic construct
  source 1..75: mol_type = other DNA
taaacgatccgcatggcagtccgtcggaaagctgctgcttcatacgaccgcttaaaccgtcagttagtgtcagta

SEQ ID NO: 625406 - DNA, 75 bp, synthetic construct
  source 1..75: mol_type = other DNA
ttttttcctagcgaaacgcttaaggaaggtgcgaataagcggggaaatacttctcggctgactcagtcatttcat

SEQ ID NO: 625407 - DNA, 75 bp, synthetic construct
  source 1..75: mol_type = other DNA
gatcagaatgatatttttcatgccgttcagatgatcctctccggatacacgttttttcccagcgaaacgcttaac

SEQ ID NO: 625408 - DNA, 75 bp, synthetic construct
  source 1..75: mol_type = other DNA
ttagcgctgacctgaaaattaaggacaatattaacagtagtggcggattttctgaaagcaacagcacgaaaaaaa

SEQ ID NO: 625409 - DNA, 75 bp, synthetic construct
  source 1..75: mol_type = other DNA
ttcagcgactacacggatgaagacctgcggaagattggcaccattgatgtggcgctggaactgtacagcaccaac

SEQ ID NO: 625410 - DNA, 75 bp, synthetic construct
  source 1..75: mol_type = other DNA
tcgaccggactacagcgacaaccctcacgccgattgcgaagggatgtttgtaccggaagattacgtaccagtgcc

SEQ ID NO: 625411 - DNA, 75 bp, synthetic construct
  source 1..75: mol_type = other DNA
gctgcgtaaactgccgtcatggcagatgctgctggataccattgccgaggaagtcgacaaatacaacaacctgca

SEQ ID NO: 625412 - DNA, 75 bp, synthetic construct
  source 1..75: mol_type = other DNA
gctgcgtaaattgccgtcgtggcagatgctgctggataccattgctgaggaagtcgacaaatacaacaacctgca

SEQ ID NO: 625413 - DNA, 75 bp, synthetic construct
  source 1..75: mol_type = other DNA
tgtctgtttacctttcaacccgccctggtatcgaacgccttgctttactggccccaggccatcttaaagcgcgta

SEQ ID NO: 625414 - DNA, 75 bp, synthetic construct
  source 1..75: mol_type = other DNA
gatgaaatactctttaatcataacattgattatatcgaaaatatattttttgctatcattaagaatatttatatg

SEQ ID NO: 625415 - DNA, 75 bp, synthetic construct
  source 1..75: mol_type = other DNA
atggttaaaaagtataataaatggaagagagttcgttttttatcctgtacaggatggaataaagaacctcgatgc

SEQ ID NO: 625416 - DNA, 75 bp, synthetic construct
  source 1..75: mol_type = other DNA
gaaaatctgatttcaaaaggtataaaaacaggtgtcgtaactaattcaagtaaacgttatgcagaaaaaataatt

SEQ ID NO: 625417 - DNA, 75 bp, synthetic construct
  source 1..75: mol_type = other DNA
taagatgaataattttagatatcaggaaaatgctgaaattatatgccctgatttttacgatgttaactctaaaac

SEQ ID NO: 625418 - DNA, 75 bp, synthetic construct
  source 1..75: mol_type = other DNA
cgcaggcagcaaaagagatcaaagggctgatcgaagagtcagtcaatcgtgtccagcagggttcgaaactggtga

SEQ ID NO: 625419 - DNA, 75 bp, synthetic construct
  source 1..75: mol_type = other DNA
tgtcggcgcaggcggtggcgctgctgaaacagattaagacaatcaccggcgagtcggttttcgtttttccgggag

SEQ ID NO: 625420 - DNA, 75 bp, synthetic construct
  source 1..75: mol_type = other DNA
gttggaaaaagtcgcagacggtcgcgaccttgacgaaaagctggcggaagccggaattggcggtagcaataaaag

SEQ ID NO: 625421 - DNA, 75 bp, synthetic construct
  source 1..75: mol_type = other DNA
cggccacgctaaacgggatcgaactcataactgtgaatggcgatgaatctccagcagatgccttcagacaaggtg

SEQ ID NO: 625422 - DNA, 75 bp, synthetic construct
  source 1..75: mol_type = other DNA
gctacagttcatgggagattgtgcgcggccaggaaggcgatcactggcaggcgagcgttgcgcaaccgcctattc

SEQ ID NO: 625423 - DNA, 75 bp, synthetic construct
  source 1..75: mol_type = other DNA
aaaaacgcgagcgtttgatcattgtagctgtaagaaatgatcttgctgatggcatcgattatgagtggccttctt

SEQ ID NO: 625424 - DNA, 75 bp, synthetic construct
  source 1..75: mol_type = other DNA
aaaaatatatcatatattcataatagtaataaaggtggcatcgctggagcatttaatagaggaataaataaattg

SEQ ID NO: 625425 - DNA, 75 bp, synthetic construct
  source 1..75: mol_type = other DNA
aagatgtagatgagttgtgtaagaaagtgacaagttggatgtattcgcatcctggagagagaattagatatgaac

SEQ ID NO: 625426 - DNA, 75 bp, synthetic construct
  source 1..75: mol_type = other DNA
tcatagaaggtgcttacgaagtggtgggcgtgtttgacctgattgaggaaaagcgtgatgccatgcagtcgctgg

SEQ ID NO: 625427 - DNA, 75 bp, synthetic construct
  source 1..75: mol_type = other DNA
atgatatttaacgatgaagataagggcaaacgcacgcgccttgaagacggttaccgcacgctggagaacaaaaaa

SEQ ID NO: 625428 - DNA, 75 bp, synthetic construct
  source 1..75: mol_type = other DNA
gaagcgttgtgagcaaaaacctgatagtaatttaagtcgttgtgctgccgcgatctttcaaaagagcagaaaaga

SEQ ID NO: 625429 - DNA, 75 bp, synthetic construct
  source 1..75: mol_type = other DNA
ggcggcgggcgtaactgatgcgaattattaccccgaagggatgcacagccatatgcgggagaactggcgcgaata

SEQ ID NO: 625430 - DNA, 75 bp, synthetic construct
  source 1..75: mol_type = other DNA
cttaaaagcgtggaggtgtttaccgataccgatggcgaagagattgtgtccatggtggtgattgacgttccccgc

SEQ ID NO: 625431 - DNA, 75 bp, synthetic construct
  source 1..75: mol_type = other DNA
gcactgaatatcctttatggtagtgctgctccttcaatgcaggatatccaaaaccgtgccattggtcgtttcaat

SEQ ID NO: 625432 - DNA, 75 bp, synthetic construct
  source 1..75: mol_type = other DNA
taaacgctatgcgtacattcccaccatcaccgtactggaaagcctgcagcgggaaggctttcagccattcttcgc

SEQ ID NO: 625433 - DNA, 75 bp, synthetic construct
  source 1..75: mol_type = other DNA
gaataaatttagaggcagtgatcgcgttattatcgtcggcagtggcccaagcgccgcaaactttgttgcgccgcg

SEQ ID NO: 625434 - DNA, 75 bp, synthetic construct
  source 1..75: mol_type = other DNA
taaatatactgtattttattccaatagagagggtaaatgggggttcaatgagttgaagtgtaagaaaggttctga

SEQ ID NO: 625435 - DNA, 75 bp, synthetic construct
  source 1..75: mol_type = other DNA
gtgccggaactggaaagcaatccacagtatgtggctcgcgaatcaatcactcagtggcaaacgatggatggtcgc

SEQ ID NO: 625436 - DNA, 75 bp, synthetic construct
  source 1..75: mol_type = other DNA
caatctgatatcacctgggttccgctctcagttggtgaaatgatccgcgtgtcgggtaacatcggcctgaaaatg

SEQ ID NO: 625437 - DNA, 75 bp, synthetic construct
  source 1..75: mol_type = other DNA
ctggaattgcgaccattttgttgttttaaaaaaaataaaaaaaggtaagttcatcattcatgatccagagaaagg

SEQ ID NO: 625438 - DNA, 75 bp, synthetic construct
  source 1..75: mol_type = other DNA
agaaaaccagctttgcttatccttgatgaagcaacaagcaatcttgaccatgaatctgaaacacaagttattgat

SEQ ID NO: 625439 - DNA, 75 bp, synthetic construct
  source 1..75: mol_type = other DNA
tcagctttatctggcaataaacgacatagaacacacgaaaacgaaggcgatgtccccgcagaccaacggcatctg

SEQ ID NO: 625440 - DNA, 75 bp, synthetic construct
  source 1..75: mol_type = other DNA
aaaactgaccatcgattctaccgttaaagggcaagcgttgccgttgagcgtcacgtatcaaggtgaatctgctga

SEQ ID NO: 625441 - DNA, 75 bp, synthetic construct
  source 1..75: mol_type = other DNA
aatcctgcaacaatgctagcaaatattttggtagaggaaaagtctataacgaataatacaaaaaaagaacttcgt

SEQ ID NO: 625442 - DNA, 75 bp, synthetic construct
  source 1..75: mol_type = other DNA
ttaacaacaatatcaggaaaacctttaacattctctggtttatcaaagaatattagttcacttgataaaactaaa

SEQ ID NO: 625443 - DNA, 75 bp, synthetic construct
  source 1..75: mol_type = other DNA
ggcattgtggattttgttgcagaagaacaaataaccgttatagaacagggacaagaaaaagaaattacgaatcca

SEQ ID NO: 625444 - DNA, 75 bp, synthetic construct
  source 1..75: mol_type = other DNA
gaacgcattgataacagaaatcagcggcatgttgaagtttataactgaagaaagaatcatggtggtacaaaacgg

SEQ ID NO: 625445 - DNA, 75 bp, synthetic construct
  source 1..75: mol_type = other DNA
ttttggttgaagagaagtcaataacggatccaacgaaaaaagtataccgtacaataccaaacactacatatgctt

SEQ ID NO: 625446 - DNA, 75 bp, synthetic construct
  source 1..75: mol_type = other DNA
ttttggtagaggaaaagtctataacgaataatacaaaaaaagaacttcgtacgataccaaatactacatacgtag

SEQ ID NO: 625447 - DNA, 75 bp, synthetic construct
  source 1..75: mol_type = other DNA
gcgaagcgctggagtcgatgattaagcacgaggcgactcgtccgttggtgttctcatcaaactactatcagactc

SEQ ID NO: 625448 - DNA, 75 bp, synthetic construct
  source 1..75: mol_type = other DNA
gaaaccatgttcctgctgggaagcgaagcgctgaaatcgatgattgataacgaagcgtctcgtccactggtcttc

SEQ ID NO: 625449 - DNA, 75 bp, synthetic construct
  source 1..75: mol_type = other DNA
cggcgaaggaacttgcgctcgaccttaaagataacattaagcagcagatcaccagcctcaatgactcccttgaaa

SEQ ID NO: 625450 - DNA, 75 bp, synthetic construct
  source 1..75: mol_type = other DNA
aatcctgcaacaatgctagcaaatattttggtagaggaaaaatccataacggatagcacaaaaaaagaacttcgt

SEQ ID NO: 625451 - DNA, 75 bp, synthetic construct
  source 1..75: mol_type = other DNA
ttagcaaggattatataccttgtgaagaacctgttattttatcaaataatgatttgaagatagagcgtattgatt

SEQ ID NO: 625452 - DNA, 75 bp, synthetic construct
  source 1..75: mol_type = other DNA
aaaaacttgcaggactctttaagaactcaggaagtagtcgcgcaggagcagaaagatctgcgtatccgtcagatt

SEQ ID NO: 625453 - DNA, 75 bp, synthetic construct
  source 1..75: mol_type = other DNA
tttgcgcgtggtgcagagggccagcaagaagccccactcctgggaaaagatgattacccctggctgacgcatgtc

SEQ ID NO: 625454 - DNA, 75 bp, synthetic construct
  source 1..75: mol_type = other DNA
acagcagcagtcagagccgggacgtgacatttatcgccgatgtcaggacagcgaagatcgctgaactggaggtca

SEQ ID NO: 625455 - DNA, 75 bp, synthetic construct
  source 1..75: mol_type = other DNA
caaacctgaatcatgccgcaatgagcacgcttcttggtgagaggattatggaccgcatgaccatgaacggtggtc

SEQ ID NO: 625456 - DNA, 75 bp, synthetic construct
  source 1..75: mol_type = other DNA
ttataagcgtaagcataaacgccttcaagggtatccggggttatgccatgcagttctgcaagcgttgctcccata

SEQ ID NO: 625457 - DNA, 75 bp, synthetic construct
  source 1..75: mol_type = other DNA
ggcggacaacggcgcaacggttgctccggtggtcatcacagggccggacggcacggtggagatctcagtcaccag

SEQ ID NO: 625458 - DNA, 75 bp, synthetic construct
  source 1..75: mol_type = other DNA
agccggaacgtgacgtttgttgccgatgtcaggacggcgaagatcgcggatctggtggtcattaaggacggctca

SEQ ID NO: 625459 - DNA, 75 bp, synthetic construct
  source 1..75: mol_type = other DNA
ggcagacggcgcaatggcgaacatgctgcaggtaaaggttaccgacgcgttcggtaatgcgcttgccgggcagac

SEQ ID NO: 625460 - DNA, 75 bp, synthetic construct
  source 1..75: mol_type = other DNA
gacgcgcacggtaacctggttgaagggggcgagtccttactgtctggtgataacgtaatagtggaaggagccgta

SEQ ID NO: 625461 - DNA, 75 bp, synthetic construct
  source 1..75: mol_type = other DNA
agacagtatatggcacattttgcggaagcgaatttgaatgcgcaactgaagatggcgggttgggtcgatgccaat

SEQ ID NO: 625462 - DNA, 75 bp, synthetic construct
  source 1..75: mol_type = other DNA
ggctggcactgacccgtcagaaacgggaagctgggttgaatcaggtggcgtgtataccacaacccgaatggcgac

SEQ ID NO: 625463 - DNA, 75 bp, synthetic construct
  source 1..75: mol_type = other DNA
atcaacagcagcagtcagagccgggacgtgacgtttatcgcggatgtcaggacggcgaagatcgctgatctggtg

SEQ ID NO: 625464 - DNA, 75 bp, synthetic construct
  source 1..75: mol_type = other DNA
cggtcaccacgcagccggacggtacggtggaaatcagtgtcaccagccagacggcgggcaccagctcggtcaccg

SEQ ID NO: 625465 - DNA, 75 bp, synthetic construct
  source 1..75: mol_type = other DNA
ttattccatccacagtggtgctccggtgcaaacaaattcagccatcaggacagataaaacgacatatatcgccgg

SEQ ID NO: 625466 - DNA, 75 bp, synthetic construct
  source 1..75: mol_type = other DNA
tgaaggtcaccgatgctaacggtaatacgcttgccgggcagacggtcagcgtgatggcaggcaacggtgcaacgg

SEQ ID NO: 625467 - DNA, 75 bp, synthetic construct
  source 1..75: mol_type = other DNA
agtaaaaaaacagaattacccctgaagttactggttgcgggtgattttagtaatggtcaggaatccgcgccatta

SEQ ID NO: 625468 - DNA, 75 bp, synthetic construct
  source 1..75: mol_type = other DNA
aaacgtgctgcttacatccaccgtcacagaggcacaaaagcggcgctgatggcgtcgctggctgacagtcccttc

SEQ ID NO: 625469 - DNA, 75 bp, synthetic construct
  source 1..75: mol_type = other DNA
ccgatgcattcggtaatgcgcttgccgggcagacggtcagcgtgacggcaggcaatggcgcaacggtcgctccga

SEQ ID NO: 625470 - DNA, 75 bp, synthetic construct
  source 1..75: mol_type = other DNA
atgcgaaccagatacgccgtgaccgtccactggcacgcgaagaactgatgtaccacgtcccgagtatttttggag

SEQ ID NO: 625471 - DNA, 75 bp, synthetic construct
  source 1..75: mol_type = other DNA
gtgaggaagtattttgattcaatgcttgagcgagaaagaaaaagacaagatttattaatgtctattgaagatcaa

SEQ ID NO: 625472 - DNA, 75 bp, synthetic construct
  source 1..75: mol_type = other DNA
attaaagaaaaggccgaactttccggtatgagtgtgggggaatatcttcgtcgttgtgctctgggacgccgcatc

SEQ ID NO: 625473 - DNA, 75 bp, synthetic construct
  source 1..75: mol_type = other DNA
atgcgttcgggaatgcacttgccgggcagacggtcagcgtgacggcaggcaacggcgcaacggttgctccggtgg

SEQ ID NO: 625474 - DNA, 75 bp, synthetic construct
  source 1..75: mol_type = other DNA
gaatcgccatcaacggtcgcggcacgctttggtatcaccgttgatgaattacgtcgcctgaatcagtttcgtacc

SEQ ID NO: 625475 - DNA, 75 bp, synthetic construct
  source 1..75: mol_type = other DNA
accagtcagacggcgggagttagcgcagtcacagcaaccatcaacaatcatagcctgagccagaacgtcaccttt

SEQ ID NO: 625476 - DNA, 75 bp, synthetic construct
  source 1..75: mol_type = other DNA
agacggtcagcgtgatggcaggcaacggcgcaacggttgccccaacggtgattacagagccggacggcacggcgg

SEQ ID NO: 625477 - DNA, 75 bp, synthetic construct
  source 1..75: mol_type = other DNA
gacgtttgttgccgatgtcaggacggcgcagatcgctgatctggtggtcattaaggacggctcagtggctgacgg

SEQ ID NO: 625478 - DNA, 75 bp, synthetic construct
  source 1..75: mol_type = other DNA
tggtggtcattaaggatggttcagaggcggacggttcgacggcgaacacgctgcgggcgagggtcaccgatgcgt

SEQ ID NO: 625479 - DNA, 75 bp, synthetic construct
  source 1..75: mol_type = other DNA
gcgggcgagggtgaccgatgcgttcggtaatacgcttgccgggcagacggtgagcgtgttgggaggcaacggcgc

SEQ ID NO: 625480 - DNA, 75 bp, synthetic construct
  source 1..75: mol_type = other DNA
ggcccccacaaactttagcgaggaagaactttcacgtattgcggttgctactcgaactattgtgatagctgtcag

SEQ ID NO: 625481 - DNA, 75 bp, synthetic construct
  source 1..75: mol_type = other DNA
gagcccctgagatgcaggctacattcaccattccggatttacgtattatggatgacggatggctggccgctgtat

SEQ ID NO: 625482 - DNA, 75 bp, synthetic construct
  source 1..75: mol_type = other DNA
gcgtctgcggcgggccggagagataaacggacaacatgtccctgaaattattctgctcaactcccatgacggtac

SEQ ID NO: 625483 - DNA, 75 bp, synthetic construct
  source 1..75: mol_type = other DNA
taagcgaattcatgctttaattaatagtaatacgataaaaattccagagggtgagaaagctcaagagacaatgca

SEQ ID NO: 625484 - DNA, 75 bp, synthetic construct
  source 1..75: mol_type = other DNA
atgcagttcttcctgtgataacagggatgaaaactctttctgattttgatgtttcgaactggtttattggtctgc

SEQ ID NO: 625485 - DNA, 75 bp, synthetic construct
  source 1..75: mol_type = other DNA
atatccggaaacagctcctccgtcagcaggagctacctgtaagactcttccggggcggggactgaccccacaacc

SEQ ID NO: 625486 - DNA, 75 bp, synthetic construct
  source 1..75: mol_type = other DNA
atttgtataaaccgagtaattttggtcgccataccttatctgctcatgattttggacggtacaaatctctttcgc

SEQ ID NO: 625487 - DNA, 75 bp, synthetic construct
  source 1..75: mol_type = other DNA
tgatgacgggatgcgggtatcgctatacgcgtgcccgcaatcttcctgaaaaatcgattctgcacagcagggagc

SEQ ID NO: 625488 - DNA, 75 bp, synthetic construct
  source 1..75: mol_type = other DNA
taccccgttgggggaaaaggtgcatacctgaatcatcattatggtgatcaagggcatgtaaagcccaccagcctg

SEQ ID NO: 625489 - DNA, 75 bp, synthetic construct
  source 1..75: mol_type = other DNA
tattgttgatgattttttctatgagtgggataagagaaagttttttagtgcatcgtcaatttgtataaaaaaaca

SEQ ID NO: 625490 - DNA, 75 bp, synthetic construct
  source 1..75: mol_type = other DNA
cgctaacgtgtaaatggaattatctggctcatgagcaacgctttagccatagcttactggaatcgatagacctga

SEQ ID NO: 625491 - DNA, 75 bp, synthetic construct
  source 1..75: mol_type = other DNA
aaaaagaactagaaggtgaatttactgcttactggcgaccaagcgaatctctttttgttttatcaaacgcaaatc

SEQ ID NO: 625492 - DNA, 75 bp, synthetic construct
  source 1..75: mol_type = other DNA
atagataaagatcacatcaatcgctttgaggagtatgttaatactttcagagtttatttagactctgcaacagga

SEQ ID NO: 625493 - DNA, 75 bp, synthetic construct
  source 1..75: mol_type = other DNA
acgacagccccaacggtcatcacagagccggacgggacgttggagatctcagtcaccagccagacggcgggagtc

SEQ ID NO: 625494 - DNA, 75 bp, synthetic construct
  source 1..75: mol_type = other DNA
gagacgctatcagccaggttatccagctgccaaatacaaaagcggaaagcattacctggaatgaagatcaaaaag

SEQ ID NO: 625495 - DNA, 75 bp, synthetic construct
  source 1..75: mol_type = other DNA
atggtggttgtagaaaaacccacactaagcctcgctgattcaacgctttctgtcgatctacaaattctgcttgcg

SEQ ID NO: 625496 - DNA, 75 bp, synthetic construct
  source 1..75: mol_type = other DNA
cgccgatgtcaggacagcgaagatcgcggacctggtggtcattaaggacgactcagtggcagacggtgcaatggc

SEQ ID NO: 625497 - DNA, 75 bp, synthetic construct
  source 1..75: mol_type = other DNA
gtcaccgtcagcatcaacagcagcagtcagagccgggacgtgacatttatcgccgatgtcaggacagcgaagatc

SEQ ID NO: 625498 - DNA, 75 bp, synthetic construct
  source 1..75: mol_type = other DNA
tgaaagtcaccgacgcgttcggcaatgcgctggccggacagacggtcagcgtctcagcgggcaacggtgcagcgg

SEQ ID NO: 625499 - DNA, 75 bp, synthetic construct
  source 1..75: mol_type = other DNA
aaaactccgatgtgatatttcgtgaactggccgacaaactgcacggcatgagccaggcagagaagttttctgttc

SEQ ID NO: 625500 - DNA, 75 bp, synthetic construct
  source 1..75: mol_type = other DNA
agattcgttacaagctggtttccggtcgttcgcgtaactacgagcacaccacggaaggcccggtctttgctgccg

SEQ ID NO: 625501 - DNA, 75 bp, synthetic construct
  source 1..75: mol_type = other DNA
tcgctagagaagcagcaaaagaatcagacattgaacacgatccaagctttaaaggaagggttgacttagttcttt

SEQ ID NO: 625502 - DNA, 75 bp, synthetic construct
  source 1..75: mol_type = other DNA
attaccgggaaacccaagaatggtaaagggaatgatgttgtatttaaattcaagattaaaaaatggtttactagt

SEQ ID NO: 625503 - DNA, 75 bp, synthetic construct
  source 1..75: mol_type = other DNA
tcacgctgttactaacccataatatgagaaatacggattataattggacggctgggatttatggaattaatgttg

SEQ ID NO: 625504 - DNA, 75 bp, synthetic construct
  source 1..75: mol_type = other DNA
acagtatatggcgcattttgcggaagcgaatttgaatgcgcaactgaagatgtctggttggagcgatgccaatta

SEQ ID NO: 625505 - DNA, 75 bp, synthetic construct
  source 1..75: mol_type = other DNA
catagcggattttcaggatttcgctgatcagtggtttgctgctgcgctgggcaggccgatagaactgacggtgtt

SEQ ID NO: 625506 - DNA, 75 bp, synthetic construct
  source 1..75: mol_type = other DNA
caagccaaactggaacgcagaacaggcatccgcccttcacgcagccaggtgattgaaaagtttctgagtagcggg

SEQ ID NO: 625507 - DNA, 75 bp, synthetic construct
  source 1..75: mol_type = other DNA
cctggtgcgccaggtcgaaagagagcaagccaaactggaacgcagaacaggcatccgcccttcacgcagccaggt

SEQ ID NO: 625508 - DNA, 75 bp, synthetic construct
  source 1..75: mol_type = other DNA
ctaatggctgtgaaatcacttaccagacgttaattaatgaaggtttgttgcctgtaggctatacaggaactaacg

SEQ ID NO: 625509 - DNA, 75 bp, synthetic construct
  source 1..75: mol_type = other DNA
tgagcgatttgtaggcatgataagacgcgttagcgtcgcattaggcaatgggcaaacgctccctcagttaatcgc

SEQ ID NO: 625510 - DNA, 75 bp, synthetic construct
  source 1..75: mol_type = other DNA
gcagaagagcagggctatgcggtcaatcgtcaggctagtttgctgcgtagtaaaaaatccaatgtgattggcatg

SEQ ID NO: 625511 - DNA, 75 bp, synthetic construct
  source 1..75: mol_type = other DNA
gcctgatggtttttcttgaagtcgcccgtagtggtgggatcatgaatgcttcaaaaaaacttaatatcacccagc

SEQ ID NO: 625512 - DNA, 75 bp, synthetic construct
  source 1..75: mol_type = other DNA
ggccctgattactgaagacggcgaagcgattgaaggcgaggccctggatgatatcactgtcgccggcgtggtgac

SEQ ID NO: 625513 - DNA, 75 bp, synthetic construct
  source 1..75: mol_type = other DNA
gtgatcgagggtgaagccctggacgatgttactgtcatcggcgtcgtgacatttactatctgcgatgttcgttct

SEQ ID NO: 625514 - DNA, 75 bp, synthetic construct
  source 1..75: mol_type = other DNA
atgctgtccacgactttcaacggctggttactgttgctccggggagcagtcacttatgtggccgccgtgtcgtgt

SEQ ID NO: 625515 - DNA, 75 bp, synthetic construct
  source 1..75: mol_type = other DNA
gtgctggtggacgcctcctgttccgccgaggcggtggcgcgtatctcgccgagaaccgcaacgttccataaaggg

SEQ ID NO: 625516 - DNA, 75 bp, synthetic construct
  source 1..75: mol_type = other DNA
gatcggcttatcgagctatgtcgtgaatggcctcgtgtctgctttggatcgtctggtgaatatgcggctatcaga

SEQ ID NO: 625517 - DNA, 75 bp, synthetic construct
  source 1..75: mol_type = other DNA
agaactaaagacaacgggtaatgcgtctgttgcatcagatctgacagtcggtgaaacctctacccttaatggtcc

SEQ ID NO: 625518 - DNA, 75 bp, synthetic construct
  source 1..75: mol_type = other DNA
ttggctcaacacatgcatcgccggactatagcggaggcgacggtaccgcacgttcagactacatgggaatgtacg

SEQ ID NO: 625519 - DNA, 75 bp, synthetic construct
  source 1..75: mol_type = other DNA
aattcgactttggtctgcgtccgtccttaggttatgtgtactctaaaggtaaagatatcaaaggggtacccggac

SEQ ID NO: 625520 - DNA, 75 bp, synthetic construct
  source 1..75: mol_type = other DNA
ttattttggttcgaacctaattggaataaacgagtctgattggtctgagttcgccgaacttcgtgaaagagaaat

SEQ ID NO: 625521 - DNA, 75 bp, synthetic construct
  source 1..75: mol_type = other DNA
aaaaacccgcatccaaactggattgtcgggggatgccttgcgccatcaacattgacgaaagcggcgcggtcgggg

SEQ ID NO: 625522 - DNA, 75 bp, synthetic construct
  source 1..75: mol_type = other DNA
ggcgggcagttggggatcttccgcaatggctactgggggcacccgcagtacaaactgccgccagaagctaacctg

SEQ ID NO: 625523 - DNA, 75 bp, synthetic construct
  source 1..75: mol_type = other DNA
agttcaacaaaccgtggagcgaaatcggcacttgtagattcaatctgtcaatgcaacacccctttcaattatctc

SEQ ID NO: 625524 - DNA, 75 bp, synthetic construct
  source 1..75: mol_type = other DNA
tggttatatatctggaacacttattgcggaatatgatgaacgtcgttgtagtggtagtaagaacgagcactgtta

SEQ ID NO: 625525 - DNA, 75 bp, synthetic construct
  source 1..75: mol_type = other DNA
tcgtgtgttaatggtaaatggcagacagcaagcggtgatggcctgaaaggtatttttataacaataaccgatcaa

SEQ ID NO: 625526 - DNA, 75 bp, synthetic construct
  source 1..75: mol_type = other DNA
ttgatggtgggatgagcagaaacaccaagatagcttccggctatggtggtcagtggagtgagaactctaatagct

SEQ ID NO: 625527 - DNA, 75 bp, synthetic construct
  source 1..75: mol_type = other DNA
ttatgttctttgcgccactgatcattaatcgcatcggtgggaaaaacgccctgctgctggctggcactattatgt

SEQ ID NO: 625528 - DNA, 75 bp, synthetic construct
  source 1..75: mol_type = other DNA
ccaccggcacgccaggcactggcgcaggctgctctgacttaccgttatggtgacgaacatcacccaatcaccact

SEQ ID NO: 625529 - DNA, 75 bp, synthetic construct
  source 1..75: mol_type = other DNA
tcttcaatgtattctgtttacctgcgtcgtgatggaacgttgccgatgacaggtgatctgaatcttggtggtaag

SEQ ID NO: 625530 - DNA, 75 bp, synthetic construct
  source 1..75: mol_type = other DNA
caataaatcacgtgactttattgtcacggttccccctatggtacgtttaaatcccagtgagcaaattcaaataag

SEQ ID NO: 625531 - DNA, 75 bp, synthetic construct
  source 1..75: mol_type = other DNA
tatcgcgcgtttgtatgtggatatgaatacaaacaaagctataacgctggattcggcttataatataattggctc

SEQ ID NO: 625532 - DNA, 75 bp, synthetic construct
  source 1..75: mol_type = other DNA
tgctatttgtatttctttatacagagtggtttgtcattgatacattttatttttagtctcatactcagtttctgc

SEQ ID NO: 625533 - DNA, 75 bp, synthetic construct
  source 1..75: mol_type = other DNA
cgattagtaccgcattgattcccaactggaaagcgctcgatccgcgtgtggttaaaggcgactggtttaacgttg

SEQ ID NO: 625534 - DNA, 75 bp, synthetic construct
  source 1..75: mol_type = other DNA
actgatgaaaccgatgataaacatgattttactaatacaggtgatctgaagggcagtacgccttctatcatgaca

SEQ ID NO: 625535 - DNA, 75 bp, synthetic construct
  source 1..75: mol_type = other DNA
agtgtgagagtcagcctgactcagggcagtaacccggctaaagcggggaataccgtggagattgtggtcgacggt

SEQ ID NO: 625536 - DNA, 75 bp, synthetic construct
  source 1..75: mol_type = other DNA
attcggcttataatataattggctctcagaaagaaggaaccgatcctgctaaagctcttatcatgtcagatgata

SEQ ID NO: 625537 - DNA, 75 bp, synthetic construct
  source 1..75: mol_type = other DNA
actcctaagcgctgggaaccgtttgatgtcgcgatgatatttgtgggcaccatggcaaaccgcttctctgatagc

SEQ ID NO: 625538 - DNA, 75 bp, synthetic construct
  source 1..75: mol_type = other DNA
aaggtggaagtgacctttacggatgaagagggtaatgagcagaaagtcacgctggagaaaggggatggcaactgg

SEQ ID NO: 625539 - DNA, 75 bp, synthetic construct
  source 1..75: mol_type = other DNA
gcatgaaatcatagttgcattcggtacgagccaaaaaacacacaaactctacccatcagagtttcttattcaaaa

SEQ ID NO: 625540 - DNA, 75 bp, synthetic construct
  source 1..75: mol_type = other DNA
tgctcttagtgattagctacccagcatactacgactaccagggcgggggaaaccccgctctaccctcactcctga

SEQ ID NO: 625541 - DNA, 75 bp, synthetic construct
  source 1..75: mol_type = other DNA
acctgaggctttttttacctactctgcaagcagcgacatctggtttgacacagagcgatccgcgccgtcagttgg

SEQ ID NO: 625542 - DNA, 75 bp, synthetic construct
  source 1..75: mol_type = other DNA
cttatccagatcgtcaatcaggccatgatccgcgattacccgttcctggtacgggaaaatgggactggaaagggc

SEQ ID NO: 625543 - DNA, 75 bp, synthetic construct
  source 1..75: mol_type = other DNA
ggttcagtttctgttgaactgccgggtgatgcaaataaaggcgatactgttgaaatcacctttgaagatgaaaat

SEQ ID NO: 625544 - DNA, 75 bp, synthetic construct
  source 1..75: mol_type = other DNA
atgcagtcactgtcacttcatcaaaatagcggatatcaaccggctgcgatgataaatcgcaatcaacctgtctcg

SEQ ID NO: 625545 - DNA, 75 bp, synthetic construct
  source 1..75: mol_type = other DNA
agtatggaagattagcgcacaggaggcttaatcaccctcactggtcactgcatgacatccggcgcacctttacaa

SEQ ID NO: 625546 - DNA, 75 bp, synthetic construct
  source 1..75: mol_type = other DNA
ttcaccagagcagagtttctgtctgccaaagaagtatcatttattaaatcgaatatgacagctgttatgtttgat

SEQ ID NO: 625547 - DNA, 75 bp, synthetic construct
  source 1..75: mol_type = other DNA
ctggcgttcgaagaaaagcatggttcccaggttgatttaatttttcgttttcttgatcacgcctttgcaaccggc

SEQ ID NO: 625548 - DNA, 75 bp, synthetic construct
  source 1..75: mol_type = other DNA
ctggcgctaaaaaataccggtgagtttagcccgctctgtttgcaattagtgagaacaggagaggcatccggctct

SEQ ID NO: 625549 - DNA, 75 bp, synthetic construct
  source 1..75: mol_type = other DNA
atttcaacagtgaaagataccgcgagaacgtccgccagctgactccggcaattcttgctgttctgccgctcaagt

SEQ ID NO: 625550 - DNA, 75 bp, synthetic construct
  source 1..75: mol_type = other DNA
gtttcgtgaagtctcaatcagtaatgatattataagcgtaaaattctatagaaatgaagaaatagaatgtgcttg

SEQ ID NO: 625551 - DNA, 75 bp, synthetic construct
  source 1..75: mol_type = other DNA
tgatgtggtgcaaggaaataataaattagatcttgatttactacgtaattttaatggggtgccaggtttaaatag

SEQ ID NO: 625552 - DNA, 75 bp, synthetic construct
  source 1..75: mol_type = other DNA
gctccaaatctcatggtaaatatgcgcttttcccaatttttactgcgagttggcgagctactcgtataaagaata

SEQ ID NO: 625553 - DNA, 75 bp, synthetic construct
  source 1..75: mol_type = other DNA
ttgcattacagaacaattggaattaactattgattattcagaatattttggaatgaagatctcgatggttatatc

SEQ ID NO: 625554 - DNA, 75 bp, synthetic construct
  source 1..75: mol_type = other DNA
agttgacttctcgcagagtcaacttggtcatagtaattttcgcgaatgtcagattagaaattcaaacttcgataa

SEQ ID NO: 625555 - DNA, 75 bp, synthetic construct
  source 1..75: mol_type = other DNA
aaatctcaggataaacatgcgcttttcccaatttttactgcgagttggcgagctaatcgtataaagaataaaggt

SEQ ID NO: 625556 - DNA, 75 bp, synthetic construct
  source 1..75: mol_type = other DNA
gaacatactcccgatgtaaacagcgctctaatcagaatcttacgtactatttatggtaaagaagttctcatgctg

SEQ ID NO: 625557 - DNA, 75 bp, synthetic construct
  source 1..75: mol_type = other DNA
gccggagcatcacgccccactctggcagcaggtcagtcaggtggaacacagaccgttgagtacgtatgaggagct

SEQ ID NO: 625558 - DNA, 75 bp, synthetic construct
  source 1..75: mol_type = other DNA
attaaagctcctgtgagtggtactgttcaggagttaaatatacatacagaaggtggtgttgtcacaacagcagaa

SEQ ID NO: 625559 - DNA, 75 bp, synthetic construct
  source 1..75: mol_type = other DNA
gaccgctacaacctgattgacgaagacgaacctgcacagttggtattgtgtaacgaataccgccagttccgctga

SEQ ID NO: 625560 - DNA, 75 bp, synthetic construct
  source 1..75: mol_type = other DNA
ttggtttgatcaagcggacccagcgtatctatggaaacgtatttaccgtttccggtgttattgccgcatttcgtc

SEQ ID NO: 625561 - DNA, 75 bp, synthetic construct
  source 1..75: mol_type = other DNA
attccctgttttaatgaggagaaaaacgttgaggaaaccatacatgccgctttagcacagcgttatgagaacatt

SEQ ID NO: 625562 - DNA, 75 bp, synthetic construct
  source 1..75: mol_type = other DNA
tacggtgcgcgacgaaccgatgatcaccttgcctcgacaatttgcttcccgagaatggtatgtgattaaaggagg

SEQ ID NO: 625563 - DNA, 75 bp, synthetic construct
  source 1..75: mol_type = other DNA
ttttcctcactggacaacatgattgctcaggggaacccgatgccggtgccttacggtgaaatgctggttggctcc

SEQ ID NO: 625564 - DNA, 75 bp, synthetic construct
  source 1..75: mol_type = other DNA
agcggaaacaaacgcctatggttttagcatagagaatctggaggcaacaagcataaattacgacccaaagcgagg

SEQ ID NO: 625565 - DNA, 75 bp, synthetic construct
  source 1..75: mol_type = other DNA
gaactgctgcccgtcgatcccggctgtgtggtatatgcgctgggaaggtgtcagcgatggcctgaaggtgaccgc

SEQ ID NO: 625566 - DNA, 75 bp, synthetic construct
  source 1..75: mol_type = other DNA
atatgcccagaaaaggtagcagaatacctaagcgagttcagcggaaaacatttcctcgatgtatataattattat

SEQ ID NO: 625567 - DNA, 75 bp, synthetic construct
  source 1..75: mol_type = other DNA
cagtctttttttgactcactaataatgttagatatatcaaaggattttatcgaagagttattgactgcaaaacat

SEQ ID NO: 625568 - DNA, 75 bp, synthetic construct
  source 1..75: mol_type = other DNA
aaggttgtggaaacaccaatctatggttatgtgtggctgaacatggaaacggcacatcagcttgagttgctatcg

SEQ ID NO: 625569 - DNA, 75 bp, synthetic construct
  source 1..75: mol_type = other DNA
accgcgggcggagtcatcgatcgggacaccattaagtggtggctgaaacagtcacgggaagcacaatcagccatt

SEQ ID NO: 625570 - DNA, 75 bp, synthetic construct
  source 1..75: mol_type = other DNA
tgcgtccgtgaaagaagcaccaattgggatcgaggtcacccccgcgcacgtcactgaatatctgaacaaagtact

SEQ ID NO: 625571 - DNA, 75 bp, synthetic construct
  source 1..75: mol_type = other DNA
tacccggcgtggatgctgcgacccgcacgctgcaactgcgtctggaagtcgacaacgctgacgaagcgctaaaac

SEQ ID NO: 625572 - DNA, 75 bp, synthetic construct
  source 1..75: mol_type = other DNA
atcgcgatgtacgcacaatcgttgagctggggaaagccatagacttcgatgccagaactgctatcccattcgaag

SEQ ID NO: 625573 - DNA, 75 bp, synthetic construct
  source 1..75: mol_type = other DNA
aacgattatgatgaagacgactttaaaaaacccgtccgcgtcaatttgcccgttgttgatgacctcccgccagaa

SEQ ID NO: 625574 - DNA, 75 bp, synthetic construct
  source 1..75: mol_type = other DNA
caaattcatcaccatgccgggccacaaggattactcccgcgccatcgtggttgcgtccgtgaaagaagcaccaat

SEQ ID NO: 625575 - DNA, 75 bp, synthetic construct
  source 1..75: mol_type = other DNA
cagtccgcaaattttacaagccaccggtattccacgccgactcttccctcgtctggtggaagcgggtgaacagat

SEQ ID NO: 625576 - DNA, 75 bp, synthetic construct
  source 1..75: mol_type = other DNA
ccacagatgcaatgacccgaattattttgggatacatactttattactgggtactggtggtcgtggttgttgtgg

SEQ ID NO: 625577 - DNA, 75 bp, synthetic construct
  source 1..75: mol_type = other DNA
atgggcgcgattgttgccagacaggacaattttcacaagacgtcgctgatggggcgcttacgccatttcgtgtta

SEQ ID NO: 625578 - DNA, 75 bp, synthetic construct
  source 1..75: mol_type = other DNA
agcagcgccagacgacgttcactatcaggacaatgctcaggaaactgaaaaactgacgggaggccaggaagaaaa

SEQ ID NO: 625579 - DNA, 75 bp, synthetic construct
  source 1..75: mol_type = other DNA
gcagccatttcggttcggtgtttgatgccacgcaaacggaaattaccgccgtgggcgatttacaactggtgaaaa

SEQ ID NO: 625580 - DNA, 75 bp, synthetic construct
  source 1..75: mol_type = other DNA
gaatcaaccagatacgccgcgatcgccctctgaccgacgacgaattacaccagcatgttcccagcgtttttggcg

SEQ ID NO: 625581 - DNA, 75 bp, synthetic construct
  source 1..75: mol_type = other DNA
caattcattttactgcatttgttaagaaagataatagtggcaagaatgtagctgaaggtgccttctcagcagttg

SEQ ID NO: 625582 - DNA, 75 bp, synthetic construct
  source 1..75: mol_type = other DNA
atgaaagcgttactcaaaattttaactatacaaatatcactcattattcttagcattatcattccacctgccata

SEQ ID NO: 625583 - DNA, 75 bp, synthetic construct
  source 1..75: mol_type = other DNA
acgtattaaggtcattgatcggatcatatcgctgcatccaattgctggttggaagttattgctcgcattagcacc

SEQ ID NO: 625584 - DNA, 75 bp, synthetic construct
  source 1..75: mol_type = other DNA
tgcggtgtataagttgcttaataatgcaactgagccactttggtggtctttgtctcaggatttccataatcttgc

SEQ ID NO: 625585 - DNA, 75 bp, synthetic construct
  source 1..75: mol_type = other DNA
gtctaaagtaggccaaaacacgcatatctatctttttgatttagatacagttcggaaattgaacattaaggagac

SEQ ID NO: 625586 - DNA, 75 bp, synthetic construct
  source 1..75: mol_type = other DNA
tcactttacctggcctttaattttattttctgtgtaagatatattcgtaagtacaaaacaaaaagtaaaaaaaca

SEQ ID NO: 625587 - DNA, 75 bp, synthetic construct
  source 1..75: mol_type = other DNA
acagacattatgcttaccaaatctggaatatctctcacgccatctgaaagacaaagttcgattggtttatcaata

SEQ ID NO: 625588 - DNA, 75 bp, synthetic construct
  source 1..75: mol_type = other DNA
atgacacaacatggagtcattagtcggggagttgatgcgtttttttttgatatgcgcgagaatatgttgttgcca

SEQ ID NO: 625589 - DNA, 75 bp, synthetic construct
  source 1..75: mol_type = other DNA
cgaacagcacgggcaaactgacccgattgaagaaatgatattggcgcgttttgattggaacagtgatcgcctggc

SEQ ID NO: 625590 - DNA, 75 bp, synthetic construct
  source 1..75: mol_type = other DNA
aaaaaatacgcgctgcttggagttttacttacacagttcgttacttcgttattaacctttgtatccactttatta

SEQ ID NO: 625591 - DNA, 75 bp, synthetic construct
  source 1..75: mol_type = other DNA
ttcttgagtttgctagaagtcgagcaatggagagtggttttgaagttggtgtttacaaccgccgtggcgtaactg

SEQ ID NO: 625592 - DNA, 75 bp, synthetic construct
  source 1..75: mol_type = other DNA
tttaataaaagatctgggaatccactcgggtatagtccagataaaacaacgtatgtattcgttactccacaacgc

SEQ ID NO: 625593 - DNA, 75 bp, synthetic construct
  source 1..75: mol_type = other DNA
atggagtcattagtcggggagttgatgcgttttttttttgatatgcgcgagaatatgttgttgccaggccatgta

SEQ ID NO: 625594 - DNA, 75 bp, synthetic construct
  source 1..75: mol_type = other DNA
ctactcatggattatcgtactgggcaacagtggctttctgaacagcctgctgctggcgctgggagtcatatcaaa

SEQ ID NO: 625595 - DNA, 75 bp, synthetic construct
  source 1..75: mol_type = other DNA
aacctctatattcaataataaaatgctccacggaaatattttatgattggagaatgttgattctgtgcttcggtt

SEQ ID NO: 625596 - DNA, 75 bp, synthetic construct
  source 1..75: mol_type = other DNA
atatgtcaatgctaattatcacccctgcggtaataatacgggaattttcccaggagcaatctatattaaaaatgg

SEQ ID NO: 625597 - DNA, 75 bp, synthetic construct
  source 1..75: mol_type = other DNA
aaaatgttaattctatgctttggtttcatatcgttttcctttctgaatattaatataattttaattacgataata

SEQ ID NO: 625598 - DNA, 75 bp, synthetic construct
  source 1..75: mol_type = other DNA
atcgacgtctgttcagggacccaacctaatgcaaaggatcccgcatttcttaaagtcagggcgcatatcttccag

SEQ ID NO: 625599 - DNA, 75 bp, synthetic construct
  source 1..75: mol_type = other DNA
ggctgaaggggggatggaatttttatcagtatccgttgaatccgatctcaaatatagatccattaggattagaaa

SEQ ID NO: 625600 - DNA, 75 bp, synthetic construct
  source 1..75: mol_type = other DNA
aaataatggcggatatggagcgagacccaacaaaccgcctacgcccgatccaagtaaattgccagacatagcgaa

SEQ ID NO: 625601 - DNA, 75 bp, synthetic construct
  source 1..75: mol_type = other DNA
acaacagccacaaagacaacgaggatatggctgattttattgaaggttacacagtgagaggagaagcagctcgct

SEQ ID NO: 625602 - DNA, 75 bp, synthetic construct
  source 1..75: mol_type = other DNA
aagtggcaacagtttaaggaaattacattgccgatggtgttacatcaggttgcgccaactctggtaatgacattt

SEQ ID NO: 625603 - DNA, 75 bp, synthetic construct
  source 1..75: mol_type = other DNA
acgtcactatgccgatcatggttctgatgctggcgaccgcgctgtcacatatcagtcctgattatgaaaaagctg

SEQ ID NO: 625604 - DNA, 75 bp, synthetic construct
  source 1..75: mol_type = other DNA
gtcacccgaatcgtaccgcttgagaacgttcctgctcgtgacctggccccccctgctccgccagatgatggatgc

SEQ ID NO: 625605 - DNA, 75 bp, synthetic construct
  source 1..75: mol_type = other DNA
tagtaaaacaaagttttgacaggaaaaaccattatctgaaaactctaaaaacaatcaaaaagaaccaagagagta

SEQ ID NO: 625606 - DNA, 75 bp, synthetic construct
  source 1..75: mol_type = other DNA
gcgcgttgcgtgccctggtagtccgccaccaggcgctgacagatatgcacacgcaggaactgaatcgcactgaaa

SEQ ID NO: 625607 - DNA, 75 bp, synthetic construct
  source 1..75: mol_type = other DNA
caggaaataaagcgcttaatactaaatatcatgtccggttctcggagtgttaacaccgatattcttgactatttc

SEQ ID NO: 625608 - DNA, 75 bp, synthetic construct
  source 1..75: mol_type = other DNA
gacttgaataacggcgggccaataagcaacgccattaccagcaacatgaacgttaaacgtacgccaagggggcag

SEQ ID NO: 625609 - DNA, 75 bp, synthetic construct
  source 1..75: mol_type = other DNA
tacacgtcatcctctgtagatgctcaggctggaacagacggaaatggtgggctgactgttgatgtcgtcgttgca

SEQ ID NO: 625610 - DNA, 75 bp, synthetic construct
  source 1..75: mol_type = other DNA
accgtactggaaagtctgcagcgggaaggcttccagccattcttcgcctgccagacccgtgtgcgcgacccgggc

SEQ ID NO: 625611 - DNA, 75 bp, synthetic construct
  source 1..75: mol_type = other DNA
cagcgggaaggctttcagccgttcttcgcctgccagacccgtgtgcgcgacccgggccgccggggatacacaaaa

SEQ ID NO: 625612 - DNA, 75 bp, synthetic construct
  source 1..75: mol_type = other DNA
gccgtatgccgggattctggcgacactagttgtgtatgtcgtcggcgtattcctcaactatctggtgccgtcgcg

SEQ ID NO: 625613 - DNA, 75 bp, synthetic construct
  source 1..75: mol_type = other DNA
gctgaagctgctgcgcagaagcttctacctgaagcggctgagaacgccagctacaaacaggatgttgaggatctg

SEQ ID NO: 625614 - DNA, 75 bp, synthetic construct
  source 1..75: mol_type = other DNA
attattttttaaacttaaagcaattgtaaatgaaaaattacttgcttataacattttgtctaaagatatcttgat

SEQ ID NO: 625615 - DNA, 75 bp, synthetic construct
  source 1..75: mol_type = other DNA
tggtggatgcggcgaacaggccggcggaggttgctcatatcgatgttgccagagcgtgtgggacgtgcatgctga

SEQ ID NO: 625616 - DNA, 75 bp, synthetic construct
  source 1..75: mol_type = other DNA
gttcagcaactggcaaacgagaatgcccgaaaacttgctctgattcaggcttatgagcaggaaggtctgattact

SEQ ID NO: 625617 - DNA, 75 bp, synthetic construct
  source 1..75: mol_type = other DNA
cagagcgcatctcaaaccggatccgcgtttactgaactggctggttatgccaactcgatggataaccaactccgc

SEQ ID NO: 625618 - DNA, 75 bp, synthetic construct
  source 1..75: mol_type = other DNA
attttccgcaagcagagtatgggtaatgagttgctggcagcgagctttgactctctcgcaggcaatgcatcaaat

SEQ ID NO: 625619 - DNA, 75 bp, synthetic construct
  source 1..75: mol_type = other DNA
ttatgtccgtccgcaatacagttgtccctgttgccagaaggtgttcagcggtgaaatgccggcacatatcctccc

SEQ ID NO: 625620 - DNA, 75 bp, synthetic construct
  source 1..75: mol_type = other DNA
tgatgacagccagcaccaaggggagtcttacaataccttaacccctcgccatatgttacgggtatggtctaacta

SEQ ID NO: 625621 - DNA, 75 bp, synthetic construct
  source 1..75: mol_type = other DNA
attcaccatcaacgaaaaccggcacttgcgaagtcgctctgattctggagttacgttctcagcgaaatctgggcg

SEQ ID NO: 625622 - DNA, 75 bp, synthetic construct
  source 1..75: mol_type = other DNA
ggtgattaatttccagatccctcatttgcatcaacaagtcttgaaagcggcccccattgtcgcccagccgacgcc

SEQ ID NO: 625623 - DNA, 75 bp, synthetic construct
  source 1..75: mol_type = other DNA
tttattatgaggtcgaagccaagacagggaagctattaaccgcaggaaaagaagccaccgacacattcgaccgca

SEQ ID NO: 625624 - DNA, 75 bp, synthetic construct
  source 1..75: mol_type = other DNA
aactgccgacaactacagagcaggcgttgagtcagttaaacaccgacttcggtttgttgctggaaaccatcgacc

SEQ ID NO: 625625 - DNA, 75 bp, synthetic construct
  source 1..75: mol_type = other DNA
agtaaagcgttgcaacaaactatagagaacacagcaatgcgcctgatgcagcgtgaatcttcacgacctggtggc

SEQ ID NO: 625626 - DNA, 75 bp, synthetic construct
  source 1..75: mol_type = other DNA
cacagcatcgacaccgatattaaactcaaccgcgcattgtgggtgatggcggaaacgctgctggagagcatgcgc

SEQ ID NO: 625627 - DNA, 75 bp, synthetic construct
  source 1..75: mol_type = other DNA
ttactccatcgcgaattgataagccgtccggtggtgcatgcagatgagactaccctgaagatcctgaacacgaag

SEQ ID NO: 625628 - DNA, 75 bp, synthetic construct
  source 1..75: mol_type = other DNA
acggtgagcacctgcctctgtatcgccagcaacaggtctttgcccgttcagatgtcggactgcccgtcagttcga

SEQ ID NO: 625629 - DNA, 75 bp, synthetic construct
  source 1..75: mol_type = other DNA
ccacaaataatgtaggttgcaaggatgttgtagtcgattgtgaaactggatatctttgcaatgtacgtgattaca

SEQ ID NO: 625630 - DNA, 75 bp, synthetic construct
  source 1..75: mol_type = other DNA
aatggtcgggattatatgataagccgcttcgatgaaagggttattattgctgattattataatgctattcaaaaa

SEQ ID NO: 625631 - DNA, 75 bp, synthetic construct
  source 1..75: mol_type = other DNA
ccatcgagcagaaaacggtggtggatggcgaacctgttttacgggtgcgtaatctggtcacccgtttccctttgc

SEQ ID NO: 625632 - DNA, 75 bp, synthetic construct
  source 1..75: mol_type = other DNA
ctcattcgccaaaagcggccgcattgtgctgggccagtgtgagcaggtaatgatgcgcgccggtggctggcagaa

SEQ ID NO: 625633 - DNA, 69 bp, synthetic construct
  source 1..69: mol_type = other DNA
gtcaatgtcaccacgcatgacggcgcaactggcctgcgatgccctgcagatggcgctgtggcggcgtaa

SEQ ID NO: 625634 - DNA, 75 bp, synthetic construct
  source 1..75: mol_type = other DNA
tttctgcttttggctgggcctacttgctgatgcaaatccccggcggctggctgcttgataagtttggctacgaaa

SEQ ID NO: 625635 - DNA, 75 bp, synthetic construct
  source 1..75: mol_type = other DNA
cccgctcaaaatctccagaaacgaaaccgatacgcggatcgcgcaccgcaccgccgacgaacgccttccagcctg

SEQ ID NO: 625636 - DNA, 75 bp, synthetic construct
  source 1..75: mol_type = other DNA
tttttgttaatactaatccttttttagaagcaatgtataaggagaggcttagtcataaaggctattctgataaaa

SEQ ID NO: 625637 - DNA, 75 bp, synthetic construct
  source 1..75: mol_type = other DNA
aaaaatatcagtaacgcgatgcttaatattctggattggttcgaacggtatcccgatattgtaaaaaatataacc

SEQ ID NO: 625638 - DNA, 75 bp, synthetic construct
  source 1..75: mol_type = other DNA
taattccgagtcaaagactaaggaaaaatataaaaacgcatttttagagttagagtcgtttttatcaacacttta

SEQ ID NO: 625639 - DNA, 75 bp, synthetic construct
  source 1..75: mol_type = other DNA
cgttacattgcgacgcgaaaaatgagggcgcaagaaaacgcctcggcatcaaaggcggcttcttctggacagagg

SEQ ID NO: 625640 - DNA, 75 bp, synthetic construct
  source 1..75: mol_type = other DNA
agtactgaccgaaaccgatcatgccaaccctgatccggaaatcgtggatattgcctgcggtcgctcctctgcccc

SEQ ID NO: 625641 - DNA, 75 bp, synthetic construct
  source 1..75: mol_type = other DNA
acatcggacgcaatgtctaatgaacaggcagcgcctgaatcagtggaagaaattccagttaaacataatgcggac

SEQ ID NO: 625642 - DNA, 75 bp, synthetic construct
  source 1..75: mol_type = other DNA
agcaccaattgggatcgaggtcatccccgcgcacgtcactgaatatctgaacaaggtactgactgaaaccgatca

SEQ ID NO: 625643 - DNA, 75 bp, synthetic construct
  source 1..75: mol_type = other DNA
aacaacaggaaacggagaaagtttgcaccgcctgcggtcaggctggaggaaatagctgccctgactgtggtgcag

SEQ ID NO: 625644 - DNA, 75 bp, synthetic construct
  source 1..75: mol_type = other DNA
caaccatctggcgcaatggcaaatgaacaggcaacgcctgaaacagtggaaccggatacaactgaacatcatcag

SEQ ID NO: 625645 - DNA, 75 bp, synthetic construct
  source 1..75: mol_type = other DNA
gtattttaaacactaatccttttttagaagcaatgaataaggagaagcttaatcataaaggctattgtgataaaa

SEQ ID NO: 625646 - DNA, 75 bp, synthetic construct
  source 1..75: mol_type = other DNA
aaagatcatgattgttttactattttcgctaagggtactattttttcctcgtttcctgtcttaaatagctgcgcc

SEQ ID NO: 625647 - DNA, 75 bp, synthetic construct
  source 1..75: mol_type = other DNA
cgcgggccgctgacttttgcccagagtttcccggcgaatgtcagttacaacgagtatcagtatgccattgtgcag

SEQ ID NO: 625648 - DNA, 75 bp, synthetic construct
  source 1..75: mol_type = other DNA
tgggtggaagcgcagagtgagtatttactgctgcgcgaaaccggcggtacggcgacccagactgaaggcattctt

SEQ ID NO: 625649 - DNA, 75 bp, synthetic construct
  source 1..75: mol_type = other DNA
catatccaccggttagcttcattaacgctgagaactggcacccttacaccagactgatccctgccagcgaagtga

SEQ ID NO: 625650 - DNA, 75 bp, synthetic construct
  source 1..75: mol_type = other DNA
agctcgttgatgcggcaaatacgccagcagaagttgctcacatcgatatagccaggtcatgcggaacatgcatgt

SEQ ID NO: 625651 - DNA, 75 bp, synthetic construct
  source 1..75: mol_type = other DNA
agggtgccgcagttcatcatcacgctggccgccgattactgttcgcaatgttccgatctggagttctgcgcgctg

SEQ ID NO: 625652 - DNA, 75 bp, synthetic construct
  source 1..75: mol_type = other DNA
tgctattgatccaaatacaaattattcaataaatggtcttacagcgcgaaaatacacttatatggatctggacgg

SEQ ID NO: 625653 - DNA, 75 bp, synthetic construct
  source 1..75: mol_type = other DNA
caactggaaaatataaaaaatttcaaagcatattacgactcagaactcaataagtttgcttccgattttcgaaat

SEQ ID NO: 625654 - DNA, 75 bp, synthetic construct
  source 1..75: mol_type = other DNA
ggttctcatattaaagaagtcaaaggcttaatttacgaatttgtcacgaaagttgataacaaagccgaggtgttc

SEQ ID NO: 625655 - DNA, 75 bp, synthetic construct
  source 1..75: mol_type = other DNA
accacgacggcggacggtggatgcgctttggtaacggcctgatgccggttttactgcagcaggcgggagacggta

SEQ ID NO: 625656 - DNA, 75 bp, synthetic construct
  source 1..75: mol_type = other DNA
ggaacgcctccggcgtggcgcacgacagtggtggccggctggcgctgttcgtcaggtcaaaagactgcgccacct

SEQ ID NO: 625657 - DNA, 75 bp, synthetic construct
  source 1..75: mol_type = other DNA
ctttatgagactgttaataatactgtggggtccgaaaacaataaaccaataataggtatgtttaaaggttgtttt

SEQ ID NO: 625658 - DNA, 75 bp, synthetic construct
  source 1..75: mol_type = other DNA
atggtgttatttggtggtttccagttttccgcaacatttaaaccggtagcagaagccgtaagtaaagcctatggt

SEQ ID NO: 625659 - DNA, 75 bp, synthetic construct
  source 1..75: mol_type = other DNA
gcatagtgatatcgtaagacaaaagaagctcaaacttattttaggtttttttataaaaaaagcattacgtaaagc

SEQ ID NO: 625660 - DNA, 75 bp, synthetic construct
  source 1..75: mol_type = other DNA
atggaaacgctggagaattcagaacgacactggcctgccagaagaaaacatatgttctttcagatttttatggcg

SEQ ID NO: 625661 - DNA, 75 bp, synthetic construct
  source 1..75: mol_type = other DNA
attgatggtattacatggaaaaatgaccgccattctcctgagtttcgactgacggttgtcctgaagtctctgagt

SEQ ID NO: 625662 - DNA, 75 bp, synthetic construct
  source 1..75: mol_type = other DNA
gttcatgaaaacatcggcaaaatagacacatttgactacattatgacgtattttaaagtatgtaatgattttctc

SEQ ID NO: 625663 - DNA, 75 bp, synthetic construct
  source 1..75: mol_type = other DNA
gagaaatcataccacacacccgcaagggcgggactcgcacaacctgaataaatacatctggcgttttatcgccct

SEQ ID NO: 625664 - DNA, 75 bp, synthetic construct
  source 1..75: mol_type = other DNA
tggtgttgacatggtaattacccctaattactatagttacatggtaattaccattgtacttaccattacgcaaaa

SEQ ID NO: 625665 - DNA, 75 bp, synthetic construct
  source 1..75: mol_type = other DNA
gcctttagtttactgggatggccaagtattaaaatcaacgactgaaattaaaaattatgatgggtccacgcgtgt

SEQ ID NO: 625666 - DNA, 75 bp, synthetic construct
  source 1..75: mol_type = other DNA
atgagcgattacacaatactaacttatttaacccaaaaatatcatgaaaaagtcgttatgaattacatggaatat

SEQ ID NO: 625667 - DNA, 75 bp, synthetic construct
  source 1..75: mol_type = other DNA
atgattgaaagaggtgataacagcggtgtttatcagtatggtcgtgctgaacacttcacccacattatatctgac

SEQ ID NO: 625668 - DNA, 75 bp, synthetic construct
  source 1..75: mol_type = other DNA
ccgatgttcaggagagggcgggtactgattgagcctgcaccggaaaaatacagcgactatgcaaccggcgtcatt

SEQ ID NO: 625669 - DNA, 75 bp, synthetic construct
  source 1..75: mol_type = other DNA
atcttggcgaaagctttggtcagtggcatatgggtgatgacgcacgcatgctgactgtggtgagtagcgcaaaca

SEQ ID NO: 625670 - DNA, 75 bp, synthetic construct
  source 1..75: mol_type = other DNA
tatgggaatcgggggtagtggtaaaaatgacctggattatccctctgctgatatacgagcgaagatcagtaaaga

SEQ ID NO: 625671 - DNA, 75 bp, synthetic construct
  source 1..75: mol_type = other DNA
taaattcaactcacaagtctcctcggtcctgtcaggggtgattgtcaccgcggtccccttggccgcgatttacac

SEQ ID NO: 625672 - DNA, 75 bp, synthetic construct
  source 1..75: mol_type = other DNA
ccattaattaaaaaagctatcaaccagtattatattaatctgctgaataacataaatggaaaacatttcgattat

SEQ ID NO: 625673 - DNA, 75 bp, synthetic construct
  source 1..75: mol_type = other DNA
cgatcctctcagggcatttttgatatgggtactgtcagaatccatcggcgctctggcactggtgccgctgggatt

SEQ ID NO: 625674 - DNA, 75 bp, synthetic construct
  source 1..75: mol_type = other DNA
ccgccatatcctcggcatcgaagtgctcaaaagctttcctgatgaggttagtgcagccttcgaccagtttatccg

SEQ ID NO: 625675 - DNA, 75 bp, synthetic construct
  source 1..75: mol_type = other DNA
tatgcattaccggattaatactgaacggcttgaagcactgctgattgaacaggtaaaacctgatacgaaggctga

SEQ ID NO: 625676 - DNA, 75 bp, synthetic construct
  source 1..75: mol_type = other DNA
tgatgtatagtatcattatatctcaattctttacatgctttatttataaccctaaacgtgttataaataaaattg

SEQ ID NO: 625677 - DNA, 75 bp, synthetic construct
  source 1..75: mol_type = other DNA
caaagtgattagtatcgtatatgggatggtgtattttgctacaacatatgtaatagctacttatttgacttatct

SEQ ID NO: 625678 - DNA, 75 bp, synthetic construct
  source 1..75: mol_type = other DNA
tgttaacaccgttaaaggcggttccttctacaaccacgcattacaggttacttcctccttcttctgcaaaaaaga

SEQ ID NO: 625679 - DNA, 75 bp, synthetic construct
  source 1..75: mol_type = other DNA
cgcaggtcaacgtaaaaggcgcggccttcatcgacaaaattctcgatgcgcaggtgccgttgatcgcttcatggg

SEQ ID NO: 625680 - DNA, 75 bp, synthetic construct
  source 1..75: mol_type = other DNA
catcgaaaaggttgctgaaatcgtggagcgtgaacgtcatgattttgcgctcattgatgaactcagggtcatcag

SEQ ID NO: 625681 - DNA, 75 bp, synthetic construct
  source 1..75: mol_type = other DNA
atcggtcgcgtcagatgctgagtccgtaaagatcggaaatcaacaatatgatggtgcagcccttcaggattatcg

SEQ ID NO: 625682 - DNA, 75 bp, synthetic construct
  source 1..75: mol_type = other DNA
gccgtttccgcgccggtctttggtgccatcatgggcggcgtattgcgtaccatgaacatcgagccggatgcgctg

SEQ ID NO: 625683 - DNA, 75 bp, synthetic construct
  source 1..75: mol_type = other DNA
agaagaatccgcacctgttactaactttgaatccctgcgcaataactttatggctaaattcaaaaccacttggga

SEQ ID NO: 625684 - DNA, 75 bp, synthetic construct
  source 1..75: mol_type = other DNA
gttgcatatgctattaacattcctgactatgagctagcagccgatgtatataatattaacgtgacgtcaccttcc

SEQ ID NO: 625685 - DNA, 75 bp, synthetic construct
  source 1..75: mol_type = other DNA
gcttacaatgagggattgatcgcgaaaaatgaacttagagatattggtaataaaatgaaagatgccgttataaat

SEQ ID NO: 625686 - DNA, 75 bp, synthetic construct
  source 1..75: mol_type = other DNA
tagtaatccgtatgtacaagggaggtttgtttgccaggaggtttttgtctctccggggagttatatagcctctgg

SEQ ID NO: 625687 - DNA, 75 bp, synthetic construct
  source 1..75: mol_type = other DNA
ttcgttccgacgaccagcttcttggacagtgttgaaccccagtcagctcccggtcaacagggagatgatgtgata

SEQ ID NO: 625688 - DNA, 75 bp, synthetic construct
  source 1..75: mol_type = other DNA
aatggtaagggtagcgtaaataacactgttgcaacagctaaggatttaacagataaaggttttattagtactgat

SEQ ID NO: 625689 - DNA, 75 bp, synthetic construct
  source 1..75: mol_type = other DNA
aacggtaaaggtgaagtggataacaaagcggcgactgccgacagcctgaccctggctggctttactaaggggggg

SEQ ID NO: 625690 - DNA, 75 bp, synthetic construct
  source 1..75: mol_type = other DNA
aaagatggtgttgtaaaagcaaaagatggcagtgacctctttattgatcttcaaggtaacctcacccagaccaaa

SEQ ID NO: 625691 - DNA, 75 bp, synthetic construct
  source 1..75: mol_type = other DNA
aaagaatcatggatcttaaaaataacactgtcggtattgcttgtggcgatttttctgccaaatgtagcgatgcat

SEQ ID NO: 625692 - DNA, 75 bp, synthetic construct
  source 1..75: mol_type = other DNA
tcaggtggactaatttatgccgtatctggtgtacctggattgattgctgcaaacagcattactaacagtgcttac

SEQ ID NO: 625693 - DNA, 75 bp, synthetic construct
  source 1..75: mol_type = other DNA
tacagcggggtacgaacaggccacggcgtacaccctcacagggcagctacagagcaggcacctgaaccttccgca

SEQ ID NO: 625694 - DNA, 75 bp, synthetic construct
  source 1..75: mol_type = other DNA
ttcaagtttgctgcgatgtatatggtatctatagcgaaatctcatgcttttaatgatgcaaataagaggaccgcg

SEQ ID NO: 625695 - DNA, 75 bp, synthetic construct
  source 1..75: mol_type = other DNA
cagcatataatggcgctcgatggttagaagagcaaattagctcaatcctacaacaaacgaatgttgaggttacta

SEQ ID NO: 625696 - DNA, 75 bp, synthetic construct
  source 1..75: mol_type = other DNA
tgtgataataattttaaaaaagcaagtagttcatttgtttattttaaaggaaaaacatcatcaggcgcaataaca

SEQ ID NO: 625697 - DNA, 75 bp, synthetic construct
  source 1..75: mol_type = other DNA
cgatcctatggcaaagttggataaagctctagctaaagttgacgcattacgttctgacttgggtgcaatccagaa

SEQ ID NO: 625698 - DNA, 75 bp, synthetic construct
  source 1..75: mol_type = other DNA
aggatacataaatttagaacgatgtttatcgattcagaaaaaaaaggacggataacagttggtcaagatgctcgg

SEQ ID NO: 625699 - DNA, 75 bp, synthetic construct
  source 1..75: mol_type = other DNA
ttcagtgtacgggaattcgtttgcgagctgaactgataatattcctttgttctcttcttaaatatttatctttct

SEQ ID NO: 625700 - DNA, 75 bp, synthetic construct
  source 1..75: mol_type = other DNA
atgaatgactgtccacgacgctatacccaaaagaaagcggcttatcggtcagtttcacctgatgtacgtaataaa

SEQ ID NO: 625701 - DNA, 75 bp, synthetic construct
  source 1..75: mol_type = other DNA
atttacgcttagaggcggagctctaaatatcaatattcctgggcgcagcgctcttcttttagggaaaacaggaga

SEQ ID NO: 625702 - DNA, 75 bp, synthetic construct
  source 1..75: mol_type = other DNA
cgatctccaaacccttgcatcaaaaccgggttccacaatctcaagcatcccatcagaaagacggatattgattaa

SEQ ID NO: 625703 - DNA, 75 bp, synthetic construct
  source 1..75: mol_type = other DNA
gctaccaggtgaaacgcatcaccgtgaaaccgggcgagggcttgtcggtacagatgcaccatcaccgcgcggaac

SEQ ID NO: 625704 - DNA, 75 bp, synthetic construct
  source 1..75: mol_type = other DNA
ctctcgaccttaaccaggcattcagcgacaacgctgcgttccgtctaaacctgatgggggaaaaaacccatgacg

SEQ ID NO: 625705 - DNA, 75 bp, synthetic construct
  source 1..75: mol_type = other DNA
tggaagagcgctggcagcatcatcgggagcctgcgttgcttgcagtatcaggtggcgcaattgataccatcagtt

SEQ ID NO: 625706 - DNA, 75 bp, synthetic construct
  source 1..75: mol_type = other DNA
tgatgtatttggtaagatggttgatactggcacagttacgacaactattgataatggtttcggtactgcacaaag

SEQ ID NO: 625707 - DNA, 75 bp, synthetic construct
  source 1..75: mol_type = other DNA
gctattgtctgcggtttgatgatgtcggcattaggcacgttgctggtcgtgcaatcttcctcgccagcccaggcg

SEQ ID NO: 625708 - DNA, 75 bp, synthetic construct
  source 1..75: mol_type = other DNA
atttgaaaattggtggttcgtctgatggtgattgccagaaagaatcccaggtaaatgaaaaaagagaagtatctc

SEQ ID NO: 625709 - DNA, 75 bp, synthetic construct
  source 1..75: mol_type = other DNA
atcaacaagagcggttatcgctatcatccgggcgaaccccgtacctttttgctgacggcgaacgtccacttctga

SEQ ID NO: 625710 - DNA, 75 bp, synthetic construct
  source 1..75: mol_type = other DNA
tttcaagagatatacgggaattcctattggttcatatattcaattacggagaattaccagagctgcaactctttt

SEQ ID NO: 625711 - DNA, 75 bp, synthetic construct
  source 1..75: mol_type = other DNA
tttcaagagatatacgggagttcctattggttcatatattcaattgcggagaattaccagagctgcaactctttt

SEQ ID NO: 625712 - DNA, 75 bp, synthetic construct
  source 1..75: mol_type = other DNA
ctccagtgattttgtcctgacggtcgatacctctattccgaccacgctggcgcaaatcaccagccagaccacgcg

SEQ ID NO: 625713 - DNA, 75 bp, synthetic construct
  source 1..75: mol_type = other DNA
cgaagcacgcgcccagctgccgcacgcacatcttatttttgtcgcccgtatccgtcaggaggtgactcatgctta

SEQ ID NO: 625714 - DNA, 75 bp, synthetic construct
  source 1..75: mol_type = other DNA
acgtgatcagtgtaatcaacacctggcctgccaaccgcgtgaaagagttgttgccctggaatgtcactcaatctg

SEQ ID NO: 625715 - DNA, 75 bp, synthetic construct
  source 1..75: mol_type = other DNA
ttacccgcagacatgggcaacacgaccatttttggtcgtaaaaatggttcggtaactttttcggcagcacctgcc

SEQ ID NO: 625716 - DNA, 75 bp, synthetic construct
  source 1..75: mol_type = other DNA
atgcgttcggtaatacgcttgccgggcagacggtcagcgtgttggcggacaacggtgcaacggtcgctccgacgg

SEQ ID NO: 625717 - DNA, 75 bp, synthetic construct
  source 1..75: mol_type = other DNA
ttgccctggctgcaccgtgagacggcccgcagcttcggcggggcgggcagtacagcggggtacgaacaggtcacg

SEQ ID NO: 625718 - DNA, 75 bp, synthetic construct
  source 1..75: mol_type = other DNA
tccgcatcgaaacggagaacggcgagcgggagaaagcgcagcgccgcagcctggcggagaaactccagcaggaag

SEQ ID NO: 625719 - DNA, 75 bp, synthetic construct
  source 1..75: mol_type = other DNA
gtgactcaggtataccgggtttataacagctcccggagctactcgcgcagtcagtattcaacaggcgcatggaca

SEQ ID NO: 625720 - DNA, 75 bp, synthetic construct
  source 1..75: mol_type = other DNA
acaacggtaaaactccgatggagcgctacttcgaacttgcagagcaaacaccatactctgatgccgttcacgcaa

SEQ ID NO: 625721 - DNA, 75 bp, synthetic construct
  source 1..75: mol_type = other DNA
cggaaccagtgtggtcaccgctagcatcaacaacagcagccagagccagaacgtgacgtttatcgccgatgtcag

SEQ ID NO: 625722 - DNA, 75 bp, synthetic construct
  source 1..75: mol_type = other DNA
caatgggatatgaaacattaataggtgaacttggggaaggtctttctggcggtcaaaaacagcgtatatttattg

SEQ ID NO: 625723 - DNA, 75 bp, synthetic construct
  source 1..75: mol_type = other DNA
cagcaggctatcagatttgcagagcgtgaaggagttcctctgcacaccacagacctgttacagcctacttcccgc

SEQ ID NO: 625724 - DNA, 75 bp, synthetic construct
  source 1..75: mol_type = other DNA
caataactactactattactcctattcagggtatacaggtgtattttaataaggattttgataaggctctagaga

SEQ ID NO: 625725 - DNA, 75 bp, synthetic construct
  source 1..75: mol_type = other DNA
tctagagctcttcaggtaacgactaccgaatctgcttattcattaatggttaggaatacatctacagcagtatct

SEQ ID NO: 625726 - DNA, 75 bp, synthetic construct
  source 1..75: mol_type = other DNA
aaattgaaaaagtaattaataaaaatgaccttaaggcatttatcgcttttccgtcatcactttatcccgacgatc

SEQ ID NO: 625727 - DNA, 75 bp, synthetic construct
  source 1..75: mol_type = other DNA
cgcgccaagagcatcacgctgatcctggataactacatcatccacaagagcaaaaaagcacagcgatggctggca

SEQ ID NO: 625728 - DNA, 75 bp, synthetic construct
  source 1..75: mol_type = other DNA
cagtgaaagagactggtcgcggactggtgcaggctggcgtgaacgtggcaaacatacctgcatcagttgccgatg

SEQ ID NO: 625729 - DNA, 75 bp, synthetic construct
  source 1..75: mol_type = other DNA
ggccgaaggactgtctcgattactcgctatcgctggagccgtcgttccgggaagagagcctgatgatactccccg

SEQ ID NO: 625730 - DNA, 75 bp, synthetic construct
  source 1..75: mol_type = other DNA
gctaatgcatcagccagcgttcactcaatcaccattaagagcagtaagcaaaatctgggattcataacgtgcggc

SEQ ID NO: 625731 - DNA, 75 bp, synthetic construct
  source 1..75: mol_type = other DNA
tttttctggctatgttatcagccagtcatttatcccacgcgtcagttattgccgctggagcggcggcaacagcgg

SEQ ID NO: 625732 - DNA, 75 bp, synthetic construct
  source 1..75: mol_type = other DNA
catggacgctggatttatctggctgacttagagcatgcactacgagtggcaggtattcgcatcaaaggacagtga

SEQ ID NO: 625733 - DNA, 75 bp, synthetic construct
  source 1..75: mol_type = other DNA
ttttaaataaactcgtgtccgcaggttttttatctcaaacaaatgttgatggtgaatgtaaaatgatcgtagacg

SEQ ID NO: 625734 - DNA, 75 bp, synthetic construct
  source 1..75: mol_type = other DNA
ctgtaaaaaaaatcacagtatatggaatgggtaatgggtgcctaagtgagattgaaaaaaattctttaagagatc

SEQ ID NO: 625735 - DNA, 75 bp, synthetic construct
  source 1..75: mol_type = other DNA
gcgtgattatcgtcaccgtgtctgacgtcatgagcgtgttgcatgacagctacgacaacggcaaatccggggaaa

SEQ ID NO: 625736 - DNA, 75 bp, synthetic construct
  source 1..75: mol_type = other DNA
gcacggcggaaatcagtgttaccagtcagacggcgggagttagcgcagtcaccgtcagcatcaacaacagcagcc

SEQ ID NO: 625737 - DNA, 75 bp, synthetic construct
  source 1..75: mol_type = other DNA
accttggtgcaagctatagaattcaattttcagaaaatacattcataccgaccgatgtaggttacctgtcgtcga

SEQ ID NO: 625738 - DNA, 75 bp, synthetic construct
  source 1..75: mol_type = other DNA
aacggacagattgccaaattcgttaccgtgcaaggccattctatggctgtttacgatgcgtatgggacacagcag

SEQ ID NO: 625739 - DNA, 75 bp, synthetic construct
  source 1..75: mol_type = other DNA
tattgtctggtgataacgtaacagtagaaggagccgtacgttcaggaggatggtctgaaaccgccggtgtttata

SEQ ID NO: 625740 - DNA, 75 bp, synthetic construct
  source 1..75: mol_type = other DNA
tcaccatcacggtaacgctccgggatgcgttcgataatctggtaaccggtgcagcttcacagttagccgctgatg

SEQ ID NO: 625741 - DNA, 75 bp, synthetic construct
  source 1..75: mol_type = other DNA
tcaccagccagacggcgggcaccagtacagtcaccgccagcatcaacaacagcagccagagccagaacgtcacct

SEQ ID NO: 625742 - DNA, 75 bp, synthetic construct
  source 1..75: mol_type = other DNA
taatgccgcaaccgcaacgaaactacagactgcacgcactatcaacggtgttaagtttgatggttctgcaaatat

SEQ ID NO: 625743 - DNA, 75 bp, synthetic construct
  source 1..75: mol_type = other DNA
ctgctacaaaactacagacggcaagaactatcggcggagttagctttgatggtactgcgaatattaatttacctg

SEQ ID NO: 625744 - DNA, 75 bp, synthetic construct
  source 1..75: mol_type = other DNA
gtggagtcaggttgttgtttccggatggggtcaggatgtaagtgttaagtctcttagtgccgtggctcttagtgg

SEQ ID NO: 625745 - DNA, 75 bp, synthetic construct
  source 1..75: mol_type = other DNA
gtgatggcaggcaacagcgcaacggtcactccgacggtcaccacgcagtcggacggtacggtggagttcagtgtc

SEQ ID NO: 625746 - DNA, 75 bp, synthetic construct
  source 1..75: mol_type = other DNA
tgtgctgatttccctcaaatgttaattgaaactatgtggggtatgaaatacatcgctatggacagtattcttgaa

SEQ ID NO: 625747 - DNA, 75 bp, synthetic construct
  source 1..75: mol_type = other DNA
cgacgcacaggcaatagctgaggcctgccaacatggaactatacgacccgtaccaataaaaactctggagcaaca

SEQ ID NO: 625748 - DNA, 75 bp, synthetic construct
  source 1..75: mol_type = other DNA
tccgacggtcactacagagccggacggtacggtggagatctcagtcaccagccagacggcgggagtcagtactgt

SEQ ID NO: 625749 - DNA, 75 bp, synthetic construct
  source 1..75: mol_type = other DNA
cggtgggtcgagcagaataatggtgaatataccattgtctggacagcatgggttgccgacgaaaatctggttgcc

SEQ ID NO: 625750 - DNA, 75 bp, synthetic construct
  source 1..75: mol_type = other DNA
gtggcagatggttcgacggcgaacacgctgcgggcgagggtgaccgatgcgttcgggaatgcacttgccgggcag

SEQ ID NO: 625751 - DNA, 75 bp, synthetic construct
  source 1..75: mol_type = other DNA
gagttatgggatcccggtattaatgccggattgctcaattataatttcagcggaaatagtgtacagaatcgggta

SEQ ID NO: 625752 - DNA, 75 bp, synthetic construct
  source 1..75: mol_type = other DNA
gttgtgcagctgggaaccatccagaaaggcggaacgggtgatgtaaaaaatattgttctgaaagcaaaaggggca

SEQ ID NO: 625753 - DNA, 75 bp, synthetic construct
  source 1..75: mol_type = other DNA
agatcgccgatctggtggtcattaaggacgactcagtggcagacggtgcaatggcgaatatgctgcgggcgagag

SEQ ID NO: 625754 - DNA, 75 bp, synthetic construct
  source 1..75: mol_type = other DNA
ggaatgatgttgtatttaaattcaagattaaaaaatggtttactagtttaggtgctaccagtagtaatacctggg

SEQ ID NO: 625755 - DNA, 75 bp, synthetic construct
  source 1..75: mol_type = other DNA
aagtcacatatagattctcactgcagaaatggtttttaccccaaggggattttcaggaagcatggagtgtaatta

SEQ ID NO: 625756 - DNA, 75 bp, synthetic construct
  source 1..75: mol_type = other DNA
aatctggttgccagtctgaaattaaaaacatggggaacggagattaagtcctcattatacgggatacaaccaggt

SEQ ID NO: 625757 - DNA, 75 bp, synthetic construct
  source 1..75: mol_type = other DNA
ctgatgtcaggacggcgcagatcgcggatctggtggtcattaaggatggttcagaggcggacggtttgacggcga

SEQ ID NO: 625758 - DNA, 75 bp, synthetic construct
  source 1..75: mol_type = other DNA
tataccacaacccgaatggcgacgattgccagcaccaatcagcacgccaacctgcaattgcagacgtggagtgat

SEQ ID NO: 625759 - DNA, 75 bp, synthetic construct
  source 1..75: mol_type = other DNA
cttttagcggtacggattattggacaagcactcagctcatgggagtacacgagaaatttaatcctgaaactggta

SEQ ID NO: 625760 - DNA, 75 bp, synthetic construct
  source 1..75: mol_type = other DNA
tacaacggcaatgggcaatatcaaagacagtatatggcgcattttgcggaagcgaatttgaatgcgcaactgaag

SEQ ID NO: 625761 - DNA, 75 bp, synthetic construct
  source 1..75: mol_type = other DNA
ccgaaagtgccggtcgtgcggggaatgccccggcagggacaaaactgacatttatcacaccgcaggcggggatca

SEQ ID NO: 625762 - DNA, 75 bp, synthetic construct
  source 1..75: mol_type = other DNA
attttgaagtgcgcagcccgctgacgtcggttcaggcgggagacagcgagctgctgacagtgggggaaatcacat

SEQ ID NO: 625763 - DNA, 75 bp, synthetic construct
  source 1..75: mol_type = other DNA
tcactggtctgattgtcggacagcctgacggtgtaaatgtcacggtatttgcgccaaaggcaaagccggtaaatc

SEQ ID NO: 625764 - DNA, 75 bp, synthetic construct
  source 1..75: mol_type = other DNA
tagaatttattgtagagcgggttcttaccatcaaaatatttttcatttggactatcttgaccatgatgagtacca

SEQ ID NO: 625765 - DNA, 75 bp, synthetic construct
  source 1..75: mol_type = other DNA
ccggtgatgtggcgggagcgcacggaaaactggtcgtgggagctgggggcgtctggctcgtggtcgcattcacgc

SEQ ID NO: 625766 - DNA, 75 bp, synthetic construct
  source 1..75: mol_type = other DNA
cgggcgtgacgcgggcatggtgccgcccggaatggccgcaggcgggcagcgtgggggtaacgtttgttcaggata

SEQ ID NO: 625767 - DNA, 75 bp, synthetic construct
  source 1..75: mol_type = other DNA
cagccgtcccaaaaaacccggatatcacccgcagcgtggctgcgatgggggatcggcagtacaactatatcgtca

SEQ ID NO: 625768 - DNA, 75 bp, synthetic construct
  source 1..75: mol_type = other DNA
ccagccgtagcactaccttcgcggcgatggagagcatcaggtctgccggcggtcgggtcagctttgaccctaata

SEQ ID NO: 625769 - DNA, 75 bp, synthetic construct
  source 1..75: mol_type = other DNA
tcacagacgccgacactgaaatgggcctgtctgaaactggggcgatggcatgacagcaaacgcacaggccgcccc

SEQ ID NO: 625770 - DNA, 75 bp, synthetic construct
  source 1..75: mol_type = other DNA
tgaaactggaatgagtggttataaatcatacttaataaaatattctgaacctgaacttgtaaacttttttgaaaa

SEQ ID NO: 625771 - DNA, 75 bp, synthetic construct
  source 1..75: mol_type = other DNA
tgctgatctggttgctgctttccgtgacctcggtgctgaccctgaaacagtacgcgcaaaaaaacctggcactga

SEQ ID NO: 625772 - DNA, 75 bp, synthetic construct
  source 1..75: mol_type = other DNA
ttatgcgcgctggcgcaaatgccccgtgaactttcccctggttttgtcgaacattatcgcgccctactggagcgt

SEQ ID NO: 625773 - DNA, 75 bp, synthetic construct
  source 1..75: mol_type = other DNA
aggaataactccttatcttcctcgagaacaggcccatttattaagtggtataaataatgagttgcaaccaccatt

SEQ ID NO: 625774 - DNA, 75 bp, synthetic construct
  source 1..75: mol_type = other DNA
caatcctgtatttaaagaactattctggaaagcaatagacgaatttaactttccgcaagaggagcttaatcggtt

SEQ ID NO: 625775 - DNA, 75 bp, synthetic construct
  source 1..75: mol_type = other DNA
gaactactgtcgctgagcagaaataatgctgcctgctctttgcatattgcaagctttaagaaaatgagtaaagag

SEQ ID NO: 625776 - DNA, 75 bp, synthetic construct
  source 1..75: mol_type = other DNA
tgtgcaggcatatttcgctgcagtattgtatagattcaatgaatgaaaataccgggaaagttccattgagggaat

SEQ ID NO: 625777 - DNA, 75 bp, synthetic construct
  source 1..75: mol_type = other DNA
ctacactttagcgccattgatgatgatggcgcactacagtatttcacttacgatttaaaccgtcagaaatcactc

SEQ ID NO: 625778 - DNA, 75 bp, synthetic construct
  source 1..75: mol_type = other DNA
gtgtatgtgcacaatctccttctttcatgcctgatttggatggaggaaaaaataaagctcaattgatcgttgacg

SEQ ID NO: 625779 - DNA, 75 bp, synthetic construct
  source 1..75: mol_type = other DNA
gcttttaatgaattcataataaatttaaaagagttgaccagaaagtataattttagccatggcgatctggaaaat

SEQ ID NO: 625780 - DNA, 75 bp, synthetic construct
  source 1..75: mol_type = other DNA
agattataattgcctgttgcattttactggaaaaccaaaaagtttaatagaatgtagacattttgctctgcaata

SEQ ID NO: 625781 - DNA, 75 bp, synthetic construct
  source 1..75: mol_type = other DNA
cgatgcagacgcaatcaatatagtacatatttccgtatctccagtgcttataaaattcctggatgatatttttac

SEQ ID NO: 625782 - DNA, 75 bp, synthetic construct
  source 1..75: mol_type = other DNA
gagtatgtatacaatctccttctttcgtgcctgatttggatggagaaaaaaataaatctcaattattcgttgacg

SEQ ID NO: 625783 - DNA, 75 bp, synthetic construct
  source 1..75: mol_type = other DNA
gcagaaataatgcagtttgctctttgtatgttgccagctataagacaatgagtaagcaggtcattgatgtatatc

SEQ ID NO: 625784 - DNA, 75 bp, synthetic construct
  source 1..75: mol_type = other DNA
gagtatgtatacaatctccttctttcgtgcctgatttggatggaggaaaaaataaaactcaattgatcgttgacg

SEQ ID NO: 625785 - DNA, 75 bp, synthetic construct
  source 1..75: mol_type = other DNA
atatgttgtatccttttatgatcctaatgcaaccaatactgcagtacgctataaagcaaacaactgtgattcttt

SEQ ID NO: 625786 - DNA, 75 bp, synthetic construct
  source 1..75: mol_type = other DNA
tgaccgggaagcggatatctggcattacctgcattataaagtcagccacggacagcgcttcgtggtgcgtactgc

SEQ ID NO: 625787 - DNA, 75 bp, synthetic construct
  source 1..75: mol_type = other DNA
gttaaataaaattaaaacactgaaagaaagttatccggcacttaagatttatgcatcttcactggtgctacgtac

SEQ ID NO: 625788 - DNA, 75 bp, synthetic construct
  source 1..75: mol_type = other DNA
aatgatgcctcgctgcctgttttagcgatcaatgggtgcggtgagataatgcaggaggcttttgatattagctat

SEQ ID NO: 625789 - DNA, 75 bp, synthetic construct
  source 1..75: mol_type = other DNA
atgcgcaaatatcgtctaagtgaagaacagcgagcctttagttatcaggaagatggcactaaaaaaaaatgtgtt

SEQ ID NO: 625790 - DNA, 75 bp, synthetic construct
  source 1..75: mol_type = other DNA
taattctgcagggcatggcgaacctgataaatgagacagttattgatcctgacgggcagtccgtggacaccccgg

SEQ ID NO: 625791 - DNA, 75 bp, synthetic construct
  source 1..75: mol_type = other DNA
ggtttccctgttgaccagcagggaataattctgcagggcatggcgaacctgataaatgagacagttattgatcct

SEQ ID NO: 625792 - DNA, 75 bp, synthetic construct
  source 1..75: mol_type = other DNA
tgcttgttttatatattctcttaacgccatttatcttattcaatttgcaggctaataaaaagaaagttcttgttt

SEQ ID NO: 625793 - DNA, 75 bp, synthetic construct
  source 1..75: mol_type = other DNA
aaaacgcatacattataacgtcattccatttatatcaggtgttttaataactatttttataaattgtttaggaaa

SEQ ID NO: 625794 - DNA, 75 bp, synthetic construct
  source 1..75: mol_type = other DNA
taaaaagagaacttgaaataatagaatacaatgttaataaatttaattgtcagattagtgaattaaaactgaaaa

SEQ ID NO: 625795 - DNA, 75 bp, synthetic construct
  source 1..75: mol_type = other DNA
tatgagtaaagttgatatcaacagagagcttgaaatgatacagcataatattaacaagttcaattgtgagattgg

SEQ ID NO: 625796 - DNA, 75 bp, synthetic construct
  source 1..75: mol_type = other DNA
atgttaaaaacacggggttatcactaatatatatagttgatgcaatagagttattgctattttggtcaataatta

SEQ ID NO: 625797 - DNA, 75 bp, synthetic construct
  source 1..75: mol_type = other DNA
tatgtcaggagttttaatgaccttttttataaattgtttagggaagcctgaaactgcactaaaactcaaaagtgt

SEQ ID NO: 625798 - DNA, 75 bp, synthetic construct
  source 1..75: mol_type = other DNA
ttgctataaatactactagccccagaaataataaagagtttctttgggttagttatagcataaataatttgaact

SEQ ID NO: 625799 - DNA, 75 bp, synthetic construct
  source 1..75: mol_type = other DNA
gcatccgggctttgatgtgctgtcgcagccgctacaggcgacggcaatctactgcgggctgaactggctgccacc

SEQ ID NO: 625800 - DNA, 75 bp, synthetic construct
  source 1..75: mol_type = other DNA
atggatcgcgtgggtgacacgctggccgccaccttcacacgaaccaatacggatctccgttcgctgggtgaaacc

SEQ ID NO: 625801 - DNA, 75 bp, synthetic construct
  source 1..75: mol_type = other DNA
aacatcctgacccaattcaagctgtcatcagatcagatggacagggttggcgatacgttaaccgccgcttttacc

SEQ ID NO: 625802 - DNA, 75 bp, synthetic construct
  source 1..75: mol_type = other DNA
tcaccatggcactatggacatcatggtgaaaatgctgtcttttataaaacattatttttcggatacagagagaat

SEQ ID NO: 625803 - DNA, 75 bp, synthetic construct
  source 1..75: mol_type = other DNA
tatggaacgcctgccgcgccgccatgcttcagtcaggaaactttcgggaaaacaagaattcgtcaaccaataatt

SEQ ID NO: 625804 - DNA, 75 bp, synthetic construct
  source 1..75: mol_type = other DNA
gaacgtgtcgccggtcgtgaagccggtggtgtccgtgaataatgtgccggttattcctccggtcgtccgtccggt

SEQ ID NO: 625805 - DNA, 75 bp, synthetic construct
  source 1..75: mol_type = other DNA
gaaaaactcgggctgattccgtcggcggttgagcgcgcccggaaaaaggcggaagaactaaaacagaaggagttg

SEQ ID NO: 625806 - DNA, 75 bp, synthetic construct
  source 1..75: mol_type = other DNA
tgccttcagatatggtgagtttttataccggaaagagaagatgaattgcagttttgcattacgacgacaggtaag

SEQ ID NO: 625807 - DNA, 75 bp, synthetic construct
  source 1..75: mol_type = other DNA
tcctgtccggggaagtattccttcatataagttaatgcaggccacagataatatgcctgaagacattatttttaa

SEQ ID NO: 625808 - DNA, 75 bp, synthetic construct
  source 1..75: mol_type = other DNA
gtactgtactgaatacagaagatattcatctcttttctgattcatctgaaaagaaaacaggttttttttatttaa

SEQ ID NO: 625809 - DNA, 75 bp, synthetic construct
  source 1..75: mol_type = other DNA
tcagaatccccgtcattctttgactgtccggcttagtgctcatcaagggcagccagcacaatcagtatccttagc

SEQ ID NO: 625810 - DNA, 75 bp, synthetic construct
  source 1..75: mol_type = other DNA
taccgcaaagagaagatgaattgcagttttgcattacgacgacaggtaagtatgcagaacaatatgattaaaaat

SEQ ID NO: 625811 - DNA, 75 bp, synthetic construct
  source 1..75: mol_type = other DNA
tcctgtccggggaagtattccttcatataagttaatgcaggccacagataatattcctgaggacattacttttaa

SEQ ID NO: 625812 - DNA, 75 bp, synthetic construct
  source 1..75: mol_type = other DNA
atgcgtgatattcagcaggtgcttgaacgctggggtgcatgggtggcaaataatcatgaggatgtgagctggtcg

SEQ ID NO: 625813 - DNA, 75 bp, synthetic construct
  source 1..75: mol_type = other DNA
gcgggaaaactgaaaacaggtggtgcgctggcaattggtgcggcagcggcgggcggctatgctgccgggcgtttt

SEQ ID NO: 625814 - DNA, 75 bp, synthetic construct
  source 1..75: mol_type = other DNA
ctgcggcaaacaccctgcccttccagccatcagccgggggagtaaaaccgccagacaatgacggttacgacgcgc

SEQ ID NO: 625815 - DNA, 75 bp, synthetic construct
  source 1..75: mol_type = other DNA
aaataatgacaggccttacatctgttaatactgaacaaagcgaatttgttttttctgcaagaccctatcagtatg

SEQ ID NO: 625816 - DNA, 75 bp, synthetic construct
  source 1..75: mol_type = other DNA
ggcaaataataatgtgctgttaaccagtatgcctaatctcggaattgctttatatcagggggatactgacactcc

SEQ ID NO: 625817 - DNA, 75 bp, synthetic construct
  source 1..75: mol_type = other DNA
ttgtggctatgaggagggtggtaaggctattgttaattccaacattgatttaggtgcaggaaatgacatcattca

SEQ ID NO: 625818 - DNA, 75 bp, synthetic construct
  source 1..75: mol_type = other DNA
gatgcagcagttaagcacccggcttgaacgcctgaatgaatcgcgcacacgggaaattcagaaaatgcgggaact

SEQ ID NO: 625819 - DNA, 75 bp, synthetic construct
  source 1..75: mol_type = other DNA
tgatcgggccatcgtgatggatcaaggccgcatcgtcagcgaatccattatggatcgtttgcttactgagcctga

SEQ ID NO: 625820 - DNA, 75 bp, synthetic construct
  source 1..75: mol_type = other DNA
ggctatgacagttgtggctacctgaaggcgcagtctgcgggcaggcaccggataagtgaagagactgaccagtat

SEQ ID NO: 625821 - DNA, 75 bp, synthetic construct
  source 1..75: mol_type = other DNA
tccggatgaagcggaaagggcgcgcaagaaaatcgaagacgcacagcgtgcggccattcttcaggacaaggttgc

SEQ ID NO: 625822 - DNA, 75 bp, synthetic construct
  source 1..75: mol_type = other DNA
cccgcaaatacggggaagttgaccgggtatccttctttaaggacatcgccggggaagaggctttcacatcgttta

SEQ ID NO: 625823 - DNA, 75 bp, synthetic construct
  source 1..75: mol_type = other DNA
ccttccagatgaagcggaaagggcgagaaagaaaatcgaagacgcgcagcgtgcggccattcttcaggacaaggt

SEQ ID NO: 625824 - DNA, 75 bp, synthetic construct
  source 1..75: mol_type = other DNA
aagttggcttcgttctaatatacagaaaaaagataaacctgggtcgtatataagggaagtggatataaataactc

SEQ ID NO: 625825 - DNA, 75 bp, synthetic construct
  source 1..75: mol_type = other DNA
gccgtgcatttgtacggctccgcactggatggcggattgaaaccgtacagtgatattgatttgctggtgactgta

SEQ ID NO: 625826 - DNA, 75 bp, synthetic construct
  source 1..75: mol_type = other DNA
gggcctaaaggcgctgcgcaacgtctggggctgaaacgcacgaccctgctgtcacggatgaagcgactgggaatt

SEQ ID NO: 625827 - DNA, 75 bp, synthetic construct
  source 1..75: mol_type = other DNA
tggggaatggcctattgatactgggattattgaagtctacgccgcctcaccgatgacggtagtgctgaacgatgt

SEQ ID NO: 625828 - DNA, 75 bp, synthetic construct
  source 1..75: mol_type = other DNA
ggggctgctggacaggctggagggggaaatccgggcaaactgcgtgagcagtgaaagccgccagtggcttgcgca

SEQ ID NO: 625829 - DNA, 75 bp, synthetic construct
  source 1..75: mol_type = other DNA
aaattcactgggcgaacggtaatattcaggtcatcagacctgtgcgggggatcagtattaatggtgaagcgcagg

SEQ ID NO: 625830 - DNA, 75 bp, synthetic construct
  source 1..75: mol_type = other DNA
atgttgtccaaacaaatcccgcttggcatctatgaaaaagcgctccccgccggggatgaacttaatcaagctata

SEQ ID NO: 625831 - DNA, 75 bp, synthetic construct
  source 1..75: mol_type = other DNA
gtcgaaccaggtccacacctgaccgattggattggcagttcggctgtgcgcccagaacgcggtcaggcctatccc

SEQ ID NO: 625832 - DNA, 75 bp, synthetic construct
  source 1..75: mol_type = other DNA
atgaagatatctcttgtagttcctgtcttcaatgaagaagaagcgataccaattttttataaaacggtacgtgaa

SEQ ID NO: 625833 - DNA, 75 bp, synthetic construct
  source 1..75: mol_type = other DNA
cctgccaggagcataaggattttagaggaggtggaagatgaatttggtgatatttcgataaaagctgttaggccc

SEQ ID NO: 625834 - DNA, 75 bp, synthetic construct
  source 1..75: mol_type = other DNA
cttaagagtgtcacgttattctgaatattctattagtaataattctatagacatgccttattttcgcgttgaaag

SEQ ID NO: 625835 - DNA, 75 bp, synthetic construct
  source 1..75: mol_type = other DNA
ttctcctttccggttacgtttctccggtggaaaacatgccagtatggctgcaaaacctgacgtggattaacccta

SEQ ID NO: 625836 - DNA, 75 bp, synthetic construct
  source 1..75: mol_type = other DNA
cattcggttggctctgtgttaaccgtggtagtaaatattggcagggaaactgggaaaaacatgtcgatatgttag

SEQ ID NO: 625837 - DNA, 75 bp, synthetic construct
  source 1..75: mol_type = other DNA
ctgagcgccgggattgccctgctggtgatgctgacgctgtttgccttttacagtcaccggatgaacctcgccacc

SEQ ID NO: 625838 - DNA, 75 bp, synthetic construct
  source 1..75: mol_type = other DNA
tttatttgctgcatttgcctatcatggctatagtaatgagaacaataaataatttctataacctatcgagcatgt

SEQ ID NO: 625839 - DNA, 75 bp, synthetic construct
  source 1..75: mol_type = other DNA
cggtgtctgggctggaaaaagcctgctggtcacttttcatggagaaagtgaaggcggcatcaagctgtttcagat

SEQ ID NO: 625840 - DNA, 75 bp, synthetic construct
  source 1..75: mol_type = other DNA
ccggtgatctgtgcagttaatggcgtggctgcaggggcaggcgcaacactggcactggggtgcgatatcgttatt

SEQ ID NO: 625841 - DNA, 75 bp, synthetic construct
  source 1..75: mol_type = other DNA
gtgttttttgatatcgaagcgctttctgatcacacttccccgcttccgcacatgctgccgcgcccggaaacgttc

SEQ ID NO: 625842 - DNA, 75 bp, synthetic construct
  source 1..75: mol_type = other DNA
gttggcttgcaggctttgcagggaatttcatctgtcatggatatgtataagcagatggatcagcagaagcgacag

SEQ ID NO: 625843 - DNA, 75 bp, synthetic construct
  source 1..75: mol_type = other DNA
ggccgataacagcactaaaaccggcgggcgcagaaccgtcgggtggaaattctggtggtggagtgagaaaaatga

SEQ ID NO: 625844 - DNA, 75 bp, synthetic construct
  source 1..75: mol_type = other DNA
gtctgtaatcagatgaaaaaagaagcgctgtttcgccctaagtcttctcctgaattattgcaggaattgcaaatg

SEQ ID NO: 625845 - DNA, 75 bp, synthetic construct
  source 1..75: mol_type = other DNA
ggtaactcggctaaggcagagggtaagtcctcaacagcaataggagcgagtagtgtttctaaatcatggggatcg

SEQ ID NO: 625846 - DNA, 75 bp, synthetic construct
  source 1..75: mol_type = other DNA
cgaactgatcgtgtagttgctgaagcaggaaataaggttttacaaaaagctaataattatactgactggagagta

SEQ ID NO: 625847 - DNA, 75 bp, synthetic construct
  source 1..75: mol_type = other DNA
agctaaagccatactcgatgccttagatttcgacttttttgaactgcttgatagcgtcactatcgctcgctcacg

SEQ ID NO: 625848 - DNA, 75 bp, synthetic construct
  source 1..75: mol_type = other DNA
tattacagatgcctgtctgctgttcaacgaggaaacggccgatggccgcaagatgcaggtgtattcggacctgct

SEQ ID NO: 625849 - DNA, 75 bp, synthetic construct
  source 1..75: mol_type = other DNA
cggttaatgccttctataaaaccaccttcaagacggccaataatcccgatgaagatatgcaaatagaacggcaat

SEQ ID NO: 625850 - DNA, 75 bp, synthetic construct
  source 1..75: mol_type = other DNA
ctatgacgaaggtaatcttttctcagccccacgagcatggtggatgctgcgcacctttggtgtagagaaagtgtc

SEQ ID NO: 625851 - DNA, 75 bp, synthetic construct
  source 1..75: mol_type = other DNA
tcacttaacccattacaagcccactgccgcagatattcccgtggcgagcgataacccagcgcactatgcggatgc

SEQ ID NO: 625852 - DNA, 75 bp, synthetic construct
  source 1..75: mol_type = other DNA
atatccagcgttctgttaacgttaggtatgatgatgatgagtccggtaaccatatctacaccgataaaattaatt

SEQ ID NO: 625853 - DNA, 75 bp, synthetic construct
  source 1..75: mol_type = other DNA
atgtagcatcggttgttaattttgttgagacaggcatgagtggttataaatcatatttgataaaatattctgaac

SEQ ID NO: 625854 - DNA, 75 bp, synthetic construct
  source 1..75: mol_type = other DNA
cactgcgattgcgggcgctgcttatctgatttatcgcaactgggagcctatctccaggttcttttcgaccatctg

SEQ ID NO: 625855 - DNA, 75 bp, synthetic construct
  source 1..75: mol_type = other DNA
aagcatcggctgcggctgttacaggcgcgactaataccgcatcagtctcccccgcgaccgttgttccaggcgttg

SEQ ID NO: 625856 - DNA, 75 bp, synthetic construct
  source 1..75: mol_type = other DNA
taaaatattctgaacctgagttggttagcttttttgaaaagattcagaaggtgaatagttctgaagacaatgaag

SEQ ID NO: 625857 - DNA, 75 bp, synthetic construct
  source 1..75: mol_type = other DNA
gatgataaactgtacagtgtgcggtacctggtgtttaacggctttgagctgataagccagcagttcagccgggta

SEQ ID NO: 625858 - DNA, 75 bp, synthetic construct
  source 1..75: mol_type = other DNA
gcaacgaggggattaactacaccgcaagccgtcttgctgctgcgttcaatcacggatttatcaataagtctttgc

SEQ ID NO: 625859 - DNA, 75 bp, synthetic construct
  source 1..75: mol_type = other DNA
tcgcgtcagcttgtattgaccgatgctggggagcgatttcttccgcgagccagaaatatactggcggagttggat

SEQ ID NO: 625860 - DNA, 75 bp, synthetic construct
  source 1..75: mol_type = other DNA
actcatacaggagacgcaaggacgggagagtacgctgacagcgggcgactatatcaggttgtcggaaatcatggc

SEQ ID NO: 625861 - DNA, 75 bp, synthetic construct
  source 1..75: mol_type = other DNA
tgccgggaaaaagctattttttcagaaaaatgacgtcctgttgacagataacatcagccagtcctttttcctgcg

SEQ ID NO: 625862 - DNA, 75 bp, synthetic construct
  source 1..75: mol_type = other DNA
tatctggtgagtgaccccctgggtgtattgggtggactaaacacttatggttatgtgctgaatccgtgttgcttc

SEQ ID NO: 625863 - DNA, 75 bp, synthetic construct
  source 1..75: mol_type = other DNA
ccgagccctgatgagttccgcacctgataatcctaaaaacatcatcggcttcagtgagccatttcatctgttagg

SEQ ID NO: 625864 - DNA, 75 bp, synthetic construct
  source 1..75: mol_type = other DNA
agaaaatatcataaataacagtgtgaagttaccagatgaaggtaatggttttgtatacaatggtgatttatcata

SEQ ID NO: 625865 - DNA, 75 bp, synthetic construct
  source 1..75: mol_type = other DNA
ccgcgttacctgcccgttatatgcaaaccatcgaaaatgctgcgatctgggcgcaaattggcgacaagatggtga

SEQ ID NO: 625866 - DNA, 75 bp, synthetic construct
  source 1..75: mol_type = other DNA
tcgttggccagggtagtcgcctttttattcgcgtagatgaaattccaactggcataaaagttgctctcaatgatg

SEQ ID NO: 625867 - DNA, 75 bp, synthetic construct
  source 1..75: mol_type = other DNA
tcacgatgtttggtatttttggtaaaaaagcccgccgagcggcagtggaaattaaaaagtttgagaaacgtgatc

SEQ ID NO: 625868 - DNA, 75 bp, synthetic construct
  source 1..75: mol_type = other DNA
tatacatatccgctgagcccggtgaatagcatggatccattaggattatatgaatttaaatcaaaaaatatagat

SEQ ID NO: 625869 - DNA, 75 bp, synthetic construct
  source 1..75: mol_type = other DNA
gagcttgttattacgggtgataatgccacagtaaacaacaatggcaaaaccaccgttgacggcaaggattccacc

SEQ ID NO: 625870 - DNA, 75 bp, synthetic construct
  source 1..75: mol_type = other DNA
tcaagctggcagagatgaaacaccatggtcaattgttgcggatgacgccacaagagagtgacaaaatagcagtat

SEQ ID NO: 625871 - DNA, 75 bp, synthetic construct
  source 1..75: mol_type = other DNA
ttgctgcatttgaagggcgagacattgcgacatttgatcttgccataatgcgaactctcccaaggcttaaaggaa

SEQ ID NO: 625872 - DNA, 75 bp, synthetic construct
  source 1..75: mol_type = other DNA
gctgatatctgaaaatatgatgacaacgccattaactaaaagaatgacaatgatcagtagaattaatacgatgac

SEQ ID NO: 625873 - DNA, 75 bp, synthetic construct
  source 1..75: mol_type = other DNA
caccgtagcctggcggaggtgttgcaggaggacacgggtgtgacgctaccggcggagctggcggtgatgctgggg

SEQ ID NO: 625874 - DNA, 75 bp, synthetic construct
  source 1..75: mol_type = other DNA
cagtcgttacaaaaaatatccctgaatgcactatttatggtggtgtaccggcgcgattcattaaaaataggtttt

SEQ ID NO: 625875 - DNA, 75 bp, synthetic construct
  source 1..75: mol_type = other DNA
cttcgatattgagattgtcggcgtaccgattatgcgtgcgaaagacggtctggcgctgagttcccgtaacggtta

SEQ ID NO: 625876 - DNA, 75 bp, synthetic construct
  source 1..75: mol_type = other DNA
tcgcactttccctggttctggtcgctcccatggcagcgcaggctgcggaaattacgttagtcccgtcagtaaaat

SEQ ID NO: 625877 - DNA, 75 bp, synthetic construct
  source 1..75: mol_type = other DNA
cttccagaacgagccggaaaccggttattacggctggttgccgaaagagggaaccgttgagccgctgccgataat

SEQ ID NO: 625878 - DNA, 75 bp, synthetic construct
  source 1..75: mol_type = other DNA
cacccgcgacggctatcccgtcagccagtcgcaaatcagccggatgctacagaccgtagactggctgctgccctg

SEQ ID NO: 625879 - DNA, 75 bp, synthetic construct
  source 1..75: mol_type = other DNA
cggatgcctgagctattccggcgatctggttcgcatcacccagatcatcaatggtggacagaacggcattaacga

SEQ ID NO: 625880 - DNA, 75 bp, synthetic construct
  source 1..75: mol_type = other DNA
aattttcagagcggtttagactgaattgtgcgggtaaaattttaaatgtagtcgaatggattgctaaaaaaaatg

SEQ ID NO: 625881 - DNA, 75 bp, synthetic construct
  source 1..75: mol_type = other DNA
accacctaatgatatttcagataaaacgcataatcaaatatgtgcatcaaaaaaaatgtttaagaaatattacaa

SEQ ID NO: 625882 - DNA, 75 bp, synthetic construct
  source 1..75: mol_type = other DNA
ctcctgcggaaaagttaagaacaggtagagttttgcatgcaaaaatattggctattcaacctcacatagatctac

SEQ ID NO: 625883 - DNA, 75 bp, synthetic construct
  source 1..75: mol_type = other DNA
attttaactacacaccatctgcgctggtggcgacgttcggaaagaggatcacacagcagcaggctgatgcccttg

SEQ ID NO: 625884 - DNA, 75 bp, synthetic construct
  source 1..75: mol_type = other DNA
tcagcggcggcggtcacggtattgatatcaccggcgacagcgcaacggtggataacaagggcaccatgaccgtca

SEQ ID NO: 625885 - DNA, 75 bp, synthetic construct
  source 1..75: mol_type = other DNA
ccagtattactggtcaggttctgttagttccgctttcgtggaggcaatgaaaaagacgggagtaacccaggatct

SEQ ID NO: 625886 - DNA, 75 bp, synthetic construct
  source 1..75: mol_type = other DNA
cgcatcactcagattatcaatggcggtcagaacggcattaacgacagacgcgtgcgttacggcaaagcgaaagcg

SEQ ID NO: 625887 - DNA, 75 bp, synthetic construct
  source 1..75: mol_type = other DNA
gcggcaatgaaagagtttggaattacatcgattaatgatcaggccatgttcattgcacaagttgggcatgaatcc

SEQ ID NO: 625888 - DNA, 75 bp, synthetic construct
  source 1..75: mol_type = other DNA
gtccgtgtaacgcagatcatcaacggtggccagaatggactggctgacagaaatagtcgttataacaaagcgcgg

SEQ ID NO: 625889 - DNA, 75 bp, synthetic construct
  source 1..75: mol_type = other DNA
tctgaaagaagcatttttaattattgaagtaatagcagatgatgaagatgacttctccttatcacatgaaataaa

SEQ ID NO: 625890 - DNA, 75 bp, synthetic construct
  source 1..75: mol_type = other DNA
gagtgcgaatggaatactcattgatggtggtagccagatagtaaaagttcaagggcatgctgatggtacaacgat

SEQ ID NO: 625891 - DNA, 75 bp, synthetic construct
  source 1..75: mol_type = other DNA
gctcaacatggcgataaagcctcacaaacggtgatgggactcatatacctgaatggtctatctgaaagtccttca

SEQ ID NO: 625892 - DNA, 75 bp, synthetic construct
  source 1..75: mol_type = other DNA
ctacaggaaaatcacgggctgacttatgtgctgatttcacacaatgtctcggtgatacgtcatatgagcgatcgg

SEQ ID NO: 625893 - DNA, 75 bp, synthetic construct
  source 1..75: mol_type = other DNA
gaaaggcagcgcaacggggatacagcagagtagccagggcgctttggttgcaaccaccagggcgacgcgggtcac

SEQ ID NO: 625894 - DNA, 75 bp, synthetic construct
  source 1..75: mol_type = other DNA
ccatttccggcaatttagcgaccaatatgttgctggaaaatggcggtaatttattggtattagcaggtaccgaag

SEQ ID NO: 625895 - DNA, 75 bp, synthetic construct
  source 1..75: mol_type = other DNA
ctaacactaacggtacgacggtgagcggtacgaatagtgaaggtgcattctccatccacaatcacgtggcagaca

SEQ ID NO: 625896 - DNA, 75 bp, synthetic construct
  source 1..75: mol_type = other DNA
taccataattaatggtggcacacagaatattaataattatggcatagccacaggcaccaatatcaacagcggaac

SEQ ID NO: 625897 - DNA, 75 bp, synthetic construct
  source 1..75: mol_type = other DNA
ataatggagcaaaagaatatcttgaagagggtaaaaaaaatgggcgagaattgactcgtgatgagctggatacca

SEQ ID NO: 625898 - DNA, 75 bp, synthetic construct
  source 1..75: mol_type = other DNA
aatgaaggcggtacgctgacagtcaacgataatggcaaagcgacagatatcgtccagaacagcggtgccgctctc

SEQ ID NO: 625899 - DNA, 75 bp, synthetic construct
  source 1..75: mol_type = other DNA
ttattaaagataaaggaacaatgtcagttttaaccaatgctaaagctgatgcgacccgaatagataatggcgggg

SEQ ID NO: 625900 - DNA, 75 bp, synthetic construct
  source 1..75: mol_type = other DNA
tactcaccagtacggcactttttccatttccggcaatttagcgaccaatatgttgctggaaaatggcggtaattt

SEQ ID NO: 625901 - DNA, 75 bp, synthetic construct
  source 1..75: mol_type = other DNA
accaataccataatcaatggtggtacacagaatattaataatcatggtattgccacgggtaccaatatcaacggc

SEQ ID NO: 625902 - DNA, 75 bp, synthetic construct
  source 1..75: mol_type = other DNA
atggtgcaattttaaaaactaacactaacggtacgacggtgagcggtacgaatagtgaaggtgcattctccatcc

SEQ ID NO: 625903 - DNA, 75 bp, synthetic construct
  source 1..75: mol_type = other DNA
ctccaaagaaaaaggaacgagagtccgctgctgatttgacaattaagaattacccgagttttattgattattata

SEQ ID NO: 625904 - DNA, 75 bp, synthetic construct
  source 1..75: mol_type = other DNA
ttataatattaccacttggtggctgtaccgttcatggtaataaatccctaactgatgaaaatcatcagacggtta

SEQ ID NO: 625905 - DNA, 75 bp, synthetic construct
  source 1..75: mol_type = other DNA
atcggcggcagcacgccagccgggaaatacaccggcatgaaggcactgctggactcgcaaaccaaactgaaaata

SEQ ID NO: 625906 - DNA, 75 bp, synthetic construct
  source 1..75: mol_type = other DNA
aaaacaaatccatcaaagacttaagcttatctacgggcgtcacatacgaaatggcgcggcgctacaccctaggta

SEQ ID NO: 625907 - DNA, 75 bp, synthetic construct
  source 1..75: mol_type = other DNA
ttatttggctttgttttaggttcgcttaccttgattgcttcagctagagataatacgctaattagaaatatagga

SEQ ID NO: 625908 - DNA, 75 bp, synthetic construct
  source 1..75: mol_type = other DNA
ccgatcaatgatagtaaaggacaagaaaccagttttgtactaagtcaaactggaactgttgaagttgtgaaaaaa

SEQ ID NO: 625909 - DNA, 75 bp, synthetic construct
  source 1..75: mol_type = other DNA
ggcaacaaaacaggggaaatcatatgaaatccttggggcatcttttaaaaacagggtgtatatgtcggcagaatt

SEQ ID NO: 625910 - DNA, 75 bp, synthetic construct
  source 1..75: mol_type = other DNA
aaatggtggacgacagtatgttgaacagagcacagtagaaacaaccaccattaaaaatggcggtgagcaaagagt

SEQ ID NO: 625911 - DNA, 75 bp, synthetic construct
  source 1..75: mol_type = other DNA
ttcacacataagtggggggactgcgaatggaacaatcattgatggtggcagccaacgagtaacaacgcaggggca

SEQ ID NO: 625912 - DNA, 75 bp, synthetic construct
  source 1..75: mol_type = other DNA
gcacatgagcatatcgctgaagccagaacatatcgatatcgtgatgctaatccgcatcatactattcacgactcg

SEQ ID NO: 625913 - DNA, 75 bp, synthetic construct
  source 1..75: mol_type = other DNA
atggaagacctgctccagcaggtagatattgtggcgaagagcgacagtacggtgttgatttgcggtgaaaccgga

SEQ ID NO: 625914 - DNA, 75 bp, synthetic construct
  source 1..75: mol_type = other DNA
gtacatttgttgaagcggtttcctgtggctccttttctgctgcggcacgaagattacgcaaaagtcagtccgcag

SEQ ID NO: 625915 - DNA, 75 bp, synthetic construct
  source 1..75: mol_type = other DNA
gcgattaatctcgaccctgatctctatattgaggaaaacaggcttataccgtgtgctttaaccacacgctttgtt

SEQ ID NO: 625916 - DNA, 75 bp, synthetic construct
  source 1..75: mol_type = other DNA
gcgaagaatcccctacaaccctgatttgtatataccggaaaacacagtcattccatgctctatggattaccgctt

SEQ ID NO: 625917 - DNA, 75 bp, synthetic construct
  source 1..75: mol_type = other DNA
atgactgacgaaaataaatccccctctacggaagaagaaaagccagtgatgacatctgatcaggatgatatcgcc

SEQ ID NO: 625918 - DNA, 75 bp, synthetic construct
  source 1..75: mol_type = other DNA
ttcctgtttcgcaaccaatcatcattaacgctgctggttatccggtatataacggacagattgcaaagttcgtta

SEQ ID NO: 625919 - DNA, 75 bp, synthetic construct
  source 1..75: mol_type = other DNA
gcaagatggtaagcggcaatttacagaaaggctaaaatctgatggtgagagattagccacaaaatttgccatgga

SEQ ID NO: 625920 - DNA, 75 bp, synthetic construct
  source 1..75: mol_type = other DNA
gcgctcggaatcaatgtgtacgaaccagtcggtggcacaggtggcgcagaagtggctgctacgaatgtcgtccgg

SEQ ID NO: 625921 - DNA, 75 bp, synthetic construct
  source 1..75: mol_type = other DNA
atgaaaaaggaaaaaagaaatgacctaaagggtcaggaattaccacatgtaaaacaagcactacgagtatggaat

SEQ ID NO: 625922 - DNA, 75 bp, synthetic construct
  source 1..75: mol_type = other DNA
taaactactcacaaaatttgcaaccatctttaagagggttacaaatttccccgaaagcccgctccctcatactct

SEQ ID NO: 625923 - DNA, 75 bp, synthetic construct
  source 1..75: mol_type = other DNA
ttccgctgtaatagttgtgctttacactagattagatcaactaatgatcatgaatatgttaggttctgactccgt

SEQ ID NO: 625924 - DNA, 75 bp, synthetic construct
  source 1..75: mol_type = other DNA
atatcccccctacgctctacaaaaaccagggcgaaattatcaacctgattacagggcaggatattgacttttcaa

SEQ ID NO: 625925 - DNA, 75 bp, synthetic construct
  source 1..75: mol_type = other DNA
tcgggaagtaccaacatctttatcaactggcgtagtcgttaatcataagggctatcaagcacaagctacgtttga

SEQ ID NO: 625926 - DNA, 75 bp, synthetic construct
  source 1..75: mol_type = other DNA
atgtcgttgatgattggcacttggataaagacatattaggaggggatgagtacagcccaagtaactgtatctttg

SEQ ID NO: 625927 - DNA, 75 bp, synthetic construct
  source 1..75: mol_type = other DNA
ttctggcatatatggaatgaagaccagagacattgagcttccagcaaaatatgaaattattggtaacgcaaaaaa

SEQ ID NO: 625928 - DNA, 75 bp, synthetic construct
  source 1..75: mol_type = other DNA
ggaaattcatcagaacgtttattcaatttttatgagtgctgctatatatttttaccaagagcgcagcctcaagat

SEQ ID NO: 625929 - DNA, 75 bp, synthetic construct
  source 1..75: mol_type = other DNA
ctgttctgctcccgccaaaacgactgaacaaatagttgcagatgccgatgctgcgctgtaccgggcgaaagaaag

SEQ ID NO: 625930 - DNA, 75 bp, synthetic construct
  source 1..75: mol_type = other DNA
gacgcgaccagttgtgttaaaaatatgatcgcagacttagaaaaaagcgccaaaatcaaacgttcagaactcgag

SEQ ID NO: 625931 - DNA, 75 bp, synthetic construct
  source 1..75: mol_type = other DNA
gggtggatgtcgctgtcgcgtaaaccggagatgacgtggtacgggtgggacggcgaccggctgacgacggtacag

SEQ ID NO: 625932 - DNA, 75 bp, synthetic construct
  source 1..75: mol_type = other DNA
attcaaatacaaaaatggcaattttgtctgggagatagccagaattaaaattactctcccaaaagaagagggtgg

SEQ ID NO: 625933 - DNA, 75 bp, synthetic construct
  source 1..75: mol_type = other DNA
atagtattataaatttaatttgtaaggaagctgcctcagggatgtatcgcggtgctcttgaaactttacaaaaaa

SEQ ID NO: 625934 - DNA, 75 bp, synthetic construct
  source 1..75: mol_type = other DNA
atttctgatgcgcagtctactttattaagtaaaattgacacttcatcttataaagatccgcacattttatttaat

SEQ ID NO: 625935 - DNA, 75 bp, synthetic construct
  source 1..75: mol_type = other DNA
ttgatgaaactggacaaaaacgaaaacatagaacgagttgatattataacttataactatgacatttatcttgag

SEQ ID NO: 625936 - DNA, 75 bp, synthetic construct
  source 1..75: mol_type = other DNA
aacgctcagacggttatggataacttccactacgttaatttcttccggtgtgagcgttggggaagtccattcctt

SEQ ID NO: 625937 - DNA, 75 bp, synthetic construct
  source 1..75: mol_type = other DNA
tctcaacgctattacatctcttttttgaacgtgaggatatttgccaaaagcttaatattattgaccaaaacaata

SEQ ID NO: 625938 - DNA, 75 bp, synthetic construct
  source 1..75: mol_type = other DNA
ccggggcagcagtatgatgaggagtccggcctgtactataaccggaaccggtactatgacccgctacaggggagg

SEQ ID NO: 625939 - DNA, 75 bp, synthetic construct
  source 1..75: mol_type = other DNA
cgtggtacgggtgggacggcgaccggctgacgacggtacagaccgacaccacgcgtatccagacggtatatcagc

SEQ ID NO: 625940 - DNA, 75 bp, synthetic construct
  source 1..75: mol_type = other DNA
tgtttcaagctacaaactatcactgtattaacatgtggtgtgttgggagggcggcagctatgtcagattcttttc

SEQ ID NO: 625941 - DNA, 75 bp, synthetic construct
  source 1..75: mol_type = other DNA
atcatttcagtctggcattatgccactttttcagctgtgcaggtgaaacattctccggtacaggataaagaaaga

SEQ ID NO: 625942 - DNA, 75 bp, synthetic construct
  source 1..75: mol_type = other DNA
tccactggcacggagatcgccggtaataacgggaaagtcattcaggacggtacactggatgtcagcggcggcggt

SEQ ID NO: 625943 - DNA, 75 bp, synthetic construct
  source 1..75: mol_type = other DNA
atgaccaatgctgatattccttatatgatcagcgacgcgttgatggggatttctgataacccactggtcatattg

SEQ ID NO: 625944 - DNA, 75 bp, synthetic construct
  source 1..75: mol_type = other DNA
ctgaaattaagcctgtccggaaggctggcgataaaggtgattgcagagccaccggataagcgtcgtcgcgacctg

SEQ ID NO: 625945 - DNA, 75 bp, synthetic construct
  source 1..75: mol_type = other DNA
agcagcggctgaaattaagcctgtccggaaggctggcgataaagattattgccgagccaccggataagcgccgcc

SEQ ID NO: 625946 - DNA, 75 bp, synthetic construct
  source 1..75: mol_type = other DNA
ccttttgattctgttcgtgctgcatttcttgaaggtaatcctttatatgacggtgcgaaattttatgaaaaaaat

SEQ ID NO: 625947 - DNA, 75 bp, synthetic construct
  source 1..75: mol_type = other DNA
acatcaaaaaactctggtatctgaaggatggcgttatttatacgcgatatggtaataagcctgtttcattttcta

SEQ ID NO: 625948 - DNA, 75 bp, synthetic construct
  source 1..75: mol_type = other DNA
gtggccgtcgaggtggtcatgcgtggacgtcagaaagaaatcgacaccggcgagggtaaacagggagaagacact

SEQ ID NO: 625949 - DNA, 75 bp, synthetic construct
  source 1..75: mol_type = other DNA
gggatggtaaatggaagattgcggcgattgattttgcatcgttacatgagtttgaaaaaaacggtcgggttactg

SEQ ID NO: 625950 - DNA, 75 bp, synthetic construct
  source 1..75: mol_type = other DNA
aggttttaaagaagtaaacgatttcttcaatgataaggtagtcaaagagtttgatataaatgttgataaatggag

SEQ ID NO: 625951 - DNA, 75 bp, synthetic construct
  source 1..75: mol_type = other DNA
tgggccttcagtgtaagcgaagtggtaacaggctgaccactgccactatgcggcaaatcaataaacgcgatcgcc

SEQ ID NO: 625952 - DNA, 75 bp, synthetic construct
  source 1..75: mol_type = other DNA
gaatatgccgtatctatccacgaggctatttttatgctttaccataataggccaattgcggaaggtaaacatatt

SEQ ID NO: 625953 - DNA, 75 bp, synthetic construct
  source 1..75: mol_type = other DNA
gattccactgtattatgggtggtaaaatagataacgtatatgatgcttttgaagccataaaaagtatgaacgtta

SEQ ID NO: 625954 - DNA, 75 bp, synthetic construct
  source 1..75: mol_type = other DNA
cgggtgagtgaggaaagccgccgctggctggcatcgtgcggcctgacggtgaagcagatgcaaaaccagatggac

SEQ ID NO: 625955 - DNA, 75 bp, synthetic construct
  source 1..75: mol_type = other DNA
agcgaaaaatacatctttatcactgtgaccaccggggcttgccgctggcgcttatcagtgaagacggcaatacgg

SEQ ID NO: 625956 - DNA, 75 bp, synthetic construct
  source 1..75: mol_type = other DNA
ttcatctttaccactgcgaccatcggggccagccgctggcgctcatcagcgaagacggcgatacggtgtggagcg

SEQ ID NO: 625957 - DNA, 75 bp, synthetic construct
  source 1..75: mol_type = other DNA
atttaattttaagattgaagaagagatcaaagagataattgatatactatcaacgcttgaaccaagtgaagattc

SEQ ID NO: 625958 - DNA, 75 bp, synthetic construct
  source 1..75: mol_type = other DNA
gaacaagtgccacgcacaggtgtaaaaaaacctgataccgaacaacttaacttgcttaaaaaatcacagcgagcc

SEQ ID NO: 625959 - DNA, 75 bp, synthetic construct
  source 1..75: mol_type = other DNA
cttcttccaattataattatttcagctattataatttattatcttagatattttattattgaattgcttctttca

SEQ ID NO: 625960 - DNA, 75 bp, synthetic construct
  source 1..75: mol_type = other DNA
ataacgaccacggctggctgaaagaaatcagccacctgagcgaaggtcaccgggtggcggtacattacggctata

SEQ ID NO: 625961 - DNA, 75 bp, synthetic construct
  source 1..75: mol_type = other DNA
atcaccgtcaccgacagcctgaaccggcgtgaggtgctgcatacagaaggcggggccgggctgaaacgggtggtg

SEQ ID NO: 625962 - DNA, 75 bp, synthetic construct
  source 1..75: mol_type = other DNA
ggatggtggcgcaccgttacgcgggaaggccggagatgcgctaccgctacgacgatacggggcgggtggtggagc

SEQ ID NO: 625963 - DNA, 75 bp, synthetic construct
  source 1..75: mol_type = other DNA
gatgcgcactatgtttaccactatgatgaatacggcagactgacggagaagacggaccgcatcccggcgggtgtg

SEQ ID NO: 625964 - DNA, 75 bp, synthetic construct
  source 1..75: mol_type = other DNA
cgatatcacggacatcaccacaccggacgggcgggagacgaaattttactataacgacgggaaccagctgacggc

SEQ ID NO: 625965 - DNA, 75 bp, synthetic construct
  source 1..75: mol_type = other DNA
cggcagcagggcaggcagtaatgccgcatatgaactgaccagcacatacacccccgcaggccagttacagagcca

SEQ ID NO: 625966 - DNA, 75 bp, synthetic construct
  source 1..75: mol_type = other DNA
acctgacgatatggcagggcgatgaattacagcgccaggtgaaaggcgtggtgacctggtttgaactcggggaga

SEQ ID NO: 625967 - DNA, 75 bp, synthetic construct
  source 1..75: mol_type = other DNA
caaccaatccctccgacccgaaatttcttgccgaatatcaaagtgcattagctgagtatacattatatcgaaatg

SEQ ID NO: 625968 - DNA, 75 bp, synthetic construct
  source 1..75: mol_type = other DNA
tcaacgacaccgtggccgccaaagccggtgtggccgtcagtgacggcgatccgtcatggaacgttggcgtgaacc

SEQ ID NO: 625969 - DNA, 75 bp, synthetic construct
  source 1..75: mol_type = other DNA
aatggttaataactgcatcaagttaataatgagacctgcctcattagaaaacataaaagatgcaagttatggtga

SEQ ID NO: 625970 - DNA, 75 bp, synthetic construct
  source 1..75: mol_type = other DNA
tgtaaaatataataaaggaaaaattgtctggcggcttattgatgattatggtgcattaacaagggaatatgaaac

SEQ ID NO: 625971 - DNA, 75 bp, synthetic construct
  source 1..75: mol_type = other DNA
tggtattggcttacccaatgcttgcaatatcggcagattttaaaacacaatcacgtaattatagtatcgttttag

SEQ ID NO: 625972 - DNA, 75 bp, synthetic construct
  source 1..75: mol_type = other DNA
tctggaataaaattgcatcctcattgccagagccatacaacagtaccatcaaacataacattattttttataaag

SEQ ID NO: 625973 - DNA, 75 bp, synthetic construct
  source 1..75: mol_type = other DNA
atcaacagaagaaaaagacattagcccattagcaaaaattattcttgactatattgaatcagataaaaaccctga

SEQ ID NO: 625974 - DNA, 75 bp, synthetic construct
  source 1..75: mol_type = other DNA
tatagatatgggaaactgtaactgctcaaatgtcaacttcgaacatacttattttgatggcgtcaagtttacaaa

SEQ ID NO: 625975 - DNA, 75 bp, synthetic construct
  source 1..75: mol_type = other DNA
gaattatgaggtttttttaacaacccttttggggttgttggatagaaggaaagatctcaaccgcaaaatcaatat

SEQ ID NO: 625976 - DNA, 75 bp, synthetic construct
  source 1..75: mol_type = other DNA
acccggcctggacgataacatatgaaattggtttctatgtttttttcggggtatcaatgtctatttcgcataaat

SEQ ID NO: 625977 - DNA, 75 bp, synthetic construct
  source 1..75: mol_type = other DNA
attcaacactatgaccgaaaccattgagaataattttgatgatatttttcgtcaacagtcagagaatatgagcaa

SEQ ID NO: 625978 - DNA, 75 bp, synthetic construct
  source 1..75: mol_type = other DNA
catggttaacaactgcatcaagttaataatgagaccagcctcattagaaaacataaaagatgcaagttatggtga

SEQ ID NO: 625979 - DNA, 75 bp, synthetic construct
  source 1..75: mol_type = other DNA
cgcgcagcgggaacaagccccgctgcgccatgcaaccgcctatgagcagatgctggtaaagctggccgaagaccg

SEQ ID NO: 625980 - DNA, 75 bp, synthetic construct
  source 1..75: mol_type = other DNA
ctggagattgcccgctatgcgatgacctatggcctgaccatgccgaccggcggccaccggcgcaccacgccgtat

SEQ ID NO: 625981 - DNA, 75 bp, synthetic construct
  source 1..75: mol_type = other DNA
atgacgagtcccgcagcgcgtcacatgatgcgggtctcggcctctgaaactgcgcggcgggctgctgctccgctg

SEQ ID NO: 625982 - DNA, 75 bp, synthetic construct
  source 1..75: mol_type = other DNA
atgaccgagatggaaaggcagcttctgagcgccttagaaagcttacaaacaagttatgaacaacagcaacaggcg

SEQ ID NO: 625983 - DNA, 75 bp, synthetic construct
  source 1..75: mol_type = other DNA
cgatgtcggcgatatcggcggcgcgatggatattgcccgctacgcgtttaagtacggtctgaccatgccaggcaa

SEQ ID NO: 625984 - DNA, 75 bp, synthetic construct
  source 1..75: mol_type = other DNA
atgcctgcccccgtcgtcctgatccttgcggccgggcgtggaaagcgctttctcgcctccgggggaaatacccat

SEQ ID NO: 625985 - DNA, 75 bp, synthetic construct
  source 1..75: mol_type = other DNA
gcaaaaaacacgctattgtagagttggttaatttaacggattctttacctgataaaaataatggttctgtaagca

SEQ ID NO: 625986 - DNA, 75 bp, synthetic construct
  source 1..75: mol_type = other DNA
gttacaccgggggatccgtatagtttggcagaagcgattaaaaaaatctatttgaataaagtaaacttagatata

SEQ ID NO: 625987 - DNA, 75 bp, synthetic construct
  source 1..75: mol_type = other DNA
caccatattacattaattttagtgaaatcaaactgaacggtaaaaatattacacccccagtgtttgttaaaccaa

SEQ ID NO: 625988 - DNA, 75 bp, synthetic construct
  source 1..75: mol_type = other DNA
aagcatgtaatttattggcggcagggcttgccgtcactgcctgtggaggagaggtgtcaaaagactctccgatga

SEQ ID NO: 625989 - DNA, 75 bp, synthetic construct
  source 1..75: mol_type = other DNA
cagcttgttcttcttccgaagcttggttgggttaaataccggaaaagccgtgatataacaggcgacataaaaaat

SEQ ID NO: 625990 - DNA, 75 bp, synthetic construct
  source 1..75: mol_type = other DNA
aaggacttgcgctgttaaaggagagctatgagtcaggtcagaaacatatgcattacaaccagcttgcaccattat

SEQ ID NO: 625991 - DNA, 75 bp, synthetic construct
  source 1..75: mol_type = other DNA
aaaaggatgacaatggacattacgatttcagcggtctatatctagcacacagcaatatttccggtaaagatccca

SEQ ID NO: 625992 - DNA, 75 bp, synthetic construct
  source 1..75: mol_type = other DNA
acacctcttctgaccgcaccaatgaccaggttaaccatactgcggcgggtggtgataaagcagacgcgtggactg

SEQ ID NO: 625993 - DNA, 75 bp, synthetic construct
  source 1..75: mol_type = other DNA
atctgaaaaatatgtggtcagttctcagtgaaacagaaattacacaactggaacacctcaacagaaaactgctac

SEQ ID NO: 625994 - DNA, 75 bp, synthetic construct
  source 1..75: mol_type = other DNA
tcgatagcatgttgtcagttcttatgcttccgtatgctaatgagttctgttgtttagaggcgattggtagtcgat

SEQ ID NO: 625995 - DNA, 75 bp, synthetic construct
  source 1..75: mol_type = other DNA
tgcaatggcgagtgttgatgatcttgagcattcttatgacgaaataaatgaaacactaaagtggatcaatagtta

SEQ ID NO: 625996 - DNA, 75 bp, synthetic construct
  source 1..75: mol_type = other DNA
tgaaattatttctccgtccaattcaattacaagaattacccgcagaagcgccggacacactcaagttttcgcgat

SEQ ID NO: 625997 - DNA, 75 bp, synthetic construct
  source 1..75: mol_type = other DNA
tatccctgcgtgacgatccggcacaggaaaccctgcgtttcagcgccgatgccagacgcaggacatcctgcacca

SEQ ID NO: 625998 - DNA, 75 bp, synthetic construct
  source 1..75: mol_type = other DNA
attagtgttaattgctactggactatcggtatcatctctcaataatgtgtatgtatctttagcgcttgttatttt

SEQ ID NO: 625999 - DNA, 75 bp, synthetic construct
  source 1..75: mol_type = other DNA
gagctagcgaaaacgctcgcgcttcagtacgaggaaatactcttgcttaagcaaaaatatcatgaaattgacgag

SEQ ID NO: 626000 - DNA, 75 bp, synthetic construct
  source 1..75: mol_type = other DNA
gcaaaaactgtatgaggcgggcgtgccaaccgtgctggtgggtaaggtggcagatatcgtcagcaatccttatgg

SEQ ID NO: 626001 - DNA, 75 bp, synthetic construct
  source 1..75: mol_type = other DNA
tcaatgattcgatgaagcacgataccattgacttgcgaagtgagacttactcaggggaaactagcgaaaattttt

SEQ ID NO: 626002 - DNA, 75 bp, synthetic construct
  source 1..75: mol_type = other DNA
acctttatggggttacaggggagccagtcgcctctcccccggttattacctcgatcacctggcctggaaagcggt

SEQ ID NO: 626003 - DNA, 75 bp, synthetic construct
  source 1..75: mol_type = other DNA
acagcaccaaatggtgatatttatattgtaagtgagccaaatattttttatcacttcaaaaagcaggtagatgat

SEQ ID NO: 626004 - DNA, 75 bp, synthetic construct
  source 1..75: mol_type = other DNA
atgaggtgaaaaatttcctcactgctctttcagatagcatttgctcattatttattgttaatagtaatgtggcat

SEQ ID NO: 626005 - DNA, 75 bp, synthetic construct
  source 1..75: mol_type = other DNA
gcactgcaaataattatttgaaacaagcctggaacgatataaaaaatgagtacgaaaaaaatcaaacatattcaa

SEQ ID NO: 626006 - DNA, 75 bp, synthetic construct
  source 1..75: mol_type = other DNA
tctataatctcagggaagatgtaaagacgttatttggcgttgatctacaatctgacaacaaaattcaggggcaga

SEQ ID NO: 626007 - DNA, 75 bp, synthetic construct
  source 1..75: mol_type = other DNA
cttatcagaaatcacatgggaatgaaacgaaagggatgattctaactaactgctcctgtgttaaaaccactttca

SEQ ID NO: 626008 - DNA, 75 bp, synthetic construct
  source 1..75: mol_type = other DNA
gatgatgttttttctgagtattgtttagatgatgaaaatattagtgttcagccagaatggataaatacgccggga

SEQ ID NO: 626009 - DNA, 75 bp, synthetic construct
  source 1..75: mol_type = other DNA
atgagtacgaaaaaaatcaaacatattcaatctctcgttttgaaaataacactggtttgttttatgcggttgtac

SEQ ID NO: 626010 - DNA, 75 bp, synthetic construct
  source 1..75: mol_type = other DNA
gccgcaccggagaaacccgaccccgccccggtgacaccaccgccgccgcgtaaagtacagggctgctacagctcg

SEQ ID NO: 626011 - DNA, 75 bp, synthetic construct
  source 1..75: mol_type = other DNA
tttatgtagagaagatgaagtttgctaaaaaggctgacaaaagtacagtcatctataaaaacaaaatacggataa

SEQ ID NO: 626012 - DNA, 75 bp, synthetic construct
  source 1..75: mol_type = other DNA
gagttaccgcctatcccctcgacagttaacacgttaaatctggaaaacaattgtctcttctggatctatcccata

SEQ ID NO: 626013 - DNA, 75 bp, synthetic construct
  source 1..75: mol_type = other DNA
tataaaaaatgagtacgaaaaaaatcaaacatattcaatcacgctttttgaaaacacactggtgtgttttatgcg

SEQ ID NO: 626014 - DNA, 75 bp, synthetic construct
  source 1..75: mol_type = other DNA
atcgaggctcttgttgatacggcattctataatctcagggaagatgtaaagacgttatttggcgttgatctacaa

SEQ ID NO: 626015 - DNA, 75 bp, synthetic construct
  source 1..75: mol_type = other DNA
catatcagtgcgaactcgggcacgctgaataacgtgaccattgcagaaaactgcgttgttaaaggaaccattagc

SEQ ID NO: 626016 - DNA, 75 bp, synthetic construct
  source 1..75: mol_type = other DNA
aatacgctgaagaatacagcgttcaaaggtggcaacgtcacggacgagcaatttacagccctgctaatcgtcgcc

SEQ ID NO: 626017 - DNA, 75 bp, synthetic construct
  source 1..75: mol_type = other DNA
ctttatgaattttgacgatgagtttttagagaaatctatcaatactgctccaggtatttggggccgtgaagtgaa

SEQ ID NO: 626018 - DNA, 75 bp, synthetic construct
  source 1..75: mol_type = other DNA
aaaacaggaaaggtctatatttgtaattatattcttaatgatatgagtcataaatcgacctataccttctggtag

SEQ ID NO: 626019 - DNA, 75 bp, synthetic construct
  source 1..75: mol_type = other DNA
aataagaaattaatgaattataacattgcagagttcgcaaaagcatatgtatggcatgagtgctttcatgattta

SEQ ID NO: 626020 - DNA, 75 bp, synthetic construct
  source 1..75: mol_type = other DNA
taatcaaggaagccaaattaaaaatagcggttgcgaactgttaccctaattcagagatggccagggtagagggtg

SEQ ID NO: 626021 - DNA, 75 bp, synthetic construct
  source 1..75: mol_type = other DNA
accgcaaagaccgtaagcacccgaccatcgtcaccgagtacatgggagagtgcaaacgcaacactcagccatggc

SEQ ID NO: 626022 - DNA, 75 bp, synthetic construct
  source 1..75: mol_type = other DNA
tgaaggatggtacaggaaaaccggtaccggactgcaccatagagctgaaggccactcgaacgagtgagacggtga

SEQ ID NO: 626023 - DNA, 75 bp, synthetic construct
  source 1..75: mol_type = other DNA
acaactattctctgtagcgactggtcgtctcgataaacttcttgaaccgccccgggtttcctggagagtgtttta

SEQ ID NO: 626024 - DNA, 75 bp, synthetic construct
  source 1..75: mol_type = other DNA
catccctgagccaacccgcgccgcgctttactctttcacctacaacgtaggagctggagcgtttagcagatcgac

SEQ ID NO: 626025 - DNA, 75 bp, synthetic construct
  source 1..75: mol_type = other DNA
atttgtttttttatgattttattattcccccttataaatacacttgaaagatgtaccgagagtagatttaaattt

SEQ ID NO: 626026 - DNA, 75 bp, synthetic construct
  source 1..75: mol_type = other DNA
tacgttcctggtttatatgatatagaaatactaggcatgtgttttaataaaatagaatcatattatagcatgatg

SEQ ID NO: 626027 - DNA, 75 bp, synthetic construct
  source 1..75: mol_type = other DNA
aggtgataccggagagcggggagtaccaggacctcaggggccgaaaggcgacgcagggccaaagggtgagcctgg

SEQ ID NO: 626028 - DNA, 75 bp, synthetic construct
  source 1..75: mol_type = other DNA
gtactgacattttcacttcattgaatgccatttccaatgatttcagatctgattttagcattcgcaatgttaata

SEQ ID NO: 626029 - DNA, 75 bp, synthetic construct
  source 1..75: mol_type = other DNA
tgcgcctgggcactatcgtcgatgccacgctgatccacgcgcccagttcaaccaagaaccaggacggcaagcgcg

SEQ ID NO: 626030 - DNA, 75 bp, synthetic construct
  source 1..75: mol_type = other DNA
ctaatgttttcaaaacattcttcagagcattaagcccttacgattacacactgtattgcaggaagtgggtaaaac

SEQ ID NO: 626031 - DNA, 75 bp, synthetic construct
  source 1..75: mol_type = other DNA
gcccggatgtggtgacgggcctcatcacgcgcatcaccacgcaggatggcagggcatcggcgttttactataacc

SEQ ID NO: 626032 - DNA, 75 bp, synthetic construct
  source 1..75: mol_type = other DNA
cggagaggcaataaaaacaaagatcaatgaaggcggtacgctgacagtcaacgataatggcaaagcgacagatat

SEQ ID NO: 626033 - DNA, 75 bp, synthetic construct
  source 1..75: mol_type = other DNA
tgttgacggtacgacgataaataagtctggttatcaggacatcatgcaaggaagtctggcgacgaacacaaccat

SEQ ID NO: 626034 - DNA, 75 bp, synthetic construct
  source 1..75: mol_type = other DNA
acagcataaaaaaatatgaactagatcaagaggaagtaacaaaaaatatgaatagtggatgtattgaggcattag

SEQ ID NO: 626035 - DNA, 75 bp, synthetic construct
  source 1..75: mol_type = other DNA
caataaggaaatgtactgatttcgttgagacttcaggcttgctagctgagtctaatgaaagggtaaatttacctt

SEQ ID NO: 626036 - DNA, 75 bp, synthetic construct
  source 1..75: mol_type = other DNA
agcgttgtccgtgaggcttttacccggtcaaaacagcgttacggtgcaccacgcctgacggatgaactgtgtgct

SEQ ID NO: 626037 - DNA, 75 bp, synthetic construct
  source 1..75: mol_type = other DNA
gccgcaggatgtcgcaaaagccgaaaaacgagccagagcaccagaaattattcctgtttcagtatctggctcttc

SEQ ID NO: 626038 - DNA, 75 bp, synthetic construct
  source 1..75: mol_type = other DNA
ccggtacggtcaacaaatcgccgttcaccgggaggaaggcatcagcacttacagcagttataacccgcgtgggca

SEQ ID NO: 626039 - DNA, 75 bp, synthetic construct
  source 1..75: mol_type = other DNA
ccgcgctgacgaattactggtttaagcgtaaaacctaccgctacctgacctcacttggacccgataagggggctg

SEQ ID NO: 626040 - DNA, 75 bp, synthetic construct
  source 1..75: mol_type = other DNA
gcctcggcgtctttggggcaagttttggttctgcggaagtggcgataaacgttgaaggtgctgccgttgagcgag

SEQ ID NO: 626041 - DNA, 75 bp, synthetic construct
  source 1..75: mol_type = other DNA
tggtgggtgccattgttggcggatccggagccatcaccattgctgcagtaatgctgggcaatgccgatgggctgg

SEQ ID NO: 626042 - DNA, 75 bp, synthetic construct
  source 1..75: mol_type = other DNA
tattgatatcaatgaccggtttgttatttgcaaatcagtcactggcgattacgcaatcacagatgcagatgagag

SEQ ID NO: 626043 - DNA, 75 bp, synthetic construct
  source 1..75: mol_type = other DNA
ccattctggctgaacaggctcgggcatggtttgcactgaaccgactaatgcgtgaagactggcaacagcattttg

SEQ ID NO: 626044 - DNA, 75 bp, synthetic construct
  source 1..75: mol_type = other DNA
ccgctgttttattcgatatggatggtgtccttattgattccaatgcggtgattgagcgcggctgggctgaaggcg

SEQ ID NO: 626045 - DNA, 75 bp, synthetic construct
  source 1..75: mol_type = other DNA
caaagcgtcgatagcgccattcagaaacgcaatcaggtcagtgaggaaaacaaaatccaggaagccggattgaaa

SEQ ID NO: 626046 - DNA, 75 bp, synthetic construct
  source 1..75: mol_type = other DNA
atgagagatgtctttaacaaagaaaaattagaaaacattataaattcgaatgatgttattataaattgcattggc

SEQ ID NO: 626047 - DNA, 75 bp, synthetic construct
  source 1..75: mol_type = other DNA
tttttactgaagatggcctctatactgtgcgcgttgagaatggtgctattgtcagtcactgccgtattaaatgtt

SEQ ID NO: 626048 - DNA, 75 bp, synthetic construct
  source 1..75: mol_type = other DNA
tcatccgttctggcgaacacacatggggccgaacggctggggctgcaaatgcggtacgcggcaaatcagccggta

SEQ ID NO: 626049 - DNA, 75 bp, synthetic construct
  source 1..75: mol_type = other DNA
ggttttaacattcagttgaatgattgcgataccactgttgccacaaaagccgctgttgccttcttaggtacggca

SEQ ID NO: 626050 - DNA, 75 bp, synthetic construct
  source 1..75: mol_type = other DNA
caatgaacagcgaaacggtcaataaggcgttgtggcgaatgggatttggcggtgaactggtctctcatggcttcc

SEQ ID NO: 626051 - DNA, 75 bp, synthetic construct
  source 1..75: mol_type = other DNA
acccgtaggcctgataagacgcgtcagcgttgcatcaggcactgtgcaccgatagccggatgcggcgtaaacgcc

SEQ ID NO: 626052 - DNA, 75 bp, synthetic construct
  source 1..75: mol_type = other DNA
cttttagagatttataatatattgtcacccaaaatattagccagaatgggtgatgcagaatttatctcagatatg

SEQ ID NO: 626053 - DNA, 75 bp, synthetic construct
  source 1..75: mol_type = other DNA
tatcctttccccaaaatatatttatatcaagcatttgacaggacaaacgaaaggccaattaaagaaattgttgat

SEQ ID NO: 626054 - DNA, 75 bp, synthetic construct
  source 1..75: mol_type = other DNA
ccactcaatcagcagacgttcgcccggaagctgaattagaccgcgcagatcgcatcaaggcggccttaaaggcta

SEQ ID NO: 626055 - DNA, 75 bp, synthetic construct
  source 1..75: mol_type = other DNA
gcaaaggggataaacgaagaggtggtgcgcgcaatttcggcgaagcgtaatgagccggagtggatgctgaagttt

SEQ ID NO: 626056 - DNA, 75 bp, synthetic construct
  source 1..75: mol_type = other DNA
agattatcgaatggctggatgatgagcaattaacgaaactactgcaggcattgattattgatgcccgacgacgac

SEQ ID NO: 626057 - DNA, 75 bp, synthetic construct
  source 1..75: mol_type = other DNA
cgaagccatctgcggctatcaacatggcctataacgggcgcgataagaacgcgcaggagatggtcagctttatca

SEQ ID NO: 626058 - DNA, 75 bp, synthetic construct
  source 1..75: mol_type = other DNA
cttgcgcgccgtccgatccgtgttctgctggcagatgaggtggataaatacccgattacccgcgagggcgatccc

SEQ ID NO: 626059 - DNA, 75 bp, synthetic construct
  source 1..75: mol_type = other DNA
tggcatcagacgcgcccatttgagtgctgcggggagcggcactcaccgctgatggattatgaccttgcctggcgg

SEQ ID NO: 626060 - DNA, 75 bp, synthetic construct
  source 1..75: mol_type = other DNA
actccggcggtcaccacacgcaaaaggtttatgagttctgcaaagatcgccttgggcgccgcgtctgggctatca

SEQ ID NO: 626061 - DNA, 75 bp, synthetic construct
  source 1..75: mol_type = other DNA
gctatctgctggtcagcacgtcaccgcaacaaccgccactcgaacagcttaccgccctggccgttccgcccggtt

SEQ ID NO: 626062 - DNA, 75 bp, synthetic construct
  source 1..75: mol_type = other DNA
caaagtggctgagtctggattgaaggtccaccagcaccagcaagctaacgtaccggactttaacgactacttcta

SEQ ID NO: 626063 - DNA, 75 bp, synthetic construct
  source 1..75: mol_type = other DNA
caggccgtaaacgccgccattcagaaacgcaatcaggtggcagaagagaatcgcgtcgctgagtctggattgaag

SEQ ID NO: 626064 - DNA, 75 bp, synthetic construct
  source 1..75: mol_type = other DNA
attcggcaataccaacgttggtgttgtgcgcttccctatggatgcagaaattaagcttttcgacggccagcaccg

SEQ ID NO: 626065 - DNA, 75 bp, synthetic construct
  source 1..75: mol_type = other DNA
cagcatcacgtttgatggatgccatcgtgaataaaaacttgtctgttagccgcggtaaggaggccagccatgact

SEQ ID NO: 626066 - DNA, 75 bp, synthetic construct
  source 1..75: mol_type = other DNA
agcacatcgcgagagctcaaccatggaattttgggtgttatgagtgtagaatagaccatgatgcacttaatgaat

SEQ ID NO: 626067 - DNA, 75 bp, synthetic construct
  source 1..75: mol_type = other DNA
acatcggtgactttgtcaaagtcacccagagcggcagcgacaccatcgtgcagatcgaccgcgacggcacgggcg

SEQ ID NO: 626068 - DNA, 75 bp, synthetic construct
  source 1..75: mol_type = other DNA
acagtggacttacaccgacagccgcacgctgaccgacggcagctacgtttatcaggtgcgggtgctggatctggc

SEQ ID NO: 626069 - DNA, 75 bp, synthetic construct
  source 1..75: mol_type = other DNA
agctacgtttatcaggtgcgggtgctggatctggcggggaacaccggcccggtggtgtcgaaaacggtggtggtc

SEQ ID NO: 626070 - DNA, 75 bp, synthetic construct
  source 1..75: mol_type = other DNA
tagcgcaggcaacagcagcacgcagacgcacaacgtacaggtgaacacggcggcagtgtcgctctcggtcagcac

SEQ ID NO: 626071 - DNA, 75 bp, synthetic construct
  source 1..75: mol_type = other DNA
attattaacgctgccgaatctggtaacgcccagaccatcagcggccaggtcacgggtgcagcggcgggcagtacc

SEQ ID NO: 626072 - DNA, 75 bp, synthetic construct
  source 1..75: mol_type = other DNA
atcactaacgattttgtcaccagcgacacgacgcttgcggtgagcggcacgctgggggcgacgctttctgccggt

SEQ ID NO: 626073 - DNA, 75 bp, synthetic construct
  source 1..75: mol_type = other DNA
cagctcggggctggcagaaggcacgccgcttaccgttacgattaataatgtggaatacaccactgcggtgcaggc

SEQ ID NO: 626074 - DNA, 75 bp, synthetic construct
  source 1..75: mol_type = other DNA
caagctacggtatcctcaaaaatctggatgactttactgaccgccgggttgataacacccacttctttgccatgg

SEQ ID NO: 626075 - DNA, 75 bp, synthetic construct
  source 1..75: mol_type = other DNA
gttggcgatacaatagatgtttgtccgagttttgttgctttgaatggtagaaattaccatcagcatgtcgatttc

SEQ ID NO: 626076 - DNA, 75 bp, synthetic construct
  source 1..75: mol_type = other DNA
acccggcgagcaccacgcataatctggcggtggatctcaccgttccggtacttaccatcaacaccattgcgggcg

SEQ ID NO: 626077 - DNA, 75 bp, synthetic construct
  source 1..75: mol_type = other DNA
acgccaccgtagcaggcgatggcagttggacaaccagcgtacctgccgccgatctcgccgcattacgcgacggcg

SEQ ID NO: 626078 - DNA, 75 bp, synthetic construct
  source 1..75: mol_type = other DNA
accacccatacggtgaatgtcgaatcgctcctgcctggggtgatcattaataccgtggcgggcgatgacattatc

SEQ ID NO: 626079 - DNA, 75 bp, synthetic construct
  source 1..75: mol_type = other DNA
cggtagctggacggtgaatgtgccgccagccgatcttgctgcgctgccggatggcgcgggcaacgtgcaggcgag

SEQ ID NO: 626080 - DNA, 75 bp, synthetic construct
  source 1..75: mol_type = other DNA
agcaatcagccatcgggcaccacaattacggttacgctgaacgggcaaaattacactgcgacgacggacgccgca

SEQ ID NO: 626081 - DNA, 75 bp, synthetic construct
  source 1..75: mol_type = other DNA
accatcagcggcgataatattattaacgccgccgaagcgggcagtgcgctgaccctgagcggcaccggaacgaac

SEQ ID NO: 626082 - DNA, 75 bp, synthetic construct
  source 1..75: mol_type = other DNA
aatgtgctggtcaacagcgccttacctggcgttaccattaacgcagtggcaaccgatgacattattaatgccgcc

SEQ ID NO: 626083 - DNA, 75 bp, synthetic construct
  source 1..75: mol_type = other DNA
gaacacattcaggcgcagattatcagcggcaccgccacgggcgcggtggcgggcgaccgcctggtggtgaccatc

SEQ ID NO: 626084 - DNA, 75 bp, synthetic construct
  source 1..75: mol_type = other DNA
ccgttcccgccagcgcggtgagtagcctggcagacggcgcggcggaaatcaccgcgaccgtcactaatatcagcg

SEQ ID NO: 626085 - DNA, 75 bp, synthetic construct
  source 1..75: mol_type = other DNA
gcaccagtggttagcgttaacaccatcgctggcgacgatattcttaacaccgctgaacagattgtggcgcagatt

SEQ ID NO: 626086 - DNA, 75 bp, synthetic construct
  source 1..75: mol_type = other DNA
gtaacacggtgtccgtgacgattggcacgaccacttacaccaccgtgctggacgccaacggcaactggagcatcg

SEQ ID NO: 626087 - DNA, 75 bp, synthetic construct
  source 1..75: mol_type = other DNA
aagctggagcgtcagcgtcccgaccggggatttagctaaccttaccgccagctcgtataccgttaacgcctcggt

SEQ ID NO: 626088 - DNA, 75 bp, synthetic construct
  source 1..75: mol_type = other DNA
gcagttataccgtgaccgccacggtgagcgacaaagcgggtaacccggcaagcgcggatcatgcgctggcggtgg

SEQ ID NO: 626089 - DNA, 75 bp, synthetic construct
  source 1..75: mol_type = other DNA
gcgttgggtgaagctaactacacagtaaccgcgaacgtcaccgatagcgcgggcaacagtaattccgccagccat

SEQ ID NO: 626090 - DNA, 75 bp, synthetic construct
  source 1..75: mol_type = other DNA
cagcgcgggcaacagcaattccgccagccataacgtggaggtgaataccgcgctgccgggtgtcaccattaatcc

SEQ ID NO: 626091 - DNA, 75 bp, synthetic construct
  source 1..75: mol_type = other DNA
attattaacgccgccgaagcgggcagtgcgctgaccctgagcggcaccggaacgaactttgccgcaggtacagtg

SEQ ID NO: 626092 - DNA, 75 bp, synthetic construct
  source 1..75: mol_type = other DNA
caaaattgaagagctcggtagtgacagatttaaagaaacccaattgtatcgtgaatttcataagaaaaaaaatgg

SEQ ID NO: 626093 - DNA, 75 bp, synthetic construct
  source 1..75: mol_type = other DNA
tatcgacgaagtagccaggtaccgggactactctgctgccgatgaaaaaggcgagtacgcaaaaatctttgaaga

SEQ ID NO: 626094 - DNA, 75 bp, synthetic construct
  source 1..75: mol_type = other DNA
cttgataacggtatcataaacggaaatgtcatcaataatgctgatttgacacttggaacaggaaagtcgcttaca

SEQ ID NO: 626095 - DNA, 75 bp, synthetic construct
  source 1..75: mol_type = other DNA
atggaggtgttataatagggggtggagttgttaatgcgaatgtgtttgttgatcaaaatgcttatataagtgtta

SEQ ID NO: 626096 - DNA, 75 bp, synthetic construct
  source 1..75: mol_type = other DNA
cctcaaggagcggtacgaattggtgaggtaagcttctttaaagcaggaagtgcaacgcagtcagaagtaattggg

SEQ ID NO: 626097 - DNA, 75 bp, synthetic construct
  source 1..75: mol_type = other DNA
gcagagataacgagtgaaaacgtcaaatatgatgttgtaacgagttactcgaaattaatggaagtcataagcggt

SEQ ID NO: 626098 - DNA, 75 bp, synthetic construct
  source 1..75: mol_type = other DNA
agcgagacctagaaaagcagatgaagcttattttacgggtaagacaattacaacagctgatggacctgtagaagt

SEQ ID NO: 626099 - DNA, 75 bp, synthetic construct
  source 1..75: mol_type = other DNA
ggttagtgatggaggctctcaacatatcagaaacggtggcatcgcgtccggtactattgtaaatcagagtggtta

SEQ ID NO: 626100 - DNA, 75 bp, synthetic construct
  source 1..75: mol_type = other DNA
ggcaaactggatccataacactcatgaatttggtgttaaaatgagtggtgacagccagttgttgtcaggtagccg

SEQ ID NO: 626101 - DNA, 75 bp, synthetic construct
  source 1..75: mol_type = other DNA
tgggaaaaccactgctacaacagttaatagttcaggaacccagaacgtcgggacttcaggagaaacaataagcac

SEQ ID NO: 626102 - DNA, 75 bp, synthetic construct
  source 1..75: mol_type = other DNA
aatatatcaagtggcgttgttatcggagagtttgtttcttctggcgaagtccaggttgtctattcaagtgggcaa

SEQ ID NO: 626103 - DNA, 75 bp, synthetic construct
  source 1..75: mol_type = other DNA
taaccactatggcagcttctccgtttcacaaaatcatgcctcaaatgttgtattagagaacgggggtcttctggc

SEQ ID NO: 626104 - DNA, 75 bp, synthetic construct
  source 1..75: mol_type = other DNA
gatacaaccgtaaactctgctggtcgtttaagaatcgatgaggggggcgctcttgacggaacaaccacaatcaat

SEQ ID NO: 626105 - DNA, 75 bp, synthetic construct
  source 1..75: mol_type = other DNA
aaactataagattattaaagaacttgtagaggataaaatattcgtatttgattatgcgattcataaaaaatcaca

SEQ ID NO: 626106 - DNA, 75 bp, synthetic construct
  source 1..75: mol_type = other DNA
atcgaactggaaagtgcatcgtggcgatttagtggtagaaggtaatatagagagtaatcaaaaattgattgttct

SEQ ID NO: 626107 - DNA, 75 bp, synthetic construct
  source 1..75: mol_type = other DNA
aagaatatgaaggtactatcgcttatcaaacaaaattgaagtactttcacgataacaaattttggacatacaaag

SEQ ID NO: 626108 - DNA, 75 bp, synthetic construct
  source 1..75: mol_type = other DNA
gccttcatgtttctttataccatgcttcatggcgagccgcccgacaagcgttagcaaattgctttatgccaaaaa

SEQ ID NO: 626109 - DNA, 75 bp, synthetic construct
  source 1..75: mol_type = other DNA
tcgaaatgtaaaagagtttataaggttattatcagatcacgatcaatttgaaaaagatcaaatctcagaattaac

SEQ ID NO: 626110 - DNA, 75 bp, synthetic construct
  source 1..75: mol_type = other DNA
agtgtagggatatggattttagtggtcgaaatgtaaaagagtttataaggttattatcagatcacgatcaatttg

SEQ ID NO: 626111 - DNA, 75 bp, synthetic construct
  source 1..75: mol_type = other DNA
ttaaaagaagctaaggatgctcttgagaagagtcaggtaaaagactctgttgatactatggttgggttttatcaa

SEQ ID NO: 626112 - DNA, 75 bp, synthetic construct
  source 1..75: mol_type = other DNA
accgcgcatttgttagcaatggcggaggcagcagaggctgagaaaaatcgacaggattctcttgatgaagagcat

SEQ ID NO: 626113 - DNA, 75 bp, synthetic construct
  source 1..75: mol_type = other DNA
gttgatggaaaaccttgcgtcaaaattacctgcgggcattggttatgactggacgggtatgtcgtatcaggaacg

SEQ ID NO: 626114 - DNA, 75 bp, synthetic construct
  source 1..75: mol_type = other DNA
cgcaagagcggacgcaaaaagtgttggatcaagtgacggattactatctgaagaacgagaaagcgaacgttgaaa

SEQ ID NO: 626115 - DNA, 75 bp, synthetic construct
  source 1..75: mol_type = other DNA
ccgtggaattccgctttcgttttgcttttagatacatcctcgctaggggtgggtcgctatactggaaatatacct

SEQ ID NO: 626116 - DNA, 75 bp, synthetic construct
  source 1..75: mol_type = other DNA
atgctacaacctgttcagcttttcaaaatcctgtcggatgaaacacggctcgccatcgtcatgcttctccgggaa

SEQ ID NO: 626117 - DNA, 75 bp, synthetic construct
  source 1..75: mol_type = other DNA
taatgcagaagacaagaataatgtaaagtatacttttggttttataggaagagttactgaagaaaaaggtttaga

SEQ ID NO: 626118 - DNA, 75 bp, synthetic construct
  source 1..75: mol_type = other DNA
gataatatacctgtaacgagaatcccaccaagcggaactggaatgctcgttgaatacattttttgcttattattg

SEQ ID NO: 626119 - DNA, 75 bp, synthetic construct
  source 1..75: mol_type = other DNA
ttttaaaaattgtttatttatatcttcaatatttgataatgttcgttttcatagttgcagctttaactgttgtaa

SEQ ID NO: 626120 - DNA, 75 bp, synthetic construct
  source 1..75: mol_type = other DNA
gtgagtcttataatagacaatatggtcgtgattataggagcgttatgcctacaaatctttatgggcctaatgaca

SEQ ID NO: 626121 - DNA, 75 bp, synthetic construct
  source 1..75: mol_type = other DNA
tttttcattgctcatgaagacgataaaagctttttcatttggtggcgatctccaaacccttgcatcaaaaccgag

SEQ ID NO: 626122 - DNA, 75 bp, synthetic construct
  source 1..75: mol_type = other DNA
cctcttggtaaggtcagtaaaagtgcgttttcaggagtaggcagcctggcgtcaccacagcaatttagtattaaa

SEQ ID NO: 626123 - DNA, 75 bp, synthetic construct
  source 1..75: mol_type = other DNA
ttgtcggtggagattttgtatttcctgacagggtcggtgatgtgtcatcccgatgttgtaaacatcgctaaaaat

SEQ ID NO: 626124 - DNA, 75 bp, synthetic construct
  source 1..75: mol_type = other DNA
attttcgatacggatacgctgtttagccatcgtttacacgaccgtctgggtgagccgcagtatacagattcactg

SEQ ID NO: 626125 - DNA, 75 bp, synthetic construct
  source 1..75: mol_type = other DNA
cgcaaacggttattgggtcgggtggctcattaacgttacgtgatttacagggcgacgaggtggaagcggacaaaa

SEQ ID NO: 626126 - DNA, 75 bp, synthetic construct
  source 1..75: mol_type = other DNA
ttacacgctgaccaatgcgctcaaaggcgatggcttgatgcgagtgcagctgtcatcctccgacaagatgtttgg

SEQ ID NO: 626127 - DNA, 75 bp, synthetic construct
  source 1..75: mol_type = other DNA
ccggtgcatccgcacagggtgccgctcaggcacttgccgcgtcgggagtaggttcagcccgtcaatccgcctcct

SEQ ID NO: 626128 - DNA, 75 bp, synthetic construct
  source 1..75: mol_type = other DNA
catcctggcgggcgccacaaaagcatccgatgccaactacctgactctggccgttcaggtcttcctcggcacggc

SEQ ID NO: 626129 - DNA, 75 bp, synthetic construct
  source 1..75: mol_type = other DNA
tgaagcgggaacatttagcggcagcgaagggacgctgaatacctggtacgtccagccacaggtgcaaatcacctg

SEQ ID NO: 626130 - DNA, 75 bp, synthetic construct
  source 1..75: mol_type = other DNA
gacttagatgctgagtatttaatggagggcggtgtttatgctctatttagatatgcaggcaatccagatggttat

SEQ ID NO: 626131 - DNA, 75 bp, synthetic construct
  source 1..75: mol_type = other DNA
ctggcacacagccccgcagaccggatgtacatgctgggcgggatgagcgacaccgccagcaaccgcatcacgttt

SEQ ID NO: 626132 - DNA, 75 bp, synthetic construct
  source 1..75: mol_type = other DNA
taaattagttctggaaagtcaaaaaataacactaaataataacattgtggacgatgaccagggcatttttgtcat

SEQ ID NO: 626133 - DNA, 75 bp, synthetic construct
  source 1..75: mol_type = other DNA
gcagaaaaaatcagagccggaggataaaccccgtcgccgtgaggcggctgcaataccacagccggacgaaaacaa

SEQ ID NO: 626134 - DNA, 75 bp, synthetic construct
  source 1..75: mol_type = other DNA
aatgtatatgcagaagatttagagttatggtgtagattaaaaaatttgggagcatcattttctaatacgaaagac

SEQ ID NO: 626135 - DNA, 75 bp, synthetic construct
  source 1..75: mol_type = other DNA
atgcagatgcgcaaatggtgtttcaggtgtacgggaaatggatgtcagaaaataataatgcgcaggtaacgctgt

SEQ ID NO: 626136 - DNA, 75 bp, synthetic construct
  source 1..75: mol_type = other DNA
caccgccagcaaccgcatcacgtttgagcgcgacagccagtaccgcatcacgggtgtcagtcacaccgacgggat

SEQ ID NO: 626137 - DNA, 75 bp, synthetic construct
  source 1..75: mol_type = other DNA
gagggtcgggctgggttatgacgtcaaagtcggaaataacgttaccttcaccgttggtaaaacgaaaaaggatga

SEQ ID NO: 626138 - DNA, 75 bp, synthetic construct
  source 1..75: mol_type = other DNA
atttagctttactaatctgtgctaacataaaatatgtcaacataatgagcagaagagagataacgcgcagttttg

SEQ ID NO: 626139 - DNA, 75 bp, synthetic construct
  source 1..75: mol_type = other DNA
gatgctatttttgttgatcgcctaagattaatcaatttaaccagagcatctgataatattgatcacagtcaaaat

SEQ ID NO: 626140 - DNA, 75 bp, synthetic construct
  source 1..75: mol_type = other DNA
tgctattgttggcggagctcataatggggccgccgatgcaatgagacattgttacttgatgtgtcgaatgactaa

SEQ ID NO: 626141 - DNA, 75 bp, synthetic construct
  source 1..75: mol_type = other DNA
tcggtcccgcattaacctttgctttacgcgaggcgatatttgcactggcacaaattgagcaggaacttatcgccc

SEQ ID NO: 626142 - DNA, 75 bp, synthetic construct
  source 1..75: mol_type = other DNA
taaaactaatgcgtgaaagtgagcgcattacaagtcgcaatgaggctgctgagttaataggtattccgcataacg

SEQ ID NO: 626143 - DNA, 75 bp, synthetic construct
  source 1..75: mol_type = other DNA
gcgacgggcgcgcaggtcaccgtcacgctcaacggtcacaattacagtgctaccaccgacgcgtcgggcaactgg

SEQ ID NO: 626144 - DNA, 75 bp, synthetic construct
  source 1..75: mol_type = other DNA
caccctctcatcgttgataagtcagggcaatggcaccttcgtctggggacaaaacaccgtcaatactttcctcag

SEQ ID NO: 626145 - DNA, 75 bp, synthetic construct
  source 1..75: mol_type = other DNA
gataccacgccgattatcagcggcgtactcaccgcggcactcgccagcgggcagtatgttgaagtggtgatcaac

SEQ ID NO: 626146 - DNA, 75 bp, synthetic construct
  source 1..75: mol_type = other DNA
agaagcggcggcttctgggtttatcaaatgcattcagtcttatatcagtactggttggagacatggctatatagt

SEQ ID NO: 626147 - DNA, 75 bp, synthetic construct
  source 1..75: mol_type = other DNA
gtatgaggtgaaattaatggcggctgagctttactctatcgaacagaacttaaagtgttctgaatcgataagtac

SEQ ID NO: 626148 - DNA, 75 bp, synthetic construct
  source 1..75: mol_type = other DNA
taacgacagccgcacgctgaccgatggtaactatctctatcaggtgcgggtgattgacgcggcgggcaacgtcgg

SEQ ID NO: 626149 - DNA, 75 bp, synthetic construct
  source 1..75: mol_type = other DNA
ccggtatcagcgatgacaccggaaccagcagcagcgattttattaccagcgacaccacgcttaccgtgcgcggcg

SEQ ID NO: 626150 - DNA, 75 bp, synthetic construct
  source 1..75: mol_type = other DNA
gtgaccgttccggcgtcacgggtgagcgccctcggtgaagccacttacacggtgaccgccgccgctactgactct

SEQ ID NO: 626151 - DNA, 75 bp, synthetic construct
  source 1..75: mol_type = other DNA
gcggcactggcactaatttcgcgacaggtacagtggtgaccgtgttgcttaacggcaaaggctacagcgccacca

SEQ ID NO: 626152 - DNA, 75 bp, synthetic construct
  source 1..75: mol_type = other DNA
gaatggctttacggtagggacatgggaaggcaccgccgacaccgatcgcattgatattcgtgaactgttacaggg

SEQ ID NO: 626153 - DNA, 75 bp, synthetic construct
  source 1..75: mol_type = other DNA
cggcaataacgcccaggcggatcgcgcgtacagcgttgatgccaccgcgccgcttgtgaccatcaacatcatcgc

SEQ ID NO: 626154 - DNA, 75 bp, synthetic construct
  source 1..75: mol_type = other DNA
cgccagtcagtacaccgtcagcgcctcggtaagcgataaagctggcaacccggcgtccaccactcacgggctggc

SEQ ID NO: 626155 - DNA, 75 bp, synthetic construct
  source 1..75: mol_type = other DNA
gcttcagctgcgaaattgaattccattatcaaaacagaaaacaaaatctatggcttacgattaggaagtactcgt

SEQ ID NO: 626156 - DNA, 75 bp, synthetic construct
  source 1..75: mol_type = other DNA
tggccaagaccaacggggagaatcaaaaggagatggtctatgggggccaggtaaagcaagtaatgatacaaaaga

SEQ ID NO: 626157 - DNA, 75 bp, synthetic construct
  source 1..75: mol_type = other DNA
aaatgcattaagccactgcattcaatgggcggaactggtgaaagaagcggtccagatatatgggggaatccgttc

SEQ ID NO: 626158 - DNA, 75 bp, synthetic construct
  source 1..75: mol_type = other DNA
ggtgtccatgccacttcgaaaacttgccggctggctacaaaccattaatcccaacaaagtaaaacccgaaatccg

SEQ ID NO: 626159 - DNA, 75 bp, synthetic construct
  source 1..75: mol_type = other DNA
ctcatggggtaggtattcgcacaacgggggcggggtcattccctatttttctgaatggaggggtcgaggccgacg

SEQ ID NO: 626160 - DNA, 75 bp, synthetic construct
  source 1..75: mol_type = other DNA
agtcacgatctcaaccacacattgcgtcatgcgcatcgggcgtggttgctaaaaggtggaaaaatgctggccagt

SEQ ID NO: 626161 - DNA, 75 bp, synthetic construct
  source 1..75: mol_type = other DNA
gatagcaccgctgtcgcctccttattgattcaaaccccgctgtacaatgacattagcgacgtggaatggctggag

SEQ ID NO: 626162 - DNA, 75 bp, synthetic construct
  source 1..75: mol_type = other DNA
acgactttgtaggtcatgttgctgatattacagatgaaaattcatcatcctttgacccagaagtgcgcgttgtgg

SEQ ID NO: 626163 - DNA, 75 bp, synthetic construct
  source 1..75: mol_type = other DNA
tgtcgctgtcacggaaaccgcaagtgacctggtacggctgggacggcgaccgcctgaccacgatacagaacgaca

SEQ ID NO: 626164 - DNA, 75 bp, synthetic construct
  source 1..75: mol_type = other DNA
gccctgaaagatgcctgtggttttactaacccgatccaggcaactcacgaagaaattgtggcgatttatcgcgca

SEQ ID NO: 626165 - DNA, 75 bp, synthetic construct
  source 1..75: mol_type = other DNA
aggtgctgccgggcgagacggacattgcgctgcccggcccgctgccgtttattctttcccgcgcctacagcagct

SEQ ID NO: 626166 - DNA, 75 bp, synthetic construct
  source 1..75: mol_type = other DNA
agctcgcagccgttaagcgcgctctggcaggtgctgccggaagatgttcgcctgagtccgcatgcgtatctggca

SEQ ID NO: 626167 - DNA, 75 bp, synthetic construct
  source 1..75: mol_type = other DNA
gacgcgggaatacggctacagtgccacgggcaggctggagagcgtgcgcaccctcgcaccggacctggacatccg

SEQ ID NO: 626168 - DNA, 75 bp, synthetic construct
  source 1..75: mol_type = other DNA
tgtgggcgatgatgcccattcccgcacatggctgcagatgaatgcagcagtactcagggagcggaaggcggcggg

SEQ ID NO: 626169 - DNA, 75 bp, synthetic construct
  source 1..75: mol_type = other DNA
gttgtgctatcaccctcttttccgcagggagaggcggcaatgttaccggtcagtacgcctgaaatgtcacccgga

SEQ ID NO: 626170 - DNA, 75 bp, synthetic construct
  source 1..75: mol_type = other DNA
tgcgtgaactggcccccggcgtggcgatggcaccggcatccggttctgcgctggcccgccggttacagctgaagt

SEQ ID NO: 626171 - DNA, 75 bp, synthetic construct
  source 1..75: mol_type = other DNA
ctaccactacgacagccagcaccgtctggtgttctacacgcggatacagcacggtgagcccccggttgagagccg

SEQ ID NO: 626172 - DNA, 75 bp, synthetic construct
  source 1..75: mol_type = other DNA
ctaccactacgacagccagcaccgtctggtgttctacacgcggatacagcacggtgagcccctggtcgagagccg

SEQ ID NO: 626173 - DNA, 75 bp, synthetic construct
  source 1..75: mol_type = other DNA
ctaccactacgacagccagcaccgtctggtgttctacacgcggatacagcacggtgagccactggtagagagccg

SEQ ID NO: 626174 - DNA, 75 bp, synthetic construct
  source 1..75: mol_type = other DNA
tgacggagcaggtcaacccggaggggctggactatcgctttgagtacgggcaggaccgtgtgaccatcacggaca

SEQ ID NO: 626175 - DNA, 75 bp, synthetic construct
  source 1..75: mol_type = other DNA
ctaccactacgacagccagcaccgtctggtgttctacacgcggatacagcacggtgagccgcgggttgagagccg

SEQ ID NO: 626176 - DNA, 75 bp, synthetic construct
  source 1..75: mol_type = other DNA
ctaccactacgacagccagcaccgtctggtgttctacacgcggatacagcacggtgagccgctggtggagagccg

SEQ ID NO: 626177 - DNA, 75 bp, synthetic construct
  source 1..75: mol_type = other DNA
gtgaaacgatatgtaatgacggcagtgtggcccctgctgctgtgcgcggctcaggctggcgcggaactcagggtt

SEQ ID NO: 626178 - DNA, 75 bp, synthetic construct
  source 1..75: mol_type = other DNA
ctgatattaatgcctttgacgaagctattgaaggattctgtcgtgacataacaacttttacggacggatttaatt

SEQ ID NO: 626179 - DNA, 75 bp, synthetic construct
  source 1..75: mol_type = other DNA
caggtgatgttcaccatgacacggtaaccggactggtagacggtatagagcaattgaatggtctggataaacagg

SEQ ID NO: 626180 - DNA, 75 bp, synthetic construct
  source 1..75: mol_type = other DNA
cggtccaatgatgcgtttattcgtgcgtttttgcgcgaaataggtgatacggcgacggcaggtttgcttacagcc

SEQ ID NO: 626181 - DNA, 75 bp, synthetic construct
  source 1..75: mol_type = other DNA
tacagagcgaatactttagatagtgtcgagggtaaagaagatatattgttttatgatgaaaaccgaaaggtaaag

SEQ ID NO: 626182 - DNA, 75 bp, synthetic construct
  source 1..75: mol_type = other DNA
tgcagaatatcgttgggaatctttcctcactgcacaatgccatcaataaactgaccggtgctgcttttgttgctg

SEQ ID NO: 626183 - DNA, 75 bp, synthetic construct
  source 1..75: mol_type = other DNA
ccaaaaaaaccggaggtcagcagttataccatgacactctgaaagagcacctgttcacgttacccgacatagtcg

SEQ ID NO: 626184 - DNA, 75 bp, synthetic construct
  source 1..75: mol_type = other DNA
agacggtggagaacccggagacgggggaactgctgtggcagcatgagacgaaacacgcctacaacgaacaggggc

SEQ ID NO: 626185 - DNA, 75 bp, synthetic construct
  source 1..75: mol_type = other DNA
tttgtagatccaaaggaaaaagaaggtttaatgatacaacacagcaatgggcaactggttattactggtaaatat

SEQ ID NO: 626186 - DNA, 75 bp, synthetic construct
  source 1..75: mol_type = other DNA
gatatgaaaccggataacttatgttatggagatgttactgaaataattagccatcattgggagtatggctctcat

SEQ ID NO: 626187 - DNA, 75 bp, synthetic construct
  source 1..75: mol_type = other DNA
tccgctgcggcttcgggatgccggcgttcaacaacgacgaaatcgtcatcccggaatttattaaactcggtattg

SEQ ID NO: 626188 - DNA, 75 bp, synthetic construct
  source 1..75: mol_type = other DNA
gaggggggatggagtctgtatgcgtatccgctgaatccggtgaatggtattgatccattagggttaagtcccgca

SEQ ID NO: 626189 - DNA, 75 bp, synthetic construct
  source 1..75: mol_type = other DNA
tggacatccgcatcccgtatgccaccgacccggcgggaaaccggctgccggacccggagctgcacccggacagta

SEQ ID NO: 626190 - DNA, 75 bp, synthetic construct
  source 1..75: mol_type = other DNA
ctaccactacgacagccagcaccgtctggtgttctacacgcggatacagcacggtgagccacaggttgagagccg

SEQ ID NO: 626191 - DNA, 75 bp, synthetic construct
  source 1..75: mol_type = other DNA
gtaaacgcagcaccatcgaatatgataaacgcgggcgtgcggtgagtgtgacggaaggcggtcttacgcgcagca

SEQ ID NO: 626192 - DNA, 75 bp, synthetic construct
  source 1..75: mol_type = other DNA
tagcattgttcagggttcagccggggtacgtattggtgcccccaccggcgtggcctgttcggtgtgcccggcgga

SEQ ID NO: 626193 - DNA, 75 bp, synthetic construct
  source 1..75: mol_type = other DNA
gctgggacgatatattactcaggacccgattgggctggcggggggatggagtctgtatgcgtatccgctgaatcc

SEQ ID NO: 626194 - DNA, 75 bp, synthetic construct
  source 1..75: mol_type = other DNA
gggacagcagtatgatgaggagtcggggctgtactacaaccgcaaccggtactatgatccgttgcaggggagata

SEQ ID NO: 626195 - DNA, 75 bp, synthetic construct
  source 1..75: mol_type = other DNA
cgcggatacagcacggtgagccgcaggtggagagccgctacctctatgacccgctgggccgccggacgggaaaac

SEQ ID NO: 626196 - DNA, 75 bp, synthetic construct
  source 1..75: mol_type = other DNA
ccgctacgatgaatacggcaggctggcggagaagacggaccgcatcccggaaggggtgatacggatgcacgacga

SEQ ID NO: 626197 - DNA, 75 bp, synthetic construct
  source 1..75: mol_type = other DNA
gtattacaaccgtcaccggtactacgatccgttgcaggggcggtatatcacccaggatccgatagggttgaaggg

SEQ ID NO: 626198 - DNA, 75 bp, synthetic construct
  source 1..75: mol_type = other DNA
atcaggctgttgagtatttaaaacaagattcacaaatgaaagaaactatagattttttatcaagctctgaagaaa

SEQ ID NO: 626199 - DNA, 75 bp, synthetic construct
  source 1..75: mol_type = other DNA
agctgggcggaacgccactggtcgagtacacgcgggaccggctgcaccgggagacggtgcgcagcttcggcgggg

SEQ ID NO: 626200 - DNA, 75 bp, synthetic construct
  source 1..75: mol_type = other DNA
cggcacagatagagccggtttatttacctgagcgaaaaattcatctttatcactgtgaccaccgggggctgccgc

SEQ ID NO: 626201 - DNA, 75 bp, synthetic construct
  source 1..75: mol_type = other DNA
tggcacaacgaagatctatactacagatactagagcaagatggctacatggtgggggatcatcgttgcgcgatcc

SEQ ID NO: 626202 - DNA, 75 bp, synthetic construct
  source 1..75: mol_type = other DNA
cactggggttagaacgagttataagtgtatatgggcctcccgctccagaccgggcaggtgctgaaactcctcttg

SEQ ID NO: 626203 - DNA, 75 bp, synthetic construct
  source 1..75: mol_type = other DNA
gattttttatcaagctctgaagaaactataaatatagagtatattgaaggaaccaatgttagatttaattcgaat

SEQ ID NO: 626204 - DNA, 75 bp, synthetic construct
  source 1..75: mol_type = other DNA
ggtgaaaccgcagagcggtggcggtacgacgaacgcggctggctgacagacatcagccatatcagcgaagggcac

SEQ ID NO: 626205 - DNA, 75 bp, synthetic construct
  source 1..75: mol_type = other DNA
tatttgactctctaatattgaataatccgggactagcattagatataacaatgatagcttctcgtggaaatgttg

SEQ ID NO: 626206 - DNA, 75 bp, synthetic construct
  source 1..75: mol_type = other DNA
agaagtttttcctagaccattccccttgccaattccatggcccaaaagccctgcacagcagcaagcagatgataa

SEQ ID NO: 626207 - DNA, 75 bp, synthetic construct
  source 1..75: mol_type = other DNA
attaacctgccaaacagcatacgatagtgactgcggagaaatacatgagcggtgtatgatgttatgtaaaactgc

SEQ ID NO: 626208 - DNA, 75 bp, synthetic construct
  source 1..75: mol_type = other DNA
tgggtgtcagagaacttcaacaggtgtgtgaaagcacccaggccaaatggcagagtcaaggtgagcaaatattaa

SEQ ID NO: 626209 - DNA, 75 bp, synthetic construct
  source 1..75: mol_type = other DNA
acagagtacagcccggatgtggtgacgggcctcatcacgcgcataaccacgccggatggcagggcatcggcgttt

SEQ ID NO: 626210 - DNA, 75 bp, synthetic construct
  source 1..75: mol_type = other DNA
ggtacgtgacctgacggggtggatgtcgctgtcgcgtaaaccggaggtaacgtggtacggctgggacggtgacag

SEQ ID NO: 626211 - DNA, 75 bp, synthetic construct
  source 1..75: mol_type = other DNA
agcagtgaaagccgccagtggctggcacagtgcgggctgacggtggagcggctggcggcacagatagagccggtt

SEQ ID NO: 626212 - DNA, 75 bp, synthetic construct
  source 1..75: mol_type = other DNA
tgtgaaaatcgcccgtaacgttcgctccctcatcctctggacagaacgcggcgcagcccgtcacgcaaaaatgct

SEQ ID NO: 626213 - DNA, 75 bp, synthetic construct
  source 1..75: mol_type = other DNA
tagtgatggaaagctcgaagaaaattcaccattgagtattgatgctggtttctttagtaagcaaatgtcaaaagg

SEQ ID NO: 626214 - DNA, 75 bp, synthetic construct
  source 1..75: mol_type = other DNA
cgacacaccgctggtggagtacacccgcgaccgcctgcaccgggaaacgctgcgcagcttcggtcgttatgaact

SEQ ID NO: 626215 - DNA, 75 bp, synthetic construct
  source 1..75: mol_type = other DNA
tcccctgccccagccgtaccgtctgccagggcagcaacacgatgaggagtcagggctgtattataaccggaaccg

SEQ ID NO: 626216 - DNA, 75 bp, synthetic construct
  source 1..75: mol_type = other DNA
ctggggcgctatattcgcgaaaggaagctgctgctggccgcccgcgatctgcgtgacaccgatcagcgggtctac

SEQ ID NO: 626217 - DNA, 75 bp, synthetic construct
  source 1..75: mol_type = other DNA
tcgccattaacctttggctatgacgtactggatctccaggaaaacaatattggagtcgttggccagggtagtcgc

SEQ ID NO: 626218 - DNA, 75 bp, synthetic construct
  source 1..75: mol_type = other DNA
acgtcgcctgaatcagtttcgtacctttgcgcggggctttgacaatgtgcgtcagggcgatgaaatagatgtgcc

SEQ ID NO: 626219 - DNA, 75 bp, synthetic construct
  source 1..75: mol_type = other DNA
aaaaagattgatttgttatttgtctttttgcttatcatatctatagcattgtcattttctagaactgaatatatt

SEQ ID NO: 626220 - DNA, 75 bp, synthetic construct
  source 1..75: mol_type = other DNA
attttaactcaatatcaagttttggtttagaacttagatatcaattagatttaaacaaccccagttcaactattg

SEQ ID NO: 626221 - DNA, 75 bp, synthetic construct
  source 1..75: mol_type = other DNA
cgcaaatggatccagagcggcaaaacgtttgatgcgaaactgctgacagatgaggacatcgcgcttaaatcactg

SEQ ID NO: 626222 - DNA, 75 bp, synthetic construct
  source 1..75: mol_type = other DNA
atgaaagaaaaaacgatcattattgtcggtggcgggcaagcggcggcaatggctgcggcctcgctacgccagcaa

SEQ ID NO: 626223 - DNA, 75 bp, synthetic construct
  source 1..75: mol_type = other DNA
gtggttctggagcgatcagtacagtgataacttacagtttattggcgatatgcgtggcgatgactggctttgtcg

SEQ ID NO: 626224 - DNA, 75 bp, synthetic construct
  source 1..75: mol_type = other DNA
taactctgggaaatggttggaatacaccgctgggagcaatctcttttgacgctacccgatcgagtagtaagttaa

SEQ ID NO: 626225 - DNA, 75 bp, synthetic construct
  source 1..75: mol_type = other DNA
atgttttctaaagggaaaacaaaggaaagtgagtcgaccacaacaattatctcaaaaaatacttcgtttgttggc

SEQ ID NO: 626226 - DNA, 75 bp, synthetic construct
  source 1..75: mol_type = other DNA
gggtgaatagcgccggttcgagtgcaagctcaagctggctggaattgagaatgtactcacctgaaagtgcagcat

SEQ ID NO: 626227 - DNA, 75 bp, synthetic construct
  source 1..75: mol_type = other DNA
gtcaggaatgcggatcctatccagggcaataattgggtttacaatggcaatggtatatatcaaagacagtatatg

SEQ ID NO: 626228 - DNA, 75 bp, synthetic construct
  source 1..75: mol_type = other DNA
acattagtctgggccgcaattgcgaagaataaacttccggcgtggttgggcgtggtgttttgcctgaatggtatc

SEQ ID NO: 626229 - DNA, 75 bp, synthetic construct
  source 1..75: mol_type = other DNA
atgtttatcggtcatcttccggctggttatttaataacttgtactttaatgaaacgcttgccactgattgctcgt

SEQ ID NO: 626230 - DNA, 75 bp, synthetic construct
  source 1..75: mol_type = other DNA
tttgcttctctggcggtcgagcgggaaggcgcatcgaacatgcctgagtatgaagccgtactatcacgtcttgct

SEQ ID NO: 626231 - DNA, 75 bp, synthetic construct
  source 1..75: mol_type = other DNA
ccagggatgctggacaacgcgctcttgtttctctttaagtggggaattgtggcttctggactggcgttttctgtc

SEQ ID NO: 626232 - DNA, 75 bp, synthetic construct
  source 1..75: mol_type = other DNA
catgaaactcttaatgaagagaaacaggcggtggtggaagcagagaagcgtttagatgaggcgaaagctgaactg

SEQ ID NO: 626233 - DNA, 75 bp, synthetic construct
  source 1..75: mol_type = other DNA
ttgcattctggccccatggtggatgcatcttgcagctttaacaaggactttagttacaagattaccaaatttcag

SEQ ID NO: 626234 - DNA, 75 bp, synthetic construct
  source 1..75: mol_type = other DNA
cgggaagctgggttgaatcaggtggcgtgtataccacaacccgaatggcgacgattgccggtaatgatcagcacg

SEQ ID NO: 626235 - DNA, 75 bp, synthetic construct
  source 1..75: mol_type = other DNA
aaaagacaaagagggatgcagacattgtcttgctgaaattatgcaacaaaatattgctattttataccagcaata

SEQ ID NO: 626236 - DNA, 75 bp, synthetic construct
  source 1..75: mol_type = other DNA
gagcgatgccaattattcaaatagctacatgattaaaccaggtgaagtaagtatgcttcgttcacagcttcgtat

SEQ ID NO: 626237 - DNA, 75 bp, synthetic construct
  source 1..75: mol_type = other DNA
aagagaaaacattgaaattcacctcgaatattttgtttttactggtgtgcgacctgataaatagccacacactcc

SEQ ID NO: 626238 - DNA, 75 bp, synthetic construct
  source 1..75: mol_type = other DNA
tatgcaatgcgtgcaaattatattaaacgtgcaaatgccgaactagcaaaaatgaagaatgcaacgccggataat

SEQ ID NO: 626239 - DNA, 75 bp, synthetic construct
  source 1..75: mol_type = other DNA
gcagatggttttcccaaaacagggtttgatggtgctaaatttacactgatattaacccacaatatgaaaaacacg

SEQ ID NO: 626240 - DNA, 75 bp, synthetic construct
  source 1..75: mol_type = other DNA
gttgtacaactacatagtgtaacaatcaatggtacgattcatcagggaagtggtgtttcatattttattttgcct

SEQ ID NO: 626241 - DNA, 75 bp, synthetic construct
  source 1..75: mol_type = other DNA
agcatccaatataaatggatatgtagatgatgagaaagctatagctatagccgacgtgctaaaaaaagcatctta

SEQ ID NO: 626242 - DNA, 75 bp, synthetic construct
  source 1..75: mol_type = other DNA
ctaacctgttgcgtagatttatgcagcggactgcctttctcccagtgtgctttacacatctgacgctgccgacga

SEQ ID NO: 626243 - DNA, 75 bp, synthetic construct
  source 1..75: mol_type = other DNA
ctgctacagagaagaacaaaaagcagactcggcgtttcaggacgcaacgagctttcgtgatgatgtgaacaaaat

SEQ ID NO: 626244 - DNA, 75 bp, synthetic construct
  source 1..75: mol_type = other DNA
cacctggtggaggaagtccgcaaggacgaatacggctttgccgaaggcgcggcggtgctgggccagaatcacaag

SEQ ID NO: 626245 - DNA, 75 bp, synthetic construct
  source 1..75: mol_type = other DNA
ctggatgaccatcaccgcgcagcagcttatcaaagcgccatcggtggaggtctgccgcgaactggctgttgccgc

SEQ ID NO: 626246 - DNA, 75 bp, synthetic construct
  source 1..75: mol_type = other DNA
tatcgaagtgtcaccgaatgttggtgcgcttgtagctgcttccgtttccgtcgcagtcctgcttcgagttgttgc

SEQ ID NO: 626247 - DNA, 75 bp, synthetic construct
  source 1..75: mol_type = other DNA
gtgcgtacctttctttacaggacttggctaacacctacgatgtatcaatcacttctgtaagcactgccgagcatg

SEQ ID NO: 626248 - DNA, 75 bp, synthetic construct
  source 1..75: mol_type = other DNA
atctgacttatcaatgataaaaaggcaaggcgatatttttccaagagaaactcatcaaatgattatctacaaacc

SEQ ID NO: 626249 - DNA, 75 bp, synthetic construct
  source 1..75: mol_type = other DNA
aaattgaaaataatcatgtaaaaaaacgctctagtaattcgagggaaaaagatcgatggtcaacgcaactactcg

SEQ ID NO: 626250 - DNA, 75 bp, synthetic construct
  source 1..75: mol_type = other DNA
ttcttatcgcgcaccaacggccaatagtacggtatgcccgactgtgcctgtagatacatttgatgtttcctggag

SEQ ID NO: 626251 - DNA, 75 bp, synthetic construct
  source 1..75: mol_type = other DNA
gaaattctgcgtaaagtctcgcaggcgttttacgacaacgtccgtagtagtgattatgttttccgctacggtggt

SEQ ID NO: 626252 - DNA, 75 bp, synthetic construct
  source 1..75: mol_type = other DNA
gcttaccgttaagccaggctgattttggcttatggtttaaccataaaggtcggcattattttagcggtattgccg

SEQ ID NO: 626253 - DNA, 75 bp, synthetic construct
  source 1..75: mol_type = other DNA
agacgtagcacatctatctctcacgttacagttgatgggaacaacatcgccaactatgcttgccgaattcaatat

SEQ ID NO: 626254 - DNA, 75 bp, synthetic construct
  source 1..75: mol_type = other DNA
ccgcagcagattccggacgacgcctttgcgtggcgggagatcgtcgacaagctgtataccgtgatcgaaaacgtg

SEQ ID NO: 626255 - DNA, 75 bp, synthetic construct
  source 1..75: mol_type = other DNA
gtatcaattgcatcatactatctttttgaaatacattttcttaaattaaaaagaaaaaccaatagaaatgaagac

SEQ ID NO: 626256 - DNA, 75 bp, synthetic construct
  source 1..75: mol_type = other DNA
attacttttcctttaattccgtttcatggagcatctcatgtgagatgtttttctacgttgcattttgcttattaa

SEQ ID NO: 626257 - DNA, 75 bp, synthetic construct
  source 1..75: mol_type = other DNA
ccccgagaaagcacgcttatcttcgacgggcaccagagcagcacctcataccggattgataactccgatgccaga

SEQ ID NO: 626258 - DNA, 75 bp, synthetic construct
  source 1..75: mol_type = other DNA
agaagattgaaaaatggaaaggggtcatttggcaaaacgtctctcccgagctgatcattgatttcttaacggaat

SEQ ID NO: 626259 - DNA, 75 bp, synthetic construct
  source 1..75: mol_type = other DNA
tggggcgttggtttggttatcgccagggatatctggatgtatgccggctttataccaccgatgagctgattgaat

SEQ ID NO: 626260 - DNA, 75 bp, synthetic construct
  source 1..75: mol_type = other DNA
gttcggaaaaaaacggcgggcttatgttctgaataatggcgggctgaggatgagttacgtctttgagtccgcgct

SEQ ID NO: 626261 - DNA, 75 bp, synthetic construct
  source 1..75: mol_type = other DNA
gacctttgagtctggtactgatgcggatatcgcgcaggttcaggtgcagaacaaactgcagctggcgatgccgtt

SEQ ID NO: 626262 - DNA, 75 bp, synthetic construct
  source 1..75: mol_type = other DNA
gggttggcactctgtgccttcccttcattggtaacggctggctaatgccatggggtgaagtggtctgcaatccat

SEQ ID NO: 626263 - DNA, 75 bp, synthetic construct
  source 1..75: mol_type = other DNA
tactagtgcaagacctaacaatactgtttgcagtatcattgaaattgcagcaatattgtcattgcttttgacagt

SEQ ID NO: 626264 - DNA, 75 bp, synthetic construct
  source 1..75: mol_type = other DNA
atatgtcagcattctggcaattgggcaagttatttaatctcaaacgtaagccgtggattatgccggatgaagtcg

SEQ ID NO: 626265 - DNA, 75 bp, synthetic construct
  source 1..75: mol_type = other DNA
ggtccggttggcggcaattattacgcgggtacgtcatctatctccgctaacgtaccgtttggcgcgcagacgatg

SEQ ID NO: 626266 - DNA, 75 bp, synthetic construct
  source 1..75: mol_type = other DNA
tgtggggctttgatgttaaggagcaggcatatgaaaattatcaggccgggcaggattcagtattaacgggcattg

SEQ ID NO: 626267 - DNA, 75 bp, synthetic construct
  source 1..75: mol_type = other DNA
gccgagagattatagaagctaaacgtaatagtgtacctttagttgttgccaactgtattagcgaattggatgaaa

SEQ ID NO: 626268 - DNA, 75 bp, synthetic construct
  source 1..75: mol_type = other DNA
ttcattctttgatgtccatgatatccctgccgggcttcggtttcatcaggtgctattgaaacagctggcgcaaag

SEQ ID NO: 626269 - DNA, 75 bp, synthetic construct
  source 1..75: mol_type = other DNA
tacttcactatggagttattggggctataccgttgtgtataatgatgagaggattttcttctactttggctttta

SEQ ID NO: 626270 - DNA, 75 bp, synthetic construct
  source 1..75: mol_type = other DNA
atgggaaacgctttatcaccagattattacatcattagtcgccgtacgagaccgcgccagcattgcttggccaaa

SEQ ID NO: 626271 - DNA, 75 bp, synthetic construct
  source 1..75: mol_type = other DNA
attttgactggtgtaactttcgtaccgtttcaagcctcgctgcaaaggctaataacgggactaactcaacagcag

SEQ ID NO: 626272 - DNA, 75 bp, synthetic construct
  source 1..75: mol_type = other DNA
aacaccttttccgcgttccttgaccgcctttccgataccgtctctgcacgcaatacctccggattccgtgaacag

SEQ ID NO: 626273 - DNA, 75 bp, synthetic construct
  source 1..75: mol_type = other DNA
atctgcttcggagctttaccataacctgattaactcaggcaaacagtatgatggcaagcccttatttaagacaac

SEQ ID NO: 626274 - DNA, 75 bp, synthetic construct
  source 1..75: mol_type = other DNA
tgccgataaagccaaaacccttctgttttcagtcctgctgttaccggccacggcaatggccacaaccggaaatgc

SEQ ID NO: 626275 - DNA, 75 bp, synthetic construct
  source 1..75: mol_type = other DNA
cttgatcctcaacatcgcacctcaattgtggctgtaggacttgatgagcaaggagaaagaaactttacctttatg

SEQ ID NO: 626276 - DNA, 75 bp, synthetic construct
  source 1..75: mol_type = other DNA
caacgagtacaacgttggcgacattgctgtatatgaggactcaatgaggtgtactggcaatagcggacactacca

SEQ ID NO: 626277 - DNA, 75 bp, synthetic construct
  source 1..75: mol_type = other DNA
agctacgctggatttctcccggtccctattcgctttccgatgcaatcgccaaacggcgtgattttttgacgacgc

SEQ ID NO: 626278 - DNA, 75 bp, synthetic construct
  source 1..75: mol_type = other DNA
actcgggtttcagctctttcagcgagtgcgtggcaagcttcttccaaccagcgaagcgatcacactttttgaaaa

SEQ ID NO: 626279 - DNA, 75 bp, synthetic construct
  source 1..75: mol_type = other DNA
gagttaacaggcgacaacaagctgatagccaaactttgtctgtccaccggtgcacgatggagtgaaggtgcaaaa

SEQ ID NO: 626280 - DNA, 75 bp, synthetic construct
  source 1..75: mol_type = other DNA
gcacgcgagcaaacgtatttcgtcgacaagacggccgatcatagagaaaaccgcctgtggatgatggccaacatg

SEQ ID NO: 626281 - DNA, 75 bp, synthetic construct
  source 1..75: mol_type = other DNA
gcacgcgagcaaacgtatttcgtcgacaagacggcagatcatagagaaaaccgactgtggatgatggccaacatg

SEQ ID NO: 626282 - DNA, 75 bp, synthetic construct
  source 1..75: mol_type = other DNA
gcacgcgagcaaacgtatttcgtcgacaacacggccgatcatagagaaaaccggctgtggatgatggccaacatg

SEQ ID NO: 626283 - DNA, 75 bp, synthetic construct
  source 1..75: mol_type = other DNA
ggcaggagcacggctttaccgtcttgctggtgacgcatgatgtgagcgaagcggtggcgatggctgaccgggtgt

SEQ ID NO: 626284 - DNA, 75 bp, synthetic construct
  source 1..75: mol_type = other DNA
tcacagatgccgacactgaaatgggcctgtctgaaactggcgaaactggggcgatggcatgacagcaaacgcaca

SEQ ID NO: 626285 - DNA, 75 bp, synthetic construct
  source 1..75: mol_type = other DNA
gcacgcgagcaaacgtatttcgtcgacaagacggcggatcatagagaaaaccggctgtggatgatggccaacatg

SEQ ID NO: 626286 - DNA, 75 bp, synthetic construct
  source 1..75: mol_type = other DNA
atgcttgaactgcccgagttcgtccctggattagctacacttaactgtacaagtattgatatggggaggtcgata

SEQ ID NO: 626287 - DNA, 75 bp, synthetic construct
  source 1..75: mol_type = other DNA
attggtaacccgcgcggactgtttaaaggtggacgccgcgcctttgatgatttatcgcgcctgttcagccgtctt

SEQ ID NO: 626288 - DNA, 75 bp, synthetic construct
  source 1..75: mol_type = other DNA
aattagaaatcaatacgccatctactgtaagtagctatactgctgaaaaaaatagtaattcatcagtaactgagg

SEQ ID NO: 626289 - DNA, 75 bp, synthetic construct
  source 1..75: mol_type = other DNA
gcacgcgagcaaacgtatttcgtcgacaatacggcagatcatagagaaaaccgtctgtggatgatggccaacatg

SEQ ID NO: 626290 - DNA, 75 bp, synthetic construct
  source 1..75: mol_type = other DNA
gcacgcgagcaaacgtatttcgtcgacaaaacggcagatcatagagaaaaccggctgtggatgatggccaacatg

SEQ ID NO: 626291 - DNA, 75 bp, synthetic construct
  source 1..75: mol_type = other DNA
gtggttgtcatacagcactgacagtcatcgccaaaacatggacggcttccacatggtttattgaaggggatatta

SEQ ID NO: 626292 - DNA, 75 bp, synthetic construct
  source 1..75: mol_type = other DNA
ctgggcgacgggctgaacaatacgctgacctggctgtgggataactggtacggcaaatctcgccgcgtaatgcag

SEQ ID NO: 626293 - DNA, 75 bp, synthetic construct
  source 1..75: mol_type = other DNA
ccgtaacgctgaacgggcaaaattacaccaccacgaccgacgcctccggcaactggagcgtcaccgttccggcat

SEQ ID NO: 626294 - DNA, 75 bp, synthetic construct
  source 1..75: mol_type = other DNA
tggcgctataacgacagccgcacgctgaccgatggcaactatctctatcaggtgcgggtgattgacgcggcgggc

SEQ ID NO: 626295 - DNA, 75 bp, synthetic construct
  source 1..75: mol_type = other DNA
caacacctttgcgggcgacgatgtggtgaatgcagcggaacacggctcgtcgctggtgatcagcggcaccaccac

SEQ ID NO: 626296 - DNA, 75 bp, synthetic construct
  source 1..75: mol_type = other DNA
gtgaccgttccggcgtctgcggtgggttcgcttggtgaagcgacttatacggtgaccgccaccgcaaccgatgtt

SEQ ID NO: 626297 - DNA, 75 bp, synthetic construct
  source 1..75: mol_type = other DNA
atcgccgtcgatgacatcatcaacgccacggagaaaggtgcggatctggcgatttccggcagcagcaaccagcct

SEQ ID NO: 626298 - DNA, 75 bp, synthetic construct
  source 1..75: mol_type = other DNA
cctgcctggggtaatcattaataccgtggcgggcgatgacattatcaacgctgctgaaatcgccgttaatcagac

SEQ ID NO: 626299 - DNA, 75 bp, synthetic construct
  source 1..75: mol_type = other DNA
gccaggggtgattattaataccgtggcgggggatgacattatcaacgccgctgaaatcgccgttaaccagaccat

SEQ ID NO: 626300 - DNA, 75 bp, synthetic construct
  source 1..75: mol_type = other DNA
accgccagcaatatcgaccagacggtcaacaccagctggggcggcttacaggccaccgatgccactcacgcttac

SEQ ID NO: 626301 - DNA, 75 bp, synthetic construct
  source 1..75: mol_type = other DNA
ccagccataacgtgctggtcaacagcgcgttacctgccgtcaccattaacgcggtggcggccgatgacattatta

SEQ ID NO: 626302 - DNA, 75 bp, synthetic construct
  source 1..75: mol_type = other DNA
gccagcgtgatttccggccttgcggacggcacggtgaccatcagcgccaccatcaccgatagcgcaggcaacagc

SEQ ID NO: 626303 - DNA, 75 bp, synthetic construct
  source 1..75: mol_type = other DNA
caccgtgacggtgactatcggcacaaataccttcaccaccgtgctggatgccagcggtaactggagcgtcggcgt

SEQ ID NO: 626304 - DNA, 75 bp, synthetic construct
  source 1..75: mol_type = other DNA
tggcggatggctcatggagcgtcggcgttccggcggcagatgtcagcgcctggcctgcggggacggtcacgatta

SEQ ID NO: 626305 - DNA, 75 bp, synthetic construct
  source 1..75: mol_type = other DNA
ttggcggcaaaacctacagcgccacggtggctgcgaatggttcgtggagtaccacggttccggcggcggatatgg

SEQ ID NO: 626306 - DNA, 75 bp, synthetic construct
  source 1..75: mol_type = other DNA
agattagcgccagcgccaccgacagcgcgggcaacagcggcagcaccacccatacggtgaatgtcgaatcgctcc

SEQ ID NO: 626307 - DNA, 75 bp, synthetic construct
  source 1..75: mol_type = other DNA
tgccacgccgccggtggtgaccattaatccggtggcgaccgataacgtcattaacacgccggaacatacccaggc

SEQ ID NO: 626308 - DNA, 75 bp, synthetic construct
  source 1..75: mol_type = other DNA
tcgacatttaccaatatcgaagggatatccggctcgaattttaacgacactctgaccggcagcagcggcgataac

SEQ ID NO: 626309 - DNA, 75 bp, synthetic construct
  source 1..75: mol_type = other DNA
ccagcttccgctgcccgccctggtccgtgtggtcatgcaaaggcaaaccccggtcaggcagtggtgccgcagagc

SEQ ID NO: 626310 - DNA, 75 bp, synthetic construct
  source 1..75: mol_type = other DNA
gatatctgcaggtagctgctgagattgaagcgctggccagtggtgcggacaaggatgcagttgtgcgggaggctc

SEQ ID NO: 626311 - DNA, 75 bp, synthetic construct
  source 1..75: mol_type = other DNA
gatacggttaccgtcacgctgggcggcaacacttacaccaccacggtacagagcaacttaagctggagcgtcacc

SEQ ID NO: 626312 - DNA, 75 bp, synthetic construct
  source 1..75: mol_type = other DNA
tgaacacggcggcagtgtcgctctcggtcagcaccatcagcggcgataaccttattaacgccgccgaagcgggca

SEQ ID NO: 626313 - DNA, 75 bp, synthetic construct
  source 1..75: mol_type = other DNA
tccgctaaccatcagcggcagcagcaccgccgaagcggggcagacggtgaccgtcacccttaatggtgtgactta

SEQ ID NO: 626314 - DNA, 75 bp, synthetic construct
  source 1..75: mol_type = other DNA
cgacgcagcaggcaactggacgttaaccgtaccggcgagcgatctggcagccttaggtcaggccaactataccgt

SEQ ID NO: 626315 - DNA, 75 bp, synthetic construct
  source 1..75: mol_type = other DNA
accgcgagcaacaatggcaagttcgtcggcaccggctataacgacaccttctttgccaccgcaggcaccgacact

SEQ ID NO: 626316 - DNA, 75 bp, synthetic construct
  source 1..75: mol_type = other DNA
cggcgatatggatctcttcctgcctgccagccagggaagagctaactacggctcgctgttattcaacaccaacgg

SEQ ID NO: 626317 - DNA, 75 bp, synthetic construct
  source 1..75: mol_type = other DNA
cgctaacttaagcagcaccgccgcgcaggccaccggttttaacacctcgacatttaccaatatcgaaggcatttc

SEQ ID NO: 626318 - DNA, 75 bp, synthetic construct
  source 1..75: mol_type = other DNA
ctccttaaaatctcccgccgttccaccaaccgtggtacaaatccaggccaataccaaccttgccatcgcagacgg

SEQ ID NO: 626319 - DNA, 75 bp, synthetic construct
  source 1..75: mol_type = other DNA
gcggtgttttagcaataatcattaacttgcttaccggttctgatggtttaaataagattgttatttccgaattga

SEQ ID NO: 626320 - DNA, 75 bp, synthetic construct
  source 1..75: mol_type = other DNA
ctgggtgaaggcagaagacagcccgctgggcggtttacggctggtgatttggttgccgctgtataagcggagtta

SEQ ID NO: 626321 - DNA, 75 bp, synthetic construct
  source 1..75: mol_type = other DNA
accgttatgtgatgaatacccgcaaggttcacactgatgacacaccggtaaaggtactggcaccgggtcagaaaa

SEQ ID NO: 626322 - DNA, 75 bp, synthetic construct
  source 1..75: mol_type = other DNA
ctgataagaaagcggcagcagagaaagctgcagccgacaaaaaagcagcagaaaaagcggctgctgaaaaggctg

SEQ ID NO: 626323 - DNA, 75 bp, synthetic construct
  source 1..75: mol_type = other DNA
cttcttgcgggatttccatgccagccattcagcatcgccggtgtcagtaaaaagaactctatgggtcgcaaacac

SEQ ID NO: 626324 - DNA, 75 bp, synthetic construct
  source 1..75: mol_type = other DNA
gggaaagctgagaagcgccgccttgattatgcccgtagacgttatctgactatccgatctgaagcattcaagatc

SEQ ID NO: 626325 - DNA, 75 bp, synthetic construct
  source 1..75: mol_type = other DNA
tttattccataacgcctgggaaaccctgaaagataatttccgtgatggtggtaaaggtctgaacattacgccgga

SEQ ID NO: 626326 - DNA, 75 bp, synthetic construct
  source 1..75: mol_type = other DNA
cttctaccgtcaacagggttacatttgaagtttcaaaggaatcctacaaccgcgccaagaaaaagatcgaggatg

SEQ ID NO: 626327 - DNA, 75 bp, synthetic construct
  source 1..75: mol_type = other DNA
ttcacgccgtctgaattgtggctgctgactgacctgaccgaagactcaaccctcattgatggttttttagcgcag

SEQ ID NO: 626328 - DNA, 75 bp, synthetic construct
  source 1..75: mol_type = other DNA
atctcagtactcaactgaataatctgcaggacacggcaacgtctgccttaagcgatatcagtaaaacggtgggag

SEQ ID NO: 626329 - DNA, 75 bp, synthetic construct
  source 1..75: mol_type = other DNA
aagccagcgcctgcgtgctgattaaacacgaaaaaggtctgccctggctggatattgcaaaattaatcaatggaa

SEQ ID NO: 626330 - DNA, 75 bp, synthetic construct
  source 1..75: mol_type = other DNA
aggtcagccagctaaagaaagaatcatggatcttaaaaataacactgtcggtattgcttgtggcgatttttctgc

SEQ ID NO: 626331 - DNA, 75 bp, synthetic construct
  source 1..75: mol_type = other DNA
cgcgaacaattttacattaattcctgacctttcaaaaattaatgataccgtatctattcgcgggaatcagcagac

SEQ ID NO: 626332 - DNA, 75 bp, synthetic construct
  source 1..75: mol_type = other DNA
ttctattttccgaatgtgctaaagtatgatccagatcagtttaagggcaatctcctgagcgaagatcactcactt

SEQ ID NO: 626333 - DNA, 75 bp, synthetic construct
  source 1..75: mol_type = other DNA
cttgtggaagagataaagacaaaaatggccgcaggctgttacccctgcggccggtttcgggcgcatattgccatc

SEQ ID NO: 626334 - DNA, 75 bp, synthetic construct
  source 1..75: mol_type = other DNA
atccaaaaaatccatagcatcatccaaaaagaaggcgcgaaagtcaaaattgagcttcaggtccctgatgagaat

SEQ ID NO: 626335 - DNA, 75 bp, synthetic construct
  source 1..75: mol_type = other DNA
gacagataattgacgacctatcaaatatagcacagcaagcaaaagtcagaaacaaacttggacatactgatttat

SEQ ID NO: 626336 - DNA, 75 bp, synthetic construct
  source 1..75: mol_type = other DNA
atggctgtttatgatgcatacggtgcgcagcagttctattttccgaatgtgctaaagtatgatccagatcagttt

SEQ ID NO: 626337 - DNA, 75 bp, synthetic construct
  source 1..75: mol_type = other DNA
aatacaaaattcatattataaggaaatagagattccgctttatgatatttattgtgaaatggcgctttctattgg

SEQ ID NO: 626338 - DNA, 75 bp, synthetic construct
  source 1..75: mol_type = other DNA
gtggtcattgcgctggctaatcgttatgttcttgtaccgcgcatgaggcaggatgaagatcgtgcggcaccctgg

SEQ ID NO: 626339 - DNA, 75 bp, synthetic construct
  source 1..75: mol_type = other DNA
cacctgaaccttccgcagcttgaccgtgactacgactggaacgacaacggacagctaattcgcatcagcggcccg

SEQ ID NO: 626340 - DNA, 75 bp, synthetic construct
  source 1..75: mol_type = other DNA
gtggatagcgcacgcgcccttattgcccggggatggggagtaagcttagtcagccgttgtctccgggtctcacgt

SEQ ID NO: 626341 - DNA, 75 bp, synthetic construct
  source 1..75: mol_type = other DNA
tagggagtgagggatataagtctcttagaaaggaaatgatgggcacgacgactgtgcctaaagttgcggatgaaa

SEQ ID NO: 626342 - DNA, 75 bp, synthetic construct
  source 1..75: mol_type = other DNA
gacaaataaataccaagtcaaaaaattatattaaagataaagtttattttgaaaaaatcataaggataacaaaat

SEQ ID NO: 626343 - DNA, 75 bp, synthetic construct
  source 1..75: mol_type = other DNA
ctctcttgataagctacaagatcagtttgttgattaccgggacaaggtaggtgatttgtcactggggcaatggaa

SEQ ID NO: 626344 - DNA, 75 bp, synthetic construct
  source 1..75: mol_type = other DNA
tggtcaccattacgtttgcgatgtttgcgctgatctttgttcccttctggtgggagttgggcggctggctggacg

SEQ ID NO: 626345 - DNA, 75 bp, synthetic construct
  source 1..75: mol_type = other DNA
gagccatcaggtagcgctggaacaactggcatttgttgagaaagaagttaatcgcgcttatcagcgggtgcagga

SEQ ID NO: 626346 - DNA, 75 bp, synthetic construct
  source 1..75: mol_type = other DNA
ccgtctgagggatgcaggtaagccgtgcatcagctgcggcaggctgccagagcagaagtttggcggaaccatgga

SEQ ID NO: 626347 - DNA, 75 bp, synthetic construct
  source 1..75: mol_type = other DNA
tgaccatcagccaaaatattgtctctactgatacgcatggtatagccgaggtctccatgacgcccgaaagaaacg

SEQ ID NO: 626348 - DNA, 75 bp, synthetic construct
  source 1..75: mol_type = other DNA
atgattcttataatttatgcgcatccatatccgcatcattcccatgcgaataaacggatgcttgaacaggcaagg

SEQ ID NO: 626349 - DNA, 75 bp, synthetic construct
  source 1..75: mol_type = other DNA
ccgcgtcgaggcataccgcaagcttaaacatttgttggtagtgagtcagcctacgcttgccgaagatgctgaata

SEQ ID NO: 626350 - DNA, 75 bp, synthetic construct
  source 1..75: mol_type = other DNA
tctgcgttacaacagccaccgcacaaacgggaagaatacctggtgatgagtggtgatgagttcatggaaaggttc

SEQ ID NO: 626351 - DNA, 75 bp, synthetic construct
  source 1..75: mol_type = other DNA
cgtggtctcaaaggtaggcgtgaccttcgacagcacggctaaaacgacaggtgcaaccccgctccttagtaacat

SEQ ID NO: 626352 - DNA, 75 bp, synthetic construct
  source 1..75: mol_type = other DNA
atgaacattgacctgggtgaagtaaccacatcccacataaatcgagaacatcatagcgagaaaaaacctgtcaat

SEQ ID NO: 626353 - DNA, 75 bp, synthetic construct
  source 1..75: mol_type = other DNA
cagacggcgcaatggcgaatatgctgcgggcgagggtgacggatgcgttcggtaatgcgcttgccggacagacgg

SEQ ID NO: 626354 - DNA, 75 bp, synthetic construct
  source 1..75: mol_type = other DNA
gtggcgtgtataccacaacccgaatggcgacgattgccagtaccaatcagcacgccaacctgcaactgcagacgt

SEQ ID NO: 626355 - DNA, 75 bp, synthetic construct
  source 1..75: mol_type = other DNA
aacaacagcagccagagccgggatgtgacgtttatcgccgatgtcaggacggcgcagatcgcgagtctggaggtg

SEQ ID NO: 626356 - DNA, 75 bp, synthetic construct
  source 1..75: mol_type = other DNA
cggttcatcttcctcgggtggaaaaaattatccagccggacactgaccattgccccgaatgtgacgagccgctgc

SEQ ID NO: 626357 - DNA, 75 bp, synthetic construct
  source 1..75: mol_type = other DNA
aattacgttgcgaacagcggcagaaaaagcctggcaagccttcagtcagaacgtcgcgttacctccgaaacagga

SEQ ID NO: 626358 - DNA, 75 bp, synthetic construct
  source 1..75: mol_type = other DNA
ccgagaatgatgtgcgtggcgagctgtcatttattgaaaaagccttcggtatcgagaaggctcgggctatttacg

SEQ ID NO: 626359 - DNA, 75 bp, synthetic construct
  source 1..75: mol_type = other DNA
atgaatatgatgatctcatatcaggaacttgttcgcaccttccttagctttggaggaacaaaggaaaataataat

SEQ ID NO: 626360 - DNA, 75 bp, synthetic construct
  source 1..75: mol_type = other DNA
cctcccgcaggagtatggcggcaaggccccaaatctgccaaaacctctacaggtcccggataacctcccggcgtt

SEQ ID NO: 626361 - DNA, 75 bp, synthetic construct
  source 1..75: mol_type = other DNA
tatattcgagccagacgttcgcatattgtgcttaaggaagatcacaaagcgatgctgaaattatgggaaaacagg

SEQ ID NO: 626362 - DNA, 75 bp, synthetic construct
  source 1..75: mol_type = other DNA
aacgtgagcaagacatgtctgttgaaattgcccgtcttaagcggcaactggcggaacgagacaaggaacaggcca

SEQ ID NO: 626363 - DNA, 75 bp, synthetic construct
  source 1..75: mol_type = other DNA
ccctgaaaaaaggcgtgatgtatgagaactccggctatgtcattacggggctttgtcttgtcgggggggctgatg

SEQ ID NO: 626364 - DNA, 75 bp, synthetic construct
  source 1..75: mol_type = other DNA
ttatcgaccaaatgcatgataataaaatgtgggcagttaaattcaatttcgatggggggcaggtattaattaaag

SEQ ID NO: 626365 - DNA, 75 bp, synthetic construct
  source 1..75: mol_type = other DNA
acgtctgatccatctcactatttaccagcagctgaacgaatattgttcgtgataaagtccttggagatctctgat

SEQ ID NO: 626366 - DNA, 75 bp, synthetic construct
  source 1..75: mol_type = other DNA
agaattgaaggctgctcagcaggtcggacgcccgatcgatacgcagaagtatgacgggatgcaactgaaatggca

SEQ ID NO: 626367 - DNA, 75 bp, synthetic construct
  source 1..75: mol_type = other DNA
tacaaacggcagcattcaggtcagtaaagggctgaatgtgtccgggcgcgttaatccttccgattacagtaattt

SEQ ID NO: 626368 - DNA, 75 bp, synthetic construct
  source 1..75: mol_type = other DNA
ttatcagtggcgcagaaaaaggtgcgccactgacccttaccggtagcactcaacaggccgagacaggacaaaccg

SEQ ID NO: 626369 - DNA, 75 bp, synthetic construct
  source 1..75: mol_type = other DNA
gggccaggctgtctgggcatcattaaaattattttctatatttttatctttgctggtttgatagggaaaatactc

SEQ ID NO: 626370 - DNA, 75 bp, synthetic construct
  source 1..75: mol_type = other DNA
gacatcatcctgataaacgcagagcccgtgcgcagcgcgatgactggctgaagaaagagatactgcgcgtatacg

SEQ ID NO: 626371 - DNA, 75 bp, synthetic construct
  source 1..75: mol_type = other DNA
gacggcgcggtggatgtactggtgaccaaacagtcgggcagcgtgttcctgatccgcaacaccaacacggtgagc

SEQ ID NO: 626372 - DNA, 75 bp, synthetic construct
  source 1..75: mol_type = other DNA
tcaccgatagcgcaggcaacagcagcacgcagacgcacaacgtgcaggtaaacacggcggcagtgtcgctctcgg

SEQ ID NO: 626373 - DNA, 75 bp, synthetic construct
  source 1..75: mol_type = other DNA
ctggcgcaaatcaccagccagaccacgcgcgatactacgccgattatcagcggggtgatcacggcggcactcgcc

SEQ ID NO: 626374 - DNA, 75 bp, synthetic construct
  source 1..75: mol_type = other DNA
ccaacaagagcaggcccacgctaaaaagatggctgctattaacgctcgtggtgcagtccagcaaatcaatcaggc

SEQ ID NO: 626375 - DNA, 75 bp, synthetic construct
  source 1..75: mol_type = other DNA
gcgtcgttagtgggtagtatgggcgtttctcgtgtcggtcagaccctccagggaagccttgagcgctctcgcgat

SEQ ID NO: 626376 - DNA, 75 bp, synthetic construct
  source 1..75: mol_type = other DNA
attcgttgagtgatattttcagctcaggttttgctgatgggttgggagaggttggcaagaacacttccagcttta

SEQ ID NO: 626377 - DNA, 75 bp, synthetic construct
  source 1..75: mol_type = other DNA
ttatggacttttaccgcgagcgtcaggaaacactgcttgcccgcattagaactgcattacaacccgcaagcagcg

SEQ ID NO: 626378 - DNA, 75 bp, synthetic construct
  source 1..75: mol_type = other DNA
atttgctcaacgtctacttggccacacatcggagaagacaacaaaaatgtatcttgatgagagagaaaaaacgta

SEQ ID NO: 626379 - DNA, 75 bp, synthetic construct
  source 1..75: mol_type = other DNA
gatatctcctttgccgggaaaaaacgtatcacgctgattggcgggggagttacctgcggctggaggcgtggaaaa

SEQ ID NO: 626380 - DNA, 75 bp, synthetic construct
  source 1..75: mol_type = other DNA
ggcgtggaagcggggcaaacggtcactgttacctttggcggtaaaacctacaccgctaccgtagcgggcgatggt

SEQ ID NO: 626381 - DNA, 75 bp, synthetic construct
  source 1..75: mol_type = other DNA
cggcaccggaacctggcttgcgaacggcggcatggacgtggttgatttccgcctctcgacggtgggcgtgaccgc

SEQ ID NO: 626382 - DNA, 75 bp, synthetic construct
  source 1..75: mol_type = other DNA
tccgctaaccatcagcggcagcagtaccgccgaagcggggcagacggtaaccgtcacgcttaatggcgtgactta

SEQ ID NO: 626383 - DNA, 75 bp, synthetic construct
  source 1..75: mol_type = other DNA
acaatgacggcaggatcgacctggttcagcacacctacaacctgaacaactattacacgctatcttcgctcatca

SEQ ID NO: 626384 - DNA, 75 bp, synthetic construct
  source 1..75: mol_type = other DNA
acctggagcgtgagcgttccggcggcagatattcaggcgctgggtaatggcgatttaacggtgagcgcctcggtc

SEQ ID NO: 626385 - DNA, 75 bp, synthetic construct
  source 1..75: mol_type = other DNA
aagggcgcggcggtaacgacacgctcaacatcggcaacggcggccacgacaccttgctctataaactgctcaacg

SEQ ID NO: 626386 - DNA, 75 bp, synthetic construct
  source 1..75: mol_type = other DNA
tgatcaacgcgacggaaaaaggatcgaatctggcgctttccggcaccagcgatcagcctgcgggtacggcgatca

SEQ ID NO: 626387 - DNA, 75 bp, synthetic construct
  source 1..75: mol_type = other DNA
ataatctgacggtggaccttgccgctccggttgtcaccattaacacggtggcgggcgatgacatcatcaacgcca

SEQ ID NO: 626388 - DNA, 75 bp, synthetic construct
  source 1..75: mol_type = other DNA
gccgggcagacggtgaccgtgacgcttaacggcgtcaattacagcggtaacgtgcaggcagacggaagctggagc

SEQ ID NO: 626389 - DNA, 75 bp, synthetic construct
  source 1..75: mol_type = other DNA
acggcgggaacggcgttaacggtcgagattaacaacgttacttatggcgcgacggtattagccgacggcacgtgg

SEQ ID NO: 626390 - DNA, 75 bp, synthetic construct
  source 1..75: mol_type = other DNA
cggctcgctcaccgccgcgcttgccagtaacgagacggcacaaatcagtatcgacggcggcgtaacctggaccac

SEQ ID NO: 626391 - DNA, 75 bp, synthetic construct
  source 1..75: mol_type = other DNA
gaacgggcaaaattacaccgcgacgaccgattcctccggcaactggagcgccacggtgccagcctcggcggttag

SEQ ID NO: 626392 - DNA, 75 bp, synthetic construct
  source 1..75: mol_type = other DNA
gataacgtcctgaacgccgatgaaaaaggccagccgttgaccattagcggtagcagtacggggttggcgaccggc

SEQ ID NO: 626393 - DNA, 75 bp, synthetic construct
  source 1..75: mol_type = other DNA
atggttacttacctgagaatagttaatagcatgaaaaatgtagaaaatattatctggcatgatggtgttttagta

SEQ ID NO: 626394 - DNA, 75 bp, synthetic construct
  source 1..75: mol_type = other DNA
gaactacaacctgacttccaaagaaaagatcgtatttggaataatgagaagaagtctaaattaatcgagtctatt

SEQ ID NO: 626395 - DNA, 75 bp, synthetic construct
  source 1..75: mol_type = other DNA
actatctcccagaataatgcaaactttgttacaacaaaccgccaaccggactaccacggcccacggatttacttc

SEQ ID NO: 626396 - DNA, 75 bp, synthetic construct
  source 1..75: mol_type = other DNA
atgccgatttgccgcgatatctgatagcagacctgacggctgacgaactgccggattatcgccttgatgattact

SEQ ID NO: 626397 - DNA, 75 bp, synthetic construct
  source 1..75: mol_type = other DNA
atacaacatcatcacagttgaacttggaattaaaaactctacaagctaaacttggtgttgcaagaattacctcca

SEQ ID NO: 626398 - DNA, 75 bp, synthetic construct
  source 1..75: mol_type = other DNA
ggatatggagctttgccttgctgctcttgcatttataaatattggctttaaaaattataattttaattcctatga

SEQ ID NO: 626399 - DNA, 75 bp, synthetic construct
  source 1..75: mol_type = other DNA
taacttaccctatattcaacatttcaagtatgaaaacaaaaaacatctgttattgcgtagtcataatgtccatga

SEQ ID NO: 626400 - DNA, 75 bp, synthetic construct
  source 1..75: mol_type = other DNA
cgcaaaaaggccgcgcgtcactcgttcccgcctcgccagcttccgctgcccgccctggtccgtgtggtcatgcaa

SEQ ID NO: 626401 - DNA, 75 bp, synthetic construct
  source 1..75: mol_type = other DNA
tgttcttatcgttgcccaatacaggcacaggtaattaataacaagacggtttttattcaggggaaccctaatgcg

SEQ ID NO: 626402 - DNA, 75 bp, synthetic construct
  source 1..75: mol_type = other DNA
ggcgctcggtctgaccgtggctgacggtgacgaatttacgccggagctgggcacggcggcgctgtctgccctcac

SEQ ID NO: 626403 - DNA, 75 bp, synthetic construct
  source 1..75: mol_type = other DNA
tccccctccggcaaaacttgtccaaccctccctacggtgagcgtggtgttggggccagtgtggcactggctgcgc

SEQ ID NO: 626404 - DNA, 75 bp, synthetic construct
  source 1..75: mol_type = other DNA
tatgatttttacgcttaatgcactgctcggtaatattgaacgtaaaggagggctgtatcagaaaaaaggcgcggc

SEQ ID NO: 626405 - DNA, 75 bp, synthetic construct
  source 1..75: mol_type = other DNA
caggctgatgtccctgctgatgtcattgttcgtgtgactcgtgaactggctgcctgtgcgccacatgctattgtc

SEQ ID NO: 626406 - DNA, 75 bp, synthetic construct
  source 1..75: mol_type = other DNA
gtgcgcggcggctgtaacctgttcgacctcgaccagctacgcatggagtacagcccggacgaataccagaacctg

SEQ ID NO: 626407 - DNA, 75 bp, synthetic construct
  source 1..75: mol_type = other DNA
ttcaattctgtcgaatataatgttgtacgtcatgggccacaggtgaatttttcttcttatatgttagcccacgaa

SEQ ID NO: 626408 - DNA, 75 bp, synthetic construct
  source 1..75: mol_type = other DNA
ccgcttcatcaaatattcaagagctttgctattggcccggatcatggagccagtcaggtagaattctttcgtcgc

SEQ ID NO: 626409 - DNA, 75 bp, synthetic construct
  source 1..75: mol_type = other DNA
gtttgaaaattgaacctcactggaacggtgaaatcgccatcagctatgacgcactggcgacgataagtgatggca

SEQ ID NO: 626410 - DNA, 75 bp, synthetic construct
  source 1..75: mol_type = other DNA
tgactcctcaaatggtgctgccgattggattaaggaaaagaccggctttgatccacgtagcatcggtcagacgct

SEQ ID NO: 626411 - DNA, 75 bp, synthetic construct
  source 1..75: mol_type = other DNA
cttgatggcgggtatcagtggggaaggtgatgaagttattgcccgtatgcatcaactcgcttctgaaggatggac

SEQ ID NO: 626412 - DNA, 75 bp, synthetic construct
  source 1..75: mol_type = other DNA
aaagtgctcagctgacagggatgactgtaacaatcatatctaatacctgcagttcaggctcaggctttgcccagg

SEQ ID NO: 626413 - DNA, 75 bp, synthetic construct
  source 1..75: mol_type = other DNA
gaacccggcgtttatagccagccagatggggcatgaaactgcgcagatggtgtatgaaatttacggtatgtggat

SEQ ID NO: 626414 - DNA, 75 bp, synthetic construct
  source 1..75: mol_type = other DNA
cccgtttggctggcgcgaagtatggatcggttatgaccccgcaaaaggtactcagaacggcgacagtgccggatg

SEQ ID NO: 626415 - DNA, 75 bp, synthetic construct
  source 1..75: mol_type = other DNA
gtcctttatggcaatccgtcgtgccaccaccgccagcggcaaccgcccgacctatgaagccagccgcagcgaaga

SEQ ID NO: 626416 - DNA, 75 bp, synthetic construct
  source 1..75: mol_type = other DNA
atgtccacgcctgcgggcgtggacttctgtttgaagccaatggctatctatatcgaaataacaaaacattatgaa

SEQ ID NO: 626417 - DNA, 75 bp, synthetic construct
  source 1..75: mol_type = other DNA
atggcgatttacattgaaattaaaaaatattatgaaacccatgaaaaggtcgcatatttatatagttgtgaccat

SEQ ID NO: 626418 - DNA, 75 bp, synthetic construct
  source 1..75: mol_type = other DNA
gtcgttgtcatgttggtcatgggggttcttggatactggttacaacgtaaggaatacccggtttcgcccattatt

SEQ ID NO: 626419 - DNA, 75 bp, synthetic construct
  source 1..75: mol_type = other DNA
gtgcggcgttaacgctctccggcagcacctccggcgtcgaagcggggcaaaccgtcaccgtgacctttggcggca

SEQ ID NO: 626420 - DNA, 75 bp, synthetic construct
  source 1..75: mol_type = other DNA
cacggtacagggcaacttaagctggagtatcagcgttccggcagccgatctccaggcgttgggcaatggcgattt

SEQ ID NO: 626421 - DNA, 75 bp, synthetic construct
  source 1..75: mol_type = other DNA
cgctgggcggcaacacttacaccaccacggtacagggcaacttaagctggagtatcagcgttccggcagccgatc

SEQ ID NO: 626422 - DNA, 75 bp, synthetic construct
  source 1..75: mol_type = other DNA
tcaatatcatcgagcacgggcaggcgctggtggtcaccggcagcagctcggggctggctgaaggcacgccgctta

SEQ ID NO: 626423 - DNA, 75 bp, synthetic construct
  source 1..75: mol_type = other DNA
gtttagcctggcggtggactggaaccatgacggtctgatggatatcgcccgtatcgcccagaccggacaatcgta

SEQ ID NO: 626424 - DNA, 75 bp, synthetic construct
  source 1..75: mol_type = other DNA
tgacggcctgaactggacatacgcggatgggcgcacgttgactaacggcacgaccacctggcaggtgcgagtggt

SEQ ID NO: 626425 - DNA, 75 bp, synthetic construct
  source 1..75: mol_type = other DNA
agcattaccgtgcctgcttcggcggtcggcgcattgggcgaggcggtttattcgattagcgccagcgccaccgac

SEQ ID NO: 626426 - DNA, 75 bp, synthetic construct
  source 1..75: mol_type = other DNA
ttcttaacgccgacgaagcgggatcggcgctgaccatcagcggcaccagcacggcggaagccgggcagacggtga

SEQ ID NO: 626427 - DNA, 75 bp, synthetic construct
  source 1..75: mol_type = other DNA
cgcaacggtgttagctgatggcacatggaatctcggtgttccggcggcagacgtcagtaactggcctgcgggtac

SEQ ID NO: 626428 - DNA, 75 bp, synthetic construct
  source 1..75: mol_type = other DNA
agcgtcggcgttccggcaagcgtcgtctcggcgctggcgaacggcacggtgaccattaacgccagcgtcaccgat

SEQ ID NO: 626429 - DNA, 75 bp, synthetic construct
  source 1..75: mol_type = other DNA
caccgtacagacggacggcagctggagcatcagcgtaccgccagccgacttaagcgccctgaccgccagcaacta

SEQ ID NO: 626430 - DNA, 75 bp, synthetic construct
  source 1..75: mol_type = other DNA
accgtggcgggcgatgatgtggtcaacattatcgagcacgggcaggcgctggtgattaccggcagcagctccgat

SEQ ID NO: 626431 - DNA, 75 bp, synthetic construct
  source 1..75: mol_type = other DNA
cgctaacttaagcagcaccgccgcccaggccactggctttaacacctcgacatttaccaatatcgaggggatttc

SEQ ID NO: 626432 - DNA, 75 bp, synthetic construct
  source 1..75: mol_type = other DNA
cggcggcgggcagcaccgtcaccgttacgctgggcggtaaaacttacaccgccaccgtccagccagatttaagct

SEQ ID NO: 626433 - DNA, 75 bp, synthetic construct
  source 1..75: mol_type = other DNA
cgtatagcgttgacgccagcgcaccgacgctcaccattaacaccattgccagcgacgatattcttaacgccacgg

SEQ ID NO: 626434 - DNA, 75 bp, synthetic construct
  source 1..75: mol_type = other DNA
cgcggcggaaattaccgcgacggtcactaatatcagcggcaataccggcaacacttcccgcaccattaccgtcga

SEQ ID NO: 626435 - DNA, 75 bp, synthetic construct
  source 1..75: mol_type = other DNA
atggcaccagctatacggttagcgcctccgcgcaggacagtgccggaaacagcgccacggcctctcgcagcgtgg

SEQ ID NO: 626436 - DNA, 75 bp, synthetic construct
  source 1..75: mol_type = other DNA
tcaacaccagctggggcggtttacaggccaccgatgccactcacgcttacgatctcagcgccgaagcgggtaccg

SEQ ID NO: 626437 - DNA, 75 bp, synthetic construct
  source 1..75: mol_type = other DNA
ccgcaacggcctgctgttaggcgcggtgacgatggtcggcgcgctgaactggacctacagcgacagcgggctggt

SEQ ID NO: 626438 - DNA, 75 bp, synthetic construct
  source 1..75: mol_type = other DNA
aacctacaccaccaccctggatgcctccggcaactggagcgtcggcgttccggcggcggatgtcactgcgctggg

SEQ ID NO: 626439 - DNA, 75 bp, synthetic construct
  source 1..75: mol_type = other DNA
caccacggttgccgcggataatacctgggggctgacaatccctgtcgccgatgttgcaaccttgccagacggcgc

SEQ ID NO: 626440 - DNA, 75 bp, synthetic construct
  source 1..75: mol_type = other DNA
gtcagcactattaacggtaacacggcttcggcaacgcacgcctacagcgtcgacgccacggcaccgacgcttgtc

SEQ ID NO: 626441 - DNA, 75 bp, synthetic construct
  source 1..75: mol_type = other DNA
gacaccatcgcgggcgatgatgtgatcaatgccgttgagcagcagcaaaacctgattatcaccggtagcagtacc

SEQ ID NO: 626442 - DNA, 75 bp, synthetic construct
  source 1..75: mol_type = other DNA
acagcattgagcacaatcaggcgctggtgatcaccgggagcagcagcggattaacggcgggaacggcgttaacgg

SEQ ID NO: 626443 - DNA, 75 bp, synthetic construct
  source 1..75: mol_type = other DNA
agcaaacatacaagccagcgtcagcaacgtcgcagggaacagcgcccaggcaacgcatgtttatagcgtcgatgc

SEQ ID NO: 626444 - DNA, 75 bp, synthetic construct
  source 1..75: mol_type = other DNA
ggtaacagtgcctcggcgacccatgcgtataacgttgacgccagcgcgccgacgctcaccattaatactatcgcc

SEQ ID NO: 626445 - DNA, 75 bp, synthetic construct
  source 1..75: mol_type = other DNA
ccgacaccgatcgcattgatattcgtgaactgttacagggcagcggctacaccggaaacggcaaagccagctacg

SEQ ID NO: 626446 - DNA, 75 bp, synthetic construct
  source 1..75: mol_type = other DNA
ctgggggctgacctacggcctcgactcgcacgggatgtggacggtgctggcaaaccagcaggtaatgcaatcgac

SEQ ID NO: 626447 - DNA, 75 bp, synthetic construct
  source 1..75: mol_type = other DNA
gcctgatcactaacgattttgtcaccagcgacacgacgcttgcggtaagcggcacgctgggcgcggcgctttctg

SEQ ID NO: 626448 - DNA, 75 bp, synthetic construct
  source 1..75: mol_type = other DNA
cgcacgacatcgtgatagacgccaatctgccaggcctgcgggtcgataccgtggcaggcgatgatgtgattaaca

SEQ ID NO: 626449 - DNA, 75 bp, synthetic construct
  source 1..75: mol_type = other DNA
ttcaggcgctgggtaacggcgacctgacagttaacgtctcggtcaccaatgacgttggtaataccggcagcggct

SEQ ID NO: 626450 - DNA, 75 bp, synthetic construct
  source 1..75: mol_type = other DNA
ccgtgacgctgaataatgtggattacaccacggtggtggatgcttccggcaactggagtctgggcgttccggcct

SEQ ID NO: 626451 - DNA, 75 bp, synthetic construct
  source 1..75: mol_type = other DNA
gggcaacgtgcaggcgagcgtcagtaatattaacggcaacagcgcccaggccgatcgcgcgtatagcgttgatgc

SEQ ID NO: 626452 - DNA, 75 bp, synthetic construct
  source 1..75: mol_type = other DNA
aaccgcaaatgtcaccgacacggcaggcaacagcaattccgccagccataatgtgcaggtcaacagcgccttgcc

SEQ ID NO: 626453 - DNA, 75 bp, synthetic construct
  source 1..75: mol_type = other DNA
accctttccactgacgatgtgattaacgccgccgaaaaaggcagcgatttgcagctctccggcaccacctccggc

SEQ ID NO: 626454 - DNA, 75 bp, synthetic construct
  source 1..75: mol_type = other DNA
gatgtggtgagcgttgtgctcaacggcaaaacctacaccaccaccctggatgcctccggcaactggagcgttggc

SEQ ID NO: 626455 - DNA, 75 bp, synthetic construct
  source 1..75: mol_type = other DNA
cgccagcctgagcgatcgcgcgggcaacagcgacagcgctacccataatgtcaccgttgatctcagcggcccgac

SEQ ID NO: 626456 - DNA, 75 bp, synthetic construct
  source 1..75: mol_type = other DNA
acaggcggacgggagctggagcgttggcattccggcggcaaacgtcagcgcctggcctgcgggggagttaatcgt

SEQ ID NO: 626457 - DNA, 75 bp, synthetic construct
  source 1..75: mol_type = other DNA
atacggtcaccggagcgcagctgctaacggtcgatacccagccgccaacacttgctatcaacaccatcgctcagg

SEQ ID NO: 626458 - DNA, 75 bp, synthetic construct
  source 1..75: mol_type = other DNA
cagcggggtgatcaccgccgcgcttgccagtgggcagtatgttgaagtggtgatcaacggcaaaacctacacctc

SEQ ID NO: 626459 - DNA, 75 bp, synthetic construct
  source 1..75: mol_type = other DNA
aacctatacaacaaccctggatgcctccggcaactggagcgtcggcgttccggcggcggatgtcaccgcgctggg

SEQ ID NO: 626460 - DNA, 75 bp, synthetic construct
  source 1..75: mol_type = other DNA
taggcgcgctgaccgcaagcaattacaccgtcagcgccacggtcaacgacaaagcgggcaaccccggcagcgcca

SEQ ID NO: 626461 - DNA, 75 bp, synthetic construct
  source 1..75: mol_type = other DNA
tgcgccggtactcggcattaacaccatcgccgtcgatgacatcatcaacgccacggagaaaggcgcggatctggc

SEQ ID NO: 626462 - DNA, 75 bp, synthetic construct
  source 1..75: mol_type = other DNA
ttaacgccgccgaagcgggcgcagcgcaaaccatcagcggacaggtgactggcgcagccgttggcgacacggtaa

SEQ ID NO: 626463 - DNA, 75 bp, synthetic construct
  source 1..75: mol_type = other DNA
cgcgacggtgttagccgacggcacatggaacctcggtgttccggcggcagacgtcagcaactggcctgcgggtac

SEQ ID NO: 626464 - DNA, 75 bp, synthetic construct
  source 1..75: mol_type = other DNA
gccaccggttttaatacctcgacatttaccaatatcgaagggatttccggctcgaattttaatgacactctgacc

SEQ ID NO: 626465 - DNA, 75 bp, synthetic construct
  source 1..75: mol_type = other DNA
ggtaacagcggcagcgccacccatcaggtgacggtcaataccgggctgccgaccattacctttaacgccatcagc

SEQ ID NO: 626466 - DNA, 75 bp, synthetic construct
  source 1..75: mol_type = other DNA
agcgccatccaggtgaacgttggcaccctgacgtggtatggctcgattgtggcgttcgataaagagggcgacggt

SEQ ID NO: 626467 - DNA, 75 bp, synthetic construct
  source 1..75: mol_type = other DNA
acatcatcaacgccgccgaaagcggccaggatttgcaaatcactggcaccaccgacgctcagccggggcagacgg

SEQ ID NO: 626468 - DNA, 75 bp, synthetic construct
  source 1..75: mol_type = other DNA
tgatcaacggcaaaacctacacctcgcagccgggcggtgcggtggtggtcgatccggcgcacaacacctggtatg

SEQ ID NO: 626469 - DNA, 75 bp, synthetic construct
  source 1..75: mol_type = other DNA
caacagtaattccgccagccataatgtgctggtcaacagcgccttgcctgccgttaccattaacgcggtggcgac

SEQ ID NO: 626470 - DNA, 75 bp, synthetic construct
  source 1..75: mol_type = other DNA
aaatatttagatcaagatgcacttaatattgcaatggtaaacaatgtaaaatatgttgattctaaatggaatttc

SEQ ID NO: 626471 - DNA, 75 bp, synthetic construct
  source 1..75: mol_type = other DNA
ggcccggagcgcgctttacctggtggggtgaagatggcaatggtgacgccttccttacggcatgggcatggtacg

SEQ ID NO: 626472 - DNA, 75 bp, synthetic construct
  source 1..75: mol_type = other DNA
agatatctgggaaaggtcgagaaacatgtctgtgagaatgagcgtgacagtgatgaagacagtagtagctatacc

SEQ ID NO: 626473 - DNA, 75 bp, synthetic construct
  source 1..75: mol_type = other DNA
ttcaaacgagaaatcttaaatgttctaccattgtggttttcaacagctcctgttggtgactattacatggaaatc

SEQ ID NO: 626474 - DNA, 75 bp, synthetic construct
  source 1..75: mol_type = other DNA
tgcgtggacgagttagaaacttctgtattatacgacagaaaagctatctacctcgtaaaattaagatgttctccc

SEQ ID NO: 626475 - DNA, 75 bp, synthetic construct
  source 1..75: mol_type = other DNA
tcacagtctcaggcaaaaagggctgcgtttttactggctaattgcggggagtggatgcaggaaaaatgaagaacg

SEQ ID NO: 626476 - DNA, 75 bp, synthetic construct
  source 1..75: mol_type = other DNA
tgattacctttccggagccaattgatgaagcattattgacgctggaacgcgatcgcgtggaacagcagtcgctgc

SEQ ID NO: 626477 - DNA, 75 bp, synthetic construct
  source 1..75: mol_type = other DNA
cccgcagcgagtatgatgaggcggggaggctgaaggcgcagacggatgcggcggggcggcggacggagtacagcc

SEQ ID NO: 626478 - DNA, 75 bp, synthetic construct
  source 1..75: mol_type = other DNA
cacgacgagcggacccaccactaccattacgacagccagcaccgtctggtgttctacacgcggatacagcacggc

SEQ ID NO: 626479 - DNA, 75 bp, synthetic construct
  source 1..75: mol_type = other DNA
ctatgggattattgcagacttgggatgatgccagatctggagcatgtacggggggagtttgtggtgttctttcac

SEQ ID NO: 626480 - DNA, 75 bp, synthetic construct
  source 1..75: mol_type = other DNA
cactggttatatcagttgtacagaaaaaaccctggttctggctgggtattatggtgtagctcgcttagagaacgg

SEQ ID NO: 626481 - DNA, 75 bp, synthetic construct
  source 1..75: mol_type = other DNA
caggagaatgttccagcaggtccctttgagttaaaagatttttatctgacaggatattcaggagacttacttgta

SEQ ID NO: 626482 - DNA, 75 bp, synthetic construct
  source 1..75: mol_type = other DNA
tcagcataggattgcagaattactggcccttgaaaaacaactgaaggaactacacgatttttgcaacgccgaccg

SEQ ID NO: 626483 - DNA, 75 bp, synthetic construct
  source 1..75: mol_type = other DNA
tggaccttccagttggcgctgaatgttgcaacgccgtttgtgctggtaggattaggactgattttcccgctgctg

SEQ ID NO: 626484 - DNA, 75 bp, synthetic construct
  source 1..75: mol_type = other DNA
aaagaatgtcttatcaataattccgatgaacttcgactggatcgtttaaatctgtcctcgctacctgacaactta

SEQ ID NO: 626485 - DNA, 75 bp, synthetic construct
  source 1..75: mol_type = other DNA
ggaaagccgccgctggctggcatcgtgcggcctgacggtggagcagatacaaaaccagatggacccggtgtacac

SEQ ID NO: 626486 - DNA, 75 bp, synthetic construct
  source 1..75: mol_type = other DNA
ggcaaatcgccgctggtggaagtcggtgcgcatacctggaactcacacttcggcgcagaggcgaacccgcagggc

SEQ ID NO: 626487 - DNA, 75 bp, synthetic construct
  source 1..75: mol_type = other DNA
aacgctataacgagctttggaagcgcgtcactgcgcctaacgcacaggcaaactatgaggctgaagcgcgagggt

SEQ ID NO: 626488 - DNA, 75 bp, synthetic construct
  source 1..75: mol_type = other DNA
gactgaacagcagatttaccgtcagctgactgacgaggtactggccctgcgattgtctgaaaacggctcacaact

SEQ ID NO: 626489 - DNA, 75 bp, synthetic construct
  source 1..75: mol_type = other DNA
tgaccgctgggcgcaggcagaagagcagaatatgagatgctggagaatgagtactctcagagggtggctgaccgg

SEQ ID NO: 626490 - DNA, 75 bp, synthetic construct
  source 1..75: mol_type = other DNA
tattgaagccgaacgtaccgatatccccggccagccgtgggcattctccattccgatcgacaggagacgttcatg

SEQ ID NO: 626491 - DNA, 75 bp, synthetic construct
  source 1..75: mol_type = other DNA
gattgacggcgacaaggccatcgtcaataacgaaggcgacagttccatcaccaacggtggcaccggcacgcagat

SEQ ID NO: 626492 - DNA, 75 bp, synthetic construct
  source 1..75: mol_type = other DNA
gaaaagttattcaggacggcgatctggatgtcagcggcggcggtcacggtattgatatcaccggcgacagcgcaa

SEQ ID NO: 626493 - DNA, 75 bp, synthetic construct
  source 1..75: mol_type = other DNA
tcgagtgtctaaattaaatgacgctggtgttagccgatcggcgaaagggctgggttatgaaaaagagattagaga

SEQ ID NO: 626494 - DNA, 75 bp, synthetic construct
  source 1..75: mol_type = other DNA
caatggcccgatgggtgcatggttggtacatcacaacgtattgccccacgatggcaacgtgttgcgtgttaaagg

SEQ ID NO: 626495 - DNA, 75 bp, synthetic construct
  source 1..75: mol_type = other DNA
gcgacaccctgctccccaaactcatctccggcgagctatccctggaagatcttccggatctcaacaccgatacag

SEQ ID NO: 626496 - DNA, 75 bp, synthetic construct
  source 1..75: mol_type = other DNA
gcatcacctgtaccagccgtaccgtttgccggggcagcagtatgatgaggagtcgggactgtattacaaccgtca

SEQ ID NO: 626497 - DNA, 75 bp, synthetic construct
  source 1..75: mol_type = other DNA
agtggcaaaaattgaagacccttacgatttgaaaccccatccactgatatcagggttaaagcttccaagaacaaa

SEQ ID NO: 626498 - DNA, 75 bp, synthetic construct
  source 1..75: mol_type = other DNA
agcgtgcggaagtacatatttttgccggtaatgatccggctcacaccgccacaggcagcagcgggattccgcagc

SEQ ID NO: 626499 - DNA, 75 bp, synthetic construct
  source 1..75: mol_type = other DNA
gaagtggtgatttgattaatatagatttcgtatatgccatattaacggttttctttatgtcagttactagttttc

SEQ ID NO: 626500 - DNA, 75 bp, synthetic construct
  source 1..75: mol_type = other DNA
gcagcagcaaagccttcaccgtgatcaaaaaaaatgatgtatgccgatccgcaggcgctgcacgctctgctcgat

SEQ ID NO: 626501 - DNA, 75 bp, synthetic construct
  source 1..75: mol_type = other DNA
ggctgaagatataatttctgctgctaatttaaaacgtaaagaaagtagcacttctcaaaataagagttctaaact

SEQ ID NO: 626502 - DNA, 75 bp, synthetic construct
  source 1..75: mol_type = other DNA
ccaatctctcatgcaaaaatattatcatgggacaatgataatattttaatcacaagccttaattggttatcagcc

SEQ ID NO: 626503 - DNA, 75 bp, synthetic construct
  source 1..75: mol_type = other DNA
gcttcgcaaagccttctttaccgttaagcgaactcagatcctgaagggatgggtcaccgagcgcgaaacggaaaa

SEQ ID NO: 626504 - DNA, 75 bp, synthetic construct
  source 1..75: mol_type = other DNA
atgcagattagtgaactggcacaaggcgttgctgccaaacttgaacaaagccgcattgtgttttggtacgaccca

SEQ ID NO: 626505 - DNA, 75 bp, synthetic construct
  source 1..75: mol_type = other DNA
tcacagctcaatgctgcttaatgagctgggtatcccgaaaatggcgctgcgcacacacattcgtaagcatcagag

SEQ ID NO: 626506 - DNA, 75 bp, synthetic construct
  source 1..75: mol_type = other DNA
ggcttcgtcagaaatttaccgacaatcgcatcgtcttctggcacgacccggaacaacgcttcatcgattcactca

SEQ ID NO: 626507 - DNA, 75 bp, synthetic construct
  source 1..75: mol_type = other DNA
ctgataattctggtgtagtatacgccgatgggatgtccacttccgggtttgaaaaaagagccgctattcttgcga

SEQ ID NO: 626508 - DNA, 75 bp, synthetic construct
  source 1..75: mol_type = other DNA
atttgacacttcacaggtgaaacgtgtttttgtcgtgatttcagatgcgatgcgctacgagatagcagaagaact

SEQ ID NO: 626509 - DNA, 75 bp, synthetic construct
  source 1..75: mol_type = other DNA
ctacatcaagagcaaatgaattacttaagaataaacactcgatatcaacagaactcaaaattaaaaaccccaaac

SEQ ID NO: 626510 - DNA, 75 bp, synthetic construct
  source 1..75: mol_type = other DNA
gttgaaactgccaccggtgaactggccagaacgcagcgccgcagcctggcggatgcgcttcagcagtccggcggc

SEQ ID NO: 626511 - DNA, 75 bp, synthetic construct
  source 1..75: mol_type = other DNA
ttttcgaaaaataggtgggagattatcaagtgtagctttatttttagcttcgccatttttactatttatagtgtt

SEQ ID NO: 626512 - DNA, 75 bp, synthetic construct
  source 1..75: mol_type = other DNA
tacaggatattcccatgggcaaattatccaaaagatacagagataatattctcaaaccttataacttttattttt

SEQ ID NO: 626513 - DNA, 75 bp, synthetic construct
  source 1..75: mol_type = other DNA
gtcgccggttaccaggcttatttatataaacagcttaatcccggcgtcggtgtgcgtgaaaatattgatacctag

SEQ ID NO: 626514 - DNA, 75 bp, synthetic construct
  source 1..75: mol_type = other DNA
tttacggttacattagatataagtacagcaagtgaattacttttctgtactcaaatatctaacggacaagccagt

SEQ ID NO: 626515 - DNA, 75 bp, synthetic construct
  source 1..75: mol_type = other DNA
tcctgaaaaccagattcaggtttatgtagagaatgaagacggttctcacgttcctgtttcgcaaccaatcatcat

SEQ ID NO: 626516 - DNA, 75 bp, synthetic construct
  source 1..75: mol_type = other DNA
gccttaaagctaaatttgccgaacatcgcatcgttttctggcacgatcccgataaacgttttattgaggaactgg

SEQ ID NO: 626517 - DNA, 75 bp, synthetic construct
  source 1..75: mol_type = other DNA
gtcgctttacgcaacgccattggcaaatatattacaagtggcgaattacctgatgaaaacgcccgcaaacaaggt

SEQ ID NO: 626518 - DNA, 75 bp, synthetic construct
  source 1..75: mol_type = other DNA
catgtccagatatatgacgccgtcggcgatagataccattgctaaaattaagacgattatttcaccgggtactaa

SEQ ID NO: 626519 - DNA, 75 bp, synthetic construct
  source 1..75: mol_type = other DNA
gggttattccgttatctgatgagttagccagtgaaatttttgattacataagcaatagcagggaaaaaatgacaa

SEQ ID NO: 626520 - DNA, 75 bp, synthetic construct
  source 1..75: mol_type = other DNA
tcatgagtaatggggagcgaggatgcctgatccttgataaaaatagtaatttaccagcttactatcaaaatctat

SEQ ID NO: 626521 - DNA, 75 bp, synthetic construct
  source 1..75: mol_type = other DNA
agataaaagccctgcaaaaaaccgccgcagaaaaacagccgcagcgccgcccggtggatattgtcgcttaccatc

SEQ ID NO: 626522 - DNA, 75 bp, synthetic construct
  source 1..75: mol_type = other DNA
accgttttccagcgtgccattactccagcgtcaggggcgaatcaaatacgcggtgacactggcgaaatacagaac

SEQ ID NO: 626523 - DNA, 75 bp, synthetic construct
  source 1..75: mol_type = other DNA
gtggatatcaaccgccagcaggctgacggcaattctcacacaattctcggctttgagccgctggaggataaatgg

SEQ ID NO: 626524 - DNA, 75 bp, synthetic construct
  source 1..75: mol_type = other DNA
ggcgatggatatacccgttctggtgaacgtcatacggcaggtagcggtgatgggattgtttcatcggtggtggtt

SEQ ID NO: 626525 - DNA, 75 bp, synthetic construct
  source 1..75: mol_type = other DNA
cgtggtacgcagaatacgatgaatggggtaacctgctgaatgaagagaacccgcatcagctgcagcagcttatcc

SEQ ID NO: 626526 - DNA, 75 bp, synthetic construct
  source 1..75: mol_type = other DNA
atacagaacgacagaacccgcatccagacgatttatcagccggggagcttcacgccactcatcagggttgaaacc

SEQ ID NO: 626527 - DNA, 75 bp, synthetic construct
  source 1..75: mol_type = other DNA
cagttagtgggttaccgttattcgaccagtggatattttaatttcgctgatacaacatacagtcgaatgaatggc

SEQ ID NO: 626528 - DNA, 75 bp, synthetic construct
  source 1..75: mol_type = other DNA
cagtctggcatccacggagttagggtatctgacctgccagacaacggcaaatccgaaggtgagcaccatcgaatt

SEQ ID NO: 626529 - DNA, 75 bp, synthetic construct
  source 1..75: mol_type = other DNA
cacagccgcgcccagacaggtcattttgtgcccaggatctggctggacattctctggttgcctggccgcgaattg

SEQ ID NO: 626530 - DNA, 75 bp, synthetic construct
  source 1..75: mol_type = other DNA
gaccaattccgtgctgccgaacacaatcaactactacgtgatctttaccgttcccaccagcccggatgtgaccgg

SEQ ID NO: 626531 - DNA, 75 bp, synthetic construct
  source 1..75: mol_type = other DNA
caggtgcgactttatatggcgatgtggcggcaatggatgatctgaccgttcagccgccaactggcgcgacggtca

SEQ ID NO: 626532 - DNA, 75 bp, synthetic construct
  source 1..75: mol_type = other DNA
tacggtcacttttatactacgccagatatataagggagacggtacgcgtatcccgctcaccgcagaaattgatga

SEQ ID NO: 626533 - DNA, 75 bp, synthetic construct
  source 1..75: mol_type = other DNA
tacggtaacgtttattctgcgtcagatctacaagggggacgggacgcgcatcccgctaacggcgcaaattgatga

SEQ ID NO: 626534 - DNA, 75 bp, synthetic construct
  source 1..75: mol_type = other DNA
aataaatcatttaaatgcccgtaaacgtgacaaaccatggccaaaaccacgtcatttcgaccgtaacatcattgt

SEQ ID NO: 626535 - DNA, 75 bp, synthetic construct
  source 1..75: mol_type = other DNA
acgtggtaatgaatgaagacgactgcaaaataagaagaggaaatgcagcagaattattttcagggatacggcaca

SEQ ID NO: 626536 - DNA, 75 bp, synthetic construct
  source 1..75: mol_type = other DNA
ggcgatacgcattgtcaggacgatccgcaagactgctacggtctgacgatagggagtattgataagtaccagaat

SEQ ID NO: 626537 - DNA, 75 bp, synthetic construct
  source 1..75: mol_type = other DNA
tgcagattgaaaacggtgaagttaccctgggtcgcagcaactcactgatgaatgtcggcgatacgcattgccagg

SEQ ID NO: 626538 - DNA, 75 bp, synthetic construct
  source 1..75: mol_type = other DNA
tctttttaatggcgatgtccgctggcgtgtttatggcgatcggatttacttttacctttcagttatcgccgatgc

SEQ ID NO: 626539 - DNA, 75 bp, synthetic construct
  source 1..75: mol_type = other DNA
aaaacagtaagggattactttctcgacctgtctgggggaggcacagaacaaatatttcatggcttttaaagcaat

SEQ ID NO: 626540 - DNA, 75 bp, synthetic construct
  source 1..75: mol_type = other DNA
aaactggcgggtttcctgatggggacggcagctggactggaaataccagcaatgattctggctggcgttattcag

SEQ ID NO: 626541 - DNA, 75 bp, synthetic construct
  source 1..75: mol_type = other DNA
cagtggacacaggagtcggcggaatcagtcgtgccggatgcagacggtaaaggcgcaggcacaatgacggacgcc

SEQ ID NO: 626542 - DNA, 75 bp, synthetic construct
  source 1..75: mol_type = other DNA
gttcagtgattgctggaactcaaagtaatgccggtaaagtgatcttacccaccaatagtggacacagaactaagt

SEQ ID NO: 626543 - DNA, 75 bp, synthetic construct
  source 1..75: mol_type = other DNA
gtggctaacaaagcacaaaatgcgattgataaagaagagagcgaagaagatatcgctaacgccctgaaattttaa

SEQ ID NO: 626544 - DNA, 75 bp, synthetic construct
  source 1..75: mol_type = other DNA
tttgttgcgcagtccatgccccgggacgcacacactgaattcgatctggaattttgtttgcccgtggccagcgac

SEQ ID NO: 626545 - DNA, 75 bp, synthetic construct
  source 1..75: mol_type = other DNA
ctgccactgacgccagtagataaagtctccggttataacaacttctatgaattcgggctggataaagccgatccc

SEQ ID NO: 626546 - DNA, 75 bp, synthetic construct
  source 1..75: mol_type = other DNA
taagccagttgttcatgatgacgctgaagagtcaacggaagagatgaacagtgagttgtcatcaccacagactga

SEQ ID NO: 626547 - DNA, 75 bp, synthetic construct
  source 1..75: mol_type = other DNA
tatcagtacattaatctcaaatcgggaacgactggacaggcagcttcagatgctacagaactcaacttccagacc

SEQ ID NO: 626548 - DNA, 75 bp, synthetic construct
  source 1..75: mol_type = other DNA
tgatatttgcccttactcgttgggcgttgaagttaaccgccagggcgtttccggcattttctcgccgattattga

SEQ ID NO: 626549 - DNA, 75 bp, synthetic construct
  source 1..75: mol_type = other DNA
gcgtttccggcattttctcgccgattattgaacgaaacaccactgtgcccgtgtcgcgtgtagaaacttattcaa

SEQ ID NO: 626550 - DNA, 75 bp, synthetic construct
  source 1..75: mol_type = other DNA
gttgaccagccgcgcaaagccgacgtcattatgctcgacggcaaacatatcatcgaagcggtggtggatctgcaa

SEQ ID NO: 626551 - DNA, 75 bp, synthetic construct
  source 1..75: mol_type = other DNA
cattgtttgctgcggttatatgtattgtgttgtgtaaacgaacattttcttcccgaagcacagaatttgcactaa

SEQ ID NO: 626552 - DNA, 75 bp, synthetic construct
  source 1..75: mol_type = other DNA
gttaagtggcgtgctgttaatttttctatgttcgaatatattttttggaaaattgtttttcagaataaaccctat

SEQ ID NO: 626553 - DNA, 75 bp, synthetic construct
  source 1..75: mol_type = other DNA
ttatgaaatatgaactgtggcatattcctcctgcctgctgggtctggcaggagtgttgtcatggttgctgctgct

SEQ ID NO: 626554 - DNA, 75 bp, synthetic construct
  source 1..75: mol_type = other DNA
gtgaaaaatacgggcacttaaccgtcaaagaatactcgcacatgctgagaggtagaaggatgtatctatgccttt

SEQ ID NO: 626555 - DNA, 75 bp, synthetic construct
  source 1..75: mol_type = other DNA
ctgcaaggacaccacccgcgcgaatgcgttgttggcgcaaattaaagggcaaaacgccgcgcttgcgcagtcgct

SEQ ID NO: 626556 - DNA, 75 bp, synthetic construct
  source 1..75: mol_type = other DNA
acaacgatccgcgaccatattctggcgatgcgttatcgcgcattacgtcactgcaaggacaccacccgcgcgaat

SEQ ID NO: 626557 - DNA, 75 bp, synthetic construct
  source 1..75: mol_type = other DNA
gatgaaagacaataaagcctgggtttctgacacctttattaacgatgttttccagtccgggctggatcaaacctt

SEQ ID NO: 626558 - DNA, 75 bp, synthetic construct
  source 1..75: mol_type = other DNA
ttttactaaaaaatctttggtctactgaagaaatgcgtcagattttttctgatgatgttcgcatgcaaatgtggc

SEQ ID NO: 626559 - DNA, 75 bp, synthetic construct
  source 1..75: mol_type = other DNA
gcgcaataccctcgtttacaggatttggagcggaatgaaaaaccgctgcacgaacccgaacaacaaagacttcga

SEQ ID NO: 626560 - DNA, 75 bp, synthetic construct
  source 1..75: mol_type = other DNA
gtattcgctatttacttcttaagtatacgtccagaaaaagcacccgggtggcaattgttggtgttaccgaaaacg

SEQ ID NO: 626561 - DNA, 75 bp, synthetic construct
  source 1..75: mol_type = other DNA
atcgccgcttccagccgggaatgtatgtgccgacgcaggcgtcgtggggccataacaaccgcaccgtcgccctgc

SEQ ID NO: 626562 - DNA, 75 bp, synthetic construct
  source 1..75: mol_type = other DNA
ggaacaggaaggcttacccttcccgattcgccagagcgatgccctgggtgagtttatcgagaatgatcacctgcg

SEQ ID NO: 626563 - DNA, 75 bp, synthetic construct
  source 1..75: mol_type = other DNA
agctggagttctatttactggatcgccagcgcgacgctgaagggtatctgcaaccgccctgcgcgcccggcaccg

SEQ ID NO: 626564 - DNA, 75 bp, synthetic construct
  source 1..75: mol_type = other DNA
ggtaagccggtgagtgtggacatcaccgcacaccccgcgccggaccggatacaggtcagtaccctgccggatggc

SEQ ID NO: 626565 - DNA, 75 bp, synthetic construct
  source 1..75: mol_type = other DNA
gtggtaagggaacggatgccagactggtgaccaccgccatcaccgcagacacggagcaccgtttcagcggcctgc

SEQ ID NO: 626566 - DNA, 75 bp, synthetic construct
  source 1..75: mol_type = other DNA
atgaactggcgcagttacagctgattccggcagatggcgcggtcgctgaggcctcgccgggtcagtttgaaatca

SEQ ID NO: 626567 - DNA, 75 bp, synthetic construct
  source 1..75: mol_type = other DNA
ctcactctgaacacatactcagccctcaaggcttaaactcagtattagtcttagctaaaaaaggcaaaaaatata

SEQ ID NO: 626568 - DNA, 75 bp, synthetic construct
  source 1..75: mol_type = other DNA
ggaaaaaaattcaatcctcttcattgaagagccagagagttttatttgcccggtaagccagaaaaatttcatgga

SEQ ID NO: 626569 - DNA, 75 bp, synthetic construct
  source 1..75: mol_type = other DNA
acctctatatgtggaagaaatggcattggtaaaacgtcgttattgaaacttatctatggtatactgtcgaaagat

SEQ ID NO: 626570 - DNA, 75 bp, synthetic construct
  source 1..75: mol_type = other DNA
cctgatgccgtcatcaatggcgttgctggcaccaaacgtgaactcgtatcgccgcttccagccgggaatgtatgt

SEQ ID NO: 626571 - DNA, 75 bp, synthetic construct
  source 1..75: mol_type = other DNA
tcagatatacaactatctattattgcacagtttatgtcttatgaatcagacgctggattcttttatgcaagtaaa

SEQ ID NO: 626572 - DNA, 75 bp, synthetic construct
  source 1..75: mol_type = other DNA
cgccaaacccgaaagattcaaaagctaattgtcttaccaatccgctctggaaacaaggaaaatcctgaaaacttt

SEQ ID NO: 626573 - DNA, 75 bp, synthetic construct
  source 1..75: mol_type = other DNA
acacaggcgcagcgggcagaagccttccgtaaacagcgcgagtcttccttatcttctccagccggtccccgttct

SEQ ID NO: 626574 - DNA, 75 bp, synthetic construct
  source 1..75: mol_type = other DNA
gccggacgcaacgttaccagtatgacctgaccggaaaactcacgcagagtgaagacgaggggcttatcaccctct

SEQ ID NO: 626575 - DNA, 75 bp, synthetic construct
  source 1..75: mol_type = other DNA
tataagtgtatatgggcctcccgctccagaccgggcaggtgctgaaactcctcttgttcttactgatatgactgg

SEQ ID NO: 626576 - DNA, 75 bp, synthetic construct
  source 1..75: mol_type = other DNA
tgaaaccgccaccggtgagctggcgaaaacgcagcgccgcagcctggcggatacccttcagcagtccggcggcga

SEQ ID NO: 626577 - DNA, 75 bp, synthetic construct
  source 1..75: mol_type = other DNA
ctgccgccggagccgcccgcataccgggtgctgacgggcgtggtggacggcttcgggcggacgctggctttccac

SEQ ID NO: 626578 - DNA, 75 bp, synthetic construct
  source 1..75: mol_type = other DNA
cgctctggcaggtgctgccggaagatgttcgcctgagtccgcatgcgtacctggcagcaaacagccttcaggggc

SEQ ID NO: 626579 - DNA, 75 bp, synthetic construct
  source 1..75: mol_type = other DNA
gtgtatgaccgcagcgggacgcaggttcgcgggtttacttatgatgcggagcacgccgggcggatggtggcgcac

SEQ ID NO: 626580 - DNA, 75 bp, synthetic construct
  source 1..75: mol_type = other DNA
caccgccgaccgtctgcgtgccagtctgaacaatcacatctttccggtcatcgggaacttacctgtatcagaact

SEQ ID NO: 626581 - DNA, 75 bp, synthetic construct
  source 1..75: mol_type = other DNA
ggtaaaactctccgactctcacggtctgtatctgctcgtcaatccgggtggttcacgcatctggtatctcaaata

SEQ ID NO: 626582 - DNA, 75 bp, synthetic construct
  source 1..75: mol_type = other DNA
agaatggcgaacaggcgaaggcgcggcaccggagcctggcggaggtgttgcaggaggacacgggtgtgacgctac

SEQ ID NO: 626583 - DNA, 75 bp, synthetic construct
  source 1..75: mol_type = other DNA
gatgctggggaggctggagcgggaactgcgtgcgggagcggtgagtgaggcatggcttgcgcagtgcgggctgac

SEQ ID NO: 626584 - DNA, 75 bp, synthetic construct
  source 1..75: mol_type = other DNA
gtatccagacggtataccagccggggagcttcacgccgctcctgagaatcgaaacagagaatggcgaacaggcga

SEQ ID NO: 626585 - DNA, 75 bp, synthetic construct
  source 1..75: mol_type = other DNA
aagggggatggaatttttatcagtatccgttgaatccgatctcaaatatagatccattaggattagaaacactaa

SEQ ID NO: 626586 - DNA, 75 bp, synthetic construct
  source 1..75: mol_type = other DNA
ttacgacagtcagcaccggctggtgcactacacgcggacacaatatgaagagccgctggtcgaaagtcgctatct

SEQ ID NO: 626587 - DNA, 75 bp, synthetic construct
  source 1..75: mol_type = other DNA
ttgggagtcctggtgcaagcggggggattaacattgatcagacactgtccgggtcgtgggctgttgctccagcac

SEQ ID NO: 626588 - DNA, 75 bp, synthetic construct
  source 1..75: mol_type = other DNA
gcttacagcatatgtatttgcaatatttccgcaaacacttcctgcgtggggatttgctatctgggatgcctccgg

SEQ ID NO: 626589 - DNA, 75 bp, synthetic construct
  source 1..75: mol_type = other DNA
tccagtccatgaacgcacaggaatatgaagatatccgggctgccggaagtgatgaacgccgtgagctgactcacg

SEQ ID NO: 626590 - DNA, 75 bp, synthetic construct
  source 1..75: mol_type = other DNA
ccagcgcggtgcacagtggggaaacaaacgctcaccattggttcgacgcagatttgggtgctgccaaatcccagc

SEQ ID NO: 626591 - DNA, 75 bp, synthetic construct
  source 1..75: mol_type = other DNA
aacattcgatgaagagtatcaggttgaagttcaggaagatgatccggagaaaatggaaggcgctgaacatccaca

SEQ ID NO: 626592 - DNA, 75 bp, synthetic construct
  source 1..75: mol_type = other DNA
aattttcagcccgttactgttccggttgaaaactcaaaatcaggtcaggcaacctggcctctgagtggtagtaac

SEQ ID NO: 626593 - DNA, 75 bp, synthetic construct
  source 1..75: mol_type = other DNA
gagtcgagcaaggccggggccgctacttggccgttaggtggtggaacgtttacaggtgtggaaaaacaaagtgcc

SEQ ID NO: 626594 - DNA, 75 bp, synthetic construct
  source 1..75: mol_type = other DNA
atgtggccggataaccgtatcgcccgtgacgcgcactatctttaccggtatgaccgttacggcaggctgacggag

SEQ ID NO: 626595 - DNA, 75 bp, synthetic construct
  source 1..75: mol_type = other DNA
ccatatttccccagacgttaccgaaatgggggatggccatctgggattcgagtgggaagctggtgctcactaatg

SEQ ID NO: 626596 - DNA, 75 bp, synthetic construct
  source 1..75: mol_type = other DNA
gacccgctgcaggggcggtatatcactcaggatccgattgggctgaaggggggatggaatttttatcagtatccg

SEQ ID NO: 626597 - DNA, 75 bp, synthetic construct
  source 1..75: mol_type = other DNA
gcaactggctcccaggtggtacttctactacactggaactggacccgaagcagcactcccattccgggctgttaa

SEQ ID NO: 626598 - DNA, 75 bp, synthetic construct
  source 1..75: mol_type = other DNA
ccatgttcgttaaaagatgtaaaaaatatatatcaatgggggtgtgaattttgtcatacgggagaaaaagaacca

SEQ ID NO: 626599 - DNA, 75 bp, synthetic construct
  source 1..75: mol_type = other DNA
ttcagtgatactgccggacggcaggacggtacggtatggttacaacaaccagttgcaactgacgtcagtgacata

SEQ ID NO: 626600 - DNA, 75 bp, synthetic construct
  source 1..75: mol_type = other DNA
ttatgagtacagcgccgcaggcgacctgacagcaacgatatcaccggacggtaaatgcagcaccatcgaatatga

SEQ ID NO: 626601 - DNA, 75 bp, synthetic construct
  source 1..75: mol_type = other DNA
atatcccgtatgcaacggacccggcaggaaaccggctgccggacccggaactgcatccggacagcacgctcacgg

SEQ ID NO: 626602 - DNA, 75 bp, synthetic construct
  source 1..75: mol_type = other DNA
atgggcggcggaaaaccggcggcgcggcagggtgacatgacccgcaagggactggatattgtgcagggttcagca

SEQ ID NO: 626603 - DNA, 75 bp, synthetic construct
  source 1..75: mol_type = other DNA
tgatgaggagtcggggctgtattacaaccgtcaccggtactatgacccgttgcagggacggtatatcacccagga

SEQ ID NO: 626604 - DNA, 75 bp, synthetic construct
  source 1..75: mol_type = other DNA
agagccgggagtaccgttacagtgacacgggaaggctgacgggcgtccacaccacggcagtgaacctggatatcg

SEQ ID NO: 626605 - DNA, 75 bp, synthetic construct
  source 1..75: mol_type = other DNA
gcggtaagtctgggattaacggcaaattatgcacgtaccggagggcaggtgactgcagggaatgtgcaatcgatt

SEQ ID NO: 626606 - DNA, 75 bp, synthetic construct
  source 1..75: mol_type = other DNA
ctgtttattgcggaggccgggaactcgttcggcctgctggccgacttctttgacagcctcgggctgacggtgaat

SEQ ID NO: 626607 - DNA, 75 bp, synthetic construct
  source 1..75: mol_type = other DNA
gagctgtccaccgtattgctcggggccggtctgcagccggtacggccggagtttgaagaaggtccgctgaacagc

SEQ ID NO: 626608 - DNA, 75 bp, synthetic construct
  source 1..75: mol_type = other DNA
gccggaaatatgaccgtcagggcaggctggcggaagagacctcgcgcaacggtaacattacgcgctggttttatg

SEQ ID NO: 626609 - DNA, 75 bp, synthetic construct
  source 1..75: mol_type = other DNA
aggatggggaccagaagatgagaatagcgcaagggatcgtatgcagcatgaacggtataaagatgaattgcgaca

SEQ ID NO: 626610 - DNA, 75 bp, synthetic construct
  source 1..75: mol_type = other DNA
ggacaccgttattgtctcggtgcaagaacacaaaacgctccccggttgccgcatatctctaaagctagcgactaa

SEQ ID NO: 626611 - DNA, 75 bp, synthetic construct
  source 1..75: mol_type = other DNA
cctggcactgcccggcccgctgccgtttattcttttccgcgcctacagcagctaccggaccaggacgcccgcgcc

SEQ ID NO: 626612 - DNA, 75 bp, synthetic construct
  source 1..75: mol_type = other DNA
catcgctacacctgtgtgcaaaattctcaagtgtattgctaatggggagtatgtttttggctctcgcatagagtt

SEQ ID NO: 626613 - DNA, 75 bp, synthetic construct
  source 1..75: mol_type = other DNA
tcgctacatttcatcgccaaatatcgtctaccgggcgtcgggttactggcggcatcgccaatgcccaggcctggt

SEQ ID NO: 626614 - DNA, 75 bp, synthetic construct
  source 1..75: mol_type = other DNA
ggcaaatcagcagtaaccggtttcatgcggtaggggaagatagcgcaccggtgccttttgttattcatttacggg

SEQ ID NO: 626615 - DNA, 75 bp, synthetic construct
  source 1..75: mol_type = other DNA
atggataaatcattagaaaaattaagtgaaaaaagtgaaaaattagctacttatattagcaatttgaaagaactt

SEQ ID NO: 626616 - DNA, 75 bp, synthetic construct
  source 1..75: mol_type = other DNA
gattgcgtgtggtgttttgtggcatcaatccgggtctttcttccgcagagtctggctttccgtttgcccatccgg

SEQ ID NO: 626617 - DNA, 75 bp, synthetic construct
  source 1..75: mol_type = other DNA
gggggatattctgttcgatcatgattcatcagtactgacagaaaaaggacgtgaacaactgatgattgttgcaga

SEQ ID NO: 626618 - DNA, 75 bp, synthetic construct
  source 1..75: mol_type = other DNA
cgacccgtcaggagccggacggtctgccgccggtggagtggctgacgtatggcagcggttatcttgcggggatga

SEQ ID NO: 626619 - DNA, 75 bp, synthetic construct
  source 1..75: mol_type = other DNA
gccggagccgcccgcataccgggtactgacggtcgtggtggatggcttcgggcgctcactgactttccaccgggc

SEQ ID NO: 626620 - DNA, 75 bp, synthetic construct
  source 1..75: mol_type = other DNA
gcctgaagcgggtggtgaagaaggagcatgcggacgggagcatcacccgcagcgagtatgatgaggcggggaggc

SEQ ID NO: 626621 - DNA, 75 bp, synthetic construct
  source 1..75: mol_type = other DNA
acacggtttatccccgctggcgcggggaactctttcccccatgcgggaagcgcgtgcgatttcgcggtttatccc

SEQ ID NO: 626622 - DNA, 75 bp, synthetic construct
  source 1..75: mol_type = other DNA
tttaccactgtgaccaccggggactgccgcaggcgcttatcagcccggaaggggaaacggcgtggtgcggggagt

SEQ ID NO: 626623 - DNA, 75 bp, synthetic construct
  source 1..75: mol_type = other DNA
atggaaatgcttgggaagatattagtgataattatatcttgcgattattataatgctggcatggactatcaagat

SEQ ID NO: 626624 - DNA, 75 bp, synthetic construct
  source 1..75: mol_type = other DNA
ttagaacgcccattactaacggcgattcgtggtttagattttagtgaagtatataaacatgaagataagaacgta

SEQ ID NO: 626625 - DNA, 75 bp, synthetic construct
  source 1..75: mol_type = other DNA
agcccgtagcattgcatataacgcattagaacgcccattactaacggcgattcgtggattagatttcagtgaagt

SEQ ID NO: 626626 - DNA, 75 bp, synthetic construct
  source 1..75: mol_type = other DNA
ccaatcagaagataacgttaatctaatcattaacttttcaaggcagattaattcagccatgaaggatgtcgaagg

SEQ ID NO: 626627 - DNA, 75 bp, synthetic construct
  source 1..75: mol_type = other DNA
tagaaactaaatttggtaacgatgccgtagtcctttacgctgccccttctgtcgtagatgttggcgatttggtta

SEQ ID NO: 626628 - DNA, 75 bp, synthetic construct
  source 1..75: mol_type = other DNA
tatattttctgcattgttattctttattccattcgccttaatgatggctgaaatgggagctgcttatcgcaaaga

SEQ ID NO: 626629 - DNA, 75 bp, synthetic construct
  source 1..75: mol_type = other DNA
tcggcgccacgctgcaacccggtgcagccatttcgcatcttgagagggaagcgctaagagtgatcggcgtccata

SEQ ID NO: 626630 - DNA, 75 bp, synthetic construct
  source 1..75: mol_type = other DNA
tgcgttcaaaggggattgagcggcagatgaccgaaggggagttaatccggcaagagccggaaaaagcatgccgcc

SEQ ID NO: 626631 - DNA, 75 bp, synthetic construct
  source 1..75: mol_type = other DNA
ggctttatgatcgcatagaacgaatggaacccgcagagcgcaacgaactgatcaactggctgaacgcaacttatg

SEQ ID NO: 626632 - DNA, 75 bp, synthetic construct
  source 1..75: mol_type = other DNA
tgaacaggattgcgcgaataaacgcaatggttgtacatcttgcgccgtattatccggaggcgcctcaggcgggcg

SEQ ID NO: 626633 - DNA, 75 bp, synthetic construct
  source 1..75: mol_type = other DNA
ccagtttgcatctgtatctcaagagatgagtacaaaagctagtaagaactctgtaaatagttcatatacgcttgc

SEQ ID NO: 626634 - DNA, 75 bp, synthetic construct
  source 1..75: mol_type = other DNA
tgcaactacaaggggagttttattacacgttgaattttgaacccttgtttttccctaacattgaagaggaggacg

SEQ ID NO: 626635 - DNA, 75 bp, synthetic construct
  source 1..75: mol_type = other DNA
cttcggtaccgcaagaatcacgctgggcgtggatgaggattttagcctgaagaactcccagttcgattttctcca

SEQ ID NO: 626636 - DNA, 75 bp, synthetic construct
  source 1..75: mol_type = other DNA
cttttttgccaataaacagcgcatagccggtttaaaaaagtgggtgactgagaacgaagacgaactgtcgttaga

SEQ ID NO: 626637 - DNA, 75 bp, synthetic construct
  source 1..75: mol_type = other DNA
aggattttgcaaatgccccagttcagcaaatacacgttgtggtttatgaccgatcaggttgctcccgaagccggt

SEQ ID NO: 626638 - DNA, 75 bp, synthetic construct
  source 1..75: mol_type = other DNA
gcttgcgaccaattaattgatggtaagtaccgggaacagtttgtgaccgactggcttcagggggtaagcgtcaac

SEQ ID NO: 626639 - DNA, 75 bp, synthetic construct
  source 1..75: mol_type = other DNA
ctaaacggcagccgagttgtgatcaccgctgaccatggcttcctcttccaacaaaaagcacttgtagcggctgac

SEQ ID NO: 626640 - DNA, 75 bp, synthetic construct
  source 1..75: mol_type = other DNA
tttatatctatcacgataccattgatgcgattggtgataaggctgcaactgaagagaaaacgtttgaagcctgtc

SEQ ID NO: 626641 - DNA, 75 bp, synthetic construct
  source 1..75: mol_type = other DNA
ctggcgcgatagaagccaagaagcgttatatcgttggtaataacttaccttctgatgaagcctgttggaaaggct

SEQ ID NO: 626642 - DNA, 75 bp, synthetic construct
  source 1..75: mol_type = other DNA
ttcaccgggcgatgtctctcaggtctgggtgctggttctggtgaatgccggtggtgagccgtttgcggtggttca

SEQ ID NO: 626643 - DNA, 75 bp, synthetic construct
  source 1..75: mol_type = other DNA
cgcctccgccgcccgttgtttacaacgcctgcccgaaggtgagcctctgcccgatgccgggaagcgagcccgtca

SEQ ID NO: 626644 - DNA, 75 bp, synthetic construct
  source 1..75: mol_type = other DNA
atatttgtactctctatatatagatggttactatatgtatatgataatcccacttattaccctgctatattcata

SEQ ID NO: 626645 - DNA, 75 bp, synthetic construct
  source 1..75: mol_type = other DNA
gggccgtgattaccgtgtgaccttcgtcgacccgtatacagcttatggggccggattcgttcaggcgcattgtga

SEQ ID NO: 626646 - DNA, 75 bp, synthetic construct
  source 1..75: mol_type = other DNA
gagtatggcagtgagttcgggggctttttccccgtccaggttcgtttcacgccagcccacgaacgttttcacctg

SEQ ID NO: 626647 - DNA, 75 bp, synthetic construct
  source 1..75: mol_type = other DNA
atgcccgtcatggaggccatgaagcacatcaatgactggcttggcgaagaggtgatccgctttaacccttacgca

SEQ ID NO: 626648 - DNA, 75 bp, synthetic construct
  source 1..75: mol_type = other DNA
ctggtttacgccgacccaccctatgttcatagcacgcgtaaacgtagcaaaatctatcgtcatgaatattcagat

SEQ ID NO: 626649 - DNA, 75 bp, synthetic construct
  source 1..75: mol_type = other DNA
ctgcggccagaggagtggcggcaactgccctgattgtggcgcggtgatgggcgacgcaacataccaggaaacatt

SEQ ID NO: 626650 - DNA, 75 bp, synthetic construct
  source 1..75: mol_type = other DNA
tgatgggcgacgcaacataccaggaaacattcgatgaagagtatcaggttgaagttcaggaagatgatccggagg

SEQ ID NO: 626651 - DNA, 75 bp, synthetic construct
  source 1..75: mol_type = other DNA
gaactcatgtatcaaagcgttatggctttgccgctggggcaatggcttgttgaaagcgccggacacgctgaatca

SEQ ID NO: 626652 - DNA, 75 bp, synthetic construct
  source 1..75: mol_type = other DNA
atgcccgccaggttgctggcgatatttgctcgcgctttttttgatattcacggcgcaatggttgaaacgaatatg

SEQ ID NO: 626653 - DNA, 75 bp, synthetic construct
  source 1..75: mol_type = other DNA
actatgacttcggtcccaaatcgccgactgaacttatcagcatgcgggtgagcgtcaacaacgaatacggcatta

SEQ ID NO: 626654 - DNA, 75 bp, synthetic construct
  source 1..75: mol_type = other DNA
atttggcttggatgcagtgaagagggggcaggcaatgccaccgtcagtgatgttgtgacggcggtgaatagcgcg

SEQ ID NO: 626655 - DNA, 75 bp, synthetic construct
  source 1..75: mol_type = other DNA
cggacgcctctggtggcctgtgcgcttccggcactgccggatcgtggctgctgggaacggcgctggatttcacgg

SEQ ID NO: 626656 - DNA, 75 bp, synthetic construct
  source 1..75: mol_type = other DNA
ttcagcccatgaacgcacaggaatatgaagatatccgggctgccggaagtgatgaacgccgtgagctgactcacg

SEQ ID NO: 626657 - DNA, 75 bp, synthetic construct
  source 1..75: mol_type = other DNA
gattgcagtgatgaaactggtgaagcgtcagctcctgtagcaactgaaatcatgtggccgtcatatttcgagcct

SEQ ID NO: 626658 - DNA, 75 bp, synthetic construct
  source 1..75: mol_type = other DNA
gaagagaaagcgtttctgatggaatgcgcaagcacaggaaaaacggttatcactgcggaagaaggccggaaaatt

SEQ ID NO: 626659 - DNA, 75 bp, synthetic construct
  source 1..75: mol_type = other DNA
gtgctgccgggctgcgtgcccgtattgattacgaaaaagggtggtggtggtccaaatcaaaccaggacgtgatga

SEQ ID NO: 626660 - DNA, 75 bp, synthetic construct
  source 1..75: mol_type = other DNA
atgtccggattacatggtgttgaaaccattgaactgacgacaggcacggttgccgtgcagaccatctccacggca

SEQ ID NO: 626661 - DNA, 75 bp, synthetic construct
  source 1..75: mol_type = other DNA
ggtgaaaaaagaactggcggacggcagcgtcacgcacagcgggtatgacgcggcaggaaggctcacggcgcagac

SEQ ID NO: 626662 - DNA, 75 bp, synthetic construct
  source 1..75: mol_type = other DNA
cagcctgacggcgcgtctcgacagcgacggatatcccgccgactttattatccacacgctggcaatggagggcgc

SEQ ID NO: 626663 - DNA, 75 bp, synthetic construct
  source 1..75: mol_type = other DNA
tgcccgtggcgctaaatttcataccgttgccgatgaagcattgattagtgaagttatcagtaaactggtgaattt

SEQ ID NO: 626664 - DNA, 75 bp, synthetic construct
  source 1..75: mol_type = other DNA
gactacgccccctcatatcacatggaaggtttatctatggatcaggtagtcatttttaaacaaatatttgataaa

SEQ ID NO: 626665 - DNA, 75 bp, synthetic construct
  source 1..75: mol_type = other DNA
tccggcactgtatttgtggcgtaaaaatgcccccgtggacaccacaaagacaaaaacgctcgatttaggaaccgc

SEQ ID NO: 626666 - DNA, 75 bp, synthetic construct
  source 1..75: mol_type = other DNA
caggaaaaacggttatcactgcggaagaaggccggaaaattgaactcatgtatcaaagcgttatggctttgccgc

SEQ ID NO: 626667 - DNA, 75 bp, synthetic construct
  source 1..75: mol_type = other DNA
ggtaaattctgttgatgcgaaatatcaggaactgcgggcagaactccatgaagctcggaaaaacattccatcaaa

SEQ ID NO: 626668 - DNA, 75 bp, synthetic construct
  source 1..75: mol_type = other DNA
ctggatatggatatccgtagcagaactccatccagtcgtttggggttgctaatgacgtcctgcatccgcttaatc

SEQ ID NO: 626669 - DNA, 75 bp, synthetic construct
  source 1..75: mol_type = other DNA
cgggctgacggtggagcaactggccagacaggtggagccggaatacacaccggcgcgaaaagttcatttttacca

SEQ ID NO: 626670 - DNA, 75 bp, synthetic construct
  source 1..75: mol_type = other DNA
tttgaacgccagtgactttccagtttctgaggagtgttatttaaatgaaatatctattcctctttatactaaaat

SEQ ID NO: 626671 - DNA, 75 bp, synthetic construct
  source 1..75: mol_type = other DNA
tgataataaaaacatgatagcagttcaagttactacgaatgcaagtccagcaaaaattaaaaaaaaactatcgaa

SEQ ID NO: 626672 - DNA, 75 bp, synthetic construct
  source 1..75: mol_type = other DNA
taacattaaccagtgtgatgacgatggcactctttggactaatttcccacgtccccacatcaaattaaaaatcgc

SEQ ID NO: 626673 - DNA, 75 bp, synthetic construct
  source 1..75: mol_type = other DNA
ggccggtattatttttagaattttttgtgcgagaagttgcctttaagggtaagggaattgttcgttctacattac

SEQ ID NO: 626674 - DNA, 75 bp, synthetic construct
  source 1..75: mol_type = other DNA
ccgcggaaaagcgaacgcttcgtctttgctgatgctgtcttcggaacgttttgaacctctcattcgtgacctgcg

SEQ ID NO: 626675 - DNA, 75 bp, synthetic construct
  source 1..75: mol_type = other DNA
tgcagttaagtttgcgcgctcagcaattatcaatggtcggtaacgatttgcgttatgccggacgtttccccgtgt

SEQ ID NO: 626676 - DNA, 75 bp, synthetic construct
  source 1..75: mol_type = other DNA
ctgcaacaaaatgggcaagtgcaggacagcattagcacaaaactgtcttttgtggataacagctggcccgttgaa

SEQ ID NO: 626677 - DNA, 75 bp, synthetic construct
  source 1..75: mol_type = other DNA
atgaccacctatggggatggttatatctctaacaaagcacaaagttttgaagtggtggcgcaatatcaattcgac

SEQ ID NO: 626678 - DNA, 75 bp, synthetic construct
  source 1..75: mol_type = other DNA
ttgtctccaataccgtggcgttgagtaaagtgtcgggtaacgaacttctggtgtggaccgctggaaaaaagcagg

SEQ ID NO: 626679 - DNA, 75 bp, synthetic construct
  source 1..75: mol_type = other DNA
gatcccgctcagtctcgcctggcgttcgcttgccgatcatcaaagtgccgccgctaacgacattcgtcagatgat

SEQ ID NO: 626680 - DNA, 75 bp, synthetic construct
  source 1..75: mol_type = other DNA
gcgctggtgctggcgtgggcacaggagatgaatttgccgtgcaaaacgttgttgaaagggttggatgaagctatc

SEQ ID NO: 626681 - DNA, 75 bp, synthetic construct
  source 1..75: mol_type = other DNA
aagcatgttgaaggctgttaatggcatgatgctggatatgctcgccgctattgcccgaaaagattacgaagaccg

SEQ ID NO: 626682 - DNA, 75 bp, synthetic construct
  source 1..75: mol_type = other DNA
gtgaaacagcccggctagctggcgtatcaaagatgacagtaatcagagtctgtaacggcaatcataaacaggata

SEQ ID NO: 626683 - DNA, 75 bp, synthetic construct
  source 1..75: mol_type = other DNA
ttgtccgccagttttttggtcgtagtgagctgggtgtacgcctgctttcgttacgtagcgtggcagattacgtgc

SEQ ID NO: 626684 - DNA, 75 bp, synthetic construct
  source 1..75: mol_type = other DNA
gcgagcaattacagggcttgaacgatgtagattcattatgaataatcgagggataattcatatcattaccccacc

SEQ ID NO: 626685 - DNA, 75 bp, synthetic construct
  source 1..75: mol_type = other DNA
gtatagccatatcacttgttcttaatccggcatccatattacaggtcagtgctcaggcagatacaaataagttaa

SEQ ID NO: 626686 - DNA, 75 bp, synthetic construct
  source 1..75: mol_type = other DNA
ggaagtcacatatagtggctttgccggaaataacgcagcatcagtagtatctgttggtgatgcgggtaaagagcg

SEQ ID NO: 626687 - DNA, 75 bp, synthetic construct
  source 1..75: mol_type = other DNA
ccgcaggagattttccgcaacaatcttgatgcgttagtcgatgaaccgtgggggggtgcccctattaagttgtca

SEQ ID NO: 626688 - DNA, 75 bp, synthetic construct
  source 1..75: mol_type = other DNA
atctgtcaaaagcggagagtcagtgggatgagatgatgcgaaccgctggttcgctgaagttgggtacaattcatg

SEQ ID NO: 626689 - DNA, 75 bp, synthetic construct
  source 1..75: mol_type = other DNA
gggattgcccttcaactcacaaccgcccgctttctgggaaccttcttgcccgatctcatgcaaataccgcccggt

SEQ ID NO: 626690 - DNA, 75 bp, synthetic construct
  source 1..75: mol_type = other DNA
cagcagcgaaaaatggcccgcgttcctgcaaatggcggttgagaagaaacgcaccatagtgatctgcggtgaaac

SEQ ID NO: 626691 - DNA, 75 bp, synthetic construct
  source 1..75: mol_type = other DNA
catgagtgtaggaactccggtggtggcaataaccgctacttcaaggaggttgcccctatggctacgaccctcacc

SEQ ID NO: 626692 - DNA, 75 bp, synthetic construct
  source 1..75: mol_type = other DNA
atggcaaaaaatccacgctattaccataccgctgtacataaaaacataacccgcgaccgcttcatccgctcggtt

SEQ ID NO: 626693 - DNA, 75 bp, synthetic construct
  source 1..75: mol_type = other DNA
acattatttttggcctcttctggctgctgggataccagttttccccccggcttgccgatgccggtgaagcggtat

SEQ ID NO: 626694 - DNA, 75 bp, synthetic construct
  source 1..75: mol_type = other DNA
cccacggtttcgacgtatggggaaacaagtgtgattcgccaaccgtagcattaagcccggcccgagttactgatg

SEQ ID NO: 626695 - DNA, 75 bp, synthetic construct
  source 1..75: mol_type = other DNA
acagcctggtgttgataatgcctggcgggaatcccgtggtgatattggtaaaggaatggagagtgtagtggcaca

SEQ ID NO: 626696 - DNA, 75 bp, synthetic construct
  source 1..75: mol_type = other DNA
aaaattcttggtgttggtggaggattaggcgttagaggtggtggtcgggctggtattgattgggaagataatgat

SEQ ID NO: 626697 - DNA, 75 bp, synthetic construct
  source 1..75: mol_type = other DNA
tgtttatggagaaaattgacaccggaaataaatttaaaactattttacttcagtaaaaagaaagtaggagagctt

SEQ ID NO: 626698 - DNA, 75 bp, synthetic construct
  source 1..75: mol_type = other DNA
atccactgtaacttgccctttatgtaatggaaaaggcagtttagcgggagaagattgtccgatctgtaatggaat

SEQ ID NO: 626699 - DNA, 75 bp, synthetic construct
  source 1..75: mol_type = other DNA
atccttatttcagaaatgagataaaggaacttacagaattatgcgaaacagtcgataaaacaatagaacaattag

SEQ ID NO: 626700 - DNA, 75 bp, synthetic construct
  source 1..75: mol_type = other DNA
ccggcggtttccgtaattatggttatcactacgttgatgaaccgggtaaagacacggcgaatatgcagcgcggct

SEQ ID NO: 626701 - DNA, 75 bp, synthetic construct
  source 1..75: mol_type = other DNA
gctcgcgagaatatccagttgacgccagtcagacagtgccgcgaacgtttccgagcggctattggtctggtcgag

SEQ ID NO: 626702 - DNA, 75 bp, synthetic construct
  source 1..75: mol_type = other DNA
atactacgccgtatgagttccgccccctggctcgctgtgaccgaaacgcacgcgttagcctgctgccacctgatg

SEQ ID NO: 626703 - DNA, 75 bp, synthetic construct
  source 1..75: mol_type = other DNA
atgggttcgactgttttgttcaaagagggggcgctgacggtaaataaaggtgggatcagtcagggtgaactgaca

SEQ ID NO: 626704 - DNA, 75 bp, synthetic construct
  source 1..75: mol_type = other DNA
ttaaatcaaaatattatatttggaacaggtttggatttgcgtgaagattattcgcagtatttccctggttggctt

SEQ ID NO: 626705 - DNA, 75 bp, synthetic construct
  source 1..75: mol_type = other DNA
tttccctagggcgaagtattcatatatggcaacaattaacaggattaatacaaaaacgatcaatgccagcatctt

SEQ ID NO: 626706 - DNA, 75 bp, synthetic construct
  source 1..75: mol_type = other DNA
gctcttaagatttttataaaaaatgagttgtcattaaactcttctatttgccttattttcttgattattattgcc

SEQ ID NO: 626707 - DNA, 75 bp, synthetic construct
  source 1..75: mol_type = other DNA
tgcgtggtgtcgaaagccgcgttccagggcgtggaagaccagtacaatctgccgatggatacctgggacacatcc

SEQ ID NO: 626708 - DNA, 75 bp, synthetic construct
  source 1..75: mol_type = other DNA
tgaaagagaaagacgaaattatagatgaaatatcattcgaagaaataaaaacaaaatatgagacaggaaaaatat

SEQ ID NO: 626709 - DNA, 75 bp, synthetic construct
  source 1..75: mol_type = other DNA
taagtttatctgtataccttccgtgatggattcagacccttcattcacaggcacggacgacttgaagaaggaaag

SEQ ID NO: 626710 - DNA, 75 bp, synthetic construct
  source 1..75: mol_type = other DNA
gcaacgcgcaggatcgctggcatcttggcgtgatggcaggttacgctaatcagcacagtaatactcagagtaatc

SEQ ID NO: 626711 - DNA, 75 bp, synthetic construct
  source 1..75: mol_type = other DNA
gcatacaacacaaagaccgaggagttttattacaatgcagatggctccgcgatgaccttgcgggagtggcgagcg

SEQ ID NO: 626712 - DNA, 75 bp, synthetic construct
  source 1..75: mol_type = other DNA
acgtcagattatccagcccggtgacgcgattcattgccgacgagctgagatagaaatgtggctcaacaagaagcc

SEQ ID NO: 626713 - DNA, 75 bp, synthetic construct
  source 1..75: mol_type = other DNA
ataattgagcaaaaaaaggagtttttgcataaaaataatttggtaatcattcgttgccatgatgtcatggatcga

SEQ ID NO: 626714 - DNA, 75 bp, synthetic construct
  source 1..75: mol_type = other DNA
ggttgccgtttcgcagccaactgttgataaaatcatttttggtgctgaagcgacacgtattaataaaattggtac

SEQ ID NO: 626715 - DNA, 75 bp, synthetic construct
  source 1..75: mol_type = other DNA
ttagaattggatgttacaaatattgttgcttctgatgatatgtaccatgtttatgctatagaacctgacagtgcc

SEQ ID NO: 626716 - DNA, 75 bp, synthetic construct
  source 1..75: mol_type = other DNA
cagaactgttgggataggggctggctgtttttgtgatccaatacagtatatggaatatcaggctgattattatat

SEQ ID NO: 626717 - DNA, 75 bp, synthetic construct
  source 1..75: mol_type = other DNA
ggaggtgcattatcagttcctcgaaaacgatgatttcagtttcggcctgaccggcggtttccgtaattatggtta

SEQ ID NO: 626718 - DNA, 75 bp, synthetic construct
  source 1..75: mol_type = other DNA
aaatcagaaaatatgaacaacacattttactgctgtgaactttgttgtaatcctgcctgtgctggatgttattaa

SEQ ID NO: 626719 - DNA, 75 bp, synthetic construct
  source 1..75: mol_type = other DNA
ggtatgcgacgtcttgcaagctatttagatctccattcaggctatccctgtattcattttacagggggctgtgat

SEQ ID NO: 626720 - DNA, 75 bp, synthetic construct
  source 1..75: mol_type = other DNA
aattttcaattcttccaggcggttcgatttgcgaattattctccgcagaattagaagcgtattggaatagcggcg

SEQ ID NO: 626721 - DNA, 75 bp, synthetic construct
  source 1..75: mol_type = other DNA
gatattgcgagaaatggttttgaggtgcgatgtaaagagacgggcattcaattttctattcttccgggcggctct

SEQ ID NO: 626722 - DNA, 75 bp, synthetic construct
  source 1..75: mol_type = other DNA
aaacgcaatatcaaaacgatccgtgcacataaatttaatgtgatgtcgaaactgggcgtcagttctgatgcaggg

SEQ ID NO: 626723 - DNA, 75 bp, synthetic construct
  source 1..75: mol_type = other DNA
agcttccacgacgtgattgatctgttttccctccgcagtcccctggtggccacactcgatgacgtgctggccagt

SEQ ID NO: 626724 - DNA, 75 bp, synthetic construct
  source 1..75: mol_type = other DNA
gcctttgctccctatgccgtgaatataaggacacgatttcatagtattaatcatcttgcgtgctttattcgcgcc

SEQ ID NO: 626725 - DNA, 75 bp, synthetic construct
  source 1..75: mol_type = other DNA
gacgataaacactcctacgcttccgttaacgatctggttttgcagaatattatttattgcccggagcggctgaag

SEQ ID NO: 626726 - DNA, 75 bp, synthetic construct
  source 1..75: mol_type = other DNA
gaattttattgatgaacagcagttaacgaatagtgatattccgaagaaaagcaccgtactaaatgaagataaaaa

SEQ ID NO: 626727 - DNA, 75 bp, synthetic construct
  source 1..75: mol_type = other DNA
aggtgattgccagcacacaaccggcacaaaccaccgtatatctggagcagccagaagccatcgattacaaacgtt

SEQ ID NO: 626728 - DNA, 75 bp, synthetic construct
  source 1..75: mol_type = other DNA
aagcctttttgatcttccttaccacggtgatgatggtgtcactgatgatggccgcggatccctccctgctacgcc

SEQ ID NO: 626729 - DNA, 75 bp, synthetic construct
  source 1..75: mol_type = other DNA
gtgagaaaggtggggttggtaaaacaacgtcctgttatcacattgccgaaggacttagtcgttttcatgaaaaac

SEQ ID NO: 626730 - DNA, 75 bp, synthetic construct
  source 1..75: mol_type = other DNA
agcataagtgcggcagcagaagaaggcctgaagtgtatcagtgaactgtacgccatcgagaatgaaatacgggga

SEQ ID NO: 626731 - DNA, 75 bp, synthetic construct
  source 1..75: mol_type = other DNA
ctctcgtgcaacagcaaacgctccgcttaactgccaccgttattgttggcaaaaattgtgacgcgttaaacgcac

SEQ ID NO: 626732 - DNA, 75 bp, synthetic construct
  source 1..75: mol_type = other DNA
cctcattcaacatgatacatttgatggtatcgtttattattccccctctattttttggggcgacttggttaaaaa

SEQ ID NO: 626733 - DNA, 75 bp, synthetic construct
  source 1..75: mol_type = other DNA
tcatctcgccattcttcacataatttccccggaaaattactagggtatatggttcaatcaatcccgatccttggg

SEQ ID NO: 626734 - DNA, 75 bp, synthetic construct
  source 1..75: mol_type = other DNA
atcagaccgggagaagcagattttaaatatggtgcatctccattacaggcaactctagggctggagtttggcgca

SEQ ID NO: 626735 - DNA, 75 bp, synthetic construct
  source 1..75: mol_type = other DNA
caacccggcaaacacgggaaatatcgtagacagtggagacaaatactacatcaagcctgatgcggtatacctcgg

SEQ ID NO: 626736 - DNA, 75 bp, synthetic construct
  source 1..75: mol_type = other DNA
cacgctgttattaaaagaacttgaacatttaacacaagaaaatcagcgtctcttgattcaactccaggaacgccc

SEQ ID NO: 626737 - DNA, 75 bp, synthetic construct
  source 1..75: mol_type = other DNA
attgcaagagcacttgttggtatggtttatgctttgcctgaatggtctaagcggacttcaacattatctgaagat

SEQ ID NO: 626738 - DNA, 75 bp, synthetic construct
  source 1..75: mol_type = other DNA
gttttgattttgcgccgggcgttaacttccagccctggtacgccttccacgctgggtttgctcaggaatctggtc

SEQ ID NO: 626739 - DNA, 75 bp, synthetic construct
  source 1..75: mol_type = other DNA
ggctaaccagtatgcgcagatgctgggcattgacgaaaataccctgatggctatgcgtcgcggagtggggcagtt

SEQ ID NO: 626740 - DNA, 75 bp, synthetic construct
  source 1..75: mol_type = other DNA
cacatgattcctgctgttataaatagaatacataatgctaaagttaataatataaaattgattgaaatttggggg

SEQ ID NO: 626741 - DNA, 75 bp, synthetic construct
  source 1..75: mol_type = other DNA
ccctatttggggaatatgttaaatgattttgctggcgtggatcagcaacgagttatgcattgtcgtaaagcattt

SEQ ID NO: 626742 - DNA, 75 bp, synthetic construct
  source 1..75: mol_type = other DNA
aattatcaccacgctgattctggcgatcggattactctatgacgattaccagacgtggaaagagggcggaaaaag

SEQ ID NO: 626743 - DNA, 75 bp, synthetic construct
  source 1..75: mol_type = other DNA
cgaggctgcccgtttgactgttgaccgtcaaaagggcgtgaattcacagttaacccagcaactccccgcaggacc

SEQ ID NO: 626744 - DNA, 75 bp, synthetic construct
  source 1..75: mol_type = other DNA
acagcctgcggcggcgcatcctcgacaacttcccgaagattgaagagactctgaccaaagttattaagggcgtga

SEQ ID NO: 626745 - DNA, 75 bp, synthetic construct
  source 1..75: mol_type = other DNA
agctatccggtttatcgttgacaacctggcacgttcgcaactggacgagcgcattgtggcaatggttgagacggc

SEQ ID NO: 626746 - DNA, 75 bp, synthetic construct
  source 1..75: mol_type = other DNA
tataaatgagatttcatccattctctccattaataaattcaagttaaataaatcgaagtatttatataaagaagg

SEQ ID NO: 626747 - DNA, 75 bp, synthetic construct
  source 1..75: mol_type = other DNA
tctggcttaacgatacgttaattgccgaaaagggctggccggaatatcgcttcactttgccacaatctttgctga

SEQ ID NO: 626748 - DNA, 75 bp, synthetic construct
  source 1..75: mol_type = other DNA
gctggactttgaaaccattctcgccgaacgcaaggcgacactgatttccctttacacaccaaagacccgaaaccg

SEQ ID NO: 626749 - DNA, 75 bp, synthetic construct
  source 1..75: mol_type = other DNA
gctcgtcttgatatcgccgaaaaacgtattccacaggatggaagaattagtttgcgtatcgggcgacgtaacata

SEQ ID NO: 626750 - DNA, 75 bp, synthetic construct
  source 1..75: mol_type = other DNA
ccgtgggtaagtggttggcttgattcacaggaaaagtttttggtcgctcttgctgataagtcaggtatcgatata

SEQ ID NO: 626751 - DNA, 75 bp, synthetic construct
  source 1..75: mol_type = other DNA
ggtgtccagctaaacattgtaaaaccagatattcatcctacatcaggtaattattttttacagatattccctctg

SEQ ID NO: 626752 - DNA, 75 bp, synthetic construct
  source 1..75: mol_type = other DNA
acgcctgacggatgaactgcgtgctcagggttacccctttaacgtaaaaccgtggcggcaagcctgcgccgtcag

SEQ ID NO: 626753 - DNA, 75 bp, synthetic construct
  source 1..75: mol_type = other DNA
tgcgacagcgttgtcctcgcggcttttacccggtcaaaacagcgttacggtgccccacgcctgacggatgaactg

SEQ ID NO: 626754 - DNA, 75 bp, synthetic construct
  source 1..75: mol_type = other DNA
gaactccagggggggggcgcttttttgtcctgtcgcaggaacgcccggcggaaagtgatattttcaccatcgaat

SEQ ID NO: 626755 - DNA, 75 bp, synthetic construct
  source 1..75: mol_type = other DNA
aatgttcagaattgttgccgtttatgcactcaagatttaaatattgacaatatatcttttgaaattgaaggaaat

SEQ ID NO: 626756 - DNA, 75 bp, synthetic construct
  source 1..75: mol_type = other DNA
agcacctcatatttattccactagcattgatgataataattatcatcatattcattttaaacaaatgacttctgg

SEQ ID NO: 626757 - DNA, 75 bp, synthetic construct
  source 1..75: mol_type = other DNA
ctcatttattatgagcactattacacttaaaaaagcagaagcaaatataaaagagaaaattaaaaaatggaataa

SEQ ID NO: 626758 - DNA, 75 bp, synthetic construct
  source 1..75: mol_type = other DNA
gtgatctatctggtgatggcctacccgaaaagcaccaaagacagcctgacggacgcggaaaaagccgcgctgaag

SEQ ID NO: 626759 - DNA, 75 bp, synthetic construct
  source 1..75: mol_type = other DNA
ctcgcgaacatccatattacaaatttgaaaaaccgagaggcatagaaaatataaaaagaattgttccattaaatg

SEQ ID NO: 626760 - DNA, 75 bp, synthetic construct
  source 1..75: mol_type = other DNA
tgatattacaggatcaattctcagcgatgaaattttagagtcaaccctcatagagggtagatttgattctgaaat

SEQ ID NO: 626761 - DNA, 75 bp, synthetic construct
  source 1..75: mol_type = other DNA
tcatggttgtttcaactatctcagttaaagagcccggcacaggcatttttagagcgcttcttgcagaattgaaat

SEQ ID NO: 626762 - DNA, 75 bp, synthetic construct
  source 1..75: mol_type = other DNA
cgatcggtttagaagttatataagagcgggtatctatcaaaaaaatagcagtgatccagttcagttgttggcagt

SEQ ID NO: 626763 - DNA, 75 bp, synthetic construct
  source 1..75: mol_type = other DNA
ttgagtcgccggacaaaggcgatatcatccagaaaaccggcgggctgcgaaaagtcaggatggcgacgggcaatc

SEQ ID NO: 626764 - DNA, 75 bp, synthetic construct
  source 1..75: mol_type = other DNA
aggttcagaaatattacatgatattgatttcaaagaaattaataactttttcggctgtgaagtattcttgggtaa

SEQ ID NO: 626765 - DNA, 75 bp, synthetic construct
  source 1..75: mol_type = other DNA
ttgcaccggaagccgtcagccattcactggcactggcggcgtcactggatgcgcaggggtacagcgttaacgaca

SEQ ID NO: 626766 - DNA, 75 bp, synthetic construct
  source 1..75: mol_type = other DNA
cctctttttaccaaaaccagtacacgccgaagtaattcagtatctgcgcgtaatggggctgataggagttaatcc

SEQ ID NO: 626767 - DNA, 75 bp, synthetic construct
  source 1..75: mol_type = other DNA
actatttgtgcagttatttctggtgcagaaagttgggaagatatagaggatttcggggaaacacatctcgatttc

SEQ ID NO: 626768 - DNA, 75 bp, synthetic construct
  source 1..75: mol_type = other DNA
acttgttcagggagaaacttggttatcttgtgaaaggaatggttaaagcaaggtgcttccaattattagtggagt

SEQ ID NO: 626769 - DNA, 75 bp, synthetic construct
  source 1..75: mol_type = other DNA
gcctgctggccgttattccggcacttaaccttgccaccagtgatgtggcggctgtagtcggccttgtgatgacgg

SEQ ID NO: 626770 - DNA, 75 bp, synthetic construct
  source 1..75: mol_type = other DNA
agagcggaacgtctggcgctggtcgcctgcctgctggctgttattccggcgcttaaccttgccaccagtgatgca

SEQ ID NO: 626771 - DNA, 75 bp, synthetic construct
  source 1..75: mol_type = other DNA
catgcctgaaaagctgacgctgaccaaatccaccctttatctgcctgataccgcaaaagaagagttagagaagaa

SEQ ID NO: 626772 - DNA, 75 bp, synthetic construct
  source 1..75: mol_type = other DNA
tggagaaatacaaaaaagacggcaccatgcctgaaaagctgacgctgaccaaatccaccctttatctgcctgata

SEQ ID NO: 626773 - DNA, 75 bp, synthetic construct
  source 1..75: mol_type = other DNA
atccgcttgatgacatcattattgatccctttaaacggcgtccgcctgaagacgctatcgccgtttcagaaacca

SEQ ID NO: 626774 - DNA, 75 bp, synthetic construct
  source 1..75: mol_type = other DNA
caagacggatgagaaatccaatgagattacagccattcctgaacttcttaacatgatggatattaaaggaaaaat

SEQ ID NO: 626775 - DNA, 75 bp, synthetic construct
  source 1..75: mol_type = other DNA
cgcgatgatgtttatcggggattcgttatctgacttagggaagatgctacatgagccagaccgcattactcgcgc

SEQ ID NO: 626776 - DNA, 75 bp, synthetic construct
  source 1..75: mol_type = other DNA
ttacagcgggagttatgccgttgctgccgcagaattgctgaaaggcatcccgcaaacaacggcagtgcataccgc

SEQ ID NO: 626777 - DNA, 75 bp, synthetic construct
  source 1..75: mol_type = other DNA
gggggggtaatacatcgccctcattaacctggtctggtgctccagaaggcaccaaaagctttgccgtaactgtgt

SEQ ID NO: 626778 - DNA, 75 bp, synthetic construct
  source 1..75: mol_type = other DNA
cggtgacagacagtgccatccaccgttacagaccgaaaattgtgctggcggatcatgctgttgatgcagacggtg

SEQ ID NO: 626779 - DNA, 75 bp, synthetic construct
  source 1..75: mol_type = other DNA
tctgcactttttgaacaggcactggcgggccatattggtattcgcagtgggcgtattgcgcgtgaggcggcaact

SEQ ID NO: 626780 - DNA, 75 bp, synthetic construct
  source 1..75: mol_type = other DNA
agcctttcgccgtcgttcaggtgcaacatatcttcacgcctgtcgctatcagtcacacgctggcgcttgccgcga

SEQ ID NO: 626781 - DNA, 75 bp, synthetic construct
  source 1..75: mol_type = other DNA
gcaatggcaagttgcatctaatagtattccttatctgacgcgtaaagggcagattcgctacaccactgctatggg

SEQ ID NO: 626782 - DNA, 75 bp, synthetic construct
  source 1..75: mol_type = other DNA
cgttttgaatctaccggtagccagctcactttcgctggctaccgtttctctgataaaaactttgtgtcgatgaat

SEQ ID NO: 626783 - DNA, 75 bp, synthetic construct
  source 1..75: mol_type = other DNA
acaagatacattcgagtagtgatgattggccagaaaaattaatagatatagccacaatttttaataaattcgatg

SEQ ID NO: 626784 - DNA, 75 bp, synthetic construct
  source 1..75: mol_type = other DNA
atgaaagaaagccatttacaaggtgcacatacccatagtgtgagtgcatataaccatagcgcaggcgcacatagc

SEQ ID NO: 626785 - DNA, 75 bp, synthetic construct
  source 1..75: mol_type = other DNA
tcaccaatgctttgcaaaatataattgaatatttaaaaataccaatatggttatttttttcttttttattgatag

SEQ ID NO: 626786 - DNA, 75 bp, synthetic construct
  source 1..75: mol_type = other DNA
tgttaaccgcttaccctgctgccaaccttaaccgtgatgataccggtgcgccaaaaactgtggtgctgggtggag

SEQ ID NO: 626787 - DNA, 75 bp, synthetic construct
  source 1..75: mol_type = other DNA
ggagtttttactggatgaacagaacggggatgtcacccggctggttctggcaccgcgtgacggctttatcgttcc

SEQ ID NO: 626788 - DNA, 75 bp, synthetic construct
  source 1..75: mol_type = other DNA
gaagccagtgtttcgtatgaagaaatatttattctggcaaatgataaagacataaatactaatgcgtctcccgat

SEQ ID NO: 626789 - DNA, 75 bp, synthetic construct
  source 1..75: mol_type = other DNA
aaaatacagggtattaatcacatcatgttttctagttgctgtaagtacaattatttctctttactttaaccactc

SEQ ID NO: 626790 - DNA, 75 bp, synthetic construct
  source 1..75: mol_type = other DNA
cttgaagcgcgtctgcagttaaaactactcaatcgcacaacccggagcctgacactgacagaagctggcgaacgc

SEQ ID NO: 626791 - DNA, 75 bp, synthetic construct
  source 1..75: mol_type = other DNA
gttggtgtgacttttgttcaggataataaccctgacattttccccggagaaggtgatgtgaagcgggtggcggat

SEQ ID NO: 626792 - DNA, 75 bp, synthetic construct
  source 1..75: mol_type = other DNA
ggatatcagccagcgcctgcccggttcgcagccgggcgtgaatgaaaccaccctgaatgccattgcgtatgcact

SEQ ID NO: 626793 - DNA, 75 bp, synthetic construct
  source 1..75: mol_type = other DNA
gtaacgtacggatgttatttgtcgcctcgacgttaatgtggacctgcaacaccatgtacattattgatatgccgt

SEQ ID NO: 626794 - DNA, 75 bp, synthetic construct
  source 1..75: mol_type = other DNA
ggcactggcagcgtcactggatgaacagggatacagcgtcagtgacatcatccatatcctgatggcggaaggagg

SEQ ID NO: 626795 - DNA, 75 bp, synthetic construct
  source 1..75: mol_type = other DNA
ggcagataggcattgttcaggcccccatacagcacattgttgcttctggcagtttggatggcttcaggattaaat

SEQ ID NO: 626796 - DNA, 75 bp, synthetic construct
  source 1..75: mol_type = other DNA
tgatgctggtctttgtcaccggattggcggcctatggcaataacggttttgcttggtttctgatctgtctgccgt

SEQ ID NO: 626797 - DNA, 75 bp, synthetic construct
  source 1..75: mol_type = other DNA
accatagacagtaaaggaacattgacggtattttacctagaatctaaaatgaccagggagtttgatagcggttct

SEQ ID NO: 626798 - DNA, 75 bp, synthetic construct
  source 1..75: mol_type = other DNA
aagttggtgagctaatatcatattgtatagcaattcattttttaaaagcgtcacaattagtctcaaaaatggctc

SEQ ID NO: 626799 - DNA, 75 bp, synthetic construct
  source 1..75: mol_type = other DNA
taagattcaactcatcatctaataagttaacatcactacttacatcagaagaagtgatacttacctatcccgctg

SEQ ID NO: 626800 - DNA, 75 bp, synthetic construct
  source 1..75: mol_type = other DNA
atgctttctcaaattatgctcaacatcctactcaggaagggtgtagctatttctatgacaatagatattttaatt

SEQ ID NO: 626801 - DNA, 75 bp, synthetic construct
  source 1..75: mol_type = other DNA
ttatgctcaacaccctactcaggaaggatgtagttatttctatgataataaatactttaattccgtagacatgct

SEQ ID NO: 626802 - DNA, 75 bp, synthetic construct
  source 1..75: mol_type = other DNA
cacatacccataccgtgggggcacatagccattctctgggtggtgcacatacccataccgtgggggcacatagcc

SEQ ID NO: 626803 - DNA, 75 bp, synthetic construct
  source 1..75: mol_type = other DNA
atctggggaaacgtatctcagcaattgggtaataacagttacagagacacccaaggtattttgggtgtgaaatat

SEQ ID NO: 626804 - DNA, 75 bp, synthetic construct
  source 1..75: mol_type = other DNA
ctcgtcgatggttgaacaggcggtgtatgtctcgcgtgctggattttacgtttcgacgctgccgaccttgtttac

SEQ ID NO: 626805 - DNA, 75 bp, synthetic construct
  source 1..75: mol_type = other DNA
tggcgttaacccgcagacggaaagtgcagacagctctgatacccgaattaatcaactggagcagggaacaggtga

SEQ ID NO: 626806 - DNA, 75 bp, synthetic construct
  source 1..75: mol_type = other DNA
agcgggttacagggaaaatgggcagttattccctgtaaattcaggaactcctcaggggggaataatttctcctgt

SEQ ID NO: 626807 - DNA, 75 bp, synthetic construct
  source 1..75: mol_type = other DNA
gtaaaactgaccggctggaaattgcaggccatgcgtctggtattacctatgttgcagtgacaaatgagggaggct

SEQ ID NO: 626808 - DNA, 75 bp, synthetic construct
  source 1..75: mol_type = other DNA
atgacccaatgttcacaggggggggccggagaattacctacggtaaaggaaaaaacatgcaaattgtctttttct

SEQ ID NO: 626809 - DNA, 75 bp, synthetic construct
  source 1..75: mol_type = other DNA
gaccaacggggtgttgcaggctaatgtggcgtttgataaggcgcagctgaactgtcagaacatggctaaacggat

SEQ ID NO: 626810 - DNA, 75 bp, synthetic construct
  source 1..75: mol_type = other DNA
ggtgttatgcagtgtaccggcattttctgtccgggccgggctggatttttctgccggtgcgaatgatatcggcta

SEQ ID NO: 626811 - DNA, 75 bp, synthetic construct
  source 1..75: mol_type = other DNA
aaaaaaatctgcagacgaaagagagtcttcgctcgctcaatatcactactgacgaattgatgaataccacaggtc

SEQ ID NO: 626812 - DNA, 75 bp, synthetic construct
  source 1..75: mol_type = other DNA
gaacggggtgacggatggttttaaaaacctgatgggggatgtgatacagggggcgacgggggcggtggccagtct

SEQ ID NO: 626813 - DNA, 75 bp, synthetic construct
  source 1..75: mol_type = other DNA
gaccaacggggtgttgcaggccaatgtggcctttgataaggcgcaactgagttgccagaacatggccaaacggat

SEQ ID NO: 626814 - DNA, 75 bp, synthetic construct
  source 1..75: mol_type = other DNA
cctgcgattcagccggcgcaggattttgcacaggccggctttaatatcatgaacggtctgccggcaaccagtacg

SEQ ID NO: 626815 - DNA, 75 bp, synthetic construct
  source 1..75: mol_type = other DNA
gcacaaactgcaaggacggaaaaagctcattcaaatctggtttgagcagcggggccgatgccccatatgtgatga

SEQ ID NO: 626816 - DNA, 75 bp, synthetic construct
  source 1..75: mol_type = other DNA
caatatgcacggcgataacctggcccgcctggtggaggtgaagtttccgggggatgttctttctcgggagcagta

SEQ ID NO: 626817 - DNA, 75 bp, synthetic construct
  source 1..75: mol_type = other DNA
gcgcggcttgagtctgggctcgatgagcccaattggctaccaaacgatgcactagcgcgtttgggactaactgaa

SEQ ID NO: 626818 - DNA, 75 bp, synthetic construct
  source 1..75: mol_type = other DNA
ggagtctggtatatctcctcagattaattatggaggtaaggttgatttatccaatactgtgaaaggcaaggggac

SEQ ID NO: 626819 - DNA, 75 bp, synthetic construct
  source 1..75: mol_type = other DNA
actgataatttaagaaaggagtcatatcctctgaaaagaaaatgtcccacaggtacagatagagttgctgcttat

SEQ ID NO: 626820 - DNA, 75 bp, synthetic construct
  source 1..75: mol_type = other DNA
ggagtgagaacggccacggcgtggtgttcccggctgaactggtgcggctgctggacaggctggaggaagaaatcc

SEQ ID NO: 626821 - DNA, 75 bp, synthetic construct
  source 1..75: mol_type = other DNA
cgcctggtggaggtgaagtttccgggggatgttctttctcgggatcagtacgacgaatatatgcggattgtcggt

SEQ ID NO: 626822 - DNA, 75 bp, synthetic construct
  source 1..75: mol_type = other DNA
cacggcgcaactggacttcgccagtaaagaacaaacggaagaacagtatcgccctaacggtgatgaatctcatgc

SEQ ID NO: 626823 - DNA, 75 bp, synthetic construct
  source 1..75: mol_type = other DNA
aacccagtccaataccagcgggcgcgatcttaatgacgctcagttgaagtcgaaggccgtattcagcggcgtatt

SEQ ID NO: 626824 - DNA, 75 bp, synthetic construct
  source 1..75: mol_type = other DNA
atccgggcggcgtaccgggggcgttgtcgaatcaaccggcacctgcgaataacgcaccaatcagcacgcctccgg

SEQ ID NO: 626825 - DNA, 75 bp, synthetic construct
  source 1..75: mol_type = other DNA
caccccaaatacagggggagaaacgtgtacgatttaactaatctggtggaatcgctgaacaatttagcgccaaat

SEQ ID NO: 626826 - DNA, 75 bp, synthetic construct
  source 1..75: mol_type = other DNA
gaatgccggtggtgagccgtttgcggtggttcaggtacagcggcggtttgcaccggaagcagtcagccattcact

SEQ ID NO: 626827 - DNA, 75 bp, synthetic construct
  source 1..75: mol_type = other DNA
ctcagctcaacggtaacgacgccaccgcgaataacagtggaaaaaccactgttgatggaaaagattccacgggta

SEQ ID NO: 626828 - DNA, 75 bp, synthetic construct
  source 1..75: mol_type = other DNA
tgccagtaatgatggtttgactgttttctggggcgacaagaaagaggtcgaacatatcgtgcaggagacctggga

SEQ ID NO: 626829 - DNA, 75 bp, synthetic construct
  source 1..75: mol_type = other DNA
cttaagtgcctgaatgatcactatgacaattgcaggctcacaatccgccgtgccgggtccgatgggttaagtgtt

SEQ ID NO: 626830 - DNA, 75 bp, synthetic construct
  source 1..75: mol_type = other DNA
cgtatgccgtcgctgcggtatttcccgccccacattacgtaaatggtggcgcagatatctggctcagggcatcgc

SEQ ID NO: 626831 - DNA, 75 bp, synthetic construct
  source 1..75: mol_type = other DNA
ctgcaaaacatcctgcgtgcgggtatgcgcgcgccggaccataagtccatgcaaccgtggcatttttttgttgat

SEQ ID NO: 626832 - DNA, 75 bp, synthetic construct
  source 1..75: mol_type = other DNA
aataaaatttcttaacccgcgaactagaaataaggtagtgcatgaagaaattaaggaaagcataaaaaaagaggg

SEQ ID NO: 626833 - DNA, 75 bp, synthetic construct
  source 1..75: mol_type = other DNA
gatttcagagcaacaatcccgctggcgattggtcattcgggctccgtggtttattgcgatccgccatacctgcca

SEQ ID NO: 626834 - DNA, 75 bp, synthetic construct
  source 1..75: mol_type = other DNA
tagtggcagacggcgtactgatccgctggcagggcaaaggcacctttgtacaaagccagaaagttgaaaacgccc

SEQ ID NO: 626835 - DNA, 75 bp, synthetic construct
  source 1..75: mol_type = other DNA
tattaacagggagtgtcgatgaaattaaagctggttttaacatacatagtacgcttgctaaaagaataataaaat

SEQ ID NO: 626836 - DNA, 75 bp, synthetic construct
  source 1..75: mol_type = other DNA
gttatgcctggcggttggtctgatcgcggttcatatgcggctggttttttctcaatatattctactgctgagcga

SEQ ID NO: 626837 - DNA, 75 bp, synthetic construct
  source 1..75: mol_type = other DNA
ccaggaaactacgaacttgatgtttatgtaaaccaccagtggcgtggaaaacaagatatcatgatcccagagtca

SEQ ID NO: 626838 - DNA, 75 bp, synthetic construct
  source 1..75: mol_type = other DNA
ctgcaattattattttgtattcttttccaggttatgctgaagaaacttttgatacacactttatgatcggcggca

SEQ ID NO: 626839 - DNA, 75 bp, synthetic construct
  source 1..75: mol_type = other DNA
cgttcgtaaaaaaacctctggtcattgcatcttccctgatgctggcgtccggtcctgttctggctgatgatgtga

SEQ ID NO: 626840 - DNA, 75 bp, synthetic construct
  source 1..75: mol_type = other DNA
aagtaacgaagacaatattatccgaatcgtctatggttctggaaccagcacgcataacgttgatttccttgaagc

SEQ ID NO: 626841 - DNA, 75 bp, synthetic construct
  source 1..75: mol_type = other DNA
gcatggctgctgccgagttgtcatcctgcgtgaacttcctcaagcagaacgccgccgactcgcctgatacaacct

SEQ ID NO: 626842 - DNA, 75 bp, synthetic construct
  source 1..75: mol_type = other DNA
atgactaaaaccgagtttgaaaatgaaacgtggcgaatgaaaggcttgcttcttggggcgctaatccgccgcctt

SEQ ID NO: 626843 - DNA, 75 bp, synthetic construct
  source 1..75: mol_type = other DNA
aaacatggcgaatgaagggcttgcttcttggggcgctgattcgccgccttgaggaagataaggctggcgagtcgc

SEQ ID NO: 626844 - DNA, 75 bp, synthetic construct
  source 1..75: mol_type = other DNA
ttttggatactgttttctcggcgaaaagcatcaatggtgagaaatctcattcttttatatcgtataaattagtta

SEQ ID NO: 626845 - DNA, 75 bp, synthetic construct
  source 1..75: mol_type = other DNA
tcactcgaatgctggaggtctctctgttggttggagggatgattgcttctaatgcaattttgccaggtatgggat

SEQ ID NO: 626846 - DNA, 75 bp, synthetic construct
  source 1..75: mol_type = other DNA
atattatggtgctgatgaatatttatatcccggattggcagagaaaaagcttttttcatgcactatttttgcaaa

SEQ ID NO: 626847 - DNA, 75 bp, synthetic construct
  source 1..75: mol_type = other DNA
gtcagcgtggtgctgcgggagccttcggcagaggcctggtatctgtggcaggaagtgctcaatggtgatggagag

SEQ ID NO: 626848 - DNA, 75 bp, synthetic construct
  source 1..75: mol_type = other DNA
gcgaaatacattacatcggtcattatttggttttcccccagcaccaacacatgcattctgcgcttgatgtgttca

SEQ ID NO: 626849 - DNA, 75 bp, synthetic construct
  source 1..75: mol_type = other DNA
cagaacagcagaaatctttcaaatggctagcatcactactggagggctgttatacagttcacacaaacatttttg

SEQ ID NO: 626850 - DNA, 75 bp, synthetic construct
  source 1..75: mol_type = other DNA
tagtgattatacccgtcacgatcatgacatctggtacaccgaactttcatgtacatatggtgatattacagggcg

SEQ ID NO: 626851 - DNA, 75 bp, synthetic construct
  source 1..75: mol_type = other DNA
gctgagaaccaaccctgcggtacgcatggattcaacgcaaagtacctcgttgaaccagggagatattcgccctga

SEQ ID NO: 626852 - DNA, 75 bp, synthetic construct
  source 1..75: mol_type = other DNA
tgccataactcactctgcgccgtcggcggcaccattaacggtgatgaccatgtttttggtttatcggcagcttag

SEQ ID NO: 626853 - DNA, 75 bp, synthetic construct
  source 1..75: mol_type = other DNA
tggacacatcaggcaccgtccgggtgtgtatattccggcattattgttcaggataccggctcaaactctgccgat

SEQ ID NO: 626854 - DNA, 75 bp, synthetic construct
  source 1..75: mol_type = other DNA
ctaacgcagtgatcgtgaacgagggcagtggtgttcttgttaatgcgatgactcaagattattcatacgtactca

SEQ ID NO: 626855 - DNA, 75 bp, synthetic construct
  source 1..75: mol_type = other DNA
tcattaaacgtgagcttgataccacgctgacgcttaaggatggtgatgtggttatgctgggaggagtcagtgaac

SEQ ID NO: 626856 - DNA, 75 bp, synthetic construct
  source 1..75: mol_type = other DNA
aacagaacttccaaggcttcattgagaagaacaaaatgggttctgttgatatcgagcgagagttttttcacatta

SEQ ID NO: 626857 - DNA, 75 bp, synthetic construct
  source 1..75: mol_type = other DNA
gcagacgtattactcttagcattgagtatgacgaaagattatggcttgagtgcgactgcgaattgatcgtaatag

SEQ ID NO: 626858 - DNA, 75 bp, synthetic construct
  source 1..75: mol_type = other DNA
tattctcagccagcgtgagagcgccatcaggctgcaatgcggggaatatcattccggcactgcgccacagcatgc

SEQ ID NO: 626859 - DNA, 75 bp, synthetic construct
  source 1..75: mol_type = other DNA
taacgttattgacaagaatagagttctgaatctgaagagcgcattaaatatatttgcagatgaacttatagacca

SEQ ID NO: 626860 - DNA, 75 bp, synthetic construct
  source 1..75: mol_type = other DNA
gatctccgatcgcgatggtcgtgcactggccttaacggacgatcgtggcacagagagcctcgccggctatcttcg

SEQ ID NO: 626861 - DNA, 75 bp, synthetic construct
  source 1..75: mol_type = other DNA
atgaatgtggatgaggtcgcctttaaaaaaggacattgttatataactgtgatctccgatcgcgatggtcgtgca

SEQ ID NO: 626862 - DNA, 75 bp, synthetic construct
  source 1..75: mol_type = other DNA
gtgttatgccggttaaccagtcgatttatgatgccttaacggtgcttcagcatcgcggtcaggatgccgccggca

SEQ ID NO: 626863 - DNA, 75 bp, synthetic construct
  source 1..75: mol_type = other DNA
ggagaactcacttctgtttatagagctcagggaacaactctttttcgcgtttccgatatcgacggtatttttctt

SEQ ID NO: 626864 - DNA, 75 bp, synthetic construct
  source 1..75: mol_type = other DNA
aatccaggaactggggaccggcgaggcgttaatctcttttctggatgcgaaaggaagtccttctgtggtggagcg

SEQ ID NO: 626865 - DNA, 75 bp, synthetic construct
  source 1..75: mol_type = other DNA
tgaatgcaggctatataagagcagcgcgtatccacttaccctgtgcggttgagaaaatcgccttcgaccgcttcc

SEQ ID NO: 626866 - DNA, 75 bp, synthetic construct
  source 1..75: mol_type = other DNA
gaagatcctgagcttaaagctgcaatcgaatattttttaaatttccctcccaaaaaacaggttgttaatgatggt

SEQ ID NO: 626867 - DNA, 75 bp, synthetic construct
  source 1..75: mol_type = other DNA
ctgccatatcctattgaccaggccagtagtgcgcctaatgttttcaaaacattcttcagagcattaagcccttac

SEQ ID NO: 626868 - DNA, 75 bp, synthetic construct
  source 1..75: mol_type = other DNA
tgccggggcagcagtatgatgaggagtccggcctgtattacaaccgccaccgctattatgacccgctgcagggga

SEQ ID NO: 626869 - DNA, 75 bp, synthetic construct
  source 1..75: mol_type = other DNA
atagaggaatttcatctattggtccgtttaactcatcaataagtcctctatttattttttcaagtcactataaag

SEQ ID NO: 626870 - DNA, 75 bp, synthetic construct
  source 1..75: mol_type = other DNA
gccggaaatgggaatccaaaaggtattactggtgcattatggcgacggacatcgtttggatttactaattttgca

SEQ ID NO: 626871 - DNA, 75 bp, synthetic construct
  source 1..75: mol_type = other DNA
gttctgcgtgcaggaaatgggaaccccaaaggtattactggtgcattatggcgacggacctcggttggatttact

SEQ ID NO: 626872 - DNA, 75 bp, synthetic construct
  source 1..75: mol_type = other DNA
cagcacgcacaataggcggcgtgtcattcgatggctccgccaatatcaacctgccgggtgtaaacattgctggta

SEQ ID NO: 626873 - DNA, 75 bp, synthetic construct
  source 1..75: mol_type = other DNA
cctggctggattagttgttcaaacagaacagatggtgtcatgtctggaatatcaccagtaaccgcaacaaacttt

SEQ ID NO: 626874 - DNA, 75 bp, synthetic construct
  source 1..75: mol_type = other DNA
tctatccttggaatgtacggtaaaaataactctattgcatctgggcttaccgtatcaaggatgggcaacggagca

SEQ ID NO: 626875 - DNA, 75 bp, synthetic construct
  source 1..75: mol_type = other DNA
cgtatgggtgaagccctgaatgcgaaagtggttatcccgttccaccacgatatctggtcaaacttccaggccgat

SEQ ID NO: 626876 - DNA, 75 bp, synthetic construct
  source 1..75: mol_type = other DNA
taaagataacgaagaattttatgttgaaaagttatacactgaactcatggaaggagttgtttatcagttgcatag

SEQ ID NO: 626877 - DNA, 75 bp, synthetic construct
  source 1..75: mol_type = other DNA
atattgctattacttgatggttttgatgaaatatcatcaaaaatgagaatggatattcttagtgaaataatttta

SEQ ID NO: 626878 - DNA, 75 bp, synthetic construct
  source 1..75: mol_type = other DNA
aaataaaaaagaatatataaagaaaatgattatgaaaataacttcagcattgcattatgatgtttttagctctaa

SEQ ID NO: 626879 - DNA, 75 bp, synthetic construct
  source 1..75: mol_type = other DNA
tttctcgcatcactcgaagaattgccgattggcgaaaatttaaccgcaagacttattgctgctgatctttttaat

SEQ ID NO: 626880 - DNA, 75 bp, synthetic construct
  source 1..75: mol_type = other DNA
tttaaccagaaagaaaatatgatcttggcatctgatgaagctaagggaagcaataggattgaggtaaaacttgag

SEQ ID NO: 626881 - DNA, 75 bp, synthetic construct
  source 1..75: mol_type = other DNA
gtgtttcaaacaaggggtgggtataaaagtacatatgctagatgggcgcattctgataggagaaacaactggcgt

SEQ ID NO: 626882 - DNA, 75 bp, synthetic construct
  source 1..75: mol_type = other DNA
gcggacgctgactttccaccgggcggcggagggtgacgtggcgggcgcggtgacgggggtgacggacggcgcggg

SEQ ID NO: 626883 - DNA, 75 bp, synthetic construct
  source 1..75: mol_type = other DNA
atgtcaaaaattgagatctttgaagcagcaggctgctgcgcaaccagtagcgttgtggtcagcgacgaagccgtc

SEQ ID NO: 626884 - DNA, 75 bp, synthetic construct
  source 1..75: mol_type = other DNA
aaacaacagagttgaagtaaaacttgagtctatcgcatcactcgaagagttgctcgttggtaaagatttcactac

SEQ ID NO: 626885 - DNA, 75 bp, synthetic construct
  source 1..75: mol_type = other DNA
aacccagtccaataccagcgggcgcgatcttaatgatgctcagttgaaatatgccagcgatgtcgaaggccgtat

SEQ ID NO: 626886 - DNA, 75 bp, synthetic construct
  source 1..75: mol_type = other DNA
agttttccccccggcttgccgatgccggtgaagcggtattctggcgagtggataaatcggcaaattacggtgcac

SEQ ID NO: 626887 - DNA, 75 bp, synthetic construct
  source 1..75: mol_type = other DNA
attatggtgccctgaatgagctggcccggggatgtgttgaactgtcaaaaatagaatcccaatgggatgaaatga

SEQ ID NO: 626888 - DNA, 75 bp, synthetic construct
  source 1..75: mol_type = other DNA
atgaatctgcagggaatatgggctatgtgatcctcgcccaacccgcaacctcagcaaaatttgaacgcaaaccca

SEQ ID NO: 626889 - DNA, 75 bp, synthetic construct
  source 1..75: mol_type = other DNA
tgggcgaagtagacgatgatgaagacgacgaatacgaagaggaagaggaagaggaagaggatgacgacagggacg

SEQ ID NO: 626890 - DNA, 75 bp, synthetic construct
  source 1..75: mol_type = other DNA
gagcacgagctcgcgcgtctggatgcgtcagacctgatttcactggccggtaaggtggtcggttttttgtcacca

SEQ ID NO: 626891 - DNA, 75 bp, synthetic construct
  source 1..75: mol_type = other DNA
ttaagcgaagtttttacttttgcatggacgatttatgctgttgatccgcaagaaatcaaactgaaaaggcggttg

SEQ ID NO: 626892 - DNA, 75 bp, synthetic construct
  source 1..75: mol_type = other DNA
cggtgtggctcgggttattctgtccagcccccgggctgatattgaaccggcaaccggtacggctccccgttgtgc

SEQ ID NO: 626893 - DNA, 75 bp, synthetic construct
  source 1..75: mol_type = other DNA
atctgtctgaactcgctgttcctgatgcgcttgtagtgccggatgccgcagagattttctcccgatggctggcac

SEQ ID NO: 626894 - DNA, 75 bp, synthetic construct
  source 1..75: mol_type = other DNA
cccctgacggattttgtcagtgtccggacggcagaaattattccctacgatgtggtggcggatattatggtgctc

SEQ ID NO: 626895 - DNA, 75 bp, synthetic construct
  source 1..75: mol_type = other DNA
gtgaaggggtgggggtccatacttttaacggtgaaatttttgtccagcctgtatgggatgcggaatccacgtcat

SEQ ID NO: 626896 - DNA, 75 bp, synthetic construct
  source 1..75: mol_type = other DNA
cagcaggcgcgcgtaattcataccgctttcatgcgaagtctgccgatacggatgtgctggatgccgatgcctatg

SEQ ID NO: 626897 - DNA, 75 bp, synthetic construct
  source 1..75: mol_type = other DNA
gttccggcaaatccggatgccgtgcctccgacggatgcggttatggaagaggacgacgcttttcgcgaacgcatt

SEQ ID NO: 626898 - DNA, 75 bp, synthetic construct
  source 1..75: mol_type = other DNA
aatttgatgagagcgggaaaagcgaaccaacggacttatttacctggtacggtaaagataaaaaagcgactctct

SEQ ID NO: 626899 - DNA, 75 bp, synthetic construct
  source 1..75: mol_type = other DNA
attgcctctcttgagttgatgttaaacaaaaaccaaaatccaataaaaacacacaatgaatacataaacaaaatt

SEQ ID NO: 626900 - DNA, 75 bp, synthetic construct
  source 1..75: mol_type = other DNA
atggtcgcccgggaactgggtgtatccgtaaaagacgtcagggaaatggagtccaggatgtcggcacaggatatg

SEQ ID NO: 626901 - DNA, 75 bp, synthetic construct
  source 1..75: mol_type = other DNA
ataaaatatcacacaaactcagacatacggtaacggaattcgatgagagcgggaaaagcgaaccaacggacttat

SEQ ID NO: 626902 - DNA, 75 bp, synthetic construct
  source 1..75: mol_type = other DNA
atgaatataaacagtttaaggaaatcgaagataaagttgaaaaaagacttcaaaatcgccagatgaaatatcaaa

SEQ ID NO: 626903 - DNA, 75 bp, synthetic construct
  source 1..75: mol_type = other DNA
aaaacgccaggagtgcttcagcgtggtttgaaagcagcaaagctatcatggcagaatcatttgcaacaggttccg

SEQ ID NO: 626904 - DNA, 75 bp, synthetic construct
  source 1..75: mol_type = other DNA
tggtgaccaatgcggttgtgctgtggaatacactttacatgcaggaggcgttgtcacatcttcgcaaatcggggg

SEQ ID NO: 626905 - DNA, 75 bp, synthetic construct
  source 1..75: mol_type = other DNA
attaacggtgatgacgccacggcaaacaacaacggcaaaaccaccgttgacggcaaggattccaccggtacggaa

SEQ ID NO: 626906 - DNA, 75 bp, synthetic construct
  source 1..75: mol_type = other DNA
cgggatttctccgcaaacgacacagtgtcagtaagctggttgtgcaccttatttttacgacaaagtatcgacgca

SEQ ID NO: 626907 - DNA, 75 bp, synthetic construct
  source 1..75: mol_type = other DNA
ggtgataatgccacagtaaacaacaatggcaaaaccaccgttgacggcaaggattccaccggtacggaaatcaac

SEQ ID NO: 626908 - DNA, 75 bp, synthetic construct
  source 1..75: mol_type = other DNA
gcccggatgtgaacagtgctgtagaagcaaaatatcgcgatctgatgacacctggctttgtggccgagtttgccc

SEQ ID NO: 626909 - DNA, 75 bp, synthetic construct
  source 1..75: mol_type = other DNA
tatttctctacaatctgatgatgaagatacccgagacatggctatgttaagtttaaagatgattacggtaatgac

SEQ ID NO: 626910 - DNA, 75 bp, synthetic construct
  source 1..75: mol_type = other DNA
caggaacttatcgataaatatgacgacgtaagactttatttttgtgcaaatcctgctgaagaggccataccgtta

SEQ ID NO: 626911 - DNA, 75 bp, synthetic construct
  source 1..75: mol_type = other DNA
gacactgcgattattcttgggcctggcaatccgccaaccctggctgtgttggcatggcaatggctgaacgagcct

SEQ ID NO: 626912 - DNA, 75 bp, synthetic construct
  source 1..75: mol_type = other DNA
tctcgtaacagctgtttttaatgaatatcttattaatacaaaaacagtagacgtcagacattcaaaattagaact

SEQ ID NO: 626913 - DNA, 75 bp, synthetic construct
  source 1..75: mol_type = other DNA
gctccagtagataaaaaaagcctttctcaattaaatatcaaaaagaaaaacaacgccatctcaataaacaacgaa

SEQ ID NO: 626914 - DNA, 75 bp, synthetic construct
  source 1..75: mol_type = other DNA
agcgcagcagtaaatggaattatggcaacttatgccgacaatgcggaagattgccgggaaatggtacgcacacat

SEQ ID NO: 626915 - DNA, 75 bp, synthetic construct
  source 1..75: mol_type = other DNA
agctttctcgtaccatcgaaactatcggcccggtaaaaggggcgcgcgtacatctggcaatgccgaaaccgtctt

SEQ ID NO: 626916 - DNA, 75 bp, synthetic construct
  source 1..75: mol_type = other DNA
tgatgacaaccatcggttatctggtcctgctgttattgttgctttggtcagtggctggtagttggttttaccctc

SEQ ID NO: 626917 - DNA, 75 bp, synthetic construct
  source 1..75: mol_type = other DNA
gccctgatgttaacgacgcaatacaggataaatatcgcgatctgatgacaccgggatatgtagccgagttttccc

SEQ ID NO: 626918 - DNA, 75 bp, synthetic construct
  source 1..75: mol_type = other DNA
gcgtttcagcgtgggaggaataccgccagtgggagttcagtggtcttctttgcgggagggatttaataaagtacc

SEQ ID NO: 626919 - DNA, 75 bp, synthetic construct
  source 1..75: mol_type = other DNA
taccttattcaatcatgggtcgatggagatccgcaaaccaacgccaaagccccttttattattaccccccctctg

SEQ ID NO: 626920 - DNA, 75 bp, synthetic construct
  source 1..75: mol_type = other DNA
tccaaacctggctcctcaagtaacatggcaggatgcgaaaggacagaaaattactcctgttttcgacaatacagg

SEQ ID NO: 626921 - DNA, 75 bp, synthetic construct
  source 1..75: mol_type = other DNA
gataaagcataatattcccgcgcttactcgccatcgtctgagctgggttaaacaaaattatctcagggcagaaac

SEQ ID NO: 626922 - DNA, 75 bp, synthetic construct
  source 1..75: mol_type = other DNA
aagcattactaatcagcagataaatgccatcgttgtagattcagaacattttgattacaagtatgtctattatta

SEQ ID NO: 626923 - DNA, 75 bp, synthetic construct
  source 1..75: mol_type = other DNA
gggaaggctttaataaagtgcccggcgcatcagaaggtgcctgctcgctgtttctgttagtgaaaacgatccccg

SEQ ID NO: 626924 - DNA, 75 bp, synthetic construct
  source 1..75: mol_type = other DNA
aacagtggcaataccaccgttgacggacagggctcgaccggtaccgaaatcgcgggtaataacgcggtggtgaac

SEQ ID NO: 626925 - DNA, 75 bp, synthetic construct
  source 1..75: mol_type = other DNA
cgccagtattgttagtggtaggccaactctggtactgagcgatagtcagcaaatgaacccggataatatcaaatg

SEQ ID NO: 626926 - DNA, 75 bp, synthetic construct
  source 1..75: mol_type = other DNA
ggcaaaacccttgattggccgtactggtgtggagtttggaaaaacactggatggccgcgactggcaggttacagc

SEQ ID NO: 626927 - DNA, 75 bp, synthetic construct
  source 1..75: mol_type = other DNA
ctgaaagacggcccgtatctggtgcgccagatcctcgactccctgccgctgtctgatttcgccaagcaacacctg

SEQ ID NO: 626928 - DNA, 75 bp, synthetic construct
  source 1..75: mol_type = other DNA
ttccaaagtgaaatatcttataaaaattatgtcattgcggggattgctctcagctgagaaaaaaataatgagagt

SEQ ID NO: 626929 - DNA, 75 bp, synthetic construct
  source 1..75: mol_type = other DNA
atgaaaattgattatgacgagatagccagaatatttgatgtttttctggaggccgacaccgcattcattcgactg

SEQ ID NO: 626930 - DNA, 75 bp, synthetic construct
  source 1..75: mol_type = other DNA
ggtcgcccggctgccgggcgaagagatggcgacttctcgatttatcgtcagggaggaacatcgacagatgcctca

SEQ ID NO: 626931 - DNA, 75 bp, synthetic construct
  source 1..75: mol_type = other DNA
atctacacccgacggggagcgtcaatggcagtaactatgctcaggatctgaccacgctggatatgtgcctgtacg

SEQ ID NO: 626932 - DNA, 75 bp, synthetic construct
  source 1..75: mol_type = other DNA
ttttctgtattactctgttacctacgtggtcctggatttgtaccggacaaaaacaatattccccactgtggtgtt

SEQ ID NO: 626933 - DNA, 75 bp, synthetic construct
  source 1..75: mol_type = other DNA
ccgcgtcatttccactgtatccactgccattgtcggcatggtctgcacggccagcgatgcggatgcggaaacctt

SEQ ID NO: 626934 - DNA, 75 bp, synthetic construct
  source 1..75: mol_type = other DNA
gatcaattcatggaagaaacaaataacgatagcgaaattgaaacgacagtagacgctaccgaacaggaagttaaa

SEQ ID NO: 626935 - DNA, 75 bp, synthetic construct
  source 1..75: mol_type = other DNA
agcgacgcggtggcggcagagccgcagacgcggcgtgagcgcaaccatgcggagatggagcgggcgctggtcagc

SEQ ID NO: 626936 - DNA, 75 bp, synthetic construct
  source 1..75: mol_type = other DNA
gcgtaaagtctggcgccagttgttacgcgaaggtatcagggtggccagatgtacagtggcacgactcatggcggt

SEQ ID NO: 626937 - DNA, 75 bp, synthetic construct
  source 1..75: mol_type = other DNA
tcctgtttcccgaccgcgatcagcgtacgctggcgacctggttcagaaaatatccggaaatacaggttgtctcgc

SEQ ID NO: 626938 - DNA, 75 bp, synthetic construct
  source 1..75: mol_type = other DNA
aatatccagttggtgttctcaatgatattgaagtacattccgcatcgaatgcagaaaatattcgcattagtagta

SEQ ID NO: 626939 - DNA, 75 bp, synthetic construct
  source 1..75: mol_type = other DNA
tttttatcaacaaagcgatgatggatgcaggtcttaatgcgctcagggataaaggtatcgacgttgaagttcgtg

SEQ ID NO: 626940 - DNA, 75 bp, synthetic construct
  source 1..75: mol_type = other DNA
ccgtaagagctggaaaaccgtgcagaagtggaactggccacactcacgtgggtggactggtataacaatcgacga

SEQ ID NO: 626941 - DNA, 75 bp, synthetic construct
  source 1..75: mol_type = other DNA
agtatgtatcactggcctatacggagcgactaaaagaagcaaaactgctggcatcaacagggagtacaggtgact

SEQ ID NO: 626942 - DNA, 75 bp, synthetic construct
  source 1..75: mol_type = other DNA
aattaacacagaatatcgcaatggttttatttcagaaagtacatatttacgctatcttaatgttcttgttaatat

SEQ ID NO: 626943 - DNA, 75 bp, synthetic construct
  source 1..75: mol_type = other DNA
tttataggtaggcgtgtaagattaacagctaattttaattatcccgtagaaatatcaagcgctcatcctaccatc

SEQ ID NO: 626944 - DNA, 75 bp, synthetic construct
  source 1..75: mol_type = other DNA
agcaacagcaaaacggcggctgccaccagtgaaaccaatgcggcaaaatcagcagccgatgcgctaaactatcgc

SEQ ID NO: 626945 - DNA, 75 bp, synthetic construct
  source 1..75: mol_type = other DNA
taacattgccgtcatggatgagcggatcactaaacttgaagcgcttgtccggcagttgaccggaagcgaaaaata

SEQ ID NO: 626946 - DNA, 75 bp, synthetic construct
  source 1..75: mol_type = other DNA
ccgggcaattgctgcgcttattgagcgtagatgccctgatgcgtaagctgcgttttgatttcagagacacttttg

SEQ ID NO: 626947 - DNA, 75 bp, synthetic construct
  source 1..75: mol_type = other DNA
ggcgttatgcacaccgacgacacgctggtggatggcctggaggcggatatcgccatgaaagggtcggtaaatctg

SEQ ID NO: 626948 - DNA, 75 bp, synthetic construct
  source 1..75: mol_type = other DNA
acgcacatcagtacgcgaaagatccaaaaattatggtcgatatcgctacctacgcggccgcatttcaagctctca

SEQ ID NO: 626949 - DNA, 75 bp, synthetic construct
  source 1..75: mol_type = other DNA
gggctgtgggggacgatgggtgtgaatgcggccagcggagccacatccagctatctaaaaggtgatgatccgctg

SEQ ID NO: 626950 - DNA, 75 bp, synthetic construct
  source 1..75: mol_type = other DNA
catttatttaatgtttgttctttgtatgcacgtgattggatcgaatttcatctgactgattatttcggaatatca

SEQ ID NO: 626951 - DNA, 75 bp, synthetic construct
  source 1..75: mol_type = other DNA
tttatttcagaaagtacatatttacgctatcttaatgtccttgttaatattcgcgatgcgtttgtaacaggggta

SEQ ID NO: 626952 - DNA, 75 bp, synthetic construct
  source 1..75: mol_type = other DNA
actagactgttagcaagtgataacactgtgcgccttgctggtgatatgtatgttcagacctacccaaatgagcaa

SEQ ID NO: 626953 - DNA, 75 bp, synthetic construct
  source 1..75: mol_type = other DNA
tggactggcgcgacagcgtggtgaaaccgtttaacgagcaactggcaaataactatccgtttaatccgcgttctg

SEQ ID NO: 626954 - DNA, 75 bp, synthetic construct
  source 1..75: mol_type = other DNA
ttgtatataaaaaatttttttaaagatgagcgaatcaaaatttatgaaacaccaataggccaactatcacatgcg

SEQ ID NO: 626955 - DNA, 75 bp, synthetic construct
  source 1..75: mol_type = other DNA
gctcctctgccgttagtgtaactggtgaaaggtcaatgaaatcggcaggtgccaaacttaagctaagtacaccgt

SEQ ID NO: 626956 - DNA, 75 bp, synthetic construct
  source 1..75: mol_type = other DNA
cccggctgtatctggtggaggagcgcactgaagaacagacagaagccgcgcctttaccggttccgctggcttcag

SEQ ID NO: 626957 - DNA, 75 bp, synthetic construct
  source 1..75: mol_type = other DNA
ttcgtttaccagaagtcttgaaacgaactggtttcggcaaggcctggatttatcgtctgatcagtgaaggtcgtt

SEQ ID NO: 626958 - DNA, 75 bp, synthetic construct
  source 1..75: mol_type = other DNA
ttggcaaggataataagcctgctatcgctcgcggtccgctgggacttcatctcaatagtggctttacgctcgaca

SEQ ID NO: 626959 - DNA, 75 bp, synthetic construct
  source 1..75: mol_type = other DNA
gaagataagctgcacacagtgattctacgcgcccatccccgcgtttacggtcagactgtagctattgtcactgaa

SEQ ID NO: 626960 - DNA, 75 bp, synthetic construct
  source 1..75: mol_type = other DNA
atgattaactttactgaaattgatagtgacggtgaagcctgggagtcatttgcccgtgattttcttgaagaactt

SEQ ID NO: 626961 - DNA, 75 bp, synthetic construct
  source 1..75: mol_type = other DNA
atgttcaaagataaaactctggcagcagatatcagcgcattaatgctcaatattggttctcaattagatgcgtca

SEQ ID NO: 626962 - DNA, 75 bp, synthetic construct
  source 1..75: mol_type = other DNA
tggtttgagctgcgatgtcggggcgagaataaacgtacgtatcgatgccactgcggatgcttccgccggttcgca

SEQ ID NO: 626963 - DNA, 75 bp, synthetic construct
  source 1..75: mol_type = other DNA
ggcggcacctgggtatccattcccggtgatggcatcaagggcgagcttatcaaaaccggggatatcaccagcggt

SEQ ID NO: 626964 - DNA, 75 bp, synthetic construct
  source 1..75: mol_type = other DNA
gggggacgctgagcggctatgggaacggtgtctacaacaccaacctgccgggggtagggttgcgtctcagttttg

SEQ ID NO: 626965 - DNA, 75 bp, synthetic construct
  source 1..75: mol_type = other DNA
ccgggcggaagctgatgcagacagaaaacacccgacttaacgctgtgctggattatattgacgcggtgacggcaa

SEQ ID NO: 626966 - DNA, 75 bp, synthetic construct
  source 1..75: mol_type = other DNA
gatttacaggcgatagctcaactggcgacccgttatgggattatcaccgcaattgataacacctggccgacaccg

SEQ ID NO: 626967 - DNA, 75 bp, synthetic construct
  source 1..75: mol_type = other DNA
cagaacatccaatagaaatatatcttttaactcaggggtgttacattataaacatttcactagatcaaggaacta

SEQ ID NO: 626968 - DNA, 75 bp, synthetic construct
  source 1..75: mol_type = other DNA
ctggcgattggatcagttcaaaatgctctgtcctctggtatttcagatacccgcattgaacaaatcagagaagcg

SEQ ID NO: 626969 - DNA, 75 bp, synthetic construct
  source 1..75: mol_type = other DNA
catggagtcagacacctcttctgacaaaacacaggtcaatacgggcggacgggagatcgtcaaaacaaaagccac

SEQ ID NO: 626970 - DNA, 75 bp, synthetic construct
  source 1..75: mol_type = other DNA
aattgcgctgagctgctcgctgggaaatatcgccgcatccatcctgctttttctccaccagctcgctgaacatga

SEQ ID NO: 626971 - DNA, 75 bp, synthetic construct
  source 1..75: mol_type = other DNA
cagggcatttttgatatgggtactgtcagaatccatcggcgctctggcactggtgccgctgggattgttatttaa

SEQ ID NO: 626972 - DNA, 75 bp, synthetic construct
  source 1..75: mol_type = other DNA
atgacacaggtacaaacgcagcgcgtcgtgcgcctcgatggttccagccaggtagttgaggttccggatcctgct

SEQ ID NO: 626973 - DNA, 75 bp, synthetic construct
  source 1..75: mol_type = other DNA
gaaggttaccttccagcagccgagcgcagaagtctgatgttagcttttggcgtcagtggtgtgtcaatgtggccc

SEQ ID NO: 626974 - DNA, 75 bp, synthetic construct
  source 1..75: mol_type = other DNA
aacagattagagagatttgcgagttttgtaagactaaggttgatcacttcaatgtaacctataaaaagaccagcg

SEQ ID NO: 626975 - DNA, 75 bp, synthetic construct
  source 1..75: mol_type = other DNA
agcactgagaataggtatcgggggggtaattattaatggagccatttcaaacagtgaagccataattgaaatggg

SEQ ID NO: 626976 - DNA, 75 bp, synthetic construct
  source 1..75: mol_type = other DNA
acctgaaagaggcgcgtgactacctggacgaagacgctaccaatgacgaaatagacgaagagatcgagaacgagc

SEQ ID NO: 626977 - DNA, 75 bp, synthetic construct
  source 1..75: mol_type = other DNA
ttggtatcgggtatggttccgtgacgccagtttttcagacgcagattatcagttcagtggaaccgcataaaatcg

SEQ ID NO: 626978 - DNA, 75 bp, synthetic construct
  source 1..75: mol_type = other DNA
tctatttgtcaatattgcaaacaactttgacaaattcaattataaaaccccaccacatgatggtgacgccttacc

SEQ ID NO: 626979 - DNA, 75 bp, synthetic construct
  source 1..75: mol_type = other DNA
atgaagtcttgttttgatactgacaaagcttttcatatgtcttttgatgaagttactttcaacgctgacagaatt

SEQ ID NO: 626980 - DNA, 75 bp, synthetic construct
  source 1..75: mol_type = other DNA
aaaaacattacttcgatccgaaagttatcccgtccatcgcctataccgaaccagaagttgcatgggtaggtctga

SEQ ID NO: 626981 - DNA, 75 bp, synthetic construct
  source 1..75: mol_type = other DNA
gcactgcaggtgtttctgaaacgttatccggccagacgcattgatgtcggaatagcgcaggtcaatctggggtgg

SEQ ID NO: 626982 - DNA, 75 bp, synthetic construct
  source 1..75: mol_type = other DNA
atggcgcgtggctgcattctgaccgttctgctgacgctggcaggcagtggcatgtgtcaggctgttgcgcagacc

SEQ ID NO: 626983 - DNA, 75 bp, synthetic construct
  source 1..75: mol_type = other DNA
cgcacttattttgaagagaaggtggagaactccatgacggtcgcccagtgtctcgactactggttcgacaactga

SEQ ID NO: 626984 - DNA, 75 bp, synthetic construct
  source 1..75: mol_type = other DNA
ccaccattttgcgtgagtgctgggcgcgtaagccaggcagctggctggatgcggccggctgctaccaccatcccg

SEQ ID NO: 626985 - DNA, 75 bp, synthetic construct
  source 1..75: mol_type = other DNA
aaagtgacacgatgcagacgggtgaaaataccttccattatgaaagcctgcgcggtcgttatgtcagtctgatgg

SEQ ID NO: 626986 - DNA, 75 bp, synthetic construct
  source 1..75: mol_type = other DNA
tgcaaaaggtatgacgccacagcagaccgccatgctggcaccggcggcggattatatctggacagagccccggag

SEQ ID NO: 626987 - DNA, 75 bp, synthetic construct
  source 1..75: mol_type = other DNA
atttcaaattatttccagaagtcaaactgtgtggggaaaatcttgaaacggtattcaaatataaaaatggcgatg

SEQ ID NO: 626988 - DNA, 75 bp, synthetic construct
  source 1..75: mol_type = other DNA
ttaacgctagcgcagttttggctatgagggattgtaatgaaaacaattcttccaaccccatggagttactagctc

SEQ ID NO: 626989 - DNA, 75 bp, synthetic construct
  source 1..75: mol_type = other DNA
aagaaaaagtgattttcatgttggttcacttaagccaggtagtatgaatagtgttattttagaaatgccaccaaa

SEQ ID NO: 626990 - DNA, 75 bp, synthetic construct
  source 1..75: mol_type = other DNA
gaactccatgacggtcgcccagtgtctcgactactggttcgacaactacgtctctacaactctcagagaaaagac

SEQ ID NO: 626991 - DNA, 75 bp, synthetic construct
  source 1..75: mol_type = other DNA
cgataaagcgacagtgcaggatgtgatgttaggagcgatagaaaaacgctttggcgataaagtaccggaacagtc

SEQ ID NO: 626992 - DNA, 75 bp, synthetic construct
  source 1..75: mol_type = other DNA
aaaagtattcaacgtacactttaataataatgaagagttagttactgatggtgagcctgacgtagtatgtttaag

SEQ ID NO: 626993 - DNA, 75 bp, synthetic construct
  source 1..75: mol_type = other DNA
tttgaggctcagaccggaagatatgacgtttatcttcggtcatgtattgaaagagaatattgtgtcggtgatatt

SEQ ID NO: 626994 - DNA, 75 bp, synthetic construct
  source 1..75: mol_type = other DNA
agatttcactgacattggtgcgaaatatagcgcagcttacggtgcaggtattctggccggcgacgccatcaaaat

SEQ ID NO: 626995 - DNA, 75 bp, synthetic construct
  source 1..75: mol_type = other DNA
gttaaagttggtgatgctgtaactggtctggatgggcagattcagaaaggccagaaggtagttgatgttgctgta

SEQ ID NO: 626996 - DNA, 75 bp, synthetic construct
  source 1..75: mol_type = other DNA
gtactttaactgttcagttaggagcgtcaggtaaattatctgttaatggtcctggctggcaacagcaattccatc

SEQ ID NO: 626997 - DNA, 75 bp, synthetic construct
  source 1..75: mol_type = other DNA
gctttcgatgaggccagtgttaacggctttatggagaaatttcgggattactcaaacgtagagattatttatcgg

SEQ ID NO: 626998 - DNA, 75 bp, synthetic construct
  source 1..75: mol_type = other DNA
cgcatgatatgcgaagagtgtttgccacaaaactaagtgatcatggttttgaacataatgtggttgaacagttgc

SEQ ID NO: 626999 - DNA, 75 bp, synthetic construct
  source 1..75: mol_type = other DNA
gtgtagatcctgaatggatacaaaagattaccggactttcggcagagcaaatgcaggcattagagcagcccttgc

SEQ ID NO: 627000 - DNA, 75 bp, synthetic construct
  source 1..75: mol_type = other DNA
ccaacgggctgaatgcatcaccggaggctggcggtattgttcaggcggcatttcgttatcaggataagcccggag

SEQ ID NO: 627001 - DNA, 75 bp, synthetic construct
  source 1..75: mol_type = other DNA
acggacggctggtacggtgcaggcagtcttgtactggcggcttataacggtaagggagacgcagacaccgaccgc

SEQ ID NO: 627002 - DNA, 75 bp, synthetic construct
  source 1..75: mol_type = other DNA
cagctctgataaaagagcaggttgaaacgctggcagataatgttcagcagaatacaaatgctgtggaggaaaaca

SEQ ID NO: 627003 - DNA, 75 bp, synthetic construct
  source 1..75: mol_type = other DNA
cagatgtctattttactgagccgggaagacataacgcctgtagttttattatcaatgaaccgcaatgtgtcttcc

SEQ ID NO: 627004 - DNA, 75 bp, synthetic construct
  source 1..75: mol_type = other DNA
attaattgaattgccttttggcgaacagtcgcagaccattacggccatgtgcgcacaccatgctggaaaagcggt

SEQ ID NO: 627005 - DNA, 75 bp, synthetic construct
  source 1..75: mol_type = other DNA
atgtccggataccatattattctgaaagcccggcagaatacatctgcagtggtcatgagaacggtggctacagtg

SEQ ID NO: 627006 - DNA, 75 bp, synthetic construct
  source 1..75: mol_type = other DNA
ttaacactagcgcagttttggctagcaggaattataatgaaaacaattcttccaaccccatggggctactagctc

SEQ ID NO: 627007 - DNA, 75 bp, synthetic construct
  source 1..75: mol_type = other DNA
gttggtggggtcagcagtggttaaacgcgctgatgcatattgatgccgacaaccgcttaccgcgcggtcgtacct

SEQ ID NO: 627008 - DNA, 75 bp, synthetic construct
  source 1..75: mol_type = other DNA
accgcaggattgataatttaccttttggctcagttccgctgatccgtgtcacgccgatagcagaggcagagattg

SEQ ID NO: 627009 - DNA, 75 bp, synthetic construct
  source 1..75: mol_type = other DNA
tctcagatgactttatagctgaacgagatgacgcaaacgtacacaaccagacgaactggttcggacctcatcgtc

SEQ ID NO: 627010 - DNA, 75 bp, synthetic construct
  source 1..75: mol_type = other DNA
taatgcctgcgtataatgctgaaaatacgattaggaagtctgtactttctgtattaaaccaatcttatacaaatt

SEQ ID NO: 627011 - DNA, 75 bp, synthetic construct
  source 1..75: mol_type = other DNA
atctggccgcagtgatttatctgatcagtcgccagatcgacagcgatccgtttctggtttttgcgctacatggtc

SEQ ID NO: 627012 - DNA, 75 bp, synthetic construct
  source 1..75: mol_type = other DNA
gcgtaatgtgcaggtgcatcgcctgttgacccgtgagacgtttgaagagcggatcaacgacatgatcagaaataa

SEQ ID NO: 627013 - DNA, 75 bp, synthetic construct
  source 1..75: mol_type = other DNA
actgcgcgcgggagcggtgagtgcggagagtgaggcatggcttgcacagtgcgggctgacggcggaacagatggc

SEQ ID NO: 627014 - DNA, 75 bp, synthetic construct
  source 1..75: mol_type = other DNA
agatgatcagtgctgaagatgcttattacacttatgaatatccagagcattttaagattcttccagccattcaca

SEQ ID NO: 627015 - DNA, 75 bp, synthetic construct
  source 1..75: mol_type = other DNA
ggtcggtggtgaaatttatgtaaaaaaaataccttcgatgaaagtaactgatatagcaacagctgttgcgcctaa

SEQ ID NO: 627016 - DNA, 75 bp, synthetic construct
  source 1..75: mol_type = other DNA
ctcagcccgcgccatgactggcttaaaacaggatccctgcggcaaaacgcgcctttacgtatttggttttacccg

SEQ ID NO: 627017 - DNA, 75 bp, synthetic construct
  source 1..75: mol_type = other DNA
ccattgggctgaaggggggatggaacctgtatgcgtatccgctgaacccggtgcagcggggggatcctcttgggt

SEQ ID NO: 627018 - DNA, 75 bp, synthetic construct
  source 1..75: mol_type = other DNA
aatggggaaacctgctgggcgaaaccagtgcgcagcaccttcaacagtcactccgtctgccggggcagcagtatg

SEQ ID NO: 627019 - DNA, 75 bp, synthetic construct
  source 1..75: mol_type = other DNA
ttatgccttcatataacgcagagcatacgatttctgcatcaattagttccgtgttaaagcaaacatatgctaact

SEQ ID NO: 627020 - DNA, 75 bp, synthetic construct
  source 1..75: mol_type = other DNA
tatctttcattgttttccccgcattatctaaaagatttggtgtcagtgttgaacatggtttgaattctttcagaa

SEQ ID NO: 627021 - DNA, 75 bp, synthetic construct
  source 1..75: mol_type = other DNA
agatttcgctcagttctgcaccgctttcaacttatacaaaccctgcaaattttgtagaaaaggagtttgattcac

SEQ ID NO: 627022 - DNA, 75 bp, synthetic construct
  source 1..75: mol_type = other DNA
gcgcccccacgttcccgccatatcgattaccggataccttttccgcctttctcccttgcgggacacgtggcgctt

SEQ ID NO: 627023 - DNA, 75 bp, synthetic construct
  source 1..75: mol_type = other DNA
acttcagtaactatgatattcaatatgtgaactggggaacgtcattgtttgatgttgatactccgtgtattttta

SEQ ID NO: 627024 - DNA, 75 bp, synthetic construct
  source 1..75: mol_type = other DNA
ttgcttataacgtcaagaaaagcatacgtttctatatataatagagatatatgtgagctgacatatccagaggaa

SEQ ID NO: 627025 - DNA, 75 bp, synthetic construct
  source 1..75: mol_type = other DNA
tgaaatacgaataaatggtgttactgcaggtcatggtgagcttgtggaaattgataataagctaggcgtaataat

SEQ ID NO: 627026 - DNA, 75 bp, synthetic construct
  source 1..75: mol_type = other DNA
atgtaacactatatgtgaatgaagaaggacaactgagagcaactactgatagttataatggtagtacatccattg

SEQ ID NO: 627027 - DNA, 75 bp, synthetic construct
  source 1..75: mol_type = other DNA
cggtctgatcacgccggcagaggcgaaagccgtggaagatgccaatacggcgctggatacggcgaagcaggcagc

SEQ ID NO: 627028 - DNA, 75 bp, synthetic construct
  source 1..75: mol_type = other DNA
tgaagaaggacaactgagagcaactactgatagttataatggtagtacatccattgactatactgggctcaattc

SEQ ID NO: 627029 - DNA, 75 bp, synthetic construct
  source 1..75: mol_type = other DNA
atattgatacgccggaagattggcatttcgctgaggtgttatataggataaatacaataaaaaatgaagattata

SEQ ID NO: 627030 - DNA, 75 bp, synthetic construct
  source 1..75: mol_type = other DNA
ttactagatttccttacccaattcaacgttctcttaagataaataaagaaaaaaaaattagtatgttctttccag

SEQ ID NO: 627031 - DNA, 75 bp, synthetic construct
  source 1..75: mol_type = other DNA
taataatgggtgtatagcagattttgtgtgctgtatatatgcaactgcaccatttattcgttctgaagatattat

SEQ ID NO: 627032 - DNA, 75 bp, synthetic construct
  source 1..75: mol_type = other DNA
ttaattaattttctacttggttatttgattgtaatatcacaatctttatatcctacttggtttttccaagggata

SEQ ID NO: 627033 - DNA, 75 bp, synthetic construct
  source 1..75: mol_type = other DNA
ctgaaaatgccctgcgggcggtcagtctgggtcgtaaaaacttcctgttcttcggctctgaccatggtggtgagc

SEQ ID NO: 627034 - DNA, 75 bp, synthetic construct
  source 1..75: mol_type = other DNA
atgcagtcgttgtatgagtggctccaagggcagatgaacacgctgtcgcgtcactcggatacggcgaaagcgttc

SEQ ID NO: 627035 - DNA, 75 bp, synthetic construct
  source 1..75: mol_type = other DNA
cagggaagtctgccagcctggatgatattgccgacaaggaggcgtttattcgtaagcttggggtggcaagagctt

SEQ ID NO: 627036 - DNA, 75 bp, synthetic construct
  source 1..75: mol_type = other DNA
tgcagggtgtggcaggggagagaggcgatacaggtccggctggtccacagggcgctaccggccccagaggaccac

SEQ ID NO: 627037 - DNA, 75 bp, synthetic construct
  source 1..75: mol_type = other DNA
gccggagagagagggccgcaaggattgcagggtgtggcaggggagagaggcgatacaggtccggctggtccacag

SEQ ID NO: 627038 - DNA, 75 bp, synthetic construct
  source 1..75: mol_type = other DNA
tacagaacgacagaacccgcatccagacgatttatcagccggggagcttcacgccactcatcagggttgaaaccg

SEQ ID NO: 627039 - DNA, 75 bp, synthetic construct
  source 1..75: mol_type = other DNA
taatggtactgagaaagtatcagcttatcatactcatggtgcaggtagtcatggagaatattgggacgaaatatt

SEQ ID NO: 627040 - DNA, 75 bp, synthetic construct
  source 1..75: mol_type = other DNA
ggcgggctgacgcgcagtatggaatacgatgctgccggacgggtcatccgcctgaccagtgaaaacggcagccac

SEQ ID NO: 627041 - DNA, 75 bp, synthetic construct
  source 1..75: mol_type = other DNA
cagagccgctggtcgaaagccgctatctttacgacccgctgggccgcagggtggcaaaacgggtgtggcgacgtg

SEQ ID NO: 627042 - DNA, 75 bp, synthetic construct
  source 1..75: mol_type = other DNA
agatgataaaaggattttgtttgataacaaaagggacaattggaatactaaagaagtacagggtgaagtagaggt

SEQ ID NO: 627043 - DNA, 75 bp, synthetic construct
  source 1..75: mol_type = other DNA
tacaacactggatcgccgtatcagtgatctattggatgagattatccatttttgtgagtttcagcagagcgcgtc

SEQ ID NO: 627044 - DNA, 75 bp, synthetic construct
  source 1..75: mol_type = other DNA
accagccggagagagagggccgcaaggattgcagggtgtggcaggggagagaggcgatacaggtccggctggtcc

SEQ ID NO: 627045 - DNA, 75 bp, synthetic construct
  source 1..75: mol_type = other DNA
gcttgaaaaaatgcatacatgggatgaggatcaagataatgaatcggcatggattaattgtctaaaagattataa

SEQ ID NO: 627046 - DNA, 75 bp, synthetic construct
  source 1..75: mol_type = other DNA
atcctccaaatttaacgataatattaatcgaagaaccagaaaatcatctttcaccccaatatttaggaagaatag

SEQ ID NO: 627047 - DNA, 75 bp, synthetic construct
  source 1..75: mol_type = other DNA
tgaaagattgagtgatggtatgaagtcattgttttatctttcgttagtcaaatctgcatttgatattgaagatga

SEQ ID NO: 627048 - DNA, 75 bp, synthetic construct
  source 1..75: mol_type = other DNA
tttacgatgctgaaggctcagtggatgtctcttacgaaggcattctgccggacttgttccgtgaagggcagggcg

SEQ ID NO: 627049 - DNA, 75 bp, synthetic construct
  source 1..75: mol_type = other DNA
tgaaagattgagtgatggtatgaaatcattattttatttatctttagttaaatctgcatttgatattgaagatga

SEQ ID NO: 627050 - DNA, 75 bp, synthetic construct
  source 1..75: mol_type = other DNA
agaaaatgttgataccttcacatatgttaaggaggccgtaaaagcatatccagaaatatattttgcaaaagttgt

SEQ ID NO: 627051 - DNA, 75 bp, synthetic construct
  source 1..75: mol_type = other DNA
gattggattatgcttgagaaattttatgaggaatataaatcatttgcaccaagcagaggcggcccaacaatacct

SEQ ID NO: 627052 - DNA, 75 bp, synthetic construct
  source 1..75: mol_type = other DNA
ttattagctcaggcgattaaacagtcgattcgtaaaagtgattatgccatccgactcggtggcgatgaattctgc

SEQ ID NO: 627053 - DNA, 75 bp, synthetic construct
  source 1..75: mol_type = other DNA
gtataaagagctatgagtggcggtttaactacacttccatcagacgcccctcaacagcgaaactggatgtgaacg

SEQ ID NO: 627054 - DNA, 75 bp, synthetic construct
  source 1..75: mol_type = other DNA
ggctacgccacgtgatcagtgtaatcaacacctggcctgccaaccgcgtgaaagagttgttgccctggaatgtca

SEQ ID NO: 627055 - DNA, 75 bp, synthetic construct
  source 1..75: mol_type = other DNA
gcaagatagtacggtatcagatttttttggacatctggtttctgatgggaaagatgaaataccatactgtatcgc

SEQ ID NO: 627056 - DNA, 75 bp, synthetic construct
  source 1..75: mol_type = other DNA
aaaagtgcagacagagtaattcaagcagatgacttccatgtccctcctggtgagaaaatagatgatcaggatgaa

SEQ ID NO: 627057 - DNA, 75 bp, synthetic construct
  source 1..75: mol_type = other DNA
atctggagcatgtacggggggagtttgtggtgttctttcacgtataataggaccaagtaaatttgatagtactgc

SEQ ID NO: 627058 - DNA, 75 bp, synthetic construct
  source 1..75: mol_type = other DNA
ttctgacgctgtatgtccgcgaactggcgggtaacgtcagtaacgtcgcctttatcagtggcatgatcgcctcgg

SEQ ID NO: 627059 - DNA, 75 bp, synthetic construct
  source 1..75: mol_type = other DNA
accctgcaactcccgccagccgtgtgcgtcaggctgcggcttcccttgcgccctgtgcatccccgccttatcgcc

SEQ ID NO: 627060 - DNA, 75 bp, synthetic construct
  source 1..75: mol_type = other DNA
aatttagtgctaaatggctaccgatagcagaagagagtggcagctggtctggatgggtattgcttggagaaatat

SEQ ID NO: 627061 - DNA, 75 bp, synthetic construct
  source 1..75: mol_type = other DNA
accggctggctgtcaggctgtcactgatcatcagtcgcctggtggcgggggaaacgctgagcgtgcgcaaactgg

SEQ ID NO: 627062 - DNA, 75 bp, synthetic construct
  source 1..75: mol_type = other DNA
cggctgatgtatctggacctggagtatcagtccggatattgccgcttacgcacagcgggcagtgagacgcagatg

SEQ ID NO: 627063 - DNA, 75 bp, synthetic construct
  source 1..75: mol_type = other DNA
gaaacgttgagcgtgcgcaaactggcggctgagtttggcgtgtcggtgcgcacgctgcggcgtgattttcgtgag

SEQ ID NO: 627064 - DNA, 75 bp, synthetic construct
  source 1..75: mol_type = other DNA
gaaacactcattcctttgaaaccacttttcaaaactggaaagaaaagggtgaagatgttgcgttattaatgcccg

SEQ ID NO: 627065 - DNA, 75 bp, synthetic construct
  source 1..75: mol_type = other DNA
gcgcgcctcaggagctaaccgttaatccaggcgaaaacgtgcaaaagctgttgtttaacatgggaatgcactctg

SEQ ID NO: 627066 - DNA, 75 bp, synthetic construct
  source 1..75: mol_type = other DNA
aaaattccggcaagaaaaaagaagtgctgtggcacctggcgatattgtgatggctaaaatcggcgcaagatgcgg

SEQ ID NO: 627067 - DNA, 75 bp, synthetic construct
  source 1..75: mol_type = other DNA
tgcttcctgaatctgagaaaaatatagagatacgtgtaaatggcgcgctaactggctatggcgaacttgttgaag

SEQ ID NO: 627068 - DNA, 75 bp, synthetic construct
  source 1..75: mol_type = other DNA
ttttgtaattggatttagtaaaacatgttatagaactattgttgatattgaagtcggtgatgttttattaatctc

SEQ ID NO: 627069 - DNA, 75 bp, synthetic construct
  source 1..75: mol_type = other DNA
actgataagaatatggacaggggaattgaatctttggttagataaagtcacagtctgccaatacgaaaacgctcc

SEQ ID NO: 627070 - DNA, 75 bp, synthetic construct
  source 1..75: mol_type = other DNA
gcggtatcactcaatgaagtgtttcggcaggttatagagaccctgctccctctggcactggaaaagggtattgat

SEQ ID NO: 627071 - DNA, 75 bp, synthetic construct
  source 1..75: mol_type = other DNA
cctatgacgggacttatggctcggtcaatggtagctattcctggagccgtgactcccaacattttgattatggcg

SEQ ID NO: 627072 - DNA, 75 bp, synthetic construct
  source 1..75: mol_type = other DNA
ccatgaaagcacgatgcaggtcggtctgaacggaacgatgctggaagggcgtaacctgtcttataacgtacagga

SEQ ID NO: 627073 - DNA, 75 bp, synthetic construct
  source 1..75: mol_type = other DNA
ggtataaaagttgatgcgataaaatctctggcgaatgttgatgacaaaacatgcgtaaatccagttccgctgatc

SEQ ID NO: 627074 - DNA, 75 bp, synthetic construct
  source 1..75: mol_type = other DNA
caggggcggtatattactcaggacccgatggggttgaaagggggatggaatttatatcagtatcctttaaatcca

SEQ ID NO: 627075 - DNA, 75 bp, synthetic construct
  source 1..75: mol_type = other DNA
ggatgaaaaatgtaaggcggcctatcacatcacccataaacctgatgataccagcctggttcaaatggatgcgat

SEQ ID NO: 627076 - DNA, 75 bp, synthetic construct
  source 1..75: mol_type = other DNA
atcgcgtgctatttaacgtccgccaggtcaacggtaaaccaataatgtttggcgcgatggcaaccgcctctctcg

SEQ ID NO: 627077 - DNA, 75 bp, synthetic construct
  source 1..75: mol_type = other DNA
tacagcagtagctggaagcgtctctcgtggaacgtctcctggagttattccaatactgccagacaggggacgggg

SEQ ID NO: 627078 - DNA, 75 bp, synthetic construct
  source 1..75: mol_type = other DNA
cagacagatgttgatgtcagcgtgggtgaattgcgcgatgaagacggatttacaccggacgtccttcaggcgcaa

SEQ ID NO: 627079 - DNA, 75 bp, synthetic construct
  source 1..75: mol_type = other DNA
gctacccgccagccagaatggctttgctcctgtggttcgtgggattgcaaagtccaacgccaccgtcatcattcg

SEQ ID NO: 627080 - DNA, 75 bp, synthetic construct
  source 1..75: mol_type = other DNA
tcgtcacgatggttcccacccgtggcgcggtggttaaggcagagttcgttactcatgtgggttatcgcgtactct

SEQ ID NO: 627081 - DNA, 75 bp, synthetic construct
  source 1..75: mol_type = other DNA
gcgtggtgcagcaacggactggcgtggttacacggtcaagacacagctaaatccttatgatgaaaaccgaatagc

SEQ ID NO: 627082 - DNA, 75 bp, synthetic construct
  source 1..75: mol_type = other DNA
aaatcaccgacctgaataccgccagtacaggtggcgaccttgacgtgactatcaaagaggaagacggtagtgaac

SEQ ID NO: 627083 - DNA, 75 bp, synthetic construct
  source 1..75: mol_type = other DNA
caggtacaagtgcgaaaacacaagaccacagaaacgggtatcaggaagtcggagtcagccatagtagtgatgaag

SEQ ID NO: 627084 - DNA, 75 bp, synthetic construct
  source 1..75: mol_type = other DNA
gagaggaaacttcatctttaccactgtgaccaccgtgggctgccgctggcgcttatcagcccggaaggggaaacg

SEQ ID NO: 627085 - DNA, 75 bp, synthetic construct
  source 1..75: mol_type = other DNA
gcctgaccggcgaacggcagacggtggagaacccggagacgggggaactgctgtggcagcatgagacaacacacg

SEQ ID NO: 627086 - DNA, 75 bp, synthetic construct
  source 1..75: mol_type = other DNA
ccgggcgcatcaccgtgctgaccaacgagaacggcagccagtccacgttccggtatgacccggtggacaggctga

SEQ ID NO: 627087 - DNA, 75 bp, synthetic construct
  source 1..75: mol_type = other DNA
atcagcacttacagcagttataacccgcgcggtcaactggtcagtcagagggatgcgcaggggcgggagacccgt

SEQ ID NO: 627088 - DNA, 75 bp, synthetic construct
  source 1..75: mol_type = other DNA
acggtctgccgccggtggagtggctgacgtatggcagcggttatcttgcggggatgaagctgggcggaacaccgc

SEQ ID NO: 627089 - DNA, 75 bp, synthetic construct
  source 1..75: mol_type = other DNA
gagtacgaccggtacggtcaacaaatcgccgttcaccgggaagaaggcatcagcacttacagcagttataacccg

SEQ ID NO: 627090 - DNA, 75 bp, synthetic construct
  source 1..75: mol_type = other DNA
tgccggacccggagctgcacccggacagtacactcacggcgtggccggataaccgaatcaccgaagacgcgcact

SEQ ID NO: 627091 - DNA, 75 bp, synthetic construct
  source 1..75: mol_type = other DNA
atgatgagaagggaaggctgacggcggagacctcgcgcagcggtgagacgatgcggtacagctatgatgacccgg

SEQ ID NO: 627092 - DNA, 75 bp, synthetic construct
  source 1..75: mol_type = other DNA
aggtatgaatttcgaccagggtgcaatctctgaactctggaatgaaagcaatggctatccggttttactattggg

SEQ ID NO: 627093 - DNA, 75 bp, synthetic construct
  source 1..75: mol_type = other DNA
tgcgggcggtgtatgaccgcagcgggacgcaggtgcgcgggtttacttatgatgtggcgcacgccgggcggatgg

SEQ ID NO: 627094 - DNA, 75 bp, synthetic construct
  source 1..75: mol_type = other DNA
atgagacgcgtggtcaaccacatgatgttatgttccatagcgaccagggaagccagtatacaggcctgaaatatt

SEQ ID NO: 627095 - DNA, 75 bp, synthetic construct
  source 1..75: mol_type = other DNA
agcgcagcggcgaagcctggtggagaagttacagcaggaagggagtgaggacggtcacggtgtggtgttcccgct

SEQ ID NO: 627096 - DNA, 75 bp, synthetic construct
  source 1..75: mol_type = other DNA
acggacagcctgaaccggcgggaggtgctgtacacggaaggcgagggtggcctgaagcgggtggtgaagaaggaa

SEQ ID NO: 627097 - DNA, 75 bp, synthetic construct
  source 1..75: mol_type = other DNA
gatccgttgcaggggcggtatatcaccccggacccgattgggttgagaggtggatggaatatgtatcagtatccg

SEQ ID NO: 627098 - DNA, 75 bp, synthetic construct
  source 1..75: mol_type = other DNA
gcgtccgtttatcctgggctcaaatgactgctggggactggtaatggattggcatgccacccaaggcgtgaagct

SEQ ID NO: 627099 - DNA, 75 bp, synthetic construct
  source 1..75: mol_type = other DNA
aaattcgtggttatggcgatgtcacgctggcactgacgggcaactacgacagctataagggttcgctgacctctg

SEQ ID NO: 627100 - DNA, 75 bp, synthetic construct
  source 1..75: mol_type = other DNA
gcagacggtggagaacccggagacgggggagatgctgtgggagcatgagacggggcacgcgtacagcgaacaggg

SEQ ID NO: 627101 - DNA, 75 bp, synthetic construct
  source 1..75: mol_type = other DNA
tgaaggggggatggaacctgtatgcgtatccgctgaacccggtgcagcggggggatcctcttgggttgtctggtg

SEQ ID NO: 627102 - DNA, 75 bp, synthetic construct
  source 1..75: mol_type = other DNA
tatatgatggctgtcagcacaaccgggcagtggctgatactcggctggccggagcgggtgccggaggcggacgag

SEQ ID NO: 627103 - DNA, 75 bp, synthetic construct
  source 1..75: mol_type = other DNA
acggacgatgccaccggcagccggaaaaccatgacgtggagccgttacggtcagttgctgaccttcactgactgt

SEQ ID NO: 627104 - DNA, 75 bp, synthetic construct
  source 1..75: mol_type = other DNA
ggcactggcggcgtcactggatacgcagggatacagcgttaacgacatcatccatatcctgatggcggaaggagg

SEQ ID NO: 627105 - DNA, 75 bp, synthetic construct
  source 1..75: mol_type = other DNA
aacggcgacctggtgcgcatcagcggcccgcgacagacgcgggaatacggctacagcgccacgggcaggctggag

SEQ ID NO: 627106 - DNA, 75 bp, synthetic construct
  source 1..75: mol_type = other DNA
atcagtaacggtaatgtggataacaacaaaggtctgatccgttcgtccaccgggcatatcgttattggcgcggca

SEQ ID NO: 627107 - DNA, 75 bp, synthetic construct
  source 1..75: mol_type = other DNA
aagcaaagatttaacgaattcttatatgaatggaatggaaaaaaagaatacagtagttacttgggaacaccaaat

SEQ ID NO: 627108 - DNA, 75 bp, synthetic construct
  source 1..75: mol_type = other DNA
gcgcatcaccacgccggatggcagggcatcggcgttttactataaccaccacaaccagttaacgtcagccaccgg

SEQ ID NO: 627109 - DNA, 75 bp, synthetic construct
  source 1..75: mol_type = other DNA
tgatgatcatggacgggtttgataaaccgctcgaaaatggtaaattgacgaggaatttatgggaccagttgcgtg

SEQ ID NO: 627110 - DNA, 75 bp, synthetic construct
  source 1..75: mol_type = other DNA
cgtggtatcgcgggccccggattacttgcccgcgtgttaacgggaaaatactgcgaacatctgccactgtatcgt

SEQ ID NO: 627111 - DNA, 75 bp, synthetic construct
  source 1..75: mol_type = other DNA
gtgaactggatttgttggcaggttgtccaccatgtcaaggattttcttcgttaagaacaaaaaataaaacagtag

SEQ ID NO: 627112 - DNA, 75 bp, synthetic construct
  source 1..75: mol_type = other DNA
atgtttaagtataaaaaaaaggcagcagggatctgttttttgtattttttatgtgtctctgtaatgacatgttat

SEQ ID NO: 627113 - DNA, 75 bp, synthetic construct
  source 1..75: mol_type = other DNA
gtactggccgcgcttgctgccgccgcctggcaggcagagcaggctgaccgggccttattgcgttcactgatcctg

SEQ ID NO: 627114 - DNA, 75 bp, synthetic construct
  source 1..75: mol_type = other DNA
gcgcaagcgtgaacagcagaagtcatccgagcagcccgtgtcgcctgggcgcactgcccgtcgcagcaggcaaag

SEQ ID NO: 627115 - DNA, 75 bp, synthetic construct
  source 1..75: mol_type = other DNA
ggctgggaaaatgcgatggccccgtcaggcaatggcgtgatgcagccgctgcgtgtggtcttttctgcgctattt

SEQ ID NO: 627116 - DNA, 75 bp, synthetic construct
  source 1..75: mol_type = other DNA
gtttaaaagataaatactatgtttattatgcacatcccatagcaaaaagaactagtttaatatcagtagtggatc

SEQ ID NO: 627117 - DNA, 75 bp, synthetic construct
  source 1..75: mol_type = other DNA
tatagatagtgggcttgcaatagctaatgtttctgagtatcgccgctcagtatctaataatatattttatgaact

SEQ ID NO: 627118 - DNA, 75 bp, synthetic construct
  source 1..75: mol_type = other DNA
catgaataacattgaacggttgaaattgctggcagatgaacggttatacaaaagtaagcaaaatggtcgagcgca

SEQ ID NO: 627119 - DNA, 75 bp, synthetic construct
  source 1..75: mol_type = other DNA
agtaaatatctctatatatgtatgctattcgtttttgcatcggcaatatctgcagttatactgtatgtttattat

SEQ ID NO: 627120 - DNA, 75 bp, synthetic construct
  source 1..75: mol_type = other DNA
acaattttgatatcagtggtagatcctgaacgttatttatctttgattagaaatcagtcaggggaacgagaagat

SEQ ID NO: 627121 - DNA, 75 bp, synthetic construct
  source 1..75: mol_type = other DNA
gatatttatcgtggcttacaaaaaaagcaagtatatttatatgtgtttgctatttgtttttgcttcggcggtatc

SEQ ID NO: 627122 - DNA, 75 bp, synthetic construct
  source 1..75: mol_type = other DNA
gcagcgggtatgacgcggcaggaaggctcacggcgcagacggacgcggcgggacggaggacagagtacggtctga

SEQ ID NO: 627123 - DNA, 75 bp, synthetic construct
  source 1..75: mol_type = other DNA
taaagctataaatactagttggaaatataaccgtttgaacagtgaaaatgtgcgagccgacctttgtaaatctct

SEQ ID NO: 627124 - DNA, 75 bp, synthetic construct
  source 1..75: mol_type = other DNA
ggcatcgtgcggcctgacggtggagcagatgcaaagccagatggacccggtatacacgccggcgcgaaaaattca

SEQ ID NO: 627125 - DNA, 75 bp, synthetic construct
  source 1..75: mol_type = other DNA
aagaggaatgacagaacattatatacaatatcttgatgcaatacaggagcatatcaataataaatacaatcttgt

SEQ ID NO: 627126 - DNA, 75 bp, synthetic construct
  source 1..75: mol_type = other DNA
ctcagtccatctgaaatgttagtcaatgccgacaaagcgttatatcaagccaaaagaaccggaaaaaacaaggtg

SEQ ID NO: 627127 - DNA, 75 bp, synthetic construct
  source 1..75: mol_type = other DNA
gtcggcaggccatgcgctcacgcgcgactgcagagtcaacgttgccgtggcaatgcgtcacattgcgcgaagaac

SEQ ID NO: 627128 - DNA, 75 bp, synthetic construct
  source 1..75: mol_type = other DNA
aaactcatcttcatccgatttaagtaaggaaataaaaataaaatcgccgcttctaattccctatgaaaatcaagg

SEQ ID NO: 627129 - DNA, 75 bp, synthetic construct
  source 1..75: mol_type = other DNA
gttgcgttatttcgtcggttgtttcgtgggcgtgatgatgtatgggcccttcgatgggaaagcaaaaccagtgct

SEQ ID NO: 627130 - DNA, 75 bp, synthetic construct
  source 1..75: mol_type = other DNA
gtgatgatccagaccgtggcctgcgtctgttctggtgcgtggtaatcaccctgatcccgctttcaattctgttca

SEQ ID NO: 627131 - DNA, 75 bp, synthetic construct
  source 1..75: mol_type = other DNA
gtcgtaagattaaagaagttatctggggactgatcctcggcagcaccgtcggttgctggttcttcttcggcgtaa

SEQ ID NO: 627132 - DNA, 75 bp, synthetic construct
  source 1..75: mol_type = other DNA
cacattgttatccctgaagttaatctggtgacaggaaataaactaaatcctgggggagttattaaccattatttg

SEQ ID NO: 627133 - DNA, 75 bp, synthetic construct
  source 1..75: mol_type = other DNA
agggaaatgttccgcctcgaaattctggaggatattgcccgggataaagtcagaactctccattttgtggatgag

SEQ ID NO: 627134 - DNA, 75 bp, synthetic construct
  source 1..75: mol_type = other DNA
gtgataacgcatatggtttataaatctgacagcgatgaattatcggcactgcgggcagaaaatacccggctggtc

SEQ ID NO: 627135 - DNA, 75 bp, synthetic construct
  source 1..75: mol_type = other DNA
tatcctactaatacacggcttactgaggatatggggctatggctcaacttattgaaaggaaataaaatatttgca

SEQ ID NO: 627136 - DNA, 75 bp, synthetic construct
  source 1..75: mol_type = other DNA
ggacgatcccggtttcgttcagtacgctggggaacgccctgagccaccgttttatcttcggcccgttgacggaga

SEQ ID NO: 627137 - DNA, 75 bp, synthetic construct
  source 1..75: mol_type = other DNA
cacaggaatatgaagatatccgggctgccggaagtgatgaacgccgtgagctgacacacgccgtgatgcgggaac

SEQ ID NO: 627138 - DNA, 75 bp, synthetic construct
  source 1..75: mol_type = other DNA
gcagagaaccgacagaaattacacattgatgtggccgcagatcctctgacggccttgtctggtgaagataaatgg

SEQ ID NO: 627139 - DNA, 75 bp, synthetic construct
  source 1..75: mol_type = other DNA
gtttgaatcgcaatacataaaaaatcagttgggaatggatgccagtaaaaatgccttaaaatactctgaatcgtc

SEQ ID NO: 627140 - DNA, 75 bp, synthetic construct
  source 1..75: mol_type = other DNA
agctcgtatggatagtgatgacatatctaggcctcaacgcttgaaagttcaattaaattttttagaatcgaatac

SEQ ID NO: 627141 - DNA, 75 bp, synthetic construct
  source 1..75: mol_type = other DNA
ggctcacggcgcagacggacgcggcgggacggcggacagagtacggtctgaatgtggtgtcaggcgatatcacgg

SEQ ID NO: 627142 - DNA, 75 bp, synthetic construct
  source 1..75: mol_type = other DNA
ccgcagcctggcggagaagttacagcaggaagggagcgaagacggtcacggtgtggtgttcccggctgaactggt

SEQ ID NO: 627143 - DNA, 75 bp, synthetic construct
  source 1..75: mol_type = other DNA
agacgcatcaggctggcatgtcgtaacgcgggggttttacttaatggtaaaaccgtcagaaaactgatgaaggaa

SEQ ID NO: 627144 - DNA, 75 bp, synthetic construct
  source 1..75: mol_type = other DNA
tgacctgacggggtggatgtcgctgtcgcgtaaaccggaggtaacgtggtacggctgggacggtgacaggctgac

SEQ ID NO: 627145 - DNA, 75 bp, synthetic construct
  source 1..75: mol_type = other DNA
tctgccgccggtggagtggctgacctacggcagcggctatcttgcgggcatgaagctgggcgggacgccgctggt

SEQ ID NO: 627146 - DNA, 75 bp, synthetic construct
  source 1..75: mol_type = other DNA
cactcacagtgtggccggataaccgaatcaccgaagacgcgcactacctgtaccgttacgatgaatacggcaggc

SEQ ID NO: 627147 - DNA, 75 bp, synthetic construct
  source 1..75: mol_type = other DNA
ggtacaaattggtacgggaaatatcggtgataagttcgattatctcagtttcatgatgtcaggtttgactggtgt

SEQ ID NO: 627148 - DNA, 75 bp, synthetic construct
  source 1..75: mol_type = other DNA
cgtctttttattgctgaggctggtaactcgttcgggctgctggccgattattttgagagcctcgggctgagtgtc

SEQ ID NO: 627149 - DNA, 75 bp, synthetic construct
  source 1..75: mol_type = other DNA
atttgcggatgctcatcaactggtggagcagggagagacgctgcagagagtggatgagcattcactgcccgatct

SEQ ID NO: 627150 - DNA, 75 bp, synthetic construct
  source 1..75: mol_type = other DNA
gcgaaaatttaccatgcgggcccgtccattattgattttctgccctgggtggaatacctggatgaagagcagtgc

SEQ ID NO: 627151 - DNA, 75 bp, synthetic construct
  source 1..75: mol_type = other DNA
aaaactcgaaacttatatcgaagtatactactgaaagaaatgtcacctgcttatccgttcacggaataagaacca

SEQ ID NO: 627152 - DNA, 75 bp, synthetic construct
  source 1..75: mol_type = other DNA
gtattattgagaaagttacatctgggcttgggaaagttaagggtataatatatctcacagccttgtttttttgtt

SEQ ID NO: 627153 - DNA, 75 bp, synthetic construct
  source 1..75: mol_type = other DNA
gagcaatacggatgcagtgagctggaagcggcgttcagggtggcagatgaacttgaccggaaacgggggttaccg

SEQ ID NO: 627154 - DNA, 75 bp, synthetic construct
  source 1..75: mol_type = other DNA
aaggcgctgacggaagaacaacgtcaactcttgcgttcagcggtgaaatcgccggggcggtataccgagggcgtg

SEQ ID NO: 627155 - DNA, 75 bp, synthetic construct
  source 1..75: mol_type = other DNA
acattggggcttcaattactaataagttagaagctcaatacatcaaaaatcaactgggaatggacgccagtaaat

SEQ ID NO: 627156 - DNA, 75 bp, synthetic construct
  source 1..75: mol_type = other DNA
tacctggaacatttggtggatttgttggttcattcgtatcagaaggtgcaagcagcgcaacgcaaaaagaagttg

SEQ ID NO: 627157 - DNA, 75 bp, synthetic construct
  source 1..75: mol_type = other DNA
atcgctgaagccgggaacagttttggcctgcaggctgattattttgaaagccttggactttctgtcaacaagata

SEQ ID NO: 627158 - DNA, 75 bp, synthetic construct
  source 1..75: mol_type = other DNA
ggaacggcgtttacggaagcctggctgggcgaaatggaatgccatttgcggggaattgcccgcccggaaggcctt

SEQ ID NO: 627159 - DNA, 75 bp, synthetic construct
  source 1..75: mol_type = other DNA
ctatctggcgctggcgatgactgagaagcatgaaaaggcggaacggatgcggattatgcaaaagcttggatgcag

SEQ ID NO: 627160 - DNA, 75 bp, synthetic construct
  source 1..75: mol_type = other DNA
tctggttgctgaatgcgctgaattcccacgccagtgtactgacggaatacgaacgttttccttcccgcccacctg

SEQ ID NO: 627161 - DNA, 75 bp, synthetic construct
  source 1..75: mol_type = other DNA
atgatggcggggaaaatccccgcttttttttctgccggtccccggaaagagcaaaaggatgtcgccgcaggctcc

SEQ ID NO: 627162 - DNA, 75 bp, synthetic construct
  source 1..75: mol_type = other DNA
agtaaaccagttggtaaatgccgctgaagttcggtttttctttcagccagcacagcgttgcccggcttttatggt

SEQ ID NO: 627163 - DNA, 75 bp, synthetic construct
  source 1..75: mol_type = other DNA
acagcagcgtgaagcatcggctgtggtaaaaaccgtgacgccagctacgccgcgcaaaatggccgtggcagatag

SEQ ID NO: 627164 - DNA, 75 bp, synthetic construct
  source 1..75: mol_type = other DNA
cagacgattgagaatacagccatgcgcctgatgcaacgagagtcacaaagaccgggaggcatcttacagccacgc

SEQ ID NO: 627165 - DNA, 75 bp, synthetic construct
  source 1..75: mol_type = other DNA
gcaatgctggaagaccaactaaaccgactgaaaggcgctattagtgacgcagccacagaagccagaaacgcaaac

SEQ ID NO: 627166 - DNA, 75 bp, synthetic construct
  source 1..75: mol_type = other DNA
gcaagacagcaaagcgttgcagcagacgattgagaatacagcgatgcggttgatgcaaagagagtcaaccaggcc

SEQ ID NO: 627167 - DNA, 75 bp, synthetic construct
  source 1..75: mol_type = other DNA
cgcatcagcggcccgcaggagagccgggagtaccgttacagcgacacgggaaggctgacgggcgtccacaccacg

SEQ ID NO: 627168 - DNA, 75 bp, synthetic construct
  source 1..75: mol_type = other DNA
cgccacgtctttatcttcccctgccggtccccgttctgcttcctcttctctggttttccccgacacgctgcccgc

SEQ ID NO: 627169 - DNA, 75 bp, synthetic construct
  source 1..75: mol_type = other DNA
gctaccggaccaggacgcccgcgccggtgggggtgtttggtcccggctggaaagcgcccttcgatatccgcttac

SEQ ID NO: 627170 - DNA, 75 bp, synthetic construct
  source 1..75: mol_type = other DNA
gatgcatggcatgtggcgctctttacccgtctgatggaaagccgtgatccgcaactggcggcgatttctgccaaa

SEQ ID NO: 627171 - DNA, 75 bp, synthetic construct
  source 1..75: mol_type = other DNA
ttcaaagtagcatcgaacgtgccaacttactctgatatatgtcaatttttttctgtcatgtaccaaggattccag

SEQ ID NO: 627172 - DNA, 75 bp, synthetic construct
  source 1..75: mol_type = other DNA
aaacttatccgcattacttaaaagtaagatggaatcgacaatttcgtcttgtaacggggaatcatctggatattt

SEQ ID NO: 627173 - DNA, 75 bp, synthetic construct
  source 1..75: mol_type = other DNA
aatagctttcggtggcggacgctacaacggcggcgcggttggtgctggcaacctgtaccgcgtgggtgaacacgg

SEQ ID NO: 627174 - DNA, 75 bp, synthetic construct
  source 1..75: mol_type = other DNA
gagtacggcagcgagttcggcggatttttccccgtccaggtccgtttcacgcctgcccacgaacgttttcacctg

SEQ ID NO: 627175 - DNA, 75 bp, synthetic construct
  source 1..75: mol_type = other DNA
cgcagataaaagctactaatggtgatatcaaggcaggtactgttgaggcaaatgccaccttaaccattaaagcgg

SEQ ID NO: 627176 - DNA, 75 bp, synthetic construct
  source 1..75: mol_type = other DNA
aactgaggcggtggacgtattccgtctgaacaaacattctgtgtcggcagaactgtcaacgacggatgaaaagtg

SEQ ID NO: 627177 - DNA, 75 bp, synthetic construct
  source 1..75: mol_type = other DNA
taaaacaggcattacagcctggtgcagtcgttgcacggatcgccagagagcacaatattaatgacaatctgttgt

SEQ ID NO: 627178 - DNA, 75 bp, synthetic construct
  source 1..75: mol_type = other DNA
cattacctgaatcactttcatacgcccaactcgatgccttactttatgccaacagaaagaaggaattaaccgagc

SEQ ID NO: 627179 - DNA, 75 bp, synthetic construct
  source 1..75: mol_type = other DNA
gatgctggaggcgggtagctgtaccttttacaccccgtgctcactgggggaggtgaaacttgaactgtttgcggt

SEQ ID NO: 627180 - DNA, 75 bp, synthetic construct
  source 1..75: mol_type = other DNA
aagctgaacgcgaatctattgcgctggctaaacgtaaagccgcagaaaacgaccgcatagctaaacaggagaaag

SEQ ID NO: 627181 - DNA, 75 bp, synthetic construct
  source 1..75: mol_type = other DNA
caacgcatcatttcagatcgcagacctggcaactcaattgcaaatgggcggtaatgcactccaggcgttcgccgt

SEQ ID NO: 627182 - DNA, 75 bp, synthetic construct
  source 1..75: mol_type = other DNA
cggaacatggctgaaattcaggctatcgcggcgcttcgtgacctgaaagaacaggcgggacaggcgcagggggaa

SEQ ID NO: 627183 - DNA, 75 bp, synthetic construct
  source 1..75: mol_type = other DNA
ttgtatagcgaaatacgccgggtctggaaccagagtcgaggttccgcaggtgcgcgcacgctggcagatatgctg

SEQ ID NO: 627184 - DNA, 75 bp, synthetic construct
  source 1..75: mol_type = other DNA
aggagtacagtctttgcaggatgctgccagacttgaaagtggaataagaatatccattggtagtggccaatattc

SEQ ID NO: 627185 - DNA, 75 bp, synthetic construct
  source 1..75: mol_type = other DNA
ggacgctttacgcagcaggtcatgacggaatatcaaacgaccgtagatccggcaacaggccaggcattggatccg

SEQ ID NO: 627186 - DNA, 75 bp, synthetic construct
  source 1..75: mol_type = other DNA
acttgcaccttcctattaccttgaaggtctactctacaacgtgccaaatgaaaagtttggcaccagttatgctga

SEQ ID NO: 627187 - DNA, 75 bp, synthetic construct
  source 1..75: mol_type = other DNA
gcttacaaagagcgttatgaggactgctgcctcggcaaactgaaacgcggtgacagtagtaaggacaaggggtta

SEQ ID NO: 627188 - DNA, 75 bp, synthetic construct
  source 1..75: mol_type = other DNA
tactcatgatatccataacaaggaaatgatcttcagcgcaatagaagcaatatatgatggaaatcctggttttat

SEQ ID NO: 627189 - DNA, 75 bp, synthetic construct
  source 1..75: mol_type = other DNA
aagagaatggcgagagaaagaggtgcaattggctccactaatcgagcagaagaactctttcaaattgtcatgggt

SEQ ID NO: 627190 - DNA, 75 bp, synthetic construct
  source 1..75: mol_type = other DNA
ccaagaatgaaaataaaatgttacctgaattattggttctcgatagcgatgaggcaatagatagctggattctat

SEQ ID NO: 627191 - DNA, 75 bp, synthetic construct
  source 1..75: mol_type = other DNA
aaaagattgctgtagaacataaccataaaatctatgaggttccagactttgagctaaatattaaaactaatatta

SEQ ID NO: 627192 - DNA, 75 bp, synthetic construct
  source 1..75: mol_type = other DNA
tactggaaggttatcagcgataccgcccgcgccgatctgaccaacatcatcactgacgcagtagcgcgcggggtt

SEQ ID NO: 627193 - DNA, 75 bp, synthetic construct
  source 1..75: mol_type = other DNA
tgagcaggggatatggtgattcagtctctcattttagttcaggaatgcagggagttatccctgaggctctgaagc

SEQ ID NO: 627194 - DNA, 75 bp, synthetic construct
  source 1..75: mol_type = other DNA
gggaaaaatacctcttccattctttactatcgataatgttctggagcctgatgtgttgggagaacatatttataa

SEQ ID NO: 627195 - DNA, 75 bp, synthetic construct
  source 1..75: mol_type = other DNA
taattaaaaatataaacggaaacgattatttatctctcggttactacgatcaggacaactaccacattaaaagag

SEQ ID NO: 627196 - DNA, 75 bp, synthetic construct
  source 1..75: mol_type = other DNA
atggatgccctgcaattattaacctggtcgctgatcctctatctgtttgccagtctggctattaagctttccggc

SEQ ID NO: 627197 - DNA, 75 bp, synthetic construct
  source 1..75: mol_type = other DNA
tcagtaagcgcctcgatgtgtcgatgtcgaaggcgaagaacatcgctcagaccgagcaggtcggcgcgctgcggc

SEQ ID NO: 627198 - DNA, 75 bp, synthetic construct
  source 1..75: mol_type = other DNA
gcaccaacgatcaagttgccgatggaaacggttcaaatgctgaactgtggtcattggctgcaaagtatgacgcga

SEQ ID NO: 627199 - DNA, 75 bp, synthetic construct
  source 1..75: mol_type = other DNA
gcagtactgacccgctatggtcagcgactgattcagctctatgacttactggcgcaaatacagcaaaaagccttt

SEQ ID NO: 627200 - DNA, 75 bp, synthetic construct
  source 1..75: mol_type = other DNA
ctactgctactgctactgctactgctactgctactgctctctttttcctgccgctctgattctgactactgcagt

SEQ ID NO: 627201 - DNA, 75 bp, synthetic construct
  source 1..75: mol_type = other DNA
ccagtctccgccgaacccgctggcgcggtttcgggctgtcgctacggtccgatgcgtgaaaacccccggcttgca

SEQ ID NO: 627202 - DNA, 75 bp, synthetic construct
  source 1..75: mol_type = other DNA
atggagggactgtacttattagaaacaatggtaagatcgatgatgacgtattcgcaacgtcgctcaaaaaaccat

SEQ ID NO: 627203 - DNA, 75 bp, synthetic construct
  source 1..75: mol_type = other DNA
tctgcatatataaacatccaaaatcatggagggactgtacttattagaaacaatggtaagatcgatgatgacgta

SEQ ID NO: 627204 - DNA, 75 bp, synthetic construct
  source 1..75: mol_type = other DNA
tcttaatattttctttgaaaatgaaactgaagtacaggaaattagacttgctaacttataccaaatctctttatc

SEQ ID NO: 627205 - DNA, 75 bp, synthetic construct
  source 1..75: mol_type = other DNA
agctttctgaaactgaaaaacggggagaaaaccctgatagttgatgcccttaagaaaaagtaccccgttgctgag

SEQ ID NO: 627206 - DNA, 75 bp, synthetic construct
  source 1..75: mol_type = other DNA
aggataaaaatcaggatactttactcggtgaaatccagcgtctcaggaagcaggttcatcagctggagctcgaac

SEQ ID NO: 627207 - DNA, 75 bp, synthetic construct
  source 1..75: mol_type = other DNA
gggtaccttctggcgtgccagcatcccgggcattgacgccaaacgcagcgccgaacttaaagaaaagattcagac

SEQ ID NO: 627208 - DNA, 75 bp, synthetic construct
  source 1..75: mol_type = other DNA
aaagttatgaggatgctcttaataatatacaattacgaagttattcattgcatcaggatattttcgacattttgg

SEQ ID NO: 627209 - DNA, 75 bp, synthetic construct
  source 1..75: mol_type = other DNA
ttcgtgaagatgtttatgagggagctcatgaaggaaacgggcgtgatcgtatgacggttgctcatgagattggac

SEQ ID NO: 627210 - DNA, 75 bp, synthetic construct
  source 1..75: mol_type = other DNA
tttctgaaaaggttgtccgcagactgatggcagaagagcagctcgttgttaagcgcaccaggcgacgacgatata

SEQ ID NO: 627211 - DNA, 75 bp, synthetic construct
  source 1..75: mol_type = other DNA
ttttaagcagtcccggttatcaaaaccagatcgcatccgccaggctgacaacgttcagtgactggaaggcgatca

SEQ ID NO: 627212 - DNA, 75 bp, synthetic construct
  source 1..75: mol_type = other DNA
actgagagaagcaagattaaagaacagtaaaccatattgttttccacctattcttattggtaaacactttaaagg

SEQ ID NO: 627213 - DNA, 75 bp, synthetic construct
  source 1..75: mol_type = other DNA
tcagtctgccgtattcatcatagtggtaaacatagtgcgcatcctctgcgatgcggttatccggccacgccgtga

SEQ ID NO: 627214 - DNA, 75 bp, synthetic construct
  source 1..75: mol_type = other DNA
atttcgactacgctgcgcagtttcctgagtccccaaatctgaaacactttggtctgggaaaaaaggagataacca

SEQ ID NO: 627215 - DNA, 75 bp, synthetic construct
  source 1..75: mol_type = other DNA
aaaacagaagcgggaactgatcgtgttattcatcttgttcaaccagctgttgatgccctgaaaagccaggctgaa

SEQ ID NO: 627216 - DNA, 75 bp, synthetic construct
  source 1..75: mol_type = other DNA
taccgaccagaacatctggaaatatgtcccagaccacagaggcgagacggtttacagcacagagaatggtaacgc

SEQ ID NO: 627217 - DNA, 75 bp, synthetic construct
  source 1..75: mol_type = other DNA
cgagaaagtaaatgcctcacaaggtgaaattattgttgaagtcgatgcaccaagagttaagcgcaagcttgtcat

SEQ ID NO: 627218 - DNA, 75 bp, synthetic construct
  source 1..75: mol_type = other DNA
ctggggagtctgctgtttggcctgctgacgtatctgactaacctgtatttcaaaatcagggaggaccgccgtaag

SEQ ID NO: 627219 - DNA, 75 bp, synthetic construct
  source 1..75: mol_type = other DNA
ataacctgaatcaggggaggccggaatgttatctggcatttttagcagagcctgaatgccataatcacggctccc

SEQ ID NO: 627220 - DNA, 75 bp, synthetic construct
  source 1..75: mol_type = other DNA
cagcgcaacagaaaaaagcctcgctactggccgaagcgcaaagcaccatcagcctgtggcagacagagctgcagc

SEQ ID NO: 627221 - DNA, 75 bp, synthetic construct
  source 1..75: mol_type = other DNA
aacagccgggaatgacggtggaacaggcgaaaatgctactggtagcggcaccggcaaccggtacggcaagtaccg

SEQ ID NO: 627222 - DNA, 75 bp, synthetic construct
  source 1..75: mol_type = other DNA
ggccagtctgattatgtggatgaaatacattcaggcactgaacgcggtcgacacttccactgcaccggatatcgg

SEQ ID NO: 627223 - DNA, 75 bp, synthetic construct
  source 1..75: mol_type = other DNA
agccagctaccatctatgatatctgggatggtgagaactgggtgacagatacggaacgacagcacactgcagaac

SEQ ID NO: 627224 - DNA, 75 bp, synthetic construct
  source 1..75: mol_type = other DNA
aaaattgtctttcccgtccggtaattaaggacttttcatattctcttggtgatgttgtctgggttgatacgggta

SEQ ID NO: 627225 - DNA, 75 bp, synthetic construct
  source 1..75: mol_type = other DNA
gccaggggggctggtcatattttttgtggctggtccagtgttgatgcatgttccggaataattcattattgcggc

SEQ ID NO: 627226 - DNA, 75 bp, synthetic construct
  source 1..75: mol_type = other DNA
ccagcaactgaaaaacatgtggtctcttgccgtctacaccggcgtgcgccacggagaacttgtgtcgctggcctg

SEQ ID NO: 627227 - DNA, 75 bp, synthetic construct
  source 1..75: mol_type = other DNA
caggtcaacgctgggaagttcatctacgacatgacgccgcaggaactggcggagctgctggaggctgtgcagggc

SEQ ID NO: 627228 - DNA, 75 bp, synthetic construct
  source 1..75: mol_type = other DNA
ggcggccaggctgacaacgttcagtgactggaaggtaatcagcgacactgcccgtggcgacctgaccaacatcat

SEQ ID NO: 627229 - DNA, 75 bp, synthetic construct
  source 1..75: mol_type = other DNA
atatcggcatcaagcgagcgctgaaatctctgttcgaccagcgccttaccgggcgtgagcgcgaggttaacagcc

SEQ ID NO: 627230 - DNA, 75 bp, synthetic construct
  source 1..75: mol_type = other DNA
ttttatccaacagtgtgaaacaaataaaatctccgaagcaatagtagatagtataacgatgttggcaagacgatt

SEQ ID NO: 627231 - DNA, 75 bp, synthetic construct
  source 1..75: mol_type = other DNA
aactcatcgccacaaaggcgggagatattaccgtttataattatgatggtgaaacacgagaatatatttctacat

SEQ ID NO: 627232 - DNA, 75 bp, synthetic construct
  source 1..75: mol_type = other DNA
gctatgctatccgccgttcggagaatttaagctcatgggagtatgcgccagaccatcgtggtgaaaccgtctata

SEQ ID NO: 627233 - DNA, 75 bp, synthetic construct
  source 1..75: mol_type = other DNA
attaaaaaaactatatccagttgaagcagatgaatttagaacacggttaagacaaataggtccaattaagaatga

SEQ ID NO: 627234 - DNA, 75 bp, synthetic construct
  source 1..75: mol_type = other DNA
ttcaagttgtttttcgtttagatatattaaaaaaattatatccagttgaagcagatgagtttagagcacggttaa

SEQ ID NO: 627235 - DNA, 75 bp, synthetic construct
  source 1..75: mol_type = other DNA
accgggtatgggcgagatgaaatcagaatgcagccaagttatcacaagaaatatttttcggtgaaaggcaaaata

SEQ ID NO: 627236 - DNA, 75 bp, synthetic construct
  source 1..75: mol_type = other DNA
tcgaacctttatgatagacggtgttaatcgaatgattatgatatgtgatagtatctctgtagaatcacgctcatg

SEQ ID NO: 627237 - DNA, 75 bp, synthetic construct
  source 1..75: mol_type = other DNA
aaaatctttggtgccgtgggcatttctttagcgatgtacttcactgccgcaccggaaaatcgggtaaaagtggcg

SEQ ID NO: 627238 - DNA, 75 bp, synthetic construct
  source 1..75: mol_type = other DNA
tctgcaagagttcagtctgagcgccgagccgctgaaatcgttgttcccggaaggcggttttgccctgcacggtaa

SEQ ID NO: 627239 - DNA, 75 bp, synthetic construct
  source 1..75: mol_type = other DNA
catgcttggcaaagctgacgcagcagcaacgcgaacatatcttgacttgggtaacgcttcgctacgagatgtagg

SEQ ID NO: 627240 - DNA, 75 bp, synthetic construct
  source 1..75: mol_type = other DNA
ggtaagcagccaattaatgctatcttgacagcattggcaggacaaacgccagaagctaataaactggcctatttt

SEQ ID NO: 627241 - DNA, 75 bp, synthetic construct
  source 1..75: mol_type = other DNA
ggatcacttttcatccgtcgttgacatttatcgctcttttgattattggtccggcaggacgagcgttaggtgacg

SEQ ID NO: 627242 - DNA, 75 bp, synthetic construct
  source 1..75: mol_type = other DNA
ggtgaacaaattgttgatggtgggtcaacagagaaaacacacatcaatggcggtacgcaaaccgttcagaattat

SEQ ID NO: 627243 - DNA, 75 bp, synthetic construct
  source 1..75: mol_type = other DNA
aatggaacaatcattgatggtggaggccagtcagtatcaactcaggggcatgttgacggtacgacgataaataag

SEQ ID NO: 627244 - DNA, 75 bp, synthetic construct
  source 1..75: mol_type = other DNA
tgctggaaaatggcggtaatttattggtattagcaggtaccgaagctcgcgactccacggttggcaagggtgggg

SEQ ID NO: 627245 - DNA, 75 bp, synthetic construct
  source 1..75: mol_type = other DNA
gtatcgggtagatctctggcgtaatgatgagttcattggttcacaggatatcgtatttgaatcgacaacagaaaa

SEQ ID NO: 627246 - DNA, 75 bp, synthetic construct
  source 1..75: mol_type = other DNA
ccaaagaaataattgaaaaatttagagggcgatctccgcttgaaaataaaattttattgattgttggcagtgttg

SEQ ID NO: 627247 - DNA, 75 bp, synthetic construct
  source 1..75: mol_type = other DNA
gaggggattgcgacgctgggcgcttttatgggttattcccattcacatattggttttgatcgtggaggacatggc

SEQ ID NO: 627248 - DNA, 75 bp, synthetic construct
  source 1..75: mol_type = other DNA
tggaaaattattttctacgccatttacaaaccagtgctatggaattgttttcggacaaacatatgcatccaacta

SEQ ID NO: 627249 - DNA, 75 bp, synthetic construct
  source 1..75: mol_type = other DNA
atccgcgcattaagccatcgcgtgggtattccggcaggattcagccagcttggcatcaccaaagaagatattgaa

SEQ ID NO: 627250 - DNA, 75 bp, synthetic construct
  source 1..75: mol_type = other DNA
tatctttttgctggcaccactggttcggggggcagaaatctctgtacagcggcagcgagcctcaaacaaacacca

SEQ ID NO: 627251 - DNA, 75 bp, synthetic construct
  source 1..75: mol_type = other DNA
gtttctgacaaagatagcattattagttttttagttgatagtgtggattttaataatggttactccagaccatac

SEQ ID NO: 627252 - DNA, 75 bp, synthetic construct
  source 1..75: mol_type = other DNA
gccactggtacaatgaaaattggacaggttttaattgtagaggaaaagggaaaaataattgtaaactttcccact

SEQ ID NO: 627253 - DNA, 75 bp, synthetic construct
  source 1..75: mol_type = other DNA
gctggagattgggggcaacaactacgccagattaacgccagttcatgctcatcagctgggtatttatctcgttcc

SEQ ID NO: 627254 - DNA, 75 bp, synthetic construct
  source 1..75: mol_type = other DNA
ccatcgacaacaactgggtggaaaaccagatccgaccctgggcgctggggcgcagcaattggctgtttgcgggtt

SEQ ID NO: 627255 - DNA, 75 bp, synthetic construct
  source 1..75: mol_type = other DNA
ctggggcgatggataaggcccagccaggttgtaagtatgggagattcacaggctgctcttactgatgatgcgtcc

SEQ ID NO: 627256 - DNA, 75 bp, synthetic construct
  source 1..75: mol_type = other DNA
ctgcgtgggcgccctgaccgtagatgcagcagactttgctcgcggcgacaccgcttacatcatccctgccggggc

SEQ ID NO: 627257 - DNA, 75 bp, synthetic construct
  source 1..75: mol_type = other DNA
cctgacggcggcgtgatgccactcgcagctggcaaacgcattcatgggattgtggtgcgtgatatctacggtgat

SEQ ID NO: 627258 - DNA, 75 bp, synthetic construct
  source 1..75: mol_type = other DNA
gcgcaggggcgcgatatcaaaatctaccgcgaactgcgtagcgatcccttagttggcggctgtattcgtcgacgc

SEQ ID NO: 627259 - DNA, 75 bp, synthetic construct
  source 1..75: mol_type = other DNA
ttttattaatttgttgtttgctaatgttgcattgaatgaaatacttgttgcttgtgctggtattccaagggattt

SEQ ID NO: 627260 - DNA, 75 bp, synthetic construct
  source 1..75: mol_type = other DNA
aggatgtgatcaagtcgctagcaaataacattcgtgctgaacgaatagatcacggtagttttttgtcaatatatt

SEQ ID NO: 627261 - DNA, 75 bp, synthetic construct
  source 1..75: mol_type = other DNA
gtcgttaatgacgccacgggataatgttacgccagttaaacttgaaggggcggtccggattaccgatagcgcgac

SEQ ID NO: 627262 - DNA, 75 bp, synthetic construct
  source 1..75: mol_type = other DNA
gaatgacgatgatctaataggtgcgttatttttagcattgccagataacttacagtttaattttgttaaaaggat

SEQ ID NO: 627263 - DNA, 75 bp, synthetic construct
  source 1..75: mol_type = other DNA
aatcagtatctgagcacggcgatgaaacaaaaaatttggcaacgtgctttatcgcatcggaaaaataatccgaaa

SEQ ID NO: 627264 - DNA, 75 bp, synthetic construct
  source 1..75: mol_type = other DNA
cagatcgatgaaagcgaaattacggagctaaatcagtcgacagaaggatgggaagaagggaaaaaaggtaatgaa

SEQ ID NO: 627265 - DNA, 75 bp, synthetic construct
  source 1..75: mol_type = other DNA
atgaaaccagcgctgatatgattttgtctgagcttatcagccacggtgaagttgatgaccagatgctattaaatg

SEQ ID NO: 627266 - DNA, 75 bp, synthetic construct
  source 1..75: mol_type = other DNA
tgatatgattttgtctgagcttatcagccacggtgaagttgatgatcagatgctattaaatgccaccgccctgat

SEQ ID NO: 627267 - DNA, 75 bp, synthetic construct
  source 1..75: mol_type = other DNA
ttttgctgtcgggatatgcaggtaattcactctgacgctgctttacaacggttattgacacgtttcaacgatcct

SEQ ID NO: 627268 - DNA, 75 bp, synthetic construct
  source 1..75: mol_type = other DNA
tattggtctctccgggctgctttctccagtactggcgatcgtagcgctgtgtgttgcagccatcgggtttattgc

SEQ ID NO: 627269 - DNA, 75 bp, synthetic construct
  source 1..75: mol_type = other DNA
agccatcgggtttattgccgtgcagccggtgttctggacgatgccgacacaactgctttccggtacggcgctggc

SEQ ID NO: 627270 - DNA, 75 bp, synthetic construct
  source 1..75: mol_type = other DNA
tgaagaacaacagaaagtgacttctcggctgagcgatgcgctgcgtaatgggcgagtctggcaactggcgattat

SEQ ID NO: 627271 - DNA, 75 bp, synthetic construct
  source 1..75: mol_type = other DNA
atgaaaaagattatcgaaacgcaacgtgccccaggcgcaatcggcccttatgttcagggcgttgatttaggcagc

SEQ ID NO: 627272 - DNA, 75 bp, synthetic construct
  source 1..75: mol_type = other DNA
gcagaaacgttgtttgccagcgatgcggcgggattactgacgctggcagcggtggcggtcatcggttcgctgatt

SEQ ID NO: 627273 - DNA, 75 bp, synthetic construct
  source 1..75: mol_type = other DNA
cgctgcgtaatgggcgagtctggcaactggcgattatctacctgaccattcaggtggcggtttacggattaattt

SEQ ID NO: 627274 - DNA, 75 bp, synthetic construct
  source 1..75: mol_type = other DNA
ccacaccggcagcaccggcagcacaggcgctggctgatgcgttgcttgtaattaaagatatgtacaagaaacagt

SEQ ID NO: 627275 - DNA, 75 bp, synthetic construct
  source 1..75: mol_type = other DNA
cgcgatggggagatcgggctgcatgactatcaaatcaaatacgccagcacacgacaaggactgctggcaaacgcc

SEQ ID NO: 627276 - DNA, 75 bp, synthetic construct
  source 1..75: mol_type = other DNA
cctgccacaactaacggtatctacaatacgctgacaaccaatgaactttccggcagcggtaatttctacctgcat

SEQ ID NO: 627277 - DNA, 75 bp, synthetic construct
  source 1..75: mol_type = other DNA
taatttatggacgaaaaacagttacaggctctggctaacgaactggccaaaaacctcaaaacccctgaagacctc

SEQ ID NO: 627278 - DNA, 75 bp, synthetic construct
  source 1..75: mol_type = other DNA
gctcctttgcgtatccttttatgtctcctcaccgtctggtcggtgttttgctgagacttctaacttcctgttttt

SEQ ID NO: 627279 - DNA, 75 bp, synthetic construct
  source 1..75: mol_type = other DNA
aacagggggaggggatgcttcgtttacgctgggtaataccggcggtttcgttgatcttgggacctatgagtatgt

SEQ ID NO: 627280 - DNA, 75 bp, synthetic construct
  source 1..75: mol_type = other DNA
atttattggtattagcaggtaccgaagcccgtgactccacggttggcaagggtggtgcaatgcaaaacctgggtc

SEQ ID NO: 627281 - DNA, 75 bp, synthetic construct
  source 1..75: mol_type = other DNA
gggcagttcactgctgcaacatggtacggggcggctgtacagtgcaggcaacctgctgcttgacgctcaggactt

SEQ ID NO: 627282 - DNA, 75 bp, synthetic construct
  source 1..75: mol_type = other DNA
catgtgggatatatggggcaatttggtgaggcgctcaccgaggcctggtctgttgcacgggtgcttggtgtggaa

SEQ ID NO: 627283 - DNA, 75 bp, synthetic construct
  source 1..75: mol_type = other DNA
caaaacccggagcaatttaaacagtggacccgctttaaaagtcgtgcgttaactgacttcactttagaacttagt

SEQ ID NO: 627284 - DNA, 75 bp, synthetic construct
  source 1..75: mol_type = other DNA
gtgatctggggttcctgttccgtcaactgtggtagccgctgtgcacttcgtctacatgttaaagataatgaagtg

SEQ ID NO: 627285 - DNA, 75 bp, synthetic construct
  source 1..75: mol_type = other DNA
actttaagtgaagtgaagcgtagatgtgtgaggcatttactgctttctcttttcagatacaactgtaaaaatata

SEQ ID NO: 627286 - DNA, 75 bp, synthetic construct
  source 1..75: mol_type = other DNA
gtttttaaatgagttcctgaaaaaacacccggaatcctggtattatctacctgttcttgaaagttattttcataa

SEQ ID NO: 627287 - DNA, 75 bp, synthetic construct
  source 1..75: mol_type = other DNA
ggcgtacagccccgatacctgattgaagcagcaatgcgtatgaagccggatcatatttttctggcggaattacga

SEQ ID NO: 627288 - DNA, 75 bp, synthetic construct
  source 1..75: mol_type = other DNA
atttcattcaccatacgtaaaccctcactgaagcgcttcacactggaggattacgttagcagcaaccgcttcagc

SEQ ID NO: 627289 - DNA, 75 bp, synthetic construct
  source 1..75: mol_type = other DNA
atgattgcggttaccaacaatcagatacagacggtgggcgttaaccagatagagacggtgggcagtaaccagatc

SEQ ID NO: 627290 - DNA, 75 bp, synthetic construct
  source 1..75: mol_type = other DNA
aaggcattctatctctttttctacactcttttttagataatatgtatcactctgaaaaattcatgaacccggttg

SEQ ID NO: 627291 - DNA, 75 bp, synthetic construct
  source 1..75: mol_type = other DNA
ccatcgatattgtggtgttcttcagacatacccatatgacggagatctactacaacccgatggagaaaaatcaac

SEQ ID NO: 627292 - DNA, 75 bp, synthetic construct
  source 1..75: mol_type = other DNA
ggtgatgaggcatggagttacctggaagtactgaatacagggcacgaaggcagcgtgacaaccattcacgccaac

SEQ ID NO: 627293 - DNA, 75 bp, synthetic construct
  source 1..75: mol_type = other DNA
atgcgttggtttcaattttatgatgctgttgagattatcggagatctattaagaaaaagagatgtagaaagaggc

SEQ ID NO: 627294 - DNA, 75 bp, synthetic construct
  source 1..75: mol_type = other DNA
ccctatcgtaaaagtcaggacgcatttgaacatgtctacggtatgttggagcgcgccagtcaggaatgggcgaag

SEQ ID NO: 627295 - DNA, 75 bp, synthetic construct
  source 1..75: mol_type = other DNA
ggtgttaagcaactggcggatgatcgcacgctgctgatggcgggggtaagtcatgatctgcgcacgccgctgacg

SEQ ID NO: 627296 - DNA, 75 bp, synthetic construct
  source 1..75: mol_type = other DNA
tatttacactactacgccgattatatgtgtaaatatgttgatgagatagatcaggacactggcaggcggattgcg

SEQ ID NO: 627297 - DNA, 75 bp, synthetic construct
  source 1..75: mol_type = other DNA
ttcgcaacctgcttacccattccggcgtcagcggagaacaaattgtcggtattggcatctcggcgcagggaaaag

SEQ ID NO: 627298 - DNA, 75 bp, synthetic construct
  source 1..75: mol_type = other DNA
taagaaaaagagatgtagaaagaggccatacttggggtaagaaggcattagaagacattacttttacatcatatc

SEQ ID NO: 627299 - DNA, 75 bp, synthetic construct
  source 1..75: mol_type = other DNA
atattttttcaattacatcttcaatgttatttctttcatgaaaacaacacaaataattacgaatggttatctcca

SEQ ID NO: 627300 - DNA, 75 bp, synthetic construct
  source 1..75: mol_type = other DNA
ggcggcatcgctggcacaaacggccgccagtatggagcaattaaccgccacggtagggcaaaacgccgataacgc

SEQ ID NO: 627301 - DNA, 75 bp, synthetic construct
  source 1..75: mol_type = other DNA
ttcaggtcagtaccatgactcacaccatgcaggagatcgccaccagctcgcaaaaaattggcgacattatcagcg

SEQ ID NO: 627302 - DNA, 75 bp, synthetic construct
  source 1..75: mol_type = other DNA
ggctctagaaacttttggatacccaggattgggaggacaggagttacatactgaaacattgctcgatgttagcat

SEQ ID NO: 627303 - DNA, 75 bp, synthetic construct
  source 1..75: mol_type = other DNA
acgttactgggaggaagagtaccgctggcacagtttcttcctgactccggattatctgtccctgaaggagacaga

SEQ ID NO: 627304 - DNA, 75 bp, synthetic construct
  source 1..75: mol_type = other DNA
taaaggaaaaagggatcgctctgtgccaccaggcccaaggttatagcgctaatctgcgtccggtaagtctcatga

SEQ ID NO: 627305 - DNA, 75 bp, synthetic construct
  source 1..75: mol_type = other DNA
cggtatttacccttgaagaacatgaagtagcacgacatgagtcggcgcagttacagattgcgccagtggtatcct

SEQ ID NO: 627306 - DNA, 75 bp, synthetic construct
  source 1..75: mol_type = other DNA
gaatgtgagagttcaagttggtgataaagggtataacgacacctcagccatgctgggtgtgaagtatacattctg

SEQ ID NO: 627307 - DNA, 75 bp, synthetic construct
  source 1..75: mol_type = other DNA
agcgagtgatgcctggtttctttgcctatcatctcgacacctggctggttatgcatgaggacttgcgccacagta

SEQ ID NO: 627308 - DNA, 75 bp, synthetic construct
  source 1..75: mol_type = other DNA
tactgagtgagatatacaaaaaaaatggctataatattgaactcacatccccagatgaatttattgtaaagaaca

SEQ ID NO: 627309 - DNA, 75 bp, synthetic construct
  source 1..75: mol_type = other DNA
gcgaatgtggaatacgataatatttccgtcgttttgtcggagcgcagagaggatgaattcagagtgtctgcctct

SEQ ID NO: 627310 - DNA, 75 bp, synthetic construct
  source 1..75: mol_type = other DNA
tgtccaaccccgaaaacgggaaaaagcaagttttccccgcttccggcgtttctgaataaatttagcttccagaaa

SEQ ID NO: 627311 - DNA, 75 bp, synthetic construct
  source 1..75: mol_type = other DNA
catattgctccccgtactgactggcagcagtttgcgtggcagagagcagaatactgccagcggcgcagcaggggt

SEQ ID NO: 627312 - DNA, 75 bp, synthetic construct
  source 1..75: mol_type = other DNA
tcctcatacattaggactaatttatgaggccttgcgtgataatacggattttgtaagtttcaaacaggttgtatt

SEQ ID NO: 627313 - DNA, 75 bp, synthetic construct
  source 1..75: mol_type = other DNA
gatttcaaagagaatgtatcattgatttacaaagtatactcaaggaaaatgaagctggtaaccagatcttagttg

SEQ ID NO: 627314 - DNA, 75 bp, synthetic construct
  source 1..75: mol_type = other DNA
cagtcagtttggatgcagcattggaaattttttctatgttatactcacctagtttcagtcatgaaccatcaaaaa

SEQ ID NO: 627315 - DNA, 75 bp, synthetic construct
  source 1..75: mol_type = other DNA
aaaaataataatcactgcgcgtgaaggaaccgttcgcttaaaatactataagcatgatggcacaaattttattaa

SEQ ID NO: 627316 - DNA, 75 bp, synthetic construct
  source 1..75: mol_type = other DNA
gggagcatatgcaagccttgactacaccaaaggtgacgacattgagaatccgctacagggtgtagttggtatcaa

SEQ ID NO: 627317 - DNA, 75 bp, synthetic construct
  source 1..75: mol_type = other DNA
agagagtatgcaagccaggctgcggagccgtataaacaagttttgcagccgcttcccgatgtgtggataccgttt

SEQ ID NO: 627318 - DNA, 75 bp, synthetic construct
  source 1..75: mol_type = other DNA
tgccatgacggaagatgatgtcatgccggaggcattgcgccgttttcaggaaatggtggaagaagcggcacgcaa

SEQ ID NO: 627319 - DNA, 75 bp, synthetic construct
  source 1..75: mol_type = other DNA
ctggtgtacgctattgctacgcaggcaggatatggcgaaatcaatttagcaaatttgccttatgggcagtataat

SEQ ID NO: 627320 - DNA, 75 bp, synthetic construct
  source 1..75: mol_type = other DNA
agaaaaaatttgacatgcaattttttcacgatactaaattattaactggagtatatggtgaagcgtttgatttat

SEQ ID NO: 627321 - DNA, 75 bp, synthetic construct
  source 1..75: mol_type = other DNA
tgttaaaattagaaggtaaagctactactgaagttaagggaaccatgatgacagttcagggaagtgctataacac

SEQ ID NO: 627322 - DNA, 75 bp, synthetic construct
  source 1..75: mol_type = other DNA
actggatgcgctgatcgaatcttctggtattgatcgacgcaagtttaaccgtagcaatcaggctaaatggatcga

SEQ ID NO: 627323 - DNA, 75 bp, synthetic construct
  source 1..75: mol_type = other DNA
gtcagatggggcataaaggaccggaaatgctgttcagacattacggctcttaccttgcagaatacgatggaaaaa

SEQ ID NO: 627324 - DNA, 75 bp, synthetic construct
  source 1..75: mol_type = other DNA
ccgaccagattaagcggatgcaggacgtcattagcaacccaaaacgactggatggaattcccgggcaaatgaatg

SEQ ID NO: 627325 - DNA, 75 bp, synthetic construct
  source 1..75: mol_type = other DNA
ttgtactttgatgaggtttattgatttagctcctgtaagtttaagtcagaaaatttcttattttcgtaagttgca

SEQ ID NO: 627326 - DNA, 75 bp, synthetic construct
  source 1..75: mol_type = other DNA
atttctcctagcaaaaaaggaaaggatagagacataccggaaaaatatacgcgtgacttttacttttcacttggc

SEQ ID NO: 627327 - DNA, 75 bp, synthetic construct
  source 1..75: mol_type = other DNA
gtgcacgaaaagccgtcaacgccgcccggcaatattaccgcgctggttatttatttgctttcctgctggcgggcg

SEQ ID NO: 627328 - DNA, 75 bp, synthetic construct
  source 1..75: mol_type = other DNA
aggcgagaatatgattggtgcaaatggcaggagcgtacctgaaatggcacttcccgaaagctataactatatcca

SEQ ID NO: 627329 - DNA, 75 bp, synthetic construct
  source 1..75: mol_type = other DNA
ctataactatatccacaagtcgggaactttgcatgaagcgccaagccctatcattccgctaaattggtcgaaagc

SEQ ID NO: 627330 - DNA, 75 bp, synthetic construct
  source 1..75: mol_type = other DNA
gtcataaaggaccagagatgttatttagacattatggctcatacctcaaagaatatgatggaaatacatctttaa

SEQ ID NO: 627331 - DNA, 75 bp, synthetic construct
  source 1..75: mol_type = other DNA
ttcataataagatcgaaaggggaacattcatttatgcggaatattttccccgttctgctcgtttgaaaatttttg

SEQ ID NO: 627332 - DNA, 75 bp, synthetic construct
  source 1..75: mol_type = other DNA
atgggcaagaaagaacaaggatcattatctctccctagaggagtaactattcgccagcataaaactggtagcact

SEQ ID NO: 627333 - DNA, 75 bp, synthetic construct
  source 1..75: mol_type = other DNA
gttcgccacgcggcacatcagccaaggtgtaaatctattctggcttgctggccagatgggccacaaaggaccgga

SEQ ID NO: 627334 - DNA, 75 bp, synthetic construct
  source 1..75: mol_type = other DNA
tatctgaaaatctgccagaaccgcaacctttcgccgtccactattggcggttatgaaaagtgcctgtctgcgcta

SEQ ID NO: 627335 - DNA, 75 bp, synthetic construct
  source 1..75: mol_type = other DNA
tcggagttatcaaaggaacaaagacaaaagccggtacccgtaaagttgaactgactgaagaagcaatgttggcgt

SEQ ID NO: 627336 - DNA, 75 bp, synthetic construct
  source 1..75: mol_type = other DNA
cgctgacactcccgtgcctgctgctgttgctgacagcctgcaaaaacgtaccgcccgtctctccccggagctggt

SEQ ID NO: 627337 - DNA, 75 bp, synthetic construct
  source 1..75: mol_type = other DNA
ttgtgcgtctgaagatgaggattcaattaatattgaatattttttgtggcgatttggtttgaatggagggattga

SEQ ID NO: 627338 - DNA, 75 bp, synthetic construct
  source 1..75: mol_type = other DNA
tactccgggggcaacagcccgcaatccgttccgggggagcgttgcgggaacaggaggtgtcgctgtcacatccgg

SEQ ID NO: 627339 - DNA, 75 bp, synthetic construct
  source 1..75: mol_type = other DNA
ggcgttgcgtttgctaaaaagaaaggtgaaatgttatctgatatttgtatttatgctacagcatgcggacatgca

SEQ ID NO: 627340 - DNA, 75 bp, synthetic construct
  source 1..75: mol_type = other DNA
ttataaaaaaataagggagtttaattcttacatagtagtaatattaggaactattcttattgcggcatcatctgt

SEQ ID NO: 627341 - DNA, 75 bp, synthetic construct
  source 1..75: mol_type = other DNA
atcatagctatcagccgcaacactcacgcgctcattgccggtctgaaggtggcagaacaacatcgtaatcaggaa

SEQ ID NO: 627342 - DNA, 75 bp, synthetic construct
  source 1..75: mol_type = other DNA
tgaaggttgcgtgcacgttcttgtacgttttttatcttttttatgagcacatgtttttcaggaatgtctcgttgg

SEQ ID NO: 627343 - DNA, 75 bp, synthetic construct
  source 1..75: mol_type = other DNA
cttataaatttgcgaacaaactactgattggcctgttagcatgcatgctatacagaataattaccatcataatta

SEQ ID NO: 627344 - DNA, 75 bp, synthetic construct
  source 1..75: mol_type = other DNA
acaggaatttacagagatttctacttggatattggtcgactgcaatcagacgctgagtataggaaagcacctcct

SEQ ID NO: 627345 - DNA, 75 bp, synthetic construct
  source 1..75: mol_type = other DNA
gccgcggctggaatgtcaacgtatcccgggtgatggataacgccacccatgtggcggtgtactttggctcttacc

SEQ ID NO: 627346 - DNA, 75 bp, synthetic construct
  source 1..75: mol_type = other DNA
catcaccggactgttgccacacaaaaaaagtctgcttccggtgtaaaagtcgctcccgcccgcactgcggggtga

SEQ ID NO: 627347 - DNA, 75 bp, synthetic construct
  source 1..75: mol_type = other DNA
ctttaattcaggactgccatatcgcgccttatcaatgatgttttcagccatgctttcatatttctttatattttt

SEQ ID NO: 627348 - DNA, 75 bp, synthetic construct
  source 1..75: mol_type = other DNA
atgaaacaggaagtggaaaagtggcgaccttttggacatccggatggtgatattcgtgatttatcatttcttgat

SEQ ID NO: 627349 - DNA, 75 bp, synthetic construct
  source 1..75: mol_type = other DNA
tttgcagcaaaagtcttcttggatgttagtagttttgcacaatatattcaactggactttcctgtcaatgacatc

SEQ ID NO: 627350 - DNA, 75 bp, synthetic construct
  source 1..75: mol_type = other DNA
tgttgttgaaagaggttttcgaactatctaagaaaactaatggagataccttaatctataatactctttggcaat

SEQ ID NO: 627351 - DNA, 75 bp, synthetic construct
  source 1..75: mol_type = other DNA
cttgagcgcggcgttgcttactatatagaagccggtacgctgaccaatgaacaatggcagcaggttacgctgaac

SEQ ID NO: 627352 - DNA, 75 bp, synthetic construct
  source 1..75: mol_type = other DNA
tgttttaccgtccggcaggtctggaagggcagccggagagtgcctatcaccagttgagcgttgcccacagcggta

SEQ ID NO: 627353 - DNA, 75 bp, synthetic construct
  source 1..75: mol_type = other DNA
caaaccaggcaatgaaaacaagagctgggattactgggaagtgcctcggcaggcattactggagcgctggctcca

SEQ ID NO: 627354 - DNA, 75 bp, synthetic construct
  source 1..75: mol_type = other DNA
acgacatatctggaaactagcagtagaatattatcctgaccatgagctttcgcgtaagcttcgaaaggatattcc

SEQ ID NO: 627355 - DNA, 75 bp, synthetic construct
  source 1..75: mol_type = other DNA
tggtagaactggcagctgaacgcggcgcagaaaaatctacctgcacgcattccttgacggtcgcgacaccccgcc

SEQ ID NO: 627356 - DNA, 75 bp, synthetic construct
  source 1..75: mol_type = other DNA
gttataacttagcgcgcacacttaaaaagaactattttggcgctgccagaaagcaacgttattcatgccgggtat

SEQ ID NO: 627357 - DNA, 75 bp, synthetic construct
  source 1..75: mol_type = other DNA
gtcccttctgccagcaccgttataacttagcgcgcacacacttaaaaagaaccattttggcgctgccagaaagca

SEQ ID NO: 627358 - DNA, 75 bp, synthetic construct
  source 1..75: mol_type = other DNA
ttcaaacccgatattgcagctattgccaatattggccatgaatttcttcatgaaaatacctggtttcgcactcca

SEQ ID NO: 627359 - DNA, 75 bp, synthetic construct
  source 1..75: mol_type = other DNA
gttatacactcctcgtttgactatgctcctcaagacgtagttagagatggtcgttataatcatgctggctcacca

SEQ ID NO: 627360 - DNA, 75 bp, synthetic construct
  source 1..75: mol_type = other DNA
tggtagaactggcagctgaacgcggcgcagaaaaaatctacctgcacgcattccttgacggtcgcgacaccccgc

SEQ ID NO: 627361 - DNA, 75 bp, synthetic construct
  source 1..75: mol_type = other DNA
tttagttgtcttgtttttgtttttttctatttcgcaatcttaatgacagtgtcagggaaggtgcgaataagcggg

SEQ ID NO: 627362 - DNA, 75 bp, synthetic construct
  source 1..75: mol_type = other DNA
aagatcaattcttaattaattttaaagctcaaaatccaaatgggacttgggatgaatttaggaatcatgaacaag

SEQ ID NO: 627363 - DNA, 75 bp, synthetic construct
  source 1..75: mol_type = other DNA
ggcagttttaaatattgatgacagatatcgagttgttgatcctaactttggatacgctgacttctcaacattaga

SEQ ID NO: 627364 - DNA, 75 bp, synthetic construct
  source 1..75: mol_type = other DNA
taaaaaaaatgaggaaaagaagaagtgttgatgatgttattgatggcaaacaattaaacaaaaaaacaatgtcaa

SEQ ID NO: 627365 - DNA, 75 bp, synthetic construct
  source 1..75: mol_type = other DNA
tattctgccggtgagcatcttgaactctgctgtggtaaggcaaggctggtgctgacgaaggacggaagcatattt

SEQ ID NO: 627366 - DNA, 75 bp, synthetic construct
  source 1..75: mol_type = other DNA
gtcttacaagctgataagaaagaaattacgataattaataaaacgaaaacacgacacttactcaaaccattgccc

SEQ ID NO: 627367 - DNA, 75 bp, synthetic construct
  source 1..75: mol_type = other DNA
ctttgtgcgtattgtgagatagatttagatcgagaaaatgaacatgaaataaaagtagagcatttcaaatctaaa

SEQ ID NO: 627368 - DNA, 75 bp, synthetic construct
  source 1..75: mol_type = other DNA
ggagcatcagaacggtgcctatgttgatggggtggtgaaagttgaccgttttgccaacaccatccatggcaagat

SEQ ID NO: 627369 - DNA, 75 bp, synthetic construct
  source 1..75: mol_type = other DNA
aaacgtttcctgtctgagcaggctaatgctgccaatgtccaacgaattattcaagataatgcagcgctacataat

SEQ ID NO: 627370 - DNA, 75 bp, synthetic construct
  source 1..75: mol_type = other DNA
ttggagaatgtcaaattttcatcaggtataaagacagctggattgagaatgaactcaaagaaaaaataattgaat

SEQ ID NO: 627371 - DNA, 75 bp, synthetic construct
  source 1..75: mol_type = other DNA
ttagtgcttgatgaagcgcatatgtatagaggagcagggggagcagagatagcccttttaatacgtcgcctctgt

SEQ ID NO: 627372 - DNA, 75 bp, synthetic construct
  source 1..75: mol_type = other DNA
aatatttacctgactccagatggtgatttgtttttacagaagattacaaggatatatggacgctatctaaaaaaa

SEQ ID NO: 627373 - DNA, 75 bp, synthetic construct
  source 1..75: mol_type = other DNA
aagaccgggcttattatttgaaaagagcagttgacagtatattaaaatcaactatttctccaaaagatatcgtaa

SEQ ID NO: 627374 - DNA, 75 bp, synthetic construct
  source 1..75: mol_type = other DNA
tgcgccagtgattaactggaactgtggtgccacacaacctgtaccggatgcgcctgtgccgaaagatttaccccc

SEQ ID NO: 627375 - DNA, 75 bp, synthetic construct
  source 1..75: mol_type = other DNA
acggcgccagtggcaaaacgaacgttttaacgttcgaacctgaaagcctgcacctggttaccgacaaaacacacc

SEQ ID NO: 627376 - DNA, 75 bp, synthetic construct
  source 1..75: mol_type = other DNA
cccgcaaagaaatcacaaaagccctggaatcagccgagggtgagtatgcgagcgcactccgttgggtgcttgggg

SEQ ID NO: 627377 - DNA, 75 bp, synthetic construct
  source 1..75: mol_type = other DNA
aacagaaaagtttaaagagtatatgacagaacttttttctgcttcaggattgaataaagctgaaaaatatcattt

SEQ ID NO: 627378 - DNA, 75 bp, synthetic construct
  source 1..75: mol_type = other DNA
atgaaattctgaaactgaccggtgttgcggcgattaaagaagacagccagctgtcaggtaacgaaatcgtcatcg

SEQ ID NO: 627379 - DNA, 75 bp, synthetic construct
  source 1..75: mol_type = other DNA
gctgaaggtaaaaagggtgctatcgagccgcaggccgactacctcatggaaattgtcgaggggtgggcactacct

SEQ ID NO: 627380 - DNA, 75 bp, synthetic construct
  source 1..75: mol_type = other DNA
ttacccaggcgcgtcagttggcatcgcttaaacccgaagagcaacgggagaaggtcaagcagatcgagacagcga

SEQ ID NO: 627381 - DNA, 75 bp, synthetic construct
  source 1..75: mol_type = other DNA
ggataagaaattttcccgctggcttgaaaagctgctgcgagaacaattgattgttctcgatggtgaagagatccg

SEQ ID NO: 627382 - DNA, 75 bp, synthetic construct
  source 1..75: mol_type = other DNA
tcaggctaagtagtcaggccattgcgcaacacgttctgaaaaacaacgctgaatttattgctgcctttaatccaa

SEQ ID NO: 627383 - DNA, 75 bp, synthetic construct
  source 1..75: mol_type = other DNA
agacaaaatctgcaccagattcgtttggcatcatcggtgaaaatattcgaacacaggacaatcgaataacgtcag

SEQ ID NO: 627384 - DNA, 75 bp, synthetic construct
  source 1..75: mol_type = other DNA
aataaattacattaaaagcgaatatattttatatagattgaaaaacaaactaaatattgctagtcctttattgaa

SEQ ID NO: 627385 - DNA, 75 bp, synthetic construct
  source 1..75: mol_type = other DNA
caggggcggtatatcactcaggatccgattgggctgaaggggggatggaatttttatcagtatccgttgaatcca

SEQ ID NO: 627386 - DNA, 75 bp, synthetic construct
  source 1..75: mol_type = other DNA
gcgacgatctacgggctaagggaattaacgtcgagaagaaattttcgcgctggctggagaagctgctgcgcgaac

SEQ ID NO: 627387 - DNA, 75 bp, synthetic construct
  source 1..75: mol_type = other DNA
aaaacacttatgggcttctaaattcaggaagtccctactccgcttgctggcgcttctttgagcctcgtggcgtcc

SEQ ID NO: 627388 - DNA, 75 bp, synthetic construct
  source 1..75: mol_type = other DNA
ctcggagagttactttttgcctgcggtatctatggtgtggaagaagaagaagcctggttactagctaaaagattc

SEQ ID NO: 627389 - DNA, 75 bp, synthetic construct
  source 1..75: mol_type = other DNA
tttacctgcaccaatgcttgaccgaccagcaaaaggggcggatggcgcactgctggcgttaacagcagggaagaa

SEQ ID NO: 627390 - DNA, 75 bp, synthetic construct
  source 1..75: mol_type = other DNA
gaacaagaaaacgacttacctgctcattacaaagaagctcagttgcttgctgatgcgatttcgggcatgactgac

SEQ ID NO: 627391 - DNA, 75 bp, synthetic construct
  source 1..75: mol_type = other DNA
ggcagcaaagaaccttgcagaggcgttcgagcattataacgaatggcatccacatagtgcgctgggttatcgctc

SEQ ID NO: 627392 - DNA, 75 bp, synthetic construct
  source 1..75: mol_type = other DNA
atcagcgttttgatttgacagaggtaaaatcaaaatttccggatatcactgtttatattaaaaagaatggcgcct

SEQ ID NO: 627393 - DNA, 75 bp, synthetic construct
  source 1..75: mol_type = other DNA
caccattgaggaggggcttcagactgttctcaatggcggaaatgtctccgggactcacattagcggaggtgagca

SEQ ID NO: 627394 - DNA, 75 bp, synthetic construct
  source 1..75: mol_type = other DNA
tcccaattatcgccaggccgcacataaactggctgatttaatggcgatagcaaaaaataaaaatatcccagataa

SEQ ID NO: 627395 - DNA, 75 bp, synthetic construct
  source 1..75: mol_type = other DNA
ggtggatttaatcaacaacttgctgagcaggccgtacagcgttatcagcaaatcattgaagaagtccgtaatggc

SEQ ID NO: 627396 - DNA, 75 bp, synthetic construct
  source 1..75: mol_type = other DNA
ccggatgctatccgggcgcaaattgctgccctttccccagaggatatgtccattctgcaaggctacgctgatgga

SEQ ID NO: 627397 - DNA, 75 bp, synthetic construct
  source 1..75: mol_type = other DNA
gatggaccttgatgttggtaaaaccaaaataaggccctacctgaccgcaggagtcagtcatgaattttcaaatca

SEQ ID NO: 627398 - DNA, 75 bp, synthetic construct
  source 1..75: mol_type = other DNA
tatagatacccaggtatctaaaggtggtgaattacaggttgagagcggttctgagctattgggtacaaccttgat

SEQ ID NO: 627399 - DNA, 75 bp, synthetic construct
  source 1..75: mol_type = other DNA
tatgattggactgtatcttaattccgaattacagcacgaggtatcatcagcacgggcgatcgaaaataacagtct

SEQ ID NO: 627400 - DNA, 75 bp, synthetic construct
  source 1..75: mol_type = other DNA
gtgtgcctgcttttaaccacgtcaggcgaggtggacctgttattccccaacaacaaggatcttgttaatctggat

SEQ ID NO: 627401 - DNA, 75 bp, synthetic construct
  source 1..75: mol_type = other DNA
agaaaaagatatatctagcaaacaattatctgttgtaaataaacaatgtaaccgccccgaaaattctggagacta

SEQ ID NO: 627402 - DNA, 75 bp, synthetic construct
  source 1..75: mol_type = other DNA
atggtctggcgacttttgatctgaaaagtagtaagcaggaagacaacactgttgaagtcacccttgaaaatggcg

SEQ ID NO: 627403 - DNA, 75 bp, synthetic construct
  source 1..75: mol_type = other DNA
ggcactccactttcacatcagtacccgaaacagaacagcgaactacagaagaccatccgcgacaactacctgctt

SEQ ID NO: 627404 - DNA, 75 bp, synthetic construct
  source 1..75: mol_type = other DNA
cccacaaaaaatactgattggctcaccgttaagtaaagcggcagatatcctcttcccagttatctcggacagcat

SEQ ID NO: 627405 - DNA, 75 bp, synthetic construct
  source 1..75: mol_type = other DNA
ctcagttttctaaccagggcacgatggcaggcgctgcgctggtaaaagacgcgatgtataacggttctttgttga

SEQ ID NO: 627406 - DNA, 75 bp, synthetic construct
  source 1..75: mol_type = other DNA
tcgccagccattttgtgatgaacggaggaaacattattgcgcttcagaagattcttggtcacgcaaccattcagc

SEQ ID NO: 627407 - DNA, 75 bp, synthetic construct
  source 1..75: mol_type = other DNA
atgacgtgaaagctggcaggatccgttttatcaggaaccagacgttacaggatcagggggcctgtgacacccgcc

SEQ ID NO: 627408 - DNA, 75 bp, synthetic construct
  source 1..75: mol_type = other DNA
caggaacatttgctgaatgactacagtaaacgtttcagtgtacattttttgcctgggcaggcggggatctggcgt

SEQ ID NO: 627409 - DNA, 75 bp, synthetic construct
  source 1..75: mol_type = other DNA
tctgcgtgccgggccgggcttcataaaggggaacgggggagccagaggggtgtcattttcttttggtctgaaaac

SEQ ID NO: 627410 - DNA, 75 bp, synthetic construct
  source 1..75: mol_type = other DNA
ccgtttatcccgactgcttcctgaggtgtatgtcaaaggttatattaatgaggtgttcagcaaaatgtcgcctca

SEQ ID NO: 627411 - DNA, 75 bp, synthetic construct
  source 1..75: mol_type = other DNA
ttggtaatacatctggcgtcattccaggcaaaaccattacggaacgacaggcagcggaaggactgatctccaacg

SEQ ID NO: 627412 - DNA, 75 bp, synthetic construct
  source 1..75: mol_type = other DNA
tatcgaattggcggcttatgaaatgtatcccgattatgccattaccagcgggcagtattcagaaccctttgaata

SEQ ID NO: 627413 - DNA, 75 bp, synthetic construct
  source 1..75: mol_type = other DNA
catcgggcagatcaagacggataagaaatccaatgagatcacagctatcccagaacttcttaacatgctggatat

SEQ ID NO: 627414 - DNA, 75 bp, synthetic construct
  source 1..75: mol_type = other DNA
tataaaacaagtaatatcagtaatattgtaagggtttttctgattcaaccccgtgagataaaggagtcaagttat

SEQ ID NO: 627415 - DNA, 75 bp, synthetic construct
  source 1..75: mol_type = other DNA
gggttataaaattaaaaaatacatttgttagtgacagaacttataatatgagaggggaggatattgtcatcccag

SEQ ID NO: 627416 - DNA, 75 bp, synthetic construct
  source 1..75: mol_type = other DNA
aataaccaacatgatggagcttttggaaaaataatagattttacccaaaatggaaataaaataagtgcaaaagat

SEQ ID NO: 627417 - DNA, 75 bp, synthetic construct
  source 1..75: mol_type = other DNA
cacacgaggaagtgttacagagagtggttgggttatagataagaccgcacctgttgaaccacttgcgataattga

SEQ ID NO: 627418 - DNA, 75 bp, synthetic construct
  source 1..75: mol_type = other DNA
gactgaaaataaactcggtagggattttgaaattgagtttatgaaaaagaatgaatacggtgagtatgatgaagc

SEQ ID NO: 627419 - DNA, 75 bp, synthetic construct
  source 1..75: mol_type = other DNA
taagttttttgaaggtgtgaagtacatgccgatgatcagagacaaggcatctctactcagcgaactcatggtagg

SEQ ID NO: 627420 - DNA, 75 bp, synthetic construct
  source 1..75: mol_type = other DNA
gtgggtcaatccggaacggggacgctgaatattaaacagaagggtcacgttgacggaggatatttaaggataggt

SEQ ID NO: 627421 - DNA, 75 bp, synthetic construct
  source 1..75: mol_type = other DNA
acggaggatatttaaggataggttcttcgacaggaggcgtcgggacggttaatgttgagggagaggactcggttc

SEQ ID NO: 627422 - DNA, 75 bp, synthetic construct
  source 1..75: mol_type = other DNA
agaatttaataaaggaatgcatccccataaagtgcatacacaccacggattaacagcaattgagaaagcagctaa

SEQ ID NO: 627423 - DNA, 75 bp, synthetic construct
  source 1..75: mol_type = other DNA
ggtgttaattcatcaattacttccaatcatcaggctatgcgcgaattaacggtaatgatgcacgaagcaatgtct

SEQ ID NO: 627424 - DNA, 75 bp, synthetic construct
  source 1..75: mol_type = other DNA
aaagtagcaattaaggaagctagccaggcgttcgatcaattccagcaaaatatgctggacaagccgttgcagacc

SEQ ID NO: 627425 - DNA, 75 bp, synthetic construct
  source 1..75: mol_type = other DNA
taccgacgggcagttattgcgtacatcgggggcagatttcactgctgggagaagatgttcttaacgctcgggaaa

SEQ ID NO: 627426 - DNA, 75 bp, synthetic construct
  source 1..75: mol_type = other DNA
atgctgcaaaattaatggagcaaaacagtgatggcatcgagatcggacgcaataaagtagggattattcacctgg

SEQ ID NO: 627427 - DNA, 75 bp, synthetic construct
  source 1..75: mol_type = other DNA
tggtactttctatgtttcagggccaccggtgtatgttgacctggtcgttaatgctgcaaaattaatggagcaaaa

SEQ ID NO: 627428 - DNA, 75 bp, synthetic construct
  source 1..75: mol_type = other DNA
tgagcctggagacattaccgaagaacaattaaaaattatgagatttgcaattataaaatctataccaagagcaac

SEQ ID NO: 627429 - DNA, 75 bp, synthetic construct
  source 1..75: mol_type = other DNA
gaccaatgttgatgatctgcctcaggttggtagaacacttataagtactattgcacgcgtgccccaagggaaaag

SEQ ID NO: 627430 - DNA, 75 bp, synthetic construct
  source 1..75: mol_type = other DNA
tcaacacattcgttaatgaccggacttatgaattacgtggcgaaaagatagttattcctggcatggcaaaagtac

SEQ ID NO: 627431 - DNA, 75 bp, synthetic construct
  source 1..75: mol_type = other DNA
ccctatgccttgattgaacgcctgtcggcgcagatgggacttatttggtatgatgatggcaaagctatttatatc

SEQ ID NO: 627432 - DNA, 75 bp, synthetic construct
  source 1..75: mol_type = other DNA
attagcccgtcgctaaacagtcagttcaacgtgctggttaacctggccgtggtgaccaatatcattccgtatatt

SEQ ID NO: 627433 - DNA, 75 bp, synthetic construct
  source 1..75: mol_type = other DNA
ttatgtcgcgctatccgtttgagctttcaggtggtatgcgccagcgggtaatgattgcgctggcattctcctgcg

SEQ ID NO: 627434 - DNA, 75 bp, synthetic construct
  source 1..75: mol_type = other DNA
gcggtgaaattgtcggtctggtgggagaatccggctcgggtaaatcagtcactgcaatgttgattatgcgtctgt

SEQ ID NO: 627435 - DNA, 75 bp, synthetic construct
  source 1..75: mol_type = other DNA
agttttattcttcaataataaaaaattgaattatatttatgactctaataaccttgatggagtgattcgtgaata

SEQ ID NO: 627436 - DNA, 75 bp, synthetic construct
  source 1..75: mol_type = other DNA
tggtttttttgtattagcaataagtggtgtcatttcaagtcaggtttctagggcgtatagtttaaaggattttac

SEQ ID NO: 627437 - DNA, 75 bp, synthetic construct
  source 1..75: mol_type = other DNA
ggtgatcctgggcactacagtgaatgcctgtacaacatcgaagaaattatgcgatggatcgaaaaccagaaacaa

SEQ ID NO: 627438 - DNA, 75 bp, synthetic construct
  source 1..75: mol_type = other DNA
gactaacctgtttttttcacaactgcttaatgagaacgtgcgtactctgccagagcatgacgcaacactgaaata

SEQ ID NO: 627439 - DNA, 75 bp, synthetic construct
  source 1..75: mol_type = other DNA
aaatttcagaacacaataaagttactgtaatcttcacacataatcattgtctatcaagaattgctaaaaaaatga

SEQ ID NO: 627440 - DNA, 75 bp, synthetic construct
  source 1..75: mol_type = other DNA
tgcctacagtcgaatgagtggttacaccgtcaagcctcctaccggagacagcaatgagcagacacaatttattga

SEQ ID NO: 627441 - DNA, 75 bp, synthetic construct
  source 1..75: mol_type = other DNA
aaaaatcgcggtgattctgtttccgatgacagggggagaaaacgacacctgggtggagtccagtaaaaacgtctt

SEQ ID NO: 627442 - DNA, 75 bp, synthetic construct
  source 1..75: mol_type = other DNA
ccctagtacaacccgaaataaaataatagaaaaaagggcggttatgctaccgcaagaaattactgacttacggga

SEQ ID NO: 627443 - DNA, 75 bp, synthetic construct
  source 1..75: mol_type = other DNA
agggcaaagccccctccacctatccgttaagcgatgacactatccgcctgttccgccagttcgctgccaaagaac

SEQ ID NO: 627444 - DNA, 75 bp, synthetic construct
  source 1..75: mol_type = other DNA
aatgcaatgcttacatcggacaagacagggatttatccaggaaagaacagcaacgtataaccgtcttcggggcct

SEQ ID NO: 627445 - DNA, 75 bp, synthetic construct
  source 1..75: mol_type = other DNA
accgtccttgccgctatcgaaaagggaggattactggaggttaaagagggggggattagcgattgcggtagatca

SEQ ID NO: 627446 - DNA, 75 bp, synthetic construct
  source 1..75: mol_type = other DNA
gcagcagtatgatgaggagtccggcctgtattacaaccgccaccgctattatgacccgctgcaggggaggtatat

SEQ ID NO: 627447 - DNA, 75 bp, synthetic construct
  source 1..75: mol_type = other DNA
cgaagatgaaagccagcaaactgcattaccctctgcactggcgcactattttgcccaactgcggggcgactcccc

SEQ ID NO: 627448 - DNA, 75 bp, synthetic construct
  source 1..75: mol_type = other DNA
caacgaaacagagaatggagaagagcggcgctgtaataggctgtgatgccaatggctacccgcttgatcctgcgt

SEQ ID NO: 627449 - DNA, 75 bp, synthetic construct
  source 1..75: mol_type = other DNA
accactgctaaccgacggttacgacgtaatacgactaaatagacggttcactgaagaacacatcgaaaggctgat

SEQ ID NO: 627450 - DNA, 75 bp, synthetic construct
  source 1..75: mol_type = other DNA
tcggttatgcctctacctgtgccaaaaagtgcaggttcagtgatacttcccgttgatgaagaggtcgctgctcgt

SEQ ID NO: 627451 - DNA, 75 bp, synthetic construct
  source 1..75: mol_type = other DNA
tgtcatggcagagctggctgatcagtatcttctcgatgagtcggaaaagcgcgcggggaatatcagtgcggttaa

SEQ ID NO: 627452 - DNA, 75 bp, synthetic construct
  source 1..75: mol_type = other DNA
tgggtattgtcccgggcattcaagactcagcgagaagcggaaaacgccgcatcgcagctcatgagctttgcgggg

SEQ ID NO: 627453 - DNA, 75 bp, synthetic construct
  source 1..75: mol_type = other DNA
agccgcgctcgatgttctgtggcgctgggtattgtcccgggcattcaagactcagcgagaagcggaaaacgccgc

SEQ ID NO: 627454 - DNA, 75 bp, synthetic construct
  source 1..75: mol_type = other DNA
agccagtcgattacgtatgacctgtatgggaaaggacacgcagtggggagactcgcggaggtgcttaagacagct

SEQ ID NO: 627455 - DNA, 75 bp, synthetic construct
  source 1..75: mol_type = other DNA
gtcatccagctacaaggacctgtcgtcctcactgaataccgtctctcggttcttacctgaagacatggacctgat

SEQ ID NO: 627456 - DNA, 75 bp, synthetic construct
  source 1..75: mol_type = other DNA
aacgcgtgccgaagctggtgcgaagcggttgttatcgctgaacctgaaaaaaggcgaacgcgtggcgctgattgc

SEQ ID NO: 627457 - DNA, 75 bp, synthetic construct
  source 1..75: mol_type = other DNA
tccaaatctaaaatgtgaaattgtgattgaaaaagacttacttcgaaattttatctcacacactaaaaaacaaat

SEQ ID NO: 627458 - DNA, 75 bp, synthetic construct
  source 1..75: mol_type = other DNA
tagtgcgtaagcttcttttaaacatccgatcggttcgtgtttttgcgcgtgaaactcactttgaacagcttcttg

SEQ ID NO: 627459 - DNA, 75 bp, synthetic construct
  source 1..75: mol_type = other DNA
actcatggcaacgggccacaggtcggcttcattctgcgtcgttctgaaatatcccgggaggaagtctctccggtc

SEQ ID NO: 627460 - DNA, 75 bp, synthetic construct
  source 1..75: mol_type = other DNA
atggcgcacgaactacaactcattaagcaatcatcaggaatcctgatccccgctacgccggagaccagcgatatt

SEQ ID NO: 627461 - DNA, 75 bp, synthetic construct
  source 1..75: mol_type = other DNA
atgccagaagtgaaagaccgtgatttaagtgcgctggaagacgctgcggaagatcaactgcgtgttgtcagagct

SEQ ID NO: 627462 - DNA, 75 bp, synthetic construct
  source 1..75: mol_type = other DNA
atgccagaagtgaaagaccgtgatttaagtgcgctggaagacgccgcagaagatcaaccacatgttgtaagagct

SEQ ID NO: 627463 - DNA, 75 bp, synthetic construct
  source 1..75: mol_type = other DNA
attcagaaaacatacaggatacacacctctccagtatagaaaaagtgaagaatggacatttaaaaaccagactgg

SEQ ID NO: 627464 - DNA, 75 bp, synthetic construct
  source 1..75: mol_type = other DNA
acacacgacccagttctgctgctggagaagtacaaaaaactactgggcgagattgaagaaactgaaaaccagctc

SEQ ID NO: 627465 - DNA, 75 bp, synthetic construct
  source 1..75: mol_type = other DNA
tttgctgatgaaaacctccgggacaggcagccgtggtatctgggccacagggaaagggagcaatgtcctggctga

SEQ ID NO: 627466 - DNA, 75 bp, synthetic construct
  source 1..75: mol_type = other DNA
gactcattcggctgtgggttctgttgcgattgaagtacaaaatggtgcaaacaaagtcgttaatgaaggtactat

SEQ ID NO: 627467 - DNA, 75 bp, synthetic construct
  source 1..75: mol_type = other DNA
acaacttagtattatgccaatgttaggtatgacccttcctggggaaaatggctggccatacggcgatcaaatact

SEQ ID NO: 627468 - DNA, 75 bp, synthetic construct
  source 1..75: mol_type = other DNA
cagctcagagtctaacccccttgatatgacctatgccggaatcagtaatacaagtgctctaggatttaccattgg

SEQ ID NO: 627469 - DNA, 75 bp, synthetic construct
  source 1..75: mol_type = other DNA
atgagtttttatacaggaaaaactataaaggttagacagccatttggtgatttttatatcgcatcaattcctgcc

SEQ ID NO: 627470 - DNA, 75 bp, synthetic construct
  source 1..75: mol_type = other DNA
gctgtattccgccgatgctgtggttaaacactgccggacggcgtccattgttgattggcagctttgccatgatga

SEQ ID NO: 627471 - DNA, 75 bp, synthetic construct
  source 1..75: mol_type = other DNA
ggttcactgggtaaattcactatgccggatagctggacgccggatcctgatttcaccaaacgagctgcgctatgg

SEQ ID NO: 627472 - DNA, 75 bp, synthetic construct
  source 1..75: mol_type = other DNA
ctgacgtaacagggatcttactgtttaatggttctcatttttccagcttctggaaggtccggaagaacaggttaa

SEQ ID NO: 627473 - DNA, 75 bp, synthetic construct
  source 1..75: mol_type = other DNA
atttctattatccccgattacagacaagcctggaaagtggtgcataaattgtcagatattctactgttgactatt

SEQ ID NO: 627474 - DNA, 75 bp, synthetic construct
  source 1..75: mol_type = other DNA
tttggcttgttgatttccgtagcgtttgccccggagactcgagggatgtcactggcgcaaaccagcaatatgacg

SEQ ID NO: 627475 - DNA, 75 bp, synthetic construct
  source 1..75: mol_type = other DNA
gtagtgatggcctttgcggtgtatgcctttttctctggcgggccgggtaatttgcagtggctctatcctaatgaa

SEQ ID NO: 627476 - DNA, 75 bp, synthetic construct
  source 1..75: mol_type = other DNA
atgaggtactggctggtgcgatgcgcggtgtgccggttaaaattctgttggctgatggttcggtagactctgatt

SEQ ID NO: 627477 - DNA, 75 bp, synthetic construct
  source 1..75: mol_type = other DNA
ggctctaaggtacattttcctgttccgtcaatcgcccacctggaacgatatagagaatcattctttgacgtaggc

SEQ ID NO: 627478 - DNA, 75 bp, synthetic construct
  source 1..75: mol_type = other DNA
taataataaaacaaaccctttactaaccctcctaaaacgaaaatctggtgaaataagctcaactgactttaaacc

SEQ ID NO: 627479 - DNA, 75 bp, synthetic construct
  source 1..75: mol_type = other DNA
tataagcctaataaatataagaagcactgggtttgagaatgtagcattgttatttagtgatgagcggataaaaaa

SEQ ID NO: 627480 - DNA, 75 bp, synthetic construct
  source 1..75: mol_type = other DNA
ctacttgcctgtaaacgatgacaacatttctatatgtccggacatccatgatattacgtatccattacaaaaagg

SEQ ID NO: 627481 - DNA, 75 bp, synthetic construct
  source 1..75: mol_type = other DNA
taaggactctgccgacaactacaacgatcattttttccgttttaacggcgcatggcgatacgggctgaaacacgg

SEQ ID NO: 627482 - DNA, 75 bp, synthetic construct
  source 1..75: mol_type = other DNA
taaatgcattggtgtatgctcataaagaattggcatggattcatccctttgaagatggcaatggtaggacgatga

SEQ ID NO: 627483 - DNA, 75 bp, synthetic construct
  source 1..75: mol_type = other DNA
atccagagttaggagttaagctacctaacatattaaatattccaaatgaagtttgtttgacttatatcaaggccc

SEQ ID NO: 627484 - DNA, 75 bp, synthetic construct
  source 1..75: mol_type = other DNA
ttgacatactaaaaggtgatgtggatgctcttaaaattcagatgatgaatgatcttccaaatgaaaacaaagaca

SEQ ID NO: 627485 - DNA, 75 bp, synthetic construct
  source 1..75: mol_type = other DNA
cagatggctatgaaggagcaattcatgagatgagtcttgggggagcaaatttactatatctaacgttaaaattat

SEQ ID NO: 627486 - DNA, 75 bp, synthetic construct
  source 1..75: mol_type = other DNA
ctaatatctctgaaattagcaacataaaaaacatgaatataattggcttcgttaacggtaactgcgaagtttttc

SEQ ID NO: 627487 - DNA, 75 bp, synthetic construct
  source 1..75: mol_type = other DNA
cttatttcttcatggtattggtaatgctgaagatgaaattgttagtagggcaacatatagtttaatattcaggcc

SEQ ID NO: 627488 - DNA, 75 bp, synthetic construct
  source 1..75: mol_type = other DNA
gaggtatttttcgcagaccatacatttgaagtggacttcataaaatcaggtaatagcaattatctagcaaacatc

SEQ ID NO: 627489 - DNA, 75 bp, synthetic construct
  source 1..75: mol_type = other DNA
ctttcacaatacagtctttgcaggttcctggccatacacctgctgatatggcttttaagatcgctgatgcaattt

SEQ ID NO: 627490 - DNA, 75 bp, synthetic construct
  source 1..75: mol_type = other DNA
tttatttttcttctccggaagcgctccgttttctctggggagtggttgacagtccggtttatgatatcagacatc

SEQ ID NO: 627491 - DNA, 75 bp, synthetic construct
  source 1..75: mol_type = other DNA
gatgaagcgcacagggggatgggatcgtcaacgacttccagcgaagcagctaaaagtaccattgtgcaacggctc

SEQ ID NO: 627492 - DNA, 75 bp, synthetic construct
  source 1..75: mol_type = other DNA
ttggcgtgatcacccgccgcgacagccacgacaatatcagcgttcagttcagcggagacgaagggctggaaacta

SEQ ID NO: 627493 - DNA, 75 bp, synthetic construct
  source 1..75: mol_type = other DNA
gcgatttatctttccggcagacagagaatcgatatctattttactgactaataccagtcaggaatcctggcttat

SEQ ID NO: 627494 - DNA, 75 bp, synthetic construct
  source 1..75: mol_type = other DNA
gcaaaatctgccctgaaacaggctcggaaaacgtttgcgctttttttgccacaggtcaattcccttttggtccga

SEQ ID NO: 627495 - DNA, 75 bp, synthetic construct
  source 1..75: mol_type = other DNA
ctgcgcaacggaagatgccaccggcagccggaaaaccatgacgtggagccgttacggtcagttgctgagcttcac

SEQ ID NO: 627496 - DNA, 75 bp, synthetic construct
  source 1..75: mol_type = other DNA
acgcggtatgaatacaacatcgccggtgacctgaccgccgtcattgccccggacggcagcagaaacgggacatag

SEQ ID NO: 627497 - DNA, 75 bp, synthetic construct
  source 1..75: mol_type = other DNA
accgtagacccgaccttgttacgtcaggtcagcgggatcggtaataacctcaatcaaatagcccgttacttgaat

SEQ ID NO: 627498 - DNA, 75 bp, synthetic construct
  source 1..75: mol_type = other DNA
agcgcgatgcggtacatgatgctctggcgaatctcaggaaggctcgacgttactggcacaacgagagcgacaaaa

SEQ ID NO: 627499 - DNA, 75 bp, synthetic construct
  source 1..75: mol_type = other DNA
gaaggcgtggctgatcgagtacacaccgcagatcaagtcgttgaaagatgagcgtaaagaggcttaccgtcaaat

SEQ ID NO: 627500 - DNA, 75 bp, synthetic construct
  source 1..75: mol_type = other DNA
cggcggtctgactgacggaaatgcgcaatggttcttacaggcaggtaaaactacatcacaggtttctgatgatga

SEQ ID NO: 627501 - DNA, 75 bp, synthetic construct
  source 1..75: mol_type = other DNA
ttttcccaggagaatgtgcgcgcgaccgtcaactgggagcgcgacagcaaacgggaagagttactcactgatatg

SEQ ID NO: 627502 - DNA, 75 bp, synthetic construct
  source 1..75: mol_type = other DNA
caagccaagcgtggtgcacaccggtggcaaattacctattggtcaaggctagcgcatatattgggttacctgctg

SEQ ID NO: 627503 - DNA, 75 bp, synthetic construct
  source 1..75: mol_type = other DNA
cagcataaagggcgttatggttatcgacgcatcagacttgcctgccgtaacgagggcattttacttaatggtaaa

SEQ ID NO: 627504 - DNA, 75 bp, synthetic construct
  source 1..75: mol_type = other DNA
ttggacatcgcacgctgatcatcgccactcaccgcacggcgatgctgcaactggtggaccgcattatcgtgatgg

SEQ ID NO: 627505 - DNA, 75 bp, synthetic construct
  source 1..75: mol_type = other DNA
gcggcctgacggtggcgcagatgcaaagccagatggacccggtatacacgccggcgcgaaaaattcacctgtacc

SEQ ID NO: 627506 - DNA, 75 bp, synthetic construct
  source 1..75: mol_type = other DNA
ttgctacttcttacgtttgttaacgtacctagcatagaggacgtacgtttcaaggtggatgtggcaagggctcgt

SEQ ID NO: 627507 - DNA, 75 bp, synthetic construct
  source 1..75: mol_type = other DNA
agaagcaagcagattgaaaaaactcttcgtgatgttgattactccatggagttacacaagcactcactaaaaaat

SEQ ID NO: 627508 - DNA, 75 bp, synthetic construct
  source 1..75: mol_type = other DNA
ggcgactgtttttcggctcgctgcgggaaaacctgacgatggggatgccggaggccagcgatgaagatatcgaac

SEQ ID NO: 627509 - DNA, 75 bp, synthetic construct
  source 1..75: mol_type = other DNA
gttttgttggcgctgccgttgctggtgatccccggcctgctggtacaacgcccgttagcgcggctggcgaacgaa

SEQ ID NO: 627510 - DNA, 75 bp, synthetic construct
  source 1..75: mol_type = other DNA
cgcccgctcagcgccatccctgacgcgcgggtggatgactatattcgcccgtatcaggcgaactggttctggagt

SEQ ID NO: 627511 - DNA, 75 bp, synthetic construct
  source 1..75: mol_type = other DNA
gcgggaagagttgctcaccgatatggcgcggcagttgggaatggggttacggctggtggagttttccgccgattc

SEQ ID NO: 627512 - DNA, 75 bp, synthetic construct
  source 1..75: mol_type = other DNA
cgtggcgcgttattaccgcctcgatttttcccaggagaacgtgcgcgcgaccgtcaactgggagcgcgacagcaa

SEQ ID NO: 627513 - DNA, 75 bp, synthetic construct
  source 1..75: mol_type = other DNA
gcggtggcggatctgccgttcttcctgctgtttgtctttattttgtggatgatcggcggctggctggtgctggtg

SEQ ID NO: 627514 - DNA, 75 bp, synthetic construct
  source 1..75: mol_type = other DNA
agcgccttgagttcgcaccgtttccgctttccgcacttgcccgcgtaactgcatgggacagcccgctcaatcctg

SEQ ID NO: 627515 - DNA, 75 bp, synthetic construct
  source 1..75: mol_type = other DNA
ttgatattcagatcatttctaacatttcataacaatgagttaatgttggaaaaatataatccgaaatatcttgta

SEQ ID NO: 627516 - DNA, 75 bp, synthetic construct
  source 1..75: mol_type = other DNA
atggatttactgattattttaacctatgtggctttcgcatgggcaatgtttaagatcttcaaaattcctgtaaat

SEQ ID NO: 627517 - DNA, 75 bp, synthetic construct
  source 1..75: mol_type = other DNA
aagcggttatttctattcctgttgtcccacaggtgactggtgtggtgattgaagtgacggataagaaaaatacgc

SEQ ID NO: 627518 - DNA, 75 bp, synthetic construct
  source 1..75: mol_type = other DNA
cgtacgtattttgacaaaatcgtggcttccctgctgccgttactggaaaaactcaccaccggcaggattgcagag

SEQ ID NO: 627519 - DNA, 75 bp, synthetic construct
  source 1..75: mol_type = other DNA
tgaggaatttagaaaaaattggttggtgagaacgaagtgtttcagaaactttgaagaattaaaaaaaactgattt

SEQ ID NO: 627520 - DNA, 75 bp, synthetic construct
  source 1..75: mol_type = other DNA
ccagaatgcttcacgtatttcatattcacccggaaaccagcgaactgactggagaaagcgacgtatatatcccac

SEQ ID NO: 627521 - DNA, 75 bp, synthetic construct
  source 1..75: mol_type = other DNA
tcctttgcgcattcattcgcgttgagcagccaggattcagttctgcgccagtgactgagaaggcattgaatatct

SEQ ID NO: 627522 - DNA, 75 bp, synthetic construct
  source 1..75: mol_type = other DNA
cttaaggcagacattgaatcacgtcaggaagggcttgaaagtttaagaaatgagtggaaaaaatatgcagataaa

SEQ ID NO: 627523 - DNA, 75 bp, synthetic construct
  source 1..75: mol_type = other DNA
aattcaacaacagtaaagttggctaacaacccattcttacttctcgaaggaaaagctggaattggtaagtctcat

SEQ ID NO: 627524 - DNA, 75 bp, synthetic construct
  source 1..75: mol_type = other DNA
ctcattattgatgaaataaatcggggtaatatttcaaaaatttttggtgaactaattacccttattgaaccatct

SEQ ID NO: 627525 - DNA, 75 bp, synthetic construct
  source 1..75: mol_type = other DNA
cgatacaaggggccaggcgtggtacatggatatgatgtgcgaagcgcgtggcgcggcggatctgtatacgcaatc

SEQ ID NO: 627526 - DNA, 75 bp, synthetic construct
  source 1..75: mol_type = other DNA
tgtcgcctggccgcaggcaacgcttcacggtggacgaggcggaaaagttatcggttttatgatgccaaaagtttc

SEQ ID NO: 627527 - DNA, 75 bp, synthetic construct
  source 1..75: mol_type = other DNA
tttggcgttctggcagtggtccgtttccggcaggggatgaagatcatccgttaccgtcgcaatctgcgccggctg

SEQ ID NO: 627528 - DNA, 75 bp, synthetic construct
  source 1..75: mol_type = other DNA
attgtcgcctcactgctgccgctgctggaaaagctgaccaccggtacgcttgccaccctgctcgccccggattac

SEQ ID NO: 627529 - DNA, 75 bp, synthetic construct
  source 1..75: mol_type = other DNA
atcgactatgcccgcatcgtactgccgcgccacaacgcacgggcgtgggaagtggtagcgcaactagcggagcgc

SEQ ID NO: 627530 - DNA, 75 bp, synthetic construct
  source 1..75: mol_type = other DNA
ctcggaggtggcgtcgcgcctcaccggacagctttccggcgaaggcaactcggcggcctttcgcgagttcgcctg

SEQ ID NO: 627531 - DNA, 75 bp, synthetic construct
  source 1..75: mol_type = other DNA
tgctgctgcggccagcagtggagctatacaccgttgcggtatgcgccggctccgcgctggtctgcctggtggcac

SEQ ID NO: 627532 - DNA, 75 bp, synthetic construct
  source 1..75: mol_type = other DNA
gtgctgctggccctgcaacgcggctggcagggctggcaaatcgtacgctaccagcgtaacctcctgctcctgccg

SEQ ID NO: 627533 - DNA, 75 bp, synthetic construct
  source 1..75: mol_type = other DNA
gctgcccatcgacgacaaacactggacgctgccgtattctatccagcagctaacagaatggatgcagccccgcca

SEQ ID NO: 627534 - DNA, 75 bp, synthetic construct
  source 1..75: mol_type = other DNA
cctgcacggtattgaaccggatgagcaggatgtgacactggcactgggtgaacgtgtggggcacaccattgtcta

SEQ ID NO: 627535 - DNA, 75 bp, synthetic construct
  source 1..75: mol_type = other DNA
tttggcgttctggcggctgtccgtttccgccagggcatgaaaatcatccgctaccgacgcaatctgcgtcggtta

SEQ ID NO: 627536 - DNA, 75 bp, synthetic construct
  source 1..75: mol_type = other DNA
gtacccaggatcgcgtcgggacggtgaaagtccccctgctggagcccgcagatattgtcacgctgcccaaggggc

SEQ ID NO: 627537 - DNA, 75 bp, synthetic construct
  source 1..75: mol_type = other DNA
ttgctggcaccggactatctggatatgagcgattcacgaccgatttttgactgggagcagataatccgcaaaaag

SEQ ID NO: 627538 - DNA, 75 bp, synthetic construct
  source 1..75: mol_type = other DNA
tccgttttgaatcccgttttccggcggtttgccggcttttgcaaaaagacagttggctgaatccggtccgcccgc

SEQ ID NO: 627539 - DNA, 75 bp, synthetic construct
  source 1..75: mol_type = other DNA
gtttctgggaaaagggtttcagtggcagcaaaaacacacgcaacgcctgctggaaacccagcgtccggaagtgga

SEQ ID NO: 627540 - DNA, 75 bp, synthetic construct
  source 1..75: mol_type = other DNA
gtgcagcttcctcggcaacggcggcagtaaattccgcaacggcggcaaaaacgtccgagacgaaagccaggtcat

SEQ ID NO: 627541 - DNA, 75 bp, synthetic construct
  source 1..75: mol_type = other DNA
gccacgaaggcttcagaggcggcgacctcagcccgtgatgcggaggcctcaaaagacgcggcaaaatcatcagaa

SEQ ID NO: 627542 - DNA, 75 bp, synthetic construct
  source 1..75: mol_type = other DNA
gccacgaaggcttcagaggcggctacctcagcccgggatgcggaggcctcaaaagacgcggcaaaatcatcagaa

SEQ ID NO: 627543 - DNA, 75 bp, synthetic construct
  source 1..75: mol_type = other DNA
gtgcagcttcctcggcaacggcggcagtaaattccgcgacggcggcaaaaacgtccgagacgaaggccaggtcat

SEQ ID NO: 627544 - DNA, 75 bp, synthetic construct
  source 1..75: mol_type = other DNA
gtgcagcttcctcggcaacggcggcagtaaattccgccacggcggcaaaaacgtccgagacgaacgccaggtcat

SEQ ID NO: 627545 - DNA, 75 bp, synthetic construct
  source 1..75: mol_type = other DNA
gccacgaatgcttcagaggcggccacctcagcccgcgatgcggaggcctcaaaagacgcggcaaaatcatcagaa

SEQ ID NO: 627546 - DNA, 75 bp, synthetic construct
  source 1..75: mol_type = other DNA
tgtacaaggggatgcttctggtcagaaaaagggaggttgtgaagcaggacagcttatttccggtaatgttaaacg

SEQ ID NO: 627547 - DNA, 75 bp, synthetic construct
  source 1..75: mol_type = other DNA
ccttaatggcaaagcaaattctgcaaaagtgcatttttacgccattaatgattttggtggtgccattgaaggtaa

SEQ ID NO: 627548 - DNA, 75 bp, synthetic construct
  source 1..75: mol_type = other DNA
acatatatcgctggcagggcggagagcaacgaccggcaaccatcatcagtgaaccagaccgtaatgtccgctatg

SEQ ID NO: 627549 - DNA, 75 bp, synthetic construct
  source 1..75: mol_type = other DNA
cacactactattacgggtatttatttcctgatattgttgagtcaattaaaggttctttgtcatattctattgatt

SEQ ID NO: 627550 - DNA, 75 bp, synthetic construct
  source 1..75: mol_type = other DNA
ggggaagtctggcatttgcattgttgttaatacagacaggctgggcaggccccgatcaggttgatatgcatattt

SEQ ID NO: 627551 - DNA, 75 bp, synthetic construct
  source 1..75: mol_type = other DNA
tgtagatgcttataataatctagaggtgcttgcgttaatatcaaacacattactaatgggatggtattatttttc

SEQ ID NO: 627552 - DNA, 75 bp, synthetic construct
  source 1..75: mol_type = other DNA
cgctcaatcaggtccagcctcttacgcccttaaaagccggggataacacactcaaatatcaacttcgttataagt

SEQ ID NO: 627553 - DNA, 75 bp, synthetic construct
  source 1..75: mol_type = other DNA
ttccggctccctgctggcaaagtctggttatcaccggtggtggactgcttcgatggaaaagttgtgagctggtct

SEQ ID NO: 627554 - DNA, 75 bp, synthetic construct
  source 1..75: mol_type = other DNA
tcgaagatgacaaaacagcggcagaaacccactatgatgctgtctggttgagggatagtttatggggctatatgg

SEQ ID NO: 627555 - DNA, 75 bp, synthetic construct
  source 1..75: mol_type = other DNA
ggaacgtttattcttgcttctactttcgaagatgacaaaacagcggcagaaacccactatgatgctgtctggttg

SEQ ID NO: 627556 - DNA, 75 bp, synthetic construct
  source 1..75: mol_type = other DNA
atgatggagacggtctgttacccggcaatggaagaagtggcgcaggagttgcggttgcgcggcgcgtacgtggag

SEQ ID NO: 627557 - DNA, 75 bp, synthetic construct
  source 1..75: mol_type = other DNA
acgagtgcagcctcgagcgccagtagtgcagcctcctcggcaacggcggcaggaaattccgcgaaggcggcaaaa

SEQ ID NO: 627558 - DNA, 75 bp, synthetic construct
  source 1..75: mol_type = other DNA
taaatggcgcttccctcacacttaccagtatcgggcgtcatttaaccggtacggcatcagttaaaaacaaaataa

SEQ ID NO: 627559 - DNA, 75 bp, synthetic construct
  source 1..75: mol_type = other DNA
aggtttccaccatttttcagcgaattacccaaaagattacgcggggaatgtctcgtgttgtgatactcattgact

SEQ ID NO: 627560 - DNA, 75 bp, synthetic construct
  source 1..75: mol_type = other DNA
cagatcacagttgacgggtcgcaatatacatttgattcctcagggttatatttttctggatgtaagtgtcttact

SEQ ID NO: 627561 - DNA, 75 bp, synthetic construct
  source 1..75: mol_type = other DNA
gcagcctggcggatacccttcagcagtccggcggcgaagacggtggcagtgtggtgttcccgccggtgctggtgc

SEQ ID NO: 627562 - DNA, 75 bp, synthetic construct
  source 1..75: mol_type = other DNA
ttattttgttcaactgaattaaactcgaaatcacaatcgcctgcattaggtttgggacatgagtttgctcatgcg

SEQ ID NO: 627563 - DNA, 75 bp, synthetic construct
  source 1..75: mol_type = other DNA
gcatgctgatgactaacgggatatccgcgctgcaaaacaccacggtgattatggggctgccgttcagctttgtga

SEQ ID NO: 627564 - DNA, 75 bp, synthetic construct
  source 1..75: mol_type = other DNA
attttaatatcaacttcattttatattttttacttaagaagaataccaggttgtaaaatcaccataaagacaaat

SEQ ID NO: 627565 - DNA, 75 bp, synthetic construct
  source 1..75: mol_type = other DNA
caggagggttgatatcatttacagtgacaggaaggattgtaaccatcacaagccagggaacaacaacatttaact

SEQ ID NO: 627566 - DNA, 75 bp, synthetic construct
  source 1..75: mol_type = other DNA
ccgttgtcagcaaaagcccgctcactgctggcgcagttcacatccgaagatatgcggcaggtgcttgaaatctca

SEQ ID NO: 627567 - DNA, 75 bp, synthetic construct
  source 1..75: mol_type = other DNA
tgtacttatgacgccgacaccttaagcaaagatccggcagatggtcgtaaagtgaaaggcgttattcactgggtg

SEQ ID NO: 627568 - DNA, 75 bp, synthetic construct
  source 1..75: mol_type = other DNA
acattttatggtcagtatggggatgtctatcgaacagttcttgatgcaaatcccacaaacccgtccctgcgcccc

SEQ ID NO: 627569 - DNA, 75 bp, synthetic construct
  source 1..75: mol_type = other DNA
cgtttcatctccacgagcggaaaaagcaaggctatattctgctattgagcagtggttagagcaatctctcaaaat

SEQ ID NO: 627570 - DNA, 75 bp, synthetic construct
  source 1..75: mol_type = other DNA
tgacaatagcaaaaaatagtggcggcgagaaaataaccgtcagcggtactgatggtaatcggcaaataacagggg

SEQ ID NO: 627571 - DNA, 75 bp, synthetic construct
  source 1..75: mol_type = other DNA
actttgaatattcaaccagattttcaaagagacattgtatggaattcatcagctcaaacacgatttattgactcc

SEQ ID NO: 627572 - DNA, 75 bp, synthetic construct
  source 1..75: mol_type = other DNA
ataggtttggtcgatgggagaaatattacaacattcaactccgcggcgcgctcttatcagcaatcaatcacctgt

SEQ ID NO: 627573 - DNA, 75 bp, synthetic construct
  source 1..75: mol_type = other DNA
aaaggtatctgtactcctgataatggcgtttttcatagtacacttgatttttcaggatacgttatttctgcaagt

SEQ ID NO: 627574 - DNA, 75 bp, synthetic construct
  source 1..75: mol_type = other DNA
cggcacaaacctgcgaaattaataatttacagccgatttattttgattttaaagaaatacccgccgcagattttt

SEQ ID NO: 627575 - DNA, 75 bp, synthetic construct
  source 1..75: mol_type = other DNA
agtagggaactgccaggcatcaaataaaacgaaaggctcagtcgaaagactgggcctttcgttttatctgttgtt

SEQ ID NO: 627576 - DNA, 75 bp, synthetic construct
  source 1..75: mol_type = other DNA
gttgcccggaaattgacgctttaccagagttcctacagagtatttcgcgggaattatttcagcactcgctgactg

SEQ ID NO: 627577 - DNA, 75 bp, synthetic construct
  source 1..75: mol_type = other DNA
gtatcccggtagaccgtatcatcaaactggcgcgtgaaattggcacagcaaaacccgcttatatctgccagggct

SEQ ID NO: 627578 - DNA, 75 bp, synthetic construct
  source 1..75: mol_type = other DNA
gtcaaacgcctgatgaactgctacggcggttcactcaatcagtatggctcctacagcaccgcgcaaatttcctgt

SEQ ID NO: 627579 - DNA, 75 bp, synthetic construct
  source 1..75: mol_type = other DNA
gtaccgaaagatcagttgcatccggttccggcaatgctgctgggggcgttgaacttaacgccaatcgaagtggcg

SEQ ID NO: 627580 - DNA, 75 bp, synthetic construct
  source 1..75: mol_type = other DNA
ctgttcctctccagcgagcgctcttactggcgtaaagcgaacgaagcctacatggcgctgatcatggacgcgcgt

SEQ ID NO: 627581 - DNA, 75 bp, synthetic construct
  source 1..75: mol_type = other DNA
ggcagcgaattttgcggggtgttctgagctgccttgccgccattctggtgctgggaggcttcagtttcatccttc

SEQ ID NO: 627582 - DNA, 75 bp, synthetic construct
  source 1..75: mol_type = other DNA
atctatactgcaaagctggataacggaacatcgatcacgttgcgaaatttatcgtcgtctcaagaacaaacaggt

SEQ ID NO: 627583 - DNA, 75 bp, synthetic construct
  source 1..75: mol_type = other DNA
cacagacactggaagatgccctgagtttgtatacagatgagcgcacagtgagcaagatttgcaaaggggggaata

SEQ ID NO: 627584 - DNA, 75 bp, synthetic construct
  source 1..75: mol_type = other DNA
tctctgatgctttcggttctcctggtagctttgttcgcagacgcatacctgcagaatatgaggcgaatgcatctg

SEQ ID NO: 627585 - DNA, 75 bp, synthetic construct
  source 1..75: mol_type = other DNA
cggcggaagccacatggggcggactgctcccctcactggtgcgggagtaccgttacgacagcgcgggcaatgtgt

SEQ ID NO: 627586 - DNA, 75 bp, synthetic construct
  source 1..75: mol_type = other DNA
tcatggcattcatggagaagaaaagctggtctgatgtaggaatggcgcttgtctattgttccctcgctggcggtg

SEQ ID NO: 627587 - DNA, 75 bp, synthetic construct
  source 1..75: mol_type = other DNA
aagaccacattattttgcttactaacctggtggtgggtaaggaagaaaagcttcgcttccatgagctgataattg

SEQ ID NO: 627588 - DNA, 75 bp, synthetic construct
  source 1..75: mol_type = other DNA
gttcagagaccctaaaaccgaccgtccggggactatcaaaaaatatattaaagcggttgaagaaaacatggctac

SEQ ID NO: 627589 - DNA, 75 bp, synthetic construct
  source 1..75: mol_type = other DNA
tattcgcgtagatgaaattcccactggcataaaagttgctctcaatgatgaacagaacttattctgtactattac

SEQ ID NO: 627590 - DNA, 75 bp, synthetic construct
  source 1..75: mol_type = other DNA
attaacctttggctatgacgtactggatctccaggaaaataatattggagtcgttggccagggtagtcgcctttt

SEQ ID NO: 627591 - DNA, 75 bp, synthetic construct
  source 1..75: mol_type = other DNA
tgttaccaattatattattgttcaaataagttccacagttttcgtacgattggaataagtttattgttaggtgtc

SEQ ID NO: 627592 - DNA, 75 bp, synthetic construct
  source 1..75: mol_type = other DNA
gagcgacctgacgggccgtccgctgatgctctttaacagtgaaggtaaaaccgtctggcgaccggggcagaccag

SEQ ID NO: 627593 - DNA, 75 bp, synthetic construct
  source 1..75: mol_type = other DNA
ccgggaattgcgccggaacagcgtaagcacctgttccagccgtttgtccgcggcgacagtgcgcgcaccattagc

SEQ ID NO: 627594 - DNA, 75 bp, synthetic construct
  source 1..75: mol_type = other DNA
aaaaaatagagcttccaggaaggtcatcttataatttagaagaaatgctatctgcgataaatttcaccattccat

SEQ ID NO: 627595 - DNA, 75 bp, synthetic construct
  source 1..75: mol_type = other DNA
aacgaaaagttttgtcgtcacctgctatgacccggatgcgccaaccggctccggctggtggcactgggtggcact

SEQ ID NO: 627596 - DNA, 75 bp, synthetic construct
  source 1..75: mol_type = other DNA
taatacaaaaagttcatcctctttcttcagacgaacgtcacttactttctattattattaattctaattttaact

SEQ ID NO: 627597 - DNA, 75 bp, synthetic construct
  source 1..75: mol_type = other DNA
cgtaacttgaccgacagcaatcgcaaaattattgctgccaagctagcgaatttgttgggcgtgaacgaaccgatt

SEQ ID NO: 627598 - DNA, 75 bp, synthetic construct
  source 1..75: mol_type = other DNA
aagccgcctccgatgaagttaaagccgcttttgaaaacagcgccactcgtgcttttggtcctgctggttttctcg

SEQ ID NO: 627599 - DNA, 75 bp, synthetic construct
  source 1..75: mol_type = other DNA
cagccgggaagcttcgcgccgctcatccgcatcgaaacagacaacggtgagcgggagaaagcgcagcgccgcagc

SEQ ID NO: 627600 - DNA, 75 bp, synthetic construct
  source 1..75: mol_type = other DNA
agtagagtggctgacggataatggttcatgctaccgggctaatgaaacacggcagtttgcccggatgttggtaag

SEQ ID NO: 627601 - DNA, 75 bp, synthetic construct
  source 1..75: mol_type = other DNA
tttaccatgagcaccaatcatttttcttagataactttaaagaggttgtggatgaagttagcaggtatgtgcatg

SEQ ID NO: 627602 - DNA, 75 bp, synthetic construct
  source 1..75: mol_type = other DNA
cagcactaaaaaagcttctcaaggcattaaatgagggggatgaactggtggtctggaagctggacaggataggcc

SEQ ID NO: 627603 - DNA, 75 bp, synthetic construct
  source 1..75: mol_type = other DNA
gttaacaataaaaaacaatgagggtaacgagacatcctttttagcctcggataattcattttctgcgaatccaat

SEQ ID NO: 627604 - DNA, 75 bp, synthetic construct
  source 1..75: mol_type = other DNA
tactgtagccgtacagagggagactaatattcatatacatgatggagttgatatggacgcatttgtggagcttcg

SEQ ID NO: 627605 - DNA, 75 bp, synthetic construct
  source 1..75: mol_type = other DNA
caggctgttctttggatcaagccgctactggccgccatcgaaaaagcgaataatcagctggctggaatacgtcaa

SEQ ID NO: 627606 - DNA, 75 bp, synthetic construct
  source 1..75: mol_type = other DNA
ccagctcaatgacctactgccaagctgtcttgtggattaagccgctactggcgttgatagaaaaaggaaataata

SEQ ID NO: 627607 - DNA, 75 bp, synthetic construct
  source 1..75: mol_type = other DNA
ggatagggagaaatgtgctacatgcgctattgatgtttcaaaatctgcacgaaaaaggcgttaattttcggagca

SEQ ID NO: 627608 - DNA, 75 bp, synthetic construct
  source 1..75: mol_type = other DNA
tgctgtggcagcatgagacgaaacacgcatacaacgagcaggggctggcaaaccgcgtcacgccggacagcctgc

SEQ ID NO: 627609 - DNA, 75 bp, synthetic construct
  source 1..75: mol_type = other DNA
aggacatgatcctgctgttgtcgaagaaaaatgccgaggaacgtctggctgcattcatctacaacctgtcccgtc

SEQ ID NO: 627610 - DNA, 75 bp, synthetic construct
  source 1..75: mol_type = other DNA
ctatcagggcgtcgtgcagccagacggcacctggagcgtgaccgttcccgccgccaacgttgacgcactggctga

SEQ ID NO: 627611 - DNA, 75 bp, synthetic construct
  source 1..75: mol_type = other DNA
aggcgaagggaatcaggcagtgctggtcagcgggaaagacgccacaggcaatacggtcaccggcgcgcagctgct

SEQ ID NO: 627612 - DNA, 75 bp, synthetic construct
  source 1..75: mol_type = other DNA
tcataattctgcaaagcagatctattagaataaaagatattgaaaattatataaatttcatactacaagacaacc

SEQ ID NO: 627613 - DNA, 75 bp, synthetic construct
  source 1..75: mol_type = other DNA
gaacatggaacaaatcaaggccgagaagcaggacttcatcaaaacggtgatcccgcagtgggacgaacaggcacg

SEQ ID NO: 627614 - DNA, 75 bp, synthetic construct
  source 1..75: mol_type = other DNA
ggtatgctggcagtcaaaggtaaatacatcaccatcgaaaataacgatgcgctggcccagcttgctggtcatacg

SEQ ID NO: 627615 - DNA, 75 bp, synthetic construct
  source 1..75: mol_type = other DNA
tatcaagtcattttatttaggtacgcccagtggtaattttaaagcaatagataaccacgggaaggaaataacaaa

SEQ ID NO: 627616 - DNA, 75 bp, synthetic construct
  source 1..75: mol_type = other DNA
gggccgcagggtggcaaaacgggtatggcgacgtgaacgggacctgacgggctggatgtcgctgtcacggaaacc

SEQ ID NO: 627617 - DNA, 75 bp, synthetic construct
  source 1..75: mol_type = other DNA
agctgcacccggacagcaccctcagcatgtggccggataaccgtatcgcccgtgacgcgcactatctttaccggt

SEQ ID NO: 627618 - DNA, 75 bp, synthetic construct
  source 1..75: mol_type = other DNA
ttgaaagcagagcggccggtggtgacttggtagggcttgcacctgcgaaagctggccgcgtcgtctattacgccg

SEQ ID NO: 627619 - DNA, 75 bp, synthetic construct
  source 1..75: mol_type = other DNA
ttcctcgttcagtcgaagcttggttaggatgggtcattgttctcatgctggtatttttttccatcatgagcgatg

SEQ ID NO: 627620 - DNA, 75 bp, synthetic construct
  source 1..75: mol_type = other DNA
aatgcggataagctggtagtaaaccaaaagctgtcaggtaaggacaatattctgctggttgattttctgaacaaa

SEQ ID NO: 627621 - DNA, 75 bp, synthetic construct
  source 1..75: mol_type = other DNA
ataactgagcaggcggcctacgattttaaacaaggtttctatactttagacccatcaccttcctttgatgaacgc

SEQ ID NO: 627622 - DNA, 75 bp, synthetic construct
  source 1..75: mol_type = other DNA
tagatgagccaacagcgtcgattgatgatgtagcagaaaaacaatttattgatcatctaatgaattggatggggc

SEQ ID NO: 627623 - DNA, 75 bp, synthetic construct
  source 1..75: mol_type = other DNA
tatcgacctgattggtaaatatgttcaccatgataatgagtacacggcaacctttgccggattcggaacccgtga

SEQ ID NO: 627624 - DNA, 75 bp, synthetic construct
  source 1..75: mol_type = other DNA
ggttcttaatgctcccatgcttgacttttccagtctttctcgtgatggtcataccacattgattcatcctggtta

SEQ ID NO: 627625 - DNA, 75 bp, synthetic construct
  source 1..75: mol_type = other DNA
tgtgagattgcagagcaacggtgatgttgatccgctagtaattgttaccttccatggaatgattgtcgatcaaga

SEQ ID NO: 627626 - DNA, 75 bp, synthetic construct
  source 1..75: mol_type = other DNA
aggtgcaggtcttgaaatgatctataacccgaaaacgggacaagttggtcatattcaaccagtcaaggttaaata

SEQ ID NO: 627627 - DNA, 75 bp, synthetic construct
  source 1..75: mol_type = other DNA
ggattaataaattcaaatgataacgattattcgataaatggtggttttggcgttggtgcagtggggctttctacg

SEQ ID NO: 627628 - DNA, 75 bp, synthetic construct
  source 1..75: mol_type = other DNA
tgatgttgccctgaccacggcgacagaaagtgactatcactatctggaaacgaagaaaaaaagcggaggttttct

SEQ ID NO: 627629 - DNA, 75 bp, synthetic construct
  source 1..75: mol_type = other DNA
taatgtcagtatccagatgagtggtgatcaggggcttgcgcaaagttttgttgcttctgaccttcaacatgaaat

SEQ ID NO: 627630 - DNA, 75 bp, synthetic construct
  source 1..75: mol_type = other DNA
cttgttgtaccgcttatgattattccagccatattggcacaaagaccactggctaaacttgccagagagggaatg

SEQ ID NO: 627631 - DNA, 75 bp, synthetic construct
  source 1..75: mol_type = other DNA
gacggaagaacagcggcaggcatatctggcaaaactgcgtgatacgccggaatacaaaaaggaacaggaaaagta

SEQ ID NO: 627632 - DNA, 75 bp, synthetic construct
  source 1..75: mol_type = other DNA
gacgcaaccagtatcatttgatcagcctgactgggaaacacgcaacttcactatgaagtctcttgtgctcaaaga

SEQ ID NO: 627633 - DNA, 75 bp, synthetic construct
  source 1..75: mol_type = other DNA
tctactactataactaattcatatgcttttattgaagttaaagatgataatggtgatgaatggatagtattagaa

SEQ ID NO: 627634 - DNA, 75 bp, synthetic construct
  source 1..75: mol_type = other DNA
atgagattacttattataaatttttctattaatctccatggagtgatatatgaatttggcctatttttatttttg

SEQ ID NO: 627635 - DNA, 75 bp, synthetic construct
  source 1..75: mol_type = other DNA
gacttcactacaatgtcttacaattgggcgatagccggaatactattttcattattatctataagcgccgccttt

SEQ ID NO: 627636 - DNA, 75 bp, synthetic construct
  source 1..75: mol_type = other DNA
gaggcagtgatctctatttcaggtttagttggccatccctttaatgctaatttcttgcatgattggctaaaagat

SEQ ID NO: 627637 - DNA, 75 bp, synthetic construct
  source 1..75: mol_type = other DNA
gtcagaacaacatatagaaatgtaacaatttcacatgagaatgttgtgcgaaataattttgaaattcatgaacat

SEQ ID NO: 627638 - DNA, 75 bp, synthetic construct
  source 1..75: mol_type = other DNA
gcacccacgaaaagaggtttggtatcagatcagaagttatatcgttaaagttgaagaatttgaaaattttagatg

SEQ ID NO: 627639 - DNA, 75 bp, synthetic construct
  source 1..75: mol_type = other DNA
gtaattaacagatggagtgatatatcagacaacagtaaactaactttaaagaaaaatgcaacccttacagttaac

SEQ ID NO: 627640 - DNA, 75 bp, synthetic construct
  source 1..75: mol_type = other DNA
acagcctatctgacaggcgggaccgtcggtcagccctattacgggaaagcaaatgatcaaactgtacttatcagt

SEQ ID NO: 627641 - DNA, 75 bp, synthetic construct
  source 1..75: mol_type = other DNA
caacctttgccggactcggaacccgtgattacagcacgcattcatggtatgccggtgcagaagtgggctaccgct

SEQ ID NO: 627642 - DNA, 75 bp, synthetic construct
  source 1..75: mol_type = other DNA
tcaaaaacaaagaactacagtttaaaaaccaagaactttcaagcaaaattcaacaaaagaaaattgacgaaaagg

SEQ ID NO: 627643 - DNA, 75 bp, synthetic construct
  source 1..75: mol_type = other DNA
cgaattttattattaaaaatgaacatggtattcacgcccgacccggtgcgtatatggtgaatattttaaaaccgt

SEQ ID NO: 627644 - DNA, 75 bp, synthetic construct
  source 1..75: mol_type = other DNA
cagcagtcagctgaaaaagcggaaaatttcatgtcagcaggctataaaaattttcttgctgaagtcaacaacctg

SEQ ID NO: 627645 - DNA, 75 bp, synthetic construct
  source 1..75: mol_type = other DNA
atggctatttcacccgtgaagttgaaaatcagcacggtacgccctgcaacgggcacggggcatgcaatatcacaa

SEQ ID NO: 627646 - DNA, 75 bp, synthetic construct
  source 1..75: mol_type = other DNA
aaccgcccgacttaacgctgcgctggattacattgacgcggtgacggcaacagataccagcaccgcgccggatgt

SEQ ID NO: 627647 - DNA, 69 bp, synthetic construct
  source 1..69: mol_type = other DNA
atgaccggagcattgcgccgggatgcgtatgttctccctggacagacagtctcagttcgtagaatctat

SEQ ID NO: 627648 - DNA, 72 bp, synthetic construct
  source 1..72: mol_type = other DNA
atgaccggagcattgcgccgggatgcgtatgttctccccggacagacagtctcagttcgtagaatctataaa

SEQ ID NO: 627649 - DNA, 75 bp, synthetic construct
  source 1..75: mol_type = other DNA
acaacctgctggtgaaaggctcctccgtggtgggcgataacaccgtggcgctgagtgcaggtaacaacgtcgata

SEQ ID NO: 627650 - DNA, 75 bp, synthetic construct
  source 1..75: mol_type = other DNA
gttaccaccatgctaatgaccaatggtacaaaaacgaacttgaaaaaatgaatgatgtttttgatatttttgtga

SEQ ID NO: 627651 - DNA, 75 bp, synthetic construct
  source 1..75: mol_type = other DNA
ggttgaactgcggaactcacagatttcaacgctaaaatctcaatataaagagatcatgaaacttgatccttttaa

SEQ ID NO: 627652 - DNA, 75 bp, synthetic construct
  source 1..75: mol_type = other DNA
gcgagataacggctctcgcccataaaagtcctatggatgaggttcgccgtaaatacttatctcaactttcgaatc

SEQ ID NO: 627653 - DNA, 75 bp, synthetic construct
  source 1..75: mol_type = other DNA
atgatttatactatcttgacaagaaaagcatttaaatttattcgtacgcttgccattctgatattggcagttatt

SEQ ID NO: 627654 - DNA, 75 bp, synthetic construct
  source 1..75: mol_type = other DNA
ttctacactaagtaaaaaataccctataatttttcttatcagacatggggagcgctgtgatcgttcttccaatgt

SEQ ID NO: 627655 - DNA, 75 bp, synthetic construct
  source 1..75: mol_type = other DNA
ttttgtaaaatagataatgattacaacgctatatttctaggtagggatttagataaaaaatttagagcgattaaa

SEQ ID NO: 627656 - DNA, 75 bp, synthetic construct
  source 1..75: mol_type = other DNA
gaataaccacagttcaacttttgctcatgcacgtcatattcacagtgataaagctagccaaattggtttgaaaat

SEQ ID NO: 627657 - DNA, 75 bp, synthetic construct
  source 1..75: mol_type = other DNA
aatggtggtgatctgcaagtaaccataaaagaggcagacggcagtattcagacattatatgttccttattcgtct

SEQ ID NO: 627658 - DNA, 75 bp, synthetic construct
  source 1..75: mol_type = other DNA
aagagcggcctgatgggcaccggcggtatcggtatcactgtcggcagcagcaaatccacccatgacctgcgtgaa

SEQ ID NO: 627659 - DNA, 75 bp, synthetic construct
  source 1..75: mol_type = other DNA
cttttacaggtaaaccatcacgtccgaggaagactttaatcatgcaatcggtaatgcatgtttttgtcgtgaagt

SEQ ID NO: 627660 - DNA, 75 bp, synthetic construct
  source 1..75: mol_type = other DNA
gtagaatggggaacggagaactgcggcgtaatggttggtgacaccttattactcgcgggcatgttagcttttatt

SEQ ID NO: 627661 - DNA, 75 bp, synthetic construct
  source 1..75: mol_type = other DNA
aatggcagaaaaagatctcgcggccaccttaaacgatacacgtccgcagctatgggcgcgattgcaggcctttaa

SEQ ID NO: 627662 - DNA, 75 bp, synthetic construct
  source 1..75: mol_type = other DNA
ggaaacggtctggcggcttgcctccggctcactccccaaagcgtggtttactgagccatggtataaggtctatcg

SEQ ID NO: 627663 - DNA, 75 bp, synthetic construct
  source 1..75: mol_type = other DNA
atggaaaatcaaggttacattgagatttacgatcctcaaattcacggttacactgcgcgttatcccttggccaaa

SEQ ID NO: 627664 - DNA, 75 bp, synthetic construct
  source 1..75: mol_type = other DNA
tacgacgaaagtgtttgaaagccagactttgacggataaacagatccacaattacgcacaacagttggcaggaga

SEQ ID NO: 627665 - DNA, 75 bp, synthetic construct
  source 1..75: mol_type = other DNA
ggtacgtggtcagattattttaatatttattcgtataaattatcagaaagcactggtgtgattttatggcagtta

SEQ ID NO: 627666 - DNA, 75 bp, synthetic construct
  source 1..75: mol_type = other DNA
gtggcattcaggcggcaacggccgcgcttcagggcctggcggggggcaatattgctggtgcactggcgggagctt

SEQ ID NO: 627667 - DNA, 75 bp, synthetic construct
  source 1..75: mol_type = other DNA
atcttcgacaaggagaaagagcagaaccgcctgaaggaaatcgggatgatcagcgatatcggcggccaggtggcg

SEQ ID NO: 627668 - DNA, 75 bp, synthetic construct
  source 1..75: mol_type = other DNA
ttacagctggcatcgaaaatggcacgtcactcgccgctggccttacaagcggcaaagcaagcgctgcgccagtcg

SEQ ID NO: 627669 - DNA, 75 bp, synthetic construct
  source 1..75: mol_type = other DNA
gcctggtggcgaaggtgactgccaatgttgagcatgctctccgggaaaaatttgctaaagctgaacaaagtaagc

SEQ ID NO: 627670 - DNA, 75 bp, synthetic construct
  source 1..75: mol_type = other DNA
ttaatccgaatcttgatgtgggggttgctatagatattcttggtgttgggtatgttaatgcgccttttgattatc

SEQ ID NO: 627671 - DNA, 75 bp, synthetic construct
  source 1..75: mol_type = other DNA
gcctgcaggacttgttaaacgaagcccggcagcagttggaaatggcagaactgctgggctatggcaaaaagaagg

SEQ ID NO: 627672 - DNA, 75 bp, synthetic construct
  source 1..75: mol_type = other DNA
tcgtcacggaggtacagcctgaggttcagaaagaaacggactcgcaggcggcagacaaacgtaaacaagtcctcg

SEQ ID NO: 627673 - DNA, 75 bp, synthetic construct
  source 1..75: mol_type = other DNA
cgagcatatgtgtattataattacgcatgattctgcatttcaaaaaattgattgcatgaaatatcatcttaacaa

SEQ ID NO: 627674 - DNA, 75 bp, synthetic construct
  source 1..75: mol_type = other DNA
caaggaaacggagagcaagattctttgatgcgttgggctagtattgagcacaacctagaccctaaattaaaaaga

SEQ ID NO: 627675 - DNA, 75 bp, synthetic construct
  source 1..75: mol_type = other DNA
acggtaaaccgtacaaccggacaaaatttttatgggacggaatgcggctggcgcaggagaacaggccggagggaa

SEQ ID NO: 627676 - DNA, 75 bp, synthetic construct
  source 1..75: mol_type = other DNA
acgacaacgactcacgtggtcgtatcggctcttattggtcggcaaatgcgcaactggcttacacctttatgtacg

SEQ ID NO: 627677 - DNA, 75 bp, synthetic construct
  source 1..75: mol_type = other DNA
ccgcacccgaccagctcccgttacgactggcggcgggcggtgtttaaaagcaacgtcaatagcggtatatgggat

SEQ ID NO: 627678 - DNA, 75 bp, synthetic construct
  source 1..75: mol_type = other DNA
tgatgaagtgggactggatggtaaaaacgatccgttttgccgtaaaccgttcccctggcaggtggaaaagcagga

SEQ ID NO: 627679 - DNA, 75 bp, synthetic construct
  source 1..75: mol_type = other DNA
ctattttagtaatgttatcatctgttattatggtgctaaatctattttggatggtgaaaatagtttaggtgagtt

SEQ ID NO: 627680 - DNA, 75 bp, synthetic construct
  source 1..75: mol_type = other DNA
tctctgtcgtatcatctgatgatgaaattctttgtgatactgtactcaataatatttgttatggaggaaatgctg

SEQ ID NO: 627681 - DNA, 75 bp, synthetic construct
  source 1..75: mol_type = other DNA
ccagaccagatcagagaacgcattgaaaacatcaggaaagcaggcccactggctgaaatggctaagcaggttgag

SEQ ID NO: 627682 - DNA, 75 bp, synthetic construct
  source 1..75: mol_type = other DNA
atgagattggtgaaaatactcgaaaaaacctttttttggattcactttaccaagcaggattagaccctagaaata

SEQ ID NO: 627683 - DNA, 75 bp, synthetic construct
  source 1..75: mol_type = other DNA
cagcaaccattgctgttaatgcaggcaaaggtggattaacagatgctgccggtaccacgaagacacgtctgactt

SEQ ID NO: 627684 - DNA, 75 bp, synthetic construct
  source 1..75: mol_type = other DNA
aaaagattgctgatgccataaaccagtctggctggaaaattaaagctggcagtgaaaatggtgggaaagttgagg

SEQ ID NO: 627685 - DNA, 75 bp, synthetic construct
  source 1..75: mol_type = other DNA
ttgaacagggagaggctgaaacaatggaaccggacgcaactgaacatcatcaggacacgcagccgctggatgctc

SEQ ID NO: 627686 - DNA, 75 bp, synthetic construct
  source 1..75: mol_type = other DNA
tgggggggcctaacagagattctctttttaacggatacgtttcagttaagaacgtgtgctccaagggagcgctaa

SEQ ID NO: 627687 - DNA, 75 bp, synthetic construct
  source 1..75: mol_type = other DNA
aataaatgattggtcttgctcatattcaagcaacattgaaaaggcccctatagccattaaaacatctgattcatc

SEQ ID NO: 627688 - DNA, 75 bp, synthetic construct
  source 1..75: mol_type = other DNA
gattctctttttaacggatacgtttcagttaagaacgtgtgctccaagggagcgctaaaaaaccctataatgata

SEQ ID NO: 627689 - DNA, 75 bp, synthetic construct
  source 1..75: mol_type = other DNA
ttgataacaaaactcgtcggattactatgaatataaaccagcctcttggccgttgggggtatgtggggttgaatg

SEQ ID NO: 627690 - DNA, 75 bp, synthetic construct
  source 1..75: mol_type = other DNA
gcactggggttaggattgtcgctggggaatttcggtgctatgtcactagataccatttattctcgaggacaacaa

SEQ ID NO: 627691 - DNA, 75 bp, synthetic construct
  source 1..75: mol_type = other DNA
tctggtgggggagcatccttttattgtggcgttgccggatatctggttagacaccagcaccttcgatcccgctac

SEQ ID NO: 627692 - DNA, 75 bp, synthetic construct
  source 1..75: mol_type = other DNA
tgacaaaagagtggatgaagggtaatcgtgtttcacacatcacttgcacggcttccggtgctaatgctggcggcg

SEQ ID NO: 627693 - DNA, 75 bp, synthetic construct
  source 1..75: mol_type = other DNA
atcttgctaaaaatgtgttcgctgttcactgcgttgaccaacacggtaaaactgttctggttaaacccaaagtat

SEQ ID NO: 627694 - DNA, 75 bp, synthetic construct
  source 1..75: mol_type = other DNA
tcaccggtaccattacgacagtcagcaccggctggtgcactacacgcggacacaatatgaagagccgctggtcga

SEQ ID NO: 627695 - DNA, 75 bp, synthetic construct
  source 1..75: mol_type = other DNA
atgaactatcgcggctttaccttcccgttgtggggatttctcgccaataccgatatctcttacgatccgcagcac

SEQ ID NO: 627696 - DNA, 75 bp, synthetic construct
  source 1..75: mol_type = other DNA
ggcaattatcctcagcgcctttttcattgccgcggtaatggtattaaacggcgctgcgggcagtaaatacggcgt

SEQ ID NO: 627697 - DNA, 75 bp, synthetic construct
  source 1..75: mol_type = other DNA
tctgatgacaactatctccactaacgcgaccggtaatattattccagccggttatcagattgccgccattgcacc

SEQ ID NO: 627698 - DNA, 75 bp, synthetic construct
  source 1..75: mol_type = other DNA
cctcaaaaacaccatcatacactaaatcagtaagttggcagcatcacccgaaaacgcaaagccagcggacctgga

SEQ ID NO: 627699 - DNA, 75 bp, synthetic construct
  source 1..75: mol_type = other DNA
ggacaaattaatcttgatgaactgtataccgcagcaggtgatttcaaatattacgataacggctttaaccttacc

SEQ ID NO: 627700 - DNA, 75 bp, synthetic construct
  source 1..75: mol_type = other DNA
tcgtcgcctttgcggcttacgctttattaaaaaaacgcacagcaatagaaaaaacaggagaacaaaaagtcacag

SEQ ID NO: 627701 - DNA, 75 bp, synthetic construct
  source 1..75: mol_type = other DNA
agttttaaataaattcactgccattcttaacccgtgcatctatatcgttttcggcggcatggcgatttgggcgat

SEQ ID NO: 627702 - DNA, 75 bp, synthetic construct
  source 1..75: mol_type = other DNA
attaacttcgatgaagctaatattaaaaataacttttttgaagcacctagaaaaatcattttttggggcaatgtg

SEQ ID NO: 627703 - DNA, 75 bp, synthetic construct
  source 1..75: mol_type = other DNA
aggaaggttttcagccattcttcgcctgccagacccgcgtgcgcgacccgggccgccggggatacacaaaacaca

SEQ ID NO: 627704 - DNA, 75 bp, synthetic construct
  source 1..75: mol_type = other DNA
ctgctggcggcgattatctggaacctgggaacgtggttcttcggtttcccgcgatgccgttaccaacttcgaaca

SEQ ID NO: 627705 - DNA, 75 bp, synthetic construct
  source 1..75: mol_type = other DNA
ggcttcctgttcctggtggtgattaacgcggtggttgcggtctgggcggcaccggcggtgagcgcatccgacttt

SEQ ID NO: 627706 - DNA, 75 bp, synthetic construct
  source 1..75: mol_type = other DNA
actgtttcccggattattaaggggcggaattgccgccatcatgtggtttggtttgcaatgttacgcggggtcact

SEQ ID NO: 627707 - DNA, 75 bp, synthetic construct
  source 1..75: mol_type = other DNA
atggagatgtattttaaaagaatgaaagatgagtggaccggacttgtcgaacaggcagatcctctcattcgtgct

SEQ ID NO: 627708 - DNA, 75 bp, synthetic construct
  source 1..75: mol_type = other DNA
aaaaaagaacttgttggttaattttattttgttctattatccttctgttaattgggtatagattacaggctaatt

SEQ ID NO: 627709 - DNA, 75 bp, synthetic construct
  source 1..75: mol_type = other DNA
ccgccaccggcacgtcaggcgctggcacaggcggcactgacttaccgttatggtgacgaacatcagcccgtcacc

SEQ ID NO: 627710 - DNA, 75 bp, synthetic construct
  source 1..75: mol_type = other DNA
gggcagtattgaggtaagtgaggatgatggtaagcttatgacacagcactctatccgttttcctgtcgcttttcc

SEQ ID NO: 627711 - DNA, 75 bp, synthetic construct
  source 1..75: mol_type = other DNA
cgccaagccctatcattccgctaaattggtcgaaagcttcaatgactctcatgttgaaagagatgtccaacctta

SEQ ID NO: 627712 - DNA, 75 bp, synthetic construct
  source 1..75: mol_type = other DNA
gttcagcaatgtgttgatgacctgctggaacacattgatcgcattgaaaataacgttactgaatatgaccagatc

SEQ ID NO: 627713 - DNA, 75 bp, synthetic construct
  source 1..75: mol_type = other DNA
gctgaagggtacgaatactactctaaccagggtgccctggtttacggttcaaacttcgagggacaaaagaaaatc

SEQ ID NO: 627714 - DNA, 75 bp, synthetic construct
  source 1..75: mol_type = other DNA
gaattcgtttgaaatcggtgaaaaaactgtccgctggcgcaggcaactcgcgcgggatgacgtctggcacacgca

SEQ ID NO: 627715 - DNA, 75 bp, synthetic construct
  source 1..75: mol_type = other DNA
attgccagagttgtatcctgtatcagtcctgcaaaatttcatgagtgctttattaactggatgcgtgactgccat

SEQ ID NO: 627716 - DNA, 75 bp, synthetic construct
  source 1..75: mol_type = other DNA
actgccgacattctgacaccacgacgccgggaggattacggtaaggacctgtggagtgcttatcagaccattcag

SEQ ID NO: 627717 - DNA, 75 bp, synthetic construct
  source 1..75: mol_type = other DNA
ggggaaactcatctcgattttttgaagcaatatggtgattttgaaaatggtattcctgttcacgatacaattgcc

SEQ ID NO: 627718 - DNA, 75 bp, synthetic construct
  source 1..75: mol_type = other DNA
taaacttcctgaaaaagtatggccgccggattgaagttgtcgatgcgaaagaattagggttatctactatcaaga

SEQ ID NO: 627719 - DNA, 75 bp, synthetic construct
  source 1..75: mol_type = other DNA
gtctacaatcgcgcgcttgcaagggctcgtcagcacccgttaactacgcgtcgctatatgtggaaagttgagtac

SEQ ID NO: 627720 - DNA, 75 bp, synthetic construct
  source 1..75: mol_type = other DNA
aaccgagcgcaggcgttcgccagggagtacaaagacgacaaagtcatctacaccatggcgagcggcgcaggctac

SEQ ID NO: 627721 - DNA, 75 bp, synthetic construct
  source 1..75: mol_type = other DNA
aatcgcaatgtcaattccttgcatatgatgtcagtcaaggccgtgcctgcctgagcaaagctgagcttactgctg

SEQ ID NO: 627722 - DNA, 75 bp, synthetic construct
  source 1..75: mol_type = other DNA
ggattgctgaatattcagacgcagggctttagcccggagtttgcgcttaaatttaaccagaccgtgttgaaagag

SEQ ID NO: 627723 - DNA, 75 bp, synthetic construct
  source 1..75: mol_type = other DNA
atgttgataaaagtgaagtctgccgtatcctggatgcgtgctcgtctgtctgccatctcactggcagatatccaa

SEQ ID NO: 627724 - DNA, 75 bp, synthetic construct
  source 1..75: mol_type = other DNA
attgaatctctgcaagcgttcctgcgttcggcgggtgcgcttggggggtgggtttacaccttcggtgatgctgcc

SEQ ID NO: 627725 - DNA, 75 bp, synthetic construct
  source 1..75: mol_type = other DNA
cagaggaaaatcaggaaagattttcatttttcaaagcaattcatacaaaaaatgtatttcaaagaatatattatt

SEQ ID NO: 627726 - DNA, 75 bp, synthetic construct
  source 1..75: mol_type = other DNA
atgagttttgagcacttcgttccggttcagtatgaacgtcctccgttattatgccatcacaatgtaaacctaaag

SEQ ID NO: 627727 - DNA, 75 bp, synthetic construct
  source 1..75: mol_type = other DNA
ggtaatcgatttaaaactgacactcacagcatcaagtccacttatcggcatcaatgacccattaggttcaactct

SEQ ID NO: 627728 - DNA, 75 bp, synthetic construct
  source 1..75: mol_type = other DNA
acgatcaccagtctggaaatgcctgaaggtcaggttatggtcgcaacccccctggcggttaaagcgcacgtcgac

SEQ ID NO: 627729 - DNA, 75 bp, synthetic construct
  source 1..75: mol_type = other DNA
gtaaggcagaaattcttgtaacaagcaccattgcagggacgaaaattgttgtggctaatctggcaaatgcaccta

SEQ ID NO: 627730 - DNA, 75 bp, synthetic construct
  source 1..75: mol_type = other DNA
tgcaggtatatatatatattcagcatatattacggatatatcttttattgcatccagaaaagctaaaaaagttaa

SEQ ID NO: 627731 - DNA, 75 bp, synthetic construct
  source 1..75: mol_type = other DNA
tcgaatcgtgaacagagcatggtggtcgttcaggcacctacgctaagccagaaagattcctcggtatcgttaagt

SEQ ID NO: 627732 - DNA, 75 bp, synthetic construct
  source 1..75: mol_type = other DNA
atcactagtggcgtaattattcaggcgcagacaatcgtgaaagttactggcaaccaaagcacagcccatgtggtc

SEQ ID NO: 627733 - DNA, 75 bp, synthetic construct
  source 1..75: mol_type = other DNA
ggatcagataaagcatggaaatttgcgcgcgtaaatcctcaagtacataatgatcttttttgcgtgttcaataat

SEQ ID NO: 627734 - DNA, 75 bp, synthetic construct
  source 1..75: mol_type = other DNA
tgaaccacctgccagacgtggttatcctgcttctgtttttgacagtttgcctcgcttactggagaggccgggacc

SEQ ID NO: 627735 - DNA, 75 bp, synthetic construct
  source 1..75: mol_type = other DNA
tggttcagttttgaatgcttcgggggaaattatggaacgatttgttcctgatgtccctgaagaaaaagggcaacg

SEQ ID NO: 627736 - DNA, 75 bp, synthetic construct
  source 1..75: mol_type = other DNA
aaaatttgtaccaacaagggaaagacaaatcagctgatggagataccagaacggatatcacccgcatggatgaca

SEQ ID NO: 627737 - DNA, 75 bp, synthetic construct
  source 1..75: mol_type = other DNA
ggctgaccgggtgagtgaggaaagccgccgctggctggcatcgtgcggcctgacggtggagcagatgcaaaacca

SEQ ID NO: 627738 - DNA, 75 bp, synthetic construct
  source 1..75: mol_type = other DNA
atgagcaaggtcactttgcacaccaaccacggcgacatcgttattcagttgcatgatgaagcgcctgagacggtc

SEQ ID NO: 627739 - DNA, 75 bp, synthetic construct
  source 1..75: mol_type = other DNA
aaccagatcatgcgcctgccacaaagacgtccctgctgaggatgtgaccatcattaacgttgagattgaggaata

SEQ ID NO: 627740 - DNA, 75 bp, synthetic construct
  source 1..75: mol_type = other DNA
aaatacgttgactcttacctctgggtctcagattaaagggagcgtcttaggtggagctttcgacgactctttgat

SEQ ID NO: 627741 - DNA, 75 bp, synthetic construct
  source 1..75: mol_type = other DNA
ctgccatcctgtgtacgggacaagcatgggctgcatgtgtggatggtgcagctggcccaaacggcgtagatagtg

SEQ ID NO: 627742 - DNA, 75 bp, synthetic construct
  source 1..75: mol_type = other DNA
tatataccaccagcaaagagacttatttataagtcagatcgctttcccgtgagtgttagtgatgacgcaaaaatt

SEQ ID NO: 627743 - DNA, 75 bp, synthetic construct
  source 1..75: mol_type = other DNA
gtgttcagccaggtgacggcgcctccccaccaggcacggtccgtggaaatacgcaggctgatgaccagactggat

SEQ ID NO: 627744 - DNA, 75 bp, synthetic construct
  source 1..75: mol_type = other DNA
ccgtgtgggacgatccgcaggccatgctgctggcggtgaaacctgatgtggttagcgtctgctcacctaaccgtt

SEQ ID NO: 627745 - DNA, 75 bp, synthetic construct
  source 1..75: mol_type = other DNA
gtcttaccggaaacagtaccgcatcagcagcagtgggcgcacagagcgggaagaatgctgttgagaataatgcgc

SEQ ID NO: 627746 - DNA, 75 bp, synthetic construct
  source 1..75: mol_type = other DNA
gtatagccgaggtcaccatgacgcccgaaagaaacggttcgtatatggtgaaagcatccctggcgaatggagcct

SEQ ID NO: 627747 - DNA, 75 bp, synthetic construct
  source 1..75: mol_type = other DNA
gctttgttctgcgcatcgtccaacttgaagccaaggaagaagagatcgccaacgaattccgcgatttgctgatca

SEQ ID NO: 627748 - DNA, 75 bp, synthetic construct
  source 1..75: mol_type = other DNA
gatgctgatggcaatacgatgcagatttcacaagccgcccaggctgttcgtcgtataactatccagcaggcaacc

SEQ ID NO: 627749 - DNA, 75 bp, synthetic construct
  source 1..75: mol_type = other DNA
gaaagagtacattaactccgcagacatgctgcgcgtgcttgataaacagcttaatttccacgacgcgtggagcaa

SEQ ID NO: 627750 - DNA, 75 bp, synthetic construct
  source 1..75: mol_type = other DNA
tatcgcgattactgaatgcaaaagcagatattaattctgcaacgattaccagtctggagatacctgaaggtggat

SEQ ID NO: 627751 - DNA, 75 bp, synthetic construct
  source 1..75: mol_type = other DNA
gccaacgagttccgtgacctgctgatcgagaagttcaccgacaagccggttgaaacctttatcggtaactttaaa

SEQ ID NO: 627752 - DNA, 75 bp, synthetic construct
  source 1..75: mol_type = other DNA
gattcatctgctttgttcatgtatgaaaaaacagataaaaaagttgaatattacaaaattagtatgaaaaacaca

SEQ ID NO: 627753 - DNA, 75 bp, synthetic construct
  source 1..75: mol_type = other DNA
tttttcgccacgaaatgccccccattctacggtctatgcttttattttcttatatcagagaagattttaatttta

SEQ ID NO: 627754 - DNA, 75 bp, synthetic construct
  source 1..75: mol_type = other DNA
ttcccggagacttggtatccgcatgaaacagaatggttgctcacagcagaaaaagaaattacggggatacacggc

SEQ ID NO: 627755 - DNA, 75 bp, synthetic construct
  source 1..75: mol_type = other DNA
ctcttactccttcccggtttacagtaatggaatctgtacattaggtatttcatttactatagataataatattaa

SEQ ID NO: 627756 - DNA, 75 bp, synthetic construct
  source 1..75: mol_type = other DNA
ccgcgttatatgagcgaatccaaagtcgccgtaaagcgccccagcgatattgaaggcgccagcctcaacgtcggg

SEQ ID NO: 627757 - DNA, 75 bp, synthetic construct
  source 1..75: mol_type = other DNA
gtcgtaacgttgttcctgcctcggcgttgctgaaagtggaaacacgcggggccagcgacgtcattaatcaatatg

SEQ ID NO: 627758 - DNA, 75 bp, synthetic construct
  source 1..75: mol_type = other DNA
ataaaaaaacggaaaaaaagaaacgcacttatccggcaaataataacgtccgtctgttgcgttattaccagaaat

SEQ ID NO: 627759 - DNA, 75 bp, synthetic construct
  source 1..75: mol_type = other DNA
gctgccgcagatattcccgtggcgagcgataacccagcgcactatgcggatgccattcgttataatgctcgaacg

SEQ ID NO: 627760 - DNA, 75 bp, synthetic construct
  source 1..75: mol_type = other DNA
cgggatcgccacagctacgctgaccagtttgaaaaatggtgattatacggttacggcctctgtgagctctggttc

SEQ ID NO: 627761 - DNA, 75 bp, synthetic construct
  source 1..75: mol_type = other DNA
acgcccgaaagaaacggtttgaaccgccccgggtttcctggagagtgttttatctgtgaactcaggctgccagat

SEQ ID NO: 627762 - DNA, 75 bp, synthetic construct
  source 1..75: mol_type = other DNA
agctgacggcgacggtgaaagatccgtcgaatcatccggtggcgggaataacggtgaacttcaccatgccacagg

SEQ ID NO: 627763 - DNA, 75 bp, synthetic construct
  source 1..75: mol_type = other DNA
caccctgtctgactggaaagataatggtgacggaagctatacccaagtcctgaccacaggagcgctgtctggcac

SEQ ID NO: 627764 - DNA, 75 bp, synthetic construct
  source 1..75: mol_type = other DNA
ggtacaaaagcaggcgctcatactgttacagcatcgatggctggcggtaagagtgagcagttggtggtgaacttt

SEQ ID NO: 627765 - DNA, 75 bp, synthetic construct
  source 1..75: mol_type = other DNA
caccgctgaagatgtcaaaggcaatttgtcgaatcgtgaacaaagcatggtggtcgttcaggcacctacgctaag

SEQ ID NO: 627766 - DNA, 75 bp, synthetic construct
  source 1..75: mol_type = other DNA
ctgaagttacactgagcggtacaaaatccggcacctatcccgtgacagttagcgtgaacaattatggtgtcagtg

SEQ ID NO: 627767 - DNA, 75 bp, synthetic construct
  source 1..75: mol_type = other DNA
gctgatccctgtattgaatggtgttcatcaagcgggtctgagtaccacaatacaattcactcgcgcagaagacaa

SEQ ID NO: 627768 - DNA, 75 bp, synthetic construct
  source 1..75: mol_type = other DNA
cactcgcgcagaagacaaaataatgagcggtatgaaccgccccgggtttcctggagagtgttttatctgtgaact

SEQ ID NO: 627769 - DNA, 75 bp, synthetic construct
  source 1..75: mol_type = other DNA
ggcagtaagagcggacaactggtggtgaactttactgcggatacgctcactgcgcaggttaatcttaacgttacc

SEQ ID NO: 627770 - DNA, 75 bp, synthetic construct
  source 1..75: mol_type = other DNA
acaaactctgccgaaatgacgaatggcggccaagccgtaacgaacgaacagggtaaggcaaccgtcacttatacc

SEQ ID NO: 627771 - DNA, 75 bp, synthetic construct
  source 1..75: mol_type = other DNA
gcattgccatcacccaagccaatggggaagcgcatgtcacgctgaaaggtaaaaaagcgggtacgcatacggtta

SEQ ID NO: 627772 - DNA, 75 bp, synthetic construct
  source 1..75: mol_type = other DNA
tgaagttcaaacaggagccgggaatcacgtatgaaaccctgaccaccaatcaggcggcggcgctggataccaaga

SEQ ID NO: 627773 - DNA, 75 bp, synthetic construct
  source 1..75: mol_type = other DNA
acgtcgtgaatgtcgacgtgatcattgggccgcgtgcggctactggtcgaaactttggttcgctgctcattctcg

SEQ ID NO: 627774 - DNA, 75 bp, synthetic construct
  source 1..75: mol_type = other DNA
tgggccgcgtgcggctactggtcgaaactttggttcactgctcattctcgggagctcgacggttatcccggtttc

SEQ ID NO: 627775 - DNA, 75 bp, synthetic construct
  source 1..75: mol_type = other DNA
caacacgctgaaggccaagaactgtaacgtgtttgtgcgctacgccaacgataccgccatcattcaggaaggcgt

SEQ ID NO: 627776 - DNA, 75 bp, synthetic construct
  source 1..75: mol_type = other DNA
gggcgttacctacgaaaccctgggtacctcgcaggctaacaacctggaagcgaagaactgcaacgtttacgtgta

SEQ ID NO: 627777 - DNA, 75 bp, synthetic construct
  source 1..75: mol_type = other DNA
ggggattgcagacgatgaagatattccggatgcagactggctgaaagtggctgcggcgatcgaatcctcttctgt

SEQ ID NO: 627778 - DNA, 75 bp, synthetic construct
  source 1..75: mol_type = other DNA
cggtgttgcaggcatttcttcattttgaaccgcaaaacttcgatcacaacgtaattgtaagactccgtttgccgc

SEQ ID NO: 627779 - DNA, 75 bp, synthetic construct
  source 1..75: mol_type = other DNA
acgttgtaaacgttgatgtgatcatctcgccgaaagcggctactggtcgtaacttcggcgcgctgctgatcctcg

SEQ ID NO: 627780 - DNA, 75 bp, synthetic construct
  source 1..75: mol_type = other DNA
ccgttaatccaggtggcctgtaagctggctggcgcagttcattatgccgatgtgcagatcaacgtggttcgctaa

SEQ ID NO: 627781 - DNA, 75 bp, synthetic construct
  source 1..75: mol_type = other DNA
agcgcaggttttcttcagccagtcaccgaagccgacacaggtttatgttggtcgctgggcgaagacgctgagttc

SEQ ID NO: 627782 - DNA, 75 bp, synthetic construct
  source 1..75: mol_type = other DNA
agcgccagcgtgggataaaagagaatctgagcagtctggagaatttgaaatcggttagggatttcatactagaat

SEQ ID NO: 627783 - DNA, 75 bp, synthetic construct
  source 1..75: mol_type = other DNA
gcggcaagcaacagatgtatacgaagcgcaacgctttcttgaccgagtcttggcattaattgatggcgcagaggc

SEQ ID NO: 627784 - DNA, 75 bp, synthetic construct
  source 1..75: mol_type = other DNA
gacaatgccgccggaaagctgacctttaacattgacgggctggcaagggcgattgctcccctgcgcgatgcctgc

SEQ ID NO: 627785 - DNA, 75 bp, synthetic construct
  source 1..75: mol_type = other DNA
ccctctggatgtccatgatatcgccgtcactctgaatgccgacaaccgggcattgcgcagccactggtttgtgcg

SEQ ID NO: 627786 - DNA, 75 bp, synthetic construct
  source 1..75: mol_type = other DNA
cttggttaggtgagcaaggtgtattgatgcaatcttaccgacaggtgcggaatactctcattgccttgcagggat

SEQ ID NO: 627787 - DNA, 75 bp, synthetic construct
  source 1..75: mol_type = other DNA
gacaccgactgtgaacaactcatgttattgcgtgattggtacaagaaggtccgagcttgttacgggataggtttt

SEQ ID NO: 627788 - DNA, 75 bp, synthetic construct
  source 1..75: mol_type = other DNA
agcctgacactaagtttgctgagttaaaacgctgctcagctgatttgctcaagtattcggagctgttacaacggt

SEQ ID NO: 627789 - DNA, 75 bp, synthetic construct
  source 1..75: mol_type = other DNA
gaattagggattagtgatacaggattaacgtcaacgggttggcttcgtaaacaaaacctagcttggccagacgtc

SEQ ID NO: 627790 - DNA, 75 bp, synthetic construct
  source 1..75: mol_type = other DNA
tgacgaagggaacggttatatcgagtacttcccgcgtaaaacaagtcgaggagatgtatttactccgaaacgcaa

SEQ ID NO: 627791 - DNA, 75 bp, synthetic construct
  source 1..75: mol_type = other DNA
attgcaatgacgagatttatcagcgccagcgtgggataaaagataatctgagcagtctggagaatttgaaatcgg

SEQ ID NO: 627792 - DNA, 75 bp, synthetic construct
  source 1..75: mol_type = other DNA
acccgcgaccgcctgcaccgggaaacgctgcgcagcttcggtcgttatgaactcaccaccgcttacacccctgcc

SEQ ID NO: 627793 - DNA, 75 bp, synthetic construct
  source 1..75: mol_type = other DNA
gggagcttcgcgccgctcatccgcatcgaaacagacaacggtgaacgggagaaagcgcaatgccgcagcctggcg

SEQ ID NO: 627794 - DNA, 75 bp, synthetic construct
  source 1..75: mol_type = other DNA
aaaagatctggctgagaaattgagcaatgaacacgatgattttcagtatcactatgtagatattcgggtgatgct

SEQ ID NO: 627795 - DNA, 75 bp, synthetic construct
  source 1..75: mol_type = other DNA
agggtgacatgacccgcaagggactggatattgtgcagggttcagcaggggtgctgataggcgcgccgacggggg

SEQ ID NO: 627796 - DNA, 75 bp, synthetic construct
  source 1..75: mol_type = other DNA
gtggtgggtaatgcgctggctgtgctggtcattgccaagtgggaacacaaatttgaccgcaaaaaggcgatggcc

SEQ ID NO: 627797 - DNA, 75 bp, synthetic construct
  source 1..75: mol_type = other DNA
gattatcccgatgctcggttccaataccgtgcaggatctgatgaatactattattaatatgaccgccgcagcggg

SEQ ID NO: 627798 - DNA, 75 bp, synthetic construct
  source 1..75: mol_type = other DNA
gtggagcagatgaaaaaccagatggacccggtgtacacgccggcgcgaaaaatccacctgtaccactgcgaccat

SEQ ID NO: 627799 - DNA, 75 bp, synthetic construct
  source 1..75: mol_type = other DNA
gaactgctggatgcctggcgcgataacccggaaggaaaagtgctggtcacccgccagcagctgagcaccgcgctg

SEQ ID NO: 627800 - DNA, 75 bp, synthetic construct
  source 1..75: mol_type = other DNA
cgttgcagcctgaactactggacgcagaattcagcgttgaaccggtgatccctgaaggcgcattcacaacggccg

SEQ ID NO: 627801 - DNA, 75 bp, synthetic construct
  source 1..75: mol_type = other DNA
ggaactccttgaacttggtcgccaggagtatcgccggacgctacgccagataaacgaagctctggagacaaacaa

SEQ ID NO: 627802 - DNA, 75 bp, synthetic construct
  source 1..75: mol_type = other DNA
catatctgaacgtgaataaccttaacaaagttttaagatactataaggtacataagtatcgtttgtttgagcaag

SEQ ID NO: 627803 - DNA, 75 bp, synthetic construct
  source 1..75: mol_type = other DNA
taggtgataatgttgccattcatgcgaatacagtgattaaagaaggtactattattggcaatgacgttatcatag

SEQ ID NO: 627804 - DNA, 75 bp, synthetic construct
  source 1..75: mol_type = other DNA
agccatctacaatcaagtaatagcgatgttgttgctgctgcagctataagtattgcagcgacagagataaaaacc

SEQ ID NO: 627805 - DNA, 75 bp, synthetic construct
  source 1..75: mol_type = other DNA
acctatatggatggtgtgcatttgatatgcaccactgccaaagtggatcgtagttttggcgatattccgttaggg

SEQ ID NO: 627806 - DNA, 75 bp, synthetic construct
  source 1..75: mol_type = other DNA
catgatggagcttttggaaaaataatagattttacccaaaatggaaataaaataagtgcaaaagataaagaacta

SEQ ID NO: 627807 - DNA, 75 bp, synthetic construct
  source 1..75: mol_type = other DNA
atacgataattggtcaaggcactcgtattgataatcaagtgcagattggacatgactgcataatcggcaataaat

SEQ ID NO: 627808 - DNA, 75 bp, synthetic construct
  source 1..75: mol_type = other DNA
gctgcgggccttgccgagctgttgggcggtagcccggaacaggtttgtgtggcagcggaaattggcatggaacac

SEQ ID NO: 627809 - DNA, 75 bp, synthetic construct
  source 1..75: mol_type = other DNA
ctgtacgctggttgctgcgacgaaagattccgtggtgactttaccagatgttagtgcaacgaagttgcaaagtaa

SEQ ID NO: 627810 - DNA, 75 bp, synthetic construct
  source 1..75: mol_type = other DNA
gtgccgttcaaaaccgtctggattctgcggtcaccaacctgaacaacaccaccaccaacctgtctgaagcgcagt

SEQ ID NO: 627811 - DNA, 75 bp, synthetic construct
  source 1..75: mol_type = other DNA
tgaaccacctgccagacgtggttatcctgcttctgtttttgacagtttacctcgcttactggagagaccgggacc

SEQ ID NO: 627812 - DNA, 75 bp, synthetic construct
  source 1..75: mol_type = other DNA
cgtgcaatgaatatgtatccgcacgatgtcattatgcaggaagctaataaatgtgtccggctggcgctaaaaagc

SEQ ID NO: 627813 - DNA, 75 bp, synthetic construct
  source 1..75: mol_type = other DNA
aaagatcgcaattgttcagcagagctttgaacctgggatgacggtctccctcgttgcccggcaacatagtgtagc

SEQ ID NO: 627814 - DNA, 75 bp, synthetic construct
  source 1..75: mol_type = other DNA
ctggctattccctttccggtctggcaatgcaaaacgaactggcgctgcacagcaaaaaagagatcgatgaatatt

SEQ ID NO: 627815 - DNA, 75 bp, synthetic construct
  source 1..75: mol_type = other DNA
aaaacaaatcatcgtggatacagacggaaacgcgaagaaaattgagctgggcagtccgcgtcgtctggcaaccat

SEQ ID NO: 627816 - DNA, 75 bp, synthetic construct
  source 1..75: mol_type = other DNA
gctcatcaggttgctgatgccgtcactattactgcccgttacccggccgtccatggcgcaccggtacatattggt

SEQ ID NO: 627817 - DNA, 75 bp, synthetic construct
  source 1..75: mol_type = other DNA
tgccgccgaaaagctggtgttcggcgagttgtctaccggggcggcggacgatctggcgcgagccaccgacatcgc

SEQ ID NO: 627818 - DNA, 75 bp, synthetic construct
  source 1..75: mol_type = other DNA
aaatctcgagcgtcaggcgcgttcatttgagcgcgcccgtgacgctgtcagtacagcggatgctggcatcgtgaa

SEQ ID NO: 627819 - DNA, 75 bp, synthetic construct
  source 1..75: mol_type = other DNA
tgcgtgttccccgccgtgcgtctgccctgcgccggatgctggtttccagcgataaactgtctaacgatccgatga

SEQ ID NO: 627820 - DNA, 75 bp, synthetic construct
  source 1..75: mol_type = other DNA
agtggcaaaagaggattttgcgaacattgttgctgccctcagtcagttgaccagggaaagatcatcagaagttca

SEQ ID NO: 627821 - DNA, 75 bp, synthetic construct
  source 1..75: mol_type = other DNA
cgcgcaggcgcttcgcgcagagctcggtttgcctgatgaccaaaaaatcattctttattcaggcaatatcggcga

SEQ ID NO: 627822 - DNA, 75 bp, synthetic construct
  source 1..75: mol_type = other DNA
gagaactattcgccctggcgctatcgccgggaagagggggccgcgacggtctggcgctgcccgctgtatgtgcct

SEQ ID NO: 627823 - DNA, 75 bp, synthetic construct
  source 1..75: mol_type = other DNA
cgtcacaacgatgtagcgatcaaatatgcaaatgcctcacttgatatgaataatgttctttcaaaattcataaca

SEQ ID NO: 627824 - DNA, 75 bp, synthetic construct
  source 1..75: mol_type = other DNA
gtaaggcgataattcgcagcagcgaatatatgtcaccgctggtacgtaagctctattaccagtgcaaaaacgtta

SEQ ID NO: 627825 - DNA, 75 bp, synthetic construct
  source 1..75: mol_type = other DNA
atccggtcaggatcgctacaccacagaagtcgtggtgaacgttggcggcactatgcagatgctgggtggtcgtca

SEQ ID NO: 627826 - DNA, 75 bp, synthetic construct
  source 1..75: mol_type = other DNA
ctatcattcgaattcaaaatctaaatggaagcggtaattataactatttttcaggtgttcctcaggataaatggt

SEQ ID NO: 627827 - DNA, 75 bp, synthetic construct
  source 1..75: mol_type = other DNA
tatgtttccactatctcgcgctccatgatgaacaaagcgcgggaaaaagttgtcgctgtcgaaaagattattttc

SEQ ID NO: 627828 - DNA, 75 bp, synthetic construct
  source 1..75: mol_type = other DNA
cagcagttttttccctttgctggcacagcgtcgctggaaaccggatcttattatgggcgtcgtgccgacgttatt

SEQ ID NO: 627829 - DNA, 75 bp, synthetic construct
  source 1..75: mol_type = other DNA
ctgtctaccgatatggcttttaggttggctaaagccttcaataccactgcaaagttctggctaaatatacagcag

SEQ ID NO: 627830 - DNA, 75 bp, synthetic construct
  source 1..75: mol_type = other DNA
ggttgcatagggctcaatgccacatcaaatgcgattgttagtgataacattatatccgatggggcttattatggt

SEQ ID NO: 627831 - DNA, 75 bp, synthetic construct
  source 1..75: mol_type = other DNA
atttacgttcgaccaaatacacccgccagaatttataatagagaagatagaagccataaattcgtatcggatgtt

SEQ ID NO: 627832 - DNA, 75 bp, synthetic construct
  source 1..75: mol_type = other DNA
cattacggcagcttaatgcgaagataattccgtttattattatctgctattttgttgctaatctggataaaacca

SEQ ID NO: 627833 - DNA, 75 bp, synthetic construct
  source 1..75: mol_type = other DNA
ctgaatacggtagagttgatatcccccttacaatttattatacaaaagtaagtaacaatgttcagggcggaagag

SEQ ID NO: 627834 - DNA, 75 bp, synthetic construct
  source 1..75: mol_type = other DNA
acagaacgtgatcatattcactattatcttgctgttcgttcaattgttttcaaactgacgaaaggtgacgcaccg

SEQ ID NO: 627835 - DNA, 75 bp, synthetic construct
  source 1..75: mol_type = other DNA
atgagtctctctttcagtgaagcaaaattagaacaagcgatcattgaactgctacaggatcagggatatcaacac

SEQ ID NO: 627836 - DNA, 75 bp, synthetic construct
  source 1..75: mol_type = other DNA
cgggcaatacgttggcagcctgacccgcgacaacctcaacgccggagagctggtgcggatgatggtcggaaggcc

SEQ ID NO: 627837 - DNA, 75 bp, synthetic construct
  source 1..75: mol_type = other DNA
aaacgccactacagttactgagcagtctgaaacgcgtattgtgtgggctacgccagtgcggcaggttgcgtgggg

SEQ ID NO: 627838 - DNA, 75 bp, synthetic construct
  source 1..75: mol_type = other DNA
ccaggcgattatagatcgttataatgagcggcgagaagatgatgtactcaacggtgaagaattcgatacattcag

SEQ ID NO: 627839 - DNA, 75 bp, synthetic construct
  source 1..75: mol_type = other DNA
caggagcagaaagagttaccgccttctgaaatggtgaagatggtcatgacgcgcggtaaagatgacgacgaggcg

SEQ ID NO: 627840 - DNA, 75 bp, synthetic construct
  source 1..75: mol_type = other DNA
gcgaagagattgccgaggtgggcaataatatctaccggttggttaatcaactggagatagaaggccaggcccggg

SEQ ID NO: 627841 - DNA, 75 bp, synthetic construct
  source 1..75: mol_type = other DNA
gtgatttattttccgaattccaagcggccccctttatgctggttatgctggctgcatggggcattagctggggag

SEQ ID NO: 627842 - DNA, 75 bp, synthetic construct
  source 1..75: mol_type = other DNA
aggttaccgatgccgtgatggagcaggttgtagaatggcaaaacagaccactggatgctgtttaccccattgttt

SEQ ID NO: 627843 - DNA, 75 bp, synthetic construct
  source 1..75: mol_type = other DNA
atgatggaaaagatgttcgcttatcaggaaccggtaaacggactgactttcaactggtccgggatgtggactttc

SEQ ID NO: 627844 - DNA, 75 bp, synthetic construct
  source 1..75: mol_type = other DNA
ctcaaccgggccgccgagtttgccctgcagactaagaagattgagcttcgctttatgggattggtgaaacgcctg

SEQ ID NO: 627845 - DNA, 75 bp, synthetic construct
  source 1..75: mol_type = other DNA
ccaaactatttcgcgggtaaatcgacgctttgagggtaaggaaaaggggttggtagtcgactacatcggcattaa

SEQ ID NO: 627846 - DNA, 75 bp, synthetic construct
  source 1..75: mol_type = other DNA
agtatggttagttgtcctgccgacaataaagtaggtgttggtcgaagcataaataaaaatagtgaacaacttaag

SEQ ID NO: 627847 - DNA, 75 bp, synthetic construct
  source 1..75: mol_type = other DNA
tgaacctaatttcataaatactataataaatgtgttcagtgatgaaaatattgcttgtgcttacggcaggcaatt

SEQ ID NO: 627848 - DNA, 75 bp, synthetic construct
  source 1..75: mol_type = other DNA
tcgaataccattttatgtgaggatatgtattatacagcaaaggcggttcaggctggatataaaatcgcttatgtc

SEQ ID NO: 627849 - DNA, 75 bp, synthetic construct
  source 1..75: mol_type = other DNA
atacaatgacttcatatactagtgatataaaatctatacatagtatggggctgaaagcggcatttatgtctaact

SEQ ID NO: 627850 - DNA, 75 bp, synthetic construct
  source 1..75: mol_type = other DNA
tcctgagattacaggcattcacaaagctcagcataaaaatagaagttttttttcgaaacattttatttggcatgt

SEQ ID NO: 627851 - DNA, 75 bp, synthetic construct
  source 1..75: mol_type = other DNA
ttaaaagatagcaatgcctatctcatcaatgaagaatataataaaggatttggctataataataatgtcgttttt

SEQ ID NO: 627852 - DNA, 75 bp, synthetic construct
  source 1..75: mol_type = other DNA
atgatccagtagaaagtgaagatacacgtgctgtaggtgattttagtgatacagacggtaaagcaaatcatccag

SEQ ID NO: 627853 - DNA, 75 bp, synthetic construct
  source 1..75: mol_type = other DNA
tgaaccgggatttattgaaagcataataactgtttttcaagatgaagaaattgtatgtgcctatggcaggcagtt

SEQ ID NO: 627854 - DNA, 75 bp, synthetic construct
  source 1..75: mol_type = other DNA
tatagcgccatttggctcttatgaatatcctatcgatatgaattggaaagggggggttacatggagaatagtgac

SEQ ID NO: 627855 - DNA, 75 bp, synthetic construct
  source 1..75: mol_type = other DNA
atgtttttccggggcctttccacatctggccttcgggtattccgagggttggacaccgactgtgaacaactcatg
